United States Patent Application Publication US 2021/0199660 A1 - sequence listing, part 36

SEQ ID NO: 510414 - DNA, 120 bp, Artificial Sequence
  ENSG00000164304_16 (sequence is synthesized)
caaaattatgtccctaaatttgagacagctcagttaaaggatcaattagaggaagtcttgaagtcagatattaccaaggatacaaaaacgacacattctaatctgctcccggattgctca

SEQ ID NO: 510415 - DNA, 120 bp, Artificial Sequence
  ENSG00000164304_17 (sequence is synthesized)
ccttgtgaagagaggctgaatcctgcagatataaaaagagcttctcagctggcctccaaaatgcacagtcttctggctctgatggtgggacttctcacatgccaggacatcatcaattct

SEQ ID NO: 510416 - DNA, 120 bp, Artificial Sequence
  ENSG00000164304_18 (sequence is synthesized)
gatgctgaacatttcaaagagagtgagaaggttagtgatataatgctgcaaaaactgaagagcctccatcttaaaaagaaaactttagataaagaggtcatagactgtgattcagatgaa

SEQ ID NO: 510417 - DNA, 120 bp, Artificial Sequence
  ENSG00000164304_19 (sequence is synthesized)
gccaagagtatcagagatgtacctacccttctgggagccaaactggataagtaccacagtctaaatgaggagcttgatttcttggttacatcatatgaagaaatcattgaatgtgctgac

SEQ ID NO: 510418 - DNA, 120 bp, Artificial Sequence
  ENSG00000164304_20 (sequence is synthesized)
caaaggcttgcaatatcccactcccagattgcacatttggaagagagaaataaacatttagaggatttaattagaaagcccagagaaaaagccagaaaaccaagatcaaaaagcttagaa

SEQ ID NO: 510419 - DNA, 120 bp, Artificial Sequence
  ENSG00000164304_21 (sequence is synthesized)
aatcatccgaagtccatgaccatgatgccagctctttttaaagaaaatagaaatgatttagattaaacaagcctgaagattaaacagtaatcatttttgtcaaccactccaggaagagtc

SEQ ID NO: 510420 - DNA, 120 bp, Artificial Sequence
  ENSG00000164304_22 (sequence is synthesized)
attactacatatgctagccaaatcaatccatgcagatgatatattaaaatctgtataaagggtaaagtcttacattccaaagatgtgattacttttcttctaatttcttcctgtgaataa

SEQ ID NO: 510421 - DNA, 120 bp, Artificial Sequence
  ENSG00000164304_23 (sequence is synthesized)
tatcaaaaattttggtcatcaccttcagatcctgtacattttgaagtggatacttctcatgaaaaagtagaaagcatgtcagaatcggataccatgaatgtcagcaatctttctcaaggt

SEQ ID NO: 510422 - DNA, 120 bp, Artificial Sequence
  ENSG00000164304_24 (sequence is synthesized)
aaaagcatttcaagatcatgctattaaggtattccaaggagtatgaaatgattgaaagtgagaacaaatatatttaatctcaggtcatagactgtgattcagatgaagccaagagtatca

SEQ ID NO: 510423 - DNA, 120 bp, Artificial Sequence
  ENSG00000164305_0 (sequence is synthesized)
agtgcagacgcggctcctagcggatgggtgctattgtgaggcggttgtagaagagtttcgtgagtgctcgcagctcatacctgtggctgtgtatccgtggccacagctggttggcgtcgc

SEQ ID NO: 510424 - DNA, 120 bp, Artificial Sequence
  ENSG00000164305_1 (sequence is synthesized)
cttgaaatcccaggccgtgaggagttagcgagccctgctcacactcggcgctctggttttcggtgggtgtgccctgcacctgcctcttcccccattctcattaataaaggtatccatgga

SEQ ID NO: 510425 - DNA, 120 bp, Artificial Sequence
  ENSG00000164305_2 (sequence is synthesized)
gaacactgaaaactcagtggattcaaaatccattaaaaatttggaaccaaagatcatacatggaagcgaatcaatggactctggaatatccctggacaacagttataaaatggattatcc

SEQ ID NO: 510426 - DNA, 120 bp, Artificial Sequence
  ENSG00000164305_3 (sequence is synthesized)
tgagatgggtttatgtataataattaataataagaattttcataaaagcactggaatgacatctcggtctggtacagatgtcgatgcagcaaacctcagggaaacattcagaaacttgaa

SEQ ID NO: 510427 - DNA, 120 bp, Artificial Sequence
  ENSG00000164305_4 (sequence is synthesized)
atatgaagtcaggaataaaaatgatcttacacgtgaagaaattgtggaattgatgcgtgatgtttctaaagaagatcacagcaaaaggagcagttttgtttgtgtgcttctgagccatgg

SEQ ID NO: 510428 - DNA, 120 bp, Artificial Sequence
  ENSG00000164305_5 (sequence is synthesized)
tgaagaaggaataatttttggaacaaatggacctgttgacctgaaaaaaataacaaactttttcagaggggatcgttgtagaagtctaactggaaaacccaaacttttcattattcaggc

SEQ ID NO: 510429 - DNA, 120 bp, Artificial Sequence
  ENSG00000164305_6 (sequence is synthesized)
ctgccgtggtacagaactggactgtggcattgagacagacagtggtgttgatgatgacatggcgtgtcataaaataccagtggaggccgacttcttgtatgcatactccacagcacctgg

SEQ ID NO: 510430 - DNA, 120 bp, Artificial Sequence
  ENSG00000164305_7 (sequence is synthesized)
ttattattcttggcgaaattcaaaggatggctcctggttcatccagtcgctttgtgccatgctgaaacagtatgccgacaagcttgaatttatgcacattcttacccgggttaaccgaaa

SEQ ID NO: 510431 - DNA, 120 bp, Artificial Sequence
  ENSG00000164305_8 (sequence is synthesized)
ggtggcaacagaatttgagtccttttcctttgacgctacttttcatgcaaagaaacagattccatgtattgtttccatgctcacaaaagaactctatttttatcactaaagaaatggttg

SEQ ID NO: 510432 - DNA, 120 bp, Artificial Sequence
  ENSG00000164305_9 (sequence is synthesized)
gttggtggttttttttagtttgtatgccaagtgagaagatggtatatttggtactgtatttccctctcattttgacctactctcatgctgcagagggtactttaagacatactccttcca

SEQ ID NO: 510433 - DNA, 120 bp, Artificial Sequence
  ENSG00000164305_10 (sequence is synthesized)
tcaaatagaaccactatgaagctacctcaaacttccagtcaggtagttgcaattgaattaaattaggaataaataaaaatggatactggtgcagtcattatgagaggcaatgattgttaa

SEQ ID NO: 510434 - DNA, 120 bp, Artificial Sequence
  ENSG00000164305_11 (sequence is synthesized)
agctttcatgattagcaagttacagtgatgctgtgctatgaattttcaagtaattgtgaaaaagttaaacattgaagtaatgaatttttatgatattccccccacttaagactgtgtatt

SEQ ID NO: 510435 - DNA, 120 bp, Artificial Sequence
  ENSG00000164305_12 (sequence is synthesized)
ctagttttgtcaaactgtagaaatgatgatgtggaagaacttaggcatctgtgggcatggtcaaaggctcaaacctttattttagaattgatatacacggatgacttaactgcattttta

SEQ ID NO: 510436 - DNA, 120 bp, Artificial Sequence
  ENSG00000164305_13 (sequence is synthesized)
gaccatttatctgggattatggttttgtgatgtttgtcctgaacacttttgttgtaaaaaaataataataatgtttaatattgagaaagaaactaatattttatgtgagagaaagtgtga

SEQ ID NO: 510437 - DNA, 120 bp, Artificial Sequence
  ENSG00000164305_14 (sequence is synthesized)
gcaaactaacttgacttttaaggctaaaacttaacattcatagaggggtggagttttaactgtaaggtgctacaatgcccctggatctaccagcataaatatcttctgatttgtccctat

SEQ ID NO: 510438 - DNA, 120 bp, Artificial Sequence
  ENSG00000164305_15 (sequence is synthesized)
gcatatcagttgagcttcatataccagcaatatatctgaagagctattatataaaaaccccaaactgttgattattagccaggtaatgtgaataaattctataggaacatatgaaaatac

SEQ ID NO: 510439 - DNA, 120 bp, Artificial Sequence
  ENSG00000164305_16 (sequence is synthesized)
aacttaaataataaacagtggaatataaggaaagcaataaatgaatgggctgagctgcctgtaacttgagagtagatggtttgagcctgagcagagacatgactcagcctgttccatgaa

SEQ ID NO: 510440 - DNA, 120 bp, Artificial Sequence
  ENSG00000164305_17 (sequence is synthesized)
ggcagagccatggaccacgcaggaagggcctacagcccatttctccatacgcactggtatgtgtggatgatgctgccagggcgccatcgccaagtaagaaagtgaagcaaatcagaaact

SEQ ID NO: 510441 - DNA, 120 bp, Artificial Sequence
  ENSG00000164305_18 (sequence is synthesized)
tgtgaagtggaaatgttctaaaggtggtgaggcaataaaaatcatagtactctttgtagcaaaattcttaagtatgttattttctgttgaagtttacaatcaaaggaaaatagtaatgtt

SEQ ID NO: 510442 - DNA, 120 bp, Artificial Sequence
  ENSG00000164305_19 (sequence is synthesized)
ttatactgtttactgaaagaaaaagacctatgagcacataggactctagacggcatccagccggaggccagagctgagccctcagcccgggaggcaggctccaggcctcagcaggtgcgg

SEQ ID NO: 510443 - DNA, 120 bp, Artificial Sequence
  ENSG00000164305_20 (sequence is synthesized)
agccgtcactgcaccaagtctcactggctgtcagtatgacatttcacgggagatttcttgttgctcaaaaaatgagctcgcatttgtcaatgacagtttcttttttcttactagacctgt

SEQ ID NO: 510444 - DNA, 120 bp, Artificial Sequence
  ENSG00000164305_21 (sequence is synthesized)
aacttttgtaaatacacatagcatgtaatggtatcttaaagtgtgtttctatgtgacaattttgtacaaatttgttattttccatttttatttcaaaatatacattcaaacttaaaatta

SEQ ID NO: 510445 - DNA, 120 bp, Artificial Sequence
  ENSG00000164305_22 (sequence is synthesized)
aggggcgggcgggaggcggggctggcgctggagcacatctcccggcggcgggccgcggaagcagtgcagacgcggctcctagcggatgggtgctattgtgaggcggttgtagaagttaat

SEQ ID NO: 510446 - DNA, 120 bp, Artificial Sequence
  ENSG00000164305_23 (sequence is synthesized)
cattctcaatgagatcaccatcctcagaataatttgtaccccgctgggcactagctaatggaggtgatgtcatgctaagcagcacttcagtgagttttgcgggaaccaaagctctgctcc

SEQ ID NO: 510447 - DNA, 120 bp, Artificial Sequence
  ENSG00000164306_0 (sequence is synthesized)
gtcttcctgagagtccgcgggcttccgctcccagcgcgggattctggagggaaattgagggagacttggaaaccgcgccaggcccaacgggtacctagaagggagacaaagccaggcctg

SEQ ID NO: 510448 - DNA, 120 bp, Artificial Sequence
  ENSG00000164306_1 (sequence is synthesized)
ctgcccagtttgagctctgggaagaagaggagcaggccgggacgcccaccgaggtatcccagaggtgacagaacttgatctgggcctggaaggggaagaattcgggaaaagcaacgtggg

SEQ ID NO: 510449 - DNA, 120 bp, Artificial Sequence
  ENSG00000164306_2 (sequence is synthesized)
gcattccagtagtaattgatagaaatattacgtgggataggatttattctctccacacttctgaaccaatgaatagaaaatgggaagcaaaactgaagcaaattgaagaacgagcatctc

SEQ ID NO: 510450 - DNA, 120 bp, Artificial Sequence
  ENSG00000164306_3 (sequence is synthesized)
attatgagaggaaaccgttgtcctcagtgtatagaccaagattgtccaagccagaagaaccaccctccatctggagactatttcatcgacaagctcaagcttttaattttgttaaaagct

SEQ ID NO: 510451 - DNA, 120 bp, Artificial Sequence
  ENSG00000164306_4 (sequence is synthesized)
gtaaagaagacgttcatgtatttgctttggaatgcaaagtaggagatggacaacgtatttaccttgtgacaacctatgctgaattttggttttactataaatccagaaaaaatctcttac

SEQ ID NO: 510452 - DNA, 120 bp, Artificial Sequence
  ENSG00000164306_5 (sequence is synthesized)
actgctatgaagttattcctgaaaatgctgtgtgcaagctttattttgatttggaatttaacaaacctgccaacccaggagctgatgggaaaaagatggttgcattactcattgagtatg

SEQ ID NO: 510453 - DNA, 120 bp, Artificial Sequence
  ENSG00000164306_6 (sequence is synthesized)
tgtgtaaagcacttcaagagttatacggtgttaattgctcagctgaagatgttttgaacttggattctagcactgatgaaaaattcagccggcatttaatatttcagctccatgatgtgg

SEQ ID NO: 510454 - DNA, 120 bp, Artificial Sequence
  ENSG00000164306_7 (sequence is synthesized)
catttaaagataatattcatgttggtaattttttgagaaaaattttgcagcctgctcttgacttgcttggcagtgaagatgatgatagcgctccagagacaacaggccatggatttcccc

SEQ ID NO: 510455 - DNA, 120 bp, Artificial Sequence
  ENSG00000164306_8 (sequence is synthesized)
atttttcagaagcacctgcaagacaaggattttctttcaataaaatgttcacagaaaaggctacagaggaaagctggacatcgaattcaaagaaactggagaggctggggtcagctgagc

SEQ ID NO: 510456 - DNA, 120 bp, Artificial Sequence
  ENSG00000164306_9 (sequence is synthesized)
cagtcctgacctttcatttctagttgtgaagaataacatgggagagaagcatctttttgtagatctcggagtttatacaagaaatagaaactttcggctatataaatcatcaaaaattgg

SEQ ID NO: 510457 - DNA, 120 bp, Artificial Sequence
  ENSG00000164306_10 (sequence is synthesized)
aaagcgtgtggctttggaggttactgaagataacaaattttttcctatacagtcaaaagatgtttctgacgaatatcaatattttctctcttctttggtcagcaatgtcaggttctcaga

SEQ ID NO: 510458 - DNA, 120 bp, Artificial Sequence
  ENSG00000164306_11 (sequence is synthesized)
tactttacgaattcttacatgtgagccatctcagaataaacaaaaaggagttggatattttaacagtatcggcacttcagtagaaaccattgaaggttttcagtgttctccctatcctga

SEQ ID NO: 510459 - DNA, 120 bp, Artificial Sequence
  ENSG00000164306_12 (sequence is synthesized)
agttgatcattttgttctttctttggtgaataaagatggcattaaaggaggaattcggcgttggaactactttttcccagaagaattactggtttatgatatttgtaaatatcggtggtg

SEQ ID NO: 510460 - DNA, 120 bp, Artificial Sequence
  ENSG00000164306_13 (sequence is synthesized)
tgaaaacattggaagagcccataagagtaataatataatgattctggttgatctgaaaaatgaagtttggtatcaaaaatgtcatgaccctgtatgtaaagcagaaaacttcaaatctga

SEQ ID NO: 510461 - DNA, 120 bp, Artificial Sequence
  ENSG00000164306_14 (sequence is synthesized)
ctgtttcccattacctgctgaagtatgtctcctgtttcttttcaaagaggaagaagagtttacaacagatgaagcagatgaaactaggagcaatgaaacccagaatcctcataaaccatc

SEQ ID NO: 510462 - DNA, 120 bp, Artificial Sequence
  ENSG00000164306_15 (sequence is synthesized)
acctagcaggctgtcaacaggtgcatctgctgatgctgtctgggataatggcattgatgatgcttattttttagaagctactgaagatgctgaattagctgaagctgcagagaacagtct

SEQ ID NO: 510463 - DNA, 120 bp, Artificial Sequence
  ENSG00000164306_16 (sequence is synthesized)
tctcagttataacagtgaagtggatgaaattcctgatgaactaattatagaagtattacaagagtaactaattcactatgaacacttttgtcaccaggctataatttgcctgatgtctgt

SEQ ID NO: 510464 - DNA, 120 bp, Artificial Sequence
  ENSG00000164306_17 (sequence is synthesized)
gagatttgataaatatatcattcaacctgtttatataaactaagttttattactttgctttccaatttttgttttttacttctgtaaaccaatttcattaaaaattagctttggtgtaaa

SEQ ID NO: 510465 - DNA, 120 bp, Artificial Sequence
  ENSG00000164306_18 (sequence is synthesized)
ggtaatttcaaatttggagtttcaagtgtgtctgagcttcagtgcagcaacgtttgaatcagtgcactcattcccacggaagaagagtttacaacagatgaagcagatgaaactaggagc

SEQ ID NO: 510466 - DNA, 120 bp, Artificial Sequence
  ENSG00000164306_19 (sequence is synthesized)
aaattggaaagcgtgtggctttggaggttactgaagataacaaattttttcctatacagtcaaaagatgtttctgacgaatatcaatattttctctcttctttggtcagcaatgtcagta

SEQ ID NO: 510467 - DNA, 120 bp, Artificial Sequence
  ENSG00000164306_20 (sequence is synthesized)
cttatccttttactttttaatttttctccatctttaagtcttaggcatatttcttggaacagcatgcagctggattttgttttctacccagtcttggtattaatactttttttttttttt

SEQ ID NO: 510468 - DNA, 120 bp, Artificial Sequence
  ENSG00000164306_21 (sequence is synthesized)
agtctattatttgtcttcatttcaggccatgtattctaccaagaaaatttaatggcaatcttaatggcatgtgatttaggaaaaatattcctgtgaatcattaaccatttaatttatatt

SEQ ID NO: 510469 - DNA, 120 bp, Artificial Sequence
  ENSG00000164306_22 (sequence is synthesized)
agtaatgaaaaagaatgacacatctagtaccaattagtttttaaaaattgtgatgatatttaaatgaagctttatgcttagagggaggggaaccatatttatttcaacacagtaagcaag

SEQ ID NO: 510470 - DNA, 120 bp, Artificial Sequence
  ENSG00000164307_0 (sequence is synthesized)
accaattcccttcctgggagttgcggcttccctcgctcggccccactcccgtttaccctttccccagctcccgccttagccaggggcttccccgcctgccgctagggctcgggccgaagc

SEQ ID NO: 510471 - DNA, 120 bp, Artificial Sequence
  ENSG00000164307_1 (sequence is synthesized)
gccgctcagcgccagcctgccgctccccgggctccactttcactttcggtcctgggggagctaggccggcggcagtggtggtggcggcggcgcaagggtgagggcggccccagaacccca

SEQ ID NO: 510472 - DNA, 120 bp, Artificial Sequence
  ENSG00000164307_2 (sequence is synthesized)
ggtaggtagagcaagaagatggtgtttctgcccctcaaatggtcccttgcaaccatgtcatttctactttcctcactgttggctctcttaactgtgtccactccttcatggtgtcagagc

SEQ ID NO: 510473 - DNA, 120 bp, Artificial Sequence
  ENSG00000164307_3 (sequence is synthesized)
actgaagcatctccaaaacgtagtgatgggacaccatttccttggaataaaatacgacttcctgagtacgtcatcccagttcattatgatctcttgatccatgcaaaccttaccacgctg

SEQ ID NO: 510474 - DNA, 120 bp, Artificial Sequence
  ENSG00000164307_4 (sequence is synthesized)
accttctggggaaccacgaaagtagaaatcacagccagtcagcccaccagcaccatcatcctgcatagtcaccacctgcagatatctagggccaccctcaggaagggagctggagagagg

SEQ ID NO: 510475 - DNA, 120 bp, Artificial Sequence
  ENSG00000164307_5 (sequence is synthesized)
ctatcggaagaacccctgcaggtcctggaacacccccgtcaggagcaaattgcactgctggctcccgagcccctccttgtcgggctcccgtacacagttgtcattcactatgctggcaat

SEQ ID NO: 510476 - DNA, 120 bp, Artificial Sequence
  ENSG00000164307_6 (sequence is synthesized)
ctttcggagactttccacggattttacaaaagcacctacagaaccaaggaaggggaactgaggatactagcatcaacacaatttgaacccactgcagctagaatggcctttccctgcttt

SEQ ID NO: 510477 - DNA, 120 bp, Artificial Sequence
  ENSG00000164307_7 (sequence is synthesized)
gatgaacctgccttcaaagcaagtttctcaatcaaaattagaagagagccaaggcacctagccatctccaatatgccattggtgaaatctgtgactgttgctgaaggactcatagaagac

SEQ ID NO: 510478 - DNA, 120 bp, Artificial Sequence
  ENSG00000164307_8 (sequence is synthesized)
cattttgatgtcactgtgaagatgagcacctatctggtggccttcatcatttcagattttgagtctgtcagcaagataaccaagagtggagtcaaggtttctgtttatgctgtgccagac

SEQ ID NO: 510479 - DNA, 120 bp, Artificial Sequence
  ENSG00000164307_9 (sequence is synthesized)
aagataaatcaagcagattatgcactggatgctgcggtgactcttctagaattttatgaggattatttcagcataccgtatcccctacccaaacaagatcttgctgctattcccgacttt

SEQ ID NO: 510480 - DNA, 120 bp, Artificial Sequence
  ENSG00000164307_10 (sequence is synthesized)
cagtctggtgctatggaaaactggggactgacaacatatagagaatctgctctgttgtttgatgcagaaaagtcttctgcatcaagtaagcttggcatcacaatgactgtggcccatgaa

SEQ ID NO: 510481 - DNA, 120 bp, Artificial Sequence
  ENSG00000164307_11 (sequence is synthesized)
ctggctcaccagtggtttgggaacctggtcactatggaatggtggaatgatctttggctaaatgaaggatttgccaaatttatggagtttgtgtctgtcagtgtgacccatcctgaactg

SEQ ID NO: 510482 - DNA, 120 bp, Artificial Sequence
  ENSG00000164307_12 (sequence is synthesized)
aaagttggagattatttctttggcaaatgttttgacgcaatggaggtagatgctttaaattcctcacaccctgtgtctacacctgtggaaaatcctgctcagatccgggagatgtttgat

SEQ ID NO: 510483 - DNA, 120 bp, Artificial Sequence
  ENSG00000164307_13 (sequence is synthesized)
gatgtttcttatgataagggagcttgtattctgaatatgctaagggagtatcttagtgctgacgcatttaaaagtggtattgtacagtatctccagaagcatagctataaaaatacaaaa

SEQ ID NO: 510484 - DNA, 120 bp, Artificial Sequence
  ENSG00000164307_14 (sequence is synthesized)
aacgaggacctgtgggatagtatggcaagtatttgccctacagatggtgtaaaagggatggatggcttttgctctagaagtcaacattcatcttcatcctcacattggcatcaggaaggg

SEQ ID NO: 510485 - DNA, 120 bp, Artificial Sequence
  ENSG00000164307_15 (sequence is synthesized)
gtggatgtgaaaaccatgatgaacacttggacactgcagaagggttttcccctaataaccatcacagtgagggggaggaatgtacacatgaagcaagagcactacatgaagggctctgac

SEQ ID NO: 510486 - DNA, 120 bp, Artificial Sequence
  ENSG00000164307_16 (sequence is synthesized)
ggcgccccggacactgggtacctgtggcatgttccattgacattcatcaccagcaaatccgacatggtccatcgatttttgctaaaaacaaaaacagatgtgctcatcctcccagaagag

SEQ ID NO: 510487 - DNA, 120 bp, Artificial Sequence
  ENSG00000164307_17 (sequence is synthesized)
gtggaatggatcaaatttaatgtgggcatgaatggctattacattgtgcattacgaggatgatggatgggactctttgactggccttttaaaaggaacacacacagcagtcagcagtaat

SEQ ID NO: 510488 - DNA, 120 bp, Artificial Sequence
  ENSG00000164307_18 (sequence is synthesized)
gatcgggcgagtctcattaacaatgcatttcagctcgtcagcattgggaagctgtccattgaaaaggccttggatttatccctgtacttgaaacatgaaactgaaattatgcccgtgttt

SEQ ID NO: 510489 - DNA, 120 bp, Artificial Sequence
  ENSG00000164307_19 (sequence is synthesized)
caaggtttgaatgagctgattcctatgtataagttaatggagaaaagagatatgaatgaagtggaaactcaattcaaggccttcctcatcaggctgctaagggacctcattgataagcag

SEQ ID NO: 510490 - DNA, 120 bp, Artificial Sequence
  ENSG00000164307_20 (sequence is synthesized)
acatggacagacgagggctcagtctcagagcgaatgctgcggagtcaactactactcctcgcctgtgtgcacaactatcagccgtgcgtacagagggcagaaggctatttcagaaagtgg

SEQ ID NO: 510491 - DNA, 120 bp, Artificial Sequence
  ENSG00000164307_21 (sequence is synthesized)
aaggaatccaatggaaacttgagcctgcctgtcgacgtgaccttggcagtgtttgctgtgggggcccagagcacagaaggctgggattttctttatagtaaatatcagttttctttgtcc

SEQ ID NO: 510492 - DNA, 120 bp, Artificial Sequence
  ENSG00000164307_22 (sequence is synthesized)
aataaaaactcaggagtttccacaaattcttacactcattggcaggaacccagtaggatacccactggcctggcaatttctgaggaaaaactggaacaaacttgtacaaaagtttgaact

SEQ ID NO: 510493 - DNA, 120 bp, Artificial Sequence
  ENSG00000164307_23 (sequence is synthesized)
tggctcatcttccatagcccacatggtaatgggtacaacaaatcaattctccacaagaacacggcttgaagaggtaaaaggattcttcagctctttgaaagaaaatggttctcagctccg

SEQ ID NO: 510494 - DNA, 120 bp, Artificial Sequence
  ENSG00000164307_24 (sequence is synthesized)
ttgtgtccaacagacaattgaaaccattgaagaaaacatcggttggatggataagaattttgataaaatcagagtgtggctgcaaagtgaaaagcttgaacatgatcctgaagctgacgc

SEQ ID NO: 510495 - DNA, 120 bp, Artificial Sequence
  ENSG00000164307_25 (sequence is synthesized)
aacaggatgaaaatccatcagaatctcagactacagcactaaatatgctttgatgctacatcaaacggaatggaagcatagctgacttcgctaaagttacttcatctccatctagcaaat

SEQ ID NO: 510496 - DNA, 120 bp, Artificial Sequence
  ENSG00000164307_26 (sequence is synthesized)
gaggcactgttctcaaccaaaggagatggggatctggtttagggcaatccctttataatttgatgtgctgtggtctccttggtaatgtataatttggtattgcacaggtgattagtcaag

SEQ ID NO: 510497 - DNA, 120 bp, Artificial Sequence
  ENSG00000164307_27 (sequence is synthesized)
gaagtctggaaaagctttggtcccacagccttgcctcacagcatgtaaataattaaaacaatattgatgctgaggttcttctactgctagtatgaaagtgacaaatttttactggtgtga

SEQ ID NO: 510498 - DNA, 120 bp, Artificial Sequence
  ENSG00000164307_28 (sequence is synthesized)
attgggaagaaaacaatgctattccatgacgtttgtaaaatgtttgtaaaagctcaaacatgacgattccataaaataaacttgaggttaaataatgggtagtaaattatagaatgtata

SEQ ID NO: 510499 - DNA, 120 bp, Artificial Sequence
  ENSG00000164307_29 (sequence is synthesized)
agaaaaaatataaaggagaaaatcaattatcaggaaagctaaagaacttttcaaatctagtaatttgaatatagacacaatgcactttattgcactttcaattcttataaagcaacaata

SEQ ID NO: 510500 - DNA, 120 bp, Artificial Sequence
  ENSG00000164307_30 (sequence is synthesized)
atattaaggtccttgactatgtgtacaatgttttcacatatatagtttcatttaatcatttcaaagttaatctctgccatctcgctaaatcatcagtctcggctcttctgaaatagaagg

SEQ ID NO: 510501 - DNA, 120 bp, Artificial Sequence
  ENSG00000164307_31 (sequence is synthesized)
tgcctgatcttcctaataattctgcctattttcatttgctttaaacaggcgccctattttctttctagttgtggctgcgcaaaaacatttatctcccaaataagatgtgctgcttaccga

SEQ ID NO: 510502 - DNA, 120 bp, Artificial Sequence
  ENSG00000164307_32 (sequence is synthesized)
ggtatcacggggtggggctccagcttgggtcgttgaagctggggtttgggaaaccacttcagagatggcagcagcaagtttagcatcttcaaatttcttttattgaaaaaaattttatta

SEQ ID NO: 510503 - DNA, 120 bp, Artificial Sequence
  ENSG00000164307_33 (sequence is synthesized)
gtaacatgttgtatataaaattatgagcacaatgccatcacttaactataactcttaaagatagcttaatgactgtttattctcttgaccaaatagactcataataacatataattttaa

SEQ ID NO: 510504 - DNA, 120 bp, Artificial Sequence
  ENSG00000164307_34 (sequence is synthesized)
aagaaatttaaattctttcttctctattgtattattttatacaatttgctatttctatttccttctcatattgattattctaaatactatgcaataatataacttagagttccacggttt

SEQ ID NO: 510505 - DNA, 120 bp, Artificial Sequence
  ENSG00000164307_35 (sequence is synthesized)
gtttacacatttcctgttgtacatttaggttattcaaagttttcagctcttttaaaattgctctgaataagttctagtgagtgagttatggtgctggctatattttgctaaactgccctc

SEQ ID NO: 510506 - DNA, 120 bp, Artificial Sequence
  ENSG00000164307_36 (sequence is synthesized)
tcaaatgttgctaggaattcatactgcgaaaagcaatgaataagcatgcctgttttcccatggccttgcttgccagaatttgacttttattatgataatcagtgtaaaatgatatactac

SEQ ID NO: 510507 - DNA, 120 bp, Artificial Sequence
  ENSG00000164307_37 (sequence is synthesized)
tattgcttgtatattgtggtatacggtgtcaggtttcagggttttttttcaacgttaaatattctagaaactttctgaaataatttctgtttaaaaatattgaatatttgcttcatttca

SEQ ID NO: 510508 - DNA, 120 bp, Artificial Sequence
  ENSG00000164307_38 (sequence is synthesized)
aatactcccttttgacaaaaaaacttaggtataactgttgatgaaaaaccagaaaaaagtccagaactctttggtgactccaactatggatagcttattttgaaaaaggagaattgcaaa

SEQ ID NO: 510509 - DNA, 120 bp, Artificial Sequence
  ENSG00000164307_39 (sequence is synthesized)
ttttaccaaaagatggagaaaagcacattaaaaagataccaacattcagaaattcatttcagcatgttattattggaaattatttaaactaatttagataactataagatacttattgtc

SEQ ID NO: 510510 - DNA, 120 bp, Artificial Sequence
  ENSG00000164307_40 (sequence is synthesized)
catttataccctgtaaagccgttttagaatgtaatattttaggtaatccaaaatgtactaaattaaattcatttttagttatgagaaatctttgcttatatgacaaatgaaaagaataac

SEQ ID NO: 510511 - DNA, 120 bp, Artificial Sequence
  ENSG00000164307_41 (sequence is synthesized)
aagttgtcaaatgaaaagaatgacattgaaacatttgtattgtctcttcttaaactatcttattgacttattatttaagccttttaatactaagtatgaaacaacctatggtctggaaat

SEQ ID NO: 510512 - DNA, 120 bp, Artificial Sequence
  ENSG00000164307_42 (sequence is synthesized)
ttgtatcgcaaagctatatgtgcatatgttatttaattcatctaatgctacacaaaagcataaaataatgatttttcactctctttaaaaatactaaatcatttatgtccatttctcaat

SEQ ID NO: 510513 - DNA, 120 bp, Artificial Sequence
  ENSG00000164307_43 (sequence is synthesized)
tttttcattgatctatgctttgagtttgctttctcaacattattgtattttccacttattattactgtataacatatgctagtgtttagttggattaatcttacctaaaagtactgaaaa

SEQ ID NO: 510514 - DNA, 120 bp, Artificial Sequence
  ENSG00000164307_44 (sequence is synthesized)
agtgtttagttggattaatcttacctaaaagtactgaaaaatgctttttagtactttttcatattttatacatttattttccgaatgtatcattgaataattttattgagttataaaagt

SEQ ID NO: 510515 - DNA, 120 bp, Artificial Sequence
  ENSG00000164307_45 (sequence is synthesized)
gtatgtaaaaattcctcccttgccaggttcctgttatctctaatcaccaacattttgttgagtgtattttcaaactagagatggctgttttggctccaactggagatacttttttccctt

SEQ ID NO: 510516 - DNA, 120 bp, Artificial Sequence
  ENSG00000164307_46 (sequence is synthesized)
caactcattttttgactatccctgtgaaaagaatagctgttagtttttcatgaatgggctatcgctaccatgtgttttgttcatcacaggtgttgccctgcaacgtaaacccaagtgttg

SEQ ID NO: 510517 - DNA, 120 bp, Artificial Sequence
  ENSG00000164307_47 (sequence is synthesized)
ggttccctgccacagaagaataaagtaccttattcttctcattttatagtttatgcttaagcacccgtgtccaaaaccctgtaccccatgtttatcattcataaactgtttcatcagtct

SEQ ID NO: 510518 - DNA, 120 bp, Artificial Sequence
  ENSG00000164307_48 (sequence is synthesized)
cctcgaaagactctgaatagtcgactactgaacaatgaacacctggatctgagactaagccggacgatgactgggttaaagctctcccggctcacccctccagacccgctgcccatccct

SEQ ID NO: 510519 - DNA, 120 bp, Artificial Sequence
  ENSG00000164307_49 (sequence is synthesized)
cttccttgctccatgcccaggggctgacttgtaaaggccaagtcatcaagctttcttgccctttggatgttggtcagtggggagccggagagctggagctggggtcggaggaggtagtag

SEQ ID NO: 510520 - DNA, 120 bp, Artificial Sequence
  ENSG00000164307_50 (sequence is synthesized)
gtggaggtgttcttccctgattcccttgcgggatgcctcgggctggcctcccctgagggtcttagctccgagaggggaccctcttttccacacagccttctccacctctggattttggta

SEQ ID NO: 510521 - DNA, 120 bp, Artificial Sequence
  ENSG00000164307_51 (sequence is synthesized)
actgctccctcctcatcccttcaggattagtggcctcagtgggagtctggcttttactagtcctggcggacttgtggtttctacataatgtgctcgcacttttgcaaaaaatctttttat

SEQ ID NO: 510522 - DNA, 120 bp, Artificial Sequence
  ENSG00000164307_52 (sequence is synthesized)
agaaccctcctcagataattctgagtgagtgtcatctatttccctgactggtacagtatctcttctgaaaaagcagagtgcattcaagtctgtaggaaaacccttttcttagggaggtga

SEQ ID NO: 510523 - DNA, 120 bp, Artificial Sequence
  ENSG00000164307_53 (sequence is synthesized)
ttttttttctctctctgcttcttatttggcctactttacaatttctaactaactagttattggcatttactgacagtaaattattgcagtcaccaataaatgatagtacattgtgaaaca

SEQ ID NO: 510524 - DNA, 120 bp, Artificial Sequence
  ENSG00000164307_54 (sequence is synthesized)
aaatatttgctcatattagcaaataggacattctttggctttgaagtctttctttcttttgtgaagacttcacacacggttgcttcagcacacagttgctgctcaggttttatgtataga

SEQ ID NO: 510525 - DNA, 120 bp, Artificial Sequence
  ENSG00000164307_55 (sequence is synthesized)
tgataataatagaaagcacagtttactaacatggtaaaccaacggagttcaagtcaagtcagttaataccctaagaattagattttatttcttattctgaaaacttgctacacagggact

SEQ ID NO: 510526 - DNA, 120 bp, Artificial Sequence
  ENSG00000164307_56 (sequence is synthesized)
tatctaacccatagtgtgctctgttgctgacttgattcaagttgcagcgtgttttgcgctgactctaaggtgcggaaatcctcacacctggcaaaggagaattcaaactgaactttttga

SEQ ID NO: 510527 - DNA, 120 bp, Artificial Sequence
  ENSG00000164307_57 (sequence is synthesized)
atataaggcaaaaacttcaagataagggaatatgattgatgattggtacgaaaaatgtcaaaatgtgttcccctaatacacgacaaaatagagtgacttctggacataaatctgccattt

SEQ ID NO: 510528 - DNA, 120 bp, Artificial Sequence
  ENSG00000164307_58 (sequence is synthesized)
attaaaccattcactacaacaaataaataggtataaaagtggaattggaatttttatacttatttgttgtagtgaatggtttaataaaaatagaaatcactggtaatttccaccccaaac

SEQ ID NO: 510529 - DNA, 120 bp, Artificial Sequence
  ENSG00000164307_59 (sequence is synthesized)
taaactatttcccttcttttaaaaaaatacacaaccaagattttaatgtaaaatattttgctttaattgtattttatgccttgattaatgaaacatggaaatattgattttcagttttgg

SEQ ID NO: 510530 - DNA, 120 bp, Artificial Sequence
  ENSG00000164307_60 (sequence is synthesized)
tcacctgaggaacctatctttgtttgcttttggaaaagcccattttctaaacagatacaatattgccacaacaatgtgcagaaacctttttgataataaaaaattgttctttgcctctaa

SEQ ID NO: 510531 - DNA, 61 bp, Artificial Sequence
  ENSG00000164307_61 (sequence is synthesized)
agctaggccggcggcagtggtggtggcggcggcgcaagggtgagggcggccccagaacccc

SEQ ID NO: 510532 - DNA, 120 bp, Artificial Sequence
  ENSG00000164307_62 (sequence is synthesized)
ttatgtcttataatgcatgttgaactttttttatttttaccttgattaaatattggtcctgtaaatatatgttaacattcataaacttatattggacatctaaaatatacttctttctga

SEQ ID NO: 510533 - DNA, 120 bp, Artificial Sequence
  ENSG00000164307_63 (sequence is synthesized)
atttctgaaagcagctgttattgttcaaattcttgatttctaaagacaaaaatgattgattgataacaagaagttgaaaggtgttttcctttaagttcttctaacaacccaagattgctt

SEQ ID NO: 510534 - DNA, 120 bp, Artificial Sequence
  ENSG00000164308_0 (sequence is synthesized)
cccaactcaaacaggcagataaagagagatcaaagagatgagcatgagatacagtcccctcgtgcccaaggagacagggtggttacagacatggaaaatctgagaataatcacctctgat

SEQ ID NO: 510535 - DNA, 120 bp, Artificial Sequence
  ENSG00000164308_1 (sequence is synthesized)
aaagatcacagaagctgcccgggaggtgtttggtaagcttggagttacgtttgtggggtggatgggcagaagtcagatttcatagcactgaggatgcagcacaaggagaagttcaagatc

SEQ ID NO: 510536 - DNA, 120 bp, Artificial Sequence
  ENSG00000164308_2 (sequence is synthesized)
aattcctaagacaacaacttggcactaaaaaacataaactatgttctgaaggctttaccctggggacaagggaagggaggtgataacagcagaagtggcagccactggcgatcctttctt

SEQ ID NO: 510537 - DNA, 120 bp, Artificial Sequence
  ENSG00000164308_3 (sequence is synthesized)
tccatggtttggcttctactccaaagccacttatttgtgcattctacaaaaagtttcttgtcctttttgaaataaagctcttatcctaagctccattcacacctgcgtgataatgaacca

SEQ ID NO: 510538 - DNA, 120 bp, Artificial Sequence
  ENSG00000164308_4 (sequence is synthesized)
gctagtacttactgtactcaggaagcatgcaaagttctgaatcttagaacagaaagtgaaagcaaaagtaaattccccttcagtcaaatctgcagcagcatgatttaagattaaattcat

SEQ ID NO: 510539 - DNA, 120 bp, Artificial Sequence
  ENSG00000164308_5 (sequence is synthesized)
gtattgaaaatattgttcagaccccatgtgacataactggagccagtgcagtgccatgaagaactacgagattagcctggatattaacttgtcttctagagaatagatttcatgttccat

SEQ ID NO: 510540 - DNA, 120 bp, Artificial Sequence
  ENSG00000164308_6 (sequence is synthesized)
tcttctgcaatggttaattcacacagaaaaccaatgtttaacattcacagaggattttactgcttaacagccatcttgccccaaatatgcatttgttctcagttctcagtgccatctagt

SEQ ID NO: 510541 - DNA, 120 bp, Artificial Sequence
  ENSG00000164308_7 (sequence is synthesized)
tatcacttcactgaggatcctggggctttcccagtagccactaatggggaacgatttccttggcaggagctaaggctccccagtgtggtcattcctctccattatgacctctttgtccac

SEQ ID NO: 510542 - DNA, 120 bp, Artificial Sequence
  ENSG00000164308_8 (sequence is synthesized)
cccaatctcacctctctggactttgttgcatctgagaagatcgaagtcttggtcagcaatgctacccagtttatcatcttgcacagcaaagatcttgaaatcacgaatgccacccttcag

SEQ ID NO: 510543 - DNA, 120 bp, Artificial Sequence
  ENSG00000164308_9 (sequence is synthesized)
tcagaggaagattcaagatacatgaaaccaggaaaagaactgaaagttttgagttaccctgctcatgaacaaattgcactgctggttccagagaaacttacgcctcacctgaaatactat

SEQ ID NO: 510544 - DNA, 120 bp, Artificial Sequence
  ENSG00000164308_10 (sequence is synthesized)
gtggctatggacttccaagccaagttaggtgatggctttgaagggttttataaaagcacatacagaactcttggtggtgaaacaagaattcttgcagtaacagattttgagccaacccag

SEQ ID NO: 510545 - DNA, 120 bp, Artificial Sequence
  ENSG00000164308_11 (sequence is synthesized)
gcacgcatggctttcccttgctttgatgaaccgttgttcaaagccaacttttcaatcaagatacgaagagagagcaggcatattgcactatccaacatgccaaaggttaagacaattgaa

SEQ ID NO: 510546 - DNA, 120 bp, Artificial Sequence
  ENSG00000164308_12 (sequence is synthesized)
cttgaaggaggtcttttggaagatcactttgaaactactgtaaaaatgagtacataccttgtagcctacatagtttgtgatttccactctctgagtggcttcacttcatcaggggtcaag

SEQ ID NO: 510547 - DNA, 120 bp, Artificial Sequence
  ENSG00000164308_13 (sequence is synthesized)
gtgtccatctatgcatccccagacaaacggaatcaaacacattatgctttgcaggcatcactgaagctacttgatttttatgaaaagtactttgatatctactatccactctccaaactg

SEQ ID NO: 510548 - DNA, 120 bp, Artificial Sequence
  ENSG00000164308_14 (sequence is synthesized)
gatttaattgctattcctgactttgcacctggagccatggaaaattggggcctcattacatatagggagacgtcactgctttttgaccccaagacctcttctgcttccgataaactgtgg

SEQ ID NO: 510549 - DNA, 120 bp, Artificial Sequence
  ENSG00000164308_15 (sequence is synthesized)
gtcaccagagtcatagcccatgaactggcgcaccagtggtttggcaacctggtcacaatggaatggtggaatgatatttggcttaaggagggttttgcaaaatacatggaacttatcgct

SEQ ID NO: 510550 - DNA, 120 bp, Artificial Sequence
  ENSG00000164308_16 (sequence is synthesized)
gttaatgctacatatccagagctgcaatttgatgactattttttgaatgtgtgttttgaagtaattacaaaagattcattgaattcatcccgccctatctccaaaccagcggaaaccccg

SEQ ID NO: 510551 - DNA, 120 bp, Artificial Sequence
  ENSG00000164308_17 (sequence is synthesized)
actcaaatacaggaaatgtttgatgaagtttcctataacaagggagcttgtattttgaatatgctcaaggattttctgggtgaggagaaattccagaaaggaataattcagtacttaaag

SEQ ID NO: 510552 - DNA, 120 bp, Artificial Sequence
  ENSG00000164308_18 (sequence is synthesized)
aagttcagctatagaaatgctaagaatgatgacttgtggagcagtctgtcaaatagttgtttagaaagtgattttacatctggtggagtttgtcattcggatcccaagatgacaagtaac

SEQ ID NO: 510553 - DNA, 120 bp, Artificial Sequence
  ENSG00000164308_19 (sequence is synthesized)
atgctcgcctttctgggggaaaatgcagaggtcaaagagatgatgactacatggactctccagaaaggaatccccctgctggtggttaaacaagacgggtgttcactccgactgcaacag

SEQ ID NO: 510554 - DNA, 120 bp, Artificial Sequence
  ENSG00000164308_20 (sequence is synthesized)
gagcgcttcctccagggggttttccaggaagaccctgaatggagggccctgcaggagaggtacctgtggcatatcccattgacctactccacgagttcttctaatgtgatccacagacac

SEQ ID NO: 510555 - DNA, 120 bp, Artificial Sequence
  ENSG00000164308_21 (sequence is synthesized)
attctaaaatcaaagacagatactctggatctacctgaaaagaccagttgggtgaaatttaatgtggactcaaatggttactacatcgttcactatgagggtcatggatgggaccaactc

SEQ ID NO: 510556 - DNA, 120 bp, Artificial Sequence
  ENSG00000164308_22 (sequence is synthesized)
attacacagctgaatcagaaccacacacttctcagacctaaggacagagtaggtctgattcatgatgtgtttcagctagttggtgcagggagactgaccctagacaaagctcttgacatg

SEQ ID NO: 510557 - DNA, 120 bp, Artificial Sequence
  ENSG00000164308_23 (sequence is synthesized)
gttttaccacatgatggacagaaggaatatttcagatatctctgaaaacctcaagcgttaccttcttcagtattttaagccagtgattgacaggcaaagctggagtgacaagggctcagt

SEQ ID NO: 510558 - DNA, 120 bp, Artificial Sequence
  ENSG00000164308_24 (sequence is synthesized)
ctgggacaggatgctccgctcggctctcttgaagctggcctgtgacctgaaccatgctccttgcatccagaaagctgctgaactcttctcccagtggatggaatccagtggaaaattaaa

SEQ ID NO: 510559 - DNA, 120 bp, Artificial Sequence
  ENSG00000164308_25 (sequence is synthesized)
tataccaacagatgttttaaagattgtgtattctgtgggtgctcagacaacagcaggatggaattaccttttagagcaatatgaactgtcaatgtcaagtgctgaacaaaacaaaattct

SEQ ID NO: 510560 - DNA, 120 bp, Artificial Sequence
  ENSG00000164308_26 (sequence is synthesized)
gtatgctttgtcaacgagcaagcatcaggaaaagttactgaagttaattgaactaggaatggaaggaaaggttatcaagacacagaacttggcagctctccttcatgcgattgccagacg

SEQ ID NO: 510561 - DNA, 120 bp, Artificial Sequence
  ENSG00000164308_27 (sequence is synthesized)
tccaaaggggcagcaactagcatgggattttgtaagagaaaattggacccatcttctgaaaaaatttgacttgggctcatatgacataaggatgatcatctctggcacaacagctcactt

SEQ ID NO: 510562 - DNA, 120 bp, Artificial Sequence
  ENSG00000164308_28 (sequence is synthesized)
ttcttccaaggataagttgcaagaggtgaaactattttttgaatctcttgaggctcaaggatcacatctggatatttttcaaactgttctggaaacgataaccaaaaatataaaatggct

SEQ ID NO: 510563 - DNA, 120 bp, Artificial Sequence
  ENSG00000164308_29 (sequence is synthesized)
ctggaaacgataaccaaaaatataaaatggctggagaagaatcttccgactctgaggacttggctaatggttaatacttaaatggtcaatagaaaaagtaggctgggcgcggtggctcac

SEQ ID NO: 510564 - DNA, 120 bp, Artificial Sequence
  ENSG00000164308_30 (sequence is synthesized)
gaaaaagaaaaagaaaagaaaagaaaaggtacatcagacatgactgcctgcatgaagtcaaacagggtaacaccagtgaagctcaagtcaagagctgtggatattttgtctaaccaacaa

SEQ ID NO: 510565 - DNA, 120 bp, Artificial Sequence
  ENSG00000164308_31 (sequence is synthesized)
tctaaccaacaagaagtctcaagaaatcaggcagtgcagctgcctgctctcagctatcgtatccagccaaaagatgcatgatgatggagtggtgggggaaggccagttcagtatcctatt

SEQ ID NO: 510566 - DNA, 120 bp, Artificial Sequence
  ENSG00000164308_32 (sequence is synthesized)
taaaagtaaacttcctgaataatggatatatgtggagatacagacatagatatatagatacagctgtaattatttagcctcaagtgactttctccattgcttcacgctatgccactattt

SEQ ID NO: 510567 - DNA, 120 bp, Artificial Sequence
  ENSG00000164308_33 (sequence is synthesized)
tgcttctttaatttttttaaccttgcttagtattctatagtttgcccaaccagttttacgtccaaggaaaattagccaatgcataaaatatacaaactatgaaaggcaaggatcaggaaa

SEQ ID NO: 510568 - DNA, 120 bp, Artificial Sequence
  ENSG00000164308_34 (sequence is synthesized)
ccagagactttgccaccaaatctcagattattagaaactaggtgtcagggtttatcaagaaggccaggaaggccttttgggttaagccttacattcatgaagaacctcaagggtagattt

SEQ ID NO: 510569 - DNA, 120 bp, Artificial Sequence
  ENSG00000164308_35 (sequence is synthesized)
ttgagagcattccaaatgaatggtctctggtcaaatgaatgaatggtcaaatgaataaatctgccctcacagagatacaaaaggaaaaggaatataattcataccatttggtttaagcct

SEQ ID NO: 510570 - DNA, 120 bp, Artificial Sequence
  ENSG00000164308_36 (sequence is synthesized)
tacattcatgaagtacctcaagggtagatttttgagatcattccaaatgaagtcgaatctgccctcacagagacacaagaaaggaatataattcatacactattgcatttttaataaatc

SEQ ID NO: 510571 - DNA, 120 bp, Artificial Sequence
  ENSG00000164308_37 (sequence is synthesized)
ttttgaaatttgcagaattagattgtattgtgtattttcggttaaatgataattgaatgtaaatatttagatgcagcaccatattttataacccagctttagcatttcttcatattttaa

SEQ ID NO: 510572 - DNA, 120 bp, Artificial Sequence
  ENSG00000164308_38 (sequence is synthesized)
ggaaaccccccacctccttcttttaagggcgcttcttgctctctgaaatgccctgctaaatgcttctcttaattatttgaataaggtagtttggaataaagaaagaaaagatcactctac

SEQ ID NO: 510573 - DNA, 120 bp, Artificial Sequence
  ENSG00000164308_39 (sequence is synthesized)
atacagatagtaaacttaatttgtgatcctatatatgagacagtataaaaatacagataagttttagaaagactcaaaacaatatgtaaatgactgatgtttgcattattaaggaagact

SEQ ID NO: 510574 - DNA, 120 bp, Artificial Sequence
  ENSG00000164308_40 (sequence is synthesized)
tgggatgttgggtcaagaggggaaagtgttagtcaatccactttggagcaatatcatgaaggtcaattataattccatatacctttctttgatgccacagtcagagatagaatacagttt

SEQ ID NO: 510575 - DNA, 120 bp, Artificial Sequence
  ENSG00000164308_41 (sequence is synthesized)
gggtggccatggatgtgccccaatacagtacacattttttggttaaatttgttttcagatcatttcatggaatctttgaagtatctttgactctaactttgacttggtggtggaccttcc

SEQ ID NO: 510576 - DNA, 120 bp, Artificial Sequence
  ENSG00000164308_42 (sequence is synthesized)
ttggtttttataacacctaagagatatcctttagaattacatgtattttagcataaggaaattgaaaaagtaaaacatactggtttttttcaacaagaccatatgtaaattaaatagtga

SEQ ID NO: 510577 - DNA, 120 bp, Artificial Sequence
  ENSG00000164308_43 (sequence is synthesized)
aatgtgtatgagtttcagtagaactgtaccatcaacaatgtttccataaatatgcagagttctttcttttgtattgttatttacaatattgttaaattgaatgcatttgcaatttctagg

SEQ ID NO: 510578 - DNA, 120 bp, Artificial Sequence
  ENSG00000164308_44 (sequence is synthesized)
taggattctaaagaattgagtacagaaagtagcaattttattatttgatgataatatgagaattactgtgccaatactgttttgataaataaatagatttttaaaaataaatgtattgta

SEQ ID NO: 510579 - DNA, 120 bp, Artificial Sequence
  ENSG00000164308_45 (sequence is synthesized)
taattcagttgactgggcagggaagtgtttgttgaggaagtgaatttaaattgagagctgagtttttttttaaagagacagttatgagaacatctcggggcaagtgctctaaagtgggat

SEQ ID NO: 510580 - DNA, 120 bp, Artificial Sequence
  ENSG00000164308_46 (sequence is synthesized)
tggttgaggaaggccagtgtaagctgaggagagcgaacaagagggagaaagggatcagatcatgtggagccttggggcgtcttgtaaggagttttgactttaactcagatgaaatgggaa

SEQ ID NO: 510581 - DNA, 120 bp, Artificial Sequence
  ENSG00000164308_47 (sequence is synthesized)
tagttcaggtaagaagtgatgctaatttgggccaggctagtggcagtgcttatggagtgaaacaattgaacttggcagttattttggagggcaaaacaacagagattgctgacatattgg

SEQ ID NO: 510582 - DNA, 120 bp, Artificial Sequence
  ENSG00000164308_48 (sequence is synthesized)
tcatgtgaggtgagggaaatagaagaatcaaggatgcttcatagagtggacggcttggtttcccagggccaggatccatctgggagaattcttgcagtaacagattttgagccaacccag

SEQ ID NO: 510583 - DNA, 120 bp, Artificial Sequence
  ENSG00000164308_49 (sequence is synthesized)
attgcttctggattcaagtcctcactctctcacttattagatgtgtgaccttaagaaaatgtacacactcatcctgagcttcaattttttcatcttatgttgaataaagactaaacctca

SEQ ID NO: 510584 - DNA, 120 bp, Artificial Sequence
  ENSG00000164308_50 (sequence is synthesized)
gtttaagtcactggtgccagttcctgctacttgtttcactttttatttgttcacttttcagacatcacacatgttccgtaaaatttaagcttcctttaaaaacataccatactaccattt

SEQ ID NO: 510585 - DNA, 120 bp, Artificial Sequence
  ENSG00000164308_51 (sequence is synthesized)
ctctttgatgtaaaagtctttgatcaagcaagacattaggtctaaaaccttttagtgaggatagaaaaaaaaacatgctgggcattacaaaccctgtttcatgctctcacattgtaagtg

SEQ ID NO: 510586 - DNA, 120 bp, Artificial Sequence
  ENSG00000164308_52 (sequence is synthesized)
atgctctcacattgtaagtgctatgtatggagactagtacaatctctaccatgaaatgtaatggtgtccattattccggtgctggctggatgcagtggcccacgcctataatcccagcac

SEQ ID NO: 510587 - DNA, 90 bp, Artificial Sequence
  ENSG00000164308_53 (sequence is synthesized)
gaccagcctggccaacatagtgaagccctgtctgcactaaaaatgcaaaaattagccaagtgtggtggtgcacgctgggagaattgcttg

SEQ ID NO: 510588 - DNA, 86 bp, Artificial Sequence
  ENSG00000164308_54 (sequence is synthesized)
gcagaagttgccgtgagccaagatcacttcactgcactgcagtctgggcaacagagaaaggccctgtctcaaaaaaaaaaaaaaaa

SEQ ID NO: 510589 - DNA, 120 bp, Artificial Sequence
  ENSG00000164308_55 (sequence is synthesized)
ctctttctctttctatgtgatttaaatgagcactgaggaattcagttagctcaggaaaaaataatttgttcctcagagatgattcttgagtgtagaaaataaaatatttatgacatgccc

SEQ ID NO: 510590 - DNA, 120 bp, Artificial Sequence
  ENSG00000164309_0 (sequence is synthesized)
agtcggagggagaacaccaggcgcggcgcgggcggctccggctccggccccggcccaggcccgggagaggcgatggcgagccgcgatagcaaccacgctggcgagagctttctcggctcc

SEQ ID NO: 510591 - DNA, 120 bp, Artificial Sequence
  ENSG00000164309_1 (sequence is synthesized)
gacggggacgaggaggcgacccgggagctggagaccgaggaggagtcggagggcgaggaggacgagacggcggcggagtcggaggaggagccggactccaggttatcagaccaggatgaa

SEQ ID NO: 510592 - DNA, 120 bp, Artificial Sequence
  ENSG00000164309_2 (sequence is synthesized)
gagggaaagatcaagcaggagtatatcatatctgacccctccttttccatggtgacagtccaaagggaagatagtgggataacctgggaaaccaattcaagtagatcttctactccttgg

SEQ ID NO: 510593 - DNA, 120 bp, Artificial Sequence
  ENSG00000164309_3 (sequence is synthesized)
gcttcagaagaaagtcagacttctggtgtgtgtagtcgggaagggtcaactgtgaattctcctcctggaaatgtttcctttattgtggatgaagtgaaaaaggttcggaaaaggactcat

SEQ ID NO: 510594 - DNA, 120 bp, Artificial Sequence
  ENSG00000164309_4 (sequence is synthesized)
aagtcaaagcatggttcaccatcattacgccggaaaggcaacagaaaaagaaattcttttgaatcccaagatgttccaacaaacaaaaaaggcagtcctttaacttcagcaagccaggta

SEQ ID NO: 510595 - DNA, 120 bp, Artificial Sequence
  ENSG00000164309_5 (sequence is synthesized)
ctaaccacggagaaagagaagtcatatactggcatttatgataaagcaagaaaaaagaagaccacttcaaatacacctccgattactggggcaatatacaaagaacacaagccattagtg

SEQ ID NO: 510596 - DNA, 120 bp, Artificial Sequence
  ENSG00000164309_6 (sequence is synthesized)
ttaagaccagtctacataggaacagtacaatataaaattaagatgtttaattcggttaaagaagaattaattcctctacaattttatggaacattgccaaagggttatgtaattaaagaa

SEQ ID NO: 510597 - DNA, 120 bp, Artificial Sequence
  ENSG00000164309_7 (sequence is synthesized)
atacattataggaaagggaaagatgcatccattagtctagagccagatttggacaatagtggttctaatacagtgtccaaaacacgcaaattagtagcccaaagcatagaggataaagta

SEQ ID NO: 510598 - DNA, 120 bp, Artificial Sequence
  ENSG00000164309_8 (sequence is synthesized)
aaagaggtttttccaccctggagaggcgcactctccaaaggatcagagtccctaaccttaatgttcagtcatgaagatcaaaagaaaatttatgctgattctcccctaaatgccacatct

SEQ ID NO: 510599 - DNA, 120 bp, Artificial Sequence
  ENSG00000164309_9 (sequence is synthesized)
gcattggagcacacagttccctcttattcaagtagtggcagagcagaacaaggaatacagctcaggcattcacagtcagtgccacaacagccagaagatgaagcaaaaccacatgaagtg

SEQ ID NO: 510600 - DNA, 120 bp, Artificial Sequence
  ENSG00000164309_10 (sequence is synthesized)
gaacctccatctgtgacacccgacacacctgcaactatgttcctgagaacaacaaaggaagaatgtgagcttgcttcaccaggaactgcagcttcagagaatgactcttcagtctcacca

SEQ ID NO: 510601 - DNA, 120 bp, Artificial Sequence
  ENSG00000164309_11 (sequence is synthesized)
tcatttgctaatgaggtaaagaaggaagatgtgtattctgctcaccattccatttctctggaggcagcgtcaccaggtctggcagcatctacccaggatggtttggacccagaccaagaa

SEQ ID NO: 510602 - DNA, 120 bp, Artificial Sequence
  ENSG00000164309_12 (sequence is synthesized)
cagccggacctgacttcaatagaaagggcagaaccagtctccgcaaaactgacccctacccatcccagtgtcaaaggagagaaggaggaaaacatgcttgagccatccatttctctttct

SEQ ID NO: 510603 - DNA, 120 bp, Artificial Sequence
  ENSG00000164309_13 (sequence is synthesized)
gaacctctaatgttagaagaaccagagaaagaagaaatagaaacttccctacccatagctattacccctgaacctgaagattctaatttagtagaagaagagatcgtagaacttgattac

SEQ ID NO: 510604 - DNA, 120 bp, Artificial Sequence
  ENSG00000164309_14 (sequence is synthesized)
ccagaaagcccattggtttccgagaagcccttcccaccacatatgtcccctgaagtggagcacaaagaagaagagcttattctaccattattggcagcatcatctcctgaacatgttgct

SEQ ID NO: 510605 - DNA, 120 bp, Artificial Sequence
  ENSG00000164309_15 (sequence is synthesized)
ttgtctgaggaagaaagagaggaaattgcatctgtttctactggttctgcttttgtatcagagtattcagtaccacaggatttgaaccatgaattacaggagcaagaaggtgagccagtt

SEQ ID NO: 510606 - DNA, 120 bp, Artificial Sequence
  ENSG00000164309_16 (sequence is synthesized)
cccccatccaatgtagaagctatagctgaacatgcagttttgtcagaagaagagaatgaggaatttgaggcttattccccagctgcagcccctacatctgagagctctctctcaccatcc

SEQ ID NO: 510607 - DNA, 120 bp, Artificial Sequence
  ENSG00000164309_17 (sequence is synthesized)
acaactgagaagacttcagagaaccagtctccactgttttcaacagttacaccagaatacatggtcctatcaggagacgaggcctcagaaagtgggtgttacacaccagactccacatct

SEQ ID NO: 510608 - DNA, 120 bp, Artificial Sequence
  ENSG00000164309_18 (sequence is synthesized)
gcttctgaatattcagttccatcactggcaacaaaagagtcactgaagaaaacaattgaccgtaagtccccgttaatattgaaaggtgtttctgagtacatgattccatcagaagagaag

SEQ ID NO: 510609 - DNA, 120 bp, Artificial Sequence
  ENSG00000164309_19 (sequence is synthesized)
gaagacactggatcgtttactccagctgtggcccctgcttctgagccctctctctcaccatccacaaccgaaaagacttctgaatgccagtcaccactgccttctactgccacatcagaa

SEQ ID NO: 510610 - DNA, 120 bp, Artificial Sequence
  ENSG00000164309_20 (sequence is synthesized)
cacgtggtcccatcagaaggagaggacctaggaagtgaacgtttcacaccggattcaaagttgatctccaaatatgcagccccactcaatgcaacacaggaatctcaaaagaaaataatc

SEQ ID NO: 510611 - DNA, 120 bp, Artificial Sequence
  ENSG00000164309_21 (sequence is synthesized)
aatgaggcatcccaattcaaaccaaaaggtatttctgagcacacagttctgtcagtagacggcaaggaggtcattggaccatcttccccagatttggttgttgcatctgaacactctttc

SEQ ID NO: 510612 - DNA, 120 bp, Artificial Sequence
  ENSG00000164309_22 (sequence is synthesized)
ccaccacacacaaccgagatgacttctgaatgccaggccccaccactttcagccaccccatctgaatatgttgttctatcagacgaagaggcagtcgagttggaacgatacacaccctct

SEQ ID NO: 510613 - DNA, 120 bp, Artificial Sequence
  ENSG00000164309_23 (sequence is synthesized)
tctacatctgcttctgaattttcagtaccaccatatgcaacaccggaggcacaggaggaagaaattgtccatagatctctaaatctaaaaggtgcatcctcacccatgaatttatcagaa

SEQ ID NO: 510614 - DNA, 120 bp, Artificial Sequence
  ENSG00000164309_24 (sequence is synthesized)
gaagatcaagaagacattggacctttttctccagattctgcatttgtgtcagaattctcatttccaccgtatgcaacccaggaagcagagaaaagagaatttgagtgcgattctccaata

SEQ ID NO: 510615 - DNA, 120 bp, Artificial Sequence
  ENSG00000164309_25 (sequence is synthesized)
tgtttaacatcaccatctgagcacactattttgtcagatgaagacactgaagaagcggaactgttctctccagactcagcatcacaagtttcaatccctccctttagaatctcagaaaca

SEQ ID NO: 510616 - DNA, 120 bp, Artificial Sequence
  ENSG00000164309_26 (sequence is synthesized)
gagaaaaatgaacttgagcctgattcactattaactgcagtgtctgcttcaggttattcctgcttttcagaagcagatgaggaagacattggatccacagctgctacacctgtatctgag

SEQ ID NO: 510617 - DNA, 120 bp, Artificial Sequence
  ENSG00000164309_27 (sequence is synthesized)
cagttcagttcatcacagaagcaaaaagctgaaactttccctttgatgtctccgcttgaagacttaagtctgccgccttcaacagataaatcagagaaagcagaaattaagccagagatt

SEQ ID NO: 510618 - DNA, 120 bp, Artificial Sequence
  ENSG00000164309_28 (sequence is synthesized)
ccaacaacctcaacatctgtatctgaatatctcattttggcacagaagcagaaaactcaagcatatttagagcctgagtctgaagacttgattccttcacatttaaccagtgaagtggag

SEQ ID NO: 510619 - DNA, 120 bp, Artificial Sequence
  ENSG00000164309_29 (sequence is synthesized)
aagggagaaagggaggcaagttcatcagtagctgcaatacctgctgctttacctgcacaatcatctatagtaaaggaagaaaccaaacctgcatctccacattcagttttacctgattca

SEQ ID NO: 510620 - DNA, 120 bp, Artificial Sequence
  ENSG00000164309_30 (sequence is synthesized)
gtccctgcaatcaagaaagaacaggaacccacagcagcactcactctaaaagctgcagatgaacagatggctttgtcaaaagtcagaaaggaagaaattgtgcctgattctcaagaagct

SEQ ID NO: 510621 - DNA, 120 bp, Artificial Sequence
  ENSG00000164309_31 (sequence is synthesized)
acagcacatgtatcacaggatcaaaaaatggagcctcagcctccaaatgttccagagtctgagatgaaatattcagttttgcctgacatggtagatgagccaaagaagggtgtcaagccc

SEQ ID NO: 510622 - DNA, 120 bp, Artificial Sequence
  ENSG00000164309_32 (sequence is synthesized)
aaattagttctaaatgtgacttctgaactagaacagagaaagttgtccaagaatgagcctgaagtaataaaaccatattcacctctaaaggaaacatctttatctggacctgaggcttta

SEQ ID NO: 510623 - DNA, 120 bp, Artificial Sequence
  ENSG00000164309_33 (sequence is synthesized)
tcagcagtgaaaatggagatgaaacatgattccaaaataacaactacacctatagtgcttcattcagcttcctcaggagtggaaaagcaagttgaacatggtccacctgcactagcattt

SEQ ID NO: 510624 - DNA, 120 bp, Artificial Sequence
  ENSG00000164309_34 (sequence is synthesized)
tcagctttgtcagaagaaattaaaaaagaaattgaacccagttcctcaacaactacagcatctgtaactaagcttgattcaaacttaaccagagcagtaaaagaagaaatcccaacagat

SEQ ID NO: 510625 - DNA, 120 bp, Artificial Sequence
  ENSG00000164309_35 (sequence is synthesized)
tcatctcttatcactcctgtagatcgtccagtcttaacaaaagtaggaaagggtgaattaggaagtggtttgccaccactggtaacatctgcagatgaacattcagttcttgcagaagaa

SEQ ID NO: 510626 - DNA, 120 bp, Artificial Sequence
  ENSG00000164309_36 (sequence is synthesized)
gacaaggtggcaattaaaggtgcttctcccattgaaacttcatccaaacatttagcttggtcagaagcagagaaggaaattaaatttgattcacttccaagtgtctcctctatagcagag

SEQ ID NO: 510627 - DNA, 120 bp, Artificial Sequence
  ENSG00000164309_37 (sequence is synthesized)
cattctgttttgtcagaagtagaagccaaagaagttaaagctgggttgccagtaatcaaaacatcatcttctcagcattcagataaatctgaggaagcaagggtagaagacaaacaagat

SEQ ID NO: 510628 - DNA, 120 bp, Artificial Sequence
  ENSG00000164309_38 (sequence is synthesized)
cttttattttctacagtctgtgactctgaacgtttggtttcatcacagaagaagagcttgatgtctacctcagaggtgttagagcctgaacatgagcttccactcagcctatggggtgag

SEQ ID NO: 510629 - DNA, 120 bp, Artificial Sequence
  ENSG00000164309_39 (sequence is synthesized)
ataaagaagaaagaaactgaacttccttcatcacaaaatgtgtcacctgcatccaaacatataatcccaaaaggcaaagatgaggaaacagcaagttcatctcctgagttggaaaattta

SEQ ID NO: 510630 - DNA, 120 bp, Artificial Sequence
  ENSG00000164309_40 (sequence is synthesized)
gcatcaggtttagccccaacattactgctcctcagtgatgataagaacaaaccggcagtggaggtatcttctacagctcagggagacttcccatcagaaaaacaagatgttgctttggca

SEQ ID NO: 510631 - DNA, 120 bp, Artificial Sequence
  ENSG00000164309_41 (sequence is synthesized)
gagctgtctttggaacctgagaagaaagacaagccacaccaaccgttggaattaccaaatgctgggtcagaattttctagtgatttaggtagacaaagtggatccataggtacaaaacaa

SEQ ID NO: 510632 - DNA, 120 bp, Artificial Sequence
  ENSG00000164309_42 (sequence is synthesized)
gcaaagtctcccataactgaaacagaggattctgttttagaaaaaggcccagctgagcttaggagcagagaaggaaaagaagaaaatagagagctttgtgcatcttctacgatgcctgca

SEQ ID NO: 510633 - DNA, 120 bp, Artificial Sequence
  ENSG00000164309_43 (sequence is synthesized)
atttcagagctttcatcattgcttagggaggaatctcagaatgaagaaattaaacctttctctcccaagatcatcagcctagagtcgaaagaaccacctgcctctgtagctgaaggaggc

SEQ ID NO: 510634 - DNA, 120 bp, Artificial Sequence
  ENSG00000164309_44 (sequence is synthesized)
aacccagaagaatttcagccatttactttttctttaaaaggattatcagaggaggttagccatccagccgactttaaaaagggaggaaatcaagaaataggcccattaccaccaactgga

SEQ ID NO: 510635 - DNA, 120 bp, Artificial Sequence
  ENSG00000164309_45 (sequence is synthesized)
aatttgaaggcacaagtcatgggagatattttagataagctaagtgaagaaacaggccacccaaattcatcccaggtactccagagtataacagaaccatcaaagattgctccttctgac

SEQ ID NO: 510636 - DNA, 120 bp, Artificial Sequence
  ENSG00000164309_46 (sequence is synthesized)
ctccttgtagaacaaaaaaagacagaaaaagcacttcattcagatcaaactgttaaattacctgatgtaagcacctcttctgaagataaacaagatctgggtattaagcagttttcactt

SEQ ID NO: 510637 - DNA, 120 bp, Artificial Sequence
  ENSG00000164309_47 (sequence is synthesized)
atgagagagaatttgcctttggaacaatcaaaatcatttatgacaaccaagcctgcggatgtcaaagaaacaaaaatggaagaattctttatttctccaaaggatgaaaactggatgttg

SEQ ID NO: 510638 - DNA, 120 bp, Artificial Sequence
  ENSG00000164309_48 (sequence is synthesized)
ggaaagccagaaaatgtggctagtcaacacgaacagagaatagcaggatctgtgcagctggattcctctagcagcaatgagctgaggccagggcagctcaaggctgctgtgtccagtaag

SEQ ID NO: 510639 - DNA, 120 bp, Artificial Sequence
  ENSG00000164309_49 (sequence is synthesized)
gaccatacatgtgaagtgagaaagcaggtcctgccgcattctgctgaagaatctcatttgtcatcacaagaagcagtatctgctcttgatacttccagtggtaatacagagaccttatca

SEQ ID NO: 510640 - DNA, 120 bp, Artificial Sequence
  ENSG00000164309_50 (sequence is synthesized)
agtaaaagttactcttctgaagaagtaaagctggctgaagaaccaaagtctttagtcctagctggaaatgtagagagaaacatagcagaggggaaggagattcattctttgatggagagt

SEQ ID NO: 510641 - DNA, 120 bp, Artificial Sequence
  ENSG00000164309_51 (sequence is synthesized)
gaaagtttgctattggagaaagcaaacacagagctttcctggccttccaaagaagatagccaggaaaaaattaaactacctcctgaaagattcttccagaaaccagtgtctggcctatca

SEQ ID NO: 510642 - DNA, 120 bp, Artificial Sequence
  ENSG00000164309_52 (sequence is synthesized)
gtggaacaggtgaagtcagaaacaatctcctcttctgtcaaaacagcccatttcccggcagaaggtgtggaacctgcattgggcaatgaaaaagaagcacacaggagcacacctcctttt

SEQ ID NO: 510643 - DNA, 120 bp, Artificial Sequence
  ENSG00000164309_53 (sequence is synthesized)
attgatgatgctgatgagggaaagaaaccatcacctgaagtaaaaatacccacacaaagaaaacccatctcctcaatccatgcaagagagcctcaatccccagagtcacctgaggtgaca

SEQ ID NO: 510644 - DNA, 120 bp, Artificial Sequence
  ENSG00000164309_54 (sequence is synthesized)
caaaatccacctacacaaccaaaggtggctaagccggaccttcctgaggaaaagggaaagaaaggaatttcatctttcaaatcgtggatgtccagcttgttttttggatcgagcactcca

SEQ ID NO: 510645 - DNA, 120 bp, Artificial Sequence
  ENSG00000164309_55 (sequence is synthesized)
gataacaaagttgctgaacaagaagacttagaaacacagccaagtccatccgtagaaaaagcagtgactgtgatagatcctgaaggtacaattcccaccaattttaatgtagctgagaaa

SEQ ID NO: 510646 - DNA, 120 bp, Artificial Sequence
  ENSG00000164309_56 (sequence is synthesized)
ccagctgatcattcattatcagaggtaaaacttaaaactgctgatgaacccagaggtactttagtaaaatctggtgacggtcaaaacgttaaagaaaaatccatgattttatcaaatgta

SEQ ID NO: 510647 - DNA, 120 bp, Artificial Sequence
  ENSG00000164309_57 (sequence is synthesized)
gaagatttacaacagccaaaattcatttctgaggtgtctagggaagattatggaaaaaaagaaatctcaggcgattcagaggaaatgaacataaactcagtagttacttctgctgatggt

SEQ ID NO: 510648 - DNA, 120 bp, Artificial Sequence
  ENSG00000164309_58 (sequence is synthesized)
gagaaccttgaaattcaatcttattcactaatcggtgagaaattggttatggaagaagccaaaactattgttcctcctcatgttactgatagtaaaagagtccagaagccagcaatcgct

SEQ ID NO: 510649 - DNA, 120 bp, Artificial Sequence
  ENSG00000164309_59 (sequence is synthesized)
cctccatctaaatggaatatttctatttttaaggaagagccaagaagtgatcaaaaacaaaaatcactcctttcatttgatgtagtagataaggtgccacaacagccaaaatcagcttcc

SEQ ID NO: 510650 - DNA, 120 bp, Artificial Sequence
  ENSG00000164309_60 (sequence is synthesized)
tccaactttgcaagtaaaaatatcacaaaggaatcagagaaaccagagtcaattattttgccagtagaagaatcaaaaggcagtttaattgatttcagtgaagacagactcaagaaagaa

SEQ ID NO: 510651 - DNA, 120 bp, Artificial Sequence
  ENSG00000164309_61 (sequence is synthesized)
atgcaaaatcctacttccttgaaaatttctgaagaggaaacaaaactcaggtctgttagtccaactgagaagaaagataatttggaaaacagatcatataccttggcagaaaagaaggtg

SEQ ID NO: 510652 - DNA, 120 bp, Artificial Sequence
  ENSG00000164309_62 (sequence is synthesized)
ctggcagaaaaacaaaactctgtggccccattagagcttagagatagtaatgaaatagggaagacacaaattacacttggatctagatctactgaactgaaagaatcaaaagccgatgct

SEQ ID NO: 510653 - DNA, 120 bp, Artificial Sequence
  ENSG00000164309_63 (sequence is synthesized)
atgccacagcacttctatcaaaatgaagactacaatgaaagacccaaaatcattgttggttctgaaaaggagaaaggtgaagaaaaagaaaatcaggtatatgtgctttcagaaggaaag

SEQ ID NO: 510654 - DNA, 120 bp, Artificial Sequence
  ENSG00000164309_64 (sequence is synthesized)
aagcagcaggaacatcagccttattctgtgaatgtagccgagtctatgagtagagaatcagatatctctttaggtcattctttgggtgaaactcaatcattttcattagttaaagctaca

SEQ ID NO: 510655 - DNA, 120 bp, Artificial Sequence
  ENSG00000164309_65 (sequence is synthesized)
tcagttactgaaaaatcagaagccatgctcgcagaggctcacccagaaatcagagaagcaaaggcagtaggaacccaaccacatcctttagaagaaagtaaagttttggtggagaaaacc

SEQ ID NO: 510656 - DNA, 120 bp, Artificial Sequence
  ENSG00000164309_66 (sequence is synthesized)
aagactttcctgccggtggctctttcttgtcgtgatgaaatagagaaccactctttatctcaggaaggaaatctagtattagaaaagtcaagcagagatatgccagatcacagtgaagaa

SEQ ID NO: 510657 - DNA, 120 bp, Artificial Sequence
  ENSG00000164309_67 (sequence is synthesized)
aaagaacagttcagagagtcagagctatcgaaaggcggttcagtagatatcacaaaagaaactgtgaaacaaggatttcaagaaaaggcagtaggaacccaaccacgtcctttagaagaa

SEQ ID NO: 510658 - DNA, 120 bp, Artificial Sequence
  ENSG00000164309_68 (sequence is synthesized)
agtaaagttttggtggagaaaactaagactttcctgccagtggttctttcttgtcatgatgaaatagagaaccactctttgtctcaggaaggaaatctagtgttagaaaagtcaagcaga

SEQ ID NO: 510659 - DNA, 120 bp, Artificial Sequence
  ENSG00000164309_69 (sequence is synthesized)
gatatgccagatcacagtgaagaaaaagaacagttcaaagagtcagagctatggaaaggtggttcagtagatatcacaaaagaaagtatgaaagaaggatttccatctaaagaatccgaa

SEQ ID NO: 510660 - DNA, 120 bp, Artificial Sequence
  ENSG00000164309_70 (sequence is synthesized)
aggactttagctcgtccttttgatgaaactaagagctcagaaacaccgccatatttgctgtcacctgtaaaaccacaaactcttgcttcaggagcttctccagaaattaacgcagtgaag

SEQ ID NO: 510661 - DNA, 120 bp, Artificial Sequence
  ENSG00000164309_71 (sequence is synthesized)
aaaaaagaaatgccacgatcagaattgactccagaaaggcatacagttcatactattcagacatctaaagatgacacatccgatgtgcctaaacaatctgttcttgtttcaaagcaccac

SEQ ID NO: 510662 - DNA, 120 bp, Artificial Sequence
  ENSG00000164309_72 (sequence is synthesized)
ttggaggctgcggaagatacccgtgtaaaggaaccactgtcttcagcaaaaagcaactatgctcaatttatatctaatacatcagcaagcaatgctgataaaatggtttctaataaagaa

SEQ ID NO: 510663 - DNA, 120 bp, Artificial Sequence
  ENSG00000164309_73 (sequence is synthesized)
atgcccaaggaacctgaagacacatatgcaaaaggtgaagactttacagtgactagtaagccagccggactttcagaagatcagaagactgcctttagtatcatttctgaaggctgtgag

SEQ ID NO: 510664 - DNA, 120 bp, Artificial Sequence
  ENSG00000164309_74 (sequence is synthesized)
atattgaatattcatgctccggcctttatttcttcaatcgatcaggaagaaagtgaacaaatgcaagataaattagaatatttggaagagaaagcctcatttaaaaccataccactccct

SEQ ID NO: 510665 - DNA, 120 bp, Artificial Sequence
  ENSG00000164309_75 (sequence is synthesized)
gatgatagtgaaacagttgcttgtcataaaacattaaagagcaggttagaagatgaaaaagttaccccattgaaagaaaataaacaaaaggaaactcataagacaaaagaagagatatcc

SEQ ID NO: 510666 - DNA, 120 bp, Artificial Sequence
  ENSG00000164309_76 (sequence is synthesized)
acagattcagaaactgatttatcatttattcagcccacaattcccagtgaagaggattattttgaaaaatatactttgattgattataacatctccccagacccagaaaaacagaaagct

SEQ ID NO: 510667 - DNA, 120 bp, Artificial Sequence
  ENSG00000164309_77 (sequence is synthesized)
ccacagaaattaaatgttgaagagaaactctcaaaggaagttacagaagaaactatctctttcccagtaagttcagtggaaagtgcactagaacatgaatatgacttggtgaaattagat

SEQ ID NO: 510668 - DNA, 120 bp, Artificial Sequence
  ENSG00000164309_78 (sequence is synthesized)
gaaagtttttatggaccagaaaagggccacaacatattatctcatccagagacccaaagccaaaactcagctgacaggaatgtttcaaaggacacaaagagagatgtggactcaaagtca

SEQ ID NO: 510669 - DNA, 120 bp, Artificial Sequence
  ENSG00000164309_79 (sequence is synthesized)
ccggggatgcctttatttgaagcagaggaaggagttctatcacgaacccagatatttcctaccactattaaagtcattgatccagaatttctggaggagccacctgcacttgcattttta

SEQ ID NO: 510670 - DNA, 120 bp, Artificial Sequence
  ENSG00000164309_80 (sequence is synthesized)
tataaggatctgtatgaagaagcagttggagagaaaaagaaggaagaggagacagcttctgaaggtgacagtgtgaattctgaggcatcatttcccagcagaaattctgacactgatgat

SEQ ID NO: 510671 - DNA, 120 bp, Artificial Sequence
  ENSG00000164309_81 (sequence is synthesized)
ggaacaggaatatattttgagaagtacatactcaaagatgacattctccatgacacatctctaactcaaaaggaccagggccaaggtctggaagaaaaacgagttggtaaggatgattca

SEQ ID NO: 510672 - DNA, 120 bp, Artificial Sequence
  ENSG00000164309_82 (sequence is synthesized)
taccaaccgatagctgcagaaggggaaatttggggaaagtttggaactatttgcagggagaagagtctggaagaacagaaaggtgtttatggggaaggagaatcagtagaccatgtggag

SEQ ID NO: 510673 - DNA, 120 bp, Artificial Sequence
  ENSG00000164309_83 (sequence is synthesized)
accgttggtaacgtagcgatgcagaagaaagctcccatcacagaggacgtcagagtggctacccagaaaataagttatgcggttccatttgaagacacccatcatgttctggagcgtgca

SEQ ID NO: 510674 - DNA, 120 bp, Artificial Sequence
  ENSG00000164309_84 (sequence is synthesized)
gatgaagcaggcagtcacggtaatgaagtcggaaatgcaagtccagaggtcaatctgaatgtcccagtacaagtgtccttcccggaggaagaatttgcatctggtgcaactcatgttcaa

SEQ ID NO: 510675 - DNA, 120 bp, Artificial Sequence
  ENSG00000164309_85 (sequence is synthesized)
gaaacatcactagaagaacctaaaatcctggtcccacctgagccaagtgaagagaggctccgtaatagccctgttcaggatgagtatgaatttacagaatccctgcataatgaagtggtt

SEQ ID NO: 510676 - DNA, 120 bp, Artificial Sequence
  ENSG00000164309_86 (sequence is synthesized)
cctcaagacatattatcagaagaactgtcttcagaatccacacctgaagatgtcttatctcaaggaaaggaatcctttgagcacatcagtgaaaatgaatttgcgagtgaggcagaacaa

SEQ ID NO: 510677 - DNA, 120 bp, Artificial Sequence
  ENSG00000164309_87 (sequence is synthesized)
agtacacctgctgaacaaaaagagttgggcagcgagaggaaagaagaagaccaattatcatctgaggtagtaactgaaaaggcacaaaaagagctgaaaaagtcccagattgacacatac

SEQ ID NO: 510678 - DNA, 120 bp, Artificial Sequence
  ENSG00000164309_88 (sequence is synthesized)
tgttacacctgcaaatgtccaatttctgccactgacaaggtgtttggcacccacaaagaccatgaagtttcaacgcttgacacagctataagtgctgtaaaggttcaattagcagaattt

SEQ ID NO: 510679 - DNA, 120 bp, Artificial Sequence
  ENSG00000164309_89 (sequence is synthesized)
ctagaaaatttacaagaaaagtccttgaggattgaagcctttgttagtgagatagaatccttttttaataccattgaggaaaactgtagtaaaaatgagaaaaggctagaagaacagaat

SEQ ID NO: 510680 - DNA, 120 bp, Artificial Sequence
  ENSG00000164309_90 (sequence is synthesized)
gaggaaatgatgaagaaggttttagcacagtatgatgagaaagcccagagctttgaggaagtgaagaagaagaagatggagttcctgcatgagcagatggtccactttctgcagagcatg

SEQ ID NO: 510681 - DNA, 120 bp, Artificial Sequence
  ENSG00000164309_91 (sequence is synthesized)
gacactgccaaagacaccctggagaccatcgtgagagaagcagaggagcttgatgaggccgtcttcctgacttcgtttgaggaaatcaatgaaaggttgctttctgcaatggagagcact

SEQ ID NO: 510682 - DNA, 120 bp, Artificial Sequence
  ENSG00000164309_92 (sequence is synthesized)
gcttctttagagaaaatgcctgctgcgttttcccttttcgaacattatgatgacagctcggcaagaagtgaccagatgttaaaacaagtggctgttccacagcctcctagattagaacct

SEQ ID NO: 510683 - DNA, 120 bp, Artificial Sequence
  ENSG00000164309_93 (sequence is synthesized)
caggaaccaaattctgccaccagcacaacaattgcagtttactggagcatgaacaaggaagatgtcattgattcatttcaggtttactgcatggaggagccacaagatgatcaagaagta

SEQ ID NO: 510684 - DNA, 120 bp, Artificial Sequence
  ENSG00000164309_94 (sequence is synthesized)
aatgagttggtagaagaatacagactgacagtgaaagaaagctactgcatttttgaagatctggaacctgaccgatgctatcaagtgtgggtgatggctgtgaacttcactggatgtagc

SEQ ID NO: 510685 - DNA, 120 bp, Artificial Sequence
  ENSG00000164309_95 (sequence is synthesized)
ctgcccagtgaaagggccatctttaggacagcaccctccacccctgtgatccgcgctgaggactgtactgtgtgttggaacacagccactatccgatggcggcccaccaccccagaggcc

SEQ ID NO: 510686 - DNA, 120 bp, Artificial Sequence
  ENSG00000164309_96 (sequence is synthesized)
acggagacctacactctggagtactgcagacagcactctcctgagggagagggcctcagatctttctctggaatcaaaggactccagctgaaagttaacctccaacccaatgataactac

SEQ ID NO: 510687 - DNA, 120 bp, Artificial Sequence
  ENSG00000164309_97 (sequence is synthesized)
tttttctatgtgagggccatcaatgcatttgggacaagtgaacagagtgaagctgctctcatctccaccagaggaaccagatttctcttgttgagagaaacagctcatcctgctctacac

SEQ ID NO: 510688 - DNA, 120 bp, Artificial Sequence
  ENSG00000164309_98 (sequence is synthesized)
atttcctcaagtgggacagtgatcagctttggtgagaggagacggctgacggaaatcccgtcagtgctgggtgaggagctgccttcctgtggccagcattactgggaaaccacagtcaca

SEQ ID NO: 510689 - DNA, 120 bp, Artificial Sequence
  ENSG00000164309_99 (sequence is synthesized)
gactgcccagcatatcgactcggcatctgctccagctcggctgtgcaggcaggtgccctaggacaaggggagacctcatggtacatgcactgctctgagccacagagatacacatttttc

SEQ ID NO: 510690 - DNA, 120 bp, Artificial Sequence
  ENSG00000164309_100 (sequence is synthesized)
tacagtggtattgtgagtgatgttcatgtgactgagcgtccagccagagtgggcatcctgctggactacaacaaccagagacttatcttcatcaacgcagagagcgagcagttgctcttc

SEQ ID NO: 510691 - DNA, 120 bp, Artificial Sequence
  ENSG00000164309_101 (sequence is synthesized)
atcatcaggcacaggtttaatgagggtgtccaccctgcctttgccctggagaaacctggaaaatgtactttgcacctggggatagagcccccggattctgtaaggcacaagtgatccttg

SEQ ID NO: 510692 - DNA, 120 bp, Artificial Sequence
  ENSG00000164309_102 (sequence is synthesized)
gctttcagaatttgcaagaacagcgatttgaattttgggggggtctgctgttcattcctttaggtgctatacattattcaaaaagtctcccgcgcatttgcactaatgatggctgcatgc

SEQ ID NO: 510693 - DNA, 120 bp, Artificial Sequence
  ENSG00000164309_103 (sequence is synthesized)
atagcaatcagcatgtgagcaaaatcgacaagaaaaccttgactttacagagcagtgtgtgagtaaacagaatgaaaacaacaacctccactctttagtttatataagtttgagttcttt

SEQ ID NO: 510694 - DNA, 120 bp, Artificial Sequence
  ENSG00000164309_104 (sequence is synthesized)
cctaaattaaaagatctacacttgagttgggaaccgaaagagaaaaatggacttccatctgttttactggtaaaggaaatcctctgatggacaggtcagagtgaaggaaggttgtgctgg

SEQ ID NO: 510695 - DNA, 120 bp, Artificial Sequence
  ENSG00000164309_105 (sequence is synthesized)
taagacatctctgacgaagagccatggatgctttccacaaaatgtcacctcgctgcactaaaggatgatgaatcctaatcattaaaggaattgtttcagctgatttaaatttataatgaa

SEQ ID NO: 510696 - DNA, 120 bp, Artificial Sequence
  ENSG00000164309_106 (sequence is synthesized)
ctcttttgtaataatgtatactgtagaacatgagtctctcctccctaaaattttaaatgtagaaaagtgctatatattagaaatttccattttgttaaataaatggttagagtctataaa

SEQ ID NO: 510697 - DNA, 120 bp, Artificial Sequence
  ENSG00000164309_107 (sequence is synthesized)
tggatgctaagggtgcattagaagacaacgctcagttcttcacagactcttgagatcagccagtaagtgtttattaagcacctattgtgtgttgagtgttgtgcaaagtgctggttatac

SEQ ID NO: 510698 - DNA, 120 bp, Artificial Sequence
  ENSG00000164309_108 (sequence is synthesized)
aacgatgacttaagcctggggtcctgttctcaagaagctcatgctcaggtggggagatggaaaaacagaggatcatagaaaatgtgtggtaagggccatatccagatatacacaggttat

SEQ ID NO: 510699 - DNA, 120 bp, Artificial Sequence
  ENSG00000164309_109 (sequence is synthesized)
tgagaacactccagaggggcacccaagttggcctggggcaggggcaggatcggaactgcttcctagaactgatgcctgcagaaaatgctttaaaggatcaataggaagtaatgcgttaaa

SEQ ID NO: 510700 - DNA, 120 bp, Artificial Sequence
  ENSG00000164309_110 (sequence is synthesized)
ggaggatattccacttgaaaaagacatgagcagaggcatcaaggcaagaaacagtatggagtgtgcaggacactgtaagaagtttggtattatttcttagacttaaacaaaggaaagaca

SEQ ID NO: 510701 - DNA, 120 bp, Artificial Sequence
  ENSG00000164309_111 (sequence is synthesized)
agataagaaaggctaacatagagaggccgtgtttgcaaggtaagaagcttgggctgcgtgtgggtgctgggaacccccaaaaggttttaagcagtggtatttaactggaaatgcattctc

SEQ ID NO: 510702 - DNA, 120 bp, Artificial Sequence
  ENSG00000164309_112 (sequence is synthesized)
acgatgaaatcttttcacagggtaagaagcctaaaccaaggctgcactgcctttaagataatggtaacctgcctcaggggaagaaatagtttactcctaccctttatcctttcctcttgc

SEQ ID NO: 510703 - DNA, 120 bp, Artificial Sequence
  ENSG00000164309_113 (sequence is synthesized)
cttttaaaacaagcctttattgagcacctactgaggacaagatcatggctaacttgtgtgtactgggacaggggaaagaatctttattttgatttgcttgtatatgtataaagaaagtct

SEQ ID NO: 510704 - DNA, 120 bp, Artificial Sequence
  ENSG00000164309_114 (sequence is synthesized)
agtgggatttataggaagctactattaggggctgtttggggatgggtgagaactgggcaatgtggaaggcagagaagggagagagacatcaccatctatatttgatcccttttgggtttt

SEQ ID NO: 510705 - DNA, 120 bp, Artificial Sequence
  ENSG00000164309_115 (sequence is synthesized)
taacacagaatacactttctgatgaaaaattgaaaacagaatcatgccgaagccgtggaagatcacgtgcttctcaggtcccaggaaagcaagctggcattgctccacgactgtcctgac

SEQ ID NO: 510706 - DNA, 120 bp, Artificial Sequence
  ENSG00000164309_116 (sequence is synthesized)
acagcactctcctgagggagagggcctcaggtgaggggccctctccatgggagagactgcccagagcccagtaaccaagctctgggtcctaaactaccctctaacttctgctcaccaagg

SEQ ID NO: 510707 - DNA, 120 bp, Artificial Sequence
  ENSG00000164309_117 (sequence is synthesized)
gagaaatgccgtctaaaatcctgctgagctaatgaagccgctgacttgatttgcagctctatcacagttcaccaatgaactccaagtttgtaataaaacacaggctacaatgcagaataa

SEQ ID NO: 510708 - DNA, 120 bp, Artificial Sequence
  ENSG00000164318_0 (sequence is synthesized)
actcgcgcacgccgacctcccggctgcagtcctacctcttggaactacccgtgtttccgggcccagccctcgcagccccccacctcctcgccccggcccggggatccgttggggccgcgt

SEQ ID NO: 510709 - DNA, 120 bp, Artificial Sequence
  ENSG00000164318_1 (sequence is synthesized)
cccccacgcgcccccggagacgccctttccgtgtgcgcccgggacttggtgaaactttgcaggcgccggctgcgaaatggatttaatccgaggcgtcttgctccggctcctgctcctggc

SEQ ID NO: 510710 - DNA, 120 bp, Artificial Sequence
  ENSG00000164318_2 (sequence is synthesized)
ttccagcctcggacccggcgcggtgtcgctccgagcggccatccgaaaaccaggcaaggtagggcctcctcttgacatcaagctgggcgcattgaactgtacggctttcagcatccagtg

SEQ ID NO: 510711 - DNA, 120 bp, Artificial Sequence
  ENSG00000164318_3 (sequence is synthesized)
gaaaatgccaaggcatcctggaagtcccatccttgggtacactgtcttttactctgaggttggcgcagataaatccctgcaggagcagttgcacagcgtgcctctcagccgggacatccc

SEQ ID NO: 510712 - DNA, 120 bp, Artificial Sequence
  ENSG00000164318_4 (sequence is synthesized)
gaccacggaggaagtgattggagatttgaaaccaggcactgaatatcgtgtgagcatagcagcttacagccaggctggcaaagggcggctgagctctcctcggcatgtcaccactttgtc

SEQ ID NO: 510713 - DNA, 120 bp, Artificial Sequence
  ENSG00000164318_5 (sequence is synthesized)
ccaagattcctgcctgcctcctgcagctccccagcagccacatgtcattgtggtttcggattctgaggtggccctgtcttggaaacctggagcgagtgaaggaagcgcccctattcagta

SEQ ID NO: 510714 - DNA, 120 bp, Artificial Sequence
  ENSG00000164318_6 (sequence is synthesized)
ctattctgtggaattcatcaggccagatttcgacaagaagtggacctcaatccatgagcggatccagatggactccatggttatcaagggcctcgatccagataccaactaccagtttgc

SEQ ID NO: 510715 - DNA, 120 bp, Artificial Sequence
  ENSG00000164318_7 (sequence is synthesized)
cgtgagggcaatgaattcccatggccccagcccccgcagctggcccagtgacatcatccggaccctctgccctgaggaggcgggaagtggccgctatggaccccgttatatcaccgacat

SEQ ID NO: 510716 - DNA, 120 bp, Artificial Sequence
  ENSG00000164318_8 (sequence is synthesized)
gggagctggtgaggatgatgaaggatttgaagacgacttagatttggatatttcctttgaggaggttaaaccacttcctgctaccaaaggagggaataagaaatttttggtggaaagcaa

SEQ ID NO: 510717 - DNA, 120 bp, Artificial Sequence
  ENSG00000164318_9 (sequence is synthesized)
gaagatgtctatatctaacccaaagaccatttctaggctcatcccccctacctcagcatctctccctgtgaccacggtggctccccagcccattcccatacagagaaaggggaagaatgg

SEQ ID NO: 510718 - DNA, 120 bp, Artificial Sequence
  ENSG00000164318_10 (sequence is synthesized)
tgtggccataatgtcaaggctctttgacatgccttgtgatgaaactctctgctctgctgacagcttctgtgtcaatgactacacctgggggggctcgcgatgccagtgcaccctgggcaa

SEQ ID NO: 510719 - DNA, 120 bp, Artificial Sequence
  ENSG00000164318_11 (sequence is synthesized)
aggtggtgagagctgctcagaagatattgttatccagtatcctcagttctttggccactcctatgtaacgtttgaacctctgaagaattcttatcaggcatttcaaattactcttgaatt

SEQ ID NO: 510720 - DNA, 120 bp, Artificial Sequence
  ENSG00000164318_12 (sequence is synthesized)
tagggcggaggcagaggatggcttactgctctactgtggggagaacgaacacgggaggggggatttcatgtccctggctatcatccgacgctccctgcagttcaggtttaattgtggaac

SEQ ID NO: 510721 - DNA, 120 bp, Artificial Sequence
  ENSG00000164318_13 (sequence is synthesized)
tggggttgccatcatcgtaagtgagaccaaaatcaaactagggggttggcacacggttatgctctacagagatgggctgaacgggctgctgcagctgaacaatggcaccccagtgacagg

SEQ ID NO: 510722 - DNA, 120 bp, Artificial Sequence
  ENSG00000164318_14 (sequence is synthesized)
ccagtctcagggccaatacagtaaaattactttccggacacctctctatcttggtggcgctcccagcgcttactggttggttagagcaacagggacaaaccgaggctttcaaggctgtgt

SEQ ID NO: 510723 - DNA, 120 bp, Artificial Sequence
  ENSG00000164318_15 (sequence is synthesized)
gcagtcgctcgctgtgaatgggaggagaattgacatgaggccctggcccctgggaaaagcactcagtggggctgatgtgggggaatgcagcagtggaatctgtgatgaggcctcgtgcat

SEQ ID NO: 510724 - DNA, 120 bp, Artificial Sequence
  ENSG00000164318_16 (sequence is synthesized)
ccatggtggcacctgcacagcaatcaaagccgactcctacatttgcctctgtccccttgggtttaaaggtcgacactgtgaagatgctttcaccttgaccattcctcagttcagagagtc

SEQ ID NO: 510725 - DNA, 120 bp, Artificial Sequence
  ENSG00000164318_17 (sequence is synthesized)
tctgagatcttacgctgcaactccctggccactggagccccagcattacctttccttcatggaatttgagatcacatttcggccagactcaggagatggtgtcctcctgtacagctatga

SEQ ID NO: 510726 - DNA, 120 bp, Artificial Sequence
  ENSG00000164318_18 (sequence is synthesized)
cacaggcagcaaagacttcctgtccatcaacttggcagggggccacgtggagttccgctttgactgtggctctgggaccggtgtcctcaggagtgaagatcccctcaccctgggcaactg

SEQ ID NO: 510727 - DNA, 120 bp, Artificial Sequence
  ENSG00000164318_19 (sequence is synthesized)
ttacaggtggataagcagaagatagtggagggaatggcagagggaggcttcacacagattaagtgcaacacagacattttcattggcggagtccccaattatgatgatgtgaagaagaac

SEQ ID NO: 510728 - DNA, 120 bp, Artificial Sequence
  ENSG00000164318_20 (sequence is synthesized)
tcgggtgtcctgaagcctttcagcgggagcatccagaagatcatcctgaatgaccgaaccatccatgtgaagcatgacttcacctccggagtgaatgtggagaatgcggcccacccctgt

SEQ ID NO: 510729 - DNA, 120 bp, Artificial Sequence
  ENSG00000164318_21 (sequence is synthesized)
gtgagagccccttgtgcccatgggggcagctgccggcccaggaaggagggctatgactgtgactgccccttgggctttgaggggcttcactgccagaaagcgatcatagaagccattgag

SEQ ID NO: 510730 - DNA, 120 bp, Artificial Sequence
  ENSG00000164318_22 (sequence is synthesized)
atcccgcagtttatcggccgcagttacctgacgtatgacaacccagatatcttgaagagggtgtcaggatcaagatcaaatgtgttcatgaggtttaaaacaactgccaaggatggcctt

SEQ ID NO: 510731 - DNA, 120 bp, Artificial Sequence
  ENSG00000164318_23 (sequence is synthesized)
ttgctgtggaggggagacagccccatgagacccaacagcgacttcatttccttgggccttcgggatggagccctcgtgttcagctataacctgggcagtggtgtggcatccatcatggtg

SEQ ID NO: 510732 - DNA, 120 bp, Artificial Sequence
  ENSG00000164318_24 (sequence is synthesized)
aatggctccttcaacgatggtcggtggcaccgagttaaggccgttagggatggccagtcaggaaagataaccgtggatgactatggagccagaacaggcaaatccccaggcatgatgcgg

SEQ ID NO: 510733 - DNA, 120 bp, Artificial Sequence
  ENSG00000164318_25 (sequence is synthesized)
cagcttaacatcaatggagctctgtatgtgggtggaatgaaggaaattgctctgcacactaacaggcaatatatgagagggctcgtgggctgtatctctcacttcaccctgtccaccgat

SEQ ID NO: 510734 - DNA, 120 bp, Artificial Sequence
  ENSG00000164318_26 (sequence is synthesized)
taccacatttccctcgtggaagatgccgtggatgggaaaaacatcaacacttgtggagccaagtaacaccagctggccttgtccaagggacagagccttctattctgagaatcccagggg

SEQ ID NO: 510735 - DNA, 120 bp, Artificial Sequence
  ENSG00000164318_27 (sequence is synthesized)
ccctcagaccctgcctgatgctatatgcagaggcccagggaccaggtgtgtttcctctcaccaagaagaaagtacacactgatgagaaactgagaaccaagacaggcatccctgggtggc

SEQ ID NO: 510736 - DNA, 120 bp, Artificial Sequence
  ENSG00000164318_28 (sequence is synthesized)
ctttcctgctgacactccacgagctgacccagcagaattctctgtgtaggaagcatcggactttgtccattgaatatgtagcggctgccagagatcacacatcaatgcaaattccagagc

SEQ ID NO: 510737 - DNA, 120 bp, Artificial Sequence
  ENSG00000164318_29 (sequence is synthesized)
ctgtctgctatagctcagtgactgtgttgtgattcatagtacattaaaaagagagagagagagaaagaatcccacagggcactattaaaatacttctctccttccctgactcatgacact

SEQ ID NO: 510738 - DNA, 120 bp, Artificial Sequence
  ENSG00000164318_30 (sequence is synthesized)
cttcctgacagcagaatgactgtgtgaccttgaacttcacatttcccacattggcccttggattgttcggattaaccccttccactcctcactggctggttcactgtgttctgactagtc

SEQ ID NO: 510739 - DNA, 120 bp, Artificial Sequence
  ENSG00000164318_31 (sequence is synthesized)
cataaaaataaagatggaaggagatcaaacacagaatcataatcataatgcggcccccttccccagagcttacctcgaatgtgaaatccctacttcttataatgcagagttaaggagctg

SEQ ID NO: 510740 - DNA, 120 bp, Artificial Sequence
  ENSG00000164318_32 (sequence is synthesized)
agcccccatgattttgtagctgtacttttgtatgtgtatatttttatagctgcagattgtccacacagtatacttttggaagtttgggtggatgactctgaattcttgcacacctttcct

SEQ ID NO: 510741 - DNA, 120 bp, Artificial Sequence
  ENSG00000164318_33 (sequence is synthesized)
aaaaatttctcccaagagagacttgtttgggccttttgtggtgtcagtggaatggataggtaacttgggtgggcaacttggggagctgaccattctcttttggtaaatgttgacggctca

SEQ ID NO: 510742 - DNA, 120 bp, Artificial Sequence
  ENSG00000164318_34 (sequence is synthesized)
agaggatgaatatgaagctttccaagataagcagattaaaaggaacatgtgttaccgaggtaggtcactgtcatttttgttttaagagttggggggagtatctatagtaaacttgaataa

SEQ ID NO: 510743 - DNA, 120 bp, Artificial Sequence
  ENSG00000164318_35 (sequence is synthesized)
aggggacaaagctagaacttattcattcattcattcacttatggagttgttactgattttgcggaggtcaggttcataccaatggacactaatacaatcagtgttcccaaggctgtgcag

SEQ ID NO: 510744 - DNA, 120 bp, Artificial Sequence
  ENSG00000164318_36 (sequence is synthesized)
gggtggggggacatgctgtcaggatggtctgagcatctgggtgagaaccagagaaacaggacttcttccttctgtaccatgagctgtgtccctttactatgcaagcacatgaccccagag

SEQ ID NO: 510745 - DNA, 120 bp, Artificial Sequence
  ENSG00000164318_37 (sequence is synthesized)
acagctggttcactggcagatccccatgatggacttactaagggaaaggtgagatgaacactgcccccaaggagggggtgaaatatgatctaacttatgcaagagcctataattagtccc

SEQ ID NO: 510746 - DNA, 120 bp, Artificial Sequence
  ENSG00000164318_38 (sequence is synthesized)
agtctcgactctacatttgtttgtgcagcattcattcagcaaagacttttggggtttgtgcaaggcacagttttaagcacataatgtaattctaaaagatgaataaactagagaggttca

SEQ ID NO: 510747 - DNA, 120 bp, Artificial Sequence
  ENSG00000164318_39 (sequence is synthesized)
agggcctgtccctctcacttccactcgattgtaatttcatccccgggccggtcgagcctccctccctcccgcggccagcccttccctcccagtcggcctccttcgtcgcccccgcccccg

SEQ ID NO: 510748 - DNA, 120 bp, Artificial Sequence
  ENSG00000164318_40 (sequence is synthesized)
atattcacattccctaagaggacgttctggactctcgggcagagctttgtgagagaaacaaggctggcttcaagtgatctgcaaccagagtaattgggatttgacaaggactgtgaaagg

SEQ ID NO: 510749 - DNA, 120 bp, Artificial Sequence
  ENSG00000164318_41 (sequence is synthesized)
tgccagagtgattcagaagggagccagaacacagtctgctggaattggctgaagcctgaagcttcaaggcttattggaagctcctggtctttctttccaacattcatcttatagagcagc

SEQ ID NO: 510750 - DNA, 120 bp, Artificial Sequence
  ENSG00000164318_42 (sequence is synthesized)
ctctaataactgtcctctctctagtctaagttaggcgctgctcctctggtgtaattccacagcacccttgtggtcttcgccgtggagtgctggcactgtgttgtcattcacagtttgact

SEQ ID NO: 510751 - DNA, 120 bp, Artificial Sequence
  ENSG00000164318_43 (sequence is synthesized)
ttttgtcttcctcagtagaccacaggctcctgagggccacacatttgctttttgctttgatttctgcagccccatcatttagcacagtacctggcacatagtgtgtcctttaatacattt

SEQ ID NO: 510752 - DNA, 120 bp, Artificial Sequence
  ENSG00000164318_44 (sequence is synthesized)
gtattgaaatgaatgaatgattgaatgaactccaaaaatgccaggctttttgttcttttttgttttggtgttttgcagggatggccagtcaggaaagataaccgtggatgactatggagc

SEQ ID NO: 510753 - DNA, 120 bp, Artificial Sequence
  ENSG00000164318_45 (sequence is synthesized)
gagacggctgcagaccatggggcagggagcatatggagcacggatatgccagacagagggatgattcatatcccaggcaggatggagcagggcagtgtgctatttcatcgtgctactcag

SEQ ID NO: 510754 - DNA, 120 bp, Artificial Sequence
  ENSG00000164318_46 (sequence is synthesized)
tatgaattgtttatttctggaatttcccatttaatatttttggactgtggttgatcgagggtaaatgaaattgcagaaagcaaaaatacagataagggggactgcttgctgtacaaagat

SEQ ID NO: 510755 - DNA, 120 bp, Artificial Sequence
  ENSG00000164318_47 (sequence is synthesized)
atctgcaaccagagtaattgggatttgacaaggactgtgaaaggctgactctccctgttctctttcatgctggcaccgggcagagtgtgggaactactgcctcaatagtaagtacaaagc

SEQ ID NO: 510756 - DNA, 120 bp, Artificial Sequence
  ENSG00000164318_48 (sequence is synthesized)
accaaagctgcaggaaacagaagatccaatccaggagagggatataagaagtccccagaataatagtgggaaggagatgctagaatgacaaatatttactagatagaaaaggcaaccagt

SEQ ID NO: 510757 - DNA, 120 bp, Artificial Sequence
  ENSG00000164323_0 (sequence is synthesized)
ctctccgcctccggaagcgcgggcgcgcggcgccgggagcccgttcagggccgcgggagtgcgccagcgccgcgcgtggggctgtggtggccgcggctctcagatatatttttgccatca

SEQ ID NO: 510758 - DNA, 120 bp, Artificial Sequence
  ENSG00000164323_1 (sequence is synthesized)
tggatcagtttggagatatattagaaggtgaagtggaccattctttctttgacagtgactttgaagaaggaaagaaatgtgaaactaactcagtttttgacaagcaaaatgatgacccaa

SEQ ID NO: 510759 - DNA, 120 bp, Artificial Sequence
  ENSG00000164323_2 (sequence is synthesized)
aggaaagaatagataaagatacaaaaaatgtaaattcgaacactggaatgcaaacaacagaaaattatcttactgagaagggaaatgaaagaaacgtgaaatttcccccagaacaccccg

SEQ ID NO: 510760 - DNA, 120 bp, Artificial Sequence
  ENSG00000164323_3 (sequence is synthesized)
tagagaatgatgttacacaaactgtaagttctttctcattgccagcctcttcaagatcaaaaaaattgtgtgatgttacaacaggacttaaaatacacgtgtccattccaaatagaattc

SEQ ID NO: 510761 - DNA, 120 bp, Artificial Sequence
  ENSG00000164323_4 (sequence is synthesized)
ccaaaattgtaaaagaaggtgaagatgattactacacagatggagaggaaagcagtgatgatgggaagaaataccatgtgaagtccaagtccgctaaaccatctactaacgttaaaaaaa

SEQ ID NO: 510762 - DNA, 120 bp, Artificial Sequence
  ENSG00000164323_5 (sequence is synthesized)
gcataaggaaaaagtattgcaaagttagctcctcttcctcctcctctttatcttcctcatcttcaggttcaggtacagattgtttagatgcagggtctgatagccatctatctgattcgt

SEQ ID NO: 510763 - DNA, 120 bp, Artificial Sequence
  ENSG00000164323_6 (sequence is synthesized)
ctccgtcatctaagtcatctaagaaacatgtatctggtataaccctcctgtcaccaaaacacaagtataaatcaggaataaaatcgacagaaacacagccttcaagtactacaccaaaat

SEQ ID NO: 510764 - DNA, 120 bp, Artificial Sequence
  ENSG00000164323_7 (sequence is synthesized)
gtggccactaccctgaggagtctgaagatactgtgactgacgtaagtcccttatcaactccagacattagccctcttcagtcttttgaactgggcatagcaaatgatcaaaaagtgaaaa

SEQ ID NO: 510765 - DNA, 120 bp, Artificial Sequence
  ENSG00000164323_8 (sequence is synthesized)
ttaaaaagcaagaaaatgtgagccaagaaatatatgaagatgttgaggatttgaaaaataattcaaaatatttgaaagcagccaaaaaagggaaagaaaaacatgagcctgatgtctcct

SEQ ID NO: 510766 - DNA, 120 bp, Artificial Sequence
  ENSG00000164323_9 (sequence is synthesized)
caaagtcgtcttcagtgttagactccagtttagaccacagacataaacagaaagtcttacatgacacaatggatctgaatcatctcttgaaagcttttctgcaattagataaaaaaggac

SEQ ID NO: 510767 - DNA, 120 bp, Artificial Sequence
  ENSG00000164323_10 (sequence is synthesized)
cacaaaaacatcactttgatcagccttcagtagcacccgggaaaaactactctttcacaagagaagaggtgagacagatcgatcgggaaaatcagaggcttttgaaagaactgtcaagac

SEQ ID NO: 510768 - DNA, 120 bp, Artificial Sequence
  ENSG00000164323_11 (sequence is synthesized)
aggcggaaaagccgggaagcaaaagtacaattcctagatcggctgatcatcccccaaagttatatcacagtgctctcaacagacagaaggaacaacaaaggattgagagagaaaacttgg

SEQ ID NO: 510769 - DNA, 120 bp, Artificial Sequence
  ENSG00000164323_12 (sequence is synthesized)
ctttattgaaaaggcttgaggccgtgaaaccaacagttggtatgaaacgttcagaacaactgatggactatcatcgcaatatgggctatctcaactcatcaccattgtcaagacgggcca

SEQ ID NO: 510770 - DNA, 120 bp, Artificial Sequence
  ENSG00000164323_13 (sequence is synthesized)
gatccactcttggccaatatagcccattaagagcttccaggacatccagtgctacgagtggtctcagttgtaggagtgagcgatcagcggttgacccctccagtggccaccctcgaagaa

SEQ ID NO: 510771 - DNA, 120 bp, Artificial Sequence
  ENSG00000164323_14 (sequence is synthesized)
gacctaaaccccctaatgtccgtacagcttggttataaaacacttttttactttaaacattgttcacacaacttttcttgaagtgctcgtgcatattcctataattctctgtgtaaacat

SEQ ID NO: 510772 - DNA, 120 bp, Artificial Sequence
  ENSG00000164323_15 (sequence is synthesized)
ctagaataccgttttagcaattgaaggtgtacaacagtgagttgtaatgtattgttattcagtgcaaaattattgtcaaaaaacgatttaatgtaaaaagtgtttcctgaggatgtattt

SEQ ID NO: 510773 - DNA, 120 bp, Artificial Sequence
  ENSG00000164323_16 (sequence is synthesized)
atatgagatgtatgtgttcttaatagagaaatagtggtatgcatgtgtatcttctaattattcagttgtcatgctgtcaaaatagtagtgatagtatcattgcatgtcgtacccaagatg

SEQ ID NO: 510774 - DNA, 120 bp, Artificial Sequence
  ENSG00000164323_17 (sequence is synthesized)
gtcactatagttttcaatttgtgttattttcatttctttataagtgttataccatgagctcagctcctaaatttggctggctttgtttttcatttgctttagaacttatgtggcatgaca

SEQ ID NO: 510775 - DNA, 120 bp, Artificial Sequence
  ENSG00000164323_18 (sequence is synthesized)
tagctcgattgtatgagatttaacacttattatgaaacaaatcttgaaatttgttttcactggtagagctgatctagatttgatgagcagattgagagacgcttctattggagcaattct

SEQ ID NO: 510776 - DNA, 120 bp, Artificial Sequence
  ENSG00000164323_19 (sequence is synthesized)
tgtaattcaccagaggtatctagttgttgtataagtgcactgagttagatcttaaaagtttgatcaatcattccaaaccatttcaaatatgaatattagaaagttcaacttagaagcttc

SEQ ID NO: 510777 - DNA, 120 bp, Artificial Sequence
  ENSG00000164323_20 (sequence is synthesized)
atgaggtaggttttagagctagtcttctaactcgtgaatagtttaaggaccacatcagttgcaaaccaagtatttgttgaatcagtaaaatggcactatcagcatgaagagccgagaagc

SEQ ID NO: 510778 - DNA, 120 bp, Artificial Sequence
  ENSG00000164323_21 (sequence is synthesized)
agatcctgaggtgtgtcggacagtgttttaggtaattcagtatttattatgttattagagaagacttagcgtaagaaagaaatgctttagaaattccagcaagtatttataaggcctgaa

SEQ ID NO: 510779 - DNA, 120 bp, Artificial Sequence
  ENSG00000164323_22 (sequence is synthesized)
aaaactaaaatttgaacaaaaagggaaataaatcacacatttgttgaggctgctgctttaagtattagctaattttcttgttttggtttactttgatttatttgattgaaccctggaagt

SEQ ID NO: 510780 - DNA, 120 bp, Artificial Sequence
  ENSG00000164323_23 (sequence is synthesized)
attatttttaccagtcccacatttaaagacctagtaatcttgatggaattggtaatggcagatagggtttaatgttgttgacttttcaaattagaattttttttctatgaaacttaggct

SEQ ID NO: 510781 - DNA, 120 bp, Artificial Sequence
  ENSG00000164323_24 (sequence is synthesized)
tttatataacaaagtatgttatctcattgttaccgccgtttttcactactagccttttcagtatgcccttaaaatgtattggaaaggttccatgttaaatgacaaatatctttttcagta

SEQ ID NO: 510782 - DNA, 120 bp, Artificial Sequence
  ENSG00000164323_25 (sequence is synthesized)
tgaatttttgatctgtagccacaataagattttcatttttcagtgctcaggctctgtagcatgtatgctgaatgcttttttccttagcacctttaacagtaaggtgttactgcattttac

SEQ ID NO: 510783 - DNA, 120 bp, Artificial Sequence
  ENSG00000164323_26 (sequence is synthesized)
aaaacatcaattcaacatgtcttggatttagtttgtattcatagattttgttaaggatcaggcctgtgaacatgggcacagtgaggttaaataattcacctggccacaacctggctttga

SEQ ID NO: 510784 - DNA, 120 bp, Artificial Sequence
  ENSG00000164323_27 (sequence is synthesized)
ggttctgcttttgggggccataattttcattcaatgttattcgatgctctgttctggtgaacaagttactatacctgctgtgtatataagcttgagctatactaaaccaaggctttattt

SEQ ID NO: 510785 - DNA, 120 bp, Artificial Sequence
  ENSG00000164323_28 (sequence is synthesized)
tcttttgttttttaacttactgtacttttactgtttatataacctatatttcaagagagagaagataatgctgaattttaaatttagcatttgaacatctgtccaatagtgaattaatca

SEQ ID NO: 510786 - DNA, 80 bp, Artificial Sequence
  ENSG00000164323_29 (sequence is synthesized)
aatttagcatttgaacatctgtccaatagtgaattaatcagtttttttaaaattgatttttaagttgttccagaaaaaaa

SEQ ID NO: 510787 - DNA, 120 bp, Artificial Sequence
  ENSG00000164323_30 (sequence is synthesized)
aagatttttatatatatataaagattatatatttatatatagtcttttctgttcataatggcattagtctctgagtacattttatattatctttgttgccacatgtcaggatacaacaca

SEQ ID NO: 510788 - DNA, 120 bp, Artificial Sequence
  ENSG00000164323_31 (sequence is synthesized)
cacaatagttttataaataacaactgtactttgattttaggtactaatttaatgctttagtttttactactttgaaaggggaggttcatctaagtattactgataacagggatccaactt

SEQ ID NO: 510789 - DNA, 120 bp, Artificial Sequence
  ENSG00000164323_32 (sequence is synthesized)
aaagtaaaagttggaaagggcaagagtcttttaagcggaacttcaattctgttgtcatggttacttatatataatgaatataaatagacaaataggacttggaaaatgtggtatattcta

SEQ ID NO: 510790 - DNA, 120 bp, Artificial Sequence
  ENSG00000164323_33 (sequence is synthesized)
agtcaagatgctatgaagttgttatagtttaagggacattcttaagaaggaattacttaagtacattactcttctcatttcaaggacatgaaaaagtaaaggatggtctggcactatttt

SEQ ID NO: 510791 - DNA, 120 bp, Artificial Sequence
  ENSG00000164323_34 (sequence is synthesized)
attttattttttttttgacttgtactgaatatatgtactttgaagatttacatctataactagaaagtatgctaatccgaggtctggttattaggccagattcttgttcagttatttttt

SEQ ID NO: 510792 - DNA, 120 bp, Artificial Sequence
  ENSG00000164323_35 (sequence is synthesized)
aaactaatgttgcctcctttttagtaagattctacgaaagttttttaactattaaagttatttcttaaggggtagctcttatacttcctctgctctctttttcagtttccataaaaagct

SEQ ID NO: 510793 - DNA, 120 bp, Artificial Sequence
  ENSG00000164323_36 (sequence is synthesized)
gttttcttagctattactccaaataaagttctttggtttgcttaaaaatgtagtgtaatgcagttgttttctctccgctaacctgagtgtccacagtagatatcgagacagctttaggaa

SEQ ID NO: 510794 - DNA, 120 bp, Artificial Sequence
  ENSG00000164323_37 (sequence is synthesized)
ggtgacggtcatgggtaagtgacggctgtgcctgtcatcttcagattcttcaaatactgcaaactatgaaacatgttaagaccaatataaacccaaagatgtgagttgattatactttaa

SEQ ID NO: 510795 - DNA, 120 bp, Artificial Sequence
  ENSG00000164323_38 (sequence is synthesized)
taattacattcataaaaagtttactatcttcaatgccaaaaaagtcttaacctataaatgattatatacaatcttagaaaatgtgcttaacagttatggcttctttatttctatgaggaa

SEQ ID NO: 510796 - DNA, 120 bp, Artificial Sequence
  ENSG00000164323_39 (sequence is synthesized)
agattagtaagaaacttaaaattaacatccttttaagattttctgttccattttaatgtattttaggcatttagaactagcctggcataatgaagaaagaaataaaagaattaaagataa

SEQ ID NO: 510797 - DNA, 80 bp, Artificial Sequence
  ENSG00000164323_40 (sequence is synthesized)
cacgccgcccctcctttccctttccgctctctccgcctccggaagcgcgggcgcgcggcgccgggagcccgttcagggcc

SEQ ID NO: 510798 - DNA, 120 bp, Artificial Sequence
  ENSG00000164323_41 (sequence is synthesized)
gcggctctcaggtgaggggcgcgcgagcggctcctggctccctgctcgcggggcgcccgccacgctcctttccgttcgcatccgtctccccgctccggagcccaggcggcggcgagtact

SEQ ID NO: 510799 - DNA, 120 bp, Artificial Sequence
  ENSG00000164323_42 (sequence is synthesized)
aggtgtgagccactgtgcctggcctgtaggagtaacttcagaactcttatgtggaataattaaagggagattgtgataaattgtcacaaaaatgatttatagcaagtctcatacctacta

SEQ ID NO: 510800 - DNA, 120 bp, Artificial Sequence
  ENSG00000164323_43 (sequence is synthesized)
agtctcatacctactatgaatattaatctgttgattaacagtacttttgttctaagatcttgaaataatgtatactttacttcattggggtttccttcttgtctggttaaggtctgttat

SEQ ID NO: 510801 - DNA, 120 bp, Artificial Sequence
  ENSG00000164323_44 (sequence is synthesized)
ctccttccgttgaagaaagcaagctaatgataactcagtgtgactcccactgttgaaatgtagagagcagtcgtcttgattctgcctgtgtgggggacagttgttactttttagtgtcct

SEQ ID NO: 510802 - DNA, 120 bp, Artificial Sequence
  ENSG00000164323_45 (sequence is synthesized)
tacaaggtctttgcttcatcgctctagaaacactaaagcaactctcctctgctaacggctgcagaaatcattaagacatttatttgtttacatttgtttaaacatcaaaagatgggctag

SEQ ID NO: 510803 - DNA, 120 bp, Artificial Sequence
  ENSG00000164323_46 (sequence is synthesized)
tcaaaagatgggctaggttaattttttttccaaagagaataattcctggatataaaataaatgtttggacaagtgtattagtccattttcatactgctgtaaagatactacctgagactg

SEQ ID NO: 510804 - DNA, 120 bp, Artificial Sequence
  ENSG00000164323_47 (sequence is synthesized)
aagagttttaattgacttacagttctgcaaggctggagaagcctcaggaaacttagaatcatgctggaaggcgaagcagaagcaaggcatgtcttacatggtggcaggatagagagagaa

SEQ ID NO: 510805 - DNA, 71 bp, Artificial Sequence
  ENSG00000164323_48 (sequence is synthesized)
agcaaggcatgtcttacatggtggcaggatagagagagaacacaggggaaactgccacttttaagtaaccc

SEQ ID NO: 510806 - DNA, 120 bp, Artificial Sequence
  ENSG00000164323_49 (sequence is synthesized)
cgagatgagatttgggtggggacacagagtcagaccgtatcaataggtatataacacagtattgttaactatagtcaacatgctgtacattagatctccagaacttactcatcttgcatg

SEQ ID NO: 510807 - DNA, 120 bp, Artificial Sequence
  ENSG00000164323_50 (sequence is synthesized)
gaacttactcatcttgcatgactggaactttgtaccttgggtacttgacatttgctaagagactagatcttaggtgttctcaccacacacataaataaaaatggtaactctgtgagatga

SEQ ID NO: 510808 - DNA, 120 bp, Artificial Sequence
  ENSG00000164323_51 (sequence is synthesized)
agaaatagtggaagaagggaagaccattgcatagtggcagtattagatacaggactttgaagtggatcttgaaagattagtcgaatttctgaatattcaacctcttttagctcaagggtg

SEQ ID NO: 510809 - DNA, 120 bp, Artificial Sequence
  ENSG00000164323_52 (sequence is synthesized)
gctgacttggggaattttccacctccatgcaaagctgcctttgctatgtaaatgtcaaaaaatggttggaattagatccttcatcttgacctgtaaatccctgaataggcagagagggca

SEQ ID NO: 510810 - DNA, 120 bp, Artificial Sequence
  ENSG00000164323_53 (sequence is synthesized)
acccttgatgtgggcaaccgtccaatcagctgtggcccagaaagaacaaaaaggtggtttcctctgtgccctgaagctgggatacactcttctcccatccttggacatcagaactccagg

SEQ ID NO: 510811 - DNA, 120 bp, Artificial Sequence
  ENSG00000164323_54 (sequence is synthesized)
ctctggcgttgagactccaggttacactagcagcctcctgggttctcaggcctactgcctcagagttatgccatcctattccctggttctgaggccttcagagttggactgagccacacc

SEQ ID NO: 510812 - DNA, 120 bp, Artificial Sequence
  ENSG00000164323_55 (sequence is synthesized)
gggaggcgcccacccacagcgcgggggcggggtccgggccggggccccacggggagagggcgcgacccagcgcggtgcacacctctctttcccacgctcccctcctcctctacaggatgc

SEQ ID NO: 510813 - DNA, 120 bp, Artificial Sequence
  ENSG00000164323_56 (sequence is synthesized)
cgtctgttcatggaaaattttgctgcaggtgtcagcggcgctggtaattcctgagctcagcaaccccgatggataccattatctccatctacacagcggggaactgaagcacaggagata

SEQ ID NO: 510814 - DNA, 120 bp, Artificial Sequence
  ENSG00000164325_0 (sequence is synthesized)
gttctcacaatcctctccactctaagaagcagggtgagcccacaaggagcaatggagcagggcagcggccgcttggaggacttccctgtcaatgtgttctccgtcactccttacacaccc

SEQ ID NO: 510815 - DNA, 120 bp, Artificial Sequence
  ENSG00000164325_1 (sequence is synthesized)
agcaccgctgacatccaggtgtccgatgatgacaaggcgggggccaccttgctcttctcaggcatctttctgggactggtggggatcacattcactgtcatgggctggatcaaataccaa

SEQ ID NO: 510816 - DNA, 120 bp, Artificial Sequence
  ENSG00000164325_2 (sequence is synthesized)
ggtgtctcccactttgaatggacccagctccttgggcccgtcctgctgtcagttggggtgacattcatcctgattgctgtgtgcaagttcaaaatgctctcctgccagttgtgcaaagaa

SEQ ID NO: 510817 - DNA, 120 bp, Artificial Sequence
  ENSG00000164325_3 (sequence is synthesized)
agtgaggaaagggtcccggactcggaacagacaccaggaggaccatcatttgttttcactggcatcaaccaacccatcaccttccatggggccactgtggtgcagtacatccctcctcct

SEQ ID NO: 510818 - DNA, 120 bp, Artificial Sequence
  ENSG00000164325_4 (sequence is synthesized)
tatggttctccagagcctatggggataaataccagctacctgcagtctgtggtgagcccctgcggcctcataacctctggaggggcagcagccgccatgtcaagtcctcctcaatactac

SEQ ID NO: 510819 - DNA, 120 bp, Artificial Sequence
  ENSG00000164325_5 (sequence is synthesized)
accatctaccctcaagataactctgcatttgtggttgatgagggctgcctttctttcacggacggtggaaatcacaggcccaatcctgatgttgaccagctagaagagacacagctggaa

SEQ ID NO: 510820 - DNA, 120 bp, Artificial Sequence
  ENSG00000164325_6 (sequence is synthesized)
gaggaggcctgtgcctgcttctctcctcccccttatgaagaaatatactctctccctcgctagaggctattctgatataataacacaatgctcagctcagggagcaagtgtttccgtcat

SEQ ID NO: 510821 - DNA, 120 bp, Artificial Sequence
  ENSG00000164325_7 (sequence is synthesized)
aaggggggaaaggggaagtgggaggtgcaatttctcagattggtaaaaattaggctgggctggggaaattctcctccggaacagtttcaaattccctcgggtaagaaatctcctgtataa

SEQ ID NO: 510822 - DNA, 120 bp, Artificial Sequence
  ENSG00000164325_8 (sequence is synthesized)
ggttcaggagcaggaatttcactttttcatccaccaccctcccccttctctgtaggaaggcattggtggctcaattttaaccccagcagccaatggaaaaatcacgacttctgagacttt

SEQ ID NO: 510823 - DNA, 120 bp, Artificial Sequence
  ENSG00000164325_9 (sequence is synthesized)
gggagtttccacagaggtgagagtcgggtgggaaggaagcagggaagagaaagcaggcccagctggagatttcctggtggctgtccttggccccaaagcagactcactaatcccaaacaa

SEQ ID NO: 510824 - DNA, 120 bp, Artificial Sequence
  ENSG00000164325_10 (sequence is synthesized)
ctcagctgccatctggcctctctgaggactctgggtaccttaaagactataaaacaaaacaaaacaaaaacatcaaaccaatgaaataaaataaatcatgtctcctgctagaatagtatt

SEQ ID NO: 510825 - DNA, 120 bp, Artificial Sequence
  ENSG00000164325_11 (sequence is synthesized)
ggatacctgactaaattacacaaaatagaccataataggatagcgctgtgaatacatccttcccgatcactgagtcacagtgacccttggctgctgctgttctcttctgcaaggttgaag

SEQ ID NO: 510826 - DNA, 120 bp, Artificial Sequence
  ENSG00000164325_12 (sequence is synthesized)
cttgacgtgtgatgaacatgggtgggctcttggtccaccccaggctggggcctgcgccaagcatgaactagctgggaccagtggctgacagaacacaggacttccctaagtacccgtagg

SEQ ID NO: 510827 - DNA, 120 bp, Artificial Sequence
  ENSG00000164325_13 (sequence is synthesized)
tctgtggagcaagacagagcagagttgccatgtcaacacatggggaatgatatgatagaaacaatctttatgactaaaagaaactcatcttcttcattaaaaaaactttggtgtccttaa

SEQ ID NO: 510828 - DNA, 120 bp, Artificial Sequence
  ENSG00000164326_0 (sequence is synthesized)
aacgacgagtttcagaacgatggagagctcccgcgtgaggctgctgcccctcctgggcgccgccctgctgctgatgctacctctgttgggtacccgtgcccaggaggacgccgagctcca

SEQ ID NO: 510829 - DNA, 120 bp, Artificial Sequence
  ENSG00000164326_1 (sequence is synthesized)
gccccgagccctggacatctactctgccgtggatgatgcctcccacgagaaggagctgatcgaagcgctgcaagaagtcttgaagaagctcaagagtaaacgtgttcccatctatgagaa

SEQ ID NO: 510830 - DNA, 120 bp, Artificial Sequence
  ENSG00000164326_2 (sequence is synthesized)
gaagtatggccaagtccccatgtgtgacgccggtgagcagtgtgcagtgaggaaaggggcaaggatcgggaagctgtgtgactgtccccgaggaacctcctgcaattccttcctcctgaa

SEQ ID NO: 510831 - DNA, 120 bp, Artificial Sequence
  ENSG00000164326_3 (sequence is synthesized)
gagtttggcttaagcaacagataaagtttttattttcctctgaagggaaagggctcttttcctgctgtttcaaaaataaaagaacacattagatgttactgtgtgaagaataatgccttg

SEQ ID NO: 510832 - DNA, 120 bp, Artificial Sequence
  ENSG00000164326_4 (sequence is synthesized)
tatggtgttgatacgtgtgtgaagtattcttattttatttgtctgacaaactcttgtgtacctttgtgtaaagaagggaagctttgtttgaaaattgtatttttgtatgtggcatggcag

SEQ ID NO: 510833 - DNA, 120 bp, Artificial Sequence
  ENSG00000164326_5 (sequence is synthesized)
aatgaaaattagatctagctaatctcggtagatgtcattacaacctggaaaataaatcaccctaagtgacacaaattgaagcatgtacaaattatacataataaagtgtttttaataatt

SEQ ID NO: 510834 - DNA, 120 bp, Artificial Sequence
  ENSG00000164326_6 (sequence is synthesized)
ccaggcacccactgccatccgaagagcgtctcgagctcacgggctcctggcagtctgttgagcgaatccctcatcccggcccctctgagcaacagggaccccagcggctcagagacccgc

SEQ ID NO: 510835 - DNA, 120 bp, Artificial Sequence
  ENSG00000164326_7 (sequence is synthesized)
ggtcagtacctgggacagcgtccgctaagtttccacccctcgaccattccctgtgtccgcggagtcccaccgcagagtgcgtgtgggtccggggctccttataactagggctggaagtgc

SEQ ID NO: 510836 - DNA, 120 bp, Artificial Sequence
  ENSG00000164327_0 (sequence is synthesized)
gttgtgactgaaacccgtcaatatggcggcgatcggccgcggccgctctctgaagaacctccgagtacgagggcggaatgacagcggcgaggagaacgtcccgctggatctgacccgaga

SEQ ID NO: 510837 - DNA, 120 bp, Artificial Sequence
  ENSG00000164327_1 (sequence is synthesized)
accttctgataacttaagagagattctccaaaatgtggccagattgcagggagtatcaaatatgagaaagctaggccatctgaataactttactaagcttctttgtgatattggccacag

SEQ ID NO: 510838 - DNA, 120 bp, Artificial Sequence
  ENSG00000164327_2 (sequence is synthesized)
tgaagaaaaactgggctttcactatgaggatatcataatttgtttgcggttagctttattaaatgaagcaaaagaagtgcgagcagcagggctacgagcgcttcgatatctcatccaaga

SEQ ID NO: 510839 - DNA, 120 bp, Artificial Sequence
  ENSG00000164327_3 (sequence is synthesized)
ctccagtattctccagaaggtgctaaaattgaaagtggactatttaatagctaggtgcattgacatacaacagagcaacgaggtagagaggacacaagcacttcgattagtcagaaagat

SEQ ID NO: 510840 - DNA, 120 bp, Artificial Sequence
  ENSG00000164327_4 (sequence is synthesized)
gattactgtgaatgcttccttgtttcctagttctgtgaccaactcattaattgcagttggaaatgatggacttcaagaaagagacagaatggtccgagcatgcattgccattatctgtga

SEQ ID NO: 510841 - DNA, 120 bp, Artificial Sequence
  ENSG00000164327_5 (sequence is synthesized)
actagcacttcagaatccagaggtggtggcccttcgaggtggactaaacaccatcttgaaaaatgtgatcgattgccaattaagtcgaataaatgaggccctaattactacaattttgca

SEQ ID NO: 510842 - DNA, 120 bp, Artificial Sequence
  ENSG00000164327_6 (sequence is synthesized)
ccttcttaatcatccaaagactcgacagtatgtgcgagctgatgtagaattagagagaattttagcaccctatactgattttcactacagacatagtccagatacagctgaaggacagct

SEQ ID NO: 510843 - DNA, 120 bp, Artificial Sequence
  ENSG00000164327_7 (sequence is synthesized)
caaagaagacagagaagcacgatttctagccagtaaaatgggaatcatagcaacattccgatcatgggcaggtattattaatttatgtaaacctggaaattctgggatccagtctctaat

SEQ ID NO: 510844 - DNA, 120 bp, Artificial Sequence
  ENSG00000164327_8 (sequence is synthesized)
aggagtactttgcataccaaatatggaaataaggcgaggtctacttgaagtgctttatgatatatttcgtcttcctctacctgttgtgactgaggagttcatagaagcactactcagtgt

SEQ ID NO: 510845 - DNA, 120 bp, Artificial Sequence
  ENSG00000164327_9 (sequence is synthesized)
agatccagggaggttccaagacagttggaggctttcagatggctttgtggcagctgaggcaaaaactattcttcctcatcgtgccagatccaggccagacctcatggataattatttggc

SEQ ID NO: 510846 - DNA, 120 bp, Artificial Sequence
  ENSG00000164327_10 (sequence is synthesized)
actgatactctctgcatttattcgtaatggacttttagagggtctagttgaagtgataacaaacagtgatgatcatatctcagttagagctaccatccttttaggagagcttttacatat

SEQ ID NO: 510847 - DNA, 120 bp, Artificial Sequence
  ENSG00000164327_11 (sequence is synthesized)
ggcaaacacaattcttcctcattcacatagccatcatttacactgcttgccaaccctaatgaatatggctgcatcctttgatatccccaaggaaaagagactgcgagccagtgcagcctt

SEQ ID NO: 510848 - DNA, 120 bp, Artificial Sequence
  ENSG00000164327_12 (sequence is synthesized)
gaactgtttaaaacgcttccatgaaatgaagaaacgaggacctaagccttatagtcttcatttagaccacattattcagaaagcaattgcaacacaccagaaacgggatcagtatctccg

SEQ ID NO: 510849 - DNA, 120 bp, Artificial Sequence
  ENSG00000164327_13 (sequence is synthesized)
agttcagaaagatatatttatccttaaggatacagaggaagctcttttaattaaccttagagatagccaagtccttcaacataaagagaatcttgaatggaattggaatcttatagggac

SEQ ID NO: 510850 - DNA, 120 bp, Artificial Sequence
  ENSG00000164327_14 (sequence is synthesized)
cattcttaagtggccaaatgtaaatctaagaaactataaagatgaacagttacacaggtttgtacgaagactactttatttttacaagcccagcagtaaattatatgccaacctggatct

SEQ ID NO: 510851 - DNA, 120 bp, Artificial Sequence
  ENSG00000164327_15 (sequence is synthesized)
ggattttgccaaggccaaacagctcacggttgtaggttgccagtttacagaatttcttcttgaatctgaagaggatgggcaaggctacttagaagatctagtaaaggatattgttcagtg

SEQ ID NO: 510852 - DNA, 120 bp, Artificial Sequence
  ENSG00000164327_16 (sequence is synthesized)
gctcaatgcttcatctggaatgaaacccgaaagaagtcttcaaaataatggtttattgaccacccttagtcaacactactttttatttattggaacactttcttgccaccctcatggagt

SEQ ID NO: 510853 - DNA, 120 bp, Artificial Sequence
  ENSG00000164327_17 (sequence is synthesized)
taaaatgctggaaaaatgcagtgtatttcagtgtctccttaatctttgctccttgaaaaaccaagatcacttgctaaaacttactgtttctagcttggactatagcagagatggattggc

SEQ ID NO: 510854 - DNA, 120 bp, Artificial Sequence
  ENSG00000164327_18 (sequence is synthesized)
tagagtcatcctttccaaaattttaactgcagctactgatgcctgcagactctatgcaacaaaacatttaagggtattattgagagctaatgttgaattctttaataattggggaattga

SEQ ID NO: 510855 - DNA, 120 bp, Artificial Sequence
  ENSG00000164327_19 (sequence is synthesized)
gttgttagtgacccagctacatgataaaaacaaaacgatttcctctgaagctcttgatatcctcgatgaagcatgtgaagacaaggccaatcttcatgctctcattcagatgaaaccagc

SEQ ID NO: 510856 - DNA, 120 bp, Artificial Sequence
  ENSG00000164327_20 (sequence is synthesized)
gttatcccaccttggagacaagggtttgcttctcctgctgagatttctctccattccaaaaggattttcctatctgaatgaaagaggttatgtagcaaaacaattggaaaagtggcacag

SEQ ID NO: 510857 - DNA, 120 bp, Artificial Sequence
  ENSG00000164327_21 (sequence is synthesized)
ggaatacaactccaaatatgttgacttgattgaggaacaactcaatgaagcacttactacttaccggaagcctgttgatggtgataactatgttcgtcggagtaaccaaagattacagcg

SEQ ID NO: 510858 - DNA, 120 bp, Artificial Sequence
  ENSG00000164327_22 (sequence is synthesized)
tcctcacgtctacctgcctatacacctttatggacaactagtacaccataaaacaggctgccatttgttggaagtacagaatattattacagaactctgtcgtaatgttcgtacaccaga

SEQ ID NO: 510859 - DNA, 120 bp, Artificial Sequence
  ENSG00000164327_23 (sequence is synthesized)
tttggataagtgggaagaaattaaaaaactgaaagcatctctttgggccttgggaaatatcggctcatcaaattggggtctcaatttgctacaggaagaaaacgtgattccagatatact

SEQ ID NO: 510860 - DNA, 120 bp, Artificial Sequence
  ENSG00000164327_24 (sequence is synthesized)
aaaacttgcaaaacagtgtgaagttctttccatcagagggacctgtgtatatgtacttgggctcatagctaaaaccaaacaaggctgtgatattctaaaatgtcacaactgggatgctgt

SEQ ID NO: 510861 - DNA, 120 bp, Artificial Sequence
  ENSG00000164327_25 (sequence is synthesized)
gaggcatagtcgcaaacatctgtggccagtggttccagatgatgtggaacaactctgtaatgaactttcatctatcccaagcactctaagtttgaactcggagtcaaccagctctagaca

SEQ ID NO: 510862 - DNA, 120 bp, Artificial Sequence
  ENSG00000164327_26 (sequence is synthesized)
taatagtgaaagtgaatctgtgccatcgagtatgttcatattggaggatgaccggtttggcagcagctctactagcacatttttccttgatatcaatgaagatacagagccaacatttta

SEQ ID NO: 510863 - DNA, 120 bp, Artificial Sequence
  ENSG00000164327_27 (sequence is synthesized)
tgaccgatctggacccataaaggataaaaattcattccctttctttgcttctagtaaacttgtgaagaatcgtatcttaaattcgcttactttgcctaacaaaaaacatcgtagtagcag

SEQ ID NO: 510864 - DNA, 120 bp, Artificial Sequence
  ENSG00000164327_28 (sequence is synthesized)
tgatccaaaaggagggaaattatcatctgaaagtaagacaagcaacaggcgaatcagaacacttacggagcccagtgttgattttaatcatagtgatgattttacacccatatccactgt

SEQ ID NO: 510865 - DNA, 120 bp, Artificial Sequence
  ENSG00000164327_29 (sequence is synthesized)
acagaaaacattacaattagagacttcatttatggggaataagcacattgaagacactggtagtacaccaagcattggagaaaatgacttaaaattcaccaagaattttggtacagagaa

SEQ ID NO: 510866 - DNA, 120 bp, Artificial Sequence
  ENSG00000164327_30 (sequence is synthesized)
tcacagagaaaatacaagccgagagaggttagtagtagaaagttcaacgagctcacatatgaagatacgtagccaaagtttcaatacagacactacaacaagtggcataagttcaatgag

SEQ ID NO: 510867 - DNA, 120 bp, Artificial Sequence
  ENSG00000164327_31 (sequence is synthesized)
ctcaagtccttcacgagagacagtaggtgtagatgctacaactatggacacagactgtggaagcatgagtactgtggtaagtactaaaactattaagacaagccactatttgacgccaca

SEQ ID NO: 510868 - DNA, 120 bp, Artificial Sequence
  ENSG00000164327_32 (sequence is synthesized)
gtctaaccatctgtctctctccaaatcaaattcggtgtccctggtgcctccaggttcttctcatacgcttcctagaagagcacagtcccttaaagcaccctctattgctacaattaaaag

SEQ ID NO: 510869 - DNA, 120 bp, Artificial Sequence
  ENSG00000164327_33 (sequence is synthesized)
tctagcagattgtaactttagttacacaagttctagagatgcttttggctatgctacactgaaaagactacagcaacaaagaatgcatccatccttatctcactctgaagctttggcatc

SEQ ID NO: 510870 - DNA, 120 bp, Artificial Sequence
  ENSG00000164327_34 (sequence is synthesized)
tccagcaaaagatgtgctatttactgataccatcaccatgaaggccaacagttttgagtccagattaacaccaagcaggttcatgaaagccttaagttatgcatcattagataaagaaga

SEQ ID NO: 510871 - DNA, 120 bp, Artificial Sequence
  ENSG00000164327_35 (sequence is synthesized)
tttattgagtcctattaatcaaaataccctgcaacgatcttcctcagtgcggtccatggtgtccagtgccacatatgggggttcagatgattacattggtcttgctctcccggtggatat

SEQ ID NO: 510872 - DNA, 120 bp, Artificial Sequence
  ENSG00000164327_36 (sequence is synthesized)
aaatgatatattccaggtaaaggatattccctattttcagacaaaaaacataccaccacatgatgatcgaggtgcaagagcatttgcccatgatgcaggaggtcttccatctggaactgg

SEQ ID NO: 510873 - DNA, 120 bp, Artificial Sequence
  ENSG00000164327_37 (sequence is synthesized)
aggtcttgtaaaaaattcttttcacttgctacgacagcagatgagtcttacggaaataatgaattcaatccattcagatgcctctctgtttttagaaagtacagaagacactggactaca

SEQ ID NO: 510874 - DNA, 120 bp, Artificial Sequence
  ENSG00000164327_38 (sequence is synthesized)
ggaacatacagatgataactgcctttattgtgtctgtattgaaattctgggtttccagcccagcaaccaactgagtgcaatatgtagtcattcagactttcaagatattccatattctga

SEQ ID NO: 510875 - DNA, 120 bp, Artificial Sequence
  ENSG00000164327_39 (sequence is synthesized)
cggggatttctggatgcagtgatggggtgtctcaagaaggctcagctagcagcaccaaaagcacagaattgttactaggtgttaaaacaattccagatgatacaccaatgtgccgtatac

SEQ ID NO: 510876 - DNA, 120 bp, Artificial Sequence
  ENSG00000164327_40 (sequence is synthesized)
tccttcgcaaagaagttctaagattagtcattaatttgagtagttcagtttcaactaaatgtcatgagactgggcttttaacaattaaggagaagtatcctcaaacatttgatgacatat

SEQ ID NO: 510877 - DNA, 120 bp, Artificial Sequence
  ENSG00000164327_41 (sequence is synthesized)
gcctttactctgaggtttcccatttgctgtcacactgcacattcagacttccgtgtcggaggttcatacaagaattatttcaagatgtacagtttctacaaatgcatgaagaagcagagg

SEQ ID NO: 510878 - DNA, 120 bp, Artificial Sequence
  ENSG00000164327_42 (sequence is synthesized)
ctgtgttggcaacaccaccaaagcaacctatagttgatacatctgctgaatcctgacctcatatttatgatggatatagatacatactatatatattcatatttgtggatttcctaaaag

SEQ ID NO: 510879 - DNA, 120 bp, Artificial Sequence
  ENSG00000164327_43 (sequence is synthesized)
cctcagaaaatacgactgactaggcagcaaagacaggagtatcttctgtacactgttccgcagttactggtacatgaacagttggaactgctgactttcctaaccaaaacaacttccttc

SEQ ID NO: 510880 - DNA, 120 bp, Artificial Sequence
  ENSG00000164327_44 (sequence is synthesized)
tctcctttgttgagccttttgaggggttcatgattcattaccacagttttaagagtttcagttaccattgtatgcaagagccaagcactgaatacctacataggttttctattttctttc

SEQ ID NO: 510881 - DNA, 120 bp, Artificial Sequence
  ENSG00000164327_45 (sequence is synthesized)
attttaaaagcataatgacagtggaacaataatgggatatgcagaagcacccttcacaagttatttctgaatgatttttagggtaaataatacagatgccttgtttgttaactaacttgt

SEQ ID NO: 510882 - DNA, 120 bp, Artificial Sequence
  ENSG00000164327_46 (sequence is synthesized)
ggaaagcaggaatcagtgtctctaaggctgcatcctattaccacaatggggtgtgctataactgctggtattagagagggaactttggccctttcacgtttttcttaatgtttgtaacac

SEQ ID NO: 510883 - DNA, 120 bp, Artificial Sequence
  ENSG00000164327_47 (sequence is synthesized)
tacttcagaggtttataacctcaaagcagaagaagagcctcaacaacccgggacttataagttatttttatgttactagacttgcataaagattcttgttttccaactcttcattttgtt

SEQ ID NO: 510884 - DNA, 120 bp, Artificial Sequence
  ENSG00000164327_48 (sequence is synthesized)
tgttgcaatgtgttattacaggatatatgaaccaattaaggtttttcactacagttcttgaataaaatttaaaaatcattttttattttaattaaaaatatttcccatttatagaatgca

SEQ ID NO: 510885 - DNA, 120 bp, Artificial Sequence
  ENSG00000164327_49 (sequence is synthesized)
tttgcaatggacttccactttcatcaactttccatctcatcgctttaaacaggaacttgaacaagcactgttagtttagacctaaaggataggaaagcattaaataatactttggatctc

SEQ ID NO: 510886 - DNA, 120 bp, Artificial Sequence
  ENSG00000164327_50 (sequence is synthesized)
ctgaggaaaagataagtttgcttgcaatttacacattccatggggaaagaagagccatatttccttaaaaaaaacattaataaagcttgttattgagaaaaattgtagtgaaaagcctta

SEQ ID NO: 510887 - DNA, 120 bp, Artificial Sequence
  ENSG00000164327_51 (sequence is synthesized)
agtaccaaattttaaagcagcagtaacttaatttttatatcagtgtttttgttttgcacaaactaaatgcagtggtaggtgggtttatgagtatattaattgcctttatccatttgtgaa

SEQ ID NO: 510888 - DNA, 120 bp, Artificial Sequence
  ENSG00000164327_52 (sequence is synthesized)
gttaagttgatgagggcaaggtttttgtttgtttaatttgtatatgtctaaaggtatttggaactttttacaggaattaaacatatatgcaaatttgtatataaaaatagcatggccatc

SEQ ID NO: 510889 - DNA, 120 bp, Artificial Sequence
  ENSG00000164327_53 (sequence is synthesized)
atttgaatgcttgtaaatgaaaggattatcttttttgagatctatatataaatagaaatagaaaatccagctggactgattaggattcttttttaattcatttgtgtataacatttttat

SEQ ID NO: 510890 - DNA, 120 bp, Artificial Sequence
  ENSG00000164327_54 (sequence is synthesized)
tacaattacacatcagttttgacacagtcatagcaacattaatattttcccatgatgcagatcctttttgtaatgggcttgttctttgagatctctgtaaagaaccctgtgaactagaaa

SEQ ID NO: 510891 - DNA, 120 bp, Artificial Sequence
  ENSG00000164327_55 (sequence is synthesized)
acataactcacagagatacttttttaaaaaatttatttactggaactgaaagttccagttgggatgaagcatttcatctcacttcataacacctctttgactgcacttcagtgaattgtt

SEQ ID NO: 510892 - DNA, 120 bp, Artificial Sequence
  ENSG00000164327_56 (sequence is synthesized)
cttatgtgcactgtgtagcaacttacattataacaaagcagataagggctgtaagctgctgcttatgttgaaaagtggttcttcagattttctctcataaaatccagttgaagataaata

SEQ ID NO: 510893 - DNA, 120 bp, Artificial Sequence
  ENSG00000164327_57 (sequence is synthesized)
atttttttatactttatcactgaacccaagtgtttatttaaatgtcaacagtacttctaagaacgttgcctgtcatcgtggtctttggtcttggataactaaactgcctttccagagaac

SEQ ID NO: 510894 - DNA, 120 bp, Artificial Sequence
  ENSG00000164327_58 (sequence is synthesized)
caaatgtcagagttactagaccaaatagtggttaaaacctccaaaggaagtaatgtaatcttattcataatgggattaacatattttagacattcattttaaacactacctcagttaata

SEQ ID NO: 510895 - DNA, 120 bp, Artificial Sequence
  ENSG00000164327_59 (sequence is synthesized)
tagagtataaaaatctgtggtttaatccctcaaaagttaacagtaattttttttttgtcttacacacacacacaccccctcccccaccatcactatccctgtaccctcaccttggtcatc

SEQ ID NO: 510896 - DNA, 84 bp, Artificial Sequence
  ENSG00000164327_60 (sequence is synthesized)
ctttgaaaaatatgtatgtataccttatcatatctgcctatatcacttactttggggagatactcagagctttgtggttatcag

SEQ ID NO: 510897 - DNA, 120 bp, Artificial Sequence
  ENSG00000164327_61 (sequence is synthesized)
acttactttggggagatactcagagctttgtggttatcagtatactaaaaaaaaaaaaaagtctacgcttaaatttatagtgctatttggtttctccatgatttcactgacaggtctaat

SEQ ID NO: 510898 - DNA, 120 bp, Artificial Sequence
  ENSG00000164327_62 (sequence is synthesized)
acattttctttgagtacttgtttgtaaaaagtagactttatggtgaaaaatacatgcagtgccaagtgattaacttaagtgtttaaaaatattaaattatagcagaagaggttaggaatg

SEQ ID NO: 510899 - DNA, 120 bp, Artificial Sequence
  ENSG00000164327_63 (sequence is synthesized)
aggttaggaatgatatcagcagtaatagaaataattgagaaaatcatctataaataatagatattacagactatagaataccaaaataatgtcaatactgtagtttttaaagattttagg

SEQ ID NO: 510900 - DNA, 120 bp, Artificial Sequence
  ENSG00000164327_64 (sequence is synthesized)
ccatataaatttgtactattggtaattattgaataattgggaggaatctgggcagttgtgctggttgtaaactatgaatttctaatcgtaaagtgaattgttatttctaattgaactttt

SEQ ID NO: 510901 - DNA, 120 bp, Artificial Sequence
  ENSG00000164327_65 (sequence is synthesized)
tttcaagaacagatttcagcctcacatactaagtaaatactgataaataaggaaattagaaatttagtattcataattaaatatgctctaaaatttcctatacttttatttcctgtttat

SEQ ID NO: 510902 - DNA, 120 bp, Artificial Sequence
  ENSG00000164327_66 (sequence is synthesized)
tcttaggtagattggaagggggaaacagtctgttctccctaattaaattttttctaataacgattagtagaatatggacattctatatgacagtgacattaaaagaggctctttggaagt

SEQ ID NO: 510903 - DNA, 120 bp, Artificial Sequence
  ENSG00000164327_67 (sequence is synthesized)
atatacattattaacataatgtgtacaagtccttttgaaatgacaactttaatgggtttcagctcttttatctagagcttgagataattcaagctgagtttttcagggcatatcacaacg

SEQ ID NO: 510904 - DNA, 120 bp, Artificial Sequence
  ENSG00000164327_68 (sequence is synthesized)
gccaagtgttcagcagtgggatatcaatgcttatttacattttcctactgctatttatataaaatgttattccattcagaggatgccttttatccccacattaaagcacagatcattaag

SEQ ID NO: 510905 - DNA, 120 bp, Artificial Sequence
  ENSG00000164327_69 (sequence is synthesized)
caataaaaaccaaattgtctgtcattcaaattataactgcagttatttttgcatggtaagagtgaggtgctaattttgtgtgagatgaactttgtaaactactttgggaaatgttctttg

SEQ ID NO: 510906 - DNA, 120 bp, Artificial Sequence
  ENSG00000164327_70 (sequence is synthesized)
gaagtaaggttttttctcctttagtcttatgcttccacttttgtctcagattcacaatccattaaaacatggggaaaaaagaaaaggtaaaattgagagacttttgttagaggagctatt

SEQ ID NO: 510907 - DNA, 120 bp, Artificial Sequence
  ENSG00000164327_71 (sequence is synthesized)
tggaatgaaccaacatttcagattttccaaaatgtaagttaggaagtctccattgtctctgcattaacaaaatacactgttactatcttaatctcaagagtgtcattacagtgagaatct

SEQ ID NO: 510908 - DNA, 120 bp, Artificial Sequence
  ENSG00000164327_72 (sequence is synthesized)
catttaaaagcataccagtgaaattaatagcagtgcttatcaaagaacactgaaatctgtgagaatctttctaggagcattcttttcttcttttagttccaagttccagggtatttttca

SEQ ID NO: 510909 - DNA, 120 bp, Artificial Sequence
  ENSG00000164327_73 (sequence is synthesized)
ttcctagtaggtttatatgactcacagaatgtggacttttttcctgtttggagtatttttgtaatgtaagtatcggatagctgcaccacagcatgcataaattgcacattttgttttact

SEQ ID NO: 510910 - DNA, 120 bp, Artificial Sequence
  ENSG00000164327_74 (sequence is synthesized)
ttctttatagaatatttaatttcaaaaatataatttatgccaaaaaaagcatacctttcaattttgctacttggttgatttagcacaaaatgcaaagtcttggggcagagagggggagtg

SEQ ID NO: 510911 - DNA, 120 bp, Artificial Sequence
  ENSG00000164327_75 (sequence is synthesized)
aaaaaaattttataggtaattgttacaaaaatacctgtcagaaaccctaaagctgcattgtaaaacaaatggtgtaaactagttttgaaaagtggtaaggaattgtgaaaaaaatctcag

SEQ ID NO: 510912 - DNA, 120 bp, Artificial Sequence
  ENSG00000164327_76 (sequence is synthesized)
acttaatgctctctaaccacatgagtttcttcttttttatttagtaatacgctgctacatatttggaggttctggtgtttgtaggtcactgaacagacattgaaatctgatttatattgt

SEQ ID NO: 510913 - DNA, 120 bp, Artificial Sequence
  ENSG00000164327_77 (sequence is synthesized)
ataactgtaacatagaaagaaaaagtatttatattttttctgtaagaatatttcattgagttgtgtataatttaaataagatttgtccccaaatggttttgctcaccttgattttttttg

SEQ ID NO: 510914 - DNA, 120 bp, Artificial Sequence
  ENSG00000164327_78 (sequence is synthesized)
ttgtgattttcttgtttttgtataatgtgtatagtttatgtcaagggcattaaaagcctcctgaagcataatcttatcaaagggatacattgttaataaaatgtacttaaaattcttaaa

SEQ ID NO: 510915 - DNA, 120 bp, Artificial Sequence
  ENSG00000164327_79 (sequence is synthesized)
taacaccaagcaggatcgattttaaaaagaagcatgtcgggggaatcaggagcttaagacctacaataacaaacaaccttttcaggttcatgaaagccttaagttatgcatcattagata

SEQ ID NO: 510916 - DNA, 120 bp, Artificial Sequence
  ENSG00000164327_80 (sequence is synthesized)
aggtgaaaaatattattagaaaatattagccaggtgtgccttgtttaaatgtgaaataaaaagtatttagataatggaaatggaaggatataattataaatggaaagatctgtaagcagc

SEQ ID NO: 510917 - DNA, 120 bp, Artificial Sequence
  ENSG00000164327_81 (sequence is synthesized)
ttcattcctggacctttaacagtgggaattaattataaaaaaaaaattatttcaggtgatgtgttttcctcattagttgttaatctagatcatatttttaaaatacagaagtaaatattt

SEQ ID NO: 510918 - DNA, 120 bp, Artificial Sequence
  ENSG00000164327_82 (sequence is synthesized)
aaatatttactacttagttaaaccctaaatataataggaatcatttaaaatattgctgttgtctgggcacggtggctcatgcgtgtaatcccagaactttgggaggccgaagtgggtgga

SEQ ID NO: 510919 - DNA, 67 bp, Artificial Sequence
  ENSG00000164327_83 (sequence is synthesized)
actccatctcaaaaaaaaaaaaaaaattgctgttgttaggaataatggctgtattaaaaattgagtt

SEQ ID NO: 510920 - DNA, 82 bp, Artificial Sequence
  ENSG00000164327_84 (sequence is synthesized)
actaaaaatacaaaaagttagccaggcacctgtaatcccagctacttaggtggtgggcacctgtaatcccaagtactcagga

SEQ ID NO: 510921 - DNA, 120 bp, Artificial Sequence
  ENSG00000164327_85 (sequence is synthesized)
tgagttgaaaatatgaactttattatgctttattcattaaaacaatataaacaacacacaagggcattctcactataaaaggttcaagcactacagactacgtttaacaaaaggtaaatg

SEQ ID NO: 510922 - DNA, 120 bp, Artificial Sequence
  ENSG00000164327_86 (sequence is synthesized)
tatttatgccttctaacttatgttttgtaatatgtggtgagattttattttaacgatggtggttttgattaaaatggaattgttaatatttctatatttattaggtatatttctaaatta

SEQ ID NO: 510923 - DNA, 120 bp, Artificial Sequence
  ENSG00000164327_87 (sequence is synthesized)
tttgtaagaatttgtattatacagttaaatcgaatttgaaggaaaagagaattcttaaagtgatttttttcctttctccttaaatgtttttatttgttttaattttgtttctttcttttg

SEQ ID NO: 510924 - DNA, 120 bp, Artificial Sequence
  ENSG00000164327_88 (sequence is synthesized)
cccttccttatatgaaccaaacctggaggtgaaaaatattattagaaaatattagccaggtgtgccttgtttaaatgtgaaataaaaagtatttagataatggaaatggaaggatataat

SEQ ID NO: 510925 - DNA, 120 bp, Artificial Sequence
  ENSG00000164327_89 (sequence is synthesized)
tataaatggaaagatctgtaagcaggtaacaaacttgagataattcacttcttactgtaataggtggaaaaagaacatggtctttggagagtctgaccaactggagtttaacctctggtt

SEQ ID NO: 510926 - DNA, 120 bp, Artificial Sequence
  ENSG00000164327_90 (sequence is synthesized)
ttatttacttttttgttagctccatgaccttgggacaattgcttttttgcacaattaggttaatgaaaaatttaatgactagattaagtgatgtatgtagtagtaagcatttagttatcc

SEQ ID NO: 510927 - DNA, 120 bp, Artificial Sequence
  ENSG00000164327_91 (sequence is synthesized)
cttctctaatataggccttatacagtttcaaaatatggtataatcatgcattggttaatgataggaatgtgttctaagaaactcactgttagatgatttcatcctgtgaacatcccagag

SEQ ID NO: 510928 - DNA, 120 bp, Artificial Sequence
  ENSG00000164327_92 (sequence is synthesized)
tttcatcctgtgaacatcccagagtacttacacagacctagatggtacagcctactacacacctaggttatgtggtatagcctgttgcttctaagctacaaacctgtatagcatgttact

SEQ ID NO: 510929 - DNA, 120 bp, Artificial Sequence
  ENSG00000164327_93 (sequence is synthesized)
gtaggcagttgtaacacaatggaattcgtgtatctaaacatctaaacatagaaaaggtacaataaaaatacagtataaaagattaaaaatactggccgggcacagtggctcacacctgta

SEQ ID NO: 510930 - DNA, 120 bp, Artificial Sequence
  ENSG00000164327_94 (sequence is synthesized)
tctgcatttattcgtaatggacttttagaggtaagacttataaaccttattttattccattttgtttattttctctaacagattctttcatgccaggtgtggtgactcacgcctgtaatc

SEQ ID NO: 510931 - DNA, 84 bp, Artificial Sequence
  ENSG00000164327_95 (sequence is synthesized)
gaccagcctgaccaacatggtgaaactgtgtctcaactaaaaatacaaaaattagccatgcatgatggcatcgagaattgcttg

SEQ ID NO: 510932 - DNA, 89 bp, Artificial Sequence
  ENSG00000164327_96 (sequence is synthesized)
cagctactcaggaggctgacacacatactgagctgagatcttgccgttgcattccagcctgggcaacagagcaagcctcttgtcttaaa

SEQ ID NO: 510933 - DNA, 120 bp, Artificial Sequence
  ENSG00000164327_97 (sequence is synthesized)
ccttcttaatcatccaaagactcgacagtatgtgcgagctgatgtagaattagaggtaggaactttaatattcttttctagttttaaaatattattataaatgtatacttttactttgaa

SEQ ID NO: 510934 - DNA, 120 bp, Artificial Sequence
  ENSG00000164327_98 (sequence is synthesized)
cagatcattcagtttggactgaattgaaaacattactcttaagaatatttcatcaatgtgtaaattttatttttgtattatctatgaaaagtttatgaaccaaattagagtacaaataaa

SEQ ID NO: 510935 - DNA, 120 bp, Artificial Sequence
  ENSG00000164327_99 (sequence is synthesized)
gttatgtaacaaatttacctatttaagattaccatttgtttttaaggcctttagtacattgtgtgtgaatagctcctgctaattatacaatatttatgaaacctaaaattatctgaagtt

SEQ ID NO: 510936 - DNA, 120 bp, Artificial Sequence
  ENSG00000164327_100 (sequence is synthesized)
ggaagcactttgttagcaactaattatatctacttgaaagaaagcatgtatgtatattttgtaaatacctcttaaattttttactgattcaagtaaggtttattacagttagtcaaaagt

SEQ ID NO: 510937 - DNA, 120 bp, Artificial Sequence
  ENSG00000164327_101 (sequence is synthesized)
aacagggctactgtataccttataagaaagtatgtcgtggaggttggaacagaattatgcactgtattatagtttcttcgtgtgcatgtattgcattgttgtcctttgaatatagtattt

SEQ ID NO: 510938 - DNA, 120 bp, Artificial Sequence
  ENSG00000164327_102 (sequence is synthesized)
ggagtcagcttaaatcaaggatttgtttgtatttaggtatgaaatcatgtgtgatataaaagattgattgtcccctaatttgtttttccaaatcattttttgaaacttaagtgttctgtt

SEQ ID NO: 510939 - DNA, 120 bp, Artificial Sequence
  ENSG00000164327_103 (sequence is synthesized)
tcaggactatttttaaaaatgcttcacattataaaattgacattagcctatattattaactaacaatgttagtataatagtcctaataagtgatttcaagtatattatttattggaatcc

SEQ ID NO: 510940 - DNA, 120 bp, Artificial Sequence
  ENSG00000164327_104 (sequence is synthesized)
atcctgtgggaataaactggcactgttgatattttataatatgtttagctttaattttttttcttatcaagtaagaaaactgtaattttaaaattggagagatgaataaaagataatatg

SEQ ID NO: 510941 - DNA, 120 bp, Artificial Sequence
  ENSG00000164327_105 (sequence is synthesized)
caactagtacaccataaaacaggctgccatttgttggaagtacaggtaaaaacataattcacttattttaagtagctacaatagtaaaaaaaaaacaaaatcttaacattgctaaaatat

SEQ ID NO: 510942 - DNA, 120 bp, Artificial Sequence
  ENSG00000164327_106 (sequence is synthesized)
attttgcaatttctcatgccaataaaaaagaatgcttcaattttacaagaagtattcaggttttgataatcattttttttaaaaaaaaacccaaactcagaatgtctaagtgtgtgacag

SEQ ID NO: 510943 - DNA, 120 bp, Artificial Sequence
  ENSG00000164327_107 (sequence is synthesized)
gaatatttaatattttatattctcaagtcatcaccccaagtatgccatctaatccatatctgtagggaaatctatttttaaagtaagtgataccttggaggaaaaatagatacatcatga

SEQ ID NO: 510944 - DNA, 120 bp, Artificial Sequence
  ENSG00000164329_0 (sequence is synthesized)
gtgttgctcctcccctggcagccgtgaggggggttagatctcagccggagccggagctgggcctagctgtcccacgggccaccactacctcctttggttcgggagaaagctacgaccaag

SEQ ID NO: 510945 - DNA, 120 bp, Artificial Sequence
  ENSG00000164329_1 (sequence is synthesized)
tacgcccagctcgggccttagaacttctgaacgggcagtgcgggtaggccctgcttagcccttcccggaggacacctgaccaaaagaggaagatagtcttgggacccttgcatggtgttt

SEQ ID NO: 510946 - DNA, 120 bp, Artificial Sequence
  ENSG00000164329_2 (sequence is synthesized)
caaagggtggtgaagaactaaggtagaagaatacatgttcacttccagtgaacaagagcatgttcccaaactcaattttgggtcgcccacccttcactccaaatcatcaacaacataata

SEQ ID NO: 510947 - DNA, 120 bp, Artificial Sequence
  ENSG00000164329_3 (sequence is synthesized)
acttctttaccctgtcacctactgtttattcacaccagcagcttatagatgcacaattcaactttcagaatgcagacttgtctagagctgtgtcattacagcagctgacatatggaaatg

SEQ ID NO: 510948 - DNA, 120 bp, Artificial Sequence
  ENSG00000164329_4 (sequence is synthesized)
tcagtccaatacagacctcagcttccccattatttcgaggaaggaagagattaagcgatgaaaaaaaccttcctcttgacggtaaacggcaacgtttccattcaccccaccaagagccaa

SEQ ID NO: 510949 - DNA, 120 bp, Artificial Sequence
  ENSG00000164329_5 (sequence is synthesized)
ctgtagttaaccagatagtgcctttatcaggtgaacgaagatactcaatgccaccattgtttcatacacattatgtaccagatatagtcagatgtgttccaccttttcgagaaattgcat

SEQ ID NO: 510950 - DNA, 120 bp, Artificial Sequence
  ENSG00000164329_6 (sequence is synthesized)
ttttagaacctagagaaatcacactgcctgaggccaaagataagttgagtcagcagatactggagttatttgaaacatgtcagcagcaaataagtgatttaaagaagaaagaactctgtc

SEQ ID NO: 510951 - DNA, 120 bp, Artificial Sequence
  ENSG00000164329_7 (sequence is synthesized)
gaacacagctgcagagagaaattcagctgttatttccacaaagcagactttttttggttgggtcctctttaaatggatttggtacccggagcagtgatggtgatttatgcctagttgtta

SEQ ID NO: 510952 - DNA, 120 bp, Artificial Sequence
  ENSG00000164329_8 (sequence is synthesized)
aggaagaaccatgtttttttcaggtaaatcagaagactgaagcacggcatatactcaccttagtccataaacacttctgtactagactttcgggctacattgagagacctcagctgattc

SEQ ID NO: 510953 - DNA, 120 bp, Artificial Sequence
  ENSG00000164329_9 (sequence is synthesized)
gagcaaaagtgccaattgtgaagttcagggataaagtcagttgtgtggagtttgacttgaatgtaaacaatattgttggaataagaaacacattccttctcagaacttatgcataccttg

SEQ ID NO: 510954 - DNA, 120 bp, Artificial Sequence
  ENSG00000164329_10 (sequence is synthesized)
aaaatcgagttcgtccgttagtgctggtgattaagaagtgggcaagtcaccatcagataaatgatgccagtcgtggtactttaagcagctatagtcttgtattgatggttttgcactatt

SEQ ID NO: 510955 - DNA, 120 bp, Artificial Sequence
  ENSG00000164329_11 (sequence is synthesized)
tacaaaccctacctgaacccatccttccatccctccaaaaaatttacccagagtcttttagtcctgctatacagctgcaccttgtacatcaagctccatgtaatgttcctccttacctct

SEQ ID NO: 510956 - DNA, 120 bp, Artificial Sequence
  ENSG00000164329_12 (sequence is synthesized)
caaagaatgaatcaaaccttggggacctcttactgggctttcttaaatattatgctacagaatttgactggaatagtcaaatgatttcagttcgtgaagccaaagccattccaaggcctg

SEQ ID NO: 510957 - DNA, 120 bp, Artificial Sequence
  ENSG00000164329_13 (sequence is synthesized)
aatggagaaataaatacatctgtgtagaagaaccttttgatggaacaaatacagccagagcagtgcacgaaaagcagaaatttgatatgatcaaggatcaatttttaaagtcatggcaca

SEQ ID NO: 510958 - DNA, 120 bp, Artificial Sequence
  ENSG00000164329_14 (sequence is synthesized)
gattgaaaaacaagagagatttgaacagtatactacctgtaagagctgctgtcctgaaaagataactggcctctatttcttaataaattcttccaagaaataaagaacaatagtttcatc

SEQ ID NO: 510959 - DNA, 120 bp, Artificial Sequence
  ENSG00000164329_15 (sequence is synthesized)
ataatacattatgtttacctccatcatagttgcttttttcatagttcttgttttcatgttttatttttaaaaagacatataaagattgcatattttattatgacatttcctaataaaccc

SEQ ID NO: 510960 - DNA, 120 bp, Artificial Sequence
  ENSG00000164329_16 (sequence is synthesized)
ctttgatttaaaaatgtatttttaaaaatgtttacattgatgatgagtaatattgcatgtgttttcaggtgatcagataaaatatattttgggaaattaactgaacaaataaaaagtttt

SEQ ID NO: 510961 - DNA, 120 bp, Artificial Sequence
  ENSG00000164329_17 (sequence is synthesized)
tgatataacttcaattaattgtaccacatgctaatcctgaagagatgtgtagaattttggaaagggtctaattcatacatgcttaaagtataacctacgttagatagtttgttgtcaaag

SEQ ID NO: 510962 - DNA, 120 bp, Artificial Sequence
  ENSG00000164329_18 (sequence is synthesized)
tctgttctagtaaagtgaagattcaagtcagttgttcagttacttgaagcaaaacgaaatctttcatttcagtcaaatcactgcagtcatgaaatactgaacaattgccttaagtctttg

SEQ ID NO: 510963 - DNA, 120 bp, Artificial Sequence
  ENSG00000164329_19 (sequence is synthesized)
cttgactcactgggatagactgaggctttgggtgtgtctgtattagcatttcattagtacttcacatgcttttgatgtactcttgagattgctttaaattttgtattgaaacaacaatac

SEQ ID NO: 510964 - DNA, 120 bp, Artificial Sequence
  ENSG00000164329_20 (sequence is synthesized)
attttgcactgtagtaatgggagcactaactcttacaacagttagtgaatcgttttaaagaatcagttcagtgtagacattttgaaaagattgtttcctgtgctttacgatagcttagtg

SEQ ID NO: 510965 - DNA, 120 bp, Artificial Sequence
  ENSG00000164329_21 (sequence is synthesized)
caatgtgcacttctgttttacttgccattttcctgctctgttttctctgtgacatgaagcaacagaaactgagatcaaagttaagattatatcctgtttgtagtatcagatatttttctg

SEQ ID NO: 510966 - DNA, 120 bp, Artificial Sequence
  ENSG00000164329_22 (sequence is synthesized)
tgtacaattataggattgtaatctaaactggaatttttaggcagtaagtcaccacaaaatgttttagataagacacaataaaattattataaataaaagcttaatgtttgtaaaaaatct

SEQ ID NO: 510967 - DNA, 120 bp, Artificial Sequence
  ENSG00000164329_23 (sequence is synthesized)
cttttttagtatttcttttttcacatgaaagaagtggtggctgctaaaaaaaaagctacagtgtttattaagggtctttttgatttatgtaaatatttgtaaattggtcagtgcctgtaa

SEQ ID NO: 510968 - DNA, 120 bp, Artificial Sequence
  ENSG00000164329_24 (sequence is synthesized)
atttaaatataaaaagtaaccttgaaaacagttttaactttttcaaaagaactatgtccaacattttttagacctgctgtagtacagttttgtacctctaacgtattttttttttgcaga

SEQ ID NO: 510969 - DNA, 120 bp, Artificial Sequence
  ENSG00000164329_25 (sequence is synthesized)
ccaaatgctaaaacttttgcttttctttgacttgtaaaaggtgcacattttcattttcttccttaagttcaaatttttgtatgatgtcaaatgcaataaaatttatatatggacattgtt

SEQ ID NO: 510970 - DNA, 120 bp, Artificial Sequence
  ENSG00000164329_26 (sequence is synthesized)
gggcagtgcgggaccaaaagaggaagatagtcttgggacccttgcatggtgtttcaaagggtggtgaagaactaaggggctccagagcttgatatatttctgggaatttggaatatgcta

SEQ ID NO: 510971 - DNA, 120 bp, Artificial Sequence
  ENSG00000164329_27 (sequence is synthesized)
cgctccccgctgcctattctcatccggggtcacgtcggtcttccgggtgtctttgacagggttttctacgccgctttttcggcgactttttgctcttccgctttttgccaccgcccccaa

SEQ ID NO: 510972 - DNA, 120 bp, Artificial Sequence
  ENSG00000164329_28 (sequence is synthesized)
ggggtttcggagaggaacgcagcagtgtaggcccaggtcggcggcggggcacgggaaacttttccgaaacggtagcgttttgttttgcgtgggaggttccagcagtatctcttggttatt

SEQ ID NO: 510973 - DNA, 120 bp, Artificial Sequence
  ENSG00000164329_29 (sequence is synthesized)
ccaaatttatgggcggcatctgggctgctgtacattttgaagaatcttaggaccgcttactttgcttactcgttttctattcctcgcgtactgcctcgtccaccactccaggaccaaaag

SEQ ID NO: 510974 - DNA, 120 bp, Artificial Sequence
  ENSG00000164329_30 (sequence is synthesized)
gtttgtttattaaaaattagcctttttttctttattcatttttaaagatgtttggcataaatagtgacatctctttagttgtgtttaagtatagtgtatcttattttatttgtatatgtt

SEQ ID NO: 510975 - DNA, 120 bp, Artificial Sequence
  ENSG00000164329_31 (sequence is synthesized)
gctacactaaaatcatatactgtcagttataggtgaatcaagtggcattttaataattgataatttttaaaaggtaactaaggtaagttttagacataagacacaaagtgaacagacaca

SEQ ID NO: 510976 - DNA, 120 bp, Artificial Sequence
  ENSG00000164329_32 (sequence is synthesized)
gtgtttaatatacacggagacagtgttctttgttttggtatggagctgggaaatgatgtaaactttcaaagaaactataacgtctcttaccatgttaagttttaattttactttcagttg

SEQ ID NO: 510977 - DNA, 120 bp, Artificial Sequence
  ENSG00000164329_33 (sequence is synthesized)
tacaaagagtcttttagtcctgctatacagctgcaccttgtacatcaagctccatgtaatgttcctccttacctctcaaagaatgaatcaaaccttggggacctcttactgggctttctt

SEQ ID NO: 510978 - DNA, 120 bp, Artificial Sequence
  ENSG00000164329_34 (sequence is synthesized)
tgcaaatactggtgaagtctttagtggaagaaaaatttcaggtttccaaattgccaaatagagtaaatttcttctctctttttcaaagaggagcctagttcaggatttataaagtttctt

SEQ ID NO: 510979 - DNA, 120 bp, Artificial Sequence
  ENSG00000164329_35 (sequence is synthesized)
ttagtataaataatgtattaatcaaaaatatttaatatcctggattaagtagaacgtgcctttttttgttgcaatgtttaaagtactattcagcctaattttctgtccaaacattacttt

SEQ ID NO: 510980 - DNA, 120 bp, Artificial Sequence
  ENSG00000164329_36 (sequence is synthesized)
tttcacttgtagagatcatgtatataatatatgtatttttcactcatagagatcacacttatcgaatgcatccaagccccgtgtatcatgttgcaaagcatttccacacataagactctg

SEQ ID NO: 510981 - DNA, 120 bp, Artificial Sequence
  ENSG00000164329_37 (sequence is synthesized)
taattatgatttctacagttaccatgataccttactgtgtgctgtaccaaaattagctattccctctgctgctagcctagatatattttcactcttacagtggtctaatgaacttctcta

SEQ ID NO: 510982 - DNA, 120 bp, Artificial Sequence
  ENSG00000164329_38 (sequence is synthesized)
cacttgtattctttttcaaagacgttttcttaaattattttagcttagtaaatactattttttaaaaaatgtgcgttggaacactgtgaattctagaaacatttgcagctattcacatta

SEQ ID NO: 510983 - DNA, 120 bp, Artificial Sequence
  ENSG00000164329_39 (sequence is synthesized)
tcttttgtctttcagcgggctacattgagagacctcagctgattcgagcaaaagtgccaattgtgaagttcagggataaagtcagttgtgtggagtttgacttgaatgtaaacaatattg

SEQ ID NO: 510984 - DNA, 120 bp, Artificial Sequence
  ENSG00000164329_40 (sequence is synthesized)
tttattattttcctaagggtaggtctttgaccctctgtaatttttcagaaaccttatccacatttatgatttagacttaacacacctatgctgatgactttcatttttgatcaccctctc

SEQ ID NO: 510985 - DNA, 120 bp, Artificial Sequence
  ENSG00000164329_41 (sequence is synthesized)
ccttgaattctatctaccttattaggcagttcatagtatatcaagcttttctgtatacataaatctaataaagatattaggctgacccatctgaaattgcaatttttgtaggttaaaaac

SEQ ID NO: 510986 - DNA, 120 bp, Artificial Sequence
  ENSG00000164329_42 (sequence is synthesized)
gaaggaattatatataaccttgagtgttctctaatttgttggaggagaggtcaagttgaggacagaaattccaggttgcaaattccaggaccaaatactttataactagaaattactagg

SEQ ID NO: 510987 - DNA, 76 bp, Artificial Sequence
  ENSG00000164330_0 (sequence is synthesized)
cctgcttcttcaagtgaagggtacctctacaaaaggaaactccagcccctcctgtcctccaccggcctgtgatccc

SEQ ID NO: 510988 - DNA, 120 bp, Artificial Sequence
  ENSG00000164330_1 (sequence is synthesized)
aaaccaaaaatcaaccaaccaaacaacccccaacagccaagcatacatctctaattttattattttggtcttttcgttggattttccctttcttctttttttcgggttatcgctcagttt

SEQ ID NO: 510989 - DNA, 120 bp, Artificial Sequence
  ENSG00000164330_2 (sequence is synthesized)
tgagcagaggtttacattttttaaaaatttgctttccagcccgccttgatcttctaagtgcgagttcatcgtctgagaaaaaaaaaaatctctggttggcgtttttgtttcttttctttt

SEQ ID NO: 510990 - DNA, 120 bp, Artificial Sequence
  ENSG00000164330_3 (sequence is synthesized)
tcctttttttttttttttaatttttttcaagggggaggagattttccacaagaaaaggttgttttcatgtttgggattcaggaaagcatccaacggagtggaagcagcatgaaggaagag

SEQ ID NO: 510991 - DNA, 120 bp, Artificial Sequence
  ENSG00000164330_4 (sequence is synthesized)
atgaaggaagagccgctgggcagcggcatgaacgcggtgcggacgtggatgcagggcgccggggtgctggacgccaacacggcggcgcagagcggggtgggtctggcccgggctcacttt

SEQ ID NO: 510992 - DNA, 120 bp, Artificial Sequence
  ENSG00000164330_5 (sequence is synthesized)
gagaagcagccgccttccaatctgcggaaatccaacttcttccacttcgtcctggccctctacgacagacagggccagcccgtggagatcgagaggacagcgtttgtggggttcgtggag

SEQ ID NO: 510993 - DNA, 120 bp, Artificial Sequence
  ENSG00000164330_6 (sequence is synthesized)
aaggaaaaagaagccaacagcgaaaagaccaataacggaattcactaccggcttcagcttctctacagcaatgggataaggacggagcaggatttctacgtgcgcctcattgactccatg

SEQ ID NO: 510994 - DNA, 120 bp, Artificial Sequence
  ENSG00000164330_7 (sequence is synthesized)
acaaaacaagccatagtgtatgaaggccaagacaagaacccagaaatgtgccgagtcttgctcacacatgagatcatgtgcagccgctgttgtgacaagaaaagctgtggcaaccgaaat

SEQ ID NO: 510995 - DNA, 120 bp, Artificial Sequence
  ENSG00000164330_8 (sequence is synthesized)
gagactccctcagatccagtgataattgacaggttcttcttgaaatttttcctcaaatgtaaccaaaattgcctaaagaatgcgggaaacccacgtgacatgcggagattccaggtcgtg

SEQ ID NO: 510996 - DNA, 120 bp, Artificial Sequence
  ENSG00000164330_9 (sequence is synthesized)
gtgtctacgacagtcaatgtggatggccatgtcctggcagtctctgataacatgtttgtccataataattccaagcatgggcggagggctcggaggcttgacccctcggaaggtacgccc

SEQ ID NO: 510997 - DNA, 120 bp, Artificial Sequence
  ENSG00000164330_10 (sequence is synthesized)
tcttatctggaacatgctactccctgtatcaaagccatcagcccgagtgaaggatggacgacgggaggtgcgactgtgatcatcataggggacaatttctttgatgggttacaggtcata

SEQ ID NO: 510998 - DNA, 120 bp, Artificial Sequence
  ENSG00000164330_11 (sequence is synthesized)
ttcggtaccatgctggtctggagtgagttgatcactcctcatgccatccgtgtgcagacccctcctcggcacatccctggtgttgtggaagtcacactgtcctacaaatctaagcagttc

SEQ ID NO: 510999 - DNA, 120 bp, Artificial Sequence
  ENSG00000164330_12 (sequence is synthesized)
tgcaaaggaacaccaggcagattcatttatacagcgctcaacgaacccaccatcgattatggtttccagaggttacagaaggtcattcctcggcaccctggtgaccctgagcgtttgcca

SEQ ID NO: 511000 - DNA, 120 bp, Artificial Sequence
  ENSG00000164330_13 (sequence is synthesized)
aaggaagtaatactcaaaagggctgcggatctggtagaagcactgtatgggatgccacacaacaaccaggaaatcattctgaagagagcggccgacattgccgaggccctgtacagtgtt

SEQ ID NO: 511001 - DNA, 120 bp, Artificial Sequence
  ENSG00000164330_14 (sequence is synthesized)
ccccgcaaccacaaccaactcccggcccttgctaacacctcggtccacgcagggatgatgggcgtgaattcgttcagtggacaactggccgtgaatgtctccgaggcatcacaagccacc

SEQ ID NO: 511002 - DNA, 120 bp, Artificial Sequence
  ENSG00000164330_15 (sequence is synthesized)
aatcagggtttcacccgcaactcaagcagcgtatcaccacacgggtacgtgccgagcaccactccccagcagaccaactataactccgtcaccacgagcatgaacggatacggctctgcc

SEQ ID NO: 511003 - DNA, 120 bp, Artificial Sequence
  ENSG00000164330_16 (sequence is synthesized)
gcaatgtccaatttgggcggctcccccaccttcctcaacggctcagctgccaactccccctatgccatagtgccatccagccccaccatggcctcctccacaagcctcccctccaactgc

SEQ ID NO: 511004 - DNA, 120 bp, Artificial Sequence
  ENSG00000164330_17 (sequence is synthesized)
agcagctcctcgggcatcttctccttctcaccagccaacatggtctcagccgtgaaacagaagagtgctttcgcaccagtcgtcagaccccagacctccccacctcccacctgcaccagc

SEQ ID NO: 511005 - DNA, 120 bp, Artificial Sequence
  ENSG00000164330_18 (sequence is synthesized)
accaacgggaacagcctgcaagcgatatctggcatgattgttcctcctatgtgaaagaattgccttgaagaattgtattaatgaagaggttggattctgctacagagagtaatctgatac

SEQ ID NO: 511006 - DNA, 120 bp, Artificial Sequence
  ENSG00000164330_19 (sequence is synthesized)
aagtcccagagtggaacttttaactcaggcctttttaagaggaatcacaataactgcagatttttaaacaaacaaaatcaccgaccttgcaaatactgaaattggaagagggatctgcaa

SEQ ID NO: 511007 - DNA, 120 bp, Artificial Sequence
  ENSG00000164330_20 (sequence is synthesized)
gtgcagggtgttggttaaagttgtacctcccaagtatttgggggatatatttattctgtattgacaaaagcaaatccactttttctttttcttttttttttttaagcttaattctgcaat

SEQ ID NO: 511008 - DNA, 120 bp, Artificial Sequence
  ENSG00000164330_21 (sequence is synthesized)
catttgtcttttataaaccgtaaagctctatacaagggacactataaataagactccatgttttaatttatgatgtttttaaagctgtgtaaaggaagaatgaagtggtgatatttacaa

SEQ ID NO: 511009 - DNA, 120 bp, Artificial Sequence
  ENSG00000164330_22 (sequence is synthesized)
aaaagaaaaaaaggaaaaaaaaaaaagcttgtatgggacagaataggaatgccagttagattttttagaaaaactaagggtcggcttttgcgccttaaagcatatcaaatggtagttagc

SEQ ID NO: 511010 - DNA, 120 bp, Artificial Sequence
  ENSG00000164330_23 (sequence is synthesized)
atggtagttagctcagacagtgcattttcaatatctaacttaacatgccaccccttagcagtgcaagcttatttatctcttttgtattgttgtcttaagcaactgtgtaaataaatgcag

SEQ ID NO: 511011 - DNA, 120 bp, Artificial Sequence
  ENSG00000164330_24 (sequence is synthesized)
cctggaaagttaaaacgcgatgtaagtgatcacatttttccctctactcgaaaatccagtgcctctagacagattgttaaaactgcatatttaaatctgatctcattctctccttttact

SEQ ID NO: 511012 - DNA, 120 bp, Artificial Sequence
  ENSG00000164330_25 (sequence is synthesized)
taagtcagtttcttctgaagccgatggcctctcgagagcttggtggcacacatactgtgtgagaatctcctttgagacttcatggaacagggtccaggcacagaattccacactctgccc

SEQ ID NO: 511013 - DNA, 120 bp, Artificial Sequence
  ENSG00000164330_26 (sequence is synthesized)
tccagttaacaagccaaaacctcacgtacgctcccccatttgcaagtttaaagtttactcgtcctaaatgcagacttcatacctatcttccaaaagttgataaaagcaacgtggcaggta

SEQ ID NO: 511014 - DNA, 120 bp, Artificial Sequence
  ENSG00000164330_27 (sequence is synthesized)
ttttcgattttcccattccagatactgcctctatcagtcgacccttaccatttgtaacataatagattgaaacaacaggttaagtgctttggaattaagagttaaagggaaccgggggtg

SEQ ID NO: 511015 - DNA, 120 bp, Artificial Sequence
  ENSG00000164330_28 (sequence is synthesized)
gagaaaggaaaagaaggttgagacctccaaaacatagttttctgttctatgggaatttttgctctcattatctgggaagtgttcttaaaaataagaattaatagcaaagatgcagcaaag

SEQ ID NO: 511016 - DNA, 120 bp, Artificial Sequence
  ENSG00000164330_29 (sequence is synthesized)
ctctgaggatgcatttgcctgatatttttttctttgctcttgtgtttttgtatgtagttataaatactgtagattttttttttgtgattttttgccaaagttgttgttctatttatacat

SEQ ID NO: 511017 - DNA, 120 bp, Artificial Sequence
  ENSG00000164330_30 (sequence is synthesized)
tttaatgtcttaagacattttttcaatatcacaaaaagattttactgcgtattttgcaaagaaaaaaagctcactacctttagcttgcacatacttgcaaagttaattaaaaggcttttt

SEQ ID NO: 511018 - DNA, 120 bp, Artificial Sequence
  ENSG00000164330_31 (sequence is synthesized)
gttttaaaggggattttgtaaaatatccatataaataatgtatttatctttcgaatttgtacattgcttttcccttcttcctcttccttccacccccaatttattttattgtgtatgttt

SEQ ID NO: 511019 - DNA, 120 bp, Artificial Sequence
  ENSG00000164330_32 (sequence is synthesized)
gctacgtgaaaagtgcgtatttgtttggtcacctacacttgtattagctgtttcaatgtgatttttaaacatttcatttatagttatttttagtattgttataaaccatgcttcagtttt

SEQ ID NO: 511020 - DNA, 120 bp, Artificial Sequence
  ENSG00000164330_33 (sequence is synthesized)
tttaatttccacccaaaagtcattgtctatttttgtattatttgtaagttaagaagttttttccaatatatggcaaaaaaaaaaaaatagtagcatattattcttgtagtatttagttca

SEQ ID NO: 511021 - DNA, 120 bp, Artificial Sequence
  ENSG00000164330_34 (sequence is synthesized)
gtagatttaaaaaaaaatgtatcctttgctttggaagcttacaaaacaaccctaatgctgttttactctattaatatgcatggaatctctccctttggagtgacgcattttgtgcattaa

SEQ ID NO: 511022 - DNA, 120 bp, Artificial Sequence
  ENSG00000164330_35 (sequence is synthesized)
attctagggagaaacttcatagaaatcaatgaacatactttctttcttaagtctgcttgtatatttcctctgtctttcacataaatataaaccagcagattggatgccttaacaatgcaa

SEQ ID NO: 511023 - DNA, 120 bp, Artificial Sequence
  ENSG00000164330_36 (sequence is synthesized)
cagcagattggatgccttaacaatgcaaatcatattcatttcacttgtacattgtaactgtgcaccagaactgtcagtcatcactaacattctaagaaaaaagaaaaagaaaaaaagaaa

SEQ ID NO: 511024 - DNA, 120 bp, Artificial Sequence
  ENSG00000164330_37 (sequence is synthesized)
caaaagaactgttttgttaccttaagacaatgtaactttttctagtagagcaagaaatcatttacaacaatgctgcaactgtgcatgcccccatatggattttgcaatggttttcactag

SEQ ID NO: 511025 - DNA, 120 bp, Artificial Sequence
  ENSG00000164330_38 (sequence is synthesized)
gctgtcaagagtgcgatttttatgggttggggtgggtgggggaggggagttgtgggagggtaggggagggaggaaagctgtttttcatggtgagaaataataatgatgactaataataat

SEQ ID NO: 511026 - DNA, 120 bp, Artificial Sequence
  ENSG00000164330_39 (sequence is synthesized)
aaaaaaaactggaaaatgtaagcaaggtggacgcattgcttctcggtactcagaaaggttatctgaatttgcgtggtaagcgctggcctgaagatgtacacaagttaaagccatatttta

SEQ ID NO: 511027 - DNA, 120 bp, Artificial Sequence
  ENSG00000164330_40 (sequence is synthesized)
tctggtgagccccttaactgtttctgaaggaatgaacggtcagccgggaaggtgtccggcttagaccttgacaacagacactacccatctgtcagccatgtgcagtggttagaactcttc

SEQ ID NO: 511028 - DNA, 120 bp, Artificial Sequence
  ENSG00000164330_41 (sequence is synthesized)
ttgaaagtccaaagagcctttaaaatgtgtataatttgtgttttgttgcttctatttctattgattagatgaaaagacattctggccctctgatcctctttcttctccacaaaagtttta

SEQ ID NO: 511029 - DNA, 120 bp, Artificial Sequence
  ENSG00000164330_42 (sequence is synthesized)
caaataaaagatgttcccctaaatacagaatatggctttaagaagaaaatgaaatgaagaattaaattaagatttcagtgttgggggaaaaaatacagcttctggatgactggattgcat

SEQ ID NO: 511030 - DNA, 120 bp, Artificial Sequence
  ENSG00000164330_43 (sequence is synthesized)
aacattgccctggcctcacattgtactaggatgcagcttaaatgaagtcatctctaaatctactaacctttcaccttcttatcaaaactttttgaatagacacacactgtacagttcaat

SEQ ID NO: 511031 - DNA, 120 bp, Artificial Sequence
  ENSG00000164330_44 (sequence is synthesized)
tgttagagaacctaactactgtagagattgttaaattttttttttttttttgcaaaaattcaagctgtaaaaacttttcaactttcacaatatttaattaaagttacttcctgtctgtga

SEQ ID NO: 511032 - DNA, 120 bp, Artificial Sequence
  ENSG00000164330_45 (sequence is synthesized)
taccggcttcagcttctctacagcaatggtgaggcccgggtcgggtctatggcctcaccctggggctccgggtctgggcagggggcgcagggagctccaggtggacgaaatcctccagcg

SEQ ID NO: 511033 - DNA, 120 bp, Artificial Sequence
  ENSG00000164330_46 (sequence is synthesized)
agagcttgaggggttcctggagggtggctgctgcggcgagacgccgagcatgttttccatccattcccacctgccctgctagctgagacgtgagattcgaggggtgccggaatataactg

SEQ ID NO: 511034 - DNA, 120 bp, Artificial Sequence
  ENSG00000164330_47 (sequence is synthesized)
tgggaattatggttggtttgggtgtcttctgaacttttggtactaaacatttgccatctgtaaacacttactggacttacaatgattggagaagacacaggcatgtttgtagcaaaggga

SEQ ID NO: 511035 - DNA, 120 bp, Artificial Sequence
  ENSG00000164330_48 (sequence is synthesized)
attgggtagatgcaataacagtgcacttcacagtgaactctgccagcaccgcgggcagtcatggggagaccccatcttggggttctgagtcttggctctgggagagcccctctcccccac

SEQ ID NO: 511036 - DNA, 120 bp, Artificial Sequence
  ENSG00000164330_49 (sequence is synthesized)
ctccttctttgagcagggagaggttaagcctggccattaacccataggtgacccaaatagaattatctgtcccagggatccgttgattgccagccgctgttgtgacaagaaaagctgtgg

SEQ ID NO: 511037 - DNA, 120 bp, Artificial Sequence
  ENSG00000164330_50 (sequence is synthesized)
tcttttgggagagagggagcagtcaggaacagggggcggaggagggatcacaattggccacaatttctgctgctaccgtggctgcctggctcgccagcgggggtcccggcttggggaaag

SEQ ID NO: 511038 - DNA, 120 bp, Artificial Sequence
  ENSG00000164330_51 (sequence is synthesized)
tgcaccagcaccaacgggaacagcctgcaagatcagtcttttgtggactctagcaagttctccagtgcagggtctctcccgggactggccttctcctgaacgatatctggcatgattgtt

SEQ ID NO: 511039 - DNA, 120 bp, Artificial Sequence
  ENSG00000164331_0 (sequence is synthesized)
gcttcctctgctctggtgacccagaaccgtcaactgaaatgaccctgtctgtgtagtactccggcaggatgggcctcggagcgtaaaggcggcaaaaacaaaaatattaaaaaaaaggag

SEQ ID NO: 511040 - DNA, 120 bp, Artificial Sequence
  ENSG00000164331_1 (sequence is synthesized)
agagggacaaaaaaaagaaaacccgaaagtttcagctgcattgctgcggaacgttttttagccagaaggcgaaagaagaaatcggaagtgacgtcgcggccaaaacaagcccgggcttgg

SEQ ID NO: 511041 - DNA, 120 bp, Artificial Sequence
  ENSG00000164331_2 (sequence is synthesized)
aggcctgtactgaagctggcctcagatgggaaggcccgactcgctgtctgctgtcgtcggtggtcgcgagaccttgcactctcaccgggtcggcctccagcccctgtgcccgggatccgc

SEQ ID NO: 511042 - DNA, 120 bp, Artificial Sequence
  ENSG00000164331_3 (sequence is synthesized)
tcgccgcggatgagcgagagtttcttcctgggacttttcgggcacagctggccggtggcgacagaacggactttctttcctgcaagagtctcccctccagcgggagacagcgggctcctg

SEQ ID NO: 511043 - DNA, 120 bp, Artificial Sequence
  ENSG00000164331_4 (sequence is synthesized)
tctcgggacgctgggacacctgtcgcctatttttaaatatccagattccaagaacacactggatactgctcttacaaaaccaagaggaaatcatgaagaaatgttttagttattgaaact

SEQ ID NO: 511044 - DNA, 120 bp, Artificial Sequence
  ENSG00000164331_5 (sequence is synthesized)
acagttgaaatcatggatacatcaacaaatctggatattggagcccagcttatcgtggaagagtgtcccagcacttatagcctaactggcatgccagacattaaaatagaacatccactg

SEQ ID NO: 511045 - DNA, 120 bp, Artificial Sequence
  ENSG00000164331_6 (sequence is synthesized)
gacccaaattcagaagaagggtcagctcagggtgttgccatgggaatgaaattcatattgcctaaccgatttgatatgaatgtgtgttctcgatttgtgaagtccttaaatgaagaagat

SEQ ID NO: 511046 - DNA, 120 bp, Artificial Sequence
  ENSG00000164331_7 (sequence is synthesized)
agtaaaaatattcaagatcaggttaactctgacctggaggtggcatctgtcctatttaaagctgaatgcaatatccatacatctccttctccgggaattcaagtaaggcatgtctacacc

SEQ ID NO: 511047 - DNA, 120 bp, Artificial Sequence
  ENSG00000164331_8 (sequence is synthesized)
ccctctacaacaaagcatttctcacccataaaacagtcaaccactttaaccaacaaacacagaggaaatgaggtctctaccacacctctgttagcaaattctttgtctgttcaccagttg

SEQ ID NO: 511048 - DNA, 120 bp, Artificial Sequence
  ENSG00000164331_9 (sequence is synthesized)
ctgctcagggagagatgctctatctggctactcgtatcgaacaagaaaatgttatcaatcacacggatgaagaaggatttactcctctgatgtgggctgcagcacacgggcaaatagctg

SEQ ID NO: 511049 - DNA, 120 bp, Artificial Sequence
  ENSG00000164331_10 (sequence is synthesized)
tggtagagttcctacttcagaatggtgctgatccccaacttttaggaaaaggtcgagaaagtgcactgtcgttggcctgtagtaaaggctacacagatattgtcaaaatgctgcttgatt

SEQ ID NO: 511050 - DNA, 120 bp, Artificial Sequence
  ENSG00000164331_11 (sequence is synthesized)
gtggagttgatgtaaatgaatatgattggaatggaggaacacctctgctttatgctgtacatggaaatcatgtgaaatgtgtaaagatgctcttagaaagtggggctgatccaacaattg

SEQ ID NO: 511051 - DNA, 120 bp, Artificial Sequence
  ENSG00000164331_12 (sequence is synthesized)
aaactgactctggatataattctatggatctagctgtagccctaggctatagaagtgttcaacaggttattgagtcacatttgttgaagctgcttcaaaatatcaaggagtagacacagt

SEQ ID NO: 511052 - DNA, 120 bp, Artificial Sequence
  ENSG00000164331_13 (sequence is synthesized)
catcagaaaatgtctgcccttttgtttacttcttggtccttataaatgatagttttgtttacttataaatttttacctcagttgcaatatttactggtttttagtaggttttaataaata

SEQ ID NO: 511053 - DNA, 120 bp, Artificial Sequence
  ENSG00000164331_14 (sequence is synthesized)
taaatgtaatactctttttataactatgttttactgtatatttaaaattataaattaatgttttcgtggcatgtaaatttttatggtacagatagttatcatcagtctttgtatcaagtg

SEQ ID NO: 511054 - DNA, 120 bp, Artificial Sequence
  ENSG00000164331_15 (sequence is synthesized)
tagttatcatcagtctttgtatcaagtgctgtaatttgacattttcagaaattattctaccctagtcatcttcactcgtgtattaagtcattcactttatatagggtttgctataaatcc

SEQ ID NO: 511055 - DNA, 120 bp, Artificial Sequence
  ENSG00000164331_16 (sequence is synthesized)
ctagaaaaaaattgttcttattgttgaataaaaaagtgcacagtgtgattgtttacaaaatgatattataaataaataaaatacttcttctgtcagtttgcatactacttttttaagtat

SEQ ID NO: 511056 - DNA, 120 bp, Artificial Sequence
  ENSG00000164331_17 (sequence is synthesized)
ataagattattaaagatttctttcagatttttaatttcacccttctgtcctgccgtaacacttcattagatcaaacaatatatgtaattaaaataaactgaatctaagtcaatcaacaaa

SEQ ID NO: 511057 - DNA, 120 bp, Artificial Sequence
  ENSG00000164331_18 (sequence is synthesized)
atattcaagatcaggttaactctgacctggaggtggcatctgtcctatttaaaggttgaaagttatgctgaatgcaatatccatacatctccttctccgggaattcaagtaaggcatgtc

SEQ ID NO: 511058 - DNA, 120 bp, Artificial Sequence
  ENSG00000164331_19 (sequence is synthesized)
aaacaaattcaataggatttattagatttgttattgttttattttaatataagaaagtcctaaagacaaaaacaaatagttacataaactcaccaggcagataacccaatggatagtaaa

SEQ ID NO: 511059 - DNA, 120 bp, Artificial Sequence
  ENSG00000164331_20 (sequence is synthesized)
gtcctatttaaaggttgaaagttatggtataaatatctgcatttgtttttgtttttgtatatttgggttattttcccaatcatgagattttgagtttgggaagacagtttagaagtcatt

SEQ ID NO: 511060 - DNA, 120 bp, Artificial Sequence
  ENSG00000164331_21 (sequence is synthesized)
gactccagagtgaaaggataattaggattgatacaggacggaggaaggaaggcatccaggcaatctcaataaaagcatccatgagtaaaagtttccattatttctttattaagcccagaa

SEQ ID NO: 511061 - DNA, 120 bp, Artificial Sequence
  ENSG00000164331_22 (sequence is synthesized)
cattaccaggcctagtgttgaactataattattgttgacaggaataacaatattcttgtttaaactaattgagaagtcttttatctctacttcccataccagggtgctgatccccaactt

SEQ ID NO: 511062 - DNA, 120 bp, Artificial Sequence
  ENSG00000164331_23 (sequence is synthesized)
gtatttcttttcaaatgtagacattgacatagaactcttactgaaatgcttttaatgtgtttacatttgtttttcacttagctgaatgcaatatccatacatctccttctccgggaattc

SEQ ID NO: 511063 - DNA, 120 bp, Artificial Sequence
  ENSG00000164332_0 (sequence is synthesized)
acttccggtcgctttcggtctctcagcggccggtttctgcgtccgctgccgcaggttccaccgcgctccaggtatttttttttctgaaggaaagctgcttcctcatatgtttcaagaatg

SEQ ID NO: 511064 - DNA, 120 bp, Artificial Sequence
  ENSG00000164332_1 (sequence is synthesized)
gctctccctatcattgtaaaatggggtggacaggagtattcagtgaccacactttcagaagatgatactgtgctcgatctcaaacagtttctcaagacccttacaggagttcttccagaa

SEQ ID NO: 511065 - DNA, 120 bp, Artificial Sequence
  ENSG00000164332_2 (sequence is synthesized)
cgccaaaagttacttggactcaaagttaaaggcaaacctgcagaaaatgatgttaagcttggagctctcaaactgaaaccaaatactaaaatcatgatgatgggaactcgtgaggagagc

SEQ ID NO: 511066 - DNA, 120 bp, Artificial Sequence
  ENSG00000164332_3 (sequence is synthesized)
ttggaagatgtcttaggtccaccccctgacaatgatgatgttgttaatgactttgatattgaagatgaagtagttgaagtagaaaatagggaagaaaacctactgaaaatttctcgcaga

SEQ ID NO: 511067 - DNA, 120 bp, Artificial Sequence
  ENSG00000164332_4 (sequence is synthesized)
gtgaaagagtacaaagtggaaattttgaatcctcccagggaagggaaaaagcttttggtgctagatgttgattatacattatttgaccacaggtcttgtgcagagactggggtagaatta

SEQ ID NO: 511068 - DNA, 120 bp, Artificial Sequence
  ENSG00000164332_5 (sequence is synthesized)
atgcggccatatcttcatgaatttctaacatctgcctatgaagattatgacattgttatttggtctgcaacaaatatgaagtggattgaagctaaaatgaaagagctgggagtgagcaca

SEQ ID NO: 511069 - DNA, 120 bp, Artificial Sequence
  ENSG00000164332_6 (sequence is synthesized)
aatgcaaattataagattactttcatgttggatagtgctgctatgataacagtacatactccaaggagaggattaatagacgtaaagcctcttggtgttatatggggaaagttttcggag

SEQ ID NO: 511070 - DNA, 120 bp, Artificial Sequence
  ENSG00000164332_7 (sequence is synthesized)
ttttacagcaagaaaaacaccattatgtttgatgacatagggagaaattttctaatgaacccacagaatggactaaagataaggccttttatgaaagcgcacctaaatcgtgataaagac

SEQ ID NO: 511071 - DNA, 120 bp, Artificial Sequence
  ENSG00000164332_8 (sequence is synthesized)
aaagaacttttaaaattaactcagtacctcaaggagatagcaaaattagatgactttttggatctaaatcacaaatattgggaaagatatctctcaaagaagcaaggacagtagttacaa

SEQ ID NO: 511072 - DNA, 120 bp, Artificial Sequence
  ENSG00000164332_9 (sequence is synthesized)
aagatacttaagatccaagaacttcttgcttttatgctagaaatcattatgatagtgctggacactgaagcaaataccatactgcttatacttggtcttccagttttttgtaaatttaat

SEQ ID NO: 511073 - DNA, 120 bp, Artificial Sequence
  ENSG00000164332_10 (sequence is synthesized)
tttatattttttgaagatgatagcaatatgctaaaaaatgcttgtcccctatatgaatattctgttacgcttgaaaaatattttctccagcgttggttactgaccaccccaccctcccac

SEQ ID NO: 511074 - DNA, 120 bp, Artificial Sequence
  ENSG00000164332_11 (sequence is synthesized)
cacacacacacacacacacacacaaagtggagaaaaatgtatactcaacaatgtcattttgtgactttggaaacaagttatgttttgtgtttttgtctcattgtgttattgtctgactaa

SEQ ID NO: 511075 - DNA, 120 bp, Artificial Sequence
  ENSG00000164332_12 (sequence is synthesized)
ggaaacaagttatgttttgtgtttttgtctcattgtgttattgtctgactaaatctaaaaccaaacccatgttgaaactagtacttttccctttaaaaacaaaccaaaaaaaaaaacaaa

SEQ ID NO: 511076 - DNA, 120 bp, Artificial Sequence
  ENSG00000164332_13 (sequence is synthesized)
ttgctatgcttaaaattaccaagaattttttatttctttgtcatagacacaatttctcttctgtatgccactagttacatttctaaattctgagcggtctcagttaggcctgtatgtgtg

SEQ ID NO: 511077 - DNA, 120 bp, Artificial Sequence
  ENSG00000164332_14 (sequence is synthesized)
tacatgtccaagtaaagctggaaaatgtcagtcttgacacagctgtgtcttagtatgagaaacagaagactgaagaataaaaactaaggaacaagaatgagtctctttttggtggctaag

SEQ ID NO: 511078 - DNA, 120 bp, Artificial Sequence
  ENSG00000164332_15 (sequence is synthesized)
tagaatcttcctaaaaccattgtcataaaagcagttaaaggcaataaatttttaaaagggacatatcactgattcattcctaaaaagcatgaacaaaaagtttttgttctgttccagcta

SEQ ID NO: 511079 - DNA, 120 bp, Artificial Sequence
  ENSG00000164332_16 (sequence is synthesized)
tatcttgtctaagtgctaacactgtttcagtgaaaatatctagccataagattaaaaaaatatattatttgcaatgcttaagcctgcagatacgtaatgtgaccactgttttgtgttgac

SEQ ID NO: 511080 - DNA, 120 bp, Artificial Sequence
  ENSG00000164332_17 (sequence is synthesized)
aatattgctttatacagttcttgtatttgaaaggaattgatccttttaaagaaacatggtgtatattgttcttacaggactaatttcagtggtgtaaataataaatatcttttcttaaaa

SEQ ID NO: 511081 - DNA, 120 bp, Artificial Sequence
  ENSG00000164332_18 (sequence is synthesized)
tattctgtcttgaagacacactgcagtaagtttacttttatcaatatttaaaagaaaattaccataagtatgctagggactgttaattctgatgcatttaaacttttagttttgcttaga

SEQ ID NO: 511082 - DNA, 120 bp, Artificial Sequence
  ENSG00000164334_0 (sequence is synthesized)
aaccttaacagccctgcagtgtagtgggcactgggcagtgctgctccttcactaagcggtctgagttctttagctatctcggagattcaactacgtttactcgtactgaatctttttaat

SEQ ID NO: 511083 - DNA, 120 bp, Artificial Sequence
  ENSG00000164334_1 (sequence is synthesized)
gaatttcctgagagccaagaagggccaatctacaggaaaaagtgggaggtggacattaagcatcttctagaaactcttctagctgatatcatgaaacgacgacaaaagaggaaacatttg

SEQ ID NO: 511084 - DNA, 120 bp, Artificial Sequence
  ENSG00000164334_2 (sequence is synthesized)
gaaaatgaagagtcccaggaaaccgctgagaagggaggaggaatgtcaaagtcccaagaggatgccctgcagcctggatccactagagtggccaaaggctggagccaaggggtgggagaa

SEQ ID NO: 511085 - DNA, 120 bp, Artificial Sequence
  ENSG00000164334_3 (sequence is synthesized)
gttacttctacctccgaatactgctcctgcgtttcttcttcacgcaagctcatccacagtggaatccagagaatacatcgagacagcccccagcctcaatcacccctggcccaggttcag

SEQ ID NO: 511086 - DNA, 120 bp, Artificial Sequence
  ENSG00000164334_4 (sequence is synthesized)
gaacgaggagagactcctccccgctcacaacatgtctccttgtcgtcctattcatcctataagacttgtgtgtcctctctgtgtgtaaacaaagaggaaaggggcatgaaaatatactac

SEQ ID NO: 511087 - DNA, 120 bp, Artificial Sequence
  ENSG00000164334_5 (sequence is synthesized)
ttggagtccttagaaaagcagccaaggatggaagaagtgaccctttctgaggttgtgagggtaggtactcccccctctgatgtgtccaccagaaacctcctgtctgacagtgagcccagt

SEQ ID NO: 511088 - DNA, 120 bp, Artificial Sequence
  ENSG00000164334_6 (sequence is synthesized)
ggggaggagaaagagcatgaggaaaggacagaatcagacagcctgccaggctcacccaccgttgaggacacacccagagccaagactcctgactggctggtgaccatggagaacggcttc

SEQ ID NO: 511089 - DNA, 120 bp, Artificial Sequence
  ENSG00000164334_7 (sequence is synthesized)
aggtgcatggcctgctgccgggtgttcaccaccatggaagccctccaggagcatgtgcagtttgggatcagagagggcttcagctgccacgtctttcatctcaccatggctcagctgaca

SEQ ID NO: 511090 - DNA, 120 bp, Artificial Sequence
  ENSG00000164334_8 (sequence is synthesized)
ggcaacatggaatcagagagcacccaagatgagcaggaggaggaaaatggaaatgagaaggaggaggaagagaaaccagaagcaaaggaggaggaggggcagcccacagaagaagacctt

SEQ ID NO: 511091 - DNA, 120 bp, Artificial Sequence
  ENSG00000164334_9 (sequence is synthesized)
ggcctgaggagatcctggagccaatgtccaggctgtgtgtttcattctccaaaggacaggaactgagacttatgggccagaagatactggaagatggtgtggccttctcttgcaagaggg

SEQ ID NO: 511092 - DNA, 120 bp, Artificial Sequence
  ENSG00000164334_10 (sequence is synthesized)
agaagaaagagccatggagatagtagcagacaggctgcccaaggtatgaagcagatgagggaccagcactcagtctaacatgtaaacatcatacgtaataaaggttgtgtttcaaacctt

SEQ ID NO: 511093 - DNA, 120 bp, Artificial Sequence
  ENSG00000164338_0 (sequence is synthesized)
acgtcatcttcgcgcgacgttcggttcgctgtgtgtgtcgccggctccttgagggtccatgtgatttttacgccagtgctgctgaactgtgcagggtagggagctggcacagtccgatta

SEQ ID NO: 511094 - DNA, 120 bp, Artificial Sequence
  ENSG00000164338_1 (sequence is synthesized)
attgtccttgggtcgaggtgtctcgtcggaccctttggggctcagtggagaattaaggcagagtcactgtaattatttctaataccaattccaaaatagtgactcttggacaatagtgca

SEQ ID NO: 511095 - DNA, 120 bp, Artificial Sequence
  ENSG00000164338_2 (sequence is synthesized)
attatatggaattatggctggttataagcctgtagctattcagacatatcctatacttggtgaaaaaatcacccaagatacactgtactggaacaactataagacccctgttcagattaa

SEQ ID NO: 511096 - DNA, 120 bp, Artificial Sequence
  ENSG00000164338_3 (sequence is synthesized)
ggaatttggtgcagtttcaaaagtagacttttctcctcagcctccatataattatgctgtcacagcttcctcaagaattcacatttatggccgatactcccaagaacctataaaaacctt

SEQ ID NO: 511097 - DNA, 120 bp, Artificial Sequence
  ENSG00000164338_4 (sequence is synthesized)
ttctcgatttaaagacacagcatactgtgctacttttcgacaagatggtagattgcttgtggctggcagtgaagatggtggagttcaactttttgatataagtgggagggctcccctcag

SEQ ID NO: 511098 - DNA, 120 bp, Artificial Sequence
  ENSG00000164338_5 (sequence is synthesized)
gcagtttgaaggccatacaaaagcagttcatacagtagattttacagctgacaaatatcacgtggtctctggggctgatgattatacagttaaattatgggatattccaaactccaaaga

SEQ ID NO: 511099 - DNA, 120 bp, Artificial Sequence
  ENSG00000164338_6 (sequence is synthesized)
aattttgacatttaaagaacactctgattatgtgaggtgtggatgtgctagcaaacttaatccggatctctttataacaggatcatatgatcatactgtgaagatgtttgatgcacgaac

SEQ ID NO: 511100 - DNA, 120 bp, Artificial Sequence
  ENSG00000164338_7 (sequence is synthesized)
gagtgagagtgttctctccgttgagcatgggcagccagtggagagtgtcctacttttcccctctggaggtcttctggtgtcagcaggaggtcgttatgttaaagtctgggacatgttaaa

SEQ ID NO: 511101 - DNA, 120 bp, Artificial Sequence
  ENSG00000164338_8 (sequence is synthesized)
aggaggacaattgctagtatctttgaaaaatcatcacaaaaccgtgacatgtttatgtctaagcagctctggacagaggttactctctggctcactggataggaaggtgaaagtatacag

SEQ ID NO: 511102 - DNA, 120 bp, Artificial Sequence
  ENSG00000164338_9 (sequence is synthesized)
cacaacttcctacaaagtagtccacagttttgattatgcagcttcaattttgagtcttgcccttgcacatgaagatgagacaatagttgtaggaatgaccaatggaatactgagtgttaa

SEQ ID NO: 511103 - DNA, 120 bp, Artificial Sequence
  ENSG00000164338_10 (sequence is synthesized)
acatcggaaatctgaagcaaagaaggaatcacttcccagaagaagaaggcctgcatatcgaacctttattaaaggaaaaaattacatgaagcaacgggatgacattttgattaacaggcc

SEQ ID NO: 511104 - DNA, 120 bp, Artificial Sequence
  ENSG00000164338_11 (sequence is synthesized)
agcaaagaagcacctagaattgtatgacagggatctgaaacattttcggatctctaaggcactcgatagagttcttgatcccacttgtacaataaagacacccgagattacggtgtccat

SEQ ID NO: 511105 - DNA, 120 bp, Artificial Sequence
  ENSG00000164338_12 (sequence is synthesized)
cataaaggagttaaatcgaagaggagtccttgcaaatgcgcttgcaggtcgggatgagaaggaaatcagtcatgttcttaattttttgataaggaatctttctcagccaagatttgcccc

SEQ ID NO: 511106 - DNA, 120 bp, Artificial Sequence
  ENSG00000164338_13 (sequence is synthesized)
tgttttaatcaatgctgctgaaataattattgatatatatctgcctgtaattggtcagtcccctgtagttgataaaaagtttttactacttcaaggacttgtagaaaaagagattgatta

SEQ ID NO: 511107 - DNA, 120 bp, Artificial Sequence
  ENSG00000164338_14 (sequence is synthesized)
ccaaagagaattgttagaaaccttggggatgatggatatgctttttgccaccatgagaaggaaggaaggcacttctgtgttggaacacacatctgatggatttccagagaataagaagat

SEQ ID NO: 511108 - DNA, 120 bp, Artificial Sequence
  ENSG00000164338_15 (sequence is synthesized)
agaatcatagtgtctgctaaataagacatataagaactctgaagttggaatagatttgactgtattaaatgttggcgagagactctctttgatacattaaaaaaactgtttgcagaagca

SEQ ID NO: 511109 - DNA, 120 bp, Artificial Sequence
  ENSG00000164338_16 (sequence is synthesized)
gttctgtggaagagactggaataattatggccggaaaacaagtacccgttttaagtaagacatggttttccatgtaatattttgaattatagcatcttcacctagaagatctcaattgtc

SEQ ID NO: 511110 - DNA, 120 bp, Artificial Sequence
  ENSG00000164338_17 (sequence is synthesized)
ttagtcacagagtaggtttatctgggatggatattaattttaatacaggagtgttctgtatcaacatttgggttggtattcagatgggaattcaaatatgaatcctctctggagagggtc

SEQ ID NO: 511111 - DNA, 120 bp, Artificial Sequence
  ENSG00000164338_18 (sequence is synthesized)
caactgggaatcctgctaaaggagcaaagccttgtattacctctggaagacaacaaaaacaattggcaacaacaaaaagcctctttcttgactttaatcagtgcctttgggatttctagg

SEQ ID NO: 511112 - DNA, 120 bp, Artificial Sequence
  ENSG00000164338_19 (sequence is synthesized)
cccttgcttagcttgcttcctgtctccttgatatctacacttgtcttagatcacatgccctgcttcagctggtaatgggactgcatcggttccaagtgtggcaagtaagttttcggctct

SEQ ID NO: 511113 - DNA, 120 bp, Artificial Sequence
  ENSG00000164338_20 (sequence is synthesized)
gaagaactgacactagctagatttgtattcagagtgtgagagcaagctctacagatagaccttattggactacttttttttttttcttcatgcagcctttctaccaagttttcaccttgt

SEQ ID NO: 511114 - DNA, 120 bp, Artificial Sequence
  ENSG00000164338_21 (sequence is synthesized)
attcttcatatgtttcaagctaatcttgtagctaagctacctaatcctctgaaaactgttttctctgatttgtatttagattcctccccccattattcacaatcatattgtatttcggaa

SEQ ID NO: 511115 - DNA, 120 bp, Artificial Sequence
  ENSG00000164338_22 (sequence is synthesized)
ccccaatgcagagcagtttgctttgaaaaatagttgtttttaaaagtttaatgtaaataattattttttagaagttttttttttttttttaaagacagggtctcgctttatcgcccaggc

SEQ ID NO: 511116 - DNA, 88 bp, Artificial Sequence
  ENSG00000164338_23 (sequence is synthesized)
ttttttttttaaagacagggtctcgctttatcgcccaggctggagtacagtgatgcaatctcagtccactgcaacctctgccctcccg

SEQ ID NO: 511117 - DNA, 78 bp, Artificial Sequence
  ENSG00000164338_24 (sequence is synthesized)
agttttagtagagacggggtttcaccttaccgtgcctcccgaagtgcttggattacaggtgtgagccactgtgtccag

SEQ ID NO: 511118 - DNA, 120 bp, Artificial Sequence
  ENSG00000164338_25 (sequence is synthesized)
gtgtccagcctgtaactattatttttttataaagagagattcttattttcttggctttttgatgtatctgttcctgatagataatcattggctagtaactcctagtacactggtttcaca

SEQ ID NO: 511119 - DNA, 120 bp, Artificial Sequence
  ENSG00000164338_26 (sequence is synthesized)
gttgctacctctcctgcttttctctaattattacgccaactcaagtagttaaaaatcagtaagaaaaatgtcttgagctagaagaacccatagaggaagattttgtaatgcgaatctcct

SEQ ID NO: 511120 - DNA, 120 bp, Artificial Sequence
  ENSG00000164338_27 (sequence is synthesized)
ctcataattttagttctgtaaattcagggtttttttttgtttttttgttttttttaagccgaaaaaatgcttaatatgttccagtaagggtattaagtaaaaattaaataaacgtattaa

SEQ ID NO: 511121 - DNA, 120 bp, Artificial Sequence
  ENSG00000164338_28 (sequence is synthesized)
aacatattaaattaatttaacatttagactaacattaacatttaaattaatatgttaagtgaatatacttaatatattctagtacaggtatgcttggaaatagggcgtttccttttcatg

SEQ ID NO: 511122 - DNA, 120 bp, Artificial Sequence
  ENSG00000164338_29 (sequence is synthesized)
catgaattgatttcgtacagcacagtggcttataaggaaccagcagtgtttttccctgagtaattatgaacttagtcaagatcagaagctgggttttggggttgagaagagttcatttat

SEQ ID NO: 511123 - DNA, 120 bp, Artificial Sequence
  ENSG00000164338_30 (sequence is synthesized)
ttaaataaagtttctatttaaaaacctttttaaaaagttaacatcataaatattctgataatttgcatagtagtaaaaattagaagttgaaattctacctaaagctgtagttgccgtcaa

SEQ ID NO: 511124 - DNA, 120 bp, Artificial Sequence
  ENSG00000164338_31 (sequence is synthesized)
ttgtgtaacatgtgacaaaggttttcccatatgtcatttcatttgattctcaccacaaccatccaaggttgatgttattctcatttaacattgagttaacgaaagtagttgattcactct

SEQ ID NO: 511125 - DNA, 120 bp, Artificial Sequence
  ENSG00000164338_32 (sequence is synthesized)
cgaagtccctgagtgtgagctcttcatcctagcactgtgaagtggtttgcctgctggggcctaaactcctcattccctttaacaaagcttcactgagtgctgcagttctcaaaatatgta

SEQ ID NO: 511126 - DNA, 120 bp, Artificial Sequence
  ENSG00000164338_33 (sequence is synthesized)
tgcagttctcaaaatatgtaacagttaacacatttttcaaacaggttaggaagcaattcccatagccatcaatacttaaattcaggagtacttttttgtttgtttgttttgttttgtttt

SEQ ID NO: 511127 - DNA, 88 bp, Artificial Sequence
  ENSG00000164338_34 (sequence is synthesized)
tgcagcttctgtctcctaggctgaagctgctacagggatgagccaccatgcccagctaattttttattttgattttttgagataagag

SEQ ID NO: 511128 - DNA, 120 bp, Artificial Sequence
  ENSG00000164338_35 (sequence is synthesized)
tgcccagctaattttttattttgattttttgagataagaggtctcaccatgttgcccaggcctgaggcaatctcctggtttcaagcaatcttcccacctcagcctccttaatgactggga

SEQ ID NO: 511129 - DNA, 120 bp, Artificial Sequence
  ENSG00000164338_36 (sequence is synthesized)
ttaaaggcatgagccactgcgcccagcaggaatggttattatattcattgagataaactgtagtatttgctgtttgaagtatttaaacataattggcatattacaatatgtgacactggc

SEQ ID NO: 511130 - DNA, 120 bp, Artificial Sequence
  ENSG00000164338_37 (sequence is synthesized)
cttaagattctaatttaaaatgcttaacagacttttagacttatgagtttcagttgaaaggtattttaaaatgttactaagtctgcaaaagtactgaaatgtttcagagaacttggaaag

SEQ ID NO: 511131 - DNA, 120 bp, Artificial Sequence
  ENSG00000164338_38 (sequence is synthesized)
tcaccgtatgtttaatttattatgtttatgagatttaagcacttgggaaggtttatgctaatggggtcaagcatttgcaatgctgcttaaaagaatcatttttttaaatgtataaatgct

SEQ ID NO: 511132 - DNA, 120 bp, Artificial Sequence
  ENSG00000164338_39 (sequence is synthesized)
attaagttgtttaaaggaatttgaattgtaaatgggattgttaaaacaaatttagtctgttcaactcaatgagggcatttcattttctaggaacaaaataccctcttagacattaaaaag

SEQ ID NO: 511133 - DNA, 120 bp, Artificial Sequence
  ENSG00000164338_40 (sequence is synthesized)
ccgcatgcctgttccctcagctatagttaactggaccatggtggtacaactgactcaacccttctctaagcagggatttgtaattgggatttataatgaaattcctgatctgggaaaatg

SEQ ID NO: 511134 - DNA, 120 bp, Artificial Sequence
  ENSG00000164338_41 (sequence is synthesized)
ggaggctgggaatgctatgtctaggtcatcagcggagaaagttggtttgtagagaatgaacaagaatgaaacctaagtgcaaagaaaataaagattatcctgctttaatagttcagacta

SEQ ID NO: 511135 - DNA, 120 bp, Artificial Sequence
  ENSG00000164338_42 (sequence is synthesized)
ccagcttcatccctgcacattactggaaagcgtagttcacatggcactttattttgcttttctctacatcagaattatttctagattgctagattggggacattattgatgagtaatggg

SEQ ID NO: 511136 - DNA, 120 bp, Artificial Sequence
  ENSG00000164338_43 (sequence is synthesized)
gaacaaggactactttatgtaatactctgcatcataacataatgttataatgctttactgcattcaaaataatgtctttcacatactacctgatttgatctaaatcccaagaagtagtag

SEQ ID NO: 511137 - DNA, 120 bp, Artificial Sequence
  ENSG00000164338_44 (sequence is synthesized)
aaccaatcatgtccctgtttggcacctgagaagactgagcgacaaataatttgtgattgattcaggatttcattactggtatccagagttgttgagactagatctcattatctctgattg

SEQ ID NO: 511138 - DNA, 120 bp, Artificial Sequence
  ENSG00000164338_45 (sequence is synthesized)
gtcgaggtgtctcgtcggaccctttggggctcagtggaggtaggtgaaggcggctcccattgagggaagcccacactcacacccggccttcctgtgttaatctggcatgctcttctgggg

SEQ ID NO: 511139 - DNA, 120 bp, Artificial Sequence
  ENSG00000164338_46 (sequence is synthesized)
ttaagcttcgacctaggttcttctctgcgattacaccctttcctgtccaccgttgttagttcccggagtaatcagcaactctccaaggcaatggacacatttccatctttgcctttgctt

SEQ ID NO: 511140 - DNA, 120 bp, Artificial Sequence
  ENSG00000164338_47 (sequence is synthesized)
acgaggctccctcagaattaaggcagagtcactgtaattatttctaataccaattccaaaatagtgactcttggacaatagtgcaattatatggaattatggctggttataagcctgtag

SEQ ID NO: 511141 - DNA, 120 bp, Artificial Sequence
  ENSG00000164338_48 (sequence is synthesized)
agtgtgggacgtaatgagggagaagggatttgtgtttatgccaatttctctagcatatgttatactctggatgctctaacagagaattattaactgaaaaccatctatcagcagcttata

SEQ ID NO: 511142 - DNA, 120 bp, Artificial Sequence
  ENSG00000164338_49 (sequence is synthesized)
gtttgggcagataatttgatatctattttttcttggaattttatgtaaaagtccatactgcttaatcagattaaccatacaaatgcctagcacagaacagatgatcaatcaatgccaaat

SEQ ID NO: 511143 - DNA, 120 bp, Artificial Sequence
  ENSG00000164338_50 (sequence is synthesized)
ttctttcgccttctggctaaaaaacgttccgcagcaatgcagctgaaactttcgggttttcttttttttgtccctctctccttttttttaatatttttgtttttgccgcctttacgctcc

SEQ ID NO: 511144 - DNA, 120 bp, Artificial Sequence
  ENSG00000164338_51 (sequence is synthesized)
gaggcccatcctgccggagtactacacagacagggtcatttcagttgacggttctgggtcaccagagcagaggaagccccaatttcgccctccggtcacacctcctactccagatcgccc

SEQ ID NO: 511145 - DNA, 120 bp, Artificial Sequence
  ENSG00000164342_0 (sequence is synthesized)
tttcactttcgagagtgccgtctatttgccacacacttccctgatgaaatgtctggatttggactaaagaaaaaaggaaaggctagcagtcatccaacagaatcatgagacagactttgc

SEQ ID NO: 511146 - DNA, 120 bp, Artificial Sequence
  ENSG00000164342_1 (sequence is synthesized)
cttgtatctacttttgggggggccttttgccctttgggatgctgtgtgcatcctccaccaccaagtgcactgttagccatgaagttgctgactgcagccacctgaagttgactcaggtac

SEQ ID NO: 511147 - DNA, 120 bp, Artificial Sequence
  ENSG00000164342_2 (sequence is synthesized)
ccgatgatctacccacaaacataacagtgttgaaccttacccataatcaactcagaagattaccagccgccaacttcacaaggtatagccagctaactagcttggatgtaggatttaaca

SEQ ID NO: 511148 - DNA, 120 bp, Artificial Sequence
  ENSG00000164342_3 (sequence is synthesized)
ccatctcaaaactggagccagaattgtgccagaaacttcccatgttaaaagttttgaacctccagcacaatgagctatctcaactttctgataaaacctttgccttctgcacgaatttga

SEQ ID NO: 511149 - DNA, 120 bp, Artificial Sequence
  ENSG00000164342_4 (sequence is synthesized)
ctgaactccatctcatgtccaactcaatccagaaaattaaaaataatccctttgtcaagcagaagaatttaatcacattagatctgtctcataatggcttgtcatctacaaaattaggaa

SEQ ID NO: 511150 - DNA, 120 bp, Artificial Sequence
  ENSG00000164342_5 (sequence is synthesized)
ctcaggttcagctggaaaatctccaagagcttctattatcaaacaataaaattcaagcgctaaaaagtgaagaactggatatctttgccaattcatctttaaaaaaattagagttgtcat

SEQ ID NO: 511151 - DNA, 120 bp, Artificial Sequence
  ENSG00000164342_6 (sequence is synthesized)
cgaatcaaattaaagagttttctccagggtgttttcacgcaattggaagattatttggcctctttctgaacaatgtccagctgggtcccagccttacagagaagctatgtttggaattag

SEQ ID NO: 511152 - DNA, 120 bp, Artificial Sequence
  ENSG00000164342_7 (sequence is synthesized)
caaacacaagcattcggaatctgtctctgagtaacagccagctgtccaccaccagcaatacaactttcttgggactaaagtggacaaatctcactatgctcgatctttcctacaacaact

SEQ ID NO: 511153 - DNA, 120 bp, Artificial Sequence
  ENSG00000164342_8 (sequence is synthesized)
taaatgtggttggtaacgattcctttgcttggcttccacaactagaatatttcttcctagagtataataatatacagcatttgttttctcactctttgcacgggcttttcaatgtgaggt

SEQ ID NO: 511154 - DNA, 120 bp, Artificial Sequence
  ENSG00000164342_9 (sequence is synthesized)
acctgaatttgaaacggtcttttactaaacaaagtatttcccttgcctcactccccaagattgatgatttttcttttcagtggctaaaatgtttggagcaccttaacatggaagataatg

SEQ ID NO: 511155 - DNA, 120 bp, Artificial Sequence
  ENSG00000164342_10 (sequence is synthesized)
atattccaggcataaaaagcaatatgttcacaggattgataaacctgaaatacttaagtctatccaactcctttacaagtttgcgaactttgacaaatgaaacatttgtatcacttgctc

SEQ ID NO: 511156 - DNA, 120 bp, Artificial Sequence
  ENSG00000164342_11 (sequence is synthesized)
attctcccttacacatactcaacctaaccaagaataaaatctcaaaaatagagagtgatgctttctcttggttgggccacctagaagtacttgacctgggccttaatgaaattgggcaag

SEQ ID NO: 511157 - DNA, 120 bp, Artificial Sequence
  ENSG00000164342_12 (sequence is synthesized)
aactcacaggccaggaatggagaggtctagaaaatattttcgaaatctatctttcctacaacaagtacctgcagctgactaggaactcctttgccttggtcccaagccttcaacgactga

SEQ ID NO: 511158 - DNA, 120 bp, Artificial Sequence
  ENSG00000164342_13 (sequence is synthesized)
tgctccgaagggtggcccttaaaaatgtggatagctctccttcaccattccagcctcttcgtaacttgaccattctggatctaagcaacaacaacatagccaacataaatgatgacatgt

SEQ ID NO: 511159 - DNA, 120 bp, Artificial Sequence
  ENSG00000164342_14 (sequence is synthesized)
tggagggtcttgagaaactagaaattctcgatttgcagcataacaacttagcacggctctggaaacacgcaaaccctggtggtcccatttatttcctaaagggtctgtctcacctccaca

SEQ ID NO: 511160 - DNA, 120 bp, Artificial Sequence
  ENSG00000164342_15 (sequence is synthesized)
tccttaacttggagtccaacggctttgacgagatcccagttgaggtcttcaaggatttatttgaactaaagatcatcgatttaggattgaataatttaaacacacttccagcatctgtct

SEQ ID NO: 511161 - DNA, 120 bp, Artificial Sequence
  ENSG00000164342_16 (sequence is synthesized)
ttaataatcaggtgtctctaaagtcattgaaccttcagaagaatctcataacatccgttgagaagaaggttttcgggccagctttcaggaacctgactgagttagatatgcgctttaatc

SEQ ID NO: 511162 - DNA, 120 bp, Artificial Sequence
  ENSG00000164342_17 (sequence is synthesized)
cctttgattgcacgtgtgaaagtattgcctggtttgttaattggattaacgagacccataccaacatccctgagctgtcaagccactacctttgcaacactccacctcactatcatgggt

SEQ ID NO: 511163 - DNA, 120 bp, Artificial Sequence
  ENSG00000164342_18 (sequence is synthesized)
tcccagtgagactttttgatacatcatcttgcaaagacagtgccccctttgaactctttttcatgatcaataccagtatcctgttgatttttatctttattgtacttctcatccactttg

SEQ ID NO: 511164 - DNA, 120 bp, Artificial Sequence
  ENSG00000164342_19 (sequence is synthesized)
agggctggaggatatctttttattggaatgtttcagtacatcgagttcttggtttcaaagaaatagacagacagacagaacagtttgaatatgcagcatatataattcatgcctataaag

SEQ ID NO: 511165 - DNA, 120 bp, Artificial Sequence
  ENSG00000164342_20 (sequence is synthesized)
ataaggattgggtctgggaacatttctcttcaatggaaaaggaagaccaatctctcaaattttgtctggaagaaagggactttgaggcgggtgtttttgaactagaagcaattgttaaca

SEQ ID NO: 511166 - DNA, 120 bp, Artificial Sequence
  ENSG00000164342_21 (sequence is synthesized)
gcatcaaaagaagcagaaaaattatttttgttataacacaccatctattaaaagacccattatgcaaaagattcaaggtacatcatgcagttcaacaagctattgaacaaaatctggatt

SEQ ID NO: 511167 - DNA, 120 bp, Artificial Sequence
  ENSG00000164342_22 (sequence is synthesized)
ccattatattggttttccttgaggagattccagattataaactgaaccatgcactctgtttgcgaagaggaatgtttaaatctcactgcatcttgaactggccagttcagaaagaacgga

SEQ ID NO: 511168 - DNA, 120 bp, Artificial Sequence
  ENSG00000164342_23 (sequence is synthesized)
taggtgcctttcgtcataaattgcaagtagcacttggatccaaaaactctgtacattaaatttatttaaatattcaattagcaaaggagaaactttctcaatttaaaaagttctatggca

SEQ ID NO: 511169 - DNA, 120 bp, Artificial Sequence
  ENSG00000164342_24 (sequence is synthesized)
aatttaagttttccataaaggtgttataatttgtttattcatatttgtaaatgattatattctatcacaattacatctcttctaggaaaatgtgtctccttatttcaggcctatttttga

SEQ ID NO: 511170 - DNA, 120 bp, Artificial Sequence
  ENSG00000164342_25 (sequence is synthesized)
tacccaaaataaaacatataagcacgtaagaacattgtctactgattaatatacaatcagccactgagcctatgacagcttaaggagtttgaaaacattcctcattttaagaaaagttag

SEQ ID NO: 511171 - DNA, 120 bp, Artificial Sequence
  ENSG00000164342_26 (sequence is synthesized)
aggtatatgagggtttgtgatgatctttttgtattttggatgcacttagaatgaaagataattgtttcaatgggtataatgctatttcctttgtaaaagagtaaaatatatacccatatt

SEQ ID NO: 511172 - DNA, 120 bp, Artificial Sequence
  ENSG00000164342_27 (sequence is synthesized)
tttaacaagtttaattacagtattttttcaatggaaaaactttgtattttagtaagtacttgtctcagtgttgactttgttaaatgttaaatattttttaatatacatacccaagggcag

SEQ ID NO: 511173 - DNA, 120 bp, Artificial Sequence
  ENSG00000164342_28 (sequence is synthesized)
aaaacatttgcaattcatttttattagttaatgagatgattatttgaatgaatattgacttgtattttcctgagattatgagtttctgctgtgggagggtggaaacaattctcttactaa

SEQ ID NO: 511174 - DNA, 120 bp, Artificial Sequence
  ENSG00000164342_29 (sequence is synthesized)
aagtattgtaggcaggcttgctttctgaaggctaatcactatttggctttgtggaaacagaactttcctcccatggtcacagactcaggagatggcgttggcaaaatcacttggtcccac

SEQ ID NO: 511175 - DNA, 120 bp, Artificial Sequence
  ENSG00000164342_30 (sequence is synthesized)
tgggattctttgactcctgatcttgaaaattatgataataaatgcatcttagatattcctatgtaattagtgatgatgatcgctgtataatatattcaaaggaatgtattattttaccat

SEQ ID NO: 511176 - DNA, 86 bp, Artificial Sequence
  ENSG00000164342_31 (sequence is synthesized)
cgctgtataatatattcaaaggaatgtattattttaccataaaataatgtgctacgcataaggtagtccttatctagaaagactaa

SEQ ID NO: 511177 - DNA, 70 bp, Artificial Sequence
  ENSG00000164342_32 (sequence is synthesized)
tctgtcgcccaggctggagttcagtggtccaacctcggcccaccgcaacctccacctctgagttcaagct

SEQ ID NO: 511178 - DNA, 120 bp, Artificial Sequence
  ENSG00000164342_33 (sequence is synthesized)
caccgcgccccgcctttttattttgttttacaatacaacaaaaaatttttagttttacaataaaagagaatctgattattggaaatagacctgaatagctttttgaaatatttatagttc

SEQ ID NO: 511179 - DNA, 120 bp, Artificial Sequence
  ENSG00000164342_34 (sequence is synthesized)
tagtatttaaagagaaacctgaaattataaagctgagttaatttctatacctgaaatgttcatttgtctgctgaattcagggagcatttgagatgtcacattttggaactttgatttaaa

SEQ ID NO: 511180 - DNA, 120 bp, Artificial Sequence
  ENSG00000164342_35 (sequence is synthesized)
tagttcagtattcccaaggctgagttccatgaccctggaatgagaaatatccactgtacctctggttctgaagagtctatagtcggccaacactgtgaatgtgtggaggactaattgtca

SEQ ID NO: 511181 - DNA, 120 bp, Artificial Sequence
  ENSG00000164342_36 (sequence is synthesized)
ctttcatgttatttgccaccctgacagctgagacactgcttttcagcattttagttaagatttgctttttaactgtgcaataatcattttattttggcattataaaataaaaatcacaac

SEQ ID NO: 511182 - DNA, 120 bp, Artificial Sequence
  ENSG00000164342_37 (sequence is synthesized)
ttctgcttttcttatatgctttgtgtgttatcacacaaatattctcaaatattcataagatattttaaataaatcattgtgaattagtcaatatatcaagttgcttaatatgtcatatat

SEQ ID NO: 511183 - DNA, 120 bp, Artificial Sequence
  ENSG00000164342_38 (sequence is synthesized)
caatgctatttaatatataatatctatatttaatatattgatatgttactggtggagagtgtccaggttcttggtgctttgaacaaggaattggacaaaatgcacaaagaatgaggcgac

SEQ ID NO: 511184 - DNA, 120 bp, Artificial Sequence
  ENSG00000164342_39 (sequence is synthesized)
aaaagcagaggtttattgaaaacgaaagcacaccccgcagggtgggagcggcccgagcaagcagctcaaaagccgggttacaggattttctggggtttaaatactctctagaggtttcca

SEQ ID NO: 511185 - DNA, 120 bp, Artificial Sequence
  ENSG00000164342_40 (sequence is synthesized)
ttggttacttggtttatgccctatgtaaatgaagaggctaaagtgaaattacaaagttatttacttgttgtgcaccctacgcaaatgaatagctgtcacagctgaggtagagttacagtg

SEQ ID NO: 511186 - DNA, 120 bp, Artificial Sequence
  ENSG00000164342_41 (sequence is synthesized)
atttacttggtggtagaatgttgggatttttccatttgattgagttctaggaagcctttagtttccctgcctgcagaccccattctcctgcctcagatatatcaatgacatattcaatac

SEQ ID NO: 511187 - DNA, 120 bp, Artificial Sequence
  ENSG00000164342_42 (sequence is synthesized)
atcattaagttgcttaatatttaagaggttaagatgcacaggtaatgacctctaaatgaatgccaataaaaatagtaaaaggtgtaaactctgactcctatctgacctaggtaggaagta

SEQ ID NO: 511188 - DNA, 120 bp, Artificial Sequence
  ENSG00000164342_43 (sequence is synthesized)
acatccagaacttctgcaggctgtcctgtgtaattgttctccggaggaacccttgtccctggggtttgagagaaggggatcgaggaaaaggatgtttgtctgagctcttgtttgatttgc

SEQ ID NO: 511189 - DNA, 120 bp, Artificial Sequence
  ENSG00000164342_44 (sequence is synthesized)
ccaagtgacttgacttgtttgaatcctctcagggtgccatcatgtaatctgtccactccaacttcttcctgtttttcacattgcaaaacaaaacccaactgaatcgacactgagtttaaa

SEQ ID NO: 511190 - DNA, 120 bp, Artificial Sequence
  ENSG00000164342_45 (sequence is synthesized)
ataaatcttggtatttaggttgtacctaaaaatgataacttttagactgtaatcagaggtagatgctatcaatttgttagtgaggaggggaggagttttcgatgccacttagtttacaat

SEQ ID NO: 511191 - DNA, 120 bp, Artificial Sequence
  ENSG00000164342_46 (sequence is synthesized)
gtctaattgttcaaatatacatctaggttgtaaaggagactcaacggtaagttatagtgaccattgaaaaatgtaaaggggcttcaaatcaagaacttagaaggaatttcttgcaatcta

SEQ ID NO: 511192 - DNA, 120 bp, Artificial Sequence
  ENSG00000164342_47 (sequence is synthesized)
ttgagacacaaagcagatgagtggttgtctgggcctaggaacaggaatggggagtggctgcaaataggtggaagagaccttttttgggtgatgaaagtgctctataattgggttatggta

SEQ ID NO: 511193 - DNA, 120 bp, Artificial Sequence
  ENSG00000164342_48 (sequence is synthesized)
ataattgtacaactatgtaaatttactgaaagtcattgagttggacacttaaaacaggtgaattttatgatatgtaaattatatattcacaaagccattaaaaattgtattttttgagca

SEQ ID NO: 511194 - DNA, 120 bp, Artificial Sequence
  ENSG00000164342_49 (sequence is synthesized)
gacacaaccaggaactgccccaggagtgacttcacgagcagtttattcattgcaattgttctcatggtgataaagaaaaagtaccaggagatggatcctggactggaaggtcagagaagc

SEQ ID NO: 511195 - DNA, 120 bp, Artificial Sequence
  ENSG00000164342_50 (sequence is synthesized)
ctccctgaaaaggtggcatctaagctgaggctgtgaatgctgagcagaagttagcccgtggccaggggaggtcagaggctggagtaagaggtgggcgctgcaggaaccgattttctccag

SEQ ID NO: 511196 - DNA, 120 bp, Artificial Sequence
  ENSG00000164342_51 (sequence is synthesized)
aaggaaggactcgtgcattacaggaagggggagaaatgctctgcccatgggatgtggtgaagggtgagcggagatggagtaaagaactgcatctggccgggtgcagcggctcaggcctat

SEQ ID NO: 511197 - DNA, 62 bp, Artificial Sequence
  ENSG00000164342_52 (sequence is synthesized)
gctgaggcaggagaattgcttgaactgaggaggtggagtttgcagtgagctgagattgcact

SEQ ID NO: 511198 - DNA, 120 bp, Artificial Sequence
  ENSG00000164342_53 (sequence is synthesized)
aaaaaaaaaaaaaaaaaaaaaggctttcaacagcattacagagtctgtgttcttttgattgttaacctctttttttttcctacctttagttttctccagggtgttttcacgcaattggaa

SEQ ID NO: 511199 - DNA, 120 bp, Artificial Sequence
  ENSG00000164344_0 (sequence is synthesized)
agtgccacattagaacagcttgaagaccgttcatttttaagtgacaagagactcacctccaagaagcaattgtgttttcagaatgattttattcaagcaagcaacttatttcatttcctt

SEQ ID NO: 511200 - DNA, 120 bp, Artificial Sequence
  ENSG00000164344_1 (sequence is synthesized)
gtttgctacagtttcctgtggatgtctgactcaactctatgaaaacgccttcttcagaggtggggatgtagcttccatgtacaccccaaatgcccaatactgccagatgaggtgcacatt

SEQ ID NO: 511201 - DNA, 120 bp, Artificial Sequence
  ENSG00000164344_2 (sequence is synthesized)
ccacccaaggtgtttgctattcagttttcttccagcaagttcaatcaatgacatggagaaaaggtttggttgcttcttgaaagatagtgttacaggaaccctgccaaaagtacatcgaac

SEQ ID NO: 511202 - DNA, 120 bp, Artificial Sequence
  ENSG00000164344_3 (sequence is synthesized)
aggtgcagtttctggacattccttgaagcaatgtggtcatcaaataagtgcttgccatcgagacatttataaaggagttgatatgagaggagtcaattttaatgtgtctaaggttagcag

SEQ ID NO: 511203 - DNA, 120 bp, Artificial Sequence
  ENSG00000164344_4 (sequence is synthesized)
tgttgaagaatgccaaaaaaggtgcaccagtaacattcgctgccagtttttttcatatgccacgcaaacatttcacaaggcagagtaccggaacaattgcctattaaagtacagtcccgg

SEQ ID NO: 511204 - DNA, 120 bp, Artificial Sequence
  ENSG00000164344_5 (sequence is synthesized)
aggaacacctaccgctataaaggtgctgagtaacgtggaatctggattctcactgaagccctgtgccctttcagaaattggttgccacatgaacatcttccagcatcttgcgttctcaga

SEQ ID NO: 511205 - DNA, 120 bp, Artificial Sequence
  ENSG00000164344_6 (sequence is synthesized)
tgtggatgttgccagggttctcactccagatgcttttgtgtgtcggaccatctgcacctatcaccccaactgcctcttctttacattctatacaaatgtatggaaaatcgagtcacaaag

SEQ ID NO: 511206 - DNA, 120 bp, Artificial Sequence
  ENSG00000164344_7 (sequence is synthesized)
aaatgtttgtcttcttaaaacatctgaaagtggcacaccaagttcctctactcctcaagaaaacaccatatctggatatagccttttaacctgcaaaagaactttacctgaaccctgcca

SEQ ID NO: 511207 - DNA, 120 bp, Artificial Sequence
  ENSG00000164344_8 (sequence is synthesized)
ttctaaaatttacccgggagttgactttggaggagaagaattgaatgtgacttttgttaaaggagtgaatgtttgccaagagacttgcacaaagatgattcgctgtcagtttttcactta

SEQ ID NO: 511208 - DNA, 120 bp, Artificial Sequence
  ENSG00000164344_9 (sequence is synthesized)
ggagctctggttactctttgagattgtgtaacactggggacaactctgtctgcacaacaaaaacaagcacacgcattgttggaggaacaaactcttcttggggagagtggccctggcagg

SEQ ID NO: 511209 - DNA, 120 bp, Artificial Sequence
  ENSG00000164344_10 (sequence is synthesized)
tgagcctgcaggtgaagctgacagctcagaggcacctgtgtggagggtcactcataggacaccagtgggtcctcactgctgcccactgctttgatgggcttcccctgcaggatgtttggc

SEQ ID NO: 511210 - DNA, 120 bp, Artificial Sequence
  ENSG00000164344_11 (sequence is synthesized)
gcatctatagtggcattttaaatctgtcagacattacaaaagatacacctttctcacaaataaaagagattattattcaccaaaactataaagtctcagaagggaatcatgatatcgcct

SEQ ID NO: 511211 - DNA, 120 bp, Artificial Sequence
  ENSG00000164344_12 (sequence is synthesized)
tgataaaactccaggctcctttgaattacactgaattccaaaaaccaatatgcctaccttccaaaggtgacacaagcacaatttataccaactgttgggtaaccggatggggcttctcga

SEQ ID NO: 511212 - DNA, 120 bp, Artificial Sequence
  ENSG00000164344_13 (sequence is synthesized)
aggagaaaggtgaaatccaaaatattctacaaaaggtaaatattcctttggtaacaaatgaagaatgccagaaaagatatcaagattataaaataacccaacggatggtctgtgctggct

SEQ ID NO: 511213 - DNA, 120 bp, Artificial Sequence
  ENSG00000164344_14 (sequence is synthesized)
ataaagaagggggaaaagatgcttgtaagggagattcaggtggtcccttagtttgcaaacacaatggaatgtggcgtttggtgggcatcaccagctggggtgaaggctgtgcccgcaggg

SEQ ID NO: 511214 - DNA, 120 bp, Artificial Sequence
  ENSG00000164344_15 (sequence is synthesized)
agcaacctggtgtctacaccaaagtcgctgagtacatggactggattttagagaaaacacagagcagtgatggaaaagctcagatgcagtcaccagcatgagaagcagtccagagtctag

SEQ ID NO: 511215 - DNA, 120 bp, Artificial Sequence
  ENSG00000164344_16 (sequence is synthesized)
gcaatttttacaacctgagttcaagtcaaattctgagcctggggggtcctcatctgcaaagcatggagagtggcatcttctttgcatcctaaggacgaaaaacacagtgcactcagagct

SEQ ID NO: 511216 - DNA, 120 bp, Artificial Sequence
  ENSG00000164344_17 (sequence is synthesized)
gctgaggacaatgtctggctgaagcccgctttcagcacgccgtaaccaggggctgacaatgcgaggtcgcaactgagatctccatgactgtgtgttgtgaaataaaatggtgaaagatca

SEQ ID NO: 511217 - DNA, 120 bp, Artificial Sequence
  ENSG00000164344_18 (sequence is synthesized)
agaacagcttgaagaccgttcatttttaagtgacaagagactcacctccaagaagcaattgtgttttcagtttcctgtgagggagttttctctgtgtccccacaaggcatgattctgggt

SEQ ID NO: 511218 - DNA, 120 bp, Artificial Sequence
  ENSG00000164344_19 (sequence is synthesized)
gtggcttgatttacatttaatctctgcaatttattagagtcctgtagttggatttactttgaagagagtttcccagaagaataaaatttgctgcgttgctttttgggtgtgagctgcttt

SEQ ID NO: 511219 - DNA, 120 bp, Artificial Sequence
  ENSG00000164344_20 (sequence is synthesized)
ttagtgaagattgtgaagtggcaggttacagagttctaaaaggcactgaagccgtcatcattccctatgcattgcacagagatccgagatacttccccaaccccgaggagttccagcctg

SEQ ID NO: 511220 - DNA, 120 bp, Artificial Sequence
  ENSG00000164346_0 (sequence is synthesized)
actctttcctgtcccggcctgcgtggtgtgggcttgtgggtctttgagacccgaaaattgagagcgttttcgcactccagcggctgctcctggcggctctgcggccgtcaccatgccaca

SEQ ID NO: 511221 - DNA, 120 bp, Artificial Sequence
  ENSG00000164346_1 (sequence is synthesized)
gaatgaatatattgaattacaccgtaaacgctatggataccgtttggattaccatgagaaaaagagaaagaaggaaagtcgagaggctcatgaacgttcaaagaaggcaaagaaaatgat

SEQ ID NO: 511222 - DNA, 120 bp, Artificial Sequence
  ENSG00000164346_2 (sequence is synthesized)
tggtctgaaggctaagctttaccataaacagcgtcatgctgagaaaatacaaatgaaaaagactatcaagatgcatgaaaagagaaacaccaaacaaaagaatgatgaaaagacaccaca

SEQ ID NO: 511223 - DNA, 120 bp, Artificial Sequence
  ENSG00000164346_3 (sequence is synthesized)
gggagcagtacctgcctatctgctggacagagagggacaatctcgagctaaagtactttccaatatgattaaacagaaaagaaaagagaaggcgggaaaatgggaagtccctctgcctaa

SEQ ID NO: 511224 - DNA, 120 bp, Artificial Sequence
  ENSG00000164346_4 (sequence is synthesized)
agtacgtgcccagggagaaacagaagtattaaaagttattcgaacaggaaagagaaagaagaaggcatggaagagaatggttactaaagtgtgctttgttggagatggctttacaagaaa

SEQ ID NO: 511225 - DNA, 120 bp, Artificial Sequence
  ENSG00000164346_5 (sequence is synthesized)
accacctaaatatgaaagattcatcaggccaatgggcttgcgtttcaagaaagcccatgtaacacatcctgaactgaaagccaccttttgcctaccaatacttggtgtaaagaagaatcc

SEQ ID NO: 511226 - DNA, 120 bp, Artificial Sequence
  ENSG00000164346_6 (sequence is synthesized)
ctcatccccactgtatacaactttgggtgttattaccaaaggtactgtcattgaagtaaatgtgagcgaattgggccttgtgacacaaggaggcaaagttatttggggaaaatatgccca

SEQ ID NO: 511227 - DNA, 120 bp, Artificial Sequence
  ENSG00000164346_7 (sequence is synthesized)
ggttaccaacaatcctgaaaatgatggatgtataaatgcagtcttactggtttgacagcaatttcatatataattattgaggactacacaccaattgaagaaactgccattactgtgatg

SEQ ID NO: 511228 - DNA, 120 bp, Artificial Sequence
  ENSG00000164346_8 (sequence is synthesized)
tttctgaatactaccaaacagccatacatgtctgcaatgaagagatttattaaattgtaaacattaaagtggtccagttttataaatggtctttattttgaaatacgctttgaccccatg

SEQ ID NO: 511229 - DNA, 120 bp, Artificial Sequence
  ENSG00000164346_9 (sequence is synthesized)
ttcataaaactgaatgattgaaaaaaagcaaatatacaaatatcctacttcatcaatatctgcatttgtgagtgggtattcagcaatttcctgaaaaaaccaccagtgttcattgaaaat

SEQ ID NO: 511230 - DNA, 120 bp, Artificial Sequence
  ENSG00000164346_10 (sequence is synthesized)
gcctttcaaaaaggttaatacacaattatgtgtctgagaatttaactgaagtatcttcaaaatctcgttaatcattaatcctaaaaaaggtaggtagcattaatacagatgttaagttta

SEQ ID NO: 511231 - DNA, 120 bp, Artificial Sequence
  ENSG00000164346_11 (sequence is synthesized)
tagtgtttgtttacactagaagtatgtgagaagacactaaaagttcagaaatcttagagaaatcttttcacctgtgaaatccagtacagcaaaggtctagtgaattcacattctaaacat

SEQ ID NO: 511232 - DNA, 120 bp, Artificial Sequence
  ENSG00000164346_12 (sequence is synthesized)
ttttttcatctcatttaccatgtataataatacctacttggcactattttctacttgaatcatgaaaatgaaaaaaatatactaaagtctttgtactctcttagcattttctgtattcta

SEQ ID NO: 511233 - DNA, 120 bp, Artificial Sequence
  ENSG00000164346_13 (sequence is synthesized)
aacaatatatttatactttcagaatagtattaagaattagtttaagtaactccagctaagttttaaaaggaaaaagaagactgcactgattccctgaggagaaatttatttgcagttact

SEQ ID NO: 511234 - DNA, 120 bp, Artificial Sequence
  ENSG00000164346_14 (sequence is synthesized)
tagatgatgtaaaaaggtaaggatttacggttgtaacttggtgaaagcacttttgtgatctgttatatgttgtggttttaaggatggcgtatattacattaatctataatcaccacattg

SEQ ID NO: 511235 - DNA, 120 bp, Artificial Sequence
  ENSG00000164346_15 (sequence is synthesized)
ttttaaattgtttattttttttttaaagaagtctgtcttcagagtacaaccaatgtgattaattgtgcctttaacaaagtcattcaatgtctaaacaaattcagtatctgaaacatcttc

SEQ ID NO: 511236 - DNA, 120 bp, Artificial Sequence
  ENSG00000164346_16 (sequence is synthesized)
atgaggaaaactgaaggaaaggaatttaaaaacacagaccaggaaacaatcacaaaatataggtttaattactacttttaaacttaaaaaaaaataaaaaccaagaaaacaaacataggt

SEQ ID NO: 511237 - DNA, 120 bp, Artificial Sequence
  ENSG00000164346_17 (sequence is synthesized)
actccagtaagacttgctactctgaataatgtaacattttttctaagttctataaatatatactggaagttttagaacacatacagacgcttaggaaaagaaaggctagttccttggaaa

SEQ ID NO: 511238 - DNA, 120 bp, Artificial Sequence
  ENSG00000164346_18 (sequence is synthesized)
acaatcacttgatgacagaaggtaagcctttcttacaattagattttagcagataattttaccactaatataaatgggtgatgtgtggatcacaagttctagaaggcgaataaaaatact

SEQ ID NO: 511239 - DNA, 120 bp, Artificial Sequence
  ENSG00000164346_19 (sequence is synthesized)
gactccaggtaatttctggatactacaaaaatgaagtttgcttgttttttttagaaccaaaaatactatcttgtaaggtacaaagaaagcttgatattaagtatgaaaacataagcataa

SEQ ID NO: 511240 - DNA, 120 bp, Artificial Sequence
  ENSG00000164346_20 (sequence is synthesized)
catttgtaactaatcacacccatgaaagacgactagatgacacctgaaacatttttcaaaatactgtaacacagatgagtaatattagtataaattttttatgtacattaagatctgttt

SEQ ID NO: 511241 - DNA, 120 bp, Artificial Sequence
  ENSG00000164346_21 (sequence is synthesized)
cagtttgctggtgtgaccaaaccttagaaggtaatcccaagggataaagcagaacataagagcagatatttagatattagtacaggctcaatttgatgcaatcataaaccttcaagattt

SEQ ID NO: 511242 - DNA, 120 bp, Artificial Sequence
  ENSG00000164346_22 (sequence is synthesized)
ctagtcactgaaaccccattgtaggtagtgttctggagtctgctataagtaaatctttaatgactagatgttttccttaccatctacactgaatggaaataccatgaatatagacacatt

SEQ ID NO: 511243 - DNA, 120 bp, Artificial Sequence
  ENSG00000164346_23 (sequence is synthesized)
ttaagtagaagactgacgttctaaatcatgctgtttgattttataaaaaaatcataatagaccctctcacctttaaaagttgtagaggagctttataataaattcttaaatatactaatt

SEQ ID NO: 511244 - DNA, 120 bp, Artificial Sequence
  ENSG00000164346_24 (sequence is synthesized)
tctgtgatgtctagcaattgaataatttaaacttgaaagaactaaaatactaataaccatctgctttatattacacaaggaaatatacacgtatgtacataaaaagtgaactcccttcac

SEQ ID NO: 511245 - DNA, 120 bp, Artificial Sequence
  ENSG00000164346_25 (sequence is synthesized)
aaataagttcacaaaggactatgtgtaatgtgactggacattcaacaactagactagccggttgaaatcacattttcagtcctctgtaattgtgaaattttttctaatgccttgcaaaaa

SEQ ID NO: 511246 - DNA, 120 bp, Artificial Sequence
  ENSG00000164346_26 (sequence is synthesized)
ctacagataactgattaagttcatgtaggttccttattgaagataaattgtggtataaattctatactcaagttactgaacatgagagttaggtttttccaagtgatctaacttttccct

SEQ ID NO: 511247 - DNA, 120 bp, Artificial Sequence
  ENSG00000164346_27 (sequence is synthesized)
ctataatctataaaccccaaaataacaatttctgtcagagagaatctgtaacagaagtgttcttgtgtgctgaacaaaaaacttctaaattgtttacaattcacttactatttaacccaa

SEQ ID NO: 511248 - DNA, 120 bp, Artificial Sequence
  ENSG00000164346_28 (sequence is synthesized)
acaagtttaacaagaataagtttatactgttagcccccaatggtcatatatgattaataaacattttttgtaaactcaactatattcacacatcaagagttgagccagtgagctcaatct

SEQ ID NO: 511249 - DNA, 120 bp, Artificial Sequence
  ENSG00000164346_29 (sequence is synthesized)
ttaaaaaactacacttgtctaaagaaagtcttttagtgctcacttcggcagcacatatactaaaattagaacaatacagggaaaattagcatggcccctgtgcaaggatgacacaaattc

SEQ ID NO: 511250 - DNA, 120 bp, Artificial Sequence
  ENSG00000164346_30 (sequence is synthesized)
atgaagcgtttccatgtttaaaataatttgaaaagaaagtattttaaacaaatccaagtaaaaataaaatatctacaagtgttttcaaatctaagaaatgaaacatgtaaagattaagaa

SEQ ID NO: 511251 - DNA, 120 bp, Artificial Sequence
  ENSG00000164346_31 (sequence is synthesized)
tttactgaatcttaacagagtatttccctttgtgatattgacagaagtttctcataaaatgtataaaacagcataaatgtttggtagattcactaatagtagtcatactttttttttttt

SEQ ID NO: 511252 - DNA, 120 bp, Artificial Sequence
  ENSG00000164346_32 (sequence is synthesized)
acttagtattagcatttgttgaaaaaataaatggccaaagtgctttaattttcatttagaatgaaataatctggcttacctttgactaattaaagaaaatatagggtaatacaattgttc

SEQ ID NO: 511253 - DNA, 120 bp, Artificial Sequence
  ENSG00000164346_33 (sequence is synthesized)
aaaatctaacacaaataggagcgtttactatttttgtctgctttaagattttaacttgatcgaaaataccaacatccccaaacaaaatttactgacctgacatcagcttactatagactg

SEQ ID NO: 511254 - DNA, 120 bp, Artificial Sequence
  ENSG00000164346_34 (sequence is synthesized)
aatacactttcaacatcagtccttagctacctcaaataatgacacaaagtcttagtttcttttgcataaggatcaagatcaagctatttttaaaacaatttaaatggtctcaaaacattc

SEQ ID NO: 511255 - DNA, 120 bp, Artificial Sequence
  ENSG00000164346_35 (sequence is synthesized)
tccaacttaagtgcaaatttgagtacacataatatttccaaagagtagaactgtttttagattatctttggattctaataaccattttgtccatttttaaataaattacaaaaaataaca

SEQ ID NO: 511256 - DNA, 120 bp, Artificial Sequence
  ENSG00000164346_36 (sequence is synthesized)
aggaggcgcgagccgcgccaaagtctgcaacggcctcaagtctcgacgccagcctaggcaaaaggcaatgtatctaaacgaaaagaaaataggctttctccgctctaccgcctcgggcag

SEQ ID NO: 511257 - DNA, 120 bp, Artificial Sequence
  ENSG00000164346_37 (sequence is synthesized)
ccacacctccacacttccggcggtgtaccggccaaatgccgcctgccagcaacttccgtcctcctagctaaaagcggaaaacagaggctcggaaccgctgcgtggttcttgctcttcact

SEQ ID NO: 511258 - DNA, 68 bp, Artificial Sequence
  ENSG00000164346_38 (sequence is synthesized)
taggactgttttataagagtcaattccagtttgataaggaaagtatctaaatgcttttgaaaatcatt

SEQ ID NO: 511259 - DNA, 120 bp, Artificial Sequence
  ENSG00000164346_39 (sequence is synthesized)
ttctcggtttaatttcaaacatgaagtacagctattattcccattatttagatgttgaagtctttgtaaatttaataaaaaacttgctttctcatcataaggttttaaaatttaagttat

SEQ ID NO: 511260 - DNA, 120 bp, Artificial Sequence
  ENSG00000164347_0 (sequence is synthesized)
ggtgtggctgcccgaggcggtagagcggagaaagcctattttcttttcgtttagatacattgccttttgcctaggctggcgtcgagacttgaggccgttgcagactttggcgcggctcgc

SEQ ID NO: 511261 - DNA, 120 bp, Artificial Sequence
  ENSG00000164347_1 (sequence is synthesized)
gcctcctgcttcaagagcccagcggtgagagctggcctgcggcacgcggcctaatgccagacagtaacagtttggaggatcaagatgttgaccaacttgaggatatttgcaatgagtcat

SEQ ID NO: 511262 - DNA, 120 bp, Artificial Sequence
  ENSG00000164347_2 (sequence is synthesized)
cagacaatacccagtgtgtatattaataatatatgctgctataaaataagagcaagtttaaaaagattaaagccacatgtgccgcttggaagaaattgcagttctctaccaggcttaata

SEQ ID NO: 511263 - DNA, 120 bp, Artificial Sequence
  ENSG00000164347_3 (sequence is synthesized)
ggaaatgatatcaaatcccttcattccatcatcaatcctcccatagctaaaatccgtaatattggaattatggctcatattgatgcaggcaaaactaccaccacagaaagaatattgtac

SEQ ID NO: 511264 - DNA, 120 bp, Artificial Sequence
  ENSG00000164347_4 (sequence is synthesized)
tattccggatatacaagatcactgggagatgttgatgatggagacacagtgacagatttcatggcccaagagcgagaaagaggcattactattcaatcagctgctgttacatttgattgg

SEQ ID NO: 511265 - DNA, 120 bp, Artificial Sequence
  ENSG00000164347_5 (sequence is synthesized)
aaaggttatagagtcaatctaattgatacaccaggtcatgtggactttaccttggaggttgagcggtgcctaagagtgttggatggtgcagtggctgtatttgatgcctctgctggtgta

SEQ ID NO: 511266 - DNA, 120 bp, Artificial Sequence
  ENSG00000164347_6 (sequence is synthesized)
gaggcccagactctcacagtatggaggcaagctgataaacacaatatacctcgaatctgttttttaaacaagatggacaaaactggagcaagctttaagtatgcagttgaaagcatcaga

SEQ ID NO: 511267 - DNA, 120 bp, Artificial Sequence
  ENSG00000164347_7 (sequence is synthesized)
gagaagttaaaggcaaagcctttgcttttacagttaccaattggtgaagccaaaactttcaaaggagtggtggatgtagtaatgaaagaaaaacttctttggaattgcaattcaaatgat

SEQ ID NO: 511268 - DNA, 120 bp, Artificial Sequence
  ENSG00000164347_8 (sequence is synthesized)
ggaaaagactttgagagaaagcccctcttggaaatgaatgatcctgaattgctgaaggaaacaactgaagcaaggaatgccttaattgaacaagttgcagatttggatgatgaatttgct

SEQ ID NO: 511269 - DNA, 120 bp, Artificial Sequence
  ENSG00000164347_9 (sequence is synthesized)
gacttggttttagaagaatttagtgagaattttgatttgttaccagctgaaaagctacagactgcaatacatagagtgacactagctcagacagcagtgcctgtgctttgtggaagtgcc

SEQ ID NO: 511270 - DNA, 120 bp, Artificial Sequence
  ENSG00000164347_10 (sequence is synthesized)
ctgaaaaacaaagggatacagcccttgttagatgctgttactatgtacttaccttcacctgaagagcgtaactatgaatttctgcagtggtataaggatgacttatgtgcattggcattt

SEQ ID NO: 511271 - DNA, 120 bp, Artificial Sequence
  ENSG00000164347_11 (sequence is synthesized)
aaagttctccatgacaagcagcgaggaccactggtttttatgcgcatttactcaggcactataaaaccccagttggccattcataatattaatggaaactgcacggagagaataagtcgt

SEQ ID NO: 511272 - DNA, 120 bp, Artificial Sequence
  ENSG00000164347_12 (sequence is synthesized)
caagtccagtgcattagctgcagctcgtagagccgaacgggagggagaaaagaagcacagacaaaacaatgaagcagagagacttttattggctggagtggagattccagaacctgtttt

SEQ ID NO: 511273 - DNA, 120 bp, Artificial Sequence
  ENSG00000164347_13 (sequence is synthesized)
cttctgtaccatagaacccccatcactgtctaagcagccagatttggaacatgcgttgaaatgtcttcagcgtgaagatcccagtttgaaagtgaggctagatcctgactctggacaaac

SEQ ID NO: 511274 - DNA, 120 bp, Artificial Sequence
  ENSG00000164347_14 (sequence is synthesized)
tgttctgtgtggtatgggggagttacatatagagattattcatgatcgaatcaagagggaatatggactggagacctatctcgggcctctccaggtggcatatcgagagaccatcctaaa

SEQ ID NO: 511275 - DNA, 120 bp, Artificial Sequence
  ENSG00000164347_15 (sequence is synthesized)
ctcagttcgtgccacagataccttagatagaactttaggagacaaaaggcatcttgtgactgtagaagtggaagcaaggccaattgaaacatcatctgttatgcctgtgattgagtttga

SEQ ID NO: 511276 - DNA, 120 bp, Artificial Sequence
  ENSG00000164347_16 (sequence is synthesized)
gtatgctgaaagtatcaatgaaggccttttgaaggtctcccaagaggccattgaaaatggaattcacagcgcatgtctccaaggaccattgcttggatccccaattcaggatgtagcaat

SEQ ID NO: 511277 - DNA, 120 bp, Artificial Sequence
  ENSG00000164347_17 (sequence is synthesized)
tactttacattccctgacaattcatcctggcacctccacaactatgatttctgcctgtgtctcaagatgcgtgcaaaaggctctgaagaaagctgataagcaagttttggagcctctgat

SEQ ID NO: 511278 - DNA, 120 bp, Artificial Sequence
  ENSG00000164347_18 (sequence is synthesized)
gaatcttgaggttacagtagctagagattatctcagccctgtcctggcagatctggcacaaagaagaggaaacattcaggaaattcagactcgccaggacaacaaagttgttattggatt

SEQ ID NO: 511279 - DNA, 120 bp, Artificial Sequence
  ENSG00000164347_19 (sequence is synthesized)
tgttcccttagcagaaattatgggttattcaactgtgcttcgaacgctaacatcaggctcagctacttttgccttagaactatctacttatcaagccatgaatcctcaagatcaaaatac

SEQ ID NO: 511280 - DNA, 120 bp, Artificial Sequence
  ENSG00000164347_20 (sequence is synthesized)
actgctcaaccggagaagtggtttgacctaaatgttttagtttttggagagaaattcaggagcacctagctacttcattttcagtaagaacaatttttattgctttatttattggacgaa

SEQ ID NO: 511281 - DNA, 120 bp, Artificial Sequence
  ENSG00000164347_21 (sequence is synthesized)
taaagtactgtttcagtacattcagagaactagataaaagatataacttaagctttgatagtggcactggagccacccgttttaatttatataatgagaaatgtgctttgatgtttaaag

SEQ ID NO: 511282 - DNA, 120 bp, Artificial Sequence
  ENSG00000164347_22 (sequence is synthesized)
ccactgtacctgaatcatgctgttcatctatgaagttattactataagtagccttcagaagagtggtatcacaaagttgtgtttcttttgtgtccttaagcttgtctcacaagaaagatg

SEQ ID NO: 511283 - DNA, 120 bp, Artificial Sequence
  ENSG00000164347_23 (sequence is synthesized)
ccaggcctctaaatgtaataagatagagggtcaaaggttcaatcaataaaaatattttattcaaaaaacagtctaatatcttattttacatgatttcaaaataaagttgattgtagtaca

SEQ ID NO: 511284 - DNA, 120 bp, Artificial Sequence
  ENSG00000164347_24 (sequence is synthesized)
aagagcccagcggtgagagctggcctgcggcacgcggcctaatgccagtcacaactgtggagagactatgaggccctgaactttggcgttaccaatgaaaagggaatggattcaaggcca

SEQ ID NO: 511285 - DNA, 120 bp, Artificial Sequence
  ENSG00000164347_25 (sequence is synthesized)
tcaggatctggctttctgtgaatttaggaaactcctaatagtatctttagttttccatttcttttcctttcaaagaaaaacatttttctttatctctttagaagaagtgaagagttgctt

SEQ ID NO: 511286 - DNA, 120 bp, Artificial Sequence
  ENSG00000164347_26 (sequence is synthesized)
tggtcttagtgtgtcaactaattagtgcgctgataatttatataaaatagttgcaatataccctcaagagatttcttatgtgattgaggtaaattttatctgaatatattggtaaacatt

SEQ ID NO: 511287 - DNA, 87 bp, Artificial Sequence
  ENSG00000164347_27 (sequence is synthesized)
ctttttgtctctgcagtatgtatggctgtttgaaattgtctttttttttttttctttttttgtaagcaaactcctgggctcaagcga

SEQ ID NO: 511288 - DNA, 120 bp, Artificial Sequence
  ENSG00000164347_28 (sequence is synthesized)
aaagtgctgggattacagacgtgagtcaccacacctggtcgaaatttctttttcaaaatttgtttgcttatccatctgttttacccactagaacatataataaattatttaaaaaatgaa

SEQ ID NO: 511289 - DNA, 120 bp, Artificial Sequence
  ENSG00000164362_0 (sequence is synthesized)
cagcgctgcgtcctgctgcgcacgtgggaagccctggccccggccacccccgcgatgccgcgcgctccccgctgccgagccgtgcgctccctgctgcgcagccactaccgcgaggtgctg

SEQ ID NO: 511290 - DNA, 80 bp, Artificial Sequence
  ENSG00000164362_1 (sequence is synthesized)
gctgccgctggccacgttcgtgcggcgcctggggccccagggctggcggctggtgcagcgcggggacccggcggctttcc

SEQ ID NO: 511291 - DNA, 120 bp, Artificial Sequence
  ENSG00000164362_2 (sequence is synthesized)
cgcacggccgccccccgccgccccctccttccgccaggtgtcctgcctgaaggagctggtggcccgagtgctgcagaggctgtgcgagcgcggcgcgaagaacgtgctggccttcggctt

SEQ ID NO: 511292 - DNA, 120 bp, Artificial Sequence
  ENSG00000164362_3 (sequence is synthesized)
ttcggcttcgcgctgctggacggggcccgcgggggcccccccgaggccttcaccaccagcgtgcgcagctacctgcccaacacggtgaccgacgcactgcgggggagcggggcgtggggg

SEQ ID NO: 511293 - DNA, 120 bp, Artificial Sequence
  ENSG00000164362_4 (sequence is synthesized)
gcgccgcgtgggcgacgacgtgctggttcacctgctggcacgctgcgcgctctttgtgctggtggctcccagctgcgcctaccaggtgtgcgggccgccgctgtaccagctcggcgctgc

SEQ ID NO: 511294 - DNA, 120 bp, Artificial Sequence
  ENSG00000164362_5 (sequence is synthesized)
cactcaggcccggcccccgccacacgctagtggaccccgaaggcgtctgggatgcgaacgggcctggaaccatagcgtcagggaggccggggtccccctgggcctgccagccccgggtgc

SEQ ID NO: 511295 - DNA, 120 bp, Artificial Sequence
  ENSG00000164362_6 (sequence is synthesized)
gaggaggcgcgggggcagtgccagccgaagtctgccgttgcccaagaggcccaggcgtggcgctgcccctgagccggagcggacgcccgttgggcaggggtcctgggcccacccgggcag

SEQ ID NO: 511296 - DNA, 120 bp, Artificial Sequence
  ENSG00000164362_7 (sequence is synthesized)
gacgcgtggaccgagtgaccgtggtttctgtgtggtgtcacctgccagacccgccgaagaagccacctctttggagggtgcgctctctggcacgcgccactcccacccatccgtgggccg

SEQ ID NO: 511297 - DNA, 120 bp, Artificial Sequence
  ENSG00000164362_8 (sequence is synthesized)
ccagcaccacgcgggccccccatccacatcgcggccaccacgtccctgggacacgccttgtcccccggtgtacgccgagaccaagcacttcctctactcctcaggcgacaaggagcagct

SEQ ID NO: 511298 - DNA, 120 bp, Artificial Sequence
  ENSG00000164362_9 (sequence is synthesized)
gcggccctccttcctactcagctctctgaggcccagcctgactggcgctcggaggctcgtggagaccatctttctgggttccaggccctggatgccagggactccccgcaggttgccccg

SEQ ID NO: 511299 - DNA, 120 bp, Artificial Sequence
  ENSG00000164362_10 (sequence is synthesized)
cctgccccagcgctactggcaaatgcggcccctgtttctggagctgcttgggaaccacgcgcagtgcccctacggggtgctcctcaagacgcactgcccgctgcgagctgcggtcacccc

SEQ ID NO: 511300 - DNA, 120 bp, Artificial Sequence
  ENSG00000164362_11 (sequence is synthesized)
agcagccggtgtctgtgcccgggagaagccccagggctctgtggcggcccccgaggaggaggacacagacccccgtcgcctggtgcagctgctccgccagcacagcagcccctggcaggt

SEQ ID NO: 511301 - DNA, 120 bp, Artificial Sequence
  ENSG00000164362_12 (sequence is synthesized)
gtacggcttcgtgcgggcctgcctgcgccggctggtgcccccaggcctctggggctccaggcacaacgaacgccgcttcctcaggaacaccaagaagttcatctccctggggaagcatgc

SEQ ID NO: 511302 - DNA, 120 bp, Artificial Sequence
  ENSG00000164362_13 (sequence is synthesized)
caagctctcgctgcaggagctgacgtggaagatgagcgtgcgggactgcgcttggctgcgcaggagcccaggggttggctgtgttccggccgcagagcaccgtctgcgtgaggagatcct

SEQ ID NO: 511303 - DNA, 120 bp, Artificial Sequence
  ENSG00000164362_14 (sequence is synthesized)
ggccaagttcctgcactggctgatgagtgtgtacgtcgtcgagctgctcaggtctttcttttatgtcacggagaccacgtttcaaaagaacaggctctttttctaccggaagagtgtctg

SEQ ID NO: 511304 - DNA, 120 bp, Artificial Sequence
  ENSG00000164362_15 (sequence is synthesized)
gagcaagttgcaaagcattggaatcagacagcacttgaagagggtgcagctgcgggagctgtcggaagcagaggtcaggcagcatcgggaagccaggcccgccctgctgacgtccagact

SEQ ID NO: 511305 - DNA, 120 bp, Artificial Sequence
  ENSG00000164362_16 (sequence is synthesized)
ggagccagaacgttccgcagagaaaagagggccgagcgtctcacctcgagggtgaaggcactgttcagcgtgctcaactacgagcgggcgcggcgccccggcctcctgggcgcctctgtg

SEQ ID NO: 511306 - DNA, 120 bp, Artificial Sequence
  ENSG00000164362_17 (sequence is synthesized)
ctgggcctggacgatatccacagggcctggcgcaccttcgtgctgcgtgtgcgggcccaggacccgccgcctgagctgtactttgtcaaggtggatgtgacgggcgcgtacgacaccatc

SEQ ID NO: 511307 - DNA, 120 bp, Artificial Sequence
  ENSG00000164362_18 (sequence is synthesized)
ccccaggacaggctcacggaggtcatcgccagcatcatcaaaccccagaacacgtactgcgtgcgtcggtatgccgtggtccagaaggccgcccatgggcacgtccgcaaggccttcaag

SEQ ID NO: 511308 - DNA, 120 bp, Artificial Sequence
  ENSG00000164362_19 (sequence is synthesized)
agccacgtctctaccttgacagacctccagccgtacatgcgacagttcgtggctcacctgcaggagaccagcccgctgagggatgccgtcgtcatcgagcagagctcctccctgaatgag

SEQ ID NO: 511309 - DNA, 120 bp, Artificial Sequence
  ENSG00000164362_20 (sequence is synthesized)
gccagcagtggcctcttcgacgtcttcctacgcttcatgtgccaccacgccgtgcgcatcaggggcaagtcctacgtccagtgccaggggatcccgcagggctccatcctctccacgctg

SEQ ID NO: 511310 - DNA, 120 bp, Artificial Sequence
  ENSG00000164362_21 (sequence is synthesized)
ctctgcagcctgtgctacggcgacatggagaacaagctgtttgcggggattcggcgggacgggctgctcctgcgtttggtggatgatttcttgttggtgacacctcacctcacccacgcg

SEQ ID NO: 511311 - DNA, 120 bp, Artificial Sequence
  ENSG00000164362_22 (sequence is synthesized)
aaaaccttcctcaggaccctggtccgaggtgtccctgagtatggctgcgtggtgaacttgcggaagacagtggtgaacttccctgtagaagacgaggccctgggtggcacggcttttgtt

SEQ ID NO: 511312 - DNA, 120 bp, Artificial Sequence
  ENSG00000164362_23 (sequence is synthesized)
cagatgccggcccacggcctattcccctggtgcggcctgctgctggatacccggaccctggaggtgcagagcgactactccagctatgcccggacctccatcagagccagtctcaccttc

SEQ ID NO: 511313 - DNA, 120 bp, Artificial Sequence
  ENSG00000164362_24 (sequence is synthesized)
aaccgcggcttcaaggctgggaggaacatgcgtcgcaaactctttggggtcttgcggctgaagtgtcacagcctgtttctggatttgcaggtgaacagcctccagacggtgtgcaccaac

SEQ ID NO: 511314 - DNA, 120 bp, Artificial Sequence
  ENSG00000164362_25 (sequence is synthesized)
atctacaagatcctcctgctgcaggcgtacaggtttcacgcatgtgtgctgcagctcccatttcatcagcaagtttggaagaaccccacatttttcctgcgcgtcatctctgacacggcc

SEQ ID NO: 511315 - DNA, 120 bp, Artificial Sequence
  ENSG00000164362_26 (sequence is synthesized)
tccctctgctactccatcctgaaagccaagaacgcagggatgtcgctgggggccaagggcgccgccggccctctgccctccgaggccgtgcagtggctgtgccaccaagcattcctgctc

SEQ ID NO: 511316 - DNA, 120 bp, Artificial Sequence
  ENSG00000164362_27 (sequence is synthesized)
aagctgactcgacaccgtgtcacctacgtgccactcctggggtcactcaggacagcccagacgcagctgagtcggaagctcccggggacgacgctgactgccctggaggccgcagccaac

SEQ ID NO: 511317 - DNA, 120 bp, Artificial Sequence
  ENSG00000164362_28 (sequence is synthesized)
ccggcactgccctcagacttcaagaccatcctggactgatggccacccgcccacagccaggccgagagcagacaccagcagccctgtcacgccgggctctacgtcccagggagggagggg

SEQ ID NO: 511318 - DNA, 120 bp, Artificial Sequence
  ENSG00000164362_29 (sequence is synthesized)
cggcccacacccaggcccgcaccgctgggagtctgaggcctgagtgagtgtttggccgaggcctgcatgtccggctgaaggctgagtgtccggctgaggcctgagcgagtgtccagccaa

SEQ ID NO: 511319 - DNA, 120 bp, Artificial Sequence
  ENSG00000164362_30 (sequence is synthesized)
gggctgagtgtccagcacacctgccgtcttcacttccccacaggctggcgctcggctccaccccagggccagcttttcctcaccaggagcccggcttccactccccacataggaatagtc

SEQ ID NO: 511320 - DNA, 120 bp, Artificial Sequence
  ENSG00000164362_31 (sequence is synthesized)
catccccagattcgccattgttcacccctcgccctgccctcctttgccttccacccccaccatccaggtggagaccctgagaaggaccctgggagctctgggaatttggagtgaccaaag

SEQ ID NO: 511321 - DNA, 120 bp, Artificial Sequence
  ENSG00000164362_32 (sequence is synthesized)
gtgtgccctgtacacaggcgaggaccctgcacctggatgggggtccctgtgggtcaaattggggggaggtgctgtgggagtaaaatactgaatatatgagtttttcagttttgaaaaaaa

SEQ ID NO: 511322 - DNA, 120 bp, Artificial Sequence
  ENSG00000164362_33 (sequence is synthesized)
taggggctcagaaaagggggcaggcagagccctggtcctcctgtctccatcgtcacgtgggcacacgtggcttttcgctcaggacgtcgagtggacacggtgatctctgcctctgctctc

SEQ ID NO: 511323 - DNA, 120 bp, Artificial Sequence
  ENSG00000164362_34 (sequence is synthesized)
cctcctgtccagtttgcataaacttacgaggttcaccttcacgttttgatggacacgcggtttccaggcgccgaggccagagcagtgaacagaggaggctgggcgcggcagtggagccgg

SEQ ID NO: 511324 - DNA, 120 bp, Artificial Sequence
  ENSG00000164362_35 (sequence is synthesized)
gttgccggcaatggggagaagtgtctggaagcacagacgctctggcgagggtgcctgcagagacccgcctggtgcactctgattctccacttgcctgttgcatgtcctcgttcccttgtt

SEQ ID NO: 511325 - DNA, 120 bp, Artificial Sequence
  ENSG00000164362_36 (sequence is synthesized)
tctcaccacctcttgggttgccatgtgcgtttcctgccgagtgtgtgttgatcctctcgttgcctcctggtcactgggcatttgcttttatttctctttgcttagtgttaccccctgatc

SEQ ID NO: 511326 - DNA, 66 bp, Artificial Sequence
  ENSG00000164362_37 (sequence is synthesized)
tttgcttttatttctctttgcttagtgttaccccctgatctttttattgtcgttgtttgcttttgt

SEQ ID NO: 511327 - DNA, 120 bp, Artificial Sequence
  ENSG00000164362_38 (sequence is synthesized)
ggattacaggtgcaagccaccgtgcccggcataccttgatcttttaaaatgaagtctgaaacattgctacccttgtcctgagcaataagacccttagtgtattttagctctggccacccc

SEQ ID NO: 511328 - DNA, 120 bp, Artificial Sequence
  ENSG00000164362_39 (sequence is synthesized)
agcaataagacccttagtgtattttagctctggccaccccccagcctgtgtgctgttttccctgctgacttagttctatctcaggcatcttgacacccccacaagctaagcattattaat

SEQ ID NO: 511329 - DNA, 120 bp, Artificial Sequence
  ENSG00000164362_40 (sequence is synthesized)
cgtgttgagtgtttctgtagctttgcccccgccctgcttttcctcctttgttccccgtctgtcttctgtctcaggcccgccgtctggggtccccttccttgtcctttgcgtggttcttct

SEQ ID NO: 511330 - DNA, 120 bp, Artificial Sequence
  ENSG00000164362_41 (sequence is synthesized)
gtcttgttattgctggtaaaccccagctttacctgtgctggcctccatggcatctagcgacgtccggggacctctgcttatgatgcacagatgaagatgtggagactcacgaggagggcg

SEQ ID NO: 511331 - DNA, 120 bp, Artificial Sequence
  ENSG00000164362_42 (sequence is synthesized)
gtacggatggtgcaggtccggagtgaggtcgccaggccctgcggtgggctgtatgtgtgttgtctggatggtgcaggtccggggtgagttcgccaggccctgcggtgagctggatgtgtg

SEQ ID NO: 511332 - DNA, 120 bp, Artificial Sequence
  ENSG00000164362_43 (sequence is synthesized)
gtgtctggatgctgcaggtccggggtgagttcgccaggccctcggtgagctggatatgcggtgtccccgtgtccgaatggtgcaggtccagggtgaggtcgccaggcccttggtgggctg

SEQ ID NO: 511333 - DNA, 120 bp, Artificial Sequence
  ENSG00000164362_44 (sequence is synthesized)
gatgtgccgtgtccggatggtgcaggtctggggtgaggtcgccaggcccttggtgagctggatgtgcggtgtccggatggtgcaggtccggggtgaggtcaccaggccctcggtgatctg

SEQ ID NO: 511334 - DNA, 120 bp, Artificial Sequence
  ENSG00000164362_45 (sequence is synthesized)
gctggggcaggtgctgctgcagggccgttgcgtccacctctgcttccgtgtggggcaggcgactgccaatcccaaagggtcagaggccacagggtgcccctcgtcccatctggggctgag

SEQ ID NO: 511335 - DNA, 120 bp, Artificial Sequence
  ENSG00000164363_0 (sequence is synthesized)
ggtttccaaacgtcggcagaggctggagacggctctctagtgctgggtgtggagtgaggcaccacccttgccctgaagcctggggcactcagtcaccatggctcatgccccagaaccgga

SEQ ID NO: 511336 - DNA, 120 bp, Artificial Sequence
  ENSG00000164363_1 (sequence is synthesized)
cccggccgcctgcgacctcggggatgagaggcccaagtgggacaacaaggcccagtacctcctgagctgcactgggtttgccgtgggactggggaacatttggcggttcccatacctgtg

SEQ ID NO: 511337 - DNA, 120 bp, Artificial Sequence
  ENSG00000164363_2 (sequence is synthesized)
ccagacctatggaggaggggccttcctcatcccctacgtcatcgcgctggtcttcgaggggatccccattttccacgtcgagctcgccatcggccagcggctgcggaagggcagcgtcgg

SEQ ID NO: 511338 - DNA, 120 bp, Artificial Sequence
  ENSG00000164363_3 (sequence is synthesized)
cgtgtggacggccatctccccgtacctcagtggagtagggctgggctgtgtcacgctgtccttcctgatcagcctgtactacaacaccatcgtggcgtgggtgctgtggtacctcctcaa

SEQ ID NO: 511339 - DNA, 120 bp, Artificial Sequence
  ENSG00000164363_4 (sequence is synthesized)
ctccttccagcacccgctgccctggagctcctgcccaccggacctcaacagaacagggtttgtggaggagtgccagggcagcagcgccgtgagctacttctggtaccggcagacactgaa

SEQ ID NO: 511340 - DNA, 120 bp, Artificial Sequence
  ENSG00000164363_5 (sequence is synthesized)
catcacagccgacatcaatgacagtggctccatccagtggtggctgctcatctgcttggcagcctcctgggcagtcgtgtacatgtgtgtcatcaggggcattgagactacagggaaggt

SEQ ID NO: 511341 - DNA, 120 bp, Artificial Sequence
  ENSG00000164363_6 (sequence is synthesized)
gatttacttcacagctttgttcccttacctggtcctgaccatctttctcatcagagggctgaccctgccaggggcaacaaaaggactcatctacttgttcactcccaacatgcacattct

SEQ ID NO: 511342 - DNA, 120 bp, Artificial Sequence
  ENSG00000164363_7 (sequence is synthesized)
ccagaacccccgggtgtggctggacgcagccacccagatattcttctctctgtccctggccttcggaggacacatcgcttttgcaagttacaactcgcccaggaatgactgccagaagga

SEQ ID NO: 511343 - DNA, 120 bp, Artificial Sequence
  ENSG00000164363_8 (sequence is synthesized)
gtcttctctgtcctggggttcaaagcaactaatgactacgagcactgcctggacagaaacatcctcagcctcatcaacgactttgacttcccagagcagagcatctccagggacgactac

SEQ ID NO: 511344 - DNA, 120 bp, Artificial Sequence
  ENSG00000164363_9 (sequence is synthesized)
ccagccgtcctcatgcacctgaacgccacctggcccaagagggtggcccagctccccctgaaggcctgcctcctggaagactttctggataagagtgcctcgggcccgggcctggccttc

SEQ ID NO: 511345 - DNA, 120 bp, Artificial Sequence
  ENSG00000164363_10 (sequence is synthesized)
gtcgtcttcacggagaccgacctccacatgccgggggctcctgtgtgggccatgctcttcttcgggatgctgttcaccttggggctatcgaccatgttcgggaccgtggaggcggtcatc

SEQ ID NO: 511346 - DNA, 120 bp, Artificial Sequence
  ENSG00000164363_11 (sequence is synthesized)
acacccctgctggacgtgggggtcctgcctagatgggtccccaaggaggccctgactgggctggtctgcctggtctgcttcctctccgccacctgcttcacgctgcagtctgggaactac

SEQ ID NO: 511347 - DNA, 120 bp, Artificial Sequence
  ENSG00000164363_12 (sequence is synthesized)
tggctggagattttcgacaattttgccgcttccccgaacctgctcatgttggcctttctcgaggttgtgggtgtcgtttatgtttatggaatgaaacggttctgcgatgacattgcgtgg

SEQ ID NO: 511348 - DNA, 120 bp, Artificial Sequence
  ENSG00000164363_13 (sequence is synthesized)
atgaccgggaggcggcccagcccctactggcggctgacctggagggtggtcagtcccctgctgctgaccatctttgtggcttacatcatcctcctgttctggaagccactgagatacaag

SEQ ID NO: 511349 - DNA, 120 bp, Artificial Sequence
  ENSG00000164363_14 (sequence is synthesized)
gcctggaaccccaaatacgagctgttcccctcgcgtcaggagaagctctacccgggctgggcgcgcgccgcctgtgtgctgctgtccttgctgcccgtgctgtgggtcccggtggccgcg

SEQ ID NO: 511350 - DNA, 120 bp, Artificial Sequence
  ENSG00000164363_15 (sequence is synthesized)
cttgctcagctgctcacccggcggaggcggacgtggagggacagggacgcgcgcccagacacggacatgcgcccggacacggacacgcgcccagacacggacatgcgcccggacacggac

SEQ ID NO: 511351 - DNA, 120 bp, Artificial Sequence
  ENSG00000164363_16 (sequence is synthesized)
atgcgctgaagccggccggagcggggcctgcatgggcgggtctgtgggggggcttggcctgatggtgggcggggccccgcccacagggccgaccccaatacaccagcgactcaaccttga

SEQ ID NO: 511352 - DNA, 120 bp, Artificial Sequence
  ENSG00000164366_0 (sequence is synthesized)
aaagcggacccgcggacggtggcgttaagggaacgctgaggtcccgcgctccccgaccgaggtatatctccatgaataacctaaatgatcccccaaattggaatatccggcctaattcca

SEQ ID NO: 511353 - DNA, 120 bp, Artificial Sequence
  ENSG00000164366_1 (sequence is synthesized)
gggcggatggtggtgatggaagcaggtggaattatgccctgttggttccaatgctgggattggctgcttttcgttggatttggtctagggagtcccagaaagaagtagaaaaagagagag

SEQ ID NO: 511354 - DNA, 120 bp, Artificial Sequence
  ENSG00000164366_2 (sequence is synthesized)
aagcctaccgtcggagaactgctgcttttcaacaggatctggaagccaagtaccacgccatgatctcagaaaatcggcgtgctgtcgctcagttgtccttggaactcgaaaaggaacaaa

SEQ ID NO: 511355 - DNA, 120 bp, Artificial Sequence
  ENSG00000164366_3 (sequence is synthesized)
acagaactgctagttaccgagaagcccttatctctcagggacgcaagttggtagaagaaaagaagcttctggaacaggaacgggcccaggtgatgcaagaaaaaagacaggtgcagcctt

SEQ ID NO: 511356 - DNA, 120 bp, Artificial Sequence
  ENSG00000164366_4 (sequence is synthesized)
tgagaagtgcgtatttgagctgcctgcaaagggaagaaaactggcaaaggagagccaggcttttgctgaaagaatttgaagctgttctcacagaaagacagaatatctactgcagtctgt

SEQ ID NO: 511357 - DNA, 120 bp, Artificial Sequence
  ENSG00000164366_5 (sequence is synthesized)
ttcttcctcgcagcaagcggctggagatagagaagagcttactggtgcgagcgtccgtcgaccccgtcgccgctgacctagagatggcagccggtctcaccgacatatttcagcatgata

SEQ ID NO: 511358 - DNA, 120 bp, Artificial Sequence
  ENSG00000164366_6 (sequence is synthesized)
catactgtggtgatgtctggaacaccaacaaacgccagaatggcagactcatgtggctctatctcaaatactgggaactcgttgtcgaactgaagaagtttaagagagtagaggaagcca

SEQ ID NO: 511359 - DNA, 120 bp, Artificial Sequence
  ENSG00000164366_7 (sequence is synthesized)
tactagaaaagtaagacaagagtgaaatcaaactgcttttagtgactcgaggccaggcagtcatgcgccttctgggtctccggcgtcttccgttcccgtgctgcccgtgtcatggccaca

SEQ ID NO: 511360 - DNA, 120 bp, Artificial Sequence
  ENSG00000164366_8 (sequence is synthesized)
ccgtcacccttcagcagcgacctccactcccgccaccgtctgagcagaagtgcaccgaagcctcagagacagagggtctcctcccgatgctctgccgctgttggggatatggtttcttga

SEQ ID NO: 511361 - DNA, 120 bp, Artificial Sequence
  ENSG00000164366_9 (sequence is synthesized)
agcatttttaggctgccagtattgtattaagcagaacagtataacctcgtattttagctccagggtaaaaatggttttttaaaaagtcaaatacaatactggtccttaccacaagtaatt

SEQ ID NO: 511362 - DNA, 120 bp, Artificial Sequence
  ENSG00000164366_10 (sequence is synthesized)
ttctgtctgtttcatcactccctaaatactttctcctcaaattatttttctctgtcaccagattacattaagaatttgtcagataatgtgtagaactgcataacaggtaataggaagtag

SEQ ID NO: 511363 - DNA, 120 bp, Artificial Sequence
  ENSG00000164366_11 (sequence is synthesized)
taatattatattatcaagggtttatattttaaagatctctctcactccataaaggggaaataccaagtgtttcttgtatccagttgttacttaatgtgtgtttgttgtatgcagttgtta

SEQ ID NO: 511364 - DNA, 120 bp, Artificial Sequence
  ENSG00000164366_12 (sequence is synthesized)
cctaatgtgtgtttgttgtatgcagttgttacctaatgtgtgtgtgttgtatgcagttgttacctaatgtgtgtgtgttgtatccagttgttacctaatgtgtgtttggaatttggcttg

SEQ ID NO: 511365 - DNA, 120 bp, Artificial Sequence
  ENSG00000164366_13 (sequence is synthesized)
tgtctgtattcagcaagcagatacttattagcaatgatatatactcaaaatacttgccatttatgagtaataatgccactttttgtgtaattcttcactctttacaaaatatttttatat

SEQ ID NO: 511366 - DNA, 120 bp, Artificial Sequence
  ENSG00000164366_14 (sequence is synthesized)
gtattatctcattgtttaccacagccaacaaggtagacaggcacttatcaccccatgtcacacatagctactgggaattgagcctgtatacctgttcactcatggaatcctcagtcgaat

SEQ ID NO: 511367 - DNA, 120 bp, Artificial Sequence
  ENSG00000164366_15 (sequence is synthesized)
cctgtgaagtgagtattactattacgctttgcggaggtgccccaaggccagcccccaggtgcgtgacctgctgggagatctcacaggactcagcacagggttggactcagcacagagcag

SEQ ID NO: 511368 - DNA, 120 bp, Artificial Sequence
  ENSG00000164366_16 (sequence is synthesized)
aatcagcaaagggagagggtgtgtgggtggcgctcagaggagccacgtgtggacaccccaggatccactccctggagtcatacaggacacacctaactattaagaataagctcactggag

SEQ ID NO: 511369 - DNA, 120 bp, Artificial Sequence
  ENSG00000164366_17 (sequence is synthesized)
actcagcacctggggcttttgctaagggctggtcatgtggtaccccctgcctggcctgtgtgggaattccccacttgtccagaaggagggtgggtttggtgtggtctgtgccgtgagcac

SEQ ID NO: 511370 - DNA, 120 bp, Artificial Sequence
  ENSG00000164366_18 (sequence is synthesized)
aagtactgtggtcacagagccacgcgtaggagttaatggtgctgggaagtctcccagaatccgagttcccagatgtcagtcaagggccagccttgcacacaggccctggtaggacacagc

SEQ ID NO: 511371 - DNA, 120 bp, Artificial Sequence
  ENSG00000164366_19 (sequence is synthesized)
cttgggcctgctgtgtgaattcgtcaccacgcacctcactttacggagatgtggaagagctaacctgcctgaggtcacgcaggtagtagtgttggagccagtctgagcccgggcaccttt

SEQ ID NO: 511372 - DNA, 120 bp, Artificial Sequence
  ENSG00000164366_20 (sequence is synthesized)
tctccagaaccgcgagtaacctgtgtgcagtgatttgatagtgtgtggccaggcaggagcgggagcaggttgtccatctgctttcaagggccatgttctcccctcctgcccgtctgtacg

SEQ ID NO: 511373 - DNA, 120 bp, Artificial Sequence
  ENSG00000164366_21 (sequence is synthesized)
ggagtaggagcaactgttaaaaatcctaagctcatagagcccacgtggcagtatgagagccactattcatggagtgcatgttccaccctgagctgtacacgctttacacgcatgcgttgt

SEQ ID NO: 511374 - DNA, 120 bp, Artificial Sequence
  ENSG00000164366_22 (sequence is synthesized)
ttgaaatccgtggaaccccttgagcgcggcggaggcgggctcagagccaacatgcgctgcctgcaacagacacgggccccctgccatgctctgctctcggcacccacgccctgctaaggg

SEQ ID NO: 511375 - DNA, 120 bp, Artificial Sequence
  ENSG00000164366_23 (sequence is synthesized)
tgctcagatgcttcacccaggcaggagtgcagtggtgtgatggctaagggtgctcagatgcttctcttcttcagtggctgctagcgtgcctctctgctctaccaccatcgctttatctga

SEQ ID NO: 511376 - DNA, 120 bp, Artificial Sequence
  ENSG00000164366_24 (sequence is synthesized)
ctagcgtgcctctctgctctaccaccatcgctttatctgagaaaaagtcacttttattttcattttttattttttttgagagggaatctctgtcacccaggcaggagtgcagtggtgtga

SEQ ID NO: 511377 - DNA, 120 bp, Artificial Sequence
  ENSG00000164366_25 (sequence is synthesized)
gctgacctcaggtgatccaccgcccccacctcggcctcccacagcactgggattacaggtgtgggccacggcacccggcccctaaaaagtcattttttcggtaaatctggacaaaactct

SEQ ID NO: 511378 - DNA, 120 bp, Artificial Sequence
  ENSG00000164366_26 (sequence is synthesized)
tcctgttgttgtttgtacttcctgatgcatcaagacccttgcctaaagagcggtgcaggctccattcctgcggcaatccggtctgctgggtgtccctgtgtgaaccactccacgtttgtc

SEQ ID NO: 511379 - DNA, 120 bp, Artificial Sequence
  ENSG00000164366_27 (sequence is synthesized)
tttaaatgaagaaaacacagtcagctgctttgtaggtgaatgattttcgaggcaaattgttaatcctcatcctgtttctaatgtccagtgtgctgtcagcctagcttccttctatagtga

SEQ ID NO: 511380 - DNA, 120 bp, Artificial Sequence
  ENSG00000164366_28 (sequence is synthesized)
gatagatatgttcagagccttcaagctggtgtggacactgacccgctgacccggtcctgcagagttaggaagacgagcattttttttttgagacagtctcgttctgttgccaggcgggag

SEQ ID NO: 511381 - DNA, 87 bp, Artificial Sequence
  ENSG00000164366_29 (sequence is synthesized)
tttttttttgagacagtctcgttctgttgccaggcggctctgcctcccgggttcgagtagtttgcctgcctcagcctcccgagtagc

SEQ ID NO: 511382 - DNA, 69 bp, Artificial Sequence
  ENSG00000164366_30 (sequence is synthesized)
atggcctcaaactgggcgtgagccaccgtgcctggccggaagatgctctttccacagggttgatattag

SEQ ID NO: 511383 - DNA, 120 bp, Artificial Sequence
  ENSG00000164366_31 (sequence is synthesized)
gcctggccggaagatgctctttccacagggttgatattagttcgtgtttgtgtggcgtggctgccttccatcagcaagtttgagtgttgatgtgaggccaccctcttttgaaatggattg

SEQ ID NO: 511384 - DNA, 120 bp, Artificial Sequence
  ENSG00000164366_32 (sequence is synthesized)
tggtcggtttggaatagttacacggtgctgtgccatttggtaactccacacatgtaccgaaaggtgagcccacagtggaacgctcctcaaccaaagtggtttaaagttgcagaaaagggt

SEQ ID NO: 511385 - DNA, 120 bp, Artificial Sequence
  ENSG00000164366_33 (sequence is synthesized)
aattgtgctggttggtgtgtgtgctgaatttgtagcgacatcagagtcaagcattatttgtcctgctgctttcttggaggtcacagtaactataaaaccgtgagccagcaaggcagagag

SEQ ID NO: 511386 - DNA, 120 bp, Artificial Sequence
  ENSG00000164366_34 (sequence is synthesized)
gaccctttggggtaaggagtggagctctgggagatcctaggtttcggaagcaggtccagtttccttggggaggggagggctcgctgcagggcggaggaggggcagccactgtaatccttg

SEQ ID NO: 511387 - DNA, 120 bp, Artificial Sequence
  ENSG00000164366_35 (sequence is synthesized)
tctggagtgaacattgtatatgaggttgcagtggcttaaaaaggaaggacttttgcggggaggggttgagattgtactttctaatttcgcttgcttcagacttgactttggaatgaagtt

SEQ ID NO: 511388 - DNA, 120 bp, Artificial Sequence
  ENSG00000164366_36 (sequence is synthesized)
cgaaggcatcacaattgacctggacattccaaaaacaaaactgaagaggcagcatttctcttccgtagtccagtcagctcatttggtagatgcgctttttcctcctttgcgcttattcat

SEQ ID NO: 511389 - DNA, 120 bp, Artificial Sequence
  ENSG00000164366_37 (sequence is synthesized)
tatgtgtgtgtatgtgtgaactggcaggtgttgatttcataaggacaaaattgttctgcaaaccttgcaccaattatggggtgtttcaacggaaaaacttcaccaaatgatctgtgtgtt

SEQ ID NO: 511390 - DNA, 120 bp, Artificial Sequence
  ENSG00000164366_38 (sequence is synthesized)
ctttcaaagagaagttatgtctaattaaaatgtgtaacggactatttctgtgttggattgtttaaaaagtgattgcttcatagtgtactaagatcatctctttaagcagaagggagaaaa

SEQ ID NO: 511391 - DNA, 120 bp, Artificial Sequence
  ENSG00000164366_39 (sequence is synthesized)
cagctttctagttactttcacatattaggtttgctacataaaagcaagtctgaagactacacctgtgacattgcagagaccaaactgcagtgtgtgcagccatgagtggcagctgcttcc

SEQ ID NO: 511392 - DNA, 120 bp, Artificial Sequence
  ENSG00000164366_40 (sequence is synthesized)
tcctcgaggtgtcttgttccagcatgaggacagcccgtgcgatgttgggaggagccagggtgtttgggggggcagctgccctagacactggctggctgtgatggggggcagcctgctgtg

SEQ ID NO: 511393 - DNA, 120 bp, Artificial Sequence
  ENSG00000164366_41 (sequence is synthesized)
tagacactggctggctgtgatggggggcagcctgctgtgtagacactggctggctgtgatgggggcagcctgctgtgtagacgctggctgtgatgggggcagcctgctgtgtagacgctg

SEQ ID NO: 511394 - DNA, 120 bp, Artificial Sequence
  ENSG00000164366_42 (sequence is synthesized)
gctggctgtgatgggggcagcctgctgtgtagacgctggctagctgtgatgggggcagcctgctgtgtagacgctggctggctgtgatgggggcagcctgctgtgtagaaagtgctgggc

SEQ ID NO: 511395 - DNA, 120 bp, Artificial Sequence
  ENSG00000164366_43 (sequence is synthesized)
ttgctccgtctgccttgacttgtgtgagtaactgcgctgggttttataggttgaggctgaaaaggctcctctttctatgctgggtttgacgaaacagttgctgtatttctctattaattt

SEQ ID NO: 511396 - DNA, 120 bp, Artificial Sequence
  ENSG00000164366_44 (sequence is synthesized)
aggattctgtttgcaagcagcagagatggatttgtgctagcctagaaagttaaagagggatttaaggctgtctcgtgaaacttcaggtcaagaatggagaacacaggttagatgtcagag

SEQ ID NO: 511397 - DNA, 120 bp, Artificial Sequence
  ENSG00000164366_45 (sequence is synthesized)
aagaaccagaaagacaaataagggactctcaggggcctcggagtacttgtcactctgtgtcatatctctgcatagccgcgccaatccccaaaccagcttctctggccacacggtgggaca

SEQ ID NO: 511398 - DNA, 120 bp, Artificial Sequence
  ENSG00000164366_46 (sequence is synthesized)
gggcggttcccacagctcctgagcctgccccctgcctggcctgctccagcgggcggccgagttagggaagcgctgggctccaccataccgcggtgttctaaaggagtgggaacaatgaag

SEQ ID NO: 511399 - DNA, 120 bp, Artificial Sequence
  ENSG00000164366_47 (sequence is synthesized)
atcagggttgcagagcctgtggcctttgctagcttcatgggaaatcttgaaaagagaaaacgaagggcttcagtaagccacccatggacagcaggcatgcggtggaaggcggagggcttc

SEQ ID NO: 511400 - DNA, 120 bp, Artificial Sequence
  ENSG00000164366_48 (sequence is synthesized)
tgtggcagcttcgcaggtctctcatctgctgcagaccccctgacaggctgagggtcttgctgtcgggtagcgggaccagatgagcctgaatgtggctctgcggctcacaggacaagtgta

SEQ ID NO: 511401 - DNA, 120 bp, Artificial Sequence
  ENSG00000164366_49 (sequence is synthesized)
ccttgagagctgctgccgccgcctggatgtttgctgggtgagctccagattcacgggagccctttgtgccagcatggccgccccaaccccatggggaaagcagatctccctcacctggga

SEQ ID NO: 511402 - DNA, 120 bp, Artificial Sequence
  ENSG00000164366_50 (sequence is synthesized)
atctggcagagacctcaggcagtgccccatctttcatgacctgcctggtccaggtagaggagtcaagtcctgctccaggagcaggtgcagggcctggcctgggtgccgagagtggggtga

SEQ ID NO: 511403 - DNA, 120 bp, Artificial Sequence
  ENSG00000164366_51 (sequence is synthesized)
ggagggaggagtaacgaagaaaggcagatgggcagaaagtgccacattggggcactcaagtggctctgtttaatattccagcagggacactgagaccgagcccatccctgctgggagagc

SEQ ID NO: 511404 - DNA, 120 bp, Artificial Sequence
  ENSG00000164366_52 (sequence is synthesized)
ttctcgaagctggttggtggctgacaggcagggagtggggtgctggggcctcctcgggaggtaggggtgctggggccctgctcttgacagcactgtgccatagctccgaggtggctgctc

SEQ ID NO: 511405 - DNA, 120 bp, Artificial Sequence
  ENSG00000164366_53 (sequence is synthesized)
cccatgggccagggctggtggtgccagaaaatgggatctgggctgaggggctctgggctggcagaggtggggcggggggtgactggcaggcatcaagatggggggggacaagcacggtgc

SEQ ID NO: 511406 - DNA, 120 bp, Artificial Sequence
  ENSG00000164366_54 (sequence is synthesized)
ccccacccatggggccgtgtggggctgatggatagtgggactccagcatgcagcagatgatggagccttgctcaactcagaagaggaagagcaggagagcgctggtggatgagagcaacc

SEQ ID NO: 511407 - DNA, 120 bp, Artificial Sequence
  ENSG00000164366_55 (sequence is synthesized)
ctgatgttccagggcccttggccacgtccaccacacagaggggccacgtccacacagaggggccacgtccaccacacagaggggccacgtccaccacacaggggccactgggcctgcgta

SEQ ID NO: 511408 - DNA, 120 bp, Artificial Sequence
  ENSG00000164366_56 (sequence is synthesized)
tatctccttggcctgcgagggtatcatcatttcctgacctgtggaacaagtcattaagccaggaaggacttgagttggagcccctaaaacggcccccactccttgccaggatggtggaca

SEQ ID NO: 511409 - DNA, 120 bp, Artificial Sequence
  ENSG00000164366_57 (sequence is synthesized)
ggaagcagtgccatgttctgaaggagctgcaccagcccatgctgctgtggaagacccaagggaggcaaagacggtggctccagatggcggcccccattgggaccctgctcacatcaccca

SEQ ID NO: 511410 - DNA, 120 bp, Artificial Sequence
  ENSG00000164366_58 (sequence is synthesized)
ctggccctggaaagccggggtgggcctgggcaggtgaaccctgaggctccgccaggagcagccccagctacagccaccatggatgtttgctgggttggatcagcactctcacctgctgaa

SEQ ID NO: 511411 - DNA, 120 bp, Artificial Sequence
  ENSG00000164366_59 (sequence is synthesized)
tggttttgcctgattcccactagcttgtcttgtgtgggaggccgtgttttctgcggtagagaagtgctctccataaaaacccagcaggcgtgctcctgggccctgcagacgccggatgtg

SEQ ID NO: 511412 - DNA, 120 bp, Artificial Sequence
  ENSG00000164366_60 (sequence is synthesized)
tggccacagacgccatgcgacccaggactggagtcacaagattgggcgaggacaaagacccagcgaatggtgaacggccatgcaggatggggccgatcagttcagtaggagcaagtgcga

SEQ ID NO: 511413 - DNA, 120 bp, Artificial Sequence
  ENSG00000164366_61 (sequence is synthesized)
gacctgcacaggacgggcgagggaggcgttggtccccagcctctgctggccttatcagaatgggctgttcttgggaagcccctgggtgtctgtggagctggagatgttgggagcttgtgc

SEQ ID NO: 511414 - DNA, 120 bp, Artificial Sequence
  ENSG00000164366_62 (sequence is synthesized)
cctcagcaccgcccactgacaccagtgggctcctgtgtgccctgcccaatcccaggcctcaggacacccagcaccctgggcccttctccactgccacaggccttaaggttggtcatcatg

SEQ ID NO: 511415 - DNA, 120 bp, Artificial Sequence
  ENSG00000164366_63 (sequence is synthesized)
ccgcccagcggctgagtcttacaataaaaattcagacacaaagcagtggcagccactctgtgctttagagttagaagtaagtcattaaaaatgttggcccagcaccttccctgcctgttt

SEQ ID NO: 511416 - DNA, 120 bp, Artificial Sequence
  ENSG00000164366_64 (sequence is synthesized)
ccaaaagctggccgcaatatcaaattcatgtccctggacaaggctccagtaaggcactgcctgcagtgtgcagagagcacttaggtggttgcagagcaggcagagacgaatgtggggagt

SEQ ID NO: 511417 - DNA, 120 bp, Artificial Sequence
  ENSG00000164366_65 (sequence is synthesized)
ggaagtcaccatatctgcccactcggcaggaggccgtccattcctgagacgcccccgggaggcaggctcctgtacggcactcatgctgggtacccaacccctacaacccaggcaaacccc

SEQ ID NO: 511418 - DNA, 120 bp, Artificial Sequence
  ENSG00000164366_66 (sequence is synthesized)
taccctgggcagagaagggcctggacacaccaggggcagaaggagaaaggggatggagacaaacctgggtgggggtgacctgggggcagctggggtggggtgacacggggaccattgggg

SEQ ID NO: 511419 - DNA, 120 bp, Artificial Sequence
  ENSG00000164366_67 (sequence is synthesized)
tggggacacactccgggagggggagacacggggcagcaggggtgggggcacacctggagtggggtgacatgggggcccctggggtggggacacactcggggagggggtgacacagggacc

SEQ ID NO: 511420 - DNA, 120 bp, Artificial Sequence
  ENSG00000164366_68 (sequence is synthesized)
ggggtggggacacactcggggagggggtgacacagggaccactggggtggggacacactccgggagggggtgatacggggcagcggtgtagggaaaagagagatcagactgtcactgtgt

SEQ ID NO: 511421 - DNA, 88 bp, Artificial Sequence
  ENSG00000164366_69 (sequence is synthesized)
ctatgtagaaagggaagacatgagactccgttttgaaaaagacctgtactttaaataattgctttgctgagatgatgttaatgtggag

SEQ ID NO: 511422 - DNA, 120 bp, Artificial Sequence
  ENSG00000164366_70 (sequence is synthesized)
ggtctgtgctgacatgggttagtaaaagacgaaagcctcttgcagttgagagagagaagtccactgtctcctgctcgccgctgggaactgaatgtcgcggtgtaaaacccgattgtacat

SEQ ID NO: 511423 - DNA, 120 bp, Artificial Sequence
  ENSG00000164366_71 (sequence is synthesized)
acatttgttcaactctgagacaggagaaaagccgccttgtggcgggaggcgagacatgtttgcggcaatgctgccttgttattctttactctgctgagatgtttgggtggagagaaacat

SEQ ID NO: 511424 - DNA, 66 bp, Artificial Sequence
  ENSG00000164366_72 (sequence is synthesized)
gacatagattcttttgctcacacgtttttgctgacctcctccttattatcaccctgctctcctact

SEQ ID NO: 511425 - DNA, 83 bp, Artificial Sequence
  ENSG00000164366_73 (sequence is synthesized)
tttctccactttccccaaccagattgtgagtcgctttcatcttaagttcggggggacggagtctcgttctgtcaccaggctgg

SEQ ID NO: 511426 - DNA, 120 bp, Artificial Sequence
  ENSG00000164379_0 (sequence is synthesized)
gagacgcagccgcggcaggccagcggggagatgctgccccggaggctgggagcgggaaggcggctgcgggcgcagcggcctcggggactcgcctccgcgggtgctcaaggctgaaggcgc

SEQ ID NO: 511427 - DNA, 120 bp, Artificial Sequence
  ENSG00000164379_1 (sequence is synthesized)
cggaccttcccccacggtggcacgcacatcatccggcaccatttccgtgccccgaagacgcccgcgcgggacctgggaccgccagtgaagaacccctcctgggctctttaacgagcagca

SEQ ID NO: 511428 - DNA, 120 bp, Artificial Sequence
  ENSG00000164379_2 (sequence is synthesized)
gatgcgcatgctgcttctctccggcaggaaagccttctaagcccggcgtgctcgggcacccgagggtggaaccgcggcccctgcacacactcaccccaaagtctcaacgtcgaaccgaag

SEQ ID NO: 511429 - DNA, 120 bp, Artificial Sequence
  ENSG00000164379_3 (sequence is synthesized)
gcgacacccacccaactcctccctctccgccccatagtccacccaacacttgcagcccctccagagaaaaagcccagcggaagaggactccggaaaagtgactatctcggaagaccaggg

SEQ ID NO: 511430 - DNA, 120 bp, Artificial Sequence
  ENSG00000164379_4 (sequence is synthesized)
tagagctcccgggagaaaaaggcgaagatccccggccccggatcgccatccccttccctggcaccagcttctctaggctgcgcgaaggaagagggtacgacgccggggagggactgggtg

SEQ ID NO: 511431 - DNA, 120 bp, Artificial Sequence
  ENSG00000164379_5 (sequence is synthesized)
cgcgggcatgaagttggaggtgttcgtccctcgcgcggcccacggggacaagcagggcagtgacctggagggcgcgggcggcagcgacgcgccgtccccgctgtcggcggcgggagacga

SEQ ID NO: 511432 - DNA, 120 bp, Artificial Sequence
  ENSG00000164379_6 (sequence is synthesized)
ctccctgggctcagatggggactgcgcggccaacagcccggccgcgggcggcggcgccagagatacgcagggcgacggcgaacagagtgcgggaggcgggccgggcgcggaggaggcgat

SEQ ID NO: 511433 - DNA, 120 bp, Artificial Sequence
  ENSG00000164379_7 (sequence is synthesized)
cgcggaggccggggcggcggggccaggcgcgggcggcgcggggagcggcgagggtgcacgcagcaagccatatacgcggcggcccaagcccccctactcgtacatcgcgctcatcgccat

SEQ ID NO: 511434 - DNA, 120 bp, Artificial Sequence
  ENSG00000164379_8 (sequence is synthesized)
caagcccccctactcgtacatcgcgctcatcgccatggccatccgcgactcggcgggcgggcgcttgacgctggcggagatcaacgagtacctcatgggcaagttcccctttttccgcgg

SEQ ID NO: 511435 - DNA, 120 bp, Artificial Sequence
  ENSG00000164379_9 (sequence is synthesized)
cagctacacgggctggcgcaactccgtgcgccacaacctttcgctcaacgactgcttcgtcaaggtgctgcgcgacccctcgcggccctggggcaaggacaactactggatgctcaaccc

SEQ ID NO: 511436 - DNA, 120 bp, Artificial Sequence
  ENSG00000164379_10 (sequence is synthesized)
gatgctcaaccccaacagcgagtacaccttcgccgacggggtcttccgccgccgccgcaagcgcctcagccaccgcgcgccggtccccgcgcccgggctgcggcccgaggaggccccggg

SEQ ID NO: 511437 - DNA, 120 bp, Artificial Sequence
  ENSG00000164379_11 (sequence is synthesized)
cccggcctcgccccgcatgcgctcgcccgcccgccaggaggagcgcgccagccccgcgggcaagttctccagctccttcgccatcgacagcatcctgcgcaagcccttccgcagccgccg

SEQ ID NO: 511438 - DNA, 120 bp, Artificial Sequence
  ENSG00000164379_12 (sequence is synthesized)
ccatcgacagcatcctgcgcaagcccttccgcagccgccgcctcagggacacggcccccgggacgacgcttcagtggggcgccgcgccctgcccgccgctgcccgcgttccccgcgctcc

SEQ ID NO: 511439 - DNA, 80 bp, Artificial Sequence
  ENSG00000164379_13 (sequence is synthesized)
gccgaggtgccaccgaccgcgccgcccctcctgcttgcacctctcccggcggcggcccccgccaagccactccgaggccc

SEQ ID NO: 511440 - DNA, 120 bp, Artificial Sequence
  ENSG00000164379_14 (sequence is synthesized)
gccggcggcgcgcacctgtactgccccctgcggctgcccgcagccctgcaggcggcctcagtccgccgccctggcccgcacctgccgtacccggtggagacgctcctagcctgagtagcg

SEQ ID NO: 511441 - DNA, 120 bp, Artificial Sequence
  ENSG00000164379_15 (sequence is synthesized)
agcgccgcggggcccgggaacgccgagtgcgcgccgtcggggaggcgggaacgcgggcccgcgcgcggactttgcactttgaatccagaggaagatgaatttttaaaatctccatcaaac

SEQ ID NO: 511442 - DNA, 120 bp, Artificial Sequence
  ENSG00000164379_16 (sequence is synthesized)
gtgccttaaagctaaagcattttgacaggagtatttaaacttagtccaggatattttcctttgtgttttataactttacagaggaccaaagcaattcttgttttagtttctttgcgaagc

SEQ ID NO: 511443 - DNA, 120 bp, Artificial Sequence
  ENSG00000164379_17 (sequence is synthesized)
ctgctcctccttcccttcataaggactttttttgtctttctttaacgcccaggcttcgtcttatttctactgtttttgtcgcaacttccattgatttatgtcccttccctcccccctaag

SEQ ID NO: 511444 - DNA, 120 bp, Artificial Sequence
  ENSG00000164379_18 (sequence is synthesized)
tacatcagggaacctttccacactataaatgatatgactactgtttggggtttctgggcccccatccgtgtacgtatgtggcatttccaggtatgactgagtgtgagagacatgtcagag

SEQ ID NO: 511445 - DNA, 120 bp, Artificial Sequence
  ENSG00000164379_19 (sequence is synthesized)
gctcttcagtgatttcttgctattgaccgatgcttcactgtgccaaaagagaaaaaaaatgttgggttttgtaattaaattatttatatatttttgaaacccgaattgaaaatgttgcag

SEQ ID NO: 511446 - DNA, 120 bp, Artificial Sequence
  ENSG00000164379_20 (sequence is synthesized)
gcaacgggctacagctttattagtggttctctaactgtggtctccttgggccaagcaatttctttaaaggaaaagttgattatgtatgtggggtgccaggaccactgccttgaaagcaag

SEQ ID NO: 511447 - DNA, 120 bp, Artificial Sequence
  ENSG00000164379_21 (sequence is synthesized)
tgtgatttttatttttaatattattttatttgtgtctgtgtacatattcatgtataaattttatgaaacccaagcatagtgcttattttttaataaaacaactgacttaacacattgtga

SEQ ID NO: 511448 - DNA, 120 bp, Artificial Sequence
  ENSG00000164393_0 (sequence is synthesized)
ctttttatttctttttatagaaacaagaaagtcagctgtgtggaagacaatgactcatatacttttgctgtactacttggtgtttcttttgcccacagagtcctgtaggacattgtatca

SEQ ID NO: 511449 - DNA, 120 bp, Artificial Sequence
  ENSG00000164393_1 (sequence is synthesized)
ggctgcaagcaaaagcaaggagaaggtgcctgccaggccacacggtgtatgcgatggtgtctgtacagactactcccagtgtactcaaccttgccctccagacactcagggaaatatggg

SEQ ID NO: 511450 - DNA, 120 bp, Artificial Sequence
  ENSG00000164393_2 (sequence is synthesized)
gttttcatgcaggcaaaagacatggcacaagatcactgacacctgccagactcttaatgccctcaacatctttgaggaggattcacgtttggttcagccatttgaagacaatataaaaat

SEQ ID NO: 511451 - DNA, 120 bp, Artificial Sequence
  ENSG00000164393_3 (sequence is synthesized)
aagtgtatatactggaaagtctgagaccataacagatatgttgctacaaaagtgtcccacagatctgtcttgtgtaattagaaacattcagcagtctccctggataccaggaaacattgc

SEQ ID NO: 511452 - DNA, 120 bp, Artificial Sequence
  ENSG00000164393_4 (sequence is synthesized)
cgtaattgtgcagctcttacacaacatatcaacagcaatatggacaggtgttgatgaggcaaagatgcagagttacagcaccatagccaaccacattcttaacagcaaaagcatctccaa

SEQ ID NO: 511453 - DNA, 120 bp, Artificial Sequence
  ENSG00000164393_5 (sequence is synthesized)
ctggactttcattcctgacagaaacagcagctatatcctgctacattcagtcaactcctttgcaagaaggctattcatagataaacatcctgttgacatatcagatgtcttcattcatac

SEQ ID NO: 511454 - DNA, 120 bp, Artificial Sequence
  ENSG00000164393_6 (sequence is synthesized)
tatgggcaccaccatatctggagataacattggaaaaaatttcactttttctatgagaattaatgataccagcaatgaagtcactgggagagtgttgatcagcagagatgaacttcggaa

SEQ ID NO: 511455 - DNA, 120 bp, Artificial Sequence
  ENSG00000164393_7 (sequence is synthesized)
ggtgccttccccttctcaggtcatcagcattgcatttccaactattggggctattttggaagccagtcttttggaaaatgttactgtaaatgggcttgtcctgtctgccattttgcccaa

SEQ ID NO: 511456 - DNA, 120 bp, Artificial Sequence
  ENSG00000164393_8 (sequence is synthesized)
ggaacttaaaagaatctcactgatttttgaaaagatcagcaagtcagaggagaggaggacacagtgtgttggctggcactctgtggagaacagatgggaccagcaggcctgcaaaatgat

SEQ ID NO: 511457 - DNA, 120 bp, Artificial Sequence
  ENSG00000164393_9 (sequence is synthesized)
tcaagaaaactcccagcaagctgtttgcaaatgtaggccaagcaaattgtttacctctttctcaattcttatgtcacctcacatcttagagagtctgattctgacttacatcacatatgt

SEQ ID NO: 511458 - DNA, 120 bp, Artificial Sequence
  ENSG00000164393_10 (sequence is synthesized)
aggcctgggcatttctatttgcagcctgatcctttgcttgtccattgaggtcctagtctggagccaagtgacaaagacagagatcacctatttacgccatgtgtgcattgttaacattgc

SEQ ID NO: 511459 - DNA, 120 bp, Artificial Sequence
  ENSG00000164393_11 (sequence is synthesized)
agccactttgctgatggcagatgtgtggttcattgtggcttcctttcttagtggcccaataacacaccacaagggatgtgtggcagccacattttttgttcatttcttttacctttctgt

SEQ ID NO: 511460 - DNA, 120 bp, Artificial Sequence
  ENSG00000164393_12 (sequence is synthesized)
atttttctggatgcttgccaaggcactccttatcctctatggaatcatgattgttttccataccttgcccaagtcagtcctggtggcatctctgttttcagtgggctatggatgcccttt

SEQ ID NO: 511461 - DNA, 120 bp, Artificial Sequence
  ENSG00000164393_13 (sequence is synthesized)
ggccattgctgccatcactgttgctgccactgaacctggcaaaggctatctacgacctgagatctgctggctcaactgggacatgaccaaagccctcctggccttcgtgatcccagcttt

SEQ ID NO: 511462 - DNA, 120 bp, Artificial Sequence
  ENSG00000164393_14 (sequence is synthesized)
ggccatcgtggtagtaaacctgatcacagtcacactggtgattgtcaagacccagcgagctgccattggcaattccatgttccaggaagtgagagccattgtgagaatcagcaagaacat

SEQ ID NO: 511463 - DNA, 120 bp, Artificial Sequence
  ENSG00000164393_15 (sequence is synthesized)
cgccatcctcacaccacttctgggactgacctggggatttggagtagccactgtcatcgatgacagatccctggccttccacattatcttctccctgctcaatgcattccagggtttctt

SEQ ID NO: 511464 - DNA, 120 bp, Artificial Sequence
  ENSG00000164393_16 (sequence is synthesized)
catcctagtgtttggaaccatcctggatccaaagataagagaagccttaaagggttgagtagcctctgcaaaaaggagctccagaatatcagagaatgcttcttctgaattatcttgtca

SEQ ID NO: 511465 - DNA, 120 bp, Artificial Sequence
  ENSG00000164393_17 (sequence is synthesized)
tcccatcaaaggcccaagttaacaaaccaggctacatccctaacctaggaggaatggcagagcccaaaggagaaatgtgctcattcctgtcttcttgcttctggagaatatgtaggaagc

SEQ ID NO: 511466 - DNA, 120 bp, Artificial Sequence
  ENSG00000164393_18 (sequence is synthesized)
tcacacatgtggtgctgatggaggagggcgtgatgtgcagaaaggatgaaaggctcctctgtctaagctgttctgtgctactaaacatttctcgtccatcaactgtacatagctacatat

SEQ ID NO: 511467 - DNA, 120 bp, Artificial Sequence
  ENSG00000164393_19 (sequence is synthesized)
gtcatgctgggcagccacagcaaacaaaaagacaaagggggccacaaccgtggtttttgttggggcttccatctctatgctgttgggtcacatttgtcttcagaaagcaacctctgtctc

SEQ ID NO: 511468 - DNA, 120 bp, Artificial Sequence
  ENSG00000164393_20 (sequence is synthesized)
ctaagtaggacattgcagattatttttttttttcaaaaggaatccactgccagtatatccactttttcaaatttaaatagattggattgtcaacttggtttaggcttagatacaacttcc

SEQ ID NO: 511469 - DNA, 120 bp, Artificial Sequence
  ENSG00000164393_21 (sequence is synthesized)
ttggccatgaaccaaggggaaaagcatagagcttttgagacagaaagatgaccattttcagttaaggagatggaagtctggagttgtgagtcaatgctaatcgaggactgagccagaggt

SEQ ID NO: 511470 - DNA, 120 bp, Artificial Sequence
  ENSG00000164393_22 (sequence is synthesized)
agaaacccaagtgtgctggctcccagccctgtacttcctcttcaagaccatatagacactgaaagatcttctgcctacactgacaatgtaaggtcaatcctcaccaacaatatgcttttt

SEQ ID NO: 511471 - DNA, 120 bp, Artificial Sequence
  ENSG00000164393_23 (sequence is synthesized)
tgatacctgggattggagagaggaaatatcacatttccaattcagagctgctctttttcttaacctgtatgtaaacaaattcaacattcaaaccaggtgttacctgatagaacagtattg

SEQ ID NO: 511472 - DNA, 120 bp, Artificial Sequence
  ENSG00000164393_24 (sequence is synthesized)
taggtagaagctctttgaggaaaaaaaaaaaacctctttacaaagcaaggacatagatgactgcagcagcatctaactagtggatgaaggcaaaggggcaatgggcagcctttaattatc

SEQ ID NO: 511473 - DNA, 120 bp, Artificial Sequence
  ENSG00000164393_25 (sequence is synthesized)
atgggcagcctttaattatcccaacaagaagtcagtattgatgacgtttcattacaaaggagaaagtggggctcaccttaggtatgagtgcagtcccttccttccttccttccttccttc

SEQ ID NO: 511474 - DNA, 120 bp, Artificial Sequence
  ENSG00000164393_26 (sequence is synthesized)
cttccttcttccctccctccctccctctctctctctctttctccctttctctttctttctttttttctccctctctctctttctttctttctttgtttcttattacaaataatcttccta

SEQ ID NO: 511475 - DNA, 120 bp, Artificial Sequence
  ENSG00000164393_27 (sequence is synthesized)
ttcttattacaaataatcttcctataagtaggaaagtttgagcagacaaaaagcatcaatctgaagttaaaaaaaatgcatcaacctggagaaatagtcatttttcaaatggcattgctt

SEQ ID NO: 511476 - DNA, 120 bp, Artificial Sequence
  ENSG00000164393_28 (sequence is synthesized)
atcttgggacaacaaaagcatccttcacaaataaagtcagagagtggttttaatttaccatttaccaatagatttgtatgttcttttcaagagaaggggtgagatagacatagtcctggt

SEQ ID NO: 511477 - DNA, 120 bp, Artificial Sequence
  ENSG00000164393_29 (sequence is synthesized)
tttcctcaatgcaggcttaggtacaaagagatgtcacttacccagagtccatatattgaagtgaaaatggaatttcatgaagcaaatatagttataggatggtaactctggacaaatttt

SEQ ID NO: 511478 - DNA, 120 bp, Artificial Sequence
  ENSG00000164393_30 (sequence is synthesized)
ataaaagatgaactccaattgcttcatttcacagataacagctctgagcactagggagagagggagggattggcctagcatttgctttgtgtcttgagcagtcacatctattatggaagt

SEQ ID NO: 511479 - DNA, 120 bp, Artificial Sequence
  ENSG00000164393_31 (sequence is synthesized)
actcactactcagctatactcactccctgagacaggatggttggaaagaaaccccaccttagcttcatcattaaccaagaaaccccaaggatgcttagagaaaaactctggaattatttg

SEQ ID NO: 511480 - DNA, 120 bp, Artificial Sequence
  ENSG00000164393_32 (sequence is synthesized)
ggaattcctggaagaagctatgccctctctcctgcatcccaaagcccactctacaccatcttgaaaaatgtcaaggaactgcatggattaggttgactctggatgaccctgggtagagac

SEQ ID NO: 511481 - DNA, 120 bp, Artificial Sequence
  ENSG00000164393_33 (sequence is synthesized)
acattcagtttcctgctgacaccgcaccaagaaagtgatttggtcaggtgactctaggagaaattggtactgatagtatccaaggcagatttttaagtatcagacttaatacataatgat

SEQ ID NO: 511482 - DNA, 120 bp, Artificial Sequence
  ENSG00000164393_34 (sequence is synthesized)
tcttgggaaagccatttaaatccctgagactttaagtggataaatgtaggtaaagtagtatagtacttggctcataataattgctcattcaaattcacatgttagttttagttgtttttt

SEQ ID NO: 511483 - DNA, 120 bp, Artificial Sequence
  ENSG00000164393_35 (sequence is synthesized)
ttaaattagagtcctgtgaatacatgaacccacccacccacatgcaaacacaagcaaacacacagccatgaccccatgcataagtttggctgaagacaccctcatgggaactagttcact

SEQ ID NO: 511484 - DNA, 120 bp, Artificial Sequence
  ENSG00000164393_36 (sequence is synthesized)
gacttccaaattaaagagttaagcatttgatttggtctgttcaacattaggggtatcagccagcaaaatctgttgagcttaccattgaaaaatcctttcattcattactgtggtcataat

SEQ ID NO: 511485 - DNA, 120 bp, Artificial Sequence
  ENSG00000164393_37 (sequence is synthesized)
acacagttacctggccaggaaagagtacacatcacagggatctgctcactgcacgtgtgcctgagctctccctcactttctgccttcttcaagaattcttccctgattggtccaaccaga

SEQ ID NO: 511486 - DNA, 120 bp, Artificial Sequence
  ENSG00000164393_38 (sequence is synthesized)
agcgctgattctccccacctgatttcctgtaattttataatctatgtccttcacttttgtgttatattgtttatttccttttggtctttttgtgtgcatatgtatatgttttggggaatg

SEQ ID NO: 511487 - DNA, 120 bp, Artificial Sequence
  ENSG00000164393_39 (sequence is synthesized)
gggtattcacttttgttactcactgtgttactcacttttgtatgcccatagtgcagagcatggtgccttgtacatagagtatgttcggtaaatatgtgcaataaaaagtcctttgattac

SEQ ID NO: 511488 - DNA, 120 bp, Artificial Sequence
  ENSG00000164393_40 (sequence is synthesized)
aggagctactcccatgcaggacttgtctgtcaggctgcagcactcctgcacatggggctgactgcctatgggaaccgcagggtccagcctggggagctgccattcggggctaacttgact

SEQ ID NO: 511489 - DNA, 120 bp, Artificial Sequence
  ENSG00000164393_41 (sequence is synthesized)
ctcatccatacaagagcccagcctgtgatttgtagcaaggtatgacagaagagagccagtaatgcccatatctccagctgccagggagtggggcaaatttgccggtgagtttgtctttgg

SEQ ID NO: 511490 - DNA, 120 bp, Artificial Sequence
  ENSG00000164393_42 (sequence is synthesized)
aggtgcttgtgacattagatttctacataaaagccaatggatttggaatagcatatggagtggggaaataaacttttgttccagagatacctggatttggatcctgactctttcatttac

SEQ ID NO: 511491 - DNA, 120 bp, Artificial Sequence
  ENSG00000164393_43 (sequence is synthesized)
taataatgtataacatgatcttgggatatttactcaacttttttcaagccatattttcctcacatataaaatgagtgcaatactgttcactttataggggtgtttggaaagtgaaattaa

SEQ ID NO: 511492 - DNA, 120 bp, Artificial Sequence
  ENSG00000164393_44 (sequence is synthesized)
atggtgaatgggaaaggatcaagtactaaaatgatctaaagaccatagacagcctagtaataggctaagttgttatggtttaaaaattaagcaataacaccttccccaaaatttaggtat

SEQ ID NO: 511493 - DNA, 120 bp, Artificial Sequence
  ENSG00000164393_45 (sequence is synthesized)
gtagctggaggtattaaagtttgcacatttattacatttccttccacttaggatttttaactaccattggaaaccatcttattttaacatggcaagctctacagagaggtattgaagata

SEQ ID NO: 511494 - DNA, 120 bp, Artificial Sequence
  ENSG00000164393_46 (sequence is synthesized)
gtttctcctctcttctcttatcacacttagatgaattaagcaacgttcacagtttcatgtgtatgctttgccaaattttctatgcttatacaaacatattttcacataacacgggttaaa

SEQ ID NO: 511495 - DNA, 120 bp, Artificial Sequence
  ENSG00000164393_47 (sequence is synthesized)
acaatgtatattattgtgtaacttgcttttgcacttaaaaatatgctctagaattttaccagctcattatgcatgaatatttctctaatggctgcataccattccatattcaataatttc

SEQ ID NO: 511496 - DNA, 120 bp, Artificial Sequence
  ENSG00000164393_48 (sequence is synthesized)
cttcttgattgaaatttttctccattgttttgtgttatagtatgtgaatgatccaaagtttattatattgaatgttaatatgtagatagtaactaattgaaaagaaagcttttatttttc

SEQ ID NO: 511497 - DNA, 120 bp, Artificial Sequence
  ENSG00000164393_49 (sequence is synthesized)
atggggctgactgcctatgggaaccgcagggtccagcctggggagctgccattcggggctaacttgactctcatccatacaagagcccagcctgtgatttgtagcaagcttctcttgaca

SEQ ID NO: 511498 - DNA, 120 bp, Artificial Sequence
  ENSG00000164393_50 (sequence is synthesized)
aagagagtgagtcccatctctttcttcttgtccaaatttcaaaattcctggggtgaggatggatgggttcagttggatcaactgccatcccctaatgcagtcagctctgaccaagtacac

SEQ ID NO: 511499 - DNA, 68 bp, Artificial Sequence
  ENSG00000164393_51 (sequence is synthesized)
gcaaggtatgacagaagagagccagtaatgcccatatctccagctgccagggagtggggcaaatttgc

SEQ ID NO: 511500 - DNA, 120 bp, Artificial Sequence
  ENSG00000164393_52 (sequence is synthesized)
ccaaagtgctgggattacagatatgaaccatcgcgcccggcccagaagatgacttcttgactcctctctctccgtatctgacactacttcattctttaccaggaaacaagaaagtcagct

SEQ ID NO: 511501 - DNA, 120 bp, Artificial Sequence
  ENSG00000164398_0 (sequence is synthesized)
ggctctaccaccacccggcttctcagagcaggcggctgttgccatcgactgtccccaggagggcagactcggggcagggccttcgccacttttgtgctttgatcaagatgtggtaacttc

SEQ ID NO: 511502 - DNA, 120 bp, Artificial Sequence
  ENSG00000164398_1 (sequence is synthesized)
tttccctgggccccacaggccctataaagggaggctggttctagtgggacgagctcagccgcctcctcagtgccaggagcctgctggaaagagtttgtcctctcacttctggagaagatg

SEQ ID NO: 511503 - DNA, 120 bp, Artificial Sequence
  ENSG00000164398_2 (sequence is synthesized)
cagacacaggagatcctgaggatactgcgactgcctgagctaggtgacttgggacagtttttccgcagcctctcggccaccaccctcgtgagtatgggtgccctggctgccatccttgcc

SEQ ID NO: 511504 - DNA, 120 bp, Artificial Sequence
  ENSG00000164398_3 (sequence is synthesized)
tactggttcactcaccggccaaaggccttgcagccgccatgcaacctcctgatgcagtcagaagaagtagaggacagtggcggggcacggcgatctgtgattgggtctggccctcagcta

SEQ ID NO: 511505 - DNA, 120 bp, Artificial Sequence
  ENSG00000164398_4 (sequence is synthesized)
cttacccactactatgatgatgcccggaccatgtaccaggtgttccgccgtgggcttagcatctcagggaatgggccctgtcttggtttcaggaagcctaagcagccttaccagtggctg

SEQ ID NO: 511506 - DNA, 120 bp, Artificial Sequence
  ENSG00000164398_5 (sequence is synthesized)
tcctaccaggaggtggccgacagggctgaatttctggggtccggacttctccagcacaattgtaaagcatgcactgatcagtttattggtgtttttgcacaaaatcggccagagtggatc

SEQ ID NO: 511507 - DNA, 120 bp, Artificial Sequence
  ENSG00000164398_6 (sequence is synthesized)
attgtggagctggcctgctacacatattccatggtggtggtcccgctctatgacaccctgggccctggggctatccgctacatcatcaatacagcggacatcagcaccgtgattgtggac

SEQ ID NO: 511508 - DNA, 120 bp, Artificial Sequence
  ENSG00000164398_7 (sequence is synthesized)
aaacctcagaaggctgtgcttctgctagagcatgtggagaggaaggagactccaggcctcaagctgatcatcctcatggacccattcgaagaagccctgaaagagagagggcagaagtgc

SEQ ID NO: 511509 - DNA, 120 bp, Artificial Sequence
  ENSG00000164398_8 (sequence is synthesized)
ggggtggtcattaagtccatgcaggccgtggaggactgtggccaagagaatcaccaggctcctgtgcccccgcagcctgatgacctctccattgtgtgtttcacaagcggcacgacaggg

SEQ ID NO: 511510 - DNA, 120 bp, Artificial Sequence
  ENSG00000164398_9 (sequence is synthesized)
aacccaaaaggtgcgatgctcacccatgggaacgtggtggctgatttctcaggctttctgaaagtgacagagagtcagtgggctcccacttgtgcggatgtgcacatttcctatttgcct

SEQ ID NO: 511511 - DNA, 120 bp, Artificial Sequence
  ENSG00000164398_10 (sequence is synthesized)
ttagcacacatgtttgagcgaatggtgcagtctgtcgtctattgccacggagggcgtgttggcttcttccagggagatatccgccttctctcagatgacatgaaggctctatgccccacc

SEQ ID NO: 511512 - DNA, 120 bp, Artificial Sequence
  ENSG00000164398_11 (sequence is synthesized)
cgactgctgaaccggatgtacgacaagatcttcagccaggcaaacacaccattaaagcgctggctcctggagtttgcagcaaagcgtaagcaagccgaggtccggagtggaatcatcagg

SEQ ID NO: 511513 - DNA, 120 bp, Artificial Sequence
  ENSG00000164398_12 (sequence is synthesized)
aatgatagtatctgggatgaactcttctttaataagattcaggccagtcttggtgggtgtgtgcggatgattgttactggagcagccccagcatcaccaacagttctgggatttctccgg

SEQ ID NO: 511514 - DNA, 120 bp, Artificial Sequence
  ENSG00000164398_13 (sequence is synthesized)
gcagctctagggtgccaggtttatgaaggttatggccaaactgagtgcacagctggatgtaccttcaccactcctggcgactggacctcagggcacgtaggggcgccacttccctgcaat

SEQ ID NO: 511515 - DNA, 120 bp, Artificial Sequence
  ENSG00000164398_14 (sequence is synthesized)
catatcaagctcgttgatgttgaggaactgaactactgggcctgcaaaggagagggagagatatgtgtgagaggaccaaatgtgttcaaaggctacttgaaagatccagacaggacgaag

SEQ ID NO: 511516 - DNA, 120 bp, Artificial Sequence
  ENSG00000164398_15 (sequence is synthesized)
gaggccctggacagcgatggctggcttcacactggagacatcggaaaatggctgccggcaggaactcttaaaattattgatcggaaaaagcatatatttaaacttgctcagggagaatat

SEQ ID NO: 511517 - DNA, 120 bp, Artificial Sequence
  ENSG00000164398_16 (sequence is synthesized)
gttgcacccgagaagattgagaacatctacatccggagccaacctgtggcgcaaatctatgtccatggggacagcttaaaggcctttttggtaggcattgttgtgcctgaccctgaagtt

SEQ ID NO: 511518 - DNA, 120 bp, Artificial Sequence
  ENSG00000164398_17 (sequence is synthesized)
atgccctcctgggcccagaagagaggaattgaaggaacatatgcagatctctgcacaaataaggatctgaagaaagccattttggaagatatggtgaggttaggaaaagaaagtggactc

SEQ ID NO: 511519 - DNA, 120 bp, Artificial Sequence
  ENSG00000164398_18 (sequence is synthesized)
cattcttttgagcaggttaaagccattcacatccattctgacatgttctcagttcaaaatggcttgctgacaccaacactaaaagctaagagacctgagctgagagagtacttcaaaaaa

SEQ ID NO: 511520 - DNA, 120 bp, Artificial Sequence
  ENSG00000164398_19 (sequence is synthesized)
caaatagaagagctttactcaatctccatgtgaagttcaaggaaagttcttctcagtgtaatgaactgtctagcaatattatagttattcttgaaagtaatgagtcaaaatgacacagct

SEQ ID NO: 511521 - DNA, 120 bp, Artificial Sequence
  ENSG00000164398_20 (sequence is synthesized)
gaaaatgaataagcatctgattttatgactgagccttttcctgtcccaagaggtctttaacaatattttctctatcatcaatgagtatattttatttttattataaaaatgatattgtgg

SEQ ID NO: 511522 - DNA, 120 bp, Artificial Sequence
  ENSG00000164398_21 (sequence is synthesized)
tggactgctaaaaatatcacaaatggcaatgtaaaaatcaagacattttctcaagaactgtgtaccactaaaagtaatatattgtcaatgttcacagaactattaaacataaaggaaaaa

SEQ ID NO: 511523 - DNA, 120 bp, Artificial Sequence
  ENSG00000164398_22 (sequence is synthesized)
gggctgcggggctgcggggctgcgggtcggggaggccgggccgggccgggccgggccccgctgaccgccatgctgaccttcttcctcgtgtcggggggctccctctggctattcgtagag

SEQ ID NO: 511524 - DNA, 120 bp, Artificial Sequence
  ENSG00000164398_23 (sequence is synthesized)
aaccagatgcagcaaatatctaggcaatgtggactacctcattcagtaactgattgtcaaaatcacaattaaatcagacttcaaaaattaaagctaggtgtatagaatcatgctaaaaga

SEQ ID NO: 511525 - DNA, 120 bp, Artificial Sequence
  ENSG00000164398_24 (sequence is synthesized)
aaacatgataactcatagtctacgtaacttcagagtctttaaacatgacaatccacattgtcatatgtgaaaattttctctctgatttttactttcattcatgaaaaatgaaaattcaga

SEQ ID NO: 511526 - DNA, 120 bp, Artificial Sequence
  ENSG00000164398_25 (sequence is synthesized)
tgtcacctaggctggagtgcagtggcttaatcatggctcattgcagtctccatctcctgggctcgagtgatcctcctgtctcacctcccaagtagctgagactacagtacaggcacatgc

SEQ ID NO: 511527 - DNA, 90 bp, Artificial Sequence
  ENSG00000164398_26 (sequence is synthesized)
ttgcagtctccatctcctgggctcgagtgatcctcctgtctcacctcccaagtagctgagactacagagaaattttttttttagagattt

SEQ ID NO: 511528 - DNA, 120 bp, Artificial Sequence
  ENSG00000164398_27 (sequence is synthesized)
tgctaggattacaggcatgagccattgttcccagccaaattcagatattattaaaacacatgtcatatttatatagtaacttacaaagacctttcaatacattttctcatttattaagct

SEQ ID NO: 511529 - DNA, 120 bp, Artificial Sequence
  ENSG00000164398_28 (sequence is synthesized)
aatgtaaaactattcaaggatagtgtgtgtatgttcatggacttcttattataatgaattctaaaagacatctgttgactctacaatgaatggatccttgaggaatacttgggagaagaa

SEQ ID NO: 511530 - DNA, 120 bp, Artificial Sequence
  ENSG00000164398_29 (sequence is synthesized)
actcagagttatttctcagggtaggcagcaattaatgtacctacattccttgctggggtcttctagtcttccattcccaatgtgcccatgctatgcctggaaaccctatatggttgtaat

SEQ ID NO: 511531 - DNA, 120 bp, Artificial Sequence
  ENSG00000164398_30 (sequence is synthesized)
tctgaacaatttcactttttttccagtaagaatatcaaggcagaaggtgggaaggaggggacattatttccagggaaaatagtttttcaacaatataactttgataaacctctttaaaat

SEQ ID NO: 511532 - DNA, 120 bp, Artificial Sequence
  ENSG00000164398_31 (sequence is synthesized)
gccccaagaaaactttttaagtccatagacaaagaaatactgcctaatggcataattacattcctaaaatctttaagcgtgccgaagtttaaccactaaaacctcctttcttgcattatg

SEQ ID NO: 511533 - DNA, 120 bp, Artificial Sequence
  ENSG00000164398_32 (sequence is synthesized)
tatttagatgcaccctgtattggggtgtcaacaatttcttataattaaaggccagataccatggacagcaattaagttccaagctatagattgtgcctctgaaaaaggcatggaccccag

SEQ ID NO: 511534 - DNA, 120 bp, Artificial Sequence
  ENSG00000164398_33 (sequence is synthesized)
gaacgtgtttttcttctgtagagacaagactctaaaagcatatcaacaatccatatgcaattcatgtgttaatttaaaatgtatgtgctcagtgtttgtagtctagaagctcctttccct

SEQ ID NO: 511535 - DNA, 120 bp, Artificial Sequence
  ENSG00000164398_34 (sequence is synthesized)
tggaggaatgccaagcagtttgcaaaaataaatgctgttagttaaaaaccacataatcacatgggcctactgaataaatatgcatcagtgattatatacttatatttcagtcttgtcaaa

SEQ ID NO: 511536 - DNA, 120 bp, Artificial Sequence
  ENSG00000164398_35 (sequence is synthesized)
agtgaatcactgtttcatttgatgtatttacccagtctttttatccagtttttcttgggcatattctctctgaagacccactgttgcacttctaaatttgacagttaagaaatgagctag

SEQ ID NO: 511537 - DNA, 120 bp, Artificial Sequence
  ENSG00000164398_36 (sequence is synthesized)
ttctatacacactgatttttaaaggcgtttctgaataaactaatacttaaaatgtccaaagtcacatctgtacagcattagatttttatatttaatatatatttgactaattaaaagtga

SEQ ID NO: 511538 - DNA, 120 bp, Artificial Sequence
  ENSG00000164398_37 (sequence is synthesized)
aagttgttacctgaactggatattcatactattttaagggcaagttgcttacatttcaataacaacaaaaaaagaatctgtttcccattgtcctcctactcaactaaaattcatagttgg

SEQ ID NO: 511539 - DNA, 120 bp, Artificial Sequence
  ENSG00000164398_38 (sequence is synthesized)
ctttaagcccaaaagaattttgaacaatgtgacagaaacaagtaatgtaaaacttattttgttttatttatactttataatagttagatataacagattatggacaacttaatatttctt

SEQ ID NO: 511540 - DNA, 86 bp, Artificial Sequence
  ENSG00000164398_39 (sequence is synthesized)
ctccgtcgtttcttctttttgccacttaaaatatcttatatttctagatttccaggtctatgtggaaatcatcacacttgggccaa

SEQ ID NO: 511541 - DNA, 120 bp, Artificial Sequence
  ENSG00000164398_40 (sequence is synthesized)
gatttccaggtctatgtggaaatcatcacacttgggccaataaatgggttagttcagatgtgctgagaaaagtaaatagtgtaccctaaatatcttgcatgtacatttatctatttctct

SEQ ID NO: 511542 - DNA, 120 bp, Artificial Sequence
  ENSG00000164398_41 (sequence is synthesized)
gtttaatgccacttaattttgtaagaaatgagaaatgaaaccctatgtatcagtggaaaaatccttcttgcttcagatttcccaactttattctggaggagaaaaaaatctgtatttctc

SEQ ID NO: 511543 - DNA, 120 bp, Artificial Sequence
  ENSG00000164398_42 (sequence is synthesized)
attaacagagatagaaaaaggtgatgtacttacgatggtcacattcatattgggcattggatctatttaagcctagaagtataacagataatcagttccttaagtgtaaatatgttctta

SEQ ID NO: 511544 - DNA, 120 bp, Artificial Sequence
  ENSG00000164398_43 (sequence is synthesized)
aatgtttggcctttttatctgttattcaaatgtattagtaattctcatattttgcaaacagatccttttgtgtatattataaaatatataccaaatctgtttttccttttgctgtggaag

SEQ ID NO: 511545 - DNA, 120 bp, Artificial Sequence
  ENSG00000164398_44 (sequence is synthesized)
atgtctttatataatattgagacttcccttgcaaatgagagacgggactctggtcaggtatagtgtgtaggcctagccccatgtattaggaactcataaactcagaaatccaaggattaa

SEQ ID NO: 511546 - DNA, 120 bp, Artificial Sequence
  ENSG00000164398_45 (sequence is synthesized)
acattttatgtctccttcatttatgcaagtcatgctttcattctacatgtagttaaaactacaagtatgagaaaaaatagaactttccattggaattttttccaatcaggtaatgtttta

SEQ ID NO: 511547 - DNA, 120 bp, Artificial Sequence
  ENSG00000164398_46 (sequence is synthesized)
gcaacttgaaatcagcacttaatttgattgtattacctatcaaagaaccaataacctttcctttttctgcagtaaagaaaatgaaatatcctttattttccaaatgtatgaagcacaaat

SEQ ID NO: 511548 - DNA, 120 bp, Artificial Sequence
  ENSG00000164398_47 (sequence is synthesized)
gcaatatagttatttaaaatataaaatactttaaaatgaatgtgaagaatgggaaaatatatttttgcatgaaaacagactacttacaaatgtgcttaatatctcaggaaaaaaagaatg

SEQ ID NO: 511549 - DNA, 120 bp, Artificial Sequence
  ENSG00000164398_48 (sequence is synthesized)
aataaccgtatataaaattggtaaactataaattggctgtatttccttgccggttttaattttaaggaagcatttacatgaaaagaaaaaaggatcctagtagtctgaatttcctctcaa

SEQ ID NO: 511550 - DNA, 120 bp, Artificial Sequence
  ENSG00000164398_49 (sequence is synthesized)
gtatgctagaaaatactttctatgaatttacaattaactgcaataagaagtgggttagcattcaagtaaggtcaataccccaaatgagaaactcttcagttagaacacattagtggttgt

SEQ ID NO: 511551 - DNA, 120 bp, Artificial Sequence
  ENSG00000164398_50 (sequence is synthesized)
aacacagaggcagtagataaatatttgaaatgtgagcatttctaaacttggtaccaaatggaaagggtttcatgaggtgacagtggcttttaaacattcatttgaccgattattctaatt

SEQ ID NO: 511552 - DNA, 120 bp, Artificial Sequence
  ENSG00000164398_51 (sequence is synthesized)
ttccttgttaaatcattgcaacagttgcatgggggagaatggatattttttgaagaattgcttattccactttcaatttttaaaaatcgaggggattaaaatattactttttaaatatgc

SEQ ID NO: 511553 - DNA, 120 bp, Artificial Sequence
  ENSG00000164398_52 (sequence is synthesized)
atgcataaaagtatcttaactgtaattacattttcagttgctttgttatagtagcatgcatattaaatataaaatgcatttatgaaaatttttgtaaaaaataaaagatttttcatttct

SEQ ID NO: 511554 - DNA, 120 bp, Artificial Sequence
  ENSG00000164398_53 (sequence is synthesized)
gaagaagtagagacctgctgttccaagaggtggcaggctctggcccagcccagggtagctcaaatagtgcttgaagaagaggacagtggcggggcacggcgatctgtgattgggtctggc

SEQ ID NO: 511555 - DNA, 120 bp, Artificial Sequence
  ENSG00000164398_54 (sequence is synthesized)
gatttgtcagagcctaggtgaacacttgccactccctcccctcactggtttgcagaggtggcacccggaggctccccatgtctgcaaactcgggtcctagggggcgttggtgtcagcggg

SEQ ID NO: 511556 - DNA, 120 bp, Artificial Sequence
  ENSG00000164398_55 (sequence is synthesized)
catgcaacctcctgatgcagtcagaagaagtagagttctcttcccctgatgcaacctgctaatgctctgtcctggccgtgagcagatgtgtagagatactcaccacgctttcactcatat

SEQ ID NO: 511557 - DNA, 120 bp, Artificial Sequence
  ENSG00000164398_56 (sequence is synthesized)
ccaccacataccctgttgtgcaccttgccttttgctcttgacagtgcaccttggcgatcataagcatgttttgccttgtaggggagggtgcaggttgaggtaggggctgggatcttcagg

SEQ ID NO: 511558 - DNA, 120 bp, Artificial Sequence
  ENSG00000164398_57 (sequence is synthesized)
ttcagagaatttggatcagagagttgtttgctcagcctcctgaagatgtgctgatttgagattggcatgagaatcaaaggtgcatatcagtctaactttactgattcttaatgtccttat

SEQ ID NO: 511559 - DNA, 120 bp, Artificial Sequence
  ENSG00000164398_58 (sequence is synthesized)
agtttttgaaaaaggtggagtctgagaattttaatgctggaccacaaataaccactttaaatgcatttgtcatgactgtgttctcctttggtgagcactgcaggcctttttggtaggcat

SEQ ID NO: 511560 - DNA, 79 bp, Artificial Sequence
  ENSG00000164398_59 (sequence is synthesized)
ataacctgggctgccattcacaggcaggagtttctgttctcattagagcaaccccacttttaccatcacttttcactcc

SEQ ID NO: 511561 - DNA, 120 bp, Artificial Sequence
  ENSG00000164398_60 (sequence is synthesized)
accccacttttaccatcacttttcactccaaatactgaaatgacccatacgtgacaaatattcagttgatttctgggagtactaagatcccagaaagaaaagcatgcaaacctatttttc

SEQ ID NO: 511562 - DNA, 120 bp, Artificial Sequence
  ENSG00000164398_61 (sequence is synthesized)
ctttctaacttcaaataacttcaaaaattgatatacccatggttttgtgtgtacctttatttagaaagtaatccttaataacttgtttttcaaaggtcagggtttaattcagtcattttg

SEQ ID NO: 511563 - DNA, 120 bp, Artificial Sequence
  ENSG00000164398_62 (sequence is synthesized)
tgtttaaggactactagagtctgagaaacaacggcaactgctaatttataaggctgtacttaaaggtaaatctaaaatcaaaaaagctttgatgtcttggcctgaccaaagcatgttagc

SEQ ID NO: 511564 - DNA, 120 bp, Artificial Sequence
  ENSG00000164398_63 (sequence is synthesized)
attttataactggctaacaaaggaggacttttcccacaagtggtgagtatgtcctgcagtttccttcagcataaaggagtgtatcttttcaaaaaagtttggctttttcttcactgtgga

SEQ ID NO: 511565 - DNA, 120 bp, Artificial Sequence
  ENSG00000164398_64 (sequence is synthesized)
gaaagtcacactccacattcatggtagatgacattatgaagtgtgtgccccaaacacttagtagaaaactgtgagagacagtttattttagcagaaaactgtgagagacagttggtggct

SEQ ID NO: 511566 - DNA, 120 bp, Artificial Sequence
  ENSG00000164398_65 (sequence is synthesized)
gagcccaggtcaggagccaaggtttgcccaagctggcccaaaagccagcacaggagagtgaaggcctctgcaaaggggtggagagcagggaagtccagcagaggagagcacgtggaggca

SEQ ID NO: 511567 - DNA, 120 bp, Artificial Sequence
  ENSG00000164398_66 (sequence is synthesized)
cagcccacccagatcccaagccttgtgcagggctcccctggctggagtagcccctgtccctagggtcagtcccatctgtgagatgtgtcctgggccctccctttgctggcggggcacagc

SEQ ID NO: 511568 - DNA, 120 bp, Artificial Sequence
  ENSG00000164398_67 (sequence is synthesized)
agggctccctgtcagcattcctctttaaggccctggttccagggatggcttgtgaggccaggctcagccagtgtttggggtttggccttgtctcctcctctggctggggctcatacccca

SEQ ID NO: 511569 - DNA, 120 bp, Artificial Sequence
  ENSG00000164398_68 (sequence is synthesized)
gccacagttgcatagacttaggagtctctgggcccctttctctgcaaggactagaaagtgctgactagccaagaccttctgaatccctgcccgggtagcccagggatcctggagaaatgg

SEQ ID NO: 511570 - DNA, 120 bp, Artificial Sequence
  ENSG00000164398_69 (sequence is synthesized)
acgtggtggctgatttctcaggctttctgaaagtgacagagaaagtgatctttccgagacaggacgatgtgctcatctccttcctgcctctggctcacatgtttgagagagtaatccagt

SEQ ID NO: 511571 - DNA, 120 bp, Artificial Sequence
  ENSG00000164398_70 (sequence is synthesized)
cgtggtggctgatttctcaggctttctgaaagtgacagaggaccattttctctttattgttttatgattctcttgtcgtcttcctgtcagtgtttctttcctttctgtctcccatgcccg

SEQ ID NO: 511572 - DNA, 120 bp, Artificial Sequence
  ENSG00000164398_71 (sequence is synthesized)
ggtactgacgttggagagcggggccggagagggctggttcgctctgcggccgggcccctcccccgcccgggagcttggcggttccgacaccgcggtcagtgcggggcaagccccagaccc

SEQ ID NO: 511573 - DNA, 120 bp, Artificial Sequence
  ENSG00000164398_72 (sequence is synthesized)
cccctgggcactgtgctgagcacttctgctgcccttccctcttctccacaccccaggagcaaagataagtaaaatgctatgacagctgtcacacaggagaacagagcacccaggccttga

SEQ ID NO: 511574 - DNA, 120 bp, Artificial Sequence
  ENSG00000164398_73 (sequence is synthesized)
ggtccaggaagcatcattcccagagctgccagagcagtggccctggaaaatatggaagcagctgtcagccatggcccagggcctgagcgtatgattctcaggaaaagtgggcaggacatc

SEQ ID NO: 511575 - DNA, 120 bp, Artificial Sequence
  ENSG00000164398_74 (sequence is synthesized)
tgactgtcaggtgtgacggcagaaggttctggcctcttcctgggaaaagcccttctaggtagccagcttctggggtgcactctgtacatcccaactccccgagggcctgccctacagtgt

SEQ ID NO: 511576 - DNA, 120 bp, Artificial Sequence
  ENSG00000164398_75 (sequence is synthesized)
aaccgcgacccggctgccattcgagcctgcccagccataaaacccaggctgcgagtcgcgcgggggcagggtcgcgtgttgatggggtgggtggcggcggggtgggctcaatgtcacgct

SEQ ID NO: 511577 - DNA, 120 bp, Artificial Sequence
  ENSG00000164398_76 (sequence is synthesized)
ccctcagagaggagacttccctgcggagcccactctgctggtttctgtgtgcttcatttggctctttgcttctgcagataacctagacccactgacgctgcgacctaacactccgcttcc

SEQ ID NO: 511578 - DNA, 120 bp, Artificial Sequence
  ENSG00000164398_77 (sequence is synthesized)
tatgctgccctgtctctctcttctttctgcaccttccccctccctctctctctccctctctctctcatttcttctctctttcatctcacctctctctctgtcctcaccactcccattccc

SEQ ID NO: 511579 - DNA, 120 bp, Artificial Sequence
  ENSG00000164398_78 (sequence is synthesized)
tgacagggtagaaggggaggaggcaggagaaggctggctcctcaccctactcaccagcacagaggggtttgccaccttcccactctgcacccgtgccactttgggcccaggaacttgctg

SEQ ID NO: 511580 - DNA, 120 bp, Artificial Sequence
  ENSG00000164398_79 (sequence is synthesized)
cctgcctctcctcccccattgcacatgaacataattcagcctgtcctccctccctagcctcctaggcttctgtgcctgggacagaaccttcagcacagtcctctaactcacttcattatg

SEQ ID NO: 511581 - DNA, 120 bp, Artificial Sequence
  ENSG00000164398_80 (sequence is synthesized)
tgaatgatgggtggcagccttcttagctaacaccacacccaactgatccttaactcaggggcatagcagtagatgatgggatgggagataccttggcaggttgttcctgaatccagccaa

SEQ ID NO: 511582 - DNA, 120 bp, Artificial Sequence
  ENSG00000164398_81 (sequence is synthesized)
tactccccactgtgttgtatgaatgagacatgggtgtgtacgaacattaactgaaaactctggacattctgcatatgctgacctgctgtgtgaatgctgtatgtgtgtgtggagtttgta

SEQ ID NO: 511583 - DNA, 120 bp, Artificial Sequence
  ENSG00000164398_82 (sequence is synthesized)
tgtggggacactggtatacccggcctttatgcatgagccaactatgtcggagtgtggctacatgcaggttgagtgtatacagtccaggtgtgtgtagtccatgtgtacgcgggcacacag

SEQ ID NO: 511584 - DNA, 120 bp, Artificial Sequence
  ENSG00000164398_83 (sequence is synthesized)
atgccacggtgctaactgcatgcacgggttgtacatccgagctgggtacagccttgtgcatgctgcggccctctcctggcacccctacctgcctcagccaacttctctggccggtgcttg

SEQ ID NO: 511585 - DNA, 120 bp, Artificial Sequence
  ENSG00000164398_84 (sequence is synthesized)
gggggcagaggacaggcatcttggaagtagaagccagacttgtggcttatttgacctcacatggcccagagaaggtgtctcccctggcagtcagccacttagctctgcagcagccttggg

SEQ ID NO: 511586 - DNA, 120 bp, Artificial Sequence
  ENSG00000164398_85 (sequence is synthesized)
cagggtctcctaccaggcactccttctgcctctcccaggaactgcctctgggtagagcctgacctgggccttgcactgggcctctagtttgcctgcttctcgggtaggagggccttggct

SEQ ID NO: 511587 - DNA, 120 bp, Artificial Sequence
  ENSG00000164398_86 (sequence is synthesized)
agggagtagtacagagcccttgctatatgtaaggggactcggggctgacagcctctgctcctgaaggaagacgggagaggataaggcacagaccacaagcagttgacccttcaggccttg

SEQ ID NO: 511588 - DNA, 120 bp, Artificial Sequence
  ENSG00000164398_87 (sequence is synthesized)
aggcacccctcctgtgcagccatatcacctgcctcctggtcccatgctggtgggagcctaatggtaggctatgtctataggatagcggtccctgaagcagcattcatctgcctgtaagtc

SEQ ID NO: 511589 - DNA, 120 bp, Artificial Sequence
  ENSG00000164398_88 (sequence is synthesized)
taaaggtggctgaagacaaaggccagaggcttgggtagacagcatgggtgtctgggactgccaacttgggcactgctctcaagaagtggcccttgagtttccaactaatttgacttcttg

SEQ ID NO: 511590 - DNA, 120 bp, Artificial Sequence
  ENSG00000164398_89 (sequence is synthesized)
ctccttcctgcctctggctcacatgtttgagagagtaatccaggtaagacacccacctgactgaccgggccttgcctgggctccttcttttttcttacagagtcagtgggctcccacttg

SEQ ID NO: 511591 - DNA, 120 bp, Artificial Sequence
  ENSG00000164398_90 (sequence is synthesized)
tgcggatgtgcacatttcctatttgcctttagcacacatgtttgagcgaatggtgcaggtaaggccctggcatcagggaggcacactctgtgcctagaacccataaccctagcgggtgtc

SEQ ID NO: 511592 - DNA, 120 bp, Artificial Sequence
  ENSG00000164398_91 (sequence is synthesized)
acttgtcactggtggcatgaagtaggaccaaactgccctgtcctcagaaggtaccataggggtcagagggctcagaggactttagccaccccacttgtccctcctgggagcattgttcca

SEQ ID NO: 511593 - DNA, 120 bp, Artificial Sequence
  ENSG00000164398_92 (sequence is synthesized)
gggaagcccccaggcctgccctgtcttacccatggacacactcagctgagagagaccccagctgatagcatcttctcagagagtattgcagctttgcagaagtgctttaccattcaagct

SEQ ID NO: 511594 - DNA, 120 bp, Artificial Sequence
  ENSG00000164398_93 (sequence is synthesized)
ctgtgcagtacagctccgtttatgaccaaaacacttatgttccataacttttataattcacaaactcctaaaagagaaaacaaaagagtaaagttggggaatgaaactggcatggctctt

SEQ ID NO: 511595 - DNA, 120 bp, Artificial Sequence
  ENSG00000164398_94 (sequence is synthesized)
caggctgcagatggggactggcctgaggctggccctgagacaggccttgtggaagtacagagggagtgggaggaggaatccatatgtgattatggagacaaggaattctccatatatgtg

SEQ ID NO: 511596 - DNA, 120 bp, Artificial Sequence
  ENSG00000164398_95 (sequence is synthesized)
tcactcaagggaccagcatatgaaaaaactgtgtcttctaggcctttcccattttgccttgggggaggtcttatgtaatagtgcaggtaaggccgtggcatctggagagcatgctttcca

SEQ ID NO: 511597 - DNA, 120 bp, Artificial Sequence
  ENSG00000164398_96 (sequence is synthesized)
gctttccagacctggattcaatgccagcaattactgtaaattagttttgtgaccctgggcaagtcatgtaacctctctgagctttgtgttccttacctgtagaaatgccacttcccttat

SEQ ID NO: 511598 - DNA, 120 bp, Artificial Sequence
  ENSG00000164398_97 (sequence is synthesized)
agggttgctatgagcattaaagaaaggagcatatataaggcccctggtgtactcctagtcccattaggaaccagccaggggctcccccttggcctcgcactaaacagcacccacagccaa

SEQ ID NO: 511599 - DNA, 120 bp, Artificial Sequence
  ENSG00000164398_98 (sequence is synthesized)
cttcagcagcatctccagtactcatggggcttacacaccttcaccttcccagaattccctggggaaatccaacaactctaagacctggagcagacccattagtaggctgtagtacatctc

SEQ ID NO: 511600 - DNA, 120 bp, Artificial Sequence
  ENSG00000164398_99 (sequence is synthesized)
aaaggcctgagtccccagggaggcccatgtccagggtttgggagtaggtgaggggggcacacgccagtgagaatggctgctttggcatctcccagaggctcaggattccactccatcttc

SEQ ID NO: 511601 - DNA, 120 bp, Artificial Sequence
  ENSG00000164398_100 (sequence is synthesized)
tgcttcatctccctgtgcctgagtgggacttggttggaaggtgagggggtgggggtcacctcagatggcattcatcagtgtctcatggcagcagccagagctgggtcagggggtcatggg

SEQ ID NO: 511602 - DNA, 120 bp, Artificial Sequence
  ENSG00000164398_101 (sequence is synthesized)
tgccctccatgtagggcagcactttggacagctttggactatcgccagtagtgaccaccctaagggactcctcccttcctgtcctgtctttctagtctgtcgtctattgccacggagggc

SEQ ID NO: 511603 - DNA, 120 bp, Artificial Sequence
  ENSG00000164398_102 (sequence is synthesized)
ggggaggccgggccgggccgggccgggccccgctgaccgccatgctgaccttcttcctcgtgtcggggggctccctctggctattcgtaggtcattctgaagtgtcctgtctcctctgtc

SEQ ID NO: 511604 - DNA, 120 bp, Artificial Sequence
  ENSG00000164398_103 (sequence is synthesized)
tcctgcttctgctccctggacagttccatgacctctcacagagacatgcctggcaccttggcttcatgaagatactgtgtggcccaaacgaataccagtttcctttagccccagaggctg

SEQ ID NO: 511605 - DNA, 120 bp, Artificial Sequence
  ENSG00000164398_104 (sequence is synthesized)
acaagacatatctcccttggatttcaggagatctgtggagcatccaccaacccacctgttggttcaaaatcaactccaaagtggttttgtcctagatgtcctctcaggctcaacggccac

SEQ ID NO: 511606 - DNA, 120 bp, Artificial Sequence
  ENSG00000164398_105 (sequence is synthesized)
cttgttcctggctccagacactgggtgacctcctgcacctcccagtgccctgcataagagtggccagatgcagatggatagtgtgcattgggaggtccagtgtgagggcttggcacctcc

SEQ ID NO: 511607 - DNA, 120 bp, Artificial Sequence
  ENSG00000164398_106 (sequence is synthesized)
cagagctgagtcagcagagtcatgggcagctggatcatgtgctgagggaaggtcctttctcactggcatcatttctctctggtaaacagctctcactcccctgctttctgcccctgcctg

SEQ ID NO: 511608 - DNA, 120 bp, Artificial Sequence
  ENSG00000164398_107 (sequence is synthesized)
gcctttgtgttggagactggggaaagagtgtgaggtttggcgtctgagagccttggtttgagtcctacctccactgcttgctgggggactgtgagccactcatttaacttctctgccacc

SEQ ID NO: 511609 - DNA, 120 bp, Artificial Sequence
  ENSG00000164398_108 (sequence is synthesized)
agtgtccccagtttctcatctgccatgagggtggctaaaggtgccaagtgggagatgggacagtgtgtgaaagggcaatgcagatgctctgcaggctggggctggtgtgccatgagcaag

SEQ ID NO: 511610 - DNA, 120 bp, Artificial Sequence
  ENSG00000164398_109 (sequence is synthesized)
gctgtcaggcaaagcacacaagcagaaatgatatcctctgtgcttggagctgacagaggagcacacacatcaacagtggcaggaataatcaaggaaggcttcctgggggaggcagaaagc

SEQ ID NO: 511611 - DNA, 120 bp, Artificial Sequence
  ENSG00000164398_110 (sequence is synthesized)
acaagaggacacacacagcacaggcacaaccctctgcatttctatagcatgctgtccaccctctctctgcaccactggggcctcagcacagcctgtgaggtgagcaggattgtcaccaag

SEQ ID NO: 511612 - DNA, 120 bp, Artificial Sequence
  ENSG00000164398_111 (sequence is synthesized)
cctgcttgctccaaagggacaccatcagcaagtagaagcaccagggcctgtgccctgctgtcataattcccaggccagagcctttcccagtgctgcctttccatctcatctgatgacgtg

SEQ ID NO: 511613 - DNA, 120 bp, Artificial Sequence
  ENSG00000164398_112 (sequence is synthesized)
gatgtcacttgtcttgccctgaatgggcaggaagtctccagccttctttttccaaactgaggattggcccatcttgatgacagctctcagtgggcagtgaactggggctctgcatgcctt

SEQ ID NO: 511614 - DNA, 120 bp, Artificial Sequence
  ENSG00000164398_113 (sequence is synthesized)
ctgcagatgcagcctctaaggcatttgacagacctgtgaccagccctacaaccaggattattcatgtcagtggatcatgataaacatgctttattgaatatagatagatttttaccatta

SEQ ID NO: 511615 - DNA, 120 bp, Artificial Sequence
  ENSG00000164398_114 (sequence is synthesized)
actcacatgggttcaaggatttccaccatattctactaaactttgtcagaaaaataacaacacagcccttcctctccaggagctgacatccagagccaacccagaattcaaaaatgccct

SEQ ID NO: 511616 - DNA, 120 bp, Artificial Sequence
  ENSG00000164398_115 (sequence is synthesized)
tcaggtttatgttgctttttaaagagcactttccaatgtctttttgtcttgagttttacaatgtgaatttttggtgacatggttttggggagcaggtcactgctatggccttacctttgg

SEQ ID NO: 511617 - DNA, 120 bp, Artificial Sequence
  ENSG00000164398_116 (sequence is synthesized)
acctgccttcaaagtgtgccttcagccttttaacaggtcacttggtcacagacattgcccttggatctggagaaaaacttcatgatgcagaaatgtgctattgcctggctggggagggca

SEQ ID NO: 511618 - DNA, 120 bp, Artificial Sequence
  ENSG00000164398_117 (sequence is synthesized)
gacatcatgtccagtgcttttccagactgtaggaagctgagccatcctgctcaagctctgtgtggtggaagcagaatgtatagggcttgaaacataggctgtgatttactatcccagacc

SEQ ID NO: 511619 - DNA, 120 bp, Artificial Sequence
  ENSG00000164398_118 (sequence is synthesized)
ctggctgtgcacttggatttccttggctttaggctaagcccatgctgtgcctcttgtactcatcctcttgtcgggcacatcagccttgtgtgtcctcagcgtcacagcccagatacagct

SEQ ID NO: 511620 - DNA, 120 bp, Artificial Sequence
  ENSG00000164398_119 (sequence is synthesized)
tcccttaaatgtaagctaaatgtcctggctcccagcctcatcaagggccacattgttcttttcatggggaaagatggaaaatatgatctgaacctgacatttggcccatgattctggtgg

SEQ ID NO: 511621 - DNA, 120 bp, Artificial Sequence
  ENSG00000164398_120 (sequence is synthesized)
aatcattccaggaagatttcattcttagcatgtggtggaaaaaatctgtggagattcctagaataagtcagtactttgaagtccctattcaggccaagaaggcctgggaggtggtgagag

SEQ ID NO: 511622 - DNA, 120 bp, Artificial Sequence
  ENSG00000164398_121 (sequence is synthesized)
cttgtggtctgtctgtacccagtgatggctgaggggtgggcatgtggtttgctgttcatttcaaaataacagttagctggactggaatctgaacccattcccacctctgaaaaaaagata

SEQ ID NO: 511623 - DNA, 120 bp, Artificial Sequence
  ENSG00000164398_122 (sequence is synthesized)
atatgtgggtgtaacatagcccagtttgggaaattgggtctcttgaatgatagttaggatgttttatccttgtgagttcatatgccttgtcttcccagcaaagaaaatacagtgctttta

SEQ ID NO: 511624 - DNA, 120 bp, Artificial Sequence
  ENSG00000164398_123 (sequence is synthesized)
aaaaacataactttcagtctatgtgtttttagcactctttttctaattcatctatattcactcattcagctcatttttgtgagtacccactatgcatcagacctagcattaggtgctgag

SEQ ID NO: 511625 - DNA, 120 bp, Artificial Sequence
  ENSG00000164398_124 (sequence is synthesized)
ggcatagggatggagaagacataggtctgcacccgtgagctcccagcttgtgtcatcaggcagttacaatatgatgcggtcactgccttgaggtctgcatccctggtgcatgggttaccc

SEQ ID NO: 511626 - DNA, 120 bp, Artificial Sequence
  ENSG00000164398_125 (sequence is synthesized)
ggccactgagagatcagtacagcaggacagaaaggattcccagaggaagtcagtctaagcagagtcctgaaagatctgtagctgcagaagccagggaaaggcattccctgcaggagaaag

SEQ ID NO: 511627 - DNA, 120 bp, Artificial Sequence
  ENSG00000164398_126 (sequence is synthesized)
agcatatgtggaggcctgatggtagcacagaacacgctgctttgagggagttttgagaggaaaagagagggcccgaggcagggcttgagggcacgagcatgagggagatgatgggacagg

SEQ ID NO: 511628 - DNA, 120 bp, Artificial Sequence
  ENSG00000164398_127 (sequence is synthesized)
agttcccaatagaggtcaggcaggaggggctggagaggctagaggagaacaggatttgtcagtgtcgtctgtggttaagttgtaactggaggatgtcaccatgaaatgacctgctggtgc

SEQ ID NO: 511629 - DNA, 120 bp, Artificial Sequence
  ENSG00000164398_128 (sequence is synthesized)
cgctgaccgccatgctgaccttcttcctcgtgtcggggggctccctctggctattcgtaggtctcttgccttatctgactcttgttttcaacagagtttgtcctctcacttctggagaag

SEQ ID NO: 511630 - DNA, 120 bp, Artificial Sequence
  ENSG00000164399_0 (sequence is synthesized)
agagccccacgaaggaccagaacaagacagagtgcctcctgccgatccaaacatgagccgcctgcccgtcctgctcctgctccaactcctggtccgccccggactccaagctcccatgac

SEQ ID NO: 511631 - DNA, 120 bp, Artificial Sequence
  ENSG00000164399_1 (sequence is synthesized)
ccagacaacgcccttgaagacaagctgggttaactgctctaacatgatcgatgaaattataacacacttaaagcagccacctttgcctttgctggacttcaacaacctcaatggggaaga

SEQ ID NO: 511632 - DNA, 120 bp, Artificial Sequence
  ENSG00000164399_2 (sequence is synthesized)
ccaagacattctgatggaaaataaccttcgaaggccaaacctggaggcattcaacagggctgtcaagagtttacagaacgcatcagcaattgagagcattcttaaaaatctcctgccatg

SEQ ID NO: 511633 - DNA, 120 bp, Artificial Sequence
  ENSG00000164399_3 (sequence is synthesized)
gttctatctgaaaacccttgagaatgcgcaggctcaacagacgactttgagcctcgcgatcttttgagtccaacgtccagctcgttctctgggccttctcaccacagagcctcgggacat

SEQ ID NO: 511634 - DNA, 120 bp, Artificial Sequence
  ENSG00000164399_4 (sequence is synthesized)
caaaaacagcagaacttctgaaacctctgggtcatctctcacacattccaggaccagaagcatttcaccttttcctgcggcatcagatgaattgttaattatctaatttctgaaatgtgc

SEQ ID NO: 511635 - DNA, 120 bp, Artificial Sequence
  ENSG00000164399_5 (sequence is synthesized)
agctcccatttggccttgtgcggttgtgttctcatttttatcccattgagactatttatttatgtatgtatgtatttatttatttattgcctggagtgtgaactgtatttattttagcag

SEQ ID NO: 511636 - DNA, 120 bp, Artificial Sequence
  ENSG00000164399_6 (sequence is synthesized)
aggagccatgtcctgctgcttctgcaaaaaactcagagtggggtggggagcatgttcatttgtacctcgagttttaaactggttcctagggatgtgtgagaataaactagactctgaaca

SEQ ID NO: 511637 - DNA, 120 bp, Artificial Sequence
  ENSG00000164400_0 (sequence is synthesized)
agtacacagagagaaaggctaaagttctctggaggatgtggctgcagagcctgctgctcttgggcactgtggcctgcagcatctctgcacccgcccgctcgcccagccccagcacgcagc

SEQ ID NO: 511638 - DNA, 120 bp, Artificial Sequence
  ENSG00000164400_1 (sequence is synthesized)
cctgggagcatgtgaatgccatccaggaggcccggcgtctcctgaacctgagtagagacactgctgctgagatgaatgaaacagtagaagtcatctcagaaatgtttgacctccaggagc

SEQ ID NO: 511639 - DNA, 120 bp, Artificial Sequence
  ENSG00000164400_2 (sequence is synthesized)
cgacctgcctacagacccgcctggagctgtacaagcagggcctgcggggcagcctcaccaagctcaagggccccttgaccatgatggccagccactacaagcagcactgccctccaaccc

SEQ ID NO: 511640 - DNA, 120 bp, Artificial Sequence
  ENSG00000164400_3 (sequence is synthesized)
cttgtcatcccctttgactgctgggagccagtccaggagtgagaccggccagatgaggctggccaagccggggagctgctctctcatgaaacaagagctagaaactcaggatggtcatct

SEQ ID NO: 511641 - DNA, 120 bp, Artificial Sequence
  ENSG00000164400_4 (sequence is synthesized)
tggagggaccaaggggtgggccacagccatggtgggagtggcctggacctgccctgggccacactgaccctgatacaggcatggcagaagaatgggaatattttatactgacagaaatca

SEQ ID NO: 511642 - DNA, 120 bp, Artificial Sequence
  ENSG00000164402_0 (sequence is synthesized)
ccgggcggagcgcgtcccgcagccggctggtccctgtcgctgcccctgcgctcgtcccagcccacccgcccggtgcggagctcgccatggcggccaccgacctggagcgcttctcgaatg

SEQ ID NO: 511643 - DNA, 120 bp, Artificial Sequence
  ENSG00000164402_1 (sequence is synthesized)
gagcgcttctcgaatgcagagccagagccccggagcctctccctgggcggccatgtgggtttcgacagcctccccgaccagctggtcagcaagtcggtcactcagggcttcagcttcaac

SEQ ID NO: 511644 - DNA, 120 bp, Artificial Sequence
  ENSG00000164402_2 (sequence is synthesized)
atcctctgtgtgggggagaccggcattggcaaatccacactgatgaacacactcttcaacacgaccttcgagactgaggaagccagtcaccatgaggcatgcgtgcgcctgcggccccag

SEQ ID NO: 511645 - DNA, 120 bp, Artificial Sequence
  ENSG00000164402_3 (sequence is synthesized)
acctatgacctccaggagagcaacgtgcagctcaagctgaccattgtggatgccgtgggctttggggatcagatcaataaggatgagagttacaggcccatagttgactacatcgatgcg

SEQ ID NO: 511646 - DNA, 120 bp, Artificial Sequence
  ENSG00000164402_4 (sequence is synthesized)
cagtttgaaaattatctgcaggaggagctgaagatccgccgctcgctcttcgactaccatgacacaaggatccacgtttgcctctacttcatcacgcccacagggcactccctgaagtct

SEQ ID NO: 511647 - DNA, 120 bp, Artificial Sequence
  ENSG00000164402_5 (sequence is synthesized)
ctagatctagtgaccatgaagaaactagacagcaaggtgaacattattcccatcatcgccaaggctgacaccatctccaagagcgagctccacaagttcaagatcaagatcatgggcgag

SEQ ID NO: 511648 - DNA, 120 bp, Artificial Sequence
  ENSG00000164402_6 (sequence is synthesized)
ttggtcagcaacggggtccagatctaccagttccccacggatgatgaggctgttgcagagattaacgcagtcatgaatgcacatctgccctttgccgtggtgggcagcaccgaggaggtg

SEQ ID NO: 511649 - DNA, 120 bp, Artificial Sequence
  ENSG00000164402_7 (sequence is synthesized)
aaggtggggaacaagctggtccgagcacggcagtacccctggggagtggtgcaggtggagaatgagaatcactgcgacttcgtgaagctgcgggagatgttgatccgggtgaacatggaa

SEQ ID NO: 511650 - DNA, 120 bp, Artificial Sequence
  ENSG00000164402_8 (sequence is synthesized)
gacctccgcgagcagacccacagccggcactacgagctctaccggcgctgcaagttggaggagatgggctttcaggacagcgatggtgacagccagcccttcagcctacaagagacatac

SEQ ID NO: 511651 - DNA, 120 bp, Artificial Sequence
  ENSG00000164402_9 (sequence is synthesized)
gaggccaagaggaaggagttcctaagtgagctgcagaggaaggaggaagagatgaggcagatgtttgtcaacaaagtgaaggagacagagctggagctgaaggagaaggaaagggagctc

SEQ ID NO: 511652 - DNA, 120 bp, Artificial Sequence
  ENSG00000164402_10 (sequence is synthesized)
catgagaagtttgagcacctgaagcgggtccaccaggaggagaagcgcaaggtggaggaaaagcgccgggaactggaggaggagaccaacgccttcaatcgccggaaggctgcggtggag

SEQ ID NO: 511653 - DNA, 120 bp, Artificial Sequence
  ENSG00000164402_11 (sequence is synthesized)
agctctaaggtgatgatgaccaaggccagtgtggagcccttgaactgcagcagctggtggcccgccatacagtgctgcagctgcctggtcagggatgcgacgtggagggaaggattcctc

SEQ ID NO: 511654 - DNA, 120 bp, Artificial Sequence
  ENSG00000164402_12 (sequence is synthesized)
tgaggcagcagctccaacacatggggccagctcaggaccaccagggcatggaactggagaccatggtttttaatgttagaacagaaaacgccatacttttcctatatcaatgatcaaaag

SEQ ID NO: 511655 - DNA, 120 bp, Artificial Sequence
  ENSG00000164402_13 (sequence is synthesized)
tgcaaacaatttaaatttccatcagggaacatcaaatgttgcccaacccttttcattcctatccatggctccgtaaggggcttgaggcttaatgcccatcctgtggccaagctgagcttc

SEQ ID NO: 511656 - DNA, 120 bp, Artificial Sequence
  ENSG00000164402_14 (sequence is synthesized)
cactccgggaccaaaaaaaaaaaaaagtctgctttgtgacatcatcgttatgagcggaaagtacctagatgacaatgtttccattctgaaaaatagaaacatactattcaagaccaaggt

SEQ ID NO: 511657 - DNA, 120 bp, Artificial Sequence
  ENSG00000164402_15 (sequence is synthesized)
agcagaaaagttacttgtatctgcttatcataagacgaaactctgcaacttggcaacggtggccagttttcgtaatgaaacagtctttagtaatttaatcttcatgcttcataacaaacc

SEQ ID NO: 511658 - DNA, 120 bp, Artificial Sequence
  ENSG00000164402_16 (sequence is synthesized)
aaaaccccatgagatttccacattgcataattttgccttactaacagaatcatatccttaaggatgaccatcattcccccaactaaaacaaatacaaactaatgtatgatatttttttaa

SEQ ID NO: 511659 - DNA, 120 bp, Artificial Sequence
  ENSG00000164402_17 (sequence is synthesized)
gtgccagatcaatatggtctaaagcttcaataaggattgtgtgtaggtgaataaagacagctaagtgaatgtgtgtaaagtgtagcaaaagcagacagatatttatgtacagtattcata

SEQ ID NO: 511660 - DNA, 120 bp, Artificial Sequence
  ENSG00000164402_18 (sequence is synthesized)
gaatggaaagttaaatatttttgcagtgtgtatttaaaagagaaactcaccataatagtgccgtctaaaaatctttgtaaagttaatttaatgtcctttagaagtgggagtctggtggaa

SEQ ID NO: 511661 - DNA, 120 bp, Artificial Sequence
  ENSG00000164402_19 (sequence is synthesized)
ctgtgttggatttaagataccttttcactcttccgtatgtcatgagccttgtgcgtcacctcactgtggtgcatgtgcaagggcgtgtgcacgcctgtgctttgccatcccatgttgtaa

SEQ ID NO: 511662 - DNA, 120 bp, Artificial Sequence
  ENSG00000164402_20 (sequence is synthesized)
acagctgttccaaaggcacaaacgagtttagggtagactctgtaaacacctccttactcactatagtcaagaagtccagcggcgtcccaatatagaggtcccagtgcagtctgtccagaa

SEQ ID NO: 511663 - DNA, 120 bp, Artificial Sequence
  ENSG00000164402_21 (sequence is synthesized)
tagccagctccatcctcagcagctcattcggggaatagtcagagccatagtgctttgtgaagtcttttacttgtggaataaactgtaaaaagaaaataaagaggccaaagccctacatca

SEQ ID NO: 511664 - DNA, 120 bp, Artificial Sequence
  ENSG00000164402_22 (sequence is synthesized)
acaagaagaattaacgcacgcacagacttacatgtcaagagtggactttagactttcatgtgttaagttgcttgagttacaccttgtgacccttctcccataacatggtgtgaggacgga

SEQ ID NO: 511665 - DNA, 120 bp, Artificial Sequence
  ENSG00000164402_23 (sequence is synthesized)
ctgggagccggtacagactccagtgtttacagccttgctttcctcccaccgaccctggccccaggctgccccgggcctggcgggccacccctctctatgcaaacacgtaaaagccatgaa

SEQ ID NO: 511666 - DNA, 120 bp, Artificial Sequence
  ENSG00000164402_24 (sequence is synthesized)
tgctggaatccaaaactgacgaggtttatttttttcagagccagtggctggtcttccatttacagtgtcactattccctgacggagctgttatgtgccgctctagcgaaggccccagccg

SEQ ID NO: 511667 - DNA, 120 bp, Artificial Sequence
  ENSG00000164402_25 (sequence is synthesized)
ggatgctaggcctaattgttcagcgtggagatggcaactcacgtggtgccctaggtgcagctgcgtggtctggtatacatgctgcaaaattcacccagttcccctcattttaatttttct

SEQ ID NO: 511668 - DNA, 120 bp, Artificial Sequence
  ENSG00000164402_26 (sequence is synthesized)
aacctacagcttaattttaataactttaaaacacttctaaatatttattttggcaccagcgtcaagacaaataatatcctctcccattattttcataagtaacacagattccctgatttt

SEQ ID NO: 511669 - DNA, 120 bp, Artificial Sequence
  ENSG00000164402_27 (sequence is synthesized)
aaacttcctgtaatgacagtgtttggcatttctttatggatggaattggaacatgaacaagaccatgtccagcgtttttactgtgaatgtaaatggaacagcagcccaaagctgttgtct

SEQ ID NO: 511670 - DNA, 120 bp, Artificial Sequence
  ENSG00000164402_28 (sequence is synthesized)
gtgccccagaggtgctacctgtagacagggaccaactccatgtgtgtgtgttaagtgtttgactccaattaagactcccaagcaaatcctgcatattccaaatgtaaagagtactcagtg

SEQ ID NO: 511671 - DNA, 120 bp, Artificial Sequence
  ENSG00000164402_29 (sequence is synthesized)
ggaaaaaggttgttacctcaaagtcattgcttctttcctggctgggtcacagggtgaagagatgaaggtgtctgatgtatatagacaattagggaaaaatgagcggcaaaggagctttcc

SEQ ID NO: 511672 - DNA, 120 bp, Artificial Sequence
  ENSG00000164402_30 (sequence is synthesized)
ccttcagctgcactctaaaggggaacattttaaggaagtactagcagctttgactcttctatgctcctgttggtttacaagccaccaagaatgtcagtgttgagaatacggcctggtaaa

SEQ ID NO: 511673 - DNA, 120 bp, Artificial Sequence
  ENSG00000164402_31 (sequence is synthesized)
atgggagatgtaaaatgactaaatgaaaggaagggtagttttaatgttgaagcaccgtgctgggcactggagctacccagaggaatgcacaacgctcccctcaaggagctcacagtctag

SEQ ID NO: 511674 - DNA, 120 bp, Artificial Sequence
  ENSG00000164402_32 (sequence is synthesized)
cctactccctggctggaagcctcaggaagacgtgctaatttattgtggaattggtagtttgcttttcatgcccctgtcttccttctcatgaccatttccccctttctgtctggcttgcat

SEQ ID NO: 511675 - DNA, 120 bp, Artificial Sequence
  ENSG00000164402_33 (sequence is synthesized)
tattgatttccaggaccaagtcctggcttcctcctgccttcctgagatgatgttctgctcagggagaagtggaggggtgagctgtgtgtgtccaccgaggcacggccaggaagaggcagc

SEQ ID NO: 511676 - DNA, 120 bp, Artificial Sequence
  ENSG00000164402_34 (sequence is synthesized)
ctttacctgtgaggggctccatgctccagcagcagagcaggttctagtgacaattcaactttttatgctatgaccaggggtggatctaaattttatggggctgaaagcttgaattattta

SEQ ID NO: 511677 - DNA, 120 bp, Artificial Sequence
  ENSG00000164402_35 (sequence is synthesized)
gaaagacttctttaagaaaaacaatgttaatataaaattaggtacagggtcttggaaggggccctgaagattaagcttccttagcgtcacaataagtccgtatctggttgcaattgaaaa

SEQ ID NO: 511678 - DNA, 120 bp, Artificial Sequence
  ENSG00000164402_36 (sequence is synthesized)
ctgatgcttcagtgagggtatctaaaaaggtaaactggcatatccagggcaaatgtgggctgccaatggctcatctctagggtaattttatgtctgaaagtgtatgcagttgggtcagag

SEQ ID NO: 511679 - DNA, 120 bp, Artificial Sequence
  ENSG00000164402_37 (sequence is synthesized)
catgacctttaagatagcctctctcagctaacatatttatgaagatgaggcctggtgacccagcaggttcattggatacataagaaatgagaattcctggttcatgggccaacctaggac

SEQ ID NO: 511680 - DNA, 120 bp, Artificial Sequence
  ENSG00000164402_38 (sequence is synthesized)
tctggagtatgcagacttggccattcgtccattgtggcctgcgggtcgcaccccaggcatactgaaaggccatactcgtggctggctgcctgcgggcctaagccttcccaggatcttcag

SEQ ID NO: 511681 - DNA, 120 bp, Artificial Sequence
  ENSG00000164402_39 (sequence is synthesized)
gacacttgacagacttgtgttttctggtctgagctgcctccacaggtccctccagcaagcctcactgcacctctcccctgctgtttgtgtttggaattttgtcttctttagctgagacca

SEQ ID NO: 511682 - DNA, 120 bp, Artificial Sequence
  ENSG00000164402_40 (sequence is synthesized)
aattaaaccttggtgcataaagtgagcttaaaacttgccactgtttagtaagttagcccccatagaatgtgaccctgtctgcagagtctcatttacccctctttttctcattgtcatttg

SEQ ID NO: 511683 - DNA, 120 bp, Artificial Sequence
  ENSG00000164402_41 (sequence is synthesized)
ttggctttattagggctgtcttacaggatcatgttggcatttactatcatgtctttatcataaaccatgtttgtttgaggtagaagaatcaccatataattcgttgcccaaattgggact

SEQ ID NO: 511684 - DNA, 120 bp, Artificial Sequence
  ENSG00000164402_42 (sequence is synthesized)
attgagagagaaaggggatgctattaattacaccagatcaaaaggcataaaccagacctgtcccaggccgatgtggaaatatgttctttctagttgtgggtaccctgatctaggtggttt

SEQ ID NO: 511685 - DNA, 120 bp, Artificial Sequence
  ENSG00000164402_43 (sequence is synthesized)
gtaattgtgcattactgactgcatatgtttgtgtatgtgtaaatgtgggctccctgttaagtggggctcatggatacgaggcctgaggaagtgtggcttgctagtctgttacgttaacat

SEQ ID NO: 511686 - DNA, 120 bp, Artificial Sequence
  ENSG00000164402_44 (sequence is synthesized)
gcttttctaaaattgcttcacgtgttaattcatttactcctgcattcattgactgtttttgttcttttccattcactttgtacttatttttttcattaaattttgcatttattttgagtt

SEQ ID NO: 511687 - DNA, 120 bp, Artificial Sequence
  ENSG00000164402_45 (sequence is synthesized)
gccttgcacgccacctcgcagcagcccctgaggaaggacaaggacaagaagaaatcttgacccttagcctgggacaccacaaactgaggtgaattctctgctttgctcgtcacaaatgcc

SEQ ID NO: 511688 - DNA, 120 bp, Artificial Sequence
  ENSG00000164402_46 (sequence is synthesized)
gtcacaaatgccaaactgactgccctttcacggtgtccatcttgctgtcttttgcttctgtttgatttggtctgcatatcttttaatgtgtctgtttttgttttgtttgttttattttta

SEQ ID NO: 511689 - DNA, 120 bp, Artificial Sequence
  ENSG00000164402_47 (sequence is synthesized)
acattcccagaaagagcagagagaaaggcagagggaagagaaagaaacggggtttcagaggatttgggagctgcttttgtatagattgtcagtgagaaggatacagaacctcctgaggcc

SEQ ID NO: 511690 - DNA, 120 bp, Artificial Sequence
  ENSG00000164402_48 (sequence is synthesized)
tccgaccctggcgaatcccagcctaaactgcgcatcctgctcgttggttgcacaaggagccgaaggctggtcccttgcccgggaaggccgcctggccggacgcgcgggtcccgccggggt

SEQ ID NO: 511691 - DNA, 120 bp, Artificial Sequence
  ENSG00000164402_49 (sequence is synthesized)
tcccgccttagctccggccggagcatcaggtggggcccaagacacccgcagactaggctgccgcggcctctcccggatccgacgggtctcccgcagcttgtccacactctgaatgcagag

SEQ ID NO: 511692 - DNA, 120 bp, Artificial Sequence
  ENSG00000164402_50 (sequence is synthesized)
tttttcaggctgctgcttctctgattgctcagactattgcttggttgctaagtagggagccacagacctggtccacggagacttggaaagctgtgtcctggcttcatgaatctccagcag

SEQ ID NO: 511693 - DNA, 120 bp, Artificial Sequence
  ENSG00000164402_51 (sequence is synthesized)
ctcgtggccgggccgggcggggaggccggtcccgcgggcgggggcaggggcggctccgcggcttctcccgccgccgccgccaaggggagtttccaggaagtggccatattggatccattc

SEQ ID NO: 511694 - DNA, 120 bp, Artificial Sequence
  ENSG00000164402_52 (sequence is synthesized)
ggacaaggacaagaagaaaggtttgagttggatcagctctcagaatccagctcacatccatagccacctggttaagcagcagatgtcttccagcagttcccctaaagcctgggatgccta

SEQ ID NO: 511695 - DNA, 120 bp, Artificial Sequence
  ENSG00000164402_53 (sequence is synthesized)
aactggtatgggccctcaggatgtccttctgcctcatgcactgtggtcccacttacactggaaggaaggaggcagagggcactcaacggccaccactggaagctgtgagcagcatggcct

SEQ ID NO: 511696 - DNA, 120 bp, Artificial Sequence
  ENSG00000164402_54 (sequence is synthesized)
cagcatctccatctgtaaaatgggttctggactagaggagagttcttgatatgacctaggagatagtgttccaaatgtatctgactctcgcaaggctaaatgcatggtagctcaaaataa

SEQ ID NO: 511697 - DNA, 120 bp, Artificial Sequence
  ENSG00000164402_55 (sequence is synthesized)
gactaaagcaggagctcttggtttcataatttctagactcgggtgttttattcccattggagagggggtcgtatgtcagttaagtaagtttaaatacatgaggaacagattcagaggctg

SEQ ID NO: 511698 - DNA, 120 bp, Artificial Sequence
  ENSG00000164402_56 (sequence is synthesized)
ggctactcagagattcacttcgccccgtattataaattggaatttatgtaccggaggagggcagtgcctgaatcctaacagacctgctgattagctggaggccaagagacccaatgcaga

SEQ ID NO: 511699 - DNA, 120 bp, Artificial Sequence
  ENSG00000164402_57 (sequence is synthesized)
ctctttgcacaatggtggaaccattaagacgttgtcccaagcccttgggacaggcagggtgatggacacttgcaatctgacgccttgaccgtcgagctccgcttttctattgcaggaatc

SEQ ID NO: 511700 - DNA, 120 bp, Artificial Sequence
  ENSG00000164402_58 (sequence is synthesized)
cacccagcctcctcccaccccacctacattggcccctataacagtagcccagccctcacactgcagggggccagggagggcctcttggggaatatctgaggctctgtggtcaccaacaga

SEQ ID NO: 511701 - DNA, 120 bp, Artificial Sequence
  ENSG00000164402_59 (sequence is synthesized)
ccagttactcctttaggtgtctggagaaggggtcagctgcctgtatccagtcagggatctcaggcagaagctgttcccagaaagaaaaggccagggggcagcctggcttggccccgagcc

SEQ ID NO: 511702 - DNA, 120 bp, Artificial Sequence
  ENSG00000164403_0 (sequence is synthesized)
agcgcttgtgacggtgtgaccagggaggggaagtgtaagtgtctggccgtccgtggtggcggggccagcaggctgtcccagccctcacccggagctcctcacccggcaccacatctgtgt

SEQ ID NO: 511703 - DNA, 120 bp, Artificial Sequence
  ENSG00000164403_1 (sequence is synthesized)
tttcccaggacccacgcagccacccagcctcagcactcatctgcgcagccatggaggccctgggacctgggggcgaccgcgcctccccggcctcgtccactagcagcctggacctgtggc

SEQ ID NO: 511704 - DNA, 120 bp, Artificial Sequence
  ENSG00000164403_2 (sequence is synthesized)
atctgtccatgcgcgcggactcggcctacagctctttctccgcagcctccggcggccccgagccgcgcacgcagtcgccggggacagacctccttccttacctagactgggactacgtgc

SEQ ID NO: 511705 - DNA, 120 bp, Artificial Sequence
  ENSG00000164403_3 (sequence is synthesized)
cttacctagactgggactacgtgcgtgtggtttggggcggcccgggccccgccccgcccgacgctgccctttgcacatccccgcggccccggcccgcggttgcagcccgcagtgggccgc

SEQ ID NO: 511706 - DNA, 120 bp, Artificial Sequence
  ENSG00000164403_4 (sequence is synthesized)
gcagtgggccgcagccaacagaggtcccggggaccccgggaccactgaacaggcaggccaccccgctgctgtacgcgctggcggccgaggcggaggccgcggcgcaggctgccgagccgc

SEQ ID NO: 511707 - DNA, 120 bp, Artificial Sequence
  ENSG00000164403_5 (sequence is synthesized)
ggcttcagggcgcgcagcggcgagtgctccgggagacgtcgttccagcgcaaggagctccgcatgagcctgcccgcccgtctgcggcccactgtcccagcgcggcccccggcgactcacc

SEQ ID NO: 511708 - DNA, 120 bp, Artificial Sequence
  ENSG00000164403_6 (sequence is synthesized)
ctccgcctcgctcagccacccgggcggggagggggagccggcgcgctcccgggctcccgcgccaggaactgccggccggggtcccctcgccaaccagcagcggaagtggtgcttctcaga

SEQ ID NO: 511709 - DNA, 120 bp, Artificial Sequence
  ENSG00000164403_7 (sequence is synthesized)
cagagccaggaaagctggatcgtgtgggtcggggcggtgggccggcgcgggaatgcctgggtgaggcctgctccagctctggcctccctgggcccgagcccttggagttccagcatccgg

SEQ ID NO: 511710 - DNA, 120 bp, Artificial Sequence
  ENSG00000164403_8 (sequence is synthesized)
cgctggctaagtttgaagatcacgaggtcggatggctgcccgagacgcaaccccaaggctccatgaacctggactccgggtccttgaagctcggtgatgccttcaggcccgccagtcgga

SEQ ID NO: 511711 - DNA, 120 bp, Artificial Sequence
  ENSG00000164403_9 (sequence is synthesized)
gtcggagcgcttcaggcgaagtcttgggttcctggggaggatcaggagggaccatacccattgtccaggctgttccccaaggagcagaaacccccagaccattgtttcagaccaaacttt

SEQ ID NO: 511712 - DNA, 120 bp, Artificial Sequence
  ENSG00000164403_10 (sequence is synthesized)
ccaggttcttgcctcagaaagaggctgcggtgatgtatcctgcagagttaccccagagcagccctgctgacagtgaacagagggtctcagagacctgcattgtgcctgcctggctcccct

SEQ ID NO: 511713 - DNA, 120 bp, Artificial Sequence
  ENSG00000164403_11 (sequence is synthesized)
cccttcctgatgaagtgttcctagaagaggccccactggtcagaatgagatcaccaccagacccccatgcctcccaggggcccccagccagtgtccatgcctctgaccagccgtatggaa

SEQ ID NO: 511714 - DNA, 120 bp, Artificial Sequence
  ENSG00000164403_12 (sequence is synthesized)
ctggcttaggccaaagaactggccaggttacagtccccacagagtacccgctccatgagtgtccaggaactgcaggggcagatgactgctggcagggggtgaatggttctgtaggtattt

SEQ ID NO: 511715 - DNA, 120 bp, Artificial Sequence
  ENSG00000164403_13 (sequence is synthesized)
gaccaccaatccccccacagctgcagagagtgacctcctcaaacctgtcccagctgatgccttgggactttcaggcaatgatactccaggtccctctcacaatactgccctagccagggg

SEQ ID NO: 511716 - DNA, 120 bp, Artificial Sequence
  ENSG00000164403_14 (sequence is synthesized)
cactggccagcctggttccaggcccacatggcctagtcagtgcctcgaggagctggttcaggagctggccagattagatccctctctatgtgaccctcttgcttcccagcccagcccaga

SEQ ID NO: 511717 - DNA, 120 bp, Artificial Sequence
  ENSG00000164403_15 (sequence is synthesized)
gccacccctgggcctgctggatggactgattcctttagcagaggtccgggctgcaatgcggcctgcctgtggggaggctggagaggaggctgccagtacttttgagccagggtcctatca

SEQ ID NO: 511718 - DNA, 120 bp, Artificial Sequence
  ENSG00000164403_16 (sequence is synthesized)
gttcagcttcacccagctcctgccggctcctcgggaggagacaaggcttgaaaaccctgccacccaccctgtgcttgaccagccatgtgggcaggggctccctgcaccaaacaacagcat

SEQ ID NO: 511719 - DNA, 120 bp, Artificial Sequence
  ENSG00000164403_17 (sequence is synthesized)
ccagggcaagaaagtggagctggccgcccgcctccaaaagatgcttcaggaccttcacacggagcaggagcggctgcagggggaggcacaagcgtgggccaggcgccaagcggctctgga

SEQ ID NO: 511720 - DNA, 120 bp, Artificial Sequence
  ENSG00000164403_18 (sequence is synthesized)
ggctgcagtgcgccaggcctgtgcccctcaggagctggagcggttcagccggttcatggccgacctagagcgcgtgcttggccttctgctgctgctgggcagtcgcctggcgcgcgtgcg

SEQ ID NO: 511721 - DNA, 120 bp, Artificial Sequence
  ENSG00000164403_19 (sequence is synthesized)
ccgcgccctggcccgggcggcctcagacagcgaccctgatgagcagcgactccggctcctgcagcggcaggaggaggacgccaaggagctgaaggagcacgtagcgcggcgcgagcgggc

SEQ ID NO: 511722 - DNA, 120 bp, Artificial Sequence
  ENSG00000164403_20 (sequence is synthesized)
cgtgcgggaggtgctggtgcgagcactaccggtggaggagctgcgcgtctattgcgccctgctggcgggcaaggccgccgtcctggcccagcagcgcaacctggacgagcgcatccgcct

SEQ ID NO: 511723 - DNA, 120 bp, Artificial Sequence
  ENSG00000164403_21 (sequence is synthesized)
ccttcaggaccaactggacgccatcagggacgaccttggccatcatgccccgtctcccagcccggcgcggcccccagggacctgtcctccagttcagccgcccttccctcttctccttac

SEQ ID NO: 511724 - DNA, 120 bp, Artificial Sequence
  ENSG00000164403_22 (sequence is synthesized)
atagttataggtggagagggtggggtgcaccgcccctatctctcacccacgtaagtggggtgatgctgatttagtctctgcttttcccttgagggattggggaggacccagtccaggcct

SEQ ID NO: 511725 - DNA, 120 bp, Artificial Sequence
  ENSG00000164403_23 (sequence is synthesized)
cggacgcgctggaggccggtgggcggtcgccgtagtcgccctcccaccacctcgctcaggtttctccggcctggggcaagaggcctgtggcccgcgcgggaacgcactgtccaccctcag

SEQ ID NO: 511726 - DNA, 120 bp, Artificial Sequence
  ENSG00000164403_24 (sequence is synthesized)
cactgtccaccctcagacctgggactgggccggcgcgcggacgctaccaagaggctgcggctcccgcccccgcggccggacgtggcgcctcccctgaggccgcggccggagcctggaggt

SEQ ID NO: 511727 - DNA, 120 bp, Artificial Sequence
  ENSG00000164403_25 (sequence is synthesized)
ggggtcggagtcagagcccggggctctgatgtcaccgcgcggctgcgacggcccaggagcgcgtctcggcgggagcctcagagcctcactttgtcgccaggctggagtgcagtggcgcga

SEQ ID NO: 511728 - DNA, 68 bp, Artificial Sequence
  ENSG00000164403_26 (sequence is synthesized)
ggaaagatcacatggagaagccaacagaacggccaggaagcagcctgggtggaacagggttggggagg

SEQ ID NO: 511729 - DNA, 120 bp, Artificial Sequence
  ENSG00000164403_27 (sequence is synthesized)
acggccaggaagcagcctgggtggaacagggttggggaggaaaggaacatgggtacattctcagcgttccaggaggtctcagggtaaaggctgcttgtgtgggcaaggggagcctggcag

SEQ ID NO: 511730 - DNA, 120 bp, Artificial Sequence
  ENSG00000164403_28 (sequence is synthesized)
ggaatgagctggtcccaattccttcccctgagctgggccctcaaccttcagaggtgctccctgggactggtcctacttcctctgccacctctgatcccaaggtgactctgccaaaatctg

SEQ ID NO: 511731 - DNA, 120 bp, Artificial Sequence
  ENSG00000164403_29 (sequence is synthesized)
aaaaaaaaaaaaaaaaaaaaagatacttctccaaagtgttctcatgtggcctcacccaggtcttgtgtattatttggtaattaatttatggatcttaaaaactgcagtattcccccattt

SEQ ID NO: 511732 - DNA, 120 bp, Artificial Sequence
  ENSG00000164403_30 (sequence is synthesized)
ccccattttgtgatgagagtgtggggctggcaggggttggttggagggaggagagaagacagaggagcacttaaggtgcaaagcagcctattttttcttcaataaaaattgttaagagaa

SEQ ID NO: 511733 - DNA, 120 bp, Artificial Sequence
  ENSG00000164403_31 (sequence is synthesized)
cccccagaccattgtttcagaccaaactttccaggtgagagacacggaccactctggaccaagttggggggaagcagcttgcatagcttttgcccaaaaaatgaaagggcttcctaccta

SEQ ID NO: 511734 - DNA, 120 bp, Artificial Sequence
  ENSG00000164404_0 (sequence is synthesized)
tttccggcaaggttggaagccgctcttggaggtcgtgagcatctgcaaacatcccaaaacctttcaaccaaaatatgtatagatgagtgtgcagaccaaagtaaggacatcagtatgtta

SEQ ID NO: 511735 - DNA, 120 bp, Artificial Sequence
  ENSG00000164404_1 (sequence is synthesized)
catttaaaaataagtcaaggttaaaggcggtgtcctcttttaagaacatcgcaaatacaattccagtactccaagtacgtattctgtacccagccacctgggaggactgagagacctaat

SEQ ID NO: 511736 - DNA, 120 bp, Artificial Sequence
  ENSG00000164404_2 (sequence is synthesized)
ggttttctgctttctggaacttctatgccaattgtgactttctcacccaaatttgtaaattcgcaaattaacatgcagcgaataattacaattgtaaacacctggaagtggaaaaggccg

SEQ ID NO: 511737 - DNA, 120 bp, Artificial Sequence
  ENSG00000164404_3 (sequence is synthesized)
tgaggataaattgagaggaagagtaaacctaataccataagttgcataccagcagatctgagtatcgtcatgaataattggttagcttttccacatgccttagaagtttcagcaagcacc

SEQ ID NO: 511738 - DNA, 120 bp, Artificial Sequence
  ENSG00000164404_4 (sequence is synthesized)
tagcgaacatcttaatccaaatttctcaaaaaatgagagattttatttaagatcattcctcaatttatcttagactttcagctacatagttagtccggtagtgtaacagtaacgggtttt

SEQ ID NO: 511739 - DNA, 120 bp, Artificial Sequence
  ENSG00000164404_5 (sequence is synthesized)
acgtaaatgccaggggaaaagagaggaaagctaaataaccaagtaaatctgtatctaattaacaaattggctaaataaggtgttatcagctgcttgatatagagctgataaaatcttcag

SEQ ID NO: 511740 - DNA, 120 bp, Artificial Sequence
  ENSG00000164404_6 (sequence is synthesized)
ctaggcatacttgaggcctgattacagaagtgaccgtagtccacccacacacctgaaatttatttaagagaccaagctaggctcttcctggcctttaggaagaggactggcatggagaaa

SEQ ID NO: 511741 - DNA, 120 bp, Artificial Sequence
  ENSG00000164404_7 (sequence is synthesized)
tatgttcctcactagttctcccaagccatggcacgtcccaacaaattcctcctttggttttgctgctttgcctggctgtgttttcctattagccttggttctcaggcttctgggggagaa

SEQ ID NO: 511742 - DNA, 120 bp, Artificial Sequence
  ENSG00000164404_8 (sequence is synthesized)
gctcagattgctgctagtgctgagttggaatctggggctatgccttggtccttgctgcagcatatagatgagagagacagagctggcctccttcccgcgcttttcaaagttctatctgtt

SEQ ID NO: 511743 - DNA, 120 bp, Artificial Sequence
  ENSG00000164404_9 (sequence is synthesized)
gggcgaggtgggtcacctaggctgcagccagactccagagctttgcactacatgaagaagctctataagacatatgctaccaaggaagggattcctaaatccaatagaagtcacctctac

SEQ ID NO: 511744 - DNA, 120 bp, Artificial Sequence
  ENSG00000164404_10 (sequence is synthesized)
aacactgttcggctcttcaccccctgtacccggcacaagcaggctcctggagaccaggtaacaggaatccttccatcagtggaactgctatttaacctggatcgcattactaccgttgaa

SEQ ID NO: 511745 - DNA, 120 bp, Artificial Sequence
  ENSG00000164404_11 (sequence is synthesized)
cacttactcaagtcagtcttgctgtacaatatcaacaactcagtttctttttcctctgctgtcaaatgtgtgtgcaatctaatgataaaggagccaaagtcttctagcaggactctcggc

SEQ ID NO: 511746 - DNA, 120 bp, Artificial Sequence
  ENSG00000164404_12 (sequence is synthesized)
agagctccatactcatttacctttaactcacagtttgaatttggaaagaaacacaaatggattcagattgatgtgaccagcctccttcaacctttagtggcctccaacaagagaagtatt

SEQ ID NO: 511747 - DNA, 120 bp, Artificial Sequence
  ENSG00000164404_13 (sequence is synthesized)
cacatgtctataaattttacttgcatgaaagaccagctggagcatccttcagcacagaatggtttgtttaacatgactctggtgtccccctcactgatcttatatttgaatgacacaagt

SEQ ID NO: 511748 - DNA, 120 bp, Artificial Sequence
  ENSG00000164404_14 (sequence is synthesized)
gctcaggcttatcacagctggtattcccttcactataaaaggaggccttcccagggtcctgaccaggagagaagtctgtctgcctatcctgtgggagaagaggctgctgaggatgggaga

SEQ ID NO: 511749 - DNA, 120 bp, Artificial Sequence
  ENSG00000164404_15 (sequence is synthesized)
tcttcccatcaccgtcaccgcagaggtcaggaaactgtcagttctgaattgaagaagcccttgggcccagcttccttcaatctgagtgaatacttcagacaatttcttcttccccaaaat

SEQ ID NO: 511750 - DNA, 120 bp, Artificial Sequence
  ENSG00000164404_16 (sequence is synthesized)
gagtgtgagctccatgactttagacttagctttagtcagctgaagtgggacaactggattgtggctccgcacaggtacaaccctcgatactgtaaaggggactgtccaagggcagttgga

SEQ ID NO: 511751 - DNA, 120 bp, Artificial Sequence
  ENSG00000164404_17 (sequence is synthesized)
catcggtatggctctccagttcacaccatggtacagaacatcatctatgagaagctggactcctcagtgccaagaccgtcatgtgtacctgccaaatacagccccttgagtgttttgacc

SEQ ID NO: 511752 - DNA, 120 bp, Artificial Sequence
  ENSG00000164404_18 (sequence is synthesized)
attgagcccgatggctcaattgcctataaagagtacgaagatatgatagctacaaagtgcacctgtcgttaacaaatggtcctcttaaaaccttgagcctatttggcaaagtaactactg

SEQ ID NO: 511753 - DNA, 120 bp, Artificial Sequence
  ENSG00000164404_19 (sequence is synthesized)
tgtgcctatgtgtgccttcaagagaaagcttcatatattaagtctctaaatgtagcatatgttatataaagaggagcctgtgtaggttagtaccttctatggcatctatcaggataaagg

SEQ ID NO: 511754 - DNA, 120 bp, Artificial Sequence
  ENSG00000164404_20 (sequence is synthesized)
gataacatcaattgttgctacagagcctttttttatttccaaatttaaatgaaatataattattgtggagaactttacatttttttccttgagtgattttttttcttttcataggagtct

SEQ ID NO: 511755 - DNA, 120 bp, Artificial Sequence
  ENSG00000164404_21 (sequence is synthesized)
tattcttgatagggaaaaaaccttaattagcatcaatcctggatggacttgcagctataaataggcaattcagattgctgtagtcttaatagaagaataaatttctgtcaatggcataaa

SEQ ID NO: 511756 - DNA, 120 bp, Artificial Sequence
  ENSG00000164404_22 (sequence is synthesized)
ggaacaaaaaggtgacgaggaaggggcctgccgacctccggggcagcgctggccaggagcttggggcctgcgagtcttcccagctgtagacagagcgcctctgagccccgaggccgggcc

SEQ ID NO: 511757 - DNA, 120 bp, Artificial Sequence
  ENSG00000164404_23 (sequence is synthesized)
cattgtggcggcggccctgcaggaccgagggtggacaggcgcttggctcgctttcgcgaagcgccgcagtccccgcgggggtccatccccaaccccagactcctgcccctgcactcctta

SEQ ID NO: 511758 - DNA, 120 bp, Artificial Sequence
  ENSG00000164404_24 (sequence is synthesized)
tcctttcccagcccagcggggcgcccctagcctcccagggtccacgaacactgcacaaccagaccccactcacgcacagggctcagctcgccctccacagtcaccgatccggttgactcg

SEQ ID NO: 511759 - DNA, 120 bp, Artificial Sequence
  ENSG00000164404_25 (sequence is synthesized)
ttcgtcatttccggcaaggttggaagccgctcttggaggtcgtgagcctggtctcagctccaaggcaagaacagaaatacagcatatagatgagagagacagagctggcctccttcccgc

SEQ ID NO: 511760 - DNA, 120 bp, Artificial Sequence
  ENSG00000164404_26 (sequence is synthesized)
attttcctactgtctctaagggatgacgcctttgtcccagaaagaagtgggctgactgggtgacccgtactgcacaaactggcttcgtatcttgcactatgagtgtaggctgactcttcc

SEQ ID NO: 511761 - DNA, 120 bp, Artificial Sequence
  ENSG00000164404_27 (sequence is synthesized)
agcatagtctccttcggggtggcgctgaatatcccctcatttcagcttttcatggtgctcctttgcctcatttttttaaaccataatgtctagcctggtctcagctccaaggcaagaaca

SEQ ID NO: 511762 - DNA, 120 bp, Artificial Sequence
  ENSG00000164405_0 (sequence is synthesized)
gagtcaaccggatcggtgactgtggagggcgagctgagccctgtgcgtgagtggggtctggttgtgcagtgttcgtggaccctgggaggctaggggcgccccgctgggctgggaaaggat

SEQ ID NO: 511763 - DNA, 120 bp, Artificial Sequence
  ENSG00000164405_1 (sequence is synthesized)
aaggagtgcaggggcaggagtctggggttggggatggacccccgcggggactgcggcgcttcgcgaaagcgagccaagcgcctgtccaccctcggtcctgcagggccgccgccacaatgg

SEQ ID NO: 511764 - DNA, 120 bp, Artificial Sequence
  ENSG00000164405_2 (sequence is synthesized)
tgttctgcgccgcattcgggagtctttctttcgcgtggtgccgcagtttgtagtgttttatcttatctacacatgggggactgaagagttcgagagatccaagaggaagaatccagctgc

SEQ ID NO: 511765 - DNA, 120 bp, Artificial Sequence
  ENSG00000164405_3 (sequence is synthesized)
ctatgaaaatgacaaatgagcaacgcatccggatgacggttccctgtctctgaaagacctttctctggaagaggagtctgcattgtagtgtctcaaagacacaataaacttcctatggtc

SEQ ID NO: 511766 - DNA, 120 bp, Artificial Sequence
  ENSG00000164405_4 (sequence is synthesized)
gccggaaatgacgaacgagtcaaccggatcggtgactgtggagggcgagctgagccctgtgcggccgccgccacaatgggccgcgagtttgggaatctgacgcggatgcggcatgtgatc

SEQ ID NO: 511767 - DNA, 120 bp, Artificial Sequence
  ENSG00000164405_5 (sequence is synthesized)
cccctcctcagcatgagtcttgaagttttgcctggtctcgggttttggtgaaagagcagggctccccctttgttccattatctacaagaaagtagctgcaggtactcctgcatctaacca

SEQ ID NO: 511768 - DNA, 120 bp, Artificial Sequence
  ENSG00000164405_6 (sequence is synthesized)
tttgtgggtgacatgggctatggcgagtgctggttcttggccctctgctcccatagcaacaataaagtctactaactatattgtaattagtatgtgtcagggacgcttttattttttatt

SEQ ID NO: 511769 - DNA, 63 bp, Artificial Sequence
  ENSG00000164405_7 (sequence is synthesized)
agtggtgtgatctcggctcactgccatctgtggcaggacaccacacctggctaattttttgta

SEQ ID NO: 511770 - DNA, 120 bp, Artificial Sequence
  ENSG00000164405_8 (sequence is synthesized)
gggattacaggcgtaagccatggtgctctgggcctcaaatactcttcttagctacacaaatgaactgttaaacctcacaagcacctttaacgtatcctcatttggcagatgaggaaatgg

SEQ ID NO: 511771 - DNA, 120 bp, Artificial Sequence
  ENSG00000164405_9 (sequence is synthesized)
gcacagagagattaagtaatttgccagaaattatacagcagtgaatggtggagtcttgcactaaagtgatgctcttaaaactatgctctattgcaggggtgtccaatcttttagcttccc

SEQ ID NO: 511772 - DNA, 120 bp, Artificial Sequence
  ENSG00000164405_10 (sequence is synthesized)
tgggccacacataaaatacgctaacattacaatagctgataagctttaaaaaatggcaaaaaaaaccctcagcgttttagaaagtttacaaatttttgttgggtcggattcaaagccatc

SEQ ID NO: 511773 - DNA, 120 bp, Artificial Sequence
  ENSG00000164405_11 (sequence is synthesized)
ctgggctgcttgctgcccaggactgcggttggacaagcttgctctactgcctttcctcctaaggcaggccttagcctgaggggatatcagctataaaacggatgaggtgatctcttagcc

SEQ ID NO: 511774 - DNA, 120 bp, Artificial Sequence
  ENSG00000164405_12 (sequence is synthesized)
tccacagcagttttctgtttctgtgccaggaggccaacaatgttttcaaccatatgtggttcataaagcctcaaagatttactctggccctttatgaataaagtttacccctgatctaaa

SEQ ID NO: 511775 - DNA, 120 bp, Artificial Sequence
  ENSG00000164405_13 (sequence is synthesized)
cctctgagcgctggcggccgggcaggcgctctgtaacttgccgtacacacctttctcattgaatattcctgaccgcccttaagctggtcatattatcctccccatcttacacggggaaaa

SEQ ID NO: 511776 - DNA, 120 bp, Artificial Sequence
  ENSG00000164405_14 (sequence is synthesized)
ctgagctacagaactgaaatgactggcccaaggtcactcgggtgattccagcatgttcctctgaggtcacctttatttagttcttaccagtggtgaaatgctttgtgttaaacgtgcagc

SEQ ID NO: 511777 - DNA, 120 bp, Artificial Sequence
  ENSG00000164406_0 (sequence is synthesized)
aggctccaacatcctccccctgtcaagatgtggcacctcaaactttgtgcagtcctcatgatcttcctgttgctgttgggccagatagatggctccccaataccagaagtgagttcggca

SEQ ID NO: 511778 - DNA, 120 bp, Artificial Sequence
  ENSG00000164406_1 (sequence is synthesized)
aagagaaggccacggagaatgaccccattttggagaggggtttccctcaggcctattggagcctcctgccgggatgattctgagtgtatcacaaggctatgcagaaaaagacgctgttcc

SEQ ID NO: 511779 - DNA, 120 bp, Artificial Sequence
  ENSG00000164406_2 (sequence is synthesized)
ttaagtgtggcccaggaatgatgtacataccagggaaagaaaggacagcagtcacctccgacaatgctccgttctatggaatattgattaactgcattttggctggagacacccaagtga

SEQ ID NO: 511780 - DNA, 120 bp, Artificial Sequence
  ENSG00000164406_3 (sequence is synthesized)
tttaaaggcagatgtacgctttaaattggtctccatttcttcttagaatgttgatatatggataagcataactaaacttgtcaatttagagtttatttttctatggatactattaaatgt

SEQ ID NO: 511781 - DNA, 120 bp, Artificial Sequence
  ENSG00000164406_4 (sequence is synthesized)
ctcaaattgaaattttagcagtctggaattcaagcttttgagggaaagaaggattcattttgtatactaaagaaaaaaacagcattgcccaataatgtgttaacttctcaatctggaaag

SEQ ID NO: 511782 - DNA, 120 bp, Artificial Sequence
  ENSG00000164406_5 (sequence is synthesized)
tgtagtgagagctacataatcaatagctacgtaatcaacttcagcaagttcctaagctgtggccctggatcccttcactccatactcttcagggaggtgtcaaaggtggtcaagcttggg

SEQ ID NO: 511783 - DNA, 120 bp, Artificial Sequence
  ENSG00000164406_6 (sequence is synthesized)
gggcgaaagggtccatgccagcaacacaatcactcaaagtccagatgagggatcagtaaatacaacgtgcctgaaaggtggcccttgagcacattcctccggtagacattaacttattaa

SEQ ID NO: 511784 - DNA, 120 bp, Artificial Sequence
  ENSG00000164406_7 (sequence is synthesized)
attgattctgattacaaatataaactttgcccccatctcacccagtaacaatgcaagagttgatgtcagtctataaaaggaagtaggaactgtccctggctttcaggctccaacatcctc

SEQ ID NO: 511785 - DNA, 120 bp, Artificial Sequence
  ENSG00000164406_8 (sequence is synthesized)
cccctgtcaagatgtggcacctcaaactttgtgcagtcctcatgatcttcctgttgctgttgggccaggtaaggagggaaggatacttatgtgtgtgtgtggagtgtggagatgatagtg

SEQ ID NO: 511786 - DNA, 120 bp, Artificial Sequence
  ENSG00000164411_0 (sequence is synthesized)
agtgccagacactgggcgcagggctgaaaaagcacgagtgtccgcactatgacaaaagaaaagcggcgtctcctcaaaacaccaccatgttcccctatgagtctggtgagccaagacact

SEQ ID NO: 511787 - DNA, 120 bp, Artificial Sequence
  ENSG00000164411_1 (sequence is synthesized)
aagaaactgcaggaaacgagagagttctcggggtgggggtgtccatggatgaagcaccgaacaaactggagcccgcaagagtcttgccttcttttgagcctaagtcatgagttggatgtt

SEQ ID NO: 511788 - DNA, 120 bp, Artificial Sequence
  ENSG00000164411_2 (sequence is synthesized)
cctcagagatctcctgagtggagtaaataaatactccactgggactggatggatttggctggctgtcgtgtttgtcttccgtttgctggtctacatggtggcagcagagcacgtgtggaa

SEQ ID NO: 511789 - DNA, 120 bp, Artificial Sequence
  ENSG00000164411_3 (sequence is synthesized)
agatgagcagaaagagtttgagtgcaacagtagacagcccggttgcaaaaatgtgtgttttgatgacttcttccccatttcccaagtcagactttgggccttacaactgataatggtctc

SEQ ID NO: 511790 - DNA, 120 bp, Artificial Sequence
  ENSG00000164411_4 (sequence is synthesized)
cacaccttcacttctggtggttttacatgtagcctatcatgagggtagagagaaaaggcacagaaagaaactctatgtcagcccaggtacaatggatgggggcctatggtacgcttatct

SEQ ID NO: 511791 - DNA, 120 bp, Artificial Sequence
  ENSG00000164411_5 (sequence is synthesized)
tatcagcctcattgttaaaactggttttgaaattggcttccttgttttattttataagctatatgatggctttagtgttccctaccttataaagtgtgatttgaagccttgtcccaacac

SEQ ID NO: 511792 - DNA, 120 bp, Artificial Sequence
  ENSG00000164411_6 (sequence is synthesized)
tgtggactgcttcatctccaaacccactgagaagacgatcttcatcctcttcttggtcatcacctcatgcttgtgtattgtgttgaatttcattgaactgagttttttggttctcaagtg

SEQ ID NO: 511793 - DNA, 120 bp, Artificial Sequence
  ENSG00000164411_7 (sequence is synthesized)
ctttattaagtgctgtctccaaaaatatttaaaaaaacctcaagtcctcagtgtgtgagtgccacagcctcagatatgttgaatgtggtaggagagggacccctcccctactccagaatc

SEQ ID NO: 511794 - DNA, 120 bp, Artificial Sequence
  ENSG00000164411_8 (sequence is synthesized)
gacaaagcacatcagccttagtatcatttgggaggaatttttttacattgtcaatatgctttcagttatgagctctagacagaggtctcattgttttgttgtagggttctccagtatgtg

SEQ ID NO: 511795 - DNA, 120 bp, Artificial Sequence
  ENSG00000164411_9 (sequence is synthesized)
gataacattagttgttttagaataggtaattgcaaattagtctgaagaaatctaacaggattcttttaagagcttagatttttcagggaaaaaaaaaaaaaaagaaaccctgtgtcagtt

SEQ ID NO: 511796 - DNA, 120 bp, Artificial Sequence
  ENSG00000164411_10 (sequence is synthesized)
ttctgttttttctaactatctcattacaattggtgcacaatgaactggaaaatataaaaagtgacactttaggcaaatgtgatggcctccgagctgaaatgaaggaactggcaatctttc

SEQ ID NO: 511797 - DNA, 120 bp, Artificial Sequence
  ENSG00000164411_11 (sequence is synthesized)
caaagtggcagccaaggccccactccctgtcctactcaatctctgcagggaaaaactgtgggataggatagcagccagctggggacacacagaggaacattcaacaggaaggtcccgcct

SEQ ID NO: 511798 - DNA, 120 bp, Artificial Sequence
  ENSG00000164411_12 (sequence is synthesized)
agggaaaaggccacagagcccaggcctcttgccgattcagggatccttggatataagtggattagaggagagggaggaaagctatcatttcagtggtctccaaatcaagtagaaatatta

SEQ ID NO: 511799 - DNA, 120 bp, Artificial Sequence
  ENSG00000164411_13 (sequence is synthesized)
ctgggaggtatcccacttaagcctgaaccagcagacatccgaaagggtcactctagagtcagaaaggaaagcaggtcccccagaaggcaacacattgataggaagtggaggccacagaaa

SEQ ID NO: 511800 - DNA, 120 bp, Artificial Sequence
  ENSG00000164411_14 (sequence is synthesized)
aagaatgtgcccacttgataattacttaagacttctatttaaccaaaagaacattgaaatactttgtaaatattcatattgttgaacctttcataatcaggaattcactatgtactatac

SEQ ID NO: 511801 - DNA, 120 bp, Artificial Sequence
  ENSG00000164411_15 (sequence is synthesized)
tgtaagtcatagttcgcctataatttactagtatatctccctctaggacagatagtaaaatgtgtactatgttgttacagtggtgcaaaaatgttttaaaagtttatcacttgttttgaa

SEQ ID NO: 511802 - DNA, 120 bp, Artificial Sequence
  ENSG00000164411_16 (sequence is synthesized)
gactagaactttctttacttttctatattttcttagcaattcacagatatgttctctttggatttagtactttaacatatgtacatttcttcagaataaaaataagggtatttcacaatg

SEQ ID NO: 511803 - DNA, 120 bp, Artificial Sequence
  ENSG00000164411_17 (sequence is synthesized)
cgccgcttacctttcgcggggtcacctcctctcctcgcccgagacgccccgccccgcttcgccgccccgcctgctagagagagcggcggagggcgccccgcccggcgccacagcgtcccc

SEQ ID NO: 511804 - DNA, 120 bp, Artificial Sequence
  ENSG00000164411_18 (sequence is synthesized)
tgtcttccggaggctgcggcgcagcggcgcggggctgcggggacccatccagtgctagcctttccggttctgaggacctcgcgcccctccttggggtctgcgggctgaagtgtgcaaggg

SEQ ID NO: 511805 - DNA, 120 bp, Artificial Sequence
  ENSG00000164411_19 (sequence is synthesized)
acgtttttgctttcttccctttttgacctttagttttccacctcccaacttcaaattacgttccagttcggtgtgtatgtttgtataaataaaaggagacatctcctagaagtatgttta

SEQ ID NO: 511806 - DNA, 120 bp, Artificial Sequence
  ENSG00000164414_0 (sequence is synthesized)
gtcagttccgcggggggctgtcggggaaccatggctgccccgagagacaatgtcactttattattcaagttatactgcttggcagtgatgaccctgatggctgcagtctataccatagct

SEQ ID NO: 511807 - DNA, 120 bp, Artificial Sequence
  ENSG00000164414_1 (sequence is synthesized)
ttaagatacacaaggacatcagacaaagaactctacttttcaaccacagccgtgtgtatcacagaagttataaagttattgctaagtgtgggaattttagctaaagaaactggtagtctg

SEQ ID NO: 511808 - DNA, 120 bp, Artificial Sequence
  ENSG00000164414_2 (sequence is synthesized)
ggtagattcaaagcatctttaagagaaaatgtcttggggagccccaaggaactgttgaagttaagtgtgccatcgttagtgtatgctgttcagaacaacatggctttcctagctcttagc

SEQ ID NO: 511809 - DNA, 120 bp, Artificial Sequence
  ENSG00000164414_3 (sequence is synthesized)
aatctggatgcagcagtgtaccaggtgacctaccagttgaagattccgtgtactgctttatgcactgttttaatgttaaaccggacactcagcaaattacagtgggtttcagtttttatg

SEQ ID NO: 511810 - DNA, 120 bp, Artificial Sequence
  ENSG00000164414_4 (sequence is synthesized)
ctgtgtgctggagttacgcttgtacagtggaaaccagcccaagctacaaaagtggtggtggaacaaaatccattattagggtttggcgctatagctattgctgtattgtgctcaggattt

SEQ ID NO: 511811 - DNA, 120 bp, Artificial Sequence
  ENSG00000164414_5 (sequence is synthesized)
gcaggagtatattttgaaaaagttttaaagagttcagatacttctctttgggtgagaaacattcaaatgtatctatcagggattattgtgacattagctggcgtctacttgtcagatgga

SEQ ID NO: 511812 - DNA, 120 bp, Artificial Sequence
  ENSG00000164414_6 (sequence is synthesized)
gctgaaattaaagaaaaaggatttttctatggttacacatattatgtctggtttgtcatctttcttgcaagtgttggtggcctctacacttctgttgtggttaagtacacagacaacatc

SEQ ID NO: 511813 - DNA, 120 bp, Artificial Sequence
  ENSG00000164414_7 (sequence is synthesized)
atgctgtttggattacagataacactcacctttgccctgggtactcttcttgtatgtgtttccatatatctctatggattacccagacaagacactacatccatccaacaaggagaaaca

SEQ ID NO: 511814 - DNA, 120 bp, Artificial Sequence
  ENSG00000164414_8 (sequence is synthesized)
gcttcaaaggagagagttattggtgtgtgattttagcctcacgtgagactccttttaagactaaaccatttgcattaaactagagccttaagtcaatctcagaaggtagcataaacaaat

SEQ ID NO: 511815 - DNA, 120 bp, Artificial Sequence
  ENSG00000164414_9 (sequence is synthesized)
aaaaattaactgtatggcatgatcagtgcggttatgtggaaacaacaacaaacaaacgaagctatctgagtgaactgctaatacagaaacttaatgtagacctgtttggggtctactatt

SEQ ID NO: 511816 - DNA, 120 bp, Artificial Sequence
  ENSG00000164414_10 (sequence is synthesized)
gttttagaatgaaggaattgtattattgtgtgtatatataatttgtaaataaaaagtatggagatgatacggtgttaaaaaaaatcatggtaaggctacaatactcaagtaacaaggttt

SEQ ID NO: 511817 - DNA, 120 bp, Artificial Sequence
  ENSG00000164414_11 (sequence is synthesized)
gggacaatgtctaagggttaaagtgccaaagccatttctgtactaactgttctcttgttccggtaccggggagaaggatgacccctccttattctccaattcatgtacagtattttgtcc

SEQ ID NO: 511818 - DNA, 120 bp, Artificial Sequence
  ENSG00000164414_12 (sequence is synthesized)
tagcagcataaagacctagctcttttcttacaagaggcagaaacaagacaggctagttcataaacaaactgtgtaacttctcaaaatgaatctatttcataactcggacaatttctgggt

SEQ ID NO: 511819 - DNA, 120 bp, Artificial Sequence
  ENSG00000164414_13 (sequence is synthesized)
ggtgactgagtacccctttagtgagtacccctttagtgctatatttgtgccattcattatctggttcatatttcttttctgttagatgatacacatttcttcaaaaaaatttctaatgtc

SEQ ID NO: 511820 - DNA, 120 bp, Artificial Sequence
  ENSG00000164414_14 (sequence is synthesized)
acttttgtacttttttaaataaagtatgtttaactgttgggctctcaataatttgtgaaatttcagtgttttctataatgttaatggggaaattcagcaataaactttatttgtaagaaa

SEQ ID NO: 511821 - DNA, 120 bp, Artificial Sequence
  ENSG00000164414_15 (sequence is synthesized)
tcccaccaggccccacctccaacattgaggattacaattcaacatcacatctgggcagggacaaatacccactttatatcagaaggcatcaacaatgtcactttattattcaagttatac

SEQ ID NO: 511822 - DNA, 120 bp, Artificial Sequence
  ENSG00000164418_0 (sequence is synthesized)
agagggaggagaagaggggaatctgttagcttctcactgtcctctccgacacttctggattttgtcacctgacccctttggacagtccgtggagaagccagatcctacatcccttgatct

SEQ ID NO: 511823 - DNA, 120 bp, Artificial Sequence
  ENSG00000164418_1 (sequence is synthesized)
ccagttggttgaatgtgtgcatgtagaacccacagacacagaggatgggctacattatgtagcgtcagtgatggcttcatagaagagttggctcgcgcggccggacattgtgggtgtgcg

SEQ ID NO: 511824 - DNA, 120 bp, Artificial Sequence
  ENSG00000164418_2 (sequence is synthesized)
tgctggatttctcccggatgctctccgactaacatggatgtcccaccattccttgcagtggaaggttgttccttggcgcagtgagtgaagaacatgcagcgattgctaatgggtttggga

SEQ ID NO: 511825 - DNA, 120 bp, Artificial Sequence
  ENSG00000164418_3 (sequence is synthesized)
agcggagactccttcctctctctatgaccatgccgtgatcgtgtctgcggtcaccactcgacgcatcctcatttctacccgaacccaggagccgaacgctagatcggggaagtgggtgcc

SEQ ID NO: 511826 - DNA, 120 bp, Artificial Sequence
  ENSG00000164418_4 (sequence is synthesized)
gtgcgtgtgggcacagaaacaccatgaagattattttcccgattctaagtaatccagtcttcaggcgcaccgttaaactcctgctctgtttactgtggattggatattctcaaggaacca

SEQ ID NO: 511827 - DNA, 120 bp, Artificial Sequence
  ENSG00000164418_5 (sequence is synthesized)
cacatgtattaagatttggtggtatttttgaatatgtggaatctggcccaatgggagctgaggaacttgcattcagatttgctgtgaacacaattaacagaaacagaacattgctaccca

SEQ ID NO: 511828 - DNA, 120 bp, Artificial Sequence
  ENSG00000164418_6 (sequence is synthesized)
atactacccttacctatgatacccagaagataaacctttatgatagttttgaagcatccaagaaagcctgtgatcagctgtctcttggggtggctgccatcttcgggccttcacacagct

SEQ ID NO: 511829 - DNA, 120 bp, Artificial Sequence
  ENSG00000164418_7 (sequence is synthesized)
catcagcaaacgcagtgcagtccatctgcaatgctctgggagttccccacatacagacccgctggaagcaccaggtgtcagacaacaaagattccttctatgtcagtctctacccagact

SEQ ID NO: 511830 - DNA, 120 bp, Artificial Sequence
  ENSG00000164418_8 (sequence is synthesized)
tctcttcactcagccgtgccattttagacctggtgcagtttttcaagtggaaaaccgtcacggttgtgtatgatgacagcactggtctcattcgtttgcaagagctcatcaaagctccat

SEQ ID NO: 511831 - DNA, 120 bp, Artificial Sequence
  ENSG00000164418_9 (sequence is synthesized)
caaggtataatcttcgactcaaaattcgtcagttacctgctgatacaaaggatgcaaaacccttactaaaagaaatgaaaagaggcaaggagtttcatgtaatctttgattgtagccatg

SEQ ID NO: 511832 - DNA, 120 bp, Artificial Sequence
  ENSG00000164418_10 (sequence is synthesized)
aaatggcagcaggcattttaaaacaggcattagctatgggaatgatgacagaatactatcattatatctttaccactctggacctctttgctcttgatgttgagccctaccgatacagtg

SEQ ID NO: 511833 - DNA, 120 bp, Artificial Sequence
  ENSG00000164418_11 (sequence is synthesized)
gtgttaacatgacagggttcagaatattaaatacagaaaatacccaagtctcctccatcattgaaaagtggtcgatggaacgattgcaggcacctccgaaacccgattcaggtttgctgg

SEQ ID NO: 511834 - DNA, 120 bp, Artificial Sequence
  ENSG00000164418_12 (sequence is synthesized)
atggatttatgacgactgatgctgctctaatgtatgatgctgtgcatgtggtgtctgtggccgttcaacagtttccccagatgacagtcagttccttgcagtgtaatcgacataaaccct

SEQ ID NO: 511835 - DNA, 120 bp, Artificial Sequence
  ENSG00000164418_13 (sequence is synthesized)
ggcgcttcgggacccgctttatgagtctaattaaagaggcacattgggaaggcctcacaggcagaataactttcaacaaaaccaatggcttgagaacagattttgatttggatgtgatca

SEQ ID NO: 511836 - DNA, 120 bp, Artificial Sequence
  ENSG00000164418_14 (sequence is synthesized)
gtctgaaggaagaaggtctagaaaagattggaacgtgggatccagccagtggcctgaatatgacagaaagtcaaaagggaaagccagcgaacatcacagattccttatccaatcgttctt

SEQ ID NO: 511837 - DNA, 120 bp, Artificial Sequence
  ENSG00000164418_15 (sequence is synthesized)
tgattgttaccaccattttggaagagccttatgtcctttttaagaagtctgacaaacctctctatggtaatgatcgatttgaaggctattgcattgatctcctcagagagttatctacaa

SEQ ID NO: 511838 - DNA, 120 bp, Artificial Sequence
  ENSG00000164418_16 (sequence is synthesized)
tccttggctttacatatgaaattagacttgtggaagatgggaaatatggagcccaggatgatgccaatggacaatggaatggaatggttcgtgaactaattgatcataaagctgaccttg

SEQ ID NO: 511839 - DNA, 120 bp, Artificial Sequence
  ENSG00000164418_17 (sequence is synthesized)
cagttgctccactggctattacctatgttcgagagaaggtcatcgacttttccaagccctttatgacacttggaataagtattttgtaccgcaagcccaatggtacaaacccaggcgtct

SEQ ID NO: 511840 - DNA, 120 bp, Artificial Sequence
  ENSG00000164418_18 (sequence is synthesized)
tctccttcctgaatcctctctcccctgatatctggatgtatattctgctggcttacttgggtgtcagttgtgtgctctttgtcatagccaggtttagtccttatgagtggtataatccac

SEQ ID NO: 511841 - DNA, 120 bp, Artificial Sequence
  ENSG00000164418_19 (sequence is synthesized)
acccttgcaaccctgactcagacgtggtggaaaacaattttaccttgctaaatagtttctggtttggagttggagctctcatgcagcaaggttctgagctcatgcccaaagcactgtcca

SEQ ID NO: 511842 - DNA, 120 bp, Artificial Sequence
  ENSG00000164418_20 (sequence is synthesized)
aggatagtgggaggcatttggtggtttttcacacttatcatcatttcttcgtatactgctaacttagccgcctttctgacagtggaacgcatggaatcccctattgactctgctgatgat

SEQ ID NO: 511843 - DNA, 120 bp, Artificial Sequence
  ENSG00000164418_21 (sequence is synthesized)
ttagctaaacaaaccaagatagaatatggagcagtagaggatggtgcaaccatgacttttttcaagaaatcaaaaatctccacgtatgacaaaatgtgggcctttatgagtagcagaagg

SEQ ID NO: 511844 - DNA, 120 bp, Artificial Sequence
  ENSG00000164418_22 (sequence is synthesized)
cagtcagtgctggtcaaaagtaatgaagaaggaatccagcgagtcctcacctctgattatgctttcctaatggagtcaacaaccatcgagtttgttacccagcggaactgtaacctgaca

SEQ ID NO: 511845 - DNA, 120 bp, Artificial Sequence
  ENSG00000164418_23 (sequence is synthesized)
cagattggcggccttatagactctaaaggttatggcgttggcactcccatgggttctccatatcgagacaaaattaccatagcaattcttcagctgcaagaggaaggcaaactgcatatg

SEQ ID NO: 511846 - DNA, 120 bp, Artificial Sequence
  ENSG00000164418_24 (sequence is synthesized)
atgaaggagaaatggtggaggggcaatggttgcccagaagaggagagcaaagaggccagtgccctgggggttcagaatattggtggcatcttcattgttctggcagccggcttggtgctt

SEQ ID NO: 511847 - DNA, 120 bp, Artificial Sequence
  ENSG00000164418_25 (sequence is synthesized)
tcagtttttgtggcagtgggagaatttttatacaaatccaaaaaaaacgctcaattggaaaagaggtccttctgtagtgccatggtagaagaattgaggatgtccctgaagtgccagcgt

SEQ ID NO: 511848 - DNA, 120 bp, Artificial Sequence
  ENSG00000164418_26 (sequence is synthesized)
cggttaaaacataagccacaggccccagttattgtgaaaacagaagaagttatcaacatgcacacatttaacgacagaaggttgccaggtaaagaaaccatggcataaagctgggaggcc

SEQ ID NO: 511849 - DNA, 120 bp, Artificial Sequence
  ENSG00000164418_27 (sequence is synthesized)
aaacacccaagcacaaactgtcgtctttttccaaacaatttagccagaatgtttcctgtggaaatatgcaacctgtgcaaaataaaatgagttacctcatgccgctgtgtctatgaacta

SEQ ID NO: 511850 - DNA, 120 bp, Artificial Sequence
  ENSG00000164418_28 (sequence is synthesized)
gagactctgtgatctaagcagttgcaatgatcagacttgatttacaagcatcatggatcaaccaagttacacggggttacactgttaatcatgggttcctcccttcttctgagtgaatgt

SEQ ID NO: 511851 - DNA, 120 bp, Artificial Sequence
  ENSG00000164418_29 (sequence is synthesized)
taacatgcgcattttgtggctgatttcaaatgcagtccagtgagaaattacaggttccttttgaagctcaactgttgccaggagatggaatatcaatgcccaacagggcaaccaataaaa

SEQ ID NO: 511852 - DNA, 120 bp, Artificial Sequence
  ENSG00000164418_30 (sequence is synthesized)
gtgtcactaagaatataaatatttggaatcagcaaaaactgtagtgttacaggaaacagtacagtcttctgaacacccagatcatagaggtgatgatgttactagcccccaactactcag

SEQ ID NO: 511853 - DNA, 120 bp, Artificial Sequence
  ENSG00000164418_31 (sequence is synthesized)
tataattattgtctgaatgcaaagtatgtgtttataggatgtgaaaaaatgtaatgcaaaacaaatttgaatcccatggcagttggaatataaagcagatgttcatcacttattttcctt

SEQ ID NO: 511854 - DNA, 120 bp, Artificial Sequence
  ENSG00000164418_32 (sequence is synthesized)
ttttcttttcttatttttttttttgacagtctgtgtcactgattgagatagaaatgccaattatcaaggaaataatgttttcttaagttccctaaggcagaagatttaacatgcaattct

SEQ ID NO: 511855 - DNA, 89 bp, Artificial Sequence
  ENSG00000164418_33 (sequence is synthesized)
tcttaagttccctaaggcagaagatttaacatgcaattctaccagatcccttcctattcccccaacaccttttctctaacccccatatc

SEQ ID NO: 511856 - DNA, 120 bp, Artificial Sequence
  ENSG00000164418_34 (sequence is synthesized)
attaaaaggataatgttttgcaatgttcaagttgtaaaaactggccgagtattggctgtgtggaagactaaagctttcattctaacattcagacatagcaatccaaacccttgttcctgc

SEQ ID NO: 511857 - DNA, 120 bp, Artificial Sequence
  ENSG00000164418_35 (sequence is synthesized)
tgtaaatgaacttgatggagcatgggcagatttcagtgatacgagaaaggggactggtcatctatagaaaaatctgtgagagaacttggaagtggactgcgtttatcaatacagtcacaa

SEQ ID NO: 511858 - DNA, 120 bp, Artificial Sequence
  ENSG00000164418_36 (sequence is synthesized)
tgttaaatgaacaaaattcttgaacagttttttttcaaaaaatgttcaggtttatttgtggaaatgcaagatttctatgaaaatagtttttgtatggaaatttttgtaatactttttatc

SEQ ID NO: 511859 - DNA, 120 bp, Artificial Sequence
  ENSG00000164418_37 (sequence is synthesized)
aacaaaacaagaacatgtgttcctgtcaggggtgtgatgtcaagcatgaatggtagtgcgtgtgcaccaccaacgtttggtgaaaactatttttatcaagaaaaaaggaatcatagaaga

SEQ ID NO: 511860 - DNA, 120 bp, Artificial Sequence
  ENSG00000164418_38 (sequence is synthesized)
gaaatattttcaagttagataatataaaagctaggtgcactaccaccactgcttaccatgccacacccctggtttccacgaggctgacaacatactgtaatgaacaattgtgtgtaaaat

SEQ ID NO: 511861 - DNA, 120 bp, Artificial Sequence
  ENSG00000164418_39 (sequence is synthesized)
ggtaaaagacacagacctcttgacaacattgtgataacagttgagtgcacacagtttgctgtttgaatccaatgcacaaaattaaaaaaaatcattaaaactatgttcattttactttca

SEQ ID NO: 511862 - DNA, 120 bp, Artificial Sequence
  ENSG00000164418_40 (sequence is synthesized)
ggagagcagctatctcagtctttctcacttaatcttggcttcacgtcagaagctgtgcagcagtgcagtagaatagggcctggcaaaacctttgctagcaaagcgccttttgtgccgggc

SEQ ID NO: 511863 - DNA, 120 bp, Artificial Sequence
  ENSG00000164418_41 (sequence is synthesized)
gcagtgggagaatttttatacaaatccaaaaaaaacgctcaattggaaaagagagccaagactaagttacctcaagactatgtattcctccctattttggagtcagtttccatttctaca

SEQ ID NO: 511864 - DNA, 120 bp, Artificial Sequence
  ENSG00000164418_42 (sequence is synthesized)
gtgttgtcatcatcaccatcttcatcatcattatcatcatgttcttaataagtacatctaataaggtccttctgtagtgccatggtagaagaattgaggatgtccctgaagtgccagcgt

SEQ ID NO: 511865 - DNA, 120 bp, Artificial Sequence
  ENSG00000164418_43 (sequence is synthesized)
tttaattgatgctaaccatagtgatgggagatccttgcttatacaggagaacataatttattatcttattttaaaataaacattacactaaaaccccacatcatttcaagaaatgtgggc

SEQ ID NO: 511866 - DNA, 120 bp, Artificial Sequence
  ENSG00000164418_44 (sequence is synthesized)
aatagtagttattttattattatacgtaacttttaaaaataacaagatagacaaaatgtttgagctacatgcacatgaaaagtgaaatttacaaaaagcttaagaaagggatccaaaagt

SEQ ID NO: 511867 - DNA, 120 bp, Artificial Sequence
  ENSG00000164418_45 (sequence is synthesized)
atatttaagcacttcctctgaaaccctcataactaacaaaatatgaaaaaacaataaatgtggtttataaaccagaaagcctaaaaaatctcttctaatgctatttttattaaaaatgtt

SEQ ID NO: 511868 - DNA, 120 bp, Artificial Sequence
  ENSG00000164418_46 (sequence is synthesized)
tactcattaatattttaattggaactttgcatcatctcaggtagaacatgagtctcctgtcactatatttaaacaagaatgtcctaaaagattgtctattttctgaaaatagcctctgct

SEQ ID NO: 511869 - DNA, 120 bp, Artificial Sequence
  ENSG00000164418_47 (sequence is synthesized)
ttcccaatggttgttgcttgcttactaaagaaatatgtaaatctttgatttaagcttttattacacagtgattccattctgccactgtgacaaaaagtatctgattgctgatcaaattct

SEQ ID NO: 511870 - DNA, 120 bp, Artificial Sequence
  ENSG00000164418_48 (sequence is synthesized)
acaaaatcttactgtgtcattacatgacctatgattaatctcttccatcttatttacattttggataaataggtgactctattttctcaaagtaaaaaggaagatatatttacttacttg

SEQ ID NO: 511871 - DNA, 120 bp, Artificial Sequence
  ENSG00000164418_49 (sequence is synthesized)
ccaattatcttattgaagtgttaaagttttatttttctctggattattttaagatgtacttactattaattcattttattgaaagttgacatggtaaactatatttccaggactatagaa

SEQ ID NO: 511872 - DNA, 120 bp, Artificial Sequence
  ENSG00000164418_50 (sequence is synthesized)
gattcaaagatgataaaatatgtatggccttttcttcacaggctttaaaatctaatgacaatttcataagcaaccataaatttgaacatttttgatatctgtaacaatatagtactttat

SEQ ID NO: 511873 - DNA, 120 bp, Artificial Sequence
  ENSG00000164418_51 (sequence is synthesized)
gtaaatggttatagcaaaaataatgccatagttctatgaggaaagaaattttaaaattcctgattcttctcctttagaaatatgtacatatttatctatctatgcatagatactatttct

SEQ ID NO: 511874 - DNA, 120 bp, Artificial Sequence
  ENSG00000164418_52 (sequence is synthesized)
tcctttatctaactaataattgtcaaaagtcacaatcaattttactttttctgttctttattttccatggggtgctgagaaataatgaaattttaagaatcacattcatttattaaaatg

SEQ ID NO: 511875 - DNA, 120 bp, Artificial Sequence
  ENSG00000164418_53 (sequence is synthesized)
tactgtcctgtctttgtgggcagagagcatgctggttgtgtcagtaagctataagtgttatagggattactgttttcttaaccagaatataaaagctttttaaatcaatatgataaatga

SEQ ID NO: 511876 - DNA, 120 bp, Artificial Sequence
  ENSG00000164418_54 (sequence is synthesized)
atcattgcctcacttcgaagatttctgaagaaccaaaactaaaataacatgttttactaacttgagttaataattcagttataagaaaaaccaaagtactaaaatttaaaaggaggcctt

SEQ ID NO: 511877 - DNA, 120 bp, Artificial Sequence
  ENSG00000164418_55 (sequence is synthesized)
ttttaaggaaccaagacatttataataaacattctaactataaaaggactaccttagtattctacataatatttgtggtttttttcttgttttttcacagaataaatgtcattaccaaaa

SEQ ID NO: 511878 - DNA, 120 bp, Artificial Sequence
  ENSG00000164418_56 (sequence is synthesized)
ccataccatccagacactgtttagtaatcttttgaaacttactaaaagaggtttttaataatgaggtccttctgtagtgccatggtagaagaattgaggatgtccctgaagtgccagcgt

SEQ ID NO: 511879 - DNA, 67 bp, Artificial Sequence
  ENSG00000164418_57 (sequence is synthesized)
ggcccacagtttcttaatccatttgttgattgatgggcatatgggctggttccatatgtttgcaact

SEQ ID NO: 511880 - DNA, 120 bp, Artificial Sequence
  ENSG00000164418_58 (sequence is synthesized)
gattgatgggcatatgggctggttccatatgtttgcaactgcaaattgtgagcactgtttaattctaagcttccttgtaggtaaggcaaaaagcaagcaaagtattttaggcaattccca

SEQ ID NO: 511881 - DNA, 120 bp, Artificial Sequence
  ENSG00000164418_59 (sequence is synthesized)
cccataactaaagggaaattatttattatatttgtccatttgaaaagatattttttcatgttgtaaaaaatttattaaatgaatgctaacataaggattaataaacaacatgatcttaac

SEQ ID NO: 511882 - DNA, 120 bp, Artificial Sequence
  ENSG00000164430_0 (sequence is synthesized)
gcagactcttgtgtgcccgccagtagtgcttggtttccaacagctgctgctggctcttcctcttgcggccttttcctgaaacggattcttctttcggggaacagaaagcgccagccatgc

SEQ ID NO: 511883 - DNA, 120 bp, Artificial Sequence
  ENSG00000164430_1 (sequence is synthesized)
agccttggcacggaaaggccatgcagagagcttccgaggccggagccactgcccccaaggcttccgcacggaatgccaggggcgccccgatggatcccaccgagtctccggctgcccccg

SEQ ID NO: 511884 - DNA, 120 bp, Artificial Sequence
  ENSG00000164430_2 (sequence is synthesized)
aggccgccctgcctaaggcgggaaagttcggccccgccaggaagtcgggatcccggcagaaaaagagcgccccggacacccaggagaggccgcccgtccgcgcaactggggcccgcgcca

SEQ ID NO: 511885 - DNA, 120 bp, Artificial Sequence
  ENSG00000164430_3 (sequence is synthesized)
aaaaggcccctcagcgcgcccaggacacgcagccgtctgacgccaccagcgcccctggggcagaggggctggagcctcctgcggctcgggagccggctctttccagggctggttcttgcc

SEQ ID NO: 511886 - DNA, 120 bp, Artificial Sequence
  ENSG00000164430_4 (sequence is synthesized)
gccagaggggcgcgcgctgctccacgaagccaagacctccgcccgggccctgggacgtgcccagccccggcctgccggtctcggcccccattctcgtacggagggatgcggcgcctgggg

SEQ ID NO: 511887 - DNA, 120 bp, Artificial Sequence
  ENSG00000164430_5 (sequence is synthesized)
cctcgaagctccgggcggttttggagaagttgaagctcagccgcgatgatatctccacggcggcggggatggtgaaaggggttgtggaccacctgctgctcagactgaagtgcgactccg

SEQ ID NO: 511888 - DNA, 120 bp, Artificial Sequence
  ENSG00000164430_6 (sequence is synthesized)
cgttcagaggcgtcgggctgctgaacaccgggagctactatgagcacgtgaagatttctgcacctaatgaatttgatgtcatgtttaaactggaagtccccagaattcaactagaagaat

SEQ ID NO: 511889 - DNA, 120 bp, Artificial Sequence
  ENSG00000164430_7 (sequence is synthesized)
attccaacactcgtgcatattactttgtgaaatttaaaagaaatccgaaagaaaatcctctgagtcagtttttagaaggtgaaatattatcagcttctaagatgctgtcaaagtttagga

SEQ ID NO: 511890 - DNA, 120 bp, Artificial Sequence
  ENSG00000164430_8 (sequence is synthesized)
aaatcattaaggaagaaattaacgacattaaagatacagatgtcatcatgaagaggaaaagaggagggagccctgctgtaacacttcttattagtgaaaaaatatctgtggatataaccc

SEQ ID NO: 511891 - DNA, 120 bp, Artificial Sequence
  ENSG00000164430_9 (sequence is synthesized)
tggctttggaatcaaaaagtagctggcctgctagcacccaagaaggcctgcgcattcaaaactggctttcagcaaaagttaggaagcaactacgactaaagccattttaccttgtaccca

SEQ ID NO: 511892 - DNA, 120 bp, Artificial Sequence
  ENSG00000164430_10 (sequence is synthesized)
agcatgcaaaggaaggaaatggtttccaagaagaaacatggcggctatccttctctcacatcgaaaaggaaattttgaacaatcatggaaaatctaaaacgtgctgtgaaaacaaagaag

SEQ ID NO: 511893 - DNA, 120 bp, Artificial Sequence
  ENSG00000164430_11 (sequence is synthesized)
agaaatgttgcaggaaagattgtttaaaactaatgaaataccttttagaacagctgaaagaaaggtttaaagacaaaaaacatctggataaattctcttcttatcatgtgaaaactgcct

SEQ ID NO: 511894 - DNA, 120 bp, Artificial Sequence
  ENSG00000164430_12 (sequence is synthesized)
tctttcacgtatgtacccagaaccctcaagacagtcagtgggaccgcaaagacctgggcctctgctttgataactgcgtgacatactttcttcagtgcctcaggacagaaaaacttgaga

SEQ ID NO: 511895 - DNA, 120 bp, Artificial Sequence
  ENSG00000164430_13 (sequence is synthesized)
aatatgaaagaaacaatgagtttccagtttttgatgaattttgagattgtatttttagaaagatctaagaactagagtcaccctaaatcctggagaatacaagaaaaatttgaaaagggg

SEQ ID NO: 511896 - DNA, 120 bp, Artificial Sequence
  ENSG00000164430_14 (sequence is synthesized)
actccatcctgggtgacagagcaagacttcctctcaaaaaataaataaataaataagaaaaataaattaggaaattattaaaataattttttagaaaagcaacaaaataacaaaaattag

SEQ ID NO: 511897 - DNA, 120 bp, Artificial Sequence
  ENSG00000164430_15 (sequence is synthesized)
ttagtgactgtaataattggaatgtttgaaatttgtcacagcaataattgactaaaatgaatgtaaataattattcagttttcagtttgttgtaataaactctaatcagtataaaggatt

SEQ ID NO: 511898 - DNA, 120 bp, Artificial Sequence
  ENSG00000164430_16 (sequence is synthesized)
gactatcctaggaaaaagattagtcaaggaataagaagcaaaagtagtatttgaaatctaaaaacattaccatgtttgctttatcatgcaggcaaataaataaataaatgacatttttag

SEQ ID NO: 511899 - DNA, 120 bp, Artificial Sequence
  ENSG00000164430_17 (sequence is synthesized)
gttggaataaaaaaagataaagtacatattgccttaattaaattcatcaagttcttactgaaaaacagctctccgccgtgcctggccaggaaatacataattttttttttttttttttag

SEQ ID NO: 511900 - DNA, 120 bp, Artificial Sequence
  ENSG00000164430_18 (sequence is synthesized)
acaggtgtgagccaccacgcctggctgaaatacataatcttaaaagaaaacataagatactttattttaatatacgtgactaaatgtaaaacctaacttattttctgttatctatttatt

SEQ ID NO: 511901 - DNA, 120 bp, Artificial Sequence
  ENSG00000164430_19 (sequence is synthesized)
tatctatttatttttactttcagtaacactttttttattttaggtagcattcagcctagaggcaactgctgtttgttaaatatttcctgttcatatattttgcacattttcttatgggtt

SEQ ID NO: 511902 - DNA, 120 bp, Artificial Sequence
  ENSG00000164430_20 (sequence is synthesized)
agttttcttctcattgttttgggaagttcttaatatatttggggtatttatctttcattcgttgtctgtgtaacaaataacttctgccatatgggttgtctgcacattttttggtgtctt

SEQ ID NO: 511903 - DNA, 120 bp, Artificial Sequence
  ENSG00000164430_21 (sequence is synthesized)
ttagtaaacaaggtttttttgttttgtattgttttgtttattgtaaagatttttaaattttaatggagttgatttcttttctcattcaagcttttgagaataaattggagttgaattttt

SEQ ID NO: 511904 - DNA, 120 bp, Artificial Sequence
  ENSG00000164430_22 (sequence is synthesized)
taggtcacttgataagtgatccgcactgaagcaaaagataaactcagcattcttaggtgcttattctaatgccaccagttttacttctgttagcaaaaatctaaagtaacataacagact

SEQ ID NO: 511905 - DNA, 120 bp, Artificial Sequence
  ENSG00000164430_23 (sequence is synthesized)
tatcacccccatttggaattagtatacaaatagaaatgatcctaatcaatttaattaattataatggacacacaagaaaaaatacctacacagcttttcgagaaacgaagacaatgactt

SEQ ID NO: 511906 - DNA, 120 bp, Artificial Sequence
  ENSG00000164430_24 (sequence is synthesized)
tgtctgtggatgacatactctgtagaaaagtttgcatgtgactccatttctcttcctcggtggttacaattatattttgcttcactgaacttacagcctaaaggattcaaagaacatagt

SEQ ID NO: 511907 - DNA, 120 bp, Artificial Sequence
  ENSG00000164430_25 (sequence is synthesized)
tcatcaaggtcatcatgattgagggtgagaccgcatacatcagctcaaaatgcatcttctctctcattggttaatgtttttaataaactgctaagcaaaatggcagacgtcctaaaaaaa

SEQ ID NO: 511908 - DNA, 120 bp, Artificial Sequence
  ENSG00000164430_26 (sequence is synthesized)
aaatggtttccaaggtattttaaatattaaagttaacttaaagaagtaaaagagttgttaatgttatatgttcaggcagtaaaagatcaacagccaaccaatgctgttgtcatttcaaga

SEQ ID NO: 511909 - DNA, 120 bp, Artificial Sequence
  ENSG00000164430_27 (sequence is synthesized)
gccatcaggcaaaataggttataagatgggagtctggtgacagacagaattgaaaagggcaaagttgtagtattaatatcaaatactcagctttaaaatgtctagcaatccatatttgaa

SEQ ID NO: 511910 - DNA, 120 bp, Artificial Sequence
  ENSG00000164430_28 (sequence is synthesized)
ttttattttatttttttcggtaaagaaaagcagtattggccttggagtcagactgccctggttctgaatcctgaggctccttctactagttgtgtgaattcgagctagttatgatgcttt

SEQ ID NO: 511911 - DNA, 120 bp, Artificial Sequence
  ENSG00000164430_29 (sequence is synthesized)
ctaaacccatttgctcatccgtacactgtgttaaccaaaagtacttgaaaaattctggaaagataaaatgtgcatgcagttctgtggccaattctgttcatgccagttatacgttattac

SEQ ID NO: 511912 - DNA, 120 bp, Artificial Sequence
  ENSG00000164434_0 (sequence is synthesized)
gtaaagggtcttctgagctgcagtggcaattagaccagaagatccccgctcctgtctctaaagaggggaaagggcaaggatggtggaggctttctgtgctacctggaagctgaccaacag

SEQ ID NO: 511913 - DNA, 120 bp, Artificial Sequence
  ENSG00000164434_1 (sequence is synthesized)
tcagaactttgatgagtacatgaaggctctaggcgtgggctttgccactaggcaggtgggaaatgtgaccaaaccaacggtaattatcagtcaagaaggagacaaagtggtcatcaggac

SEQ ID NO: 511914 - DNA, 120 bp, Artificial Sequence
  ENSG00000164434_2 (sequence is synthesized)
tctcagcacattcaagaacacggagattagtttccagctgggagaagagtttgatgaaaccactgcagatgatagaaactgtaagtctgttgttagcctggatggagacaaacttgttca

SEQ ID NO: 511915 - DNA, 120 bp, Artificial Sequence
  ENSG00000164434_3 (sequence is synthesized)
tgacccttacttttggtgatgtggttgctgttcgccactatgagaaggcataaaaatgttcctggtcggggcttggaagagctcttcagtttttctgtttcctcaagtctcagtgctatc

SEQ ID NO: 511916 - DNA, 120 bp, Artificial Sequence
  ENSG00000164434_4 (sequence is synthesized)
ctattacaacatggctgatcattaattagaaggttatccttggtgtggaggtggaaaatggtgatttaaaaacttgttactccaagcaacttgcccaattttaatctgaaaatttatcat

SEQ ID NO: 511917 - DNA, 120 bp, Artificial Sequence
  ENSG00000164434_5 (sequence is synthesized)
gttttataatttgaattaaagttttgtcccccccccccttttttttataaacaagtgaatacattttataatttcttttggaatgtaaatcaaatttgaataaaaatcttacacgtgaaa

SEQ ID NO: 511918 - DNA, 120 bp, Artificial Sequence
  ENSG00000164434_6 (sequence is synthesized)
attaaggatggcaaaatggttatggtaagtaatgacaattctccattcttccttgtttttttctcctctccgcacacctctcacctccttccttcttcttccctcctccttccattcttc

SEQ ID NO: 511919 - DNA, 120 bp, Artificial Sequence
  ENSG00000164434_7 (sequence is synthesized)
ctccttccttccttctttaataatacatcactggcaaggttctttaactatatgtaaaacaggggaaacaaaaagatcccagttaattttcttcttcagctcaacttctttgattgtaga

SEQ ID NO: 511920 - DNA, 120 bp, Artificial Sequence
  ENSG00000164434_8 (sequence is synthesized)
aaaagagaaaaattcatgtgtagttaaaaaaataaaagttgccattgatttgcctaaaactgtgtcaaaagattttttgtaggataactatggatgtctctcaaataaaatttaatataa

SEQ ID NO: 511921 - DNA, 120 bp, Artificial Sequence
  ENSG00000164434_9 (sequence is synthesized)
agcccataatcactgaaatatataaagataattgctattataagagaatctcagacagatgactttatagctcctgtaataagagatctttaaacagtttatattttaatttataaagtt

SEQ ID NO: 511922 - DNA, 120 bp, Artificial Sequence
  ENSG00000164434_10 (sequence is synthesized)
acacaagttctgggcagataatttagaatataacagaaaagtataacaaaaaaattaaaatcccctctgatttctcatcagtgataacccttttttttttttttttttgagataaagtct

SEQ ID NO: 511923 - DNA, 86 bp, Artificial Sequence
  ENSG00000164434_11 (sequence is synthesized)
gtcacccagactggagtgcagggggtgcattcttggctcactgcaacctctgcttcatgggctcaagcgattctacacaagccacc

SEQ ID NO: 511924 - DNA, 77 bp, Artificial Sequence
  ENSG00000164434_12 (sequence is synthesized)
gggatttcgccatgttgcccaggctggcctacagctcttgagctcaaagtgatgctcccgcctgaggctcccagccc

SEQ ID NO: 511925 - DNA, 120 bp, Artificial Sequence
  ENSG00000164434_13 (sequence is synthesized)
agagaaccattttgatgttacttctttccagtttttttctcgaatgcataatatgccttttaaacatatatattcaatactaggtagacatgaaaaatatttttttcaatcagcctcttc

SEQ ID NO: 511926 - DNA, 120 bp, Artificial Sequence
  ENSG00000164434_14 (sequence is synthesized)
ttacttactaggaattatctgtaaaagaggatttattagtgtcctaaggctgccacaacaaagtaccacaaacttggtggcttaaaacaacagaaatgaattttctcagttctgaaagct

SEQ ID NO: 511927 - DNA, 120 bp, Artificial Sequence
  ENSG00000164434_15 (sequence is synthesized)
ggacgcctgagatcaaggcgaccctagtgttgccatccttctgcgggccccctcccttgcttcttcctacttcccggatggctcctggcaatcattgaggttgttgggcttacagttgtt

SEQ ID NO: 511928 - DNA, 120 bp, Artificial Sequence
  ENSG00000164434_16 (sequence is synthesized)
attactctgatccatttctgactccatctttacaagactttttcctctgtttttgtcctaaattgatcaaatataaaataattaacaaataatttatctaatgatggagtagtatcacaa

SEQ ID NO: 511929 - DNA, 120 bp, Artificial Sequence
  ENSG00000164434_17 (sequence is synthesized)
actaggagaaatattatgccttcaccaagccttcctcagacactttttgtgtgacctgcaatggtatattgatgatactgacataggtgggtaggctcattcaattttggaggagggtgt

SEQ ID NO: 511930 - DNA, 120 bp, Artificial Sequence
  ENSG00000164434_18 (sequence is synthesized)
gagaatgctttacatagtccttgtacgatgacagcagagaaagttttgttgtttaagaatggggactcatgtttccttctccccttgactactgcaatcagcactgttctgcattgagat

SEQ ID NO: 511931 - DNA, 120 bp, Artificial Sequence
  ENSG00000164434_19 (sequence is synthesized)
attcatgtttctgtggagatggaggtggggagcagagggacagttttcctttcatgttaaaggatatttgctcacatttttttggcaacaatcaataaaagaaaggactcatttctaaaa

SEQ ID NO: 511932 - DNA, 120 bp, Artificial Sequence
  ENSG00000164438_0 (sequence is synthesized)
gcgcactcttggcaaagtttcagtgcgacgagaggcgccgggcgctccatggccgcgccgtaacggggacccagccgcctccccgcccagcccagcccagcccttccgcccgcccaggat

SEQ ID NO: 511933 - DNA, 120 bp, Artificial Sequence
  ENSG00000164438_1 (sequence is synthesized)
ggaggcgcccgccagcgcgcagaccccgcacccgcacgagcccatcagcttcggcatcgaccagatccttaacagcccggaccaggacagcgcacccgccccgcggggccccgacggcgc

SEQ ID NO: 511934 - DNA, 120 bp, Artificial Sequence
  ENSG00000164438_2 (sequence is synthesized)
cagctacctgggagggccccccgggggccgtccgggcgccacatacccgtctctgcccgcctcctttgcgggcctcggcgcgcccttcgaggacgcgggatcttacagtgtgaacctgag

SEQ ID NO: 511935 - DNA, 120 bp, Artificial Sequence
  ENSG00000164438_3 (sequence is synthesized)
cctagcgcccgcaggcgtgatccgggtgccggcgcacaggccgctgcccggggccgtgccaccgcctctgccaagcgcgctacccgccatgccctccgtgcccacggtctccagccttgg

SEQ ID NO: 511936 - DNA, 120 bp, Artificial Sequence
  ENSG00000164438_4 (sequence is synthesized)
cggtctcaatttcccctggatggagagcagccgccgcttcgtgaaagaccgcttcacagcggcggccgcactcacgcccttcaccgtgacccggcgcatcggccacccctaccagaaccg

SEQ ID NO: 511937 - DNA, 120 bp, Artificial Sequence
  ENSG00000164438_5 (sequence is synthesized)
gacgccgcccaagcgtaagaagccgcgcacgtccttttcccgggtgcagatctgcgagctggaaaagcgcttccatcgccagaagtacctggcctctgccgagagggcggcgctcgccaa

SEQ ID NO: 511938 - DNA, 120 bp, Artificial Sequence
  ENSG00000164438_6 (sequence is synthesized)
cggcagcaggcgagccggctcatgctgcagctgcaacacgacgccttccaaaagagcctcaacgactccatccagcctgacccgctctgtctgcacaactcgtcactctttgctctgcag

SEQ ID NO: 511939 - DNA, 120 bp, Artificial Sequence
  ENSG00000164438_7 (sequence is synthesized)
aatctgcagccctgggaggaggatagttccaaggttcccgctgtcacctccctggtgtgagcccaccagcgcgcaccgtcgccacggatcgccgcccccacccagccgggcgccccggac

SEQ ID NO: 511940 - DNA, 120 bp, Artificial Sequence
  ENSG00000164438_8 (sequence is synthesized)
gaaccggcgccgagaggggaaggggccgcctagcccgagtaggccccagggcgcggccacagactggcgggccgcggaagggggtagggcccgagctccgcgcggccgcacaatccgagc

SEQ ID NO: 511941 - DNA, 120 bp, Artificial Sequence
  ENSG00000164438_9 (sequence is synthesized)
gccgcacaatccgagcccccgccccgcgccccgtcccgccccaggcccgggcctgacaagaaagcgccttacgtttctccgccccccgcccgcaccccccgggccgggcgcctgtattat

SEQ ID NO: 511942 - DNA, 120 bp, Artificial Sequence
  ENSG00000164438_10 (sequence is synthesized)
ttatactttgtacttttgcccaaacgtgtaaataataaaaaagttttggcttttttctttagaaaccggccacctgcttcccccgcgggggccgctggaggaagggcagccgacccggcc

SEQ ID NO: 511943 - DNA, 120 bp, Artificial Sequence
  ENSG00000164438_11 (sequence is synthesized)
gctgggggaagtgccaggggcccggggcaccctgcgtttaggctgggtccactcttcttcttttccgttccttttatttaagtctttttatttaataaaaaagttagctatttcacttaa

SEQ ID NO: 511944 - DNA, 120 bp, Artificial Sequence
  ENSG00000164440_0 (sequence is synthesized)
gctgttgctgcagctctgacttgctttttcctgcctccttcctctcctctctcttcttgcttagcttcttgccttctgatactactcccaagatggaggctaatcactctgaacagctct

SEQ ID NO: 511945 - DNA, 120 bp, Artificial Sequence
  ENSG00000164440_1 (sequence is synthesized)
cagcggaacgacagtcaacacctccaggtgacagttcatcattacccagtcacaatggcctggagaaggaagatggccaggattctccaaccccagtccaaccaccagagaaagaggcaa

SEQ ID NO: 511946 - DNA, 120 bp, Artificial Sequence
  ENSG00000164440_2 (sequence is synthesized)
gtgtgcaccccgatatctctgaagagctgaatcgacagctggaagacatcattaacacttatgggtctgctgccagcacagcagggaaagagggctctgccagggccagtgagcagcctg

SEQ ID NO: 511947 - DNA, 120 bp, Artificial Sequence
  ENSG00000164440_3 (sequence is synthesized)
agaatgcagaatcacctgacaacgaggatggggactgtgaggaaacaactgaagaggctggaagagaacccgttgcttctggagagccacccactgtcaaagagcccgtcagcaataagg

SEQ ID NO: 511948 - DNA, 120 bp, Artificial Sequence
  ENSG00000164440_4 (sequence is synthesized)
agcaaaaattggaaaagaaaatcctaaaaggattaggcaaagaagccaacctgctaatgcaaaatctgaacaagttgcaaacaccggaagaaaagtttgattttttattcaagaagtatg

SEQ ID NO: 511949 - DNA, 120 bp, Artificial Sequence
  ENSG00000164440_5 (sequence is synthesized)
ctgaattgctggatgaacatcgtactgagcaaaagaagttaaagctcctccaaaagaaacaggtacaaattcaaaaagaaaaggaccagttacaaggtgaacacagcagagctatcctcg

SEQ ID NO: 511950 - DNA, 120 bp, Artificial Sequence
  ENSG00000164440_6 (sequence is synthesized)
ctcgaagcaaattggagagtctgtgccgggagctgcagagacacaacaagactctgaaggaagaggcgcttcagcgggcacgtgaggaagaagagaaaaggaaggaaatcacaagccatt

SEQ ID NO: 511951 - DNA, 120 bp, Artificial Sequence
  ENSG00000164440_7 (sequence is synthesized)
tccagagtaccctcacggacatccagggccagatcgagcagcagagtgagcgaaatatgaagctctgtcaggagaacacagagcttgcagaaaagctgaaaagcatcatcgatcagtatg

SEQ ID NO: 511952 - DNA, 120 bp, Artificial Sequence
  ENSG00000164440_8 (sequence is synthesized)
agctcagagaggagcatctggacaaaatatttaaacacagagaactgcagcagaagctggtggatgcaaagcttgagcaggcccaagaaatgatgaaggaagcggaggagcgacacaaac

SEQ ID NO: 511953 - DNA, 120 bp, Artificial Sequence
  ENSG00000164440_9 (sequence is synthesized)
gagaaaaggaatatttgctgaaccaggcagcagagtggaaacttcaggcgaaagtgctgaaggagcaagagacagtcctgcaggctcagctcactctctactcaggaaggtttgaagaat

SEQ ID NO: 511954 - DNA, 120 bp, Artificial Sequence
  ENSG00000164440_10 (sequence is synthesized)
tccagagcacactaactaaaagcaacgaggtgtttgccacgttcaaacaggaaatggacaaaacaactaagaaaatgaagaagctggaaaaggacacagccacatggaaagcccgatttg

SEQ ID NO: 511955 - DNA, 120 bp, Artificial Sequence
  ENSG00000164440_11 (sequence is synthesized)
agaactgtaacaaagctctgttggacatgattgaagagaaagcactgagagctaaagaatatgagtgctttgtgatgaaaatcgggaggctagagaacctctgccgtgctttacaagaag

SEQ ID NO: 511956 - DNA, 120 bp, Artificial Sequence
  ENSG00000164440_12 (sequence is synthesized)
agagaaacgaactccacaaaaaaatcagagacgcagaaatatctgaaaaggatgaccaaagtcagcacaactccgatgaagagccagagtcaaacgtctctgtggatcaagagattgacg

SEQ ID NO: 511957 - DNA, 120 bp, Artificial Sequence
  ENSG00000164440_13 (sequence is synthesized)
cagaggaggttaatagtgtccaaaccgccgtgaaaaatctggccacagccttcatgataattcatcatccagagtcaaccccgcaccagtccaaagaaacccaacccgaaataggcagtt

SEQ ID NO: 511958 - DNA, 120 bp, Artificial Sequence
  ENSG00000164440_14 (sequence is synthesized)
ctcaggagagtgctgacgccgctctcaaggagccagagcaaccccctctgatcccttcacgggattcagagagtcccctgcctcccctaactcctcaggctgaagccgaaggaggcagtg

SEQ ID NO: 511959 - DNA, 120 bp, Artificial Sequence
  ENSG00000164440_15 (sequence is synthesized)
atgctgaacctccctccaaggccagtaattctcctgccgggttgggagcagaaacccaatgcgagggtctccctgttggagcacaggctgatcaggcgtcctggaagccagaggcagaag

SEQ ID NO: 511960 - DNA, 120 bp, Artificial Sequence
  ENSG00000164440_16 (sequence is synthesized)
cttccggtcaggccccacaggctcccaccgaggcctccctacagaagatggaggcagatgtgcctgctccagcatgcgcagcagaagagcacgttgcagccatggtgcctgcatgcgagc

SEQ ID NO: 511961 - DNA, 120 bp, Artificial Sequence
  ENSG00000164440_17 (sequence is synthesized)
ccagtaggcagcccccacgagcagcagcagaggagctgccagtaggggcctcagctgggccccagccgcgcaacgtggctgacaccaatctggaaggcgtcgactaagcctcaccgtgcc

SEQ ID NO: 511962 - DNA, 120 bp, Artificial Sequence
  ENSG00000164440_18 (sequence is synthesized)
ttcagaggcttcttcctgcctctttgcatattcagcataacagcttgtcttccgaaaaaggcattaagggctagagatgtcaaatggaagagacttaggatcaagacattttttaatgtt

SEQ ID NO: 511963 - DNA, 120 bp, Artificial Sequence
  ENSG00000164440_19 (sequence is synthesized)
tttgaaggttttctatttaacactggttgacagtataattttcccaaagggcaacaaaacatacagatagcaaatttatattccttttctgttaagataatacttaaatttgttaatcac

SEQ ID NO: 511964 - DNA, 120 bp, Artificial Sequence
  ENSG00000164440_20 (sequence is synthesized)
cagtaagatttgatgtttaaagacttccactgcaatatataaatactgaaaatgtgatgttctgcttatttggatatatagtttaacaagttccatagtaatttatggatgcccaggtta

SEQ ID NO: 511965 - DNA, 120 bp, Artificial Sequence
  ENSG00000164440_21 (sequence is synthesized)
atgcccaggttacatttaaactatacatatacataatatatacatacgtgtgtacttattatatgtatatatacacgtatgtatagatgtgtgaatatttgtttatatacatatatgcac

SEQ ID NO: 511966 - DNA, 120 bp, Artificial Sequence
  ENSG00000164440_22 (sequence is synthesized)
atatataaatgcattattacacatacatttctctcaccccttaatgcatttttctcaatgcagaatatttagatgctaatcaaaaaaatgatctcttacttgcacttgagactatggttg

SEQ ID NO: 511967 - DNA, 120 bp, Artificial Sequence
  ENSG00000164440_23 (sequence is synthesized)
actaatgctctataaatccgaagagagttcggactataagtatttaggctatcattatgttgggcaaaaataagtaacccaatggtagataaatgaattcaaccagttgatcaaatggca

SEQ ID NO: 511968 - DNA, 120 bp, Artificial Sequence
  ENSG00000164440_24 (sequence is synthesized)
gaaaagcagttagactacaatctgtgcagacagcatggacacaaagatgaccacaaggggcccaaaacagaaaagagaaacacaagctcacctcttggagctgcttctcctacacttctc

SEQ ID NO: 511969 - DNA, 120 bp, Artificial Sequence
  ENSG00000164440_25 (sequence is synthesized)
agcccattgctttgccaccccctcatgtgccagggcatcccattccaggcttcctgcaaggaaacggttggaagtgggaaaggggagctagggattgaggggttaagggacctcacacta

SEQ ID NO: 511970 - DNA, 120 bp, Artificial Sequence
  ENSG00000164440_26 (sequence is synthesized)
agaaggggctgtgctttgatcccctgcctcttgcactaccaatgtctcaagacataatattcatctcttgctgtcagacccattctatattctaaaagcttctgctccttccttcccaat

SEQ ID NO: 511971 - DNA, 120 bp, Artificial Sequence
  ENSG00000164440_27 (sequence is synthesized)
ttctcctttgtagcaggaaattacacccagccctcatctcaattaatgctaaataaagctattgtttttccaaaacacaaatctacactgggtctcaatatcagtgatgaggcttacaaa

SEQ ID NO: 511972 - DNA, 120 bp, Artificial Sequence
  ENSG00000164440_28 (sequence is synthesized)
ccaacacgttttctgccatgaggatttctctttaggccagaagtacaaaacaaaaaaaccaatggattttaaccaaaatgatttgaaatataggtgaggattcaggagaaggcaaaagct

SEQ ID NO: 511973 - DNA, 120 bp, Artificial Sequence
  ENSG00000164440_29 (sequence is synthesized)
agaaacacttggggttgtcaacatgagtattacattaacattgcttgatgagaacctctaatgatactgacaacataaattacctagggtaaaggatagctgcaacaatgaaacaggaaa

SEQ ID NO: 511974 - DNA, 120 bp, Artificial Sequence
  ENSG00000164440_30 (sequence is synthesized)
gaagagagggagagagaggaaagggaaggaagaaaggaaggagggagaagggaagaaagaaacaatgtctaacccaaccctatcttgaaagttgaactcaagtagaaaaatggatagaaa

SEQ ID NO: 511975 - DNA, 120 bp, Artificial Sequence
  ENSG00000164440_31 (sequence is synthesized)
caaaattctctagtactcatccaggaaaccattcttcaatgttgcatgtggctgtttgccaaggcacacaaagtgcttgtaggcagcaaccatatgctacaagaattgtaaactgcatac

SEQ ID NO: 511976 - DNA, 120 bp, Artificial Sequence
  ENSG00000164440_32 (sequence is synthesized)
agtttgtttgaagtagacagtgaggataataacaaagttgctaggcaggaaaaaaaatcaggaaaaaagcttgtcgctatttgagaatctgtatatttttaaaggcttaaaatattataa

SEQ ID NO: 511977 - DNA, 120 bp, Artificial Sequence
  ENSG00000164440_33 (sequence is synthesized)
ccacagggtatccagccaaattcaacattactgcaagtcttagagatttaaacattcatttgattcagagctaaatattcaccataatccaggagggtctccttccccactgcagaggca

SEQ ID NO: 511978 - DNA, 120 bp, Artificial Sequence
  ENSG00000164440_34 (sequence is synthesized)
gaacgtccaagaatggagtaagattagtcatagtaaagtctcagtctgaatatttagcaagagaaacaggcagcagaggaacccaaaggcagtaaatcaaatattctaaaacccaaagtt

SEQ ID NO: 511979 - DNA, 120 bp, Artificial Sequence
  ENSG00000164440_35 (sequence is synthesized)
cattattttcatccaaaagactttcacagaaacacattactcacagccatgtatatcttggacagagtttcagatggaatgacttgtctgaaatttgtaaagcttaatataggttttggg

SEQ ID NO: 511980 - DNA, 120 bp, Artificial Sequence
  ENSG00000164440_36 (sequence is synthesized)
ggaattattttaatattcaaagaatgttttattatagtcctttgtgttaaaatttagccttactaattataacaataactcataaagttctaaattcagaaggaatgtctgttctttatc

SEQ ID NO: 511981 - DNA, 120 bp, Artificial Sequence
  ENSG00000164440_37 (sequence is synthesized)
aagtgtatgtaactattttttagaaatgccatctactttctagaaacactaaagttattgttttctaagttaaataactataatttatatatctattaaaaaggtacttctcttcccaaa

SEQ ID NO: 511982 - DNA, 120 bp, Artificial Sequence
  ENSG00000164440_38 (sequence is synthesized)
ccaaaggtgggcagcagaagtcctcctatgtggcaggggatggggggatgggaattggaaatgaagaacaacttcacatttattcatattttcaagtaaaaataaaagcacaatattata

SEQ ID NO: 511983 - DNA, 120 bp, Artificial Sequence
  ENSG00000164442_0 (sequence is synthesized)
acagctcattgttggcagctgccgggcggtcctgccgagctgtgagggcaacggaggggaaataaaagggaacggctccgaatctgccccagcggccgctgcgagacctcggcgccgaca

SEQ ID NO: 511984 - DNA, 120 bp, Artificial Sequence
  ENSG00000164442_1 (sequence is synthesized)
tcgcgacagcgaagcgctttgcacgccaggaaggtcccctctatgtgctgctgagccggtcctggacgcgacgagcccgccctcggtcttcggagcagaaatcgcaaaaacggaaggact

SEQ ID NO: 511985 - DNA, 120 bp, Artificial Sequence
  ENSG00000164442_2 (sequence is synthesized)
ggaaatggcagaccatatgatggccatgaaccacgggcgcttccccgacggcaccaatgggctgcaccatcaccctgcccaccgcatgggcatggggcagttcccgagcccccatcacca

SEQ ID NO: 511986 - DNA, 120 bp, Artificial Sequence
  ENSG00000164442_3 (sequence is synthesized)
ccagcagcagcagccccagcacgccttcaacgccctaatgggcgagcacatacactacggcgcgggcaacatgaatgccacgagcggcatcaggcatgcgatggggccggggactgtgaa

SEQ ID NO: 511987 - DNA, 120 bp, Artificial Sequence
  ENSG00000164442_4 (sequence is synthesized)
cggagggcaccccccgagcgcgctggcccccgcggccaggtttaacaactcccagttcatgggtcccccggtggccagccagggaggctccctgccggccagcatgcagctgcagaagct

SEQ ID NO: 511988 - DNA, 120 bp, Artificial Sequence
  ENSG00000164442_5 (sequence is synthesized)
caacaaccagtatttcaaccatcacccctacccccacaaccactacatgccggatttgcaccctgctgcaggccaccagatgaacgggacaaaccagcacttccgagattgcaaccccaa

SEQ ID NO: 511989 - DNA, 120 bp, Artificial Sequence
  ENSG00000164442_6 (sequence is synthesized)
ttccgagattgcaaccccaagcacagcggcggcagcagcacccccggcggctcgggcggcagcagcacccccggcggctctggcagcagctcgggcggcggcgcgggcagcagcaacagc

SEQ ID NO: 511990 - DNA, 120 bp, Artificial Sequence
  ENSG00000164442_7 (sequence is synthesized)
caacatgcccgcctccgtggcccacgtccccgctgcaatgctgccgcccaatgtcatagacactgatttcatcgacgaggaagttcttatgtccttggtgatagaaatgggtttggaccg

SEQ ID NO: 511991 - DNA, 120 bp, Artificial Sequence
  ENSG00000164442_8 (sequence is synthesized)
catcaaggagctgcccgaactctggctggggcaaaacgagtttgattttatgacggacttcgtgtgcaaacagcagcccagcagagtgagctgttgactcgatcgaaaccccggcgaaag

SEQ ID NO: 511992 - DNA, 120 bp, Artificial Sequence
  ENSG00000164442_9 (sequence is synthesized)
agtaaactataaacttgtacaaattggttttaaaaaaaattgctgccacttttttttcctgtttttgtttcgtttttgtagccttgacattcacccacctcccttatgtagttgaaatat

SEQ ID NO: 511993 - DNA, 120 bp, Artificial Sequence
  ENSG00000164442_10 (sequence is synthesized)
ctagctaacttggtctttttcgttgtttgtttttactcctttccctcactttctccagtgctcaactgttagatattaatcttggcaaactgcttaatcttgtggattttgtagatggtt

SEQ ID NO: 511994 - DNA, 120 bp, Artificial Sequence
  ENSG00000164442_11 (sequence is synthesized)
tcaaatgactgaactgcattcagatttacgagtgaaaggaaaaattgcattagttggttgcatgaacttcgaagggcagatattactgcacaaactgccatctcgcttcatttttttaac

SEQ ID NO: 511995 - DNA, 120 bp, Artificial Sequence
  ENSG00000164442_12 (sequence is synthesized)
tatgcatttgagtacagactaatttttaaaatatgctaaactggaagattaaacagatgtgggccaaactgttctggatcaggaaagtcatactgttcactttcaagttggctgtccccc

SEQ ID NO: 511996 - DNA, 120 bp, Artificial Sequence
  ENSG00000164442_13 (sequence is synthesized)
ccgccgccccccccacccccatatgtacagatgataatagggtgtggaatgtcgtcagtggcaaacatttcacagatttttattttgtttctgtcttcaacatttttgacactgtgctaa

SEQ ID NO: 511997 - DNA, 120 bp, Artificial Sequence
  ENSG00000164442_14 (sequence is synthesized)
tagttatattcagtacatgaaaagatactactgtgttgaaagctttttaggaaattttgacagtatttttgtacaaaacatttttttgaaaaaatacttgttaatttattctattttaat

SEQ ID NO: 511998 - DNA, 120 bp, Artificial Sequence
  ENSG00000164442_15 (sequence is synthesized)
ttgccaatgtcaataaaaagttaagaaataacttgttttctagaagtcatttgggggtggttgttccctttggtggcttttttccccccgtctttgagttgaacactattgatgagagta

SEQ ID NO: 511999 - DNA, 120 bp, Artificial Sequence
  ENSG00000164442_16 (sequence is synthesized)
agcattccaaaggataaattacaggacactaaaacaggtcatgatgagcttaagcggagagcaggatttaacataattggcataatgcttcattgttatcattgtaacatgcctcttggt

SEQ ID NO: 512000 - DNA, 120 bp, Artificial Sequence
  ENSG00000164442_17 (sequence is synthesized)
gtgctttaatcaaaagctgcaaagttgtcactgcttttttttttttcttaattgccatcatatcaagtgtactccagagttagaaaggtttgcaatactcaacattatctttttcaatgg

SEQ ID NO: 512001 - DNA, 120 bp, Artificial Sequence
  ENSG00000164442_18 (sequence is synthesized)
gcaggaggcaaaaaaaatcaagtgtttctgtttatacctgattcaactacttaaatagaggtagattggaataatacactgattgattgatgggtggcattaaatataaatctaccttta

SEQ ID NO: 512002 - DNA, 120 bp, Artificial Sequence
  ENSG00000164451_0 (sequence is synthesized)
gatcagaaagggccacaagctgatttgtgtaacagcttcccaagatgtgcccaactctcaacaatattgtgtcttctctgcagagaaatggaatatttatcaattctttaattgcagcct

SEQ ID NO: 512003 - DNA, 120 bp, Artificial Sequence
  ENSG00000164451_1 (sequence is synthesized)
tgactattggtgggcaacaactcttctcctcttctacattcagctgtccttgtcaggttggaaaaaatttctattatggttctgcttttcttgtcattcctgccttgatccttctcgttg

SEQ ID NO: 512004 - DNA, 120 bp, Artificial Sequence
  ENSG00000164451_2 (sequence is synthesized)
ctggctttgctctgagaagccaaatgtggacaattaccggtgaatactgctgcagctgtgcccctccatacaggagaatcagccccctagagtgcaagctggcttgccttaggttcttca

SEQ ID NO: 512005 - DNA, 120 bp, Artificial Sequence
  ENSG00000164451_3 (sequence is synthesized)
gcatcactgggagggcagttattgctcctttaacttggctggcggtgaccctgctgacaggcacgtattatgaatgtgcagcaagtgaatttgcatctgtggaccattacccaatgtttg

SEQ ID NO: 512006 - DNA, 120 bp, Artificial Sequence
  ENSG00000164451_4 (sequence is synthesized)
ataatgtcagtgccagcaaacgagaagagatcctggctgggtttccatgttgcagatcagctccttctgacgtgatcctagtaagagatgaaatagctcttctgcacagataccagtcac

SEQ ID NO: 512007 - DNA, 120 bp, Artificial Sequence
  ENSG00000164451_5 (sequence is synthesized)
ccattgctgccttagtctcctgctgtgtggcaaagtgctgctctcccctcacctctctgcaacattgctactggaccagccacctccagaatgagagagaactctttgaacaagcagcag

SEQ ID NO: 512008 - DNA, 120 bp, Artificial Sequence
  ENSG00000164451_6 (sequence is synthesized)
agcagcactctcggctcctcatgatgcatcgcataaagaagctatttggcttcattcccgggagtgaagacgtcaaacacatccgcattccttcttgtcaggactggaaagatatttcag

SEQ ID NO: 512009 - DNA, 120 bp, Artificial Sequence
  ENSG00000164451_7 (sequence is synthesized)
tacccactcttttatgcatgggtgatgacttgcaaggtcactatagcttccttggaaatagggtggatgaggataatgaggaagacagatcaagaggtattgaattaaaaccttgattac

SEQ ID NO: 512010 - DNA, 120 bp, Artificial Sequence
  ENSG00000164451_8 (sequence is synthesized)
agcacctttcatgagtcaggttgcttagcagatacttggcttttatggcttttatgatcaggccatttcaatgtaatctcttcatctttttctttctctctgatatttgtttacgtaagt

SEQ ID NO: 512011 - DNA, 120 bp, Artificial Sequence
  ENSG00000164451_9 (sequence is synthesized)
ccatctcaaatattatttctaaaatcaatctattagataattgtgccaatctctcattttgaaattttgccaatggtctggtaatgcctagagtggaatgtgaagtcacatggaaatttg

SEQ ID NO: 512012 - DNA, 120 bp, Artificial Sequence
  ENSG00000164451_10 (sequence is synthesized)
catcttagttctgttacttagtagctgtgtgaaaattaatatttctgagtgccattttgtcatctgcacattgtagctacctcctagagctattatgagaattaaacatgataatacaaa

SEQ ID NO: 512013 - DNA, 120 bp, Artificial Sequence
  ENSG00000164451_11 (sequence is synthesized)
tgttttacccttgggtcctcccctgcctacactgtgctgagaactgctctctctgaccgggtctcctgtttctacctggtttgttgtgaacctgtgttctccacatttgtcctgactctt

SEQ ID NO: 512014 - DNA, 120 bp, Artificial Sequence
  ENSG00000164451_12 (sequence is synthesized)
caggtgaataactgagcctttcacttggctttgctgcaacccttcagctctgtgcgtgttggaagcaagaattggataagacttctcaggcgtctgcacaatccctaatggcccccagat

SEQ ID NO: 512015 - DNA, 120 bp, Artificial Sequence
  ENSG00000164451_13 (sequence is synthesized)
gtgctgagaactgctctctctgaccgggtctcctgtttctacctggtttgttgtgaacctgtgttctccacatttgtcctgactcttcagttggaagcaagaattggataagacttctca

SEQ ID NO: 512016 - DNA, 120 bp, Artificial Sequence
  ENSG00000164451_14 (sequence is synthesized)
ctctttctcttttgcattccatgtcttctattcaccattttccctgcctctattttctggttttatcagtttctacctttatataatgtccagaacttttcacagcctccccctctttct

SEQ ID NO: 512017 - DNA, 120 bp, Artificial Sequence
  ENSG00000164451_15 (sequence is synthesized)
tcagacctaaatatctgaccttttgggaagcaggacagaaacctctttctaatccagtaacatgtgagggagaagcccatgcaggaagctcttgagttactgtactataacctggggaca

SEQ ID NO: 512018 - DNA, 120 bp, Artificial Sequence
  ENSG00000164458_0 (sequence is synthesized)
tttccctctctgcgcgcggaccttccttttccagatggtgagagccgcggggacacccgacgccggggcaggctgatccacgatcctgggtgtgcgtaacgccgcctggggctccgtggg

SEQ ID NO: 512019 - DNA, 120 bp, Artificial Sequence
  ENSG00000164458_1 (sequence is synthesized)
cgagggacgtgtggggacaggtgcaccggaaactgccagactggagagttgaggcatcggaggcgcgagaacagcactactactgcggcgagacgagcgcggcgcatcccaaagcccggc

SEQ ID NO: 512020 - DNA, 120 bp, Artificial Sequence
  ENSG00000164458_2 (sequence is synthesized)
caaatgcgctcgtccctgggaggggagggaggcgcgcctggagcggggacagtcttggtccgcgccctcctcccgggtctgtgccgggacccgggacccgggagccgtcgcaggtctcgg

SEQ ID NO: 512021 - DNA, 120 bp, Artificial Sequence
  ENSG00000164458_3 (sequence is synthesized)
tccaaggggccccttttctcggaagggcggcggccaagagcagggaaggtggatctcaggtagcgagtctgggcttcggggacggcggggaggggagccggacgggaggatgagctcccc

SEQ ID NO: 512022 - DNA, 120 bp, Artificial Sequence
  ENSG00000164458_4 (sequence is synthesized)
tggcaccgagagcgcgggaaagagcctgcagtaccgagtggaccacctgctgagcgccgtggagaatgagctgcaggcgggcagcgagaagggcgaccccacagagcgcgaactgcgcgt

SEQ ID NO: 512023 - DNA, 120 bp, Artificial Sequence
  ENSG00000164458_5 (sequence is synthesized)
gggcctggaggagagcgagctgtggctgcgcttcaaggagctcaccaatgagatgatcgtgaccaagaacggcaggaggatgtttccggtgctgaaggtgaacgtgtctggcctggaccc

SEQ ID NO: 512024 - DNA, 120 bp, Artificial Sequence
  ENSG00000164458_6 (sequence is synthesized)
caacgccatgtactccttcctgctggacttcgtggcggcggacaaccaccgctggaagtacgtgaacggggaatgggtgccggggggcaagccggagccgcaggcgcccagctgcgtcta

SEQ ID NO: 512025 - DNA, 120 bp, Artificial Sequence
  ENSG00000164458_7 (sequence is synthesized)
catccaccccgactcgcccaacttcggggcccactggatgaaggctcccgtctccttcagcaaagtcaagctcaccaacaagctcaacggagggggccagatcatgctgaactccttgca

SEQ ID NO: 512026 - DNA, 120 bp, Artificial Sequence
  ENSG00000164458_8 (sequence is synthesized)
taagtatgagcctcgaatccacatagtgagagttgggggtccacagcgcatgatcaccagccactgcttccctgagacccagttcatagcggtgactgcttatcagaacgaggagatcac

SEQ ID NO: 512027 - DNA, 120 bp, Artificial Sequence
  ENSG00000164458_9 (sequence is synthesized)
agctcttaaaattaagtacaatccatttgcaaaagctttccttgatgcaaaggaaagaagtgatcacaaagagatgatggaggaacccggagacagccagcaacctgggtactcccaatg

SEQ ID NO: 512028 - DNA, 120 bp, Artificial Sequence
  ENSG00000164458_10 (sequence is synthesized)
acctgcaaatcctcatcctcagtttggaggtgccctctccctcccctccacgcacagctgtgacaggtacccaaccctgaggagccaccggtcctcaccctaccccagcccctatgctca

SEQ ID NO: 512029 - DNA, 120 bp, Artificial Sequence
  ENSG00000164458_11 (sequence is synthesized)
tcggaacaattctccaacctattctgacaactcacctgcatgtttatccatgctgcaatcccatgacaattggtccagccttggaatgcctgcccatcccagcatgctccccgtgagcca

SEQ ID NO: 512030 - DNA, 120 bp, Artificial Sequence
  ENSG00000164458_12 (sequence is synthesized)
caatgccagcccacctaccagctccagtcagtaccccagcctgtggtctgtgagcaacggcgccgtcaccccgggctcccaggcagcagccgtgtccaacgggctgggggcccagttctt

SEQ ID NO: 512031 - DNA, 120 bp, Artificial Sequence
  ENSG00000164458_13 (sequence is synthesized)
ccggggctcccccgcgcactacacacccctcacccatccggtctcggcgccctcttcctcgggatccccactgtacgaaggggcggccgcggccacagacatcgtggacagccagtacga

SEQ ID NO: 512032 - DNA, 120 bp, Artificial Sequence
  ENSG00000164458_14 (sequence is synthesized)
cgccgcagcccaaggccgcctcatagcctcatggacacctgtgtcgccaccttccatgtgaagcagcaaggcccaggtcccgaaagatgcagtgactttttgtcgtggcagccagtggtg

SEQ ID NO: 512033 - DNA, 120 bp, Artificial Sequence
  ENSG00000164458_15 (sequence is synthesized)
actggattgacctactaggtacccagtggcagtctcaggttaagaaggaaatgcagcctcagtaacttccttttcaaagcagtggaggagcacacggcacctttccccagagccccagca

SEQ ID NO: 512034 - DNA, 120 bp, Artificial Sequence
  ENSG00000164458_16 (sequence is synthesized)
tcccttgctcacacctgcagtagcggtgctgtcccaggtggcttacagatgaacccaactgtggagatgatgcagttggcccaacctcactgacggtgaaaaaatgtttgccagggtcca

SEQ ID NO: 512035 - DNA, 120 bp, Artificial Sequence
  ENSG00000164458_17 (sequence is synthesized)
gaaactttttttggtttatttctcatacagtgtattggcaactttggcacaccagaatttgtaaactccaccagtcctactttagtgagataaaaagcacactcttaatcttcttccttg

SEQ ID NO: 512036 - DNA, 120 bp, Artificial Sequence
  ENSG00000164458_18 (sequence is synthesized)
ttgctttcaagtagttagagttgagctgttaaggacagaataaaatcatagttgaggacagcaggttttagttgaattgaaaatttgactgctctgccccctagaatgtgtgtattttaa

SEQ ID NO: 512037 - DNA, 120 bp, Artificial Sequence
  ENSG00000164458_19 (sequence is synthesized)
gcatatgtagctaatctcttgtgttgttaaactataactgtttcatatttttcttttgacaaagtagccaaagacaatcagcagaaagcattttctgcaaaataaacgcaatatgcaaaa

SEQ ID NO: 512038 - DNA, 120 bp, Artificial Sequence
  ENSG00000164458_20 (sequence is synthesized)
ggggagggcactgaatttcggtccccagagacctacactagtagagccttggggagttcaagtggaataacttctccccacccctctgcccccgtcccctccccccaagtcttggtccgc

SEQ ID NO: 512039 - DNA, 120 bp, Artificial Sequence
  ENSG00000164463_0 (sequence is synthesized)
gagtcacgcgatttccgggaacccgtcaggaaggacataaacaaaacaaacccgaggcagcatggagaggggccgtggcccctgcagcggaaccggacccagtccctgagccgcccctac

SEQ ID NO: 512040 - DNA, 120 bp, Artificial Sequence
  ENSG00000164463_1 (sequence is synthesized)
acccacagacagcatcgcacagaattattttaaaaaaaagcagtgatccaagcaattgaattggaagcactctggggaaacctgctgtttattgtggaaatcatcttcgatcttggaatt

SEQ ID NO: 512041 - DNA, 120 bp, Artificial Sequence
  ENSG00000164463_2 (sequence is synthesized)
gaaagtaaagctggaaaggaatttacaaacaagaaaaaaaagaagtttggaatcggattcacaggatctgggcttggaaatgcctcagcctagtgtaagcggaatggatccgcctttcgg

SEQ ID NO: 512042 - DNA, 120 bp, Artificial Sequence
  ENSG00000164463_3 (sequence is synthesized)
ggatgcctttcgaagccacaccttttcggaacaaactctgatgagcacagatctcttagcaaacagttcggatccagatttcatgtatgaactggatagagagatgaactaccaacagaa

SEQ ID NO: 512043 - DNA, 120 bp, Artificial Sequence
  ENSG00000164463_4 (sequence is synthesized)
tcctagagacaactttctttctttggaggactgcaaagacattgaaaatctggagtctttcacagatgtcctggataatgagggtgctttaacctcaaactgggaacagtgggatacata

SEQ ID NO: 512044 - DNA, 120 bp, Artificial Sequence
  ENSG00000164463_5 (sequence is synthesized)
ctgtgaagacctaacgaaatataccaaactaaccagctgtgacatctggggaacaaaagaagtggattacttgggtcttgatgacttttctagtccttaccaagatgaagaggttataag

SEQ ID NO: 512045 - DNA, 120 bp, Artificial Sequence
  ENSG00000164463_6 (sequence is synthesized)
taaaactccaactttagctcaacttaatagtgaggactcacagtctgtttctgattccctttattaccccgattcacttttcagtgtcaaacaaaatcccttaccctcttcattccctgg

SEQ ID NO: 512046 - DNA, 120 bp, Artificial Sequence
  ENSG00000164463_7 (sequence is synthesized)
taaaaagatcacaagcagagcagctgctcctgtgtgttcttctaagactctgcaggctgaggtccctttgtcagactgtgtccaaaaagcaagtaaacccacttcaagcacacaaatcat

SEQ ID NO: 512047 - DNA, 120 bp, Artificial Sequence
  ENSG00000164463_8 (sequence is synthesized)
ggtgaagaccaacatgtatcataatgaaaaggtgaactttcatgttgaatgtaaagactatgtaaaaaaggcaaaggtaaagatcaacccagtgcaacagagccggcccttgttgagcca

SEQ ID NO: 512048 - DNA, 120 bp, Artificial Sequence
  ENSG00000164463_9 (sequence is synthesized)
gattcacacagatgcagcaaaggagaacacctgctactgtggtgcagtggcaaagagacaagagaaaaaagggatggagcctcttcaaggtcatgccactcccgctttgccttttaaaga

SEQ ID NO: 512049 - DNA, 120 bp, Artificial Sequence
  ENSG00000164463_10 (sequence is synthesized)
aacccaggaactattactaagtcccctgccccaggaaggtcctgggtcacttgcagcaggagagagcagcagtctttctgccagtacatcagtctcagattcatcccagaaaaaagaaga

SEQ ID NO: 512050 - DNA, 120 bp, Artificial Sequence
  ENSG00000164463_11 (sequence is synthesized)
gcacaattattctctttttgtctccgacaacttgggtgaacagccaactaaatgcagtcctgaagaagatgaggaggacgaggaggatgttgatgatgaggaccatgatgaaggattcgg

SEQ ID NO: 512051 - DNA, 120 bp, Artificial Sequence
  ENSG00000164463_12 (sequence is synthesized)
cagtgagcatgaactgtctgaaaatgaggaggaggaagaagaggaagaggattatgaagatgacaaggatgatgatattagtgatactttctctgaaccaggctatgaaaatgattctgt

SEQ ID NO: 512052 - DNA, 120 bp, Artificial Sequence
  ENSG00000164463_13 (sequence is synthesized)
agaagacctgaaggaggtgacttcaatatcttcacggaagagaggtaaaagaagatacttctgggagtatagtgaacaacttacaccatcacagcaagagaggatgctgagaccatctga

SEQ ID NO: 512053 - DNA, 120 bp, Artificial Sequence
  ENSG00000164463_14 (sequence is synthesized)
gtggaaccgagatactttgccaagtaatatgtatcagaaaaatggcttacatcatggaaaatatgcagtaaagaagtcacggagaactgatgtagaagacctgactccaaatcctaaaaa

SEQ ID NO: 512054 - DNA, 120 bp, Artificial Sequence
  ENSG00000164463_15 (sequence is synthesized)
actcctccagataggcaatgaacttcggaaactgaataaggtgattagtgacctgactccagtcagtgagcttcccttaacagcccgaccaaggtcaaggaaggaaaaaaataagctggc

SEQ ID NO: 512055 - DNA, 120 bp, Artificial Sequence
  ENSG00000164463_16 (sequence is synthesized)
ttccagagcttgtcggttaaagaagaaagcccagtatgaagctaataaagtgaaattatggggcctcaacacagaatatgataatttattgtttgtaatcaactccatcaagcaagagat

SEQ ID NO: 512056 - DNA, 120 bp, Artificial Sequence
  ENSG00000164463_17 (sequence is synthesized)
tgtaaaccgggtacagaatccaagagatgagagaggacccaacatggggcagaagcttgaaatcctcattaaagatactctcggtctaccagttgctgggcaaacctcagaatttgttaa

SEQ ID NO: 512057 - DNA, 120 bp, Artificial Sequence
  ENSG00000164463_18 (sequence is synthesized)
ccaagtgttagagaagactgcagaagggaatcccactggaggccttgtaggattaaggataccaacatcaaaggtgtaatcagcctcattggaccactggtcagaaatgtctgcgttttg

SEQ ID NO: 512058 - DNA, 120 bp, Artificial Sequence
  ENSG00000164463_19 (sequence is synthesized)
tcacgttatccattgtaaattttcattctgttttgcatgtcagttagcattatgtaaacatttacaattaggttacattgttttaagaactaagtagcataagtgaagcatgatccaaaa

SEQ ID NO: 512059 - DNA, 120 bp, Artificial Sequence
  ENSG00000164463_20 (sequence is synthesized)
tacttgattattgcattttcagagcataaaccatgattaaaactgctactggcatcagaattgaaaatcatatgtttaagtaaatgttaggtacagattacaaaaatctgttaaagcaaa

SEQ ID NO: 512060 - DNA, 120 bp, Artificial Sequence
  ENSG00000164463_21 (sequence is synthesized)
acattttggaggagtgaaatagtaaaatgccaagtattgtggcagatttatgctctgaaccacacaaaaaaattgaggaagcatttttttaaacagtcggtttaaattgtttttagaatt

SEQ ID NO: 512061 - DNA, 120 bp, Artificial Sequence
  ENSG00000164463_22 (sequence is synthesized)
attgctttttgttctaattttccacaaccattaatctcacttgtatatggcacacccagcacttgtgcctgtgggccatattagatgttcattgtcagagctcaagatgatatatataaa

SEQ ID NO: 512062 - DNA, 120 bp, Artificial Sequence
  ENSG00000164463_23 (sequence is synthesized)
tatatatatatacacacacacacacaaatgtctgtgcaagtaagaaaaaaaaagcatattctttgtgccttgtattttggggaaactctaaaactggtaatattttgtatgatgaaaacc

SEQ ID NO: 512063 - DNA, 120 bp, Artificial Sequence
  ENSG00000164463_24 (sequence is synthesized)
atgatgaaaaccctaatgagaaaaaacaagatatatagatggaaaaattatggggtttaaatgtttttttgttccaactctttttcagattttttgaatgtatataggactatgttgaaa

SEQ ID NO: 512064 - DNA, 120 bp, Artificial Sequence
  ENSG00000164463_25 (sequence is synthesized)
caaaacaaaaaacaacaaaaaaaagatggctctagaaaactcatatttcggtacttgaccggaagaagacaaatacttgcacattattgcgattgttttattttttgtaccaaagacaaa

SEQ ID NO: 512065 - DNA, 120 bp, Artificial Sequence
  ENSG00000164463_26 (sequence is synthesized)
acattattgcgattgttttattttttgtaccaaagacaaatgcaactgatatggcaaactgccagtctaagtaaagttttgcacagcttacatgatactgtatgaatgtatgaaaaaaaa

SEQ ID NO: 512066 - DNA, 120 bp, Artificial Sequence
  ENSG00000164463_27 (sequence is synthesized)
ggagaaaaaaaagaaaaaaaaaggtcagggttagggatcttactgaactgtgaattttatttctgtttgggtccaattatctacagaaggagcatccatacatacaaatattattttgct

SEQ ID NO: 512067 - DNA, 120 bp, Artificial Sequence
  ENSG00000164463_28 (sequence is synthesized)
gttcctctagttcgcttccatagtagataagttggtggccatttagatgtcttttatttctgcacttattgtaggaaattttaatatatttcattttagtaagctattgataaaatagtt

SEQ ID NO: 512068 - DNA, 120 bp, Artificial Sequence
  ENSG00000164463_29 (sequence is synthesized)
tgtagtatacttccaccagacaacaaaatagattatttttattgtattatgtatatatatatatgtaaagaaagaaaaaagctaaaaatatctaattctttagttgccacttttccgatt

SEQ ID NO: 512069 - DNA, 120 bp, Artificial Sequence
  ENSG00000164463_30 (sequence is synthesized)
aaaatatctaattctttagttgccacttttccgattgatgtattattgtgcatgtaatattttcaaagatcaacacaggctaaaacaaaaacaatttatagatttttatatttttgtaca

SEQ ID NO: 512070 - DNA, 120 bp, Artificial Sequence
  ENSG00000164463_31 (sequence is synthesized)
ggtattttcaaactagcttcttcaaacttaacatgtgacttattcttctatagtttctagaattgagaaacattaacacatttagtttttaggtgctcttttttgctcatataaaacagc

SEQ ID NO: 512071 - DNA, 120 bp, Artificial Sequence
  ENSG00000164463_32 (sequence is synthesized)
catcctgtctctcttactgttttattctcaaatcttgtgctttgaactctgaaaactggtggcttaaaaactaaaaaaagaaaaaaagcatatttagcaaggaaaaaaataccaaaaatt

SEQ ID NO: 512072 - DNA, 120 bp, Artificial Sequence
  ENSG00000164463_33 (sequence is synthesized)
tcaggcatagctgctggaaaaattatctatttctccattacccactgtaggatttcttttttaattatactttgactataaagtgtcaaagtataatttgttcttttcttttactttgtt

SEQ ID NO: 512073 - DNA, 120 bp, Artificial Sequence
  ENSG00000164463_34 (sequence is synthesized)
accccatttgtaagctatagcatatgaagctatatatatagcttgtgaaggtttgatctagaacacccagtaacaaatgaacaatgttgcttacctgcttctttgacatcttaaaaaaga

SEQ ID NO: 512074 - DNA, 120 bp, Artificial Sequence
  ENSG00000164463_35 (sequence is synthesized)
aatccaaggaggattgtaaggattgtcttaccaccttagctgaactgtgatgcacaagatttttctatgtgtttggtggaaatgtacctggtttgtacattcacgctaaacagatgataa

SEQ ID NO: 512075 - DNA, 120 bp, Artificial Sequence
  ENSG00000164463_36 (sequence is synthesized)
gctcaagtctgatggtttaatagaatgtaagttcatcgtttaaagcttttcctttttaggttggagaaggcaaaacacaggcttgcaagttggaagtatatgaagtcttgacagagtgtg

SEQ ID NO: 512076 - DNA, 120 bp, Artificial Sequence
  ENSG00000164463_37 (sequence is synthesized)
tctggtaaattgaaaagtgtttcaaactatggcagttttgcaatcaggtgaaaatcacctcatgatattcagctgataaggtttataaaattgcccctttctagctgctctgttaggaat

SEQ ID NO: 512077 - DNA, 120 bp, Artificial Sequence
  ENSG00000164463_38 (sequence is synthesized)
tctggtttttgatacttttttcctgtctgcaaaccagaatttgattttttggtcttgcatttcaaaaaaaaaaagactttgaatctgtttagtagattccatatctttgagtttcagtgt

SEQ ID NO: 512078 - DNA, 120 bp, Artificial Sequence
  ENSG00000164463_39 (sequence is synthesized)
aagttaaatagttaaaagcttttaaatagttgagctttttaatgttgacactttattttgtacctatttatatatgtatgtatatcttagaaaagcactttgttaaaaaaaaattgcatt

SEQ ID NO: 512079 - DNA, 120 bp, Artificial Sequence
  ENSG00000164463_40 (sequence is synthesized)
aaaaaaaaattgcattttatatgattcctgccatttgctgctaaatctgggctggtcagaatgctgcagcgatacttgatctatataaaaacctggcagtaaaatgtagagtgaaagtta

SEQ ID NO: 512080 - DNA, 120 bp, Artificial Sequence
  ENSG00000164463_41 (sequence is synthesized)
aatcctcttgctgttttaactttatcataaagatgacataggcaagctgtgcagctttacattttaaccaggggactctgtggcatttaaaaccgtctagaaatggttgtactttaatgc

SEQ ID NO: 512081 - DNA, 120 bp, Artificial Sequence
  ENSG00000164463_42 (sequence is synthesized)
cagtaataatctgcttcctctattgtcattaaaatatatacgtttagtgtatcacacaaaccaatcttataagggtaatgtaaaaaccccaacaattgtacatgttctgtttttgaaaat

SEQ ID NO: 512082 - DNA, 120 bp, Artificial Sequence
  ENSG00000164463_43 (sequence is synthesized)
tgtggcatgtatttttgggtgaagatcattagagaagagttctctaaaggttttctgtgttcatacatggtatacagatagctcataatgaagtccagaatcttacttttaagtgaaggc

SEQ ID NO: 512083 - DNA, 120 bp, Artificial Sequence
  ENSG00000164463_44 (sequence is synthesized)
attgtgaattcacctcaagtaaacccattgttccaaagcaattataaactttgactctagtactactatgatttaaaaaaaaaaaaaaccaacaaaaaccttttttcctagtttcagata

SEQ ID NO: 512084 - DNA, 120 bp, Artificial Sequence
  ENSG00000164463_45 (sequence is synthesized)
cactggattctttatagagtttgtctccatatgaaagcatgctgtccagtcgctcttgttaagatcttgtctgagttttgaattgggtgccacacttttccagtcaatataattgcttgt

SEQ ID NO: 512085 - DNA, 120 bp, Artificial Sequence
  ENSG00000164463_46 (sequence is synthesized)
tctactgtaccatgtatgattcttgtcctttcctatatccttcatgacagattatgatgtggctttatattgtgccttacttgtacatttaaaactaaacgtcttcattcccttccactt

SEQ ID NO: 512086 - DNA, 120 bp, Artificial Sequence
  ENSG00000164463_47 (sequence is synthesized)
cctacatctttaactttgacctttttggtaagagaatcagaactattacaaaagcatcatgaaggatttcagatgggtatggtttcaaattccctctctttatagttattttatatttgt

SEQ ID NO: 512087 - DNA, 120 bp, Artificial Sequence
  ENSG00000164463_48 (sequence is synthesized)
atgaaagaccagttttggatggtctttgaatataggggggaaagattagcagtaatttcactacatcccttttctctgactttcatgcatttctcatacatcttctttctgatgcttgac

SEQ ID NO: 512088 - DNA, 120 bp, Artificial Sequence
  ENSG00000164463_49 (sequence is synthesized)
tttatttgcttcctagcaatagtctgcatttaaagaaaggtgtgttcaattcatcagcttgaaattgactatttcatttttccaggattttttaggagaagagtacccattttgttttat

SEQ ID NO: 512089 - DNA, 120 bp, Artificial Sequence
  ENSG00000164463_50 (sequence is synthesized)
aaaaacagatgacaagtctctttaaaagaaacagaagtacagtacttttgaaatacaatgctgttagtttggatttctttttatatatatatataatattcatacaatgatctgatgttt

SEQ ID NO: 512090 - DNA, 120 bp, Artificial Sequence
  ENSG00000164463_51 (sequence is synthesized)
gccttcattaataaagctgttagtttattcaccaaaatgtcaagaatggatgtgcttttctttattccacacatttaaaaaaatttagctgctaagatttaatgttataagaaatgaatt

SEQ ID NO: 512091 - DNA, 120 bp, Artificial Sequence
  ENSG00000164463_52 (sequence is synthesized)
caagttgccttcagcaagaattaacaaaaacttatgttccctttctttatatagtttcctaaaattctgttcaagtattttctagttaattatgtaacagaatgttagcatctctccata

SEQ ID NO: 512092 - DNA, 120 bp, Artificial Sequence
  ENSG00000164463_53 (sequence is synthesized)
tcttgaaacttgaattttgagaatgcattgaattatgctttcagtgttaaagtaaaaggtttcaattatccttctagtgaagtctgttgtggaataccatttcccatggaactgaggcca

SEQ ID NO: 512093 - DNA, 120 bp, Artificial Sequence
  ENSG00000164463_54 (sequence is synthesized)
tttccacaactttgcacagaactgcagtcttgttcttcccttggatcatgacaaataagtctcacacagtgccgtaatacttgtggattcttttgtaatctttgtaatcttaataagggc

SEQ ID NO: 512094 - DNA, 120 bp, Artificial Sequence
  ENSG00000164463_55 (sequence is synthesized)
attatgagaagacgactccatgtttttttaatacttcaaacacattgggatgtaacaatgaatgtcaactgtaggaatggtggtttcgttttaaggaataagcatgttggggaaagatga

SEQ ID NO: 512095 - DNA, 120 bp, Artificial Sequence
  ENSG00000164463_56 (sequence is synthesized)
tgaaaatgtactactgaaagttatacacttccataggcaaatgggattatgtgttgaagcatagtcctcatgcttaataaactgactgaaatcgtagaaattacacctaggaactgagct

SEQ ID NO: 512096 - DNA, 120 bp, Artificial Sequence
  ENSG00000164463_57 (sequence is synthesized)
aggccaaattgccatttttgtttagagagttttggaggtagtagtgaggggacagagccttaaaactacttccaaacagtattttggaattgaagacttggtaactagtgaagaacatca

SEQ ID NO: 512097 - DNA, 120 bp, Artificial Sequence
  ENSG00000164463_58 (sequence is synthesized)
aagttgggtatttcaatgtgccaagtttgggtgaactaggttcggtttgcctctttcataacaatgtaaacacaatggtgtagttaattaaattctgggtggataggagcaggactgatt

SEQ ID NO: 512098 - DNA, 120 bp, Artificial Sequence
  ENSG00000164463_59 (sequence is synthesized)
actatgtcttgcccttcgccctttgtttttttcagaaccaaataacagaaatgtgtatgtgtgtactgtatctgcctttccaccacatttttatgacactgtattccactgcctgctttt

SEQ ID NO: 512099 - DNA, 120 bp, Artificial Sequence
  ENSG00000164463_60 (sequence is synthesized)
ttaccttctttccctaggatttgtcctacagcttagtattgtggttgacagcgatactagggctgacagcacagaagtcacaagagaagagtggaagggcaagaattcaaagcatttgtt

SEQ ID NO: 512100 - DNA, 120 bp, Artificial Sequence
  ENSG00000164463_61 (sequence is synthesized)
catacaatgtggcaacctcttttgcatagttgcgtaggatcctgtttgtaatgctatcataaatattctgtagttttttttttttctctcccaactggagctatgacactttttattgga

SEQ ID NO: 512101 - DNA, 120 bp, Artificial Sequence
  ENSG00000164463_62 (sequence is synthesized)
ttcagtcttgtctcttgtctagaaagaactttatcttgttgacgcatgagctgtttaaaaattatcctattaaatgttggttaatagttgtgcagtttttcatttcagatggaaaggcaa

SEQ ID NO: 512102 - DNA, 120 bp, Artificial Sequence
  ENSG00000164463_63 (sequence is synthesized)
tgcaaattttgcctttgttttctgtcaccttccaacccctgagcacttctagtcagatacagattcatcagtgtatgcaacatcctttgtaatttaaaataaaaaaagatgaaaagaaaa

SEQ ID NO: 512103 - DNA, 120 bp, Artificial Sequence
  ENSG00000164463_64 (sequence is synthesized)
gagacagggcaaagggcgagggagccgggccgggggtgtttcgggtgtccgaaggcgagtccgatcggaccaggaagtagctcaggggagcctgacctcgacccgcctttctcctcacac

SEQ ID NO: 512104 - DNA, 120 bp, Artificial Sequence
  ENSG00000164463_65 (sequence is synthesized)
gagctgaggaggcagggaagtaccgagggcagtcaagcctcccctgggggtggttcctgggactagatggagctcagtctctggattctccctctttctcggccctatgcttcctgacag

SEQ ID NO: 512105 - DNA, 120 bp, Artificial Sequence
  ENSG00000164463_66 (sequence is synthesized)
ctgagctggcttgagccttaagactaccttaaggagacggagtctaactgcgttgcccaggttggagtccggtggcgtgatcctggcgcactgcaacctccgtttcctgggttcaagcga

SEQ ID NO: 512106 - DNA, 84 bp, Artificial Sequence
  ENSG00000164463_67 (sequence is synthesized)
tcctggcgcactgcaacctccgtttcctgggttcaagcgattatcctgcccgctatgctcagctaatttttgtattttcagtag

SEQ ID NO: 512107 - DNA, 120 bp, Artificial Sequence
  ENSG00000164463_68 (sequence is synthesized)
ttctttattttagtttgggaattaaatgacttaaaccttggattggatatgtaattggtttttctattcaaatagctctaaaatgatcacttttgctcacatagggattcataagctgat

SEQ ID NO: 512108 - DNA, 120 bp, Artificial Sequence
  ENSG00000164463_69 (sequence is synthesized)
tccttgagggcttattttttattattttatttcttatttttaaaattaaaatagagatgagagcttgccactgtgcccagctgaggacttattcttaatgtatcttatgttaagtgacct

SEQ ID NO: 512109 - DNA, 120 bp, Artificial Sequence
  ENSG00000164463_70 (sequence is synthesized)
gttttgtcactctcttgagcatttatgcaaagacaccaataatttattggtttaaaaaatattcctgtttagggccaggcgcagtggctcacgttagtaatcccagcactttgggaggcc

SEQ ID NO: 512110 - DNA, 80 bp, Artificial Sequence
  ENSG00000164463_71 (sequence is synthesized)
gctgaggttgcggttagctgacgtctgtctcaataacaacaaaaaataataaataaaaatattactgtttatgcatgtgt

SEQ ID NO: 512111 - DNA, 120 bp, Artificial Sequence
  ENSG00000164463_72 (sequence is synthesized)
aaaaaataataaataaaaatattactgtttatgcatgtgtctctctattatagttgagataagttaggagtatatagaatgttgaaccaagtgatgatggtttatattactcattccaat

SEQ ID NO: 512112 - DNA, 120 bp, Artificial Sequence
  ENSG00000164463_73 (sequence is synthesized)
acccaacaaagtctatttatgaataatgtaaaagcattttctttgtgtctgctaacattttaatttacatcgtattttcctatttaagaaaaatacatgctgtaatttggtgagcatgaa

SEQ ID NO: 512113 - DNA, 120 bp, Artificial Sequence
  ENSG00000164463_74 (sequence is synthesized)
tggcttacatcatggtaagaggggattgcagtcagatatttagtgtcactttaatcaagttgagctactaatccataatgtttactccgtgtacctaggcattcagcccttcctagcaaa

SEQ ID NO: 512114 - DNA, 120 bp, Artificial Sequence
  ENSG00000164463_75 (sequence is synthesized)
ctggagatggggactgtagagctgctacatttgtgtgactactcttcgtcactcacaaatagcttttaccagtgttaagagtcctcacctaagtggagaggaaggactgtgtaaacatta

SEQ ID NO: 512115 - DNA, 120 bp, Artificial Sequence
  ENSG00000164463_76 (sequence is synthesized)
tttcatttctagtcccttcttaatctacctaccccattcaggaaatgactaggaggctgctggtttctgacctgtcacagttggtataaccagaagggttgaggagaaagtgaacgggct

SEQ ID NO: 512116 - DNA, 120 bp, Artificial Sequence
  ENSG00000164463_77 (sequence is synthesized)
ctcttgcattcttgtgtaatccccagatgtaaatggggggactggaattcaaacggtaatggggataaaagggcaaggaaagaaaagaaagggaggatggttatggagaaaaggagttgt

SEQ ID NO: 512117 - DNA, 120 bp, Artificial Sequence
  ENSG00000164463_78 (sequence is synthesized)
agagaagagttgaatacctgtagcaggaatcagaagtttataatcttaggtaggtcaggccgtgtgctgcagctcatggttgtaatcctagcactttgggaggatcacttgagtccagga

SEQ ID NO: 512118 - DNA, 120 bp, Artificial Sequence
  ENSG00000164463_79 (sequence is synthesized)
gttagagtctgcagtgaattgtgattatgctactgcactccatcctgggcgatagagtgagatcctgtctctaaaaaaattttaaaaatgacagtcttaggtaggtcaaattttttattg

SEQ ID NO: 512119 - DNA, 120 bp, Artificial Sequence
  ENSG00000164463_80 (sequence is synthesized)
tgaactcaggaagctgtgattaagtagaatttattctgcacaaatgttatttttaaattaatccatagtttctagttcttctgctctgaataaaaaaaattaatacaaagtctttactga

SEQ ID NO: 512120 - DNA, 120 bp, Artificial Sequence
  ENSG00000164463_81 (sequence is synthesized)
aagtggggaggggaactactagtaagtgtgatggtcagtaaacaggttattcactcatcgtacgaatgtgagttgcaaaggatttttgaggacaagaattccatctgatgtatgtttgtg

SEQ ID NO: 512121 - DNA, 120 bp, Artificial Sequence
  ENSG00000164463_82 (sequence is synthesized)
tctcattttccttttccactagcaaccaggtgtactatattgtctctcagtaaataattaccaagcttttgccttcagataagttttctactagaaatgaaacattaagtccagtcaata

SEQ ID NO: 512122 - DNA, 120 bp, Artificial Sequence
  ENSG00000164463_83 (sequence is synthesized)
atcccaagtagcatatgaatactaggaaagttgtaggagttcagaggacagagccatcccttttgcctggagtgatagaccaagaccccttgagtcttctataatgttatttatcaaagc

SEQ ID NO: 512123 - DNA, 120 bp, Artificial Sequence
  ENSG00000164463_84 (sequence is synthesized)
aacaaaagaagagcttttaaacaaggttatgcttacttgttggattttcaagttcaatacaaaaatgtgtatgtctgacagttttcagacgtagcatcagaaacatcttggtttgtgtaa

SEQ ID NO: 512124 - DNA, 120 bp, Artificial Sequence
  ENSG00000164463_85 (sequence is synthesized)
aatctccaagctctcttccgactatgtattataccctagtcctgattttggtgtttagttgaactcatactcatcctgagatttgagatgcttagtatgccatgcaaataatgaagaatc

SEQ ID NO: 512125 - DNA, 120 bp, Artificial Sequence
  ENSG00000164463_86 (sequence is synthesized)
tgtcatgctggaactagaagcctagggtagggaagaacttggaaaaagttagaactctgccatatcacccccatttcctgcagccacaagatgggaaggagaggaggccagcccttctag

SEQ ID NO: 512126 - DNA, 120 bp, Artificial Sequence
  ENSG00000164463_87 (sequence is synthesized)
gatagattgttaaacatgctaagacttctgaaacatgccaagacttctgaaaagaaaaggtagtggtgggaagtggttaaaaatgtggccgtgaaaaacgtgtctcttgttaattaaagt

SEQ ID NO: 512127 - DNA, 120 bp, Artificial Sequence
  ENSG00000164463_88 (sequence is synthesized)
aaggggatattaaaagttcttttagtttaaggaaaaactcaagtgctctcattgtaattactctcctttatgagtagttttatcttttgagatttagtgttcataaacatgtgttgcagg

SEQ ID NO: 512128 - DNA, 120 bp, Artificial Sequence
  ENSG00000164463_89 (sequence is synthesized)
tgaccacaacttgtaatttagacttaatcatgaaactattttaacatttaagaaaaacaaacttctagcaactttaacctttcatggaggacaaaaggtcccagagctgtcaagcctgca

SEQ ID NO: 512129 - DNA, 120 bp, Artificial Sequence
  ENSG00000164463_90 (sequence is synthesized)
gtttgcactttagtgtagagattcttacttgttttactcagtaatgcatttcacaggattcccacaaacttggctctctggtttcccatccctgaacagattgcacaatgtggggaggat

SEQ ID NO: 512130 - DNA, 120 bp, Artificial Sequence
  ENSG00000164463_91 (sequence is synthesized)
cagagggcagggatctagacgtcaggccaactgagagctgacagggaagagagagctagctagtatagacatagacatgagaatcagctcagctgctgtaggagaaagtcactgacagac

SEQ ID NO: 512131 - DNA, 120 bp, Artificial Sequence
  ENSG00000164463_92 (sequence is synthesized)
agtagcatccaaggcatccagcgttatatgacccacgaaaacccccaaaattaaatatacacaataaaaggtcaaatgtttttcttgaacaaaagtatatttatattgaaaacaatcagg

SEQ ID NO: 512132 - DNA, 120 bp, Artificial Sequence
  ENSG00000164463_93 (sequence is synthesized)
tgaagagtagaccctaatcgccagtattttcctcagcaatcacttacctcctgcttccatatggattaattctgtgcttgactttttcttcaaatgggttgatgctattttaatttttta

SEQ ID NO: 512133 - DNA, 120 bp, Artificial Sequence
  ENSG00000164463_94 (sequence is synthesized)
tgtattctttcatagcatttctttcttttctttccttttatttttaaaagcatttttattcttcctttattagctacagggggaaatttaacattacaagaaaaagttatttttaccttt

SEQ ID NO: 512134 - DNA, 120 bp, Artificial Sequence
  ENSG00000164463_95 (sequence is synthesized)
ttattttttaatataaacatctatatgtttggtaagcttatgtactcctttacacttgaaagtcagttttaccaggtataaaatcctcaactcgtattttctttccttgagtatcttgaa

SEQ ID NO: 512135 - DNA, 120 bp, Artificial Sequence
  ENSG00000164463_96 (sequence is synthesized)
aaatcctcaactcgtattttctttccttgagtatcttgaatatgagtctccattttcttttggcataaagtgttgctatagaaaagctaatactggctgggcttggtggctcatgcctgt

SEQ ID NO: 512136 - DNA, 62 bp, Artificial Sequence
  ENSG00000164463_97 (sequence is synthesized)
ggaggggtggaggttacagtgagccaagattagaccactgcactctagcctgggtgacagag

SEQ ID NO: 512137 - DNA, 80 bp, Artificial Sequence
  ENSG00000164465_0 (sequence is synthesized)
agaggaggcggcccggcccgggcagctgcggctcgggatccgtcgaggggaggccgagcttgccaagctggcgcccagcg

SEQ ID NO: 512138 - DNA, 120 bp, Artificial Sequence
  ENSG00000164465_1 (sequence is synthesized)
cgcggcggcggcgcactggcgcgggctgccgggcggggcctcctggctttgctgctcgcggtctccgccccgctccggctgcaggcggaggagctgggtgatggctgtggacacctagtg

SEQ ID NO: 512139 - DNA, 120 bp, Artificial Sequence
  ENSG00000164465_2 (sequence is synthesized)
atggctgtggacacctagtgacttatcaggatagtggcacaatgacatctaagaattatcccgggacctaccccaatcacactgtttgcgaaaagacaattacagtaccaaaggggaaaa

SEQ ID NO: 512140 - DNA, 120 bp, Artificial Sequence
  ENSG00000164465_3 (sequence is synthesized)
gactgattctgaggttgggagatttggatatcgaatcccagacctgtgcttctgactatcttctcttcaccagctcttcagatcaatatggtccatactgtggaagtatgactgttccca

SEQ ID NO: 512141 - DNA, 120 bp, Artificial Sequence
  ENSG00000164465_4 (sequence is synthesized)
aagaactcttgttgaacacaagtgaagtaaccgtccgctttgagagtggatcccacatttctggccggggttttttgctgacctatgcgagcagcgaccatccagatttaataacatgtt

SEQ ID NO: 512142 - DNA, 120 bp, Artificial Sequence
  ENSG00000164465_5 (sequence is synthesized)
tggaacgagctagccattatttgaagacagaatacagcaaattctgcccagctggttgtagagacgtagcaggagacatttctgggaatatggtagatggatatagagatacctctttat

SEQ ID NO: 512143 - DNA, 120 bp, Artificial Sequence
  ENSG00000164465_6 (sequence is synthesized)
tgtgcaaagctgccatccatgcaggaataattgctgatgaactaggtggccagatcagtgtgcttcagcgcaaagggatcagtcgatatgaagggattctggccaatggtgttctttcga

SEQ ID NO: 512144 - DNA, 120 bp, Artificial Sequence
  ENSG00000164465_7 (sequence is synthesized)
gggatggttccctgtcagacaagcgatttctgtttacctccaatggttgcagcagatccttgagttttgaacctgacgggcaaatcagagcttcttcctcatggcagtcggtcaatgaga

SEQ ID NO: 512145 - DNA, 120 bp, Artificial Sequence
  ENSG00000164465_8 (sequence is synthesized)
tgggcttcgggcgacagtagcaacaaccacaaaccacgagagtggctggagatcgatttgggggagaaaaagaaaataacaggaattaggaccacaggatctacacagtcgaacttcaac

SEQ ID NO: 512146 - DNA, 120 bp, Artificial Sequence
  ENSG00000164465_9 (sequence is synthesized)
ttttatgttaagagttttgtgatgaacttcaaaaacaataattctaagtggaagacctataaaggaattgtgaataatgaagaaaaggtgtttcagggtaactctaactttcgggaccca

SEQ ID NO: 512147 - DNA, 120 bp, Artificial Sequence
  ENSG00000164465_10 (sequence is synthesized)
gtgcaaaacaatttcatccctcccatcgtggccagatatgtgcgggttgtcccccagacatggcaccagaggatagccttgaaggtggagctcattggttgccagattacacaaggtaat

SEQ ID NO: 512148 - DNA, 120 bp, Artificial Sequence
  ENSG00000164465_11 (sequence is synthesized)
gattcattggtgtggcgcaagacaagtcaaagcaccagtgtttcaactaagaaagaagatgagacaatcacaaggcccatcccctcggaagaaacatccacaggaataaacattacaacg

SEQ ID NO: 512149 - DNA, 120 bp, Artificial Sequence
  ENSG00000164465_12 (sequence is synthesized)
gtggctattccattggtgctccttgttgtcctggtgtttgctggaatggggatctttgcagcctttagaaagaagaagaagaaaggaagtccgtatggatcagcagaggctcagaaaaca

SEQ ID NO: 512150 - DNA, 120 bp, Artificial Sequence
  ENSG00000164465_13 (sequence is synthesized)
gactgttggaagcagattaaatatccctttgccagacatcagtcagctgagtttaccatcagctatgataatgagaaggagatgacacaaaagttagatctcatcacaagtgatatggca

SEQ ID NO: 512151 - DNA, 120 bp, Artificial Sequence
  ENSG00000164465_14 (sequence is synthesized)
ggttaactccgttgactgccaaaatagcatccccaacgtgcagccctccgcatctatcagcaggttgccccggatggatctcagagatgaggattggaacaccatgttctttcccaccct

SEQ ID NO: 512152 - DNA, 120 bp, Artificial Sequence
  ENSG00000164465_15 (sequence is synthesized)
aacaacaacaaagggcagtaaattaaagtactctttgtaaggtacagttaccgattaatctagagataaaatattttcttaaaaatatatttcattaaacacctatgctgtctctataaa

SEQ ID NO: 512153 - DNA, 120 bp, Artificial Sequence
  ENSG00000164465_16 (sequence is synthesized)
ggtgagcaccgatgccggcggccactatgactgcccgcagcgggccggccgccacgagtacgcgctgcccctggcgcccccggagcccgagtacgccacgcccatcgtggagcggcacgt

SEQ ID NO: 512154 - DNA, 120 bp, Artificial Sequence
  ENSG00000164465_17 (sequence is synthesized)
gctgcgcgcccacacgttctctgcgcagagcggctaccgcgtcccagggccccagcccggccacaaacactccctctcctcgggcggcttctcccccgtagcgggtgtgggcgcccagga

SEQ ID NO: 512155 - DNA, 120 bp, Artificial Sequence
  ENSG00000164465_18 (sequence is synthesized)
cggagactatcaaaggccacacagcgcacagcctgcggacaggggctacgaccggcccaaagctgtcagcgccctcgccaccgaaagcgggcaccctgactctcagaagcccccaacgca

SEQ ID NO: 512156 - DNA, 120 bp, Artificial Sequence
  ENSG00000164465_19 (sequence is synthesized)
tcccgggacgagtgacagctattctgcccccagagactgcctcacacccctcaaccagacggccatgactgcccttttgtgaacacaatgtgaaagaagcctgctgtggtactgagcgtc

SEQ ID NO: 512157 - DNA, 120 bp, Artificial Sequence
  ENSG00000164465_20 (sequence is synthesized)
gggctgtcacaaggcactggaagaagggagcctgctggtccagagtgtgcgtgtgtatcggtgtgtgtgtacacttgcatgtgtgtgtgtgatccagtaggatcctagagacaacctgtc

SEQ ID NO: 512158 - DNA, 120 bp, Artificial Sequence
  ENSG00000164465_21 (sequence is synthesized)
atactgtttacaaaattgtgcagctggtttcgtgctgacccttagggtgcgtctgttgggttttgttgggctagaaaaatgaaaattttcagatggcgttttcattcctctgactgatat

SEQ ID NO: 512159 - DNA, 120 bp, Artificial Sequence
  ENSG00000164465_22 (sequence is synthesized)
tgagctgctttggtgttaaaggtgtaatgtgtacagagttgtatttaacaataataaaagtaacttaagtttgctctatcagattttagttctgcacagaggttaagtgggaaaatgcag

SEQ ID NO: 512160 - DNA, 120 bp, Artificial Sequence
  ENSG00000164465_23 (sequence is synthesized)
ctgttgcaaaatgtatataaatagtatgttcatttttttcagtatattatctgatactgtgttagcagcaggtctgcttaaacctagtcttgttgttattgagtcatttcctctcctttg

SEQ ID NO: 512161 - DNA, 120 bp, Artificial Sequence
  ENSG00000164465_24 (sequence is synthesized)
ataactagaactgaaagcatttttaacattcttctcctggaagaaatgaattacttgaagcatgaaaagcacaccagggtggttgtttatttagcaattatgactgtagatttaaaaaca

SEQ ID NO: 512162 - DNA, 120 bp, Artificial Sequence
  ENSG00000164465_25 (sequence is synthesized)
agcaaagaaacaacacctcagcagctgcccgtttccttagtctccacttcagagggggatgcgaagaggtcggcccagctccggtgaccatgaaggtggcacaggaattacagtgtgaat

SEQ ID NO: 512163 - DNA, 120 bp, Artificial Sequence
  ENSG00000164465_26 (sequence is synthesized)
ggctgtgtcagatgttttcgtacctcagattaaaaatattgctgaggtcagacgccacaattttcatgactttcttcagaagtagcacattttcgtgacttccgctgtcctctgaaaaac

SEQ ID NO: 512164 - DNA, 120 bp, Artificial Sequence
  ENSG00000164465_27 (sequence is synthesized)
aaagttatttggaacatgttcatgcaaaagtgattctgaccaagtctaaatcgagcttttctactgacatgaaactgttggaaactgatctcattttataagaaatgattttcccctcaa

SEQ ID NO: 512165 - DNA, 120 bp, Artificial Sequence
  ENSG00000164465_28 (sequence is synthesized)
ggaggcgtctgtaattccagaacagtccagacatcagctgtacctcatgctcagtagtttttatttgagtttcttttgtgagttaactatgggagatttaacctcttttgccaaagaggg

SEQ ID NO: 512166 - DNA, 120 bp, Artificial Sequence
  ENSG00000164465_29 (sequence is synthesized)
aagtgtgtgtgtttttttaatagaaaatatggaccaaaaatttttttccctgaagaatgtattataaccctatttgtgtggttattacatcctgtgaaatgtatatatgttaaaataatg

SEQ ID NO: 512167 - DNA, 120 bp, Artificial Sequence
  ENSG00000164465_30 (sequence is synthesized)
ggggtgctggaaggtcatggcagactagctgctggttagtgtggaggggaaatggtttactttgtagagtttacatggttttatgcgcacactaattgtaataaactatgccaaaccaaa

SEQ ID NO: 512168 - DNA, 120 bp, Artificial Sequence
  ENSG00000164465_31 (sequence is synthesized)
gtactttcaaaatttccatgggtcctcaggttgattgagagaatcagccccagaatgatcgccagcataaaacaatctatgaaaaatatactgtagttccagctactcagaaggctgcgg

SEQ ID NO: 512169 - DNA, 120 bp, Artificial Sequence
  ENSG00000164465_32 (sequence is synthesized)
caggaggactgagaccaggagctggaagctgtagtgcactgtgatcaggcctgtgaatagacactgcactccagctgggcaacatgctcacagtgtcaaacctgttggagcctggaagca

SEQ ID NO: 512170 - DNA, 120 bp, Artificial Sequence
  ENSG00000164465_33 (sequence is synthesized)
tctaatatgcaaaataagattagtatatattcttctagtgaaatcttgtgacctttcttataaatgagataaatttatagataattctacatatttgtatgattttctaaagcacatggc

SEQ ID NO: 512171 - DNA, 120 bp, Artificial Sequence
  ENSG00000164465_34 (sequence is synthesized)
tctcacatcaaccctatgaggtaagtactattatgatccttatgttatatagggagagagaggcagatacattggcttataaatattcagtaggactttttgtcttgataggaagaagaa

SEQ ID NO: 512172 - DNA, 120 bp, Artificial Sequence
  ENSG00000164465_35 (sequence is synthesized)
tcaaagtatcgttctgtgtttttgagtccagccaggtccaggcattggggtttagtggccagagctgggattatttcggctccttatgccctgttcttctggatccgtttaactaaaggt

SEQ ID NO: 512173 - DNA, 120 bp, Artificial Sequence
  ENSG00000164465_36 (sequence is synthesized)
agctcttcagatcaatatggttatttcaagctgaagtgtcttcctggagcagttctttgttcttcaaagaggcccatgtaatatgaaactttgaaaggactcaaatataaggtgttgcct

SEQ ID NO: 512174 - DNA, 120 bp, Artificial Sequence
  ENSG00000164465_37 (sequence is synthesized)
caagaagataaaactggaaaacaagagatgaaataacctgaaacaatagatattgtttaataattcagtcttctttttttgttttttggttttccttctgcccaaaaacaataaaataca

SEQ ID NO: 512175 - DNA, 120 bp, Artificial Sequence
  ENSG00000164465_38 (sequence is synthesized)
ttacataggtgcttctctacctacctccaagttcttgaaatatttgaaaatgtaacaaatctttacattctttctgtgaaaagaatctgtatgcaagttgtaaatatggatatatggatt

SEQ ID NO: 512176 - DNA, 120 bp, Artificial Sequence
  ENSG00000164465_39 (sequence is synthesized)
agagagataattcttcaatggtgaaatctttatatggtgtattgtcagtgtgaaaacattaatctgtgaagagatttttaaatgcaactaatataagttggcctgtgagatgatctgagg

SEQ ID NO: 512177 - DNA, 120 bp, Artificial Sequence
  ENSG00000164465_40 (sequence is synthesized)
tttcaaatgagggagaaaaaaatgaaacttgaaattataatagatgttatatttaacaaacttttaaaaatagcctgtaaatattattttcttacaaggaattaggaccacaggatctac

SEQ ID NO: 512178 - DNA, 120 bp, Artificial Sequence
  ENSG00000164465_41 (sequence is synthesized)
aggcaagagaactgagtaggagaacaggcctctatatattttcatcaatgtgtttacattaaatatctcattaataaaagacagtgaggccaagcatggtggttcatgcctgtaatcccc

SEQ ID NO: 512179 - DNA, 81 bp, Artificial Sequence
  ENSG00000164465_42 (sequence is synthesized)
attatggttgtgctattgtactacagcctgggcaacagagtaaaatcctgtctctaaaataaaataaaacttttaaaaaga

SEQ ID NO: 512180 - DNA, 120 bp, Artificial Sequence
  ENSG00000164465_43 (sequence is synthesized)
tacagcctgggcaacagagtaaaatcctgtctctaaaataaaataaaacttttaaaaagatgatgatgggctggtcgcgctggctcacgcatataatctcagcactttgggaggctaagg

SEQ ID NO: 512181 - DNA, 78 bp, Artificial Sequence
  ENSG00000164465_44 (sequence is synthesized)
ttccatctcaaaaaaaagaaaaagaaaaaaagaaagatggggctttcttggcatccaaatccaagaataagaaatgtg

SEQ ID NO: 512182 - DNA, 120 bp, Artificial Sequence
  ENSG00000164465_45 (sequence is synthesized)
ggggctttcttggcatccaaatccaagaataagaaatgtgtcaataaaaaccttgagagatctttgtgatttaattcttttctacttcaggaatgaaatacttgtgattttcttgggaag

SEQ ID NO: 512183 - DNA, 120 bp, Artificial Sequence
  ENSG00000164465_46 (sequence is synthesized)
tgaaaattggccatttaaaatggctgcttcagtataagtatggtagatgtttgagttggacatttgtcttgggatcctgttagtgacaatgagaattcggaaggaaatggcaaaagtgag

SEQ ID NO: 512184 - DNA, 120 bp, Artificial Sequence
  ENSG00000164465_47 (sequence is synthesized)
agagctgaagccttgtgctcttgaggttgcttgtctatagcaccagttgaatgtaggaatattaaggtcaaataatacaacaaggcaattttagcttctttatccaaaatgaaatttaaa

SEQ ID NO: 512185 - DNA, 120 bp, Artificial Sequence
  ENSG00000164465_48 (sequence is synthesized)
tcagtaaacagttgagcagcaccaccttagttagataaattggcccttgtttgcaaagcctcgtatcttcaatatcaagagtgtctagaaaaatgcaaccgacatagaatccttgccttg

SEQ ID NO: 512186 - DNA, 120 bp, Artificial Sequence
  ENSG00000164465_49 (sequence is synthesized)
gtttcatataaccaggtataagtgggatgataaacacctaaaaactcactaatagaatcttaaggtaaacataatttccttctataggtgtttcagggtaactctaactttcgggaccca

SEQ ID NO: 512187 - DNA, 120 bp, Artificial Sequence
  ENSG00000164465_50 (sequence is synthesized)
gtactttcaaaatttccatgggtcctcaggttgattgagagaatcagccccagaatgatcgccagcataaaacaatctatgctggctttctctctgatgcatctccagcagaagagtgat

SEQ ID NO: 512188 - DNA, 120 bp, Artificial Sequence
  ENSG00000164465_51 (sequence is synthesized)
tttttgagtaactccagaggccaaagtccacttctccacgtaagatcttcaatcccagaagccctatcatgggatctctctgtgtgtcccacttgtgagagtctaacccaggagttcacc

SEQ ID NO: 512189 - DNA, 120 bp, Artificial Sequence
  ENSG00000164466_0 (sequence is synthesized)
gggagaagcgtttccggtggcggcggaggctgcactgagcgggacctgcgagcagcgcgggcggcagcccgggggaagcgtccgggaccatgtctggagaactaccaccaaacattaaca

SEQ ID NO: 512190 - DNA, 120 bp, Artificial Sequence
  ENSG00000164466_1 (sequence is synthesized)
tcaaggaacctcgatgggatcaaagcactttcattggacgagccaatcatttcttcactgtaactgaccccaggaacattctgttaaccaacgaacaactcgagagtgcgagaaaaatag

SEQ ID NO: 512191 - DNA, 120 bp, Artificial Sequence
  ENSG00000164466_2 (sequence is synthesized)
tacatgattacaggcaaggaattgttcctcctggtcttacagaaaatgaattgtggagagcaaagtacatctatgattcagcttttcatcctgacactggtgagaagatgattttgatag

SEQ ID NO: 512192 - DNA, 120 bp, Artificial Sequence
  ENSG00000164466_3 (sequence is synthesized)
gaagaatgtcagcccaggttcccatgaacatgaccatcacaggttgtatgatgacgttttacaggactacgccggctgtgctgttctggcagtggattaaccagtccttcaatgccgtcg

SEQ ID NO: 512193 - DNA, 120 bp, Artificial Sequence
  ENSG00000164466_4 (sequence is synthesized)
tcaattacaccaacagaagtggagacgcacccctcactgtcaatgagttgggaacagcttacgtttctgcaacaactggtgccgtagcaacagctctaggactcaatgcattgaccaagc

SEQ ID NO: 512194 - DNA, 120 bp, Artificial Sequence
  ENSG00000164466_5 (sequence is synthesized)
atgtctcaccactgataggacgttttgttccctttgctgccgtagctgctgctaattgcattaatattccattaatgaggcaaagggaactcaaagttggcattcccgtcacggatgaga

SEQ ID NO: 512195 - DNA, 120 bp, Artificial Sequence
  ENSG00000164466_6 (sequence is synthesized)
atgggaaccgcttgggggagtcggcgaacgctgcgaaacaagccatcacgcaagttgtcgtgtccaggattctcatggcagcccctggcatggccatccctccattcattatgaacactt

SEQ ID NO: 512196 - DNA, 120 bp, Artificial Sequence
  ENSG00000164466_7 (sequence is synthesized)
tggaaaagaaagcctttttgaagaggttcccatggatgagtgcacccattcaagttgggttagttggcttctgtttggtgtttgctacacccctgtgttgtgccctgtttcctcagaaaa

SEQ ID NO: 512197 - DNA, 120 bp, Artificial Sequence
  ENSG00000164466_8 (sequence is synthesized)
gttccatgtctgtgacaagcttggaggccgagttgcaagctaagatccaagagagccatcctgaattgcgacgcgtgtacttcaataagggattgtaaagcagggaggaaacctctgcag

SEQ ID NO: 512198 - DNA, 120 bp, Artificial Sequence
  ENSG00000164466_9 (sequence is synthesized)
ctcattctgccactgcaaagctggtgtagccatgctggtgagaaaaatcctgttcaacctgggttctcccagttacggaaaccttttaaagatccacattagccttttagaataaagctg

SEQ ID NO: 512199 - DNA, 120 bp, Artificial Sequence
  ENSG00000164466_10 (sequence is synthesized)
ctactttaacagagcacctggcgtgggccaagtgcctgatactcccttacactgaatcatgttatgatttatagaaatacctttcctgtagcttttatagtcattgtttttcaaagacga

SEQ ID NO: 512200 - DNA, 120 bp, Artificial Sequence
  ENSG00000164466_11 (sequence is synthesized)
tataccagccctcacccaggttttaaaaaagcactggtaggcatagaataggtgctcagtatatggtcagtaaatgttctattgattatcaatcagtgaaaaaagaaatctgtttaaaat

SEQ ID NO: 512201 - DNA, 120 bp, Artificial Sequence
  ENSG00000164466_12 (sequence is synthesized)
actgaattttcatctcactcccattgcaaatcaaggagatctcagcagtgaactgggaaaatacaaaagctctgggctaatctataaaaacttaccctgaaatattaagggcagtttgct

SEQ ID NO: 512202 - DNA, 120 bp, Artificial Sequence
  ENSG00000164466_13 (sequence is synthesized)
tctagtttggggattgcgctagcccaatgaaggtgatgaagcttttggatttggagggtaaaagctccttcacaccccttccaaaagtcagtcacagaccactgcaacatgccttccctg

SEQ ID NO: 512203 - DNA, 120 bp, Artificial Sequence
  ENSG00000164466_14 (sequence is synthesized)
ctggatcattatatacattcagattgtgagtggattgccttggttgacttttaatttattgttttttgttcttataaagatgataatcttaccttgcagttattgactttatattcaatt

SEQ ID NO: 512204 - DNA, 120 bp, Artificial Sequence
  ENSG00000164466_15 (sequence is synthesized)
atttacatcaaataatgaaataactgaaatgtacaaatgtcaaattttggaagtatattcaataccaatgctgtatgagtgggctgaatccagttcattgttttttttttggtaagaagt

SEQ ID NO: 512205 - DNA, 120 bp, Artificial Sequence
  ENSG00000164466_16 (sequence is synthesized)
aattttacttgaatattgtatgttgcattccacttcatttgaaaataatgaaaccatgtaccactgtttacatcatctgtagtgatttcatagataatatatttaatatgacagattatg

SEQ ID NO: 512206 - DNA, 120 bp, Artificial Sequence
  ENSG00000164466_17 (sequence is synthesized)
tatgtttcaactctgtagatgtttaacgtcatagacagttggccctctgtatccgtgagctctatatctgtgaattcaaccaagtttggatggaaaattttttttttttttttttttttg

SEQ ID NO: 512207 - DNA, 120 bp, Artificial Sequence
  ENSG00000164466_18 (sequence is synthesized)
acaagcgtgagccaccgcacccggcctgaaaatattttctaaaaagataaaaaatatacataacgatgaaaaataatacaaatttaaaaaccaatacagtataacaactatttacatagt

SEQ ID NO: 512208 - DNA, 120 bp, Artificial Sequence
  ENSG00000164466_19 (sequence is synthesized)
gcttacattgtattaggtgttataagcaatctagagatgatttagcaagtatacaggaggatgtgcctaggttatatgcaaatactgtgccattttatatcaggaacttgagcatctgca

SEQ ID NO: 512209 - DNA, 120 bp, Artificial Sequence
  ENSG00000164466_20 (sequence is synthesized)
gatattggtatcggagggcggtcctggaaccaagcatccacggatactgaggggtgacatttcatgaagtgtagatcattgtattcagagattgtaaatgaaaaaaatatagaaactatt

SEQ ID NO: 512210 - DNA, 120 bp, Artificial Sequence
  ENSG00000164466_21 (sequence is synthesized)
tagttttggtagattttttttctgacaatgtgaccagactgaatttcctcataaagaaaaaatggcgtgccttgtgtctgtgtttctcttttctctgaaaggattaatagatctgaagct

SEQ ID NO: 512211 - DNA, 120 bp, Artificial Sequence
  ENSG00000164466_22 (sequence is synthesized)
ttgggccactcagagccttccttgatgctgccagagtcttcttatttagattttctgtcttaaaccattggaagcaaaacggttttcccatgacattctggccttggacagattctgttg

SEQ ID NO: 512212 - DNA, 120 bp, Artificial Sequence
  ENSG00000164466_23 (sequence is synthesized)
tcctcgacgcgtctctttataaagtggtaaaagcctgaaattcagggcagctctccatgaggtgctgaagggctcttttcataagaagctaaggcactgctgcctgccccaggtgtcccg

SEQ ID NO: 512213 - DNA, 120 bp, Artificial Sequence
  ENSG00000164466_24 (sequence is synthesized)
ctcctctcagagtcctccccctaccaggtagtgtgtagctccatttcagaatgttaacctccagtgaagagctaatgactggttagaagattgacaaactaaccaaaattttacacactc

SEQ ID NO: 512214 - DNA, 71 bp, Artificial Sequence
  ENSG00000164466_25 (sequence is synthesized)
ggttagaagattgacaaactaaccaaaattttacacactccggttatgtgtgtgaaaggttataaaaggaa

SEQ ID NO: 512215 - DNA, 67 bp, Artificial Sequence
  ENSG00000164466_26 (sequence is synthesized)
attataaaagggatgatgaacatggagctgcatctttttaaacgttgttttttgatgcttcagactc

SEQ ID NO: 512216 - DNA, 120 bp, Artificial Sequence
  ENSG00000164466_27 (sequence is synthesized)
ctgcatctttttaaacgttgttttttgatgcttcagactcttaatgcttttatataaagctatcaactgtatgttgatcacagtttataagaaagaacaaatcaagattggcaatccttg

SEQ ID NO: 512217 - DNA, 120 bp, Artificial Sequence
  ENSG00000164466_28 (sequence is synthesized)
ccgatcttttagaaataccttttctggagaaaaaaaaatccacatgaagtgcaataagcttataaagctaagtagttattaatatttctattaacatgatacaaaggatgatgattgtaa

SEQ ID NO: 512218 - DNA, 120 bp, Artificial Sequence
  ENSG00000164466_29 (sequence is synthesized)
gtgtttactgactggcagcttttatttcagtattagcacagcgtcttgccagtgttggaggccatgtattatttcagttcaactggatgaaatgttaaataaactcagaatgaaaataaa

SEQ ID NO: 512219 - DNA, 120 bp, Artificial Sequence
  ENSG00000164466_30 (sequence is synthesized)
gaacatgaccatcacaggttgtatgatgacgttttacaggtatgttatgaatatgtagcaacagtgtgtttaccattacagaagctcaaagtatatttttgtatgtaaataattttgttg

SEQ ID NO: 512220 - DNA, 120 bp, Artificial Sequence
  ENSG00000164466_31 (sequence is synthesized)
aaataagtattatttcataagtatatgaagtgacaaacaaggtaattagcttgattgaatcattccgtaatgtacttatgaatcaaaacatcatgttgaactcctttagtatatacaata

SEQ ID NO: 512221 - DNA, 79 bp, Artificial Sequence
  ENSG00000164466_32 (sequence is synthesized)
gggaagcgaggcatgatagctcactacagctccaactcttgggctcaagcgatccccacaccccactgccacctcagcc

SEQ ID NO: 512222 - DNA, 120 bp, Artificial Sequence
  ENSG00000164466_33 (sequence is synthesized)
tgggctcaagcgatccccacaccccactgccacctcagcctcctgagtagctgcaactataggcgtgcaccaccatgcccggataatccgggaccatgtctggagaactaccaccaaaca

SEQ ID NO: 512223 - DNA, 120 bp, Artificial Sequence
  ENSG00000164466_34 (sequence is synthesized)
aaatacaggttgaaccagcgttcacggatccgtgaaccagaaaacaaacacatatatcacacctcttagtggaaattgccttccactgggggtggcagaaaataaacaagtaaataaagt

SEQ ID NO: 512224 - DNA, 120 bp, Artificial Sequence
  ENSG00000164466_35 (sequence is synthesized)
aaagtattcaaagccatttatttctcaacacagaggttcccatggatgagtgcacccattcaagttgggttagttggcttctgtttggtgtttgctacacccctgtgttgtgccctgttt

SEQ ID NO: 512225 - DNA, 73 bp, Artificial Sequence
  ENSG00000164466_36 (sequence is synthesized)
ctgtttggtgtttgctacacccctgtgttgtgccctgtttcctcagaaaagatacaaaaatttgggtctcacc

SEQ ID NO: 512226 - DNA, 120 bp, Artificial Sequence
  ENSG00000164466_37 (sequence is synthesized)
gatcatcatgttaggctgctatctttaaaccttcacttagtgattttacaacttttttttttgcaatggaattcttttgaccaaaaaaaaaaaaaggaagaaaagagtaaaaagacctgt

SEQ ID NO: 512227 - DNA, 120 bp, Artificial Sequence
  ENSG00000164466_38 (sequence is synthesized)
tatatcccccattgctcgcccttaacacagatatctagggttcatattaacctgacaatgggagtcatccctcttagttgtagataccaatccctttctcctggcagcttgccttctgtt

SEQ ID NO: 512228 - DNA, 120 bp, Artificial Sequence
  ENSG00000164466_39 (sequence is synthesized)
tgagtattaatcctaaaaaccaattgaaggtgcaggtgccattattccatttcattggcagggaagttgagactcaaaagatactgaagccagggtctcttaaaaggaagggatggaggc

SEQ ID NO: 512229 - DNA, 120 bp, Artificial Sequence
  ENSG00000164466_40 (sequence is synthesized)
agaaatcaaacccacatctgtctaatttcagatgcacccagctcttttctacccccttccattaaatttgaaaatgctttattcttttgtgagaatcagattaactctgatgcaaatttg

SEQ ID NO: 512230 - DNA, 120 bp, Artificial Sequence
  ENSG00000164466_41 (sequence is synthesized)
gcaattatatgcacttagcttaggtggttggtatatttgcttcctttcttcccacttagttttttgccttaaaagctttcttgtgcacgcctctcatcgcaaactgcccttgaatcctgc

SEQ ID NO: 512231 - DNA, 120 bp, Artificial Sequence
  ENSG00000164466_42 (sequence is synthesized)
ctttgatgtgagaacaggactaactggcgttaaatcggcattttctacatcaggtctccagcctgctcttgacctgactccaacacacaaagcagcggcattttgttgtctgtcattttc

SEQ ID NO: 512232 - DNA, 120 bp, Artificial Sequence
  ENSG00000164466_43 (sequence is synthesized)
tgtaagtgttaccaggccccttgccttggtaataccctttcctttgtgggccagtaggtcccgaacatatggtctttaatcccccagccttgcggagttggttttggatgaggtgttctg

SEQ ID NO: 512233 - DNA, 120 bp, Artificial Sequence
  ENSG00000164466_44 (sequence is synthesized)
ttctagaactaatgctgtcagatccctctacctgatcgagaactccaccttgtatctgctctcccactctgtctccgaccctgctgttcttgaatagaaatttaaacctcatggacagga

SEQ ID NO: 512234 - DNA, 120 bp, Artificial Sequence
  ENSG00000164466_45 (sequence is synthesized)
gcccttcatcaccttggagcctactgaagagccccccttgaagagggcaggaccttcagaacttgctctgggagcctgattcagatgaatttcctcatctctacagtgggataatgatac

SEQ ID NO: 512235 - DNA, 120 bp, Artificial Sequence
  ENSG00000164466_46 (sequence is synthesized)
ctgcttaattgtacaaaccccagagtcttggggctcaacctgagaatgtccatttctgtagtatgtggcttatgaacactggtgttcagcagctggccttgatttagcagtttagacttt

SEQ ID NO: 512236 - DNA, 120 bp, Artificial Sequence
  ENSG00000164466_47 (sequence is synthesized)
gagcacataaaatgccaaggggtgtgcctgataccaagttgtaaaacacctaagaaatgtagctgtaattattttcagattgaaagggttttagatttgaaaacccatagagaaactttc

SEQ ID NO: 512237 - DNA, 120 bp, Artificial Sequence
  ENSG00000164466_48 (sequence is synthesized)
tactttggccttttttctttgagtgctgcaagaaataaaatatagcccaacatttattttttatgattcattgaaactctaggggtagaaatggaaagctttctgtaactactagtgtcc

SEQ ID NO: 512238 - DNA, 120 bp, Artificial Sequence
  ENSG00000164466_49 (sequence is synthesized)
ttaggtcaaggccctcagaaagcgtgtggttttacatttgagaaaccaatcctcttttgttttactgtattttaaaatagcttcttactctgttttgttgtttatacattgtatgtttgg

SEQ ID NO: 512239 - DNA, 120 bp, Artificial Sequence
  ENSG00000164466_50 (sequence is synthesized)
cttcttgaggtctctggctcctcagtttttccttggctcataacatagtatcctcattgatccaagcatgaccctgttttgcttatttttattttacttatactaataatataatgaata

SEQ ID NO: 512240 - DNA, 120 bp, Artificial Sequence
  ENSG00000164466_51 (sequence is synthesized)
tccacaaattcagtgcccaatgaggcaggagaatcgctcgaacccagtaggcagaggctgtggtgagccaagatcacgctactgcattccagcctgggcaacagtgcgagattctgtctc

SEQ ID NO: 512241 - DNA, 120 bp, Artificial Sequence
  ENSG00000164466_52 (sequence is synthesized)
acccctcactgtcaagtaaggctacgagaattgaccactctctgcagttcttcaaccttcattttattaagtggtgatactctcctgtttaaaaaagcctatgtgtgcatatttttatat

SEQ ID NO: 512242 - DNA, 120 bp, Artificial Sequence
  ENSG00000164466_53 (sequence is synthesized)
agtgctgggaacataggtgtgagctgccgcacccatcctaaaacttttcgtacctttattttctccagagtaattctaggtatccaacaagtaaatattaaaatactatgtacttataaa

SEQ ID NO: 512243 - DNA, 120 bp, Artificial Sequence
  ENSG00000164466_54 (sequence is synthesized)
gagaaatatgtaggaaactattgaaatttagttaagatcaattgagatttatagacaaacttagctttgaatttagatggcctttttgccatttatagcaaaattatctttataaatagg

SEQ ID NO: 512244 - DNA, 90 bp, Artificial Sequence
  ENSG00000164466_55 (sequence is synthesized)
ctcactctatcacctaggttggagtgcagtggcacaatctcagccgactgcaacctccacatcccaggctccagcaatcctgctcgccac

SEQ ID NO: 512245 - DNA, 120 bp, Artificial Sequence
  ENSG00000164483_0 (sequence is synthesized)
aaaagacgcggccaaggcccgctccgtccacgcttcccgccggcccggcaaggggttccggagaacggcttgggggggcgagaaccatgggcgggggaaatggaagacagagggaactga

SEQ ID NO: 512246 - DNA, 120 bp, Artificial Sequence
  ENSG00000164483_1 (sequence is synthesized)
agcacgggggtcttcgatgagcagtgcggatgttcgactccaaacatcaaagccaacgagaggttcaggttactcctccttgaccccaaacatccagtgagtggagactggcctgttcac

SEQ ID NO: 512247 - DNA, 120 bp, Artificial Sequence
  ENSG00000164483_2 (sequence is synthesized)
agagtaaaatatgtcgtctctaattcggcaaagacggtgatgactgtatatatgcaggccaattccgctctccaagagattctaactcagtcacagtttgaaccactactgaaccactgc

SEQ ID NO: 512248 - DNA, 120 bp, Artificial Sequence
  ENSG00000164483_3 (sequence is synthesized)
tgttaggaagctacaacccaaaagaaaagccccacagatgctgagagctggtgatcctcaggataaaacaaaggaaccagaaccacatccactgatcggatttgcctggggaggaggggt

SEQ ID NO: 512249 - DNA, 120 bp, Artificial Sequence
  ENSG00000164483_4 (sequence is synthesized)
gctctctcctttgatcttctcttctggaagagatggaccaaaagcctctccagcaataatccgaaatgattcttgaagactatctttccagcttgtcacatatgcaaggtgtatttacag

SEQ ID NO: 512250 - DNA, 120 bp, Artificial Sequence
  ENSG00000164483_5 (sequence is synthesized)
gagacagcaatggaaacctggtcagttgagcaggtctgcagttggttggtggagaaaaatttaggagagctagttcatagatttcaagaggaagaagtaagtggggccgctcttcttgca

SEQ ID NO: 512251 - DNA, 120 bp, Artificial Sequence
  ENSG00000164483_6 (sequence is synthesized)
cttaatgatcggatggttcagcaactggtaaagaaaattgggcaccaggctgttctgatggatttaattaaaaaatacaagcagaacactcaaggactgaagtccccagaaaaccccaaa

SEQ ID NO: 512252 - DNA, 120 bp, Artificial Sequence
  ENSG00000164483_7 (sequence is synthesized)
aaggcagccctggtcatgcaaacagaagcagctcgagattacagggatgaagagtcctccagtccagccaggcatggggagcagatgccatctttctatccagctgaaaaccttgataat

SEQ ID NO: 512253 - DNA, 120 bp, Artificial Sequence
  ENSG00000164483_8 (sequence is synthesized)
ggactaattgaccaaagagtattgaaacagagaagaaatgtgaaacaaattctagcaagaagcaaagcattacagtggacgaagtcctatgttttaccagagtttccctatgatgtcaaa

SEQ ID NO: 512254 - DNA, 120 bp, Artificial Sequence
  ENSG00000164483_9 (sequence is synthesized)
tgtaccccagcacccagcagtacaatgacgtggttaatgccctgctgcaggcccaccctttcctggatgaggatggctgtggcttctttttatggaaacgagccctcaaagatcgcttta

SEQ ID NO: 512255 - DNA, 120 bp, Artificial Sequence
  ENSG00000164483_10 (sequence is synthesized)
aatatgttcgaagacccatagaagatgatgagcaagtgattagaaataagtgtaaatttggacaccgaagaggccagacaaggaaatctcttgctgatataagatttgatgaaattaaac

SEQ ID NO: 512256 - DNA, 120 bp, Artificial Sequence
  ENSG00000164483_11 (sequence is synthesized)
ttgtccagataaaagaagaagctgtttgttttgattctgagctagatgaacatattaagtggttccagcaagaatacgtgaaaacagaaaaggactggagagaaattgacaagagaatga

SEQ ID NO: 512257 - DNA, 120 bp, Artificial Sequence
  ENSG00000164483_12 (sequence is synthesized)
gccaaactttggaaataagaagaaagatgattggcagccgaacacctctgaaggacattcttaaactgtttcctttcttgaagtgcccttatcagatgttcagagaattccaacttctta

SEQ ID NO: 512258 - DNA, 120 bp, Artificial Sequence
  ENSG00000164483_13 (sequence is synthesized)
caagaacagatatttataagaaaacaaggcacattttggaatcctattcagaaaatatactgacttctttttcagtggtggacaatccaatcaatattgtattgcaagaaaaaatgaaac

SEQ ID NO: 512259 - DNA, 120 bp, Artificial Sequence
  ENSG00000164483_14 (sequence is synthesized)
attacacagatgaagacatgttgaaatacatgaagatgacagccacatgtttactcctcccagatgtttttggggatgatcccagcctttttgtcatcatgaatgaacaggtgcaagtgt

SEQ ID NO: 512260 - DNA, 120 bp, Artificial Sequence
  ENSG00000164483_15 (sequence is synthesized)
ccacacctgtgttggaagttaaaaaccctttcaacatggaggtctgcgaattttctttatatttagaaagggagaggctcacaaaggtggacgactgtgttacagccttggctgcgctag

SEQ ID NO: 512261 - DNA, 120 bp, Artificial Sequence
  ENSG00000164483_16 (sequence is synthesized)
tagctgcctttcatgtatttaggattgagtgtccaagaagactgtcccaaactttcaacttcctagaaacgctgattttcgatatgcacagtccttattttccttctttgaaagaaaagg

SEQ ID NO: 512262 - DNA, 120 bp, Artificial Sequence
  ENSG00000164483_17 (sequence is synthesized)
aaaacgaagtaggatttcagcacccactcacttaatagcatgccaaatattgtactggaatttacctctgggaaaactgaagcttcataagaaattgttttgatttagggttgtggtaga

SEQ ID NO: 512263 - DNA, 120 bp, Artificial Sequence
  ENSG00000164483_18 (sequence is synthesized)
ggtaggtatgagaaaatcatcttgtatttatagatgctaatgaatttcaatgctttctatctttacacttagatattaagttctttgtgaaattctgtaataaaattctacttcattaaa

SEQ ID NO: 512264 - DNA, 120 bp, Artificial Sequence
  ENSG00000164483_19 (sequence is synthesized)
gccacccctgagacagcaagaccaactctcctcttcctcctcctcctcctcagcctactcactgcaagacgacgagtatgaagatctttatgatgatccacttccatgaaatgattcttg

SEQ ID NO: 512265 - DNA, 120 bp, Artificial Sequence
  ENSG00000164483_20 (sequence is synthesized)
agtcttgctgtctttcaatggggcagccactgctcagttgctgccattcagaaatatgaacccagtatcaccagaacttttgatttttcaagagaaaccaagattccagatttgtaggtg

SEQ ID NO: 512266 - DNA, 120 bp, Artificial Sequence
  ENSG00000164483_21 (sequence is synthesized)
gctctggttgcacattaggattcctagagattcagattgaattaatttgaggatgggattattctaatgtacaaccacggctgagaaccactgccgctgacgtttcaacacaaagtttgc

SEQ ID NO: 512267 - DNA, 120 bp, Artificial Sequence
  ENSG00000164483_22 (sequence is synthesized)
tgtttgaacctgcctgtctcctggatttcaaagaccactgtcttcattgcacaacaatgtgaatataatcaacactattgaactgtacctaagaatagttaataaaaaactgagtgttta

SEQ ID NO: 512268 - DNA, 120 bp, Artificial Sequence
  ENSG00000164483_23 (sequence is synthesized)
ctttgtgaagaaacctgggtgttaatggtacaggattgggtaccattgtatgtccctggctgtctgttagtaaagcttagagatgcctgtggaaaaaaagtaggagaaggtgtatttaca

SEQ ID NO: 512269 - DNA, 120 bp, Artificial Sequence
  ENSG00000164483_24 (sequence is synthesized)
taaaagttggctagaactatgctctgctattacaaccaactctgtgagagcttaggttactgtggtgttggagtagagagaccacactctatgttgccaaaactggtgtggtaaaggaag

SEQ ID NO: 512270 - DNA, 120 bp, Artificial Sequence
  ENSG00000164483_25 (sequence is synthesized)
catagcatacgctctttatacaatttgtttggctttaactcaagttaatgttctggttaatttacgctgattcctctaaagtcacacatctcaaaggtgagtcctacacttcccttcagt

SEQ ID NO: 512271 - DNA, 120 bp, Artificial Sequence
  ENSG00000164483_26 (sequence is synthesized)
gtatttcttggcctgaagtgatctctttcgtgcttcatgtctactttctttgattcctccttgagcacggccctccattaactttgtctgctgagacagacatcttgaagtcaacagtca

SEQ ID NO: 512272 - DNA, 120 bp, Artificial Sequence
  ENSG00000164483_27 (sequence is synthesized)
gcagctgtttccagctgctgttctgtaagattcagacatttcttactcactagttgcctcatttcaacgtgcactgttaaagaaatcagcctgttagagaagtgaggaaataccctaaaa

SEQ ID NO: 512273 - DNA, 120 bp, Artificial Sequence
  ENSG00000164483_28 (sequence is synthesized)
gaaacctgcacacctgagcatctctgtgcttggaaaagtcacttcccctttgagggtctcaatttgcccatcagtaaagtgtgaggcatggactaggtggtttctaagttctttccagct

SEQ ID NO: 512274 - DNA, 120 bp, Artificial Sequence
  ENSG00000164483_29 (sequence is synthesized)
aacagtatatctaacaatatataaatctaacaatatgtaaatcattaaaatggtgagaattttaaattctgatgtagctttttaataattaggaaaatcacttcagtctagaatacaacc

SEQ ID NO: 512275 - DNA, 120 bp, Artificial Sequence
  ENSG00000164483_30 (sequence is synthesized)
cttcagtctagaatacaacccaccaacactgtgttaatcccatcagtctgatcaggtggaagttatctagaaactttattttcatgattgggtaagagttttggaggaagtagtacatta

SEQ ID NO: 512276 - DNA, 120 bp, Artificial Sequence
  ENSG00000164483_31 (sequence is synthesized)
aacattttttctgtactttaaaaaattaaaatgttttcttacttaagaaattgtcattctatgcatttgagacatacagaagaaaaactacatacgtaacatatatgtagtttatgagac

SEQ ID NO: 512277 - DNA, 120 bp, Artificial Sequence
  ENSG00000164483_32 (sequence is synthesized)
aaaataaacactgttaactcagcatttaactttagaactagaacactgcctgcaccattgtgtgtgcctgagttttcctcccctctcctgtcacctgcctttccaacaccacaggcctct

SEQ ID NO: 512278 - DNA, 120 bp, Artificial Sequence
  ENSG00000164483_33 (sequence is synthesized)
agaactaatcactattctgaattttatgtttatcattcacctgttttaaaaataaatgacattgtcacatatgcatgaattcttaagggatatattgcttagttttgcttgttttttttt

SEQ ID NO: 512279 - DNA, 120 bp, Artificial Sequence
  ENSG00000164483_34 (sequence is synthesized)
caagcacatattttatttgaataaatcctctgtagtccatttttatgttcaacagtttaaaacatatacaaacaaagcttgaaagtaaatgaagatctgacatatctgaagcttaaagat

SEQ ID NO: 512280 - DNA, 120 bp, Artificial Sequence
  ENSG00000164483_35 (sequence is synthesized)
ttttatttttcttttcaccaccttccacattttacatttgaaactccttggcttcgttgacaatccattatcctggttctcctgctcctataattttctccctttctatatatctaaatc

SEQ ID NO: 512281 - DNA, 120 bp, Artificial Sequence
  ENSG00000164483_36 (sequence is synthesized)
tagataatttaaaagaaatatcaaatctctatctctgcattcacaagtttcctagctattcttccaacctcaattaaaagatttcatcgcctttaagtcccagctttaaaccctggccgt

SEQ ID NO: 512282 - DNA, 120 bp, Artificial Sequence
  ENSG00000164483_37 (sequence is synthesized)
ctatggttttccacaatcttcagatttgctctgctaaacattcccgtaacatgctctgcccttcctgtctctccacccagaactgtcctttcttctttcaaattctattatcccttaaaa

SEQ ID NO: 512283 - DNA, 120 bp, Artificial Sequence
  ENSG00000164483_38 (sequence is synthesized)
tctgatcagttcctcatcttccacgaattttccttcactaccccagcctaaaacaaattctagttttgcttgtttttaaggtttacaaaatgatatgaaaactatatgttggctttgata

SEQ ID NO: 512284 - DNA, 120 bp, Artificial Sequence
  ENSG00000164483_39 (sequence is synthesized)
agttcctttttttcaatcaatgtaatgtcactggaattcatccaggttgttcagttgagtgtagtttattcgttttcctgttggtttaatctattgtgacaggcaaccagtttatttggc

SEQ ID NO: 512285 - DNA, 120 bp, Artificial Sequence
  ENSG00000164483_40 (sequence is synthesized)
tcttctcttcttaacggatatttgatttgtttccagtgttggctgttatgaactatgctgctgtgattattcttgtatgtgtgtcttgaagcatatgtgaagatttttttcaaggattta

SEQ ID NO: 512286 - DNA, 120 bp, Artificial Sequence
  ENSG00000164483_41 (sequence is synthesized)
tacttaggagtggatttgctggctcactggctcacagggtgtgcagatattcaactctgtaagacagtgccaaattattttcctggatgattaagctccctgagcagcactcgttaatca

SEQ ID NO: 512287 - DNA, 120 bp, Artificial Sequence
  ENSG00000164483_42 (sequence is synthesized)
tctgatttcttttccactcaccccacccccatgcaatgccaccaccccacttccaatctattgggaatacaatggtactgtgtttggcttccattttagttatgtatgagggtgatcatc

SEQ ID NO: 512288 - DNA, 120 bp, Artificial Sequence
  ENSG00000164483_43 (sequence is synthesized)
ttttcatatgtttatgaaatattcatgtttcctcctctgtaaagtgtctgttcatgtcttttgcttatttttctatgaggctgcctttttttcaatttacttgtaaaaatcctttgtata

SEQ ID NO: 512289 - DNA, 120 bp, Artificial Sequence
  ENSG00000164483_44 (sequence is synthesized)
ttctgtattctactcctttactaattatatttgttcccaatatcttctcacagtttgtgccttgccttttaaatttctttctggtgtcttttgacaaggaaagacaaggttgcaatttta

SEQ ID NO: 512290 - DNA, 120 bp, Artificial Sequence
  ENSG00000164483_45 (sequence is synthesized)
atgtagttagagttatcaatcatttgtcttatgatcagtgcttctgaggcaggagaatagggtctgaaggcaggaagcctaaggccaatttgcaccaacttcctcgaactgaatcaaaag

SEQ ID NO: 512291 - DNA, 120 bp, Artificial Sequence
  ENSG00000164483_46 (sequence is synthesized)
aacggaaaacaatgagaagcagcaagttacaatctccttctcctagccaggagaagcaaggggttaaccagtctactaaggggttaaccagtttactaagtatctctgtcaggcttttat

SEQ ID NO: 512292 - DNA, 120 bp, Artificial Sequence
  ENSG00000164483_47 (sequence is synthesized)
ctgatccttcctcccttcctctcctgcccaccccttctgtaaatgtcaaccacttcctgaggagcctggtagtggtgaatttcacacctttcttttctttgtgaagaaacctgggtgtta

SEQ ID NO: 512293 - DNA, 120 bp, Artificial Sequence
  ENSG00000164483_48 (sequence is synthesized)
atggtacaggattgggtaccattgtatgtccctggctgtctgttagtaaagcttagagatgcctgtggaaaaaaagtaggagaaggtgaagaaatttgagaaatgggatgctaggaaata

SEQ ID NO: 512294 - DNA, 120 bp, Artificial Sequence
  ENSG00000164483_49 (sequence is synthesized)
ggtttaaatcaggtcttatttttaaagtgagtgtgtgttttgttagcaatttttaaatgtacattgtaaaaatagtaattttaaaaaagcttaacattgagaagataaaggagtctagca

SEQ ID NO: 512295 - DNA, 120 bp, Artificial Sequence
  ENSG00000164483_50 (sequence is synthesized)
gcccaaagatgatagtttttatggaaacgagccctcaaagatcgctttaaatatgttcgaagacccatagaagatgatgagcaagtgattagaaataagtgtaaatttggacaccgaaga

SEQ ID NO: 512296 - DNA, 120 bp, Artificial Sequence
  ENSG00000164483_51 (sequence is synthesized)
gtcaatgaagtgtgtgagataaaggcagatggtgccacaggaggcacggcatagcatggaagaaagcagataaaacaaaggaaccagaaccacatccactgatcggatttgcctggggag

SEQ ID NO: 512297 - DNA, 120 bp, Artificial Sequence
  ENSG00000164483_52 (sequence is synthesized)
cacttccatgtaataaatagtaaatgttttctcttccttgttatttgcttaataacattttctttcctctaactcattttattgtaacagtactgtatataatatatataacatacaaaa

SEQ ID NO: 512298 - DNA, 120 bp, Artificial Sequence
  ENSG00000164483_53 (sequence is synthesized)
atttacaggagacagcaatggaaacctggtcagttgagcaggtctgcagttggttggtggagaaaaatttaggagagctagttcatagatttcaaggaagaagtaagtggggccgctctt

SEQ ID NO: 512299 - DNA, 120 bp, Artificial Sequence
  ENSG00000164483_54 (sequence is synthesized)
ggctttgaggtctgggcctccagccttacctggccctgtcagatctctgctttctgtcctgataaaaacagaccctcaggatgctctggggcagcagttcttttttttttttttcctttt

SEQ ID NO: 512300 - DNA, 62 bp, Artificial Sequence
  ENSG00000164483_55 (sequence is synthesized)
tttttttttgagacggagtctcgctctctcactcaggctggagtagggcagcagttctaagc

SEQ ID NO: 512301 - DNA, 120 bp, Artificial Sequence
  ENSG00000164484_0 (sequence is synthesized)
ccaaagatgggttttgtctgcgggtgatttgggctctcgaagtgcaactttgtggccgggacgcggatcggccggcctgggctcctgcagagcagatcctgtctgcgtcctccaggagga

SEQ ID NO: 512302 - DNA, 120 bp, Artificial Sequence
  ENSG00000164484_1 (sequence is synthesized)
gtgggtggcaggactggggtttcccacaggttttggggcggcggcgagattggcacggtccggggtcgcaggcgcgcagccacgcccctggaagtccgccccggcccccgcccccaaccc

SEQ ID NO: 512303 - DNA, 120 bp, Artificial Sequence
  ENSG00000164484_2 (sequence is synthesized)
gcctcttcggggctttatggcgtgaggtttggggctgggatccatctggagccgagcagaaaacttttcccctcccgttcccggtcccttttgtctttcttggacgcggtggcggcgccg

SEQ ID NO: 512304 - DNA, 120 bp, Artificial Sequence
  ENSG00000164484_3 (sequence is synthesized)
gcgactccctctcccctgcccggcttgctgcgcccggtgccctccgagggcaggcgcgcctggactctgcgcccggatggcggcggccctctgtgagcaccggcagcggcgcatcccctg

SEQ ID NO: 512305 - DNA, 120 bp, Artificial Sequence
  ENSG00000164484_4 (sequence is synthesized)
cgggcataggggcgcccccaccctccgtccgcttgcaccccttgccacccgccccctcgcctgactcatccgcccgcggtggccgcccgagccctgggatggggagggagaccgcggctg

SEQ ID NO: 512306 - DNA, 120 bp, Artificial Sequence
  ENSG00000164484_5 (sequence is synthesized)
gcccgagccctgggatggggagggagaccgcggctgcccgcggcggccgagattcccgctgacgcccccgaccctgccgccttcttcgtccgcctccagaggcgcccgacgtcccgacag

SEQ ID NO: 512307 - DNA, 120 bp, Artificial Sequence
  ENSG00000164484_6 (sequence is synthesized)
ctcctggagtgagaccaggactgagaacagggagaggcgacccgacccccagggcccggtgctcaggacagcacacagagccgctgaaaacgactgaagagagcaagggatttcctggga

SEQ ID NO: 512308 - DNA, 120 bp, Artificial Sequence
  ENSG00000164484_7 (sequence is synthesized)
catctggctctggagagtaaaaggccaagctatgatagcaactggtggagtgataactggcctggccgccttgaaaaggcaagactctgccagatcacagcagcatgtcaacctcagccc

SEQ ID NO: 512309 - DNA, 120 bp, Artificial Sequence
  ENSG00000164484_8 (sequence is synthesized)
gtctcctgctacccaagagaagaagcccatcaggcgccggccccgggcagatgttgtggttgttcgtggcaaaatccggctttattccccatctggtttttttcttattttaggagtgct

SEQ ID NO: 512310 - DNA, 120 bp, Artificial Sequence
  ENSG00000164484_9 (sequence is synthesized)
catctccattataggaattgctatggccgttcttggatattggccccaaaaagaacattttattgatgctgaaacaacactgtcaacaaatgaaactcaggtcattcggaatgaaggcgg

SEQ ID NO: 512311 - DNA, 120 bp, Artificial Sequence
  ENSG00000164484_10 (sequence is synthesized)
tgtggtggttcgcttctttgagcagcatttgcattctgataagatgaaaatgcttggcccattcaccatggggattggcattttcattttcatttgtgctaatgccattcttcatgaaaa

SEQ ID NO: 512312 - DNA, 120 bp, Artificial Sequence
  ENSG00000164484_11 (sequence is synthesized)
ccgtgacaaagagaccaaaatcatacacatgagggatatctattccacagtcattgacattcacacgctaagaatcaaggagcaaaggcaaatgaacggcatgtacactggtttgatggg

SEQ ID NO: 512313 - DNA, 120 bp, Artificial Sequence
  ENSG00000164484_12 (sequence is synthesized)
agaaacagaagtaaaacagaatgggagctcctgtgcctcgagattggcagcaaatacgatcgcctctttctcgggttttcggagcagttttcgaatggacagctccgtggaggaggatga

SEQ ID NO: 512314 - DNA, 120 bp, Artificial Sequence
  ENSG00000164484_13 (sequence is synthesized)
acttatgttaaatgaaggtaagagttctgggcatcttatgccccctttgctctctgacagctctgtgtctgtctttggcctctatccacctccttccaagacaactgatgataagaccag

SEQ ID NO: 512315 - DNA, 120 bp, Artificial Sequence
  ENSG00000164484_14 (sequence is synthesized)
tgtcatcgtccatcagtgcttttacattgcctgtgatcaaacttaataactgtgttattgatgagcccagtatagataacatcactgaagatgctgacaacctcaaaagtaggtcaagga

SEQ ID NO: 512316 - DNA, 120 bp, Artificial Sequence
  ENSG00000164484_15 (sequence is synthesized)
atttgtcaatggattcccttgtggttcctttgcccaacaccagtgaatccttccagcccgtcagcacagtgctaccaaggaataattccattggggagtcgttgtcgagtcagtacaagt

SEQ ID NO: 512317 - DNA, 120 bp, Artificial Sequence
  ENSG00000164484_16 (sequence is synthesized)
catctatggctctcggacctggggctggacagctcttgtctcctggggctgccagaagacagtttgggtccaatacatccttgcatttgctctcgtcacactcaaagtccttggacttag

SEQ ID NO: 512318 - DNA, 120 bp, Artificial Sequence
  ENSG00000164484_17 (sequence is synthesized)
accggggtccctccactctaactgttcaggcagaacaacggaaacatccaagttggcctaggttggatcggaacaacagcaagggatatatgaaactagagaacaaagaagacccgatgg

SEQ ID NO: 512319 - DNA, 120 bp, Artificial Sequence
  ENSG00000164484_18 (sequence is synthesized)
ataggttgcttgtgccccaagttgccatcaaaaaggactttaccaataaggagaagcttcttatgatttcaagatctcacaataatttgagttttgaacatgatgagtttttgagtaaca

SEQ ID NO: 512320 - DNA, 120 bp, Artificial Sequence
  ENSG00000164484_19 (sequence is synthesized)
acctaaagaggggaacttctgaaacaaggttttaatgttaaaagaatatatcattttacaagggtatatattttaaaacgattttcactggtgtttccttcttaaagtattggctgtaag

SEQ ID NO: 512321 - DNA, 120 bp, Artificial Sequence
  ENSG00000164484_20 (sequence is synthesized)
cctttttaatcaaatggtttgtagtgtattagaattggctgcttagttctgtaatgaagatggttgtatgtttgggttacttgtgactgcagtactctatgttaccacacatgattttat

SEQ ID NO: 512322 - DNA, 120 bp, Artificial Sequence
  ENSG00000164484_21 (sequence is synthesized)
ttttctcttcctttgaaagcatgatctcttttattaatatgaatgcaaaatgcttgcatccaaattaaagcttattttctttacttttaagttctttgattgccctattcataaaatgaa

SEQ ID NO: 512323 - DNA, 120 bp, Artificial Sequence
  ENSG00000164484_22 (sequence is synthesized)
atgtccagtatggaaaacatagggtaccaaagtgtggaccaggagtacaaattcagtcccaatactcaatacgtattatagatgactatgagtgcaaaccttaggatgtgattttctgaa

SEQ ID NO: 512324 - DNA, 120 bp, Artificial Sequence
  ENSG00000164484_23 (sequence is synthesized)
taattgttctttgtaggatttggttacattatttaaaatgaaaaagatctagttttagtgtgagctcagtaatgttaattggttaagttcattgtgaatcttgagttttagataagtagt

SEQ ID NO: 512325 - DNA, 120 bp, Artificial Sequence
  ENSG00000164484_24 (sequence is synthesized)
tatttttttcaatatcacttctgtttttagtgatattatatcaagaaacaacgtattcaagagccatggctgacagtgccagatatacttagggataaacatcaaaatgcaattatagtt

SEQ ID NO: 512326 - DNA, 120 bp, Artificial Sequence
  ENSG00000164484_25 (sequence is synthesized)
gctataacgttagatactcggaatcaaaatttatttgcaagctgacttgataaactaaatgaaccaataaaatttgtagaaatgctatcctgaaataattatatacatgaagacaatgtt

SEQ ID NO: 512327 - DNA, 120 bp, Artificial Sequence
  ENSG00000164484_26 (sequence is synthesized)
gactaatgaattaagatacattatatactagttaatgctaactagtctcagtacctgtttttagccatctgttactgtccaatagcacctcattcccacattctattttcccccggtatt

SEQ ID NO: 512328 - DNA, 120 bp, Artificial Sequence
  ENSG00000164484_27 (sequence is synthesized)
ctttagatcctagtatttggaaaacaatcggctaaccttgacatttctttttaccttcatatgccactatctcggtagttcaaaaaaatttagttcttgataaattgccttgaagtttac

SEQ ID NO: 512329 - DNA, 120 bp, Artificial Sequence
  ENSG00000164484_28 (sequence is synthesized)
cttgtgctggagagccttatgataactccaaagactttcttacggtataatacatgttgtttaggattgtgtttcttagtcactgaagataataaatattaaaatggatgttttcatcag

SEQ ID NO: 512330 - DNA, 120 bp, Artificial Sequence
  ENSG00000164484_29 (sequence is synthesized)
gcaagcatttaggaatagcatttgccaactcccaagacttggctgtccctctcgctctggccttacttacctaactgacctcctgtagtactgagttgtgtgctggccaagttcctattc

SEQ ID NO: 512331 - DNA, 120 bp, Artificial Sequence
  ENSG00000164484_30 (sequence is synthesized)
ctggactgctttctttcccttgaccttccttgaaatactgctaacctgacttttgactgtgatctatgtgctatctcctgtgtgaagcctaatgaaaggtccttctctaatggaaacttt

SEQ ID NO: 512332 - DNA, 120 bp, Artificial Sequence
  ENSG00000164484_31 (sequence is synthesized)
cattctaggagttacctcattctgttttatgtggatctgttagctccttcattaggtttcaagctgtttgaaacagtgattgaatttgctcacctttgctttcctctcagggtctacatt

SEQ ID NO: 512333 - DNA, 120 bp, Artificial Sequence
  ENSG00000164484_32 (sequence is synthesized)
gggaccctgagtgataatagagccttctgtagtattgaattgctttaaacagaattaaaggacattggcaccaaatgtgattttgccaatccttgggagtcttggtgcctctgtctgggc

SEQ ID NO: 512334 - DNA, 120 bp, Artificial Sequence
  ENSG00000164484_33 (sequence is synthesized)
ttgaccagggtagaatggctgaagaaaatgtgattcctccacccattaaattctttatttctcaactactctggaagtttttgcctctttttgtttctatccattttcatacttttaaga

SEQ ID NO: 512335 - DNA, 120 bp, Artificial Sequence
  ENSG00000164484_34 (sequence is synthesized)
tacccttttttactttaagataccttttttcttcctaacgtttctttacatgctcacatgcaagcccagtcatccatctctctttttcacctttctgtcctcatatatttttcttaaaat

SEQ ID NO: 512336 - DNA, 120 bp, Artificial Sequence
  ENSG00000164484_35 (sequence is synthesized)
atcttttctcatctaatctcctttcctctatcaatcagcctcctaagcgaaaatggtagtgctaatgttttaaaaagtgggggaggactagaaatctgtatggaatgtaattcactttta

SEQ ID NO: 512337 - DNA, 120 bp, Artificial Sequence
  ENSG00000164484_36 (sequence is synthesized)
ttgcttttaaattaaatgaaacgtttttgcccttgtttccattctactcagaaggatttcagactaaatccttaagcctgccatatggaaataactgggctagagggctgctatctaatc

SEQ ID NO: 512338 - DNA, 120 bp, Artificial Sequence
  ENSG00000164484_37 (sequence is synthesized)
taagcatttaattcaaacatttgaaatggtttttgcttcaagaaaacataggttgacactaagctttattttagcaaaggtttgggaaaggttctaatctgcagtatgtacactttgata

SEQ ID NO: 512339 - DNA, 120 bp, Artificial Sequence
  ENSG00000164484_38 (sequence is synthesized)
aatttcatagactagagcaacagattacaatttagtttgttcttccaacataaaactattttaatcctagttataatttcactgaaggctggatttactcactggcttgttaaaactgta

SEQ ID NO: 512340 - DNA, 120 bp, Artificial Sequence
  ENSG00000164484_39 (sequence is synthesized)
gataacaaccacaagcctgttatttaaacacaattcagaaatcataaatagaaattcaaaaggagagctcaatgctgcaagatgagatttgatgccctgaagaaactctctctgaaattt

SEQ ID NO: 512341 - DNA, 120 bp, Artificial Sequence
  ENSG00000164484_40 (sequence is synthesized)
gccaaagaccttgtggaacttaaaatatcttcttgtttcctaccagctagatatggcagcttgagaactatttattatgaatcaagatagatattttaccaactcagaaaatgttgcttt

SEQ ID NO: 512342 - DNA, 120 bp, Artificial Sequence
  ENSG00000164484_41 (sequence is synthesized)
ttgtttggatattaatcttgtttgttcatatttttaactaggaaagttagtacagtaatatggtggtcatccaacagaccacaagaagagaatttgtccctcattcagcattttagcaaa

SEQ ID NO: 512343 - DNA, 120 bp, Artificial Sequence
  ENSG00000164484_42 (sequence is synthesized)
tatttcttgaacactagccatgtgcaaggtattacagtgagtgtttctgctaataaaaatatgaattaaatttgatgtttgatcataagtagaagaactgtgatactataatattgtaag

SEQ ID NO: 512344 - DNA, 120 bp, Artificial Sequence
  ENSG00000164484_43 (sequence is synthesized)
tgccatagaaaacttgctattataaaatgctgtaaggagttaatgcttgcatagggtgcagtgggtcagctagagaaggctttataaagaaagtggaatatgagctttgatgcctagcca

SEQ ID NO: 512345 - DNA, 120 bp, Artificial Sequence
  ENSG00000164484_44 (sequence is synthesized)
gatgtgggtatgtgaagaacagggcagggcagtggggagtgggtggattctggacagctgaaacattgttaacaaaatctcagaaatggtacaaaatggaatatgaatgagaaatacaga

SEQ ID NO: 512346 - DNA, 120 bp, Artificial Sequence
  ENSG00000164484_45 (sequence is synthesized)
acatttgttaggttttatttttatgcaaattaaagagaagagttagagacaaagttaaagtcaatgggtctagaatttcagctaaaactttggtaggtagtggagaatattttatcatta

SEQ ID NO: 512347 - DNA, 120 bp, Artificial Sequence
  ENSG00000164484_46 (sequence is synthesized)
ttctgctctttaaacaacttcagagatgattgattaatcttgattgtaaaggaagagaaattctttggaagaccagttagggggttatcatatggtctagtaaaagttaataagatctgc

SEQ ID NO: 512348 - DNA, 120 bp, Artificial Sequence
  ENSG00000164484_47 (sequence is synthesized)
acaaggctgggaagagtaggattagaacagaggggtggaattaaaggacatcgtatattggaaatttctaggatttagaacctgattggaagaggaagaagaaagggaggagttaaaaat

SEQ ID NO: 512349 - DNA, 120 bp, Artificial Sequence
  ENSG00000164484_48 (sequence is synthesized)
cagctcagtggctctcaaacctcagcaggcatcagaatcacctggaggacttatgaaaccagtttgctgggcccgcttggtccagcgcttctgattcagtagggagaagtggaaccatga

SEQ ID NO: 512350 - DNA, 120 bp, Artificial Sequence
  ENSG00000164484_49 (sequence is synthesized)
atttgcattcccgacaagctcacaggttataccagtgttgctggcccgaggattgtattttgggcagcattactccatctgaactcttcttgttctcttacctccttacgtcccaagact

SEQ ID NO: 512351 - DNA, 120 bp, Artificial Sequence
  ENSG00000164485_0 (sequence is synthesized)
ctcactttaccactactcgctatagagccctggtcaagttctctccacctctctatctatgtctcagtttcttcatctgtaacatcaaatgaataataataccaatctcctagacttcat

SEQ ID NO: 512352 - DNA, 120 bp, Artificial Sequence
  ENSG00000164485_1 (sequence is synthesized)
aagaggattaacaaagacaaaatatgggaaaaacataacatggcgtcccataattattagatcttattattgacactaaaatggcattaaaattaccaaaaggaagacagcatctgtttc

SEQ ID NO: 512353 - DNA, 120 bp, Artificial Sequence
  ENSG00000164485_2 (sequence is synthesized)
ctctttggtcctgagctggttaaaaggaacactggttgcctgaacagtcacacttgcaaccatgatgcctaaacattgctttctaggcttcctcatcagtttcttccttactggtgtagc

SEQ ID NO: 512354 - DNA, 120 bp, Artificial Sequence
  ENSG00000164485_3 (sequence is synthesized)
aggaactcagtcaacgcatgagtctctgaagcctcagagggtacaatttcagtcccgaaattttcacaacattttgcaatggcagcctgggagggcacttactggcaacagcagtgtcta

SEQ ID NO: 512355 - DNA, 120 bp, Artificial Sequence
  ENSG00000164485_4 (sequence is synthesized)
ttttgtgcagtacaaaatatatggacagagacaatggaaaaataaagaagactgttggggtactcaagaactctcttgtgaccttaccagtgaaacctcagacatacaggaaccttatta

SEQ ID NO: 512356 - DNA, 120 bp, Artificial Sequence
  ENSG00000164485_5 (sequence is synthesized)
cgggagggtgagggcggcctcggctgggagctactcagaatggagcatgacgccgcggttcactccctggtgggaaacaaaaatagatcctccagtcatgaatataacccaagtcaatgg

SEQ ID NO: 512357 - DNA, 120 bp, Artificial Sequence
  ENSG00000164485_6 (sequence is synthesized)
ctctttgttggtaattctccatgctccaaatttaccatatagataccaaaaggaaaaaaatgtatctatagaagattactatgaactactataccgagtttttataattaacaattcact

SEQ ID NO: 512358 - DNA, 120 bp, Artificial Sequence
  ENSG00000164485_7 (sequence is synthesized)
agaaaaggagcaaaaggtttatgaaggggctcacagagcggttgaaattgaagctctaacaccacactccagctactgtgtagtggctgaaatatatcagcccatgttagacagaagaag

SEQ ID NO: 512359 - DNA, 120 bp, Artificial Sequence
  ENSG00000164485_8 (sequence is synthesized)
tcagagaagtgaagagagatgtgtggaaattccatgacttgtggaatttggcattcagcaatgtggaaattctaaagctccctgagaacaggatgactcgtgtttgaaggatcttattta

SEQ ID NO: 512360 - DNA, 120 bp, Artificial Sequence
  ENSG00000164485_9 (sequence is synthesized)
aaattgtttttgtattttcttaaagcaatattcactgttacaccttggggacttctttgtttatccattcttttatcctttatatttcatttgtaaactatatttgaacgacattccccc

SEQ ID NO: 512361 - DNA, 120 bp, Artificial Sequence
  ENSG00000164485_10 (sequence is synthesized)
cgaaaaattgaaatgtaaagatgaggcagagaataaagtgttctatgaaattcagaactttatttctgaatgtaacatccctaataacaaccttcattcttctaatacagcaaaataaaa

SEQ ID NO: 512362 - DNA, 120 bp, Artificial Sequence
  ENSG00000164485_11 (sequence is synthesized)
aatttttttaaaatagcattacagactgaggcggtcctgaagcaatggtttttcactctcttattgagccaattaaattgacattgctttgacaatttaaaacttctataaaggtgaata

SEQ ID NO: 512363 - DNA, 80 bp, Artificial Sequence
  ENSG00000164485_12 (sequence is synthesized)
gaatcaaaattttgttttaaagtctactttatgtaaataagaacaggttttggggaaaaaaatcttatgatttctggatt

SEQ ID NO: 512364 - DNA, 120 bp, Artificial Sequence
  ENSG00000164485_13 (sequence is synthesized)
tttggggaaaaaaatcttatgatttctggattgatatctgaattaaaactatcaacaacaaggaagtctgctctgtacaattgtccctcatttaaaagatatattaagcttttcttttct

SEQ ID NO: 512365 - DNA, 120 bp, Artificial Sequence
  ENSG00000164485_14 (sequence is synthesized)
gtttgtttttgttttgtttagtttttaatcctgtcttagaagaacttatctttattctcaaaattaaatgtaatttttttagtgacaaagaagaaaggaaacctcattactcaatccttc

SEQ ID NO: 512366 - DNA, 120 bp, Artificial Sequence
  ENSG00000164485_15 (sequence is synthesized)
tggccaagagtgtcttgcttgtggcgccttcctcatctctatataggaggatcccatgaatgatggtttattgggaactgctggggtcgaccccatacagagaactcagcttgaagctgg

SEQ ID NO: 512367 - DNA, 120 bp, Artificial Sequence
  ENSG00000164485_16 (sequence is synthesized)
aagcacacagtgggtagcaggagaaggaccggtgttggtaggtgcctacagagactatagagctagacaaagccctccaaactggcccctcctgctcactgcctctcctgagtagaaatc

SEQ ID NO: 512368 - DNA, 120 bp, Artificial Sequence
  ENSG00000164485_17 (sequence is synthesized)
tggtgacctaaggctcagtgtggtcaacagaaagctgccttcttcacttgaggctaagtcttcatatatgtttaaggttgtctttctagtgaggagatacatatcagagaacatttgtac

SEQ ID NO: 512369 - DNA, 120 bp, Artificial Sequence
  ENSG00000164485_18 (sequence is synthesized)
aattccccatgaaaattgctccaaagttgataacaatatagtcggtgcttctagttatatgcaagtactcagtgataaatggattaaaaaatattcagaaatgtattggggggtggagga

SEQ ID NO: 512370 - DNA, 120 bp, Artificial Sequence
  ENSG00000164485_19 (sequence is synthesized)
gaataagaggcagagcaagagctagagaattggtttccttgcttccctgtatgctcagaaaacattgatttgagcatagacgcagagactgaaaaaaaaatttactttgatctctgtttt

SEQ ID NO: 512371 - DNA, 120 bp, Artificial Sequence
  ENSG00000164485_20 (sequence is synthesized)
tgaattcttattatttatattttgcttactaccttttttgccttttgtccttttgtggagagggcgatgaattaagagtagtggggtgggtggcgagtaagtaaaatttcaaatagcatt

SEQ ID NO: 512372 - DNA, 120 bp, Artificial Sequence
  ENSG00000164485_21 (sequence is synthesized)
ttagtgaatgcaattcagtagtcctgaagcctgacttaataaaacaaaattcatttatggttgtttcatgaaagttattagataggatcaagttttgtttgtatattgtttgccttgctc

SEQ ID NO: 512373 - DNA, 120 bp, Artificial Sequence
  ENSG00000164485_22 (sequence is synthesized)
tgtttttgcttttgtgcttaggcaagtgcaaaatactctatggaaatcataattgtcatcttcttcatggtgttagggatatattgtcacatgatttcaataaatcctttttttgcttta

SEQ ID NO: 512374 - DNA, 120 bp, Artificial Sequence
  ENSG00000164485_23 (sequence is synthesized)
gtgcagtacaaaatcatgttctcatgcagcatgaaaagctctcaccagaagccaagtggatgctggcagcacatttcttgtaacttcccaggctgcagaacattggctaaatatggacag

SEQ ID NO: 512375 - DNA, 120 bp, Artificial Sequence
  ENSG00000164488_0 (sequence is synthesized)
agattccagcccaccttggcgacctgcggagccgggggcggagagaggaggcgcaggaggacccgcgacacagctcgggatccgcgcgcgctgggcctccggcgccgctcgtggggttcg

SEQ ID NO: 512376 - DNA, 80 bp, Artificial Sequence
  ENSG00000164488_1 (sequence is synthesized)
ggaggccgggaccctgcccgggagatgtggacgccgggcggacccccggggtccgcgggctgggaccgccgtaggttggg

SEQ ID NO: 512377 - DNA, 80 bp, Artificial Sequence
  ENSG00000164488_2 (sequence is synthesized)
ctgcaggagctgcaggggctgcgagccacgcagcaggagcgggtacggggcgccctggccctgcagcccccgcccgcgcc

SEQ ID NO: 512378 - DNA, 120 bp, Artificial Sequence
  ENSG00000164488_3 (sequence is synthesized)
gcggcgctggccgcgctgcaggagcagctgtcccggctgagacaacaggacatcggcctgaagacccacctggaccagctggacctgcagattagcaagctgcagctggatgtgggcaca

SEQ ID NO: 512379 - DNA, 120 bp, Artificial Sequence
  ENSG00000164488_4 (sequence is synthesized)
gcctcaggggaggccctggacagcgacagcaggcccagctcaggcttttacgagatgagcgacggtggatcctgctccctgtccacgtcctgtgcctccgtctgcagtgaccacatctct

SEQ ID NO: 512380 - DNA, 120 bp, Artificial Sequence
  ENSG00000164488_5 (sequence is synthesized)
ccctcgctgggcagtttgttgcctgtggcccaggcccacaaggccaggcccagcatgggggactggaggccccggtcggttgatgagactactgtgccagcgtggagaccccaggctacc

SEQ ID NO: 512381 - DNA, 120 bp, Artificial Sequence
  ENSG00000164488_6 (sequence is synthesized)
gaggagggcgccaggcccccagggagcgtggaggatgcaggccagccgtggggcacattctggcccaggcctgtgtctacaggtgatcttgacagagccctgccggcggacacggggctc

SEQ ID NO: 512382 - DNA, 120 bp, Artificial Sequence
  ENSG00000164488_7 (sequence is synthesized)
cagaaagccagcgcggacgccgagctcctcgggctcctctgccagggggtggatatcccgctgcacgtgccggaccccaagtatcggcaggacctggtgtcccagggcggcagggaggtg

SEQ ID NO: 512383 - DNA, 120 bp, Artificial Sequence
  ENSG00000164488_8 (sequence is synthesized)
tacccgtaccccagccccctgcacgccgtggctctacagagccccctgtttgtcctgactaaggaaaccccacagagaggtggcccctcgttccctagggagagccccaggggccccgca

SEQ ID NO: 512384 - DNA, 120 bp, Artificial Sequence
  ENSG00000164488_9 (sequence is synthesized)
ggtctgaacaccatccagactgggccggtcctcgaggctggcccggccagggccagagcttatatcgacaggttgctgcatctgtggggccgggagaccccagcaaagggtagcgaggga

SEQ ID NO: 512385 - DNA, 120 bp, Artificial Sequence
  ENSG00000164488_10 (sequence is synthesized)
gaacagggacctctaaggcatgcagcgtccccatctccacagaggcagggtggctggagtacagacggtggagggcgactgctggtcttcgccccagggagggaggacgagggagggcca

SEQ ID NO: 512386 - DNA, 120 bp, Artificial Sequence
  ENSG00000164488_11 (sequence is synthesized)
gctcagagcaggggtgccggcaggggcgggccccagcagcagggatacatgccccttgagggtccccagcagtctggcagccttccagaggagggctccaagccctcaaacagctgtgtc

SEQ ID NO: 512387 - DNA, 120 bp, Artificial Sequence
  ENSG00000164488_12 (sequence is synthesized)
tcaccggcctctgggcactttgcccacccatcctttgctgccagcctgaaaatgggtccccccaagagcaaggctgaaaaaatcaagagaagtcccatggacaaggtgctgaggtttgca

SEQ ID NO: 512388 - DNA, 120 bp, Artificial Sequence
  ENSG00000164488_13 (sequence is synthesized)
aggcagccgctgcttctactggacaggcctgagggagcccatgcagccccccagccatccctggagtgggaccctgcccactggcccacagggaggggcgggctccagcggaggccagcc

SEQ ID NO: 512389 - DNA, 120 bp, Artificial Sequence
  ENSG00000164488_14 (sequence is synthesized)
ctggcctgggaggcacccgggcgctcctgttctgagtccaccctctaccccatgcctgtcctcgtccccttggcagtggccccgcaggagagccaccggacctcagcccaagccctgttc

SEQ ID NO: 512390 - DNA, 120 bp, Artificial Sequence
  ENSG00000164488_15 (sequence is synthesized)
ccctttgaggcgtcactgctcacctcagtggccaggaggaagcatcgccgctggcagtccaccgtggagatctcggcccgggcccgcctggccagctgtcctgagtctaacctggggccc

SEQ ID NO: 512391 - DNA, 120 bp, Artificial Sequence
  ENSG00000164488_16 (sequence is synthesized)
cccaggcccgtggccaggagagcaggtggcccactggcccggggccgtccctcactggtccgccaggacgcctacaccaggagcgactcagagccctccaagcactcggccgagtgtgac

SEQ ID NO: 512392 - DNA, 120 bp, Artificial Sequence
  ENSG00000164488_17 (sequence is synthesized)
ccgcggttcccgtcagtcatcccggagaccagcgagggagagtccagtgaccacaccaccaaccgattcggagaccgtgagtccagcagcagcgacgaggagggcggcgcccagagcagg

SEQ ID NO: 512393 - DNA, 120 bp, Artificial Sequence
  ENSG00000164488_18 (sequence is synthesized)
gactgtgacctggcactgggctatgtggcggccgggcatgcggagctggcctggacccaggaggccccggtcagctcggggccactcctgtcccccgtgcccaagctgtgccgtattaag

SEQ ID NO: 512394 - DNA, 120 bp, Artificial Sequence
  ENSG00000164488_19 (sequence is synthesized)
gcctccaaggccctgaagaagaagatccgcaggttccagccgacggccctgaaggtcatgaccatggtgtgaggtgcagtgactgcgtcaagagaagcctgctgcacacaggggcccttt

SEQ ID NO: 512395 - DNA, 120 bp, Artificial Sequence
  ENSG00000164488_20 (sequence is synthesized)
ccatgcagtgtcctgtgcatgtctgggtttcagtgtcgtcttgccaagtcgctttatcttccgaggccaccgtttaacaggagtccccgcagatgggttctgccctgtggagtatggccg

SEQ ID NO: 512396 - DNA, 120 bp, Artificial Sequence
  ENSG00000164488_21 (sequence is synthesized)
tgagtccccgccccagcaaagacttccatgcggagctctggtttcagatgccagcagcctccccggccgacctagtgtctcttttcaaggtctgcccaggatgctgcttcccggcatgca

SEQ ID NO: 512397 - DNA, 120 bp, Artificial Sequence
  ENSG00000164488_22 (sequence is synthesized)
ccttgtttccatgttgtcatcctcccatggcttcccctgccctcactcccctctggctggggaagtgtttcccaatcctttgaccattcctccccaaaagcattttaaagaggcggttgc

SEQ ID NO: 512398 - DNA, 120 bp, Artificial Sequence
  ENSG00000164488_23 (sequence is synthesized)
aggactctgagctggaaattgaatttgagtttaaactccacgttaagctgtcagcatacacaaacacccaaattatgccatgatctcaaataaaaggaacattttttttccctcttttaa

SEQ ID NO: 512399 - DNA, 120 bp, Artificial Sequence
  ENSG00000164488_24 (sequence is synthesized)
ttcactgacaggtgtaggttctggtttgagaggaaagtgtggcctctgtggctgtcagctccctttctgctcagtgaacacaagttcaaagacaaaatcatcaggaatttcaagacagca

SEQ ID NO: 512400 - DNA, 120 bp, Artificial Sequence
  ENSG00000164488_25 (sequence is synthesized)
cctctgcccgccaagtcactctgctttccccacagtgagccagtgggagctgcagagaagtgtccagaaaggactgctggtcagtggaatttcctttacgtggaaagttgaagtgaggga

SEQ ID NO: 512401 - DNA, 120 bp, Artificial Sequence
  ENSG00000164488_26 (sequence is synthesized)
gtaatggacgtaagagagaatggtttctccctaacaaatagactggaaattccaatccttctactttctgtgtgtttttctagcatgactgcaagtgctggggccataagcaccatgttc

SEQ ID NO: 512402 - DNA, 120 bp, Artificial Sequence
  ENSG00000164488_27 (sequence is synthesized)
agcagcacccaggaagcaaaagtagttgacagaatgttagtgagcattccttcttgtttttatttttttttaaagccccttctatatttcataatttttgtgattttgggtaaatacaat

SEQ ID NO: 512403 - DNA, 120 bp, Artificial Sequence
  ENSG00000164488_28 (sequence is synthesized)
gttatcataagttaaggaaaagttaatctttttaggctaggaaaagttccagtttacgtgcatatatattattgcaaaatgatgtgaaaatttaatattttttgagataattgatatttt

SEQ ID NO: 512404 - DNA, 120 bp, Artificial Sequence
  ENSG00000164488_29 (sequence is synthesized)
tcattcactatgttaataagatgaatcatattaacaaaatgtccattgctaaaccaatcatgcattcataggatgaacaatgtttggttatggtgtttttgtttgtacttttaaatggta

SEQ ID NO: 512405 - DNA, 120 bp, Artificial Sequence
  ENSG00000164488_30 (sequence is synthesized)
cttaaacataattagggagaagatgagctccaaagcacctggcacagctccagcaggctcagctaatggccggtcttctcatttaccaaacccacgtggccaccccgacctcagacgaat

SEQ ID NO: 512406 - DNA, 120 bp, Artificial Sequence
  ENSG00000164488_31 (sequence is synthesized)
tttttttacaaagtccagacattcaattatttacaatgtgtctttttaggacactgccagaattaggttgtaaatttttttttaggattgtatcttatgttcatagaagaaattggccta

SEQ ID NO: 512407 - DNA, 120 bp, Artificial Sequence
  ENSG00000164488_32 (sequence is synthesized)
tgaaatttctttcatataatactcacatctggttttcatcccaaagctaaaccagcccataaaagcagctgtgatggttttcttcttcttatatttcaataaatggtatgtaaaagacag

SEQ ID NO: 512408 - DNA, 120 bp, Artificial Sequence
  ENSG00000164494_0 (sequence is synthesized)
atgcctccaatatggcgtcctccacataggcagtggctgtggtttctaccccgggtggccgggggcagtgctgagctgggactgttgtttgcccagcctgggctgcagaaagcagcagtt

SEQ ID NO: 512409 - DNA, 120 bp, Artificial Sequence
  ENSG00000164494_1 (sequence is synthesized)
aaagttcgtttctggtcactgctccaggaagccaccttactctgagggtcaagaattgccgcttccttttagttactgtaagttcctcctctgcccctggtttgtttcccgcggcacttc

SEQ ID NO: 512410 - DNA, 120 bp, Artificial Sequence
  ENSG00000164494_2 (sequence is synthesized)
tggatacccccaggtcccagacccttccagactcaaaccatgaactttcggcagctgctgttgcacttgccacgttatcttggagcctcgggttccccgcgtcgcctgtggtggtccccg

SEQ ID NO: 512411 - DNA, 120 bp, Artificial Sequence
  ENSG00000164494_3 (sequence is synthesized)
tccctcgacaccatctcctcggtgggctcttggcgtggtcggtcctccaagtccccggcccactggaatcaggtagtgtcagaggcggagaagatcgtggggtaccccacgtccttcatg

SEQ ID NO: 512412 - DNA, 120 bp, Artificial Sequence
  ENSG00000164494_4 (sequence is synthesized)
agccttcgctgcctgctgagcgacgagctcagcaacatcgctatgcaggtgcggaagctggtgggcactcagcaccctctgcttaccacagccagggggcttgtacatgacagctggaat

SEQ ID NO: 512413 - DNA, 120 bp, Artificial Sequence
  ENSG00000164494_5 (sequence is synthesized)
agcctccagttgaggggcttggtggtgctccttatctctaaagcagctgggcccagcagcgtgaacacttcatgtcagaactatgacatggtcagtgggatctactcatgtcaaagaagt

SEQ ID NO: 512414 - DNA, 120 bp, Artificial Sequence
  ENSG00000164494_6 (sequence is synthesized)
ttggcagagatcacggagctaattcatattgctctccttgtacatcgtgggatagtaaatttaaatgagttgcaatcatctgatggtccactgaaagacatgcaatttggaaataaaatt

SEQ ID NO: 512415 - DNA, 120 bp, Artificial Sequence
  ENSG00000164494_7 (sequence is synthesized)
gctatcctgagtggagactttcttctagcaaatgcctgcaatggactagctctgctacagaacaccaaggttgtggaacttttagcaagtgctcttatggacttggtacaaggagtatat

SEQ ID NO: 512416 - DNA, 120 bp, Artificial Sequence
  ENSG00000164494_8 (sequence is synthesized)
catgaaaattctacttcaaaggaaagttatatcacagatgatattggaatatcgacttggaaggagcagacttttctctcccatggtgccttactagcaaagagctgccaagctgcaatg

SEQ ID NO: 512417 - DNA, 120 bp, Artificial Sequence
  ENSG00000164494_9 (sequence is synthesized)
gaattagcaaagcatgatgctgaggttcagaatatggcatttcagtatgggaagcacatggccatgagtcataagataaattctgatgtccagccttttattaaagaaaagaccagtgac

SEQ ID NO: 512418 - DNA, 120 bp, Artificial Sequence
  ENSG00000164494_10 (sequence is synthesized)
tccatgacttttaatctaaactcagctcctgtagtcttacatcaggaatttcttggaagagatttgtggattaaacagatcggagaggctcaagaaaaaggaagattggactatgctaag

SEQ ID NO: 512419 - DNA, 120 bp, Artificial Sequence
  ENSG00000164494_11 (sequence is synthesized)
ttgcgagaaagaatcaaagctggcaaaggtgtgacttcagctattgacctgtgtcgttaccatggaaacaaggcactggaggccctggagagctttcctccctcggaggccagatctgct

SEQ ID NO: 512420 - DNA, 120 bp, Artificial Sequence
  ENSG00000164494_12 (sequence is synthesized)
ttagaaaacattgtgtttgctgtgaccagattttcatgacatcaaattaaaaagacactattgttagttagctgaaaatcctagggaatgaggttgattgggagcgctttcacgatgcgt

SEQ ID NO: 512421 - DNA, 120 bp, Artificial Sequence
  ENSG00000164494_13 (sequence is synthesized)
taatgacttttaaaacatatgcatttttccttccttttatcacattgctaaatgagttctgctttctttttggaactgctacaaacaaaattagaagaaaaaaaggtcaagcagttttca

SEQ ID NO: 512422 - DNA, 120 bp, Artificial Sequence
  ENSG00000164494_14 (sequence is synthesized)
cgctcctgtgacctcagcaaatggacaggaaataagtccttattgattggaccgagccagggatggcgccagggcggtggcctgtggtttttcctgctagagaggacaaagcaagttgga

SEQ ID NO: 512423 - DNA, 120 bp, Artificial Sequence
  ENSG00000164494_15 (sequence is synthesized)
agctgcaggtgtcaagagaaatgctctcaataccaaccagggaggattgtctaatcaaaaactagtgaccaatttgtcataatggagagtagttcaatggattgagaaaaatatgtttta

SEQ ID NO: 512424 - DNA, 86 bp, Artificial Sequence
  ENSG00000164494_16 (sequence is synthesized)
aatggagagtagttcaatggattgagaaaaatatgttttatttgttggcttgtaattatgtctctggattattattattttttttt

SEQ ID NO: 512425 - DNA, 83 bp, Artificial Sequence
  ENSG00000164494_17 (sequence is synthesized)
tgcacctggcctcatgtctctggatttataatgcagtatgaatatactttgtgctttatggtttttataatgtctttttggag

SEQ ID NO: 512426 - DNA, 120 bp, Artificial Sequence
  ENSG00000164494_18 (sequence is synthesized)
atactttgtgctttatggtttttataatgtctttttggagaaattgccgaaaagttgccaaatacttgaagtaggagattaaaatgttatcaaatgttaaattggttatattaggaatag

SEQ ID NO: 512427 - DNA, 120 bp, Artificial Sequence
  ENSG00000164494_19 (sequence is synthesized)
tctgtttttctttcctgaagatcagtttttttattcaaacacatttcaaagaaccaaattttttttttctttaaggaaaaaggagctttttttcaagtgaaatgtattcatttgtaatac

SEQ ID NO: 512428 - DNA, 120 bp, Artificial Sequence
  ENSG00000164494_20 (sequence is synthesized)
tttggtttaaggcatactttaatttttacgagtttcagaaacagaatttttgtactagggaattcattggtgagagtgttcttttaacctcagaatgtcaaattttggtcttgaaccaca

SEQ ID NO: 512429 - DNA, 120 bp, Artificial Sequence
  ENSG00000164494_21 (sequence is synthesized)
gacatccaattacagaaagaatataagcaatctcacaggcctgcaatcggacactgtctctgtgtggttcataggagatgatttttgaggtttgcactcatgcaatttgagaacaccgtt

SEQ ID NO: 512430 - DNA, 120 bp, Artificial Sequence
  ENSG00000164494_22 (sequence is synthesized)
gacaagaaggctgagtttacataaatgatctagattgaaactcagctacctttcttcctcatgtggtgtaattacagccctatctggagacagcgaatacagcaaacagattttattacc

SEQ ID NO: 512431 - DNA, 120 bp, Artificial Sequence
  ENSG00000164494_23 (sequence is synthesized)
tagttcgctcaaacactacatgaagttattttagttaaagccctcccccaaaagttataaaaccattttatcagggcccaacatgtggcatgcaatgaagagaaaatgtaaagctacaga

SEQ ID NO: 512432 - DNA, 120 bp, Artificial Sequence
  ENSG00000164494_24 (sequence is synthesized)
ggttaatgtattgtattataaaatattttaagtgtactcaaaatatcataattgtacagtttatgccaccataatttgaggcctatagatttagcttaagagaacactgttctgtttgaa

SEQ ID NO: 512433 - DNA, 120 bp, Artificial Sequence
  ENSG00000164494_25 (sequence is synthesized)
atgctttctgtcactgaaattggcttaattagtaaccatggataagatgctttagatcagactaggttttaatcattaacttccacaaagaagtcatactttgcgttaggtgtgctggtt

SEQ ID NO: 512434 - DNA, 120 bp, Artificial Sequence
  ENSG00000164494_26 (sequence is synthesized)
ggatgtgcaggaacttcagcaagcagtaggttttactaagcagatggtcgggcactgcagggcaccaggcaggatcctagggcgcctcttattctgcgttagcatctggtttgctgtatg

SEQ ID NO: 512435 - DNA, 120 bp, Artificial Sequence
  ENSG00000164494_27 (sequence is synthesized)
accttgcacaagtcacttccttctgagcctcaattttctcatctgtacaatgagattcaaaagttgacctgaaagtcaagtgtgaaaaaaaaaaagagattaaacaagataattatgaaa

SEQ ID NO: 512436 - DNA, 120 bp, Artificial Sequence
  ENSG00000164494_28 (sequence is synthesized)
tgcaatggactagctctgctacagaacaccaagtcattttcatttaatggacctattgctatatatcagatgggagactgtgagtcagcctggatcttgtctaaacacccaagagcattg

SEQ ID NO: 512437 - DNA, 120 bp, Artificial Sequence
  ENSG00000164494_29 (sequence is synthesized)
tcatgatgtcactcctggaggttgttctattaagcattagtgatttatacttccggataaccagtggcacagatgtactctttacatagctgatgtatttccttatgttaactttgtttt

SEQ ID NO: 512438 - DNA, 120 bp, Artificial Sequence
  ENSG00000164494_30 (sequence is synthesized)
cctaaaggcgtaaatatgttgtttaaaatgaagtattttgtttgtacaaatatgctcaatttatgcatataaatctccctttacaccatctatatagtttaataaagatgctattgtcta

SEQ ID NO: 512439 - DNA, 120 bp, Artificial Sequence
  ENSG00000164500_0 (sequence is synthesized)
gaattatcagaaatactttatagttatcaaaaattctaaagaaaaaggccatggatgtagaaattcaggacacacctggaaagataagtatctctaaaaggtccatcctttcaggaactg

SEQ ID NO: 512440 - DNA, 120 bp, Artificial Sequence
  ENSG00000164500_1 (sequence is synthesized)
ttgagaatatagattacccacactattgtgatctcttaagaaaaatgaacatgccttttgtgaaaggtcttgagaacagacataactatggcaggtttgaaaagaaatgcaaccctgctt

SEQ ID NO: 512441 - DNA, 120 bp, Artificial Sequence
  ENSG00000164500_2 (sequence is synthesized)
ttcttaaatttcacccttatcccccttcagttttgccagactatcatttacatgatccttatcccccaccatatgggccacattatccattatttccacttcgggatgatgtgaccttag

SEQ ID NO: 512442 - DNA, 120 bp, Artificial Sequence
  ENSG00000164500_3 (sequence is synthesized)
gtgattcctgttcagggtttatgagtcctggtggtgatgctgatttaaatcctggcattggcagaaccataccaaccctagtggattttagtgatgtgaaacctcaacatcgagttccca

SEQ ID NO: 512443 - DNA, 120 bp, Artificial Sequence
  ENSG00000164500_4 (sequence is synthesized)
gaccagacacaggatttcaaacaacaataaaaaggcaaaaaattctatcagaagaactgcaacagaacaggagatggaattccagggaagtaccagacatttctatcagagcaagacttg

SEQ ID NO: 512444 - DNA, 120 bp, Artificial Sequence
  ENSG00000164500_5 (sequence is synthesized)
gaggttggacaagccctctgaaagttactcccttacaacctcatcatgaaggacgctcattaagtcacatatttacatttgatgaggaggcaacatgtacagatgaaggtgaaccacttg

SEQ ID NO: 512445 - DNA, 120 bp, Artificial Sequence
  ENSG00000164500_6 (sequence is synthesized)
ttcaaacaaacaagaaatgtaatgcaaaggactcattttacaagtcctctacacaaaaagcttatgaagatgttccttgggataagatgctaccaccaaaacttgttccagaagaaacaa

SEQ ID NO: 512446 - DNA, 120 bp, Artificial Sequence
  ENSG00000164500_7 (sequence is synthesized)
cattggaaaaaaccgctgaccccatctcacagtgttttactctgaaaagatataaaggggtgccagcaataactcagatggttggtgagctctgggacagatttcaaacaagatctttct

SEQ ID NO: 512447 - DNA, 120 bp, Artificial Sequence
  ENSG00000164500_8 (sequence is synthesized)
ccttgggagacatcgcatcgctagccaagcagcggtactctaagcctctttatacaaacacaagtcgtgctgcaaatattccaggatataccggcaaggttcatttcacagccacccacc

SEQ ID NO: 512448 - DNA, 120 bp, Artificial Sequence
  ENSG00000164500_9 (sequence is synthesized)
cagcaaattctaatattccatcaacaaccccatcaccagattcagaactgcaccgcgtcttccagaaagaaatggcagttgacctcttccgtcaccaggctcccctgtctcgactggtca

SEQ ID NO: 512449 - DNA, 120 bp, Artificial Sequence
  ENSG00000164500_10 (sequence is synthesized)
caactgtgagaccctacaaccctttcaacaagaaggacaaagaaaccatagactactagaggaggcggccctgcgcgggctgtccaggcctccgcctggggaaggcttgtgcggcggtgg

SEQ ID NO: 512450 - DNA, 120 bp, Artificial Sequence
  ENSG00000164500_11 (sequence is synthesized)
gaaataaaggctgcttctccgcgctgcgcagtgtggtgggttcggtgctgttctccgctggcctgcgcgtccctgcccagcccgcctctctcccccggcaggcggcgctcagctggacac

SEQ ID NO: 512451 - DNA, 120 bp, Artificial Sequence
  ENSG00000164500_12 (sequence is synthesized)
tgggcgcccgccagccgcggcgcagactcccaagccgccggcagcagggtagcagggcctgtgttgcagaagattcctctttagggttggaatattgggtctacctagaggtttcacatg

SEQ ID NO: 512452 - DNA, 120 bp, Artificial Sequence
  ENSG00000164500_13 (sequence is synthesized)
gcaccacttcagtgcagggattctagagcagagagcagaccatagattttagaatctcaaaggcagtctagtcaaaaatccgtatgctgtcagtgggaaccctgagctactgagaaagtg

SEQ ID NO: 512453 - DNA, 120 bp, Artificial Sequence
  ENSG00000164500_14 (sequence is synthesized)
cgttcttcttttctagcaggggacatcacacaaggggacaacatctaccctctcttggcctgctccagtgtttccttcagagagaagtgttccccagtccccatgagggtcctgaagtct

SEQ ID NO: 512454 - DNA, 120 bp, Artificial Sequence
  ENSG00000164500_15 (sequence is synthesized)
aagtcaggaccactttgggttagagtgtggcctgacccggccttgaccaaagagagcaccagctcgcagaatctctcaggggtgcatgtgggctgagggggagccctctggccttcggaa

SEQ ID NO: 512455 - DNA, 120 bp, Artificial Sequence
  ENSG00000164506_0 (sequence is synthesized)
actcctccgtttccgcggtcgaagctgccttcggccccgggtggtctcccccgcccggggaccccctgtgcctcccctcccgggctgcgggggagcccctccgagaccatgaggaaattc

SEQ ID NO: 512456 - DNA, 120 bp, Artificial Sequence
  ENSG00000164506_1 (sequence is synthesized)
aacatcaggaaggtgctggacggcctgaccgccggctcgtcctcggcgtcgcagcagcaacagcagcagcatccgcctgggaaccgggagccggagatccaggaaacgctccagtccgag

SEQ ID NO: 512457 - DNA, 120 bp, Artificial Sequence
  ENSG00000164506_2 (sequence is synthesized)
cactttcagctctgcaagactgttcgccatggatttccctatcaaccctcagccctggcctttgatcctgtacagaagatcctggcagtgggaactcagactggtgctttaaggctcttt

SEQ ID NO: 512458 - DNA, 120 bp, Artificial Sequence
  ENSG00000164506_3 (sequence is synthesized)
ggtcgtccaggagtagaatgttattgccagcatgacagtggagctgcagtaatccagctccagttcctgattaatgagggagcgcttgtgagtgccttggctgatgacaccttacactta

SEQ ID NO: 512459 - DNA, 120 bp, Artificial Sequence
  ENSG00000164506_4 (sequence is synthesized)
tggaatttacgtcagaagaggcctgccatactacattcgcttaaattttgcagagaaagggttacattttgccatctgcctttccagagtaagtggctctatgtgggcactgaacgaggt

SEQ ID NO: 512460 - DNA, 120 bp, Artificial Sequence
  ENSG00000164506_5 (sequence is synthesized)
aatatacatattgtcaatgtggagtccttcacactctcaggctacgtcattatgtggaataaagccattgaactgtcatctaaatctcacccaggacctgtggtccatataagtgataat

SEQ ID NO: 512461 - DNA, 120 bp, Artificial Sequence
  ENSG00000164506_6 (sequence is synthesized)
ccaatggacgagggaaagcttttgattggctttgaatctggaacagtagttttatgggacctcaaatcaaagaaagccgactacagatacacatatgatgaggctatccactctgttgct

SEQ ID NO: 512462 - DNA, 120 bp, Artificial Sequence
  ENSG00000164506_7 (sequence is synthesized)
tggcatcatgaaggaaaacaatttatttgcagtcattcagatggcaccttgactatatggaatgtaaggtcccctgctaaaccagtacagacaatcactccacatggaaaacagttaaag

SEQ ID NO: 512463 - DNA, 120 bp, Artificial Sequence
  ENSG00000164506_8 (sequence is synthesized)
gatgggaagaagccagaaccatgcaaacctatcctcaaggtggaattcaaaacgactagatctggggagccttttattattttatcaggaggtttgtcatatgatactgtaggaagaaga

SEQ ID NO: 512464 - DNA, 120 bp, Artificial Sequence
  ENSG00000164506_9 (sequence is synthesized)
ccttgcttaacagtgatgcatgggaaaagcactgctgtgctagaaatggactattcaattgttgattttctaacgctgtgtgaaacaccatacccaaatgattttcaagaaccatatgct

SEQ ID NO: 512465 - DNA, 120 bp, Artificial Sequence
  ENSG00000164506_10 (sequence is synthesized)
gtggttgttcttctagaaaaggatttagtacttatagaccttgcacaaaatggatatcctatatttgaaaatccctaccctttgagtatacatgagtcccctgttacatgttgcgaatat

SEQ ID NO: 512466 - DNA, 120 bp, Artificial Sequence
  ENSG00000164506_11 (sequence is synthesized)
tttgcggattgtcctgtggaccttattcctgcactttattctgttggagctagacagaaacgtcaaggttacagcaaaaaggaatggcccatcaacggaggtaattggggcttgggtgct

SEQ ID NO: 512467 - DNA, 120 bp, Artificial Sequence
  ENSG00000164506_12 (sequence is synthesized)
caaagttacccagaaataattattacagggcatgctgatgggtcagttaagttctgggatgcttctgcaataactctacaagtattatataagctaaagacatctaaagtatttgaaaag

SEQ ID NO: 512468 - DNA, 120 bp, Artificial Sequence
  ENSG00000164506_13 (sequence is synthesized)
tcaagaaataaagatgacaggccaaacacagacattgtagatgaagatccatatgccattcagatcatctcctggtgtccagaaagtagaatgctgtgcatcgctggagtttcagctcat

SEQ ID NO: 512469 - DNA, 120 bp, Artificial Sequence
  ENSG00000164506_14 (sequence is synthesized)
gtcattatttatagattcagcaagcaggaagtaatcacagaagtcattccgatgcttgaagttcgattattatatgagataaatgatgtggaaactccggagggtgagcagccaccacct

SEQ ID NO: 512470 - DNA, 120 bp, Artificial Sequence
  ENSG00000164506_15 (sequence is synthesized)
ttgccaacacccgtgggagggtccaaccctcagcccatccctcctcagtctcatccatctaccagtagcagttcatctgatgggcttcgtgataatgtaccttgtttaaaagttaaaaac

SEQ ID NO: 512471 - DNA, 120 bp, Artificial Sequence
  ENSG00000164506_16 (sequence is synthesized)
tcaccacttaaacagtctccaggttatcaaacagaactagttattcagttggtttgggtgggtggagaaccaccacaacaaataaccagcctggcagtcaattcttcctatggactggtg

SEQ ID NO: 512472 - DNA, 120 bp, Artificial Sequence
  ENSG00000164506_17 (sequence is synthesized)
gtttttggcaattgcaatggcattgctatggttgactacctccagaaagcagtgctgctcaacctgggcactattgaattatatggctctaatgatccttatcggagagaaccccgatct

SEQ ID NO: 512473 - DNA, 120 bp, Artificial Sequence
  ENSG00000164506_18 (sequence is synthesized)
cctcgtaaatctcgacagccttcaggagccggtctgtgtgatattagtgaagggactgttgttccagaggatcgctgcaaatctccaacctctgcaaagatgtcaaggaagttaagctta

SEQ ID NO: 512474 - DNA, 120 bp, Artificial Sequence
  ENSG00000164506_19 (sequence is synthesized)
cctactgacctaaagcctgatttagatgtaaaggataactcctttagccgatcacggagttcaagtgtaacaagcattgacaaagaatcccgagaagcgatctccgctcttcatttctgt

SEQ ID NO: 512475 - DNA, 120 bp, Artificial Sequence
  ENSG00000164506_20 (sequence is synthesized)
gaaacgtttactcgaaagacggactcgtccccttccccttgtctatgggttggaacaacgctaggaacagtgcttgtcattgcactgaaccttcccccagggggagagcaaagacttctt

SEQ ID NO: 512476 - DNA, 120 bp, Artificial Sequence
  ENSG00000164506_21 (sequence is synthesized)
cagccagtaattgtgtctccaagtggtactatattgaggttaaaaggtgcaatcttgagaatggcatttctggataccacaggctgcttaataccacctgcgtatgaaccctggagagag

SEQ ID NO: 512477 - DNA, 120 bp, Artificial Sequence
  ENSG00000164506_22 (sequence is synthesized)
cacaatgttcctgaagaaaaagacgaaaaggagaaattgaaaaaacggcggcctgtctcagtatccccctcctcttctcaggaaattagtgaaaaccagtatgcagtgatatgttctgaa

SEQ ID NO: 512478 - DNA, 120 bp, Artificial Sequence
  ENSG00000164506_23 (sequence is synthesized)
aagcaagcaaaagtaatctcactgccaacccagaactgtgcttataagcaaaatattacagagacctcgtttgtgcttcgtggagatattgtagcattgagtaacagtatctgccttgcc

SEQ ID NO: 512479 - DNA, 120 bp, Artificial Sequence
  ENSG00000164506_24 (sequence is synthesized)
tgtttctgtgccaatggacatataatgacttttagtttgccaagtttaagacctctgttggatgtgtattacttgccccttaccaatatgcggatagccagaacgttctgctttaccaac

SEQ ID NO: 512480 - DNA, 120 bp, Artificial Sequence
  ENSG00000164506_25 (sequence is synthesized)
aatggacaagcattataccttgtttcacctacagaaatccagagacttacttatagtcaagagacctgtgaaaatcttcaggaaatgttgggtgaactcttcactcctgtagaaacacct

SEQ ID NO: 512481 - DNA, 120 bp, Artificial Sequence
  ENSG00000164506_26 (sequence is synthesized)
gaagcaccaaacaggggattctttaaaggcttatttggaggtggtgcacaatctcttgacagagaagaactatttggagaatcgtcctcaggaaaggcttcaaggagccttgcacagcat

SEQ ID NO: 512482 - DNA, 120 bp, Artificial Sequence
  ENSG00000164506_27 (sequence is synthesized)
attcctggccctggtggcattgaaggcgtaaaaggggcagcatctggagttgttggtgaattagcacgagccaggctggcactagatgaaagagggcagaaacttggcgatctggaagaa

SEQ ID NO: 512483 - DNA, 120 bp, Artificial Sequence
  ENSG00000164506_28 (sequence is synthesized)
agaactgcggccatgttatcaagtgcagagtcattttctaaacatgctcatgagattatgttgaaatacaaagataagaagtggtaccagttctgacaaccagaatccaataagtccaac

SEQ ID NO: 512484 - DNA, 120 bp, Artificial Sequence
  ENSG00000164506_29 (sequence is synthesized)
ttcagccagaaggaaaaaagttttccatttttattacattctttaggaaagttaacgttaaagggatgttcgtcactgaatactgttctttcctagcacagtcatgcactgttttacctc

SEQ ID NO: 512485 - DNA, 120 bp, Artificial Sequence
  ENSG00000164506_30 (sequence is synthesized)
agtcatgtggctttaactgaggagtgttcacacgcactcgaaatggagtatatggtgtgtgccagttatgagttgaccatttgggaattaaacaggtcacacgtgacagatgaagaaacc

SEQ ID NO: 512486 - DNA, 120 bp, Artificial Sequence
  ENSG00000164506_31 (sequence is synthesized)
aagggggctgctgaggagacctggtgcagggactaatcctggatcattcctgtattaaactttcatatgccaaaagggtttgtgccgttttatctgccatcagtgtttgacctgtttagg

SEQ ID NO: 512487 - DNA, 120 bp, Artificial Sequence
  ENSG00000164506_32 (sequence is synthesized)
gcagaggcaataagtcagaagtcttgaagttgaaatagttatatgtgtgtcattggactggattataaacagctgtcttggactttccctctcttaacactgactggtcatcagtatcat

SEQ ID NO: 512488 - DNA, 120 bp, Artificial Sequence
  ENSG00000164506_33 (sequence is synthesized)
tagtgaaaaagaaacaaattgtttgttatcatctctttagacagataagctgaatggtgggctttaaataataaaaacatacacatagttgacttgtgtatgagctactcttggattctt

SEQ ID NO: 512489 - DNA, 120 bp, Artificial Sequence
  ENSG00000164506_34 (sequence is synthesized)
gttattatagacttgtatttagttcatattttgtcaaaagcaaaacaagaagatacatcacttttcattgaaaagaaaagtgtagagcatgactgaattgctcatcattctgggagtttc

SEQ ID NO: 512490 - DNA, 120 bp, Artificial Sequence
  ENSG00000164506_35 (sequence is synthesized)
catgtagtggctatgcagtgtggaaagtgagaaaaacctccattgtggtgaggagaatacttcaatgtcccttgtccttgttctcattaattcagctaaaggtggatttgaccaaaataa

SEQ ID NO: 512491 - DNA, 120 bp, Artificial Sequence
  ENSG00000164506_36 (sequence is synthesized)
tgctggttaaatttgtagaaatgttgaaattggctgtgttttaaattttgcttgaatttttataaaatgtttaaccaaatgtacctttgcattctttaattaaaattgcttaaaaaaaaa

SEQ ID NO: 512492 - DNA, 120 bp, Artificial Sequence
  ENSG00000164506_37 (sequence is synthesized)
ctttcattatttcagtaaaatgctcagctcccttttcaaaatgccctttatttgctaactgttccaatacactcaggtgatgagccaattaaatgttagtgcacatgctatcgcatggaa

SEQ ID NO: 512493 - DNA, 120 bp, Artificial Sequence
  ENSG00000164506_38 (sequence is synthesized)
atattttgtgtagaaatatactataaatctgtacatatcctttcaaggttttaaaaaaccaaaaagaaaggaaaatatgtacactgtgataactaaattatttctgtattggaatataat

SEQ ID NO: 512494 - DNA, 120 bp, Artificial Sequence
  ENSG00000164506_39 (sequence is synthesized)
acaatttgagaccagcaatggacaatgaatgattgtttcatagaatagcattacgggcaggaaagaaaccacctagtagatctagaagtaagcaatctcagaatacagactaatctgaga

SEQ ID NO: 512495 - DNA, 120 bp, Artificial Sequence
  ENSG00000164506_40 (sequence is synthesized)
ttattattgattgttgttaaagcaacccagcaaaagcaaaatggaagcattaaaattaatgttaatgaaatttaaatattgtcttctataaaaaattcctttaaatgattttgttttttc

SEQ ID NO: 512496 - DNA, 120 bp, Artificial Sequence
  ENSG00000164506_41 (sequence is synthesized)
attaagagataatcagagcacaaattgatagtaaacaggatggttgtttttctattctatatgatcattaaaggaatatgtaggacatcttaactttttcatacagtctgttatgcatat

SEQ ID NO: 512497 - DNA, 120 bp, Artificial Sequence
  ENSG00000164506_42 (sequence is synthesized)
tttcctctacttttcattaataaagcttttatgtttacattttataacatgcactactagatgcaaaagtttacatcaaagtttactttaaatatcatttggtagggactaaatgtgtgt

SEQ ID NO: 512498 - DNA, 120 bp, Artificial Sequence
  ENSG00000164506_43 (sequence is synthesized)
gatagagataattgatcaagccaaaagaaatattttttaaataagcccttttcaaaagtttttgaatttatagaaagcaccaatgaataacatatttctgtttcgttaatgtcagctgcc

SEQ ID NO: 512499 - DNA, 120 bp, Artificial Sequence
  ENSG00000164506_44 (sequence is synthesized)
tgaacattcagcagtttataaattgcttaatttgtgttatctattatccagtaaacccatagttccatgatatgtcacaggaattgttaggtcctattttaaaggtacagttttgtgaat

SEQ ID NO: 512500 - DNA, 120 bp, Artificial Sequence
  ENSG00000164506_45 (sequence is synthesized)
gtcatcaataaaatcaacagttatggatttgaagaagttgggaaagcattatgtagattaatatactggttggttccctatctatgtggaaggtcatattagctgcaattatttaatttg

SEQ ID NO: 512501 - DNA, 120 bp, Artificial Sequence
  ENSG00000164506_46 (sequence is synthesized)
agctgcaattatttaatttgctgtgttattttgtgttatataacacaaatatatttgtatattaacttcatttttactgtcatttttcctgttgtatacaaaatgaactaatcttgtaat

SEQ ID NO: 512502 - DNA, 120 bp, Artificial Sequence
  ENSG00000164506_47 (sequence is synthesized)
tatacattagatggatttccaagattttgtaagaaaatcttaaatcagtgttttgagttatttaatttttaaattaatctacaaattatgcacaacaaactagagactcagttaggatta

SEQ ID NO: 512503 - DNA, 120 bp, Artificial Sequence
  ENSG00000164506_48 (sequence is synthesized)
gaaagcttaaagtatgtttgagtgtaggaaataagcttctcagagttatacttgattctgtctgtagataagagacagtctacagtaataactaacccagggaatttactgtaatttgag

SEQ ID NO: 512504 - DNA, 120 bp, Artificial Sequence
  ENSG00000164506_49 (sequence is synthesized)
aggtaacatctctatttttttctttttaaatacagaaagtaatagtcaccagcaagccacgatttcaggaaaactgactaaaaaaaaaagtcaaaatagaaaatatcagaaaaatgaaag

SEQ ID NO: 512505 - DNA, 120 bp, Artificial Sequence
  ENSG00000164506_50 (sequence is synthesized)
atttttgtgtgccctctccatatcctcattgtttttgttgcatttgtccttgactctaaaatcactgaagtattcatgattagtagtttgtaagtaggaagtggtttttctgtatgtacc

SEQ ID NO: 512506 - DNA, 120 bp, Artificial Sequence
  ENSG00000164506_51 (sequence is synthesized)
atatatccagttcatttcagttttcaaactaaaatccatatgtatttgctgagaaagttatttgaaatcttatattctgacaaattctgtacattacatccatttgaagttttgcatcat

SEQ ID NO: 512507 - DNA, 120 bp, Artificial Sequence
  ENSG00000164506_52 (sequence is synthesized)
cttaacacttttgctttgcatttcaattgtacaaagtgtttccaaaaaaatggttatagattcgactgagctattactaacttctccatttgattttttatggatgtgaaaaatgctgct

SEQ ID NO: 512508 - DNA, 120 bp, Artificial Sequence
  ENSG00000164506_53 (sequence is synthesized)
acttgtctatgttattatgtgtaagtatattacaatttaattaagtacaatagtttaaagaacgaagcaatttttttttttttggcttagaacttcttaattgtaggttcctctgaagcg

SEQ ID NO: 512509 - DNA, 120 bp, Artificial Sequence
  ENSG00000164506_54 (sequence is synthesized)
atttcatgtagatatgtgagtgttttaaacaagtctgaaagtgttacatacttttaggttacaggggtgctggggagacagctgaggaaaggaagaatatgtggaagacaccacggagtt

SEQ ID NO: 512510 - DNA, 120 bp, Artificial Sequence
  ENSG00000164506_55 (sequence is synthesized)
caaagttttaccctgagttctatcttccatgtatgttttgcttaaggcatttctcatgtgacattagaaaagctatatccaaaggtaaattttttgtggcaaagatttattttacacttt

SEQ ID NO: 512511 - DNA, 120 bp, Artificial Sequence
  ENSG00000164506_56 (sequence is synthesized)
aacttttgggattttatttgtttcagcaaaataaagagcactgaactttaaacttgaattttttctgcacttttttaggtaatgaaaactttttattatcatttaatccacattgctcag

SEQ ID NO: 512512 - DNA, 120 bp, Artificial Sequence
  ENSG00000164506_57 (sequence is synthesized)
tttaaaccaagtgatacatgtgtataaaacataccaaaatcatgaatatgctgctagctgtaccttaaataaactgatcagttttaaaacctttaatagggttttatatagatttaaaaa

SEQ ID NO: 512513 - DNA, 120 bp, Artificial Sequence
  ENSG00000164506_58 (sequence is synthesized)
atagtaaaataatctgctgtatgtttcagtgttcttggtcttaaattattgcaacactttcagatttgttttaagatcatacagtaacatgttatatttatacatactgctagaaaatat

SEQ ID NO: 512514 - DNA, 120 bp, Artificial Sequence
  ENSG00000164506_59 (sequence is synthesized)
aaatgtactttaattttaaaatggtgaacttgttaagtttaagtcaaagtacttaaaaagtatgtatattatccatacaaaaagttatgttttacgcttataataagaaatactggtatc

SEQ ID NO: 512515 - DNA, 120 bp, Artificial Sequence
  ENSG00000164506_60 (sequence is synthesized)
tacgcttataataagaaatactggtatctcatatcgagatacaattaattttaaaaaatcatacatcatttaaaaatcttcacacatgaacaggaaagatatcatttctatgctttaaaa

SEQ ID NO: 512516 - DNA, 120 bp, Artificial Sequence
  ENSG00000164506_61 (sequence is synthesized)
aaccctctattgagcattttcaaatattaattttattttgggggaaaatgcccacaacaataattgcaagatctttctcaatagcttcagtttgctgttggatgcctaccttaactattg

SEQ ID NO: 512517 - DNA, 120 bp, Artificial Sequence
  ENSG00000164506_62 (sequence is synthesized)
tttaaaatagttttccaggtattttcttctaccttttttaaaaataaatttccaaaaatgaaaacagagtttatgtatttttgtcaatgaaggtttttattttgtagtttatagaatttg

SEQ ID NO: 512518 - DNA, 120 bp, Artificial Sequence
  ENSG00000164506_63 (sequence is synthesized)
gtttttattttgtagtttatagaatttgttccttatcagtttgatacttgatcaacattcttagactttttaatctgtatttactttggggggaaaaaagcactcctatatcttaaatgt

SEQ ID NO: 512519 - DNA, 120 bp, Artificial Sequence
  ENSG00000164506_64 (sequence is synthesized)
ccttcttttttcttttcccttttagggtatttgttctcttggattgaaatttatgcccacagatttttcttttcatttgaaaatgaatgtgaagatactgtttacagcttttgttaattg

SEQ ID NO: 512520 - DNA, 120 bp, Artificial Sequence
  ENSG00000164506_65 (sequence is synthesized)
cacttttcatcactctgatcaatttcttgtaaagtgctatgggaattatttttcctgtgaatattaatgattttactactgcctccgaagttttaaaaaaggttctgtagacagaaaaca

SEQ ID NO: 512521 - DNA, 120 bp, Artificial Sequence
  ENSG00000164506_66 (sequence is synthesized)
gttgttgcaaccaaaaacaaccaaaaaaagaaaaaaagggaaaactggcttacctttctcagatgaattaaatgattttaataacttcccaattaccagggttataacattgctttcttc

SEQ ID NO: 512522 - DNA, 120 bp, Artificial Sequence
  ENSG00000164506_67 (sequence is synthesized)
agttattaatacagtcaaattaattttaacaatataggcacaattcatttacaaattcagtacagtagtccagggctacatgtaagtggtctctttattttattctttacatcagaaaaa

SEQ ID NO: 512523 - DNA, 120 bp, Artificial Sequence
  ENSG00000164506_68 (sequence is synthesized)
tcatgaatgtcagttttgccagtattttacaatgaggcttatcgtttaaaattttatagtgtatgacatgtaaataaaccagtatttattgtaggttgtttgattcaggcatttcaaatg

SEQ ID NO: 512524 - DNA, 120 bp, Artificial Sequence
  ENSG00000164506_69 (sequence is synthesized)
gatataggttaatggcaatggaatcctatttatttggtagttggttttgtttgtttttgtttatttacttttgctatttgttttgtattgtctaaactttgcttcaactgaagacagtgt

SEQ ID NO: 512525 - DNA, 120 bp, Artificial Sequence
  ENSG00000164506_70 (sequence is synthesized)
aaggagttgaaaatacaatcaacatagcaatggaaagcaatgcaaagagggtaaatcttgttttaatttttttaactttttttttttgtaaataaatagtactgtgatactttaggtgtg

SEQ ID NO: 512526 - DNA, 120 bp, Artificial Sequence
  ENSG00000164506_71 (sequence is synthesized)
acctctattccacatgatagttagaaccagaaaaacacttttgctttctagttatactattggttcattgtaaatgcattaccaaaagacaatatgaaaaagagcaagattaagtttttc

SEQ ID NO: 512527 - DNA, 120 bp, Artificial Sequence
  ENSG00000164506_72 (sequence is synthesized)
taacattgtccacttcaggggcaagcatgcttggtatagagctctagcttgtgtataccttaaactgtaacttgcaggtgtttttcagttgctgcactttttatttaatcttgctcagtc

SEQ ID NO: 512528 - DNA, 120 bp, Artificial Sequence
  ENSG00000164506_73 (sequence is synthesized)
ccagtaactatctcaaaggtaattgctggaatatgcattttgaaatacggtttaaaaaaaatctgtgtattgtttcatctaaaaagaaaagcactattggaaacactaaaaacgtgttaa

SEQ ID NO: 512529 - DNA, 120 bp, Artificial Sequence
  ENSG00000164506_74 (sequence is synthesized)
actttgtagttattttgcattcctgtactttacaaactgtcatcacagcaaaaagtttaaaattaggtaatgaaatatttttgtaaataaataccgttaagctggtattttaaaaaatgt

SEQ ID NO: 512530 - DNA, 120 bp, Artificial Sequence
  ENSG00000164506_75 (sequence is synthesized)
attataaattaattaatgtttctggaaaatgttcatatatatgtatatgaatgtctctttatgctgaagggctctgattgggcaaaataaaatactctaatctctcctgaaactaaacaa

SEQ ID NO: 512531 - DNA, 120 bp, Artificial Sequence
  ENSG00000164506_76 (sequence is synthesized)
ccaacctctggttcttcatcaccacacaattcagatgatgaacaaaaaatgaataattttatagaaaaggtgaagaccaaaagcagaaagttttccaagatggtagccaatgatatagca

SEQ ID NO: 512532 - DNA, 120 bp, Artificial Sequence
  ENSG00000164506_77 (sequence is synthesized)
attgaattatatggctctaatgatccttatcggagagaaccccgatctcctcgtaaatctcgacagccttcaggaggtgtgctgattgtgacttcttgcatgtgcggcctttctagctta

SEQ ID NO: 512533 - DNA, 120 bp, Artificial Sequence
  ENSG00000164506_78 (sequence is synthesized)
ttaaatgaactctaagaggtgtatcatctgtttgactcttgcatccttcattgtgtgacctgtagcatagttatctgacttctttgtggttcattttcctcacttatgacatagatggat

SEQ ID NO: 512534 - DNA, 120 bp, Artificial Sequence
  ENSG00000164506_79 (sequence is synthesized)
aaaatgtcagacattagttgtttaattgagatgataatgtatgtaaaacatttcaagcagtttctggtatataataaactctataaatgattgagaagccatttttttaaggaaatcccc

SEQ ID NO: 512535 - DNA, 120 bp, Artificial Sequence
  ENSG00000164506_80 (sequence is synthesized)
tgccaccaattgatttttatttgttacatttgtcctatggcaaaggaattaaaataggaaaagcatggtagcaaagaaagaaaaacaggaagaaaatctgaaaaaaaaaatctatgatta

SEQ ID NO: 512536 - DNA, 120 bp, Artificial Sequence
  ENSG00000164506_81 (sequence is synthesized)
taatacaaaatgaattggctaaatatttaaattaatagtgactaattaggttctattcttatctagttattttaacaaatattgactggcaacaaaggcagcagttcagggaagattttt

SEQ ID NO: 512537 - DNA, 120 bp, Artificial Sequence
  ENSG00000164506_82 (sequence is synthesized)
tcctctgtgcttcacctgttccagtttttactcctaaataatgttaatatttatgagttcaggtttcttcaagatggcagtaatacttttcctttcatagaattagaaatgaaaatttaa

SEQ ID NO: 512538 - DNA, 120 bp, Artificial Sequence
  ENSG00000164506_83 (sequence is synthesized)
aatgttgctcttttgtaggcatttgtaaatacagtcatccactacctaatagcatcatgatcagtggtggactgtatatacaatgacggtcccaataaattataatattgtactttactg

SEQ ID NO: 512539 - DNA, 120 bp, Artificial Sequence
  ENSG00000164506_84 (sequence is synthesized)
taccttttctatgtttatatacacaaatacttaccattgtgttacagttgcctacaatacttagtacagtaatatgctatataggtttgtaacctaggagtaataggctatacaatatag

SEQ ID NO: 512540 - DNA, 120 bp, Artificial Sequence
  ENSG00000164506_85 (sequence is synthesized)
cctagatatgtagtatatcatcgagatttgtgtaagttacactctatgatgttcatacaatgacaaaattgtccaatgatgcattcctcagaaggtatcctttgttgttaaatgacgtag

SEQ ID NO: 512541 - DNA, 120 bp, Artificial Sequence
  ENSG00000164506_86 (sequence is synthesized)
ttatactgttaactggatcagtaagatcaccattttgtaacagtgttctctactttctcaatttcttttgtcacctaagatgggaaattcagtaaattcaacatattcttcttttctctc

SEQ ID NO: 512542 - DNA, 120 bp, Artificial Sequence
  ENSG00000164508_0 (sequence is synthesized)
atgtctggacgagggaagcagggaggaaaagcacgcgccaagtctaagtctcgctcttctagagcgggtttgcagtttcccgtaggccggatccatcgtctgcttcgtaagggaaactat

SEQ ID NO: 512543 - DNA, 120 bp, Artificial Sequence
  ENSG00000164508_1 (sequence is synthesized)
gcggcagtgttagagtatctcacagcagaaatccttgagctggcaggcaatgcgtctcgcgataacaaaaaaactcgcattattccccgccacctgcagctagcgatccgcaatgatgag

SEQ ID NO: 512544 - DNA, 120 bp, Artificial Sequence
  ENSG00000164508_2 (sequence is synthesized)
gaactcaataagcttttgggcggcgtgaccattgcccagggcggagtcctgcctaacattcaggcagtgctgctgcccaagaagactgagagtcaccaccataaagcccaaagcaagtaa

SEQ ID NO: 512545 - DNA, 120 bp, Artificial Sequence
  ENSG00000164509_0 (sequence is synthesized)
acagcctccttctgcttaggaacaccagacagcactccagcactctgcttggggggcattcgaaacagcaaaatcactcataaaaggcaaaaaattgcaaaaaaaaatagtaataaccag

SEQ ID NO: 512546 - DNA, 120 bp, Artificial Sequence
  ENSG00000164509_1 (sequence is synthesized)
catggcactaaatagaccatgaaaagacatgtgtgtgcagtatgaaaattgagacaggaaggcagagtgtcagcttgttccacctcagctgggaatgtgcatcaggcaactcaagttttt

SEQ ID NO: 512547 - DNA, 120 bp, Artificial Sequence
  ENSG00000164509_2 (sequence is synthesized)
caccacggcatgtgtctgtgaatgtccgcaaaacattctctctccccagccttcatgtgttaacctggggatgatgtggacctgggcactgtggatgctcccctcactctgcaaattcag

SEQ ID NO: 512548 - DNA, 120 bp, Artificial Sequence
  ENSG00000164509_3 (sequence is synthesized)
cctggcagctctgccagctaagcctgagaacatttcctgtgtctactactataggaaaaatttaacctgcacttggagtccaggaaaggaaaccagttatacccagtacacagttaagag

SEQ ID NO: 512549 - DNA, 120 bp, Artificial Sequence
  ENSG00000164509_4 (sequence is synthesized)
aacttacgcttttggagaaaaacatgataattgtacaaccaatagttctacaagtgaaaatcgtgcttcgtgctcttttttccttccaagaataacgatcccagataattataccattga

SEQ ID NO: 512550 - DNA, 120 bp, Artificial Sequence
  ENSG00000164509_5 (sequence is synthesized)
ggtggaagctgaaaatggagatggtgtaattaaatctcatatgacatactggagattagagaacatagcgaaaactgaaccacctaagattttccgtgtgaaaccagttttgggcatcaa

SEQ ID NO: 512551 - DNA, 120 bp, Artificial Sequence
  ENSG00000164509_6 (sequence is synthesized)
acgaatgattcaaattgaatggataaagcctgagttggcgcctgtttcatctgatttaaaatacacacttcgattcaggacagtcaacagtaccagctggatggaagtcaacttcgctaa

SEQ ID NO: 512552 - DNA, 120 bp, Artificial Sequence
  ENSG00000164509_7 (sequence is synthesized)
gaaccgtaaggataaaaaccaaacgtacaacctcacggggctgcagccttttacagaatatgtcatagctctgcgatgtgcggtcaaggagtcaaagttctggagtgactggagccaaga

SEQ ID NO: 512553 - DNA, 120 bp, Artificial Sequence
  ENSG00000164509_8 (sequence is synthesized)
aaaaatgggaatgactgaggaagaagctccatgtggcctggaactgtggagagtcctgaaaccagctgaggcggatggaagaaggccagtgcggttgttatggaagaaggcaagaggagc

SEQ ID NO: 512554 - DNA, 120 bp, Artificial Sequence
  ENSG00000164509_9 (sequence is synthesized)
cccagtcctagagaaaacacttggctacaacatatggtactatccagaaagcaacactaacctcacagaaacaatgaacactactaaccagcagcttgaactgcatctgggaggcgagag

SEQ ID NO: 512555 - DNA, 120 bp, Artificial Sequence
  ENSG00000164509_10 (sequence is synthesized)
cttttgggtgtctatgatttcttataattctcttgggaagtctccagtggccaccctgaggattccagctattcaagaaaaatcatttcagtgcattgaggtcatgcaggcctgcgttgc

SEQ ID NO: 512556 - DNA, 120 bp, Artificial Sequence
  ENSG00000164509_11 (sequence is synthesized)
agcccaccaccctttcctgggaatctgtgtctcaggccacgaactggacgatccagcaagataaattaaaacctttctggtgctataacatctctgtgtatccaatgttgcatgacaaag

SEQ ID NO: 512557 - DNA, 120 bp, Artificial Sequence
  ENSG00000164509_12 (sequence is synthesized)
ttggcgagccatattccatccaggcttatgccaaagaaggcgttccatcagaaggtcctgagaccaaggtggagaacattggcgtgaagacggtcacgatcacatggaaagagattccca

SEQ ID NO: 512558 - DNA, 120 bp, Artificial Sequence
  ENSG00000164509_13 (sequence is synthesized)
agagtgagagaaagggtatcatctgcaactacaccatcttttaccaagctgaaggtggaaaaggattctccaagacagtcaattccagcatcttgcagtacggcctggagtccctgaaac

SEQ ID NO: 512559 - DNA, 120 bp, Artificial Sequence
  ENSG00000164509_14 (sequence is synthesized)
gaaagacctcttacattgttcaggtcatggccagcaccagtgctgggggaaccaacgggaccagcataaatttcaagacattgtcattcagtgtctttgagattatcctcataacttctc

SEQ ID NO: 512560 - DNA, 120 bp, Artificial Sequence
  ENSG00000164509_15 (sequence is synthesized)
tgattggtggaggccttcttattctcattatcctgacagtggcatatggtctcaaaaaacccaacaaattgactcatctgtgttggcccaccgttcccaaccctgctgaaagtagtatag

SEQ ID NO: 512561 - DNA, 120 bp, Artificial Sequence
  ENSG00000164509_16 (sequence is synthesized)
ccacatggcatggagatgatttcaaggataagctaaacctgaaggagtctgatgactctgtgaacacagaagacaggatcttaaaaccatgttccacccccagtgacaagttggtgattg

SEQ ID NO: 512562 - DNA, 120 bp, Artificial Sequence
  ENSG00000164509_17 (sequence is synthesized)
acaagttggtggtgaactttgggaatgttctgcaagaaattttcacagatgaagccagaacgggtcaggaaaacaatttaggaggggaaaagaatgggtatgtgacctgccccttcaggc

SEQ ID NO: 512563 - DNA, 120 bp, Artificial Sequence
  ENSG00000164509_18 (sequence is synthesized)
ctgattgtcccctggggaaaagttttgaggagctcccagtttcacctgagattccgcccagaaaatcccaatacctacgttcgaggatgccagaggggacccgcccagaagccaaagagc

SEQ ID NO: 512564 - DNA, 120 bp, Artificial Sequence
  ENSG00000164509_19 (sequence is synthesized)
agcttctcttttctggtcaaagtttagtaccagatcatctgtgtgaggaaggagccccaaatccatatttgaaaaattcagtgacagccagggaatttcttgtgtctgaaaaacttccag

SEQ ID NO: 512565 - DNA, 120 bp, Artificial Sequence
  ENSG00000164509_20 (sequence is synthesized)
agcacaccaagggagaagtctaaatgcgaccatagcatgagaccctcggggcctcagtgtggatggcccttgccagagaagatgtcaagactcggcacgcagcgcttgcttggccctgcc

SEQ ID NO: 512566 - DNA, 120 bp, Artificial Sequence
  ENSG00000164509_21 (sequence is synthesized)
acatcctgcctaggttaaagtttcccctgccccttgagctgccagttgaacttggtcggcaaagatgcgaccttgtactgggaagaagggatggtgataagcccgagttttgtaaaggaa

SEQ ID NO: 512567 - DNA, 120 bp, Artificial Sequence
  ENSG00000164509_22 (sequence is synthesized)
ttaacaataatgcaatccatttcccagcataagtgggtaagtgccactttgacttgggctgggcttaaaagcacaagaaaagctcgcagacaatcagagtggaaacactcccacatctta

SEQ ID NO: 512568 - DNA, 120 bp, Artificial Sequence
  ENSG00000164509_23 (sequence is synthesized)
gtgtggataaattaaagtccagattgttcttcctgtcctgacttgtgctgtgggaggtggagttgcctttgatgcaaatcctttgagccagcagaacatctgtggaacatcccctgatac

SEQ ID NO: 512569 - DNA, 120 bp, Artificial Sequence
  ENSG00000164509_24 (sequence is synthesized)
agttttccaactaggaagactgaatctgtggccccaagagaaccatctctgaagactgggtatgtggtcttttccacacatggaccacctacggatgcaatctgtaatgcatgtgcatga

SEQ ID NO: 512570 - DNA, 120 bp, Artificial Sequence
  ENSG00000164509_25 (sequence is synthesized)
gaagtctgttattaagtagagtgtgaaaacatggttatggtaataggaacagcttttaaaatgcttttgtatttgggcctttcatacaaaaaagccataataccattttcatgtaatgct

SEQ ID NO: 512571 - DNA, 83 bp, Artificial Sequence
  ENSG00000164509_26 (sequence is synthesized)
tctggatgtgccaagacgggtggatcgctgagttcaggagttcaagacaagtccaggcaacatagtgaaaccttgtttctaca

SEQ ID NO: 512572 - DNA, 79 bp, Artificial Sequence
  ENSG00000164509_27 (sequence is synthesized)
catcaggcaactcaagtttttcaccacggcatgtgtctgtgaatgtccgcaaaacattagtttcactcttgtcgccagg

SEQ ID NO: 512573 - DNA, 120 bp, Artificial Sequence
  ENSG00000164509_28 (sequence is synthesized)
agatgctatggatagacctgttgtaggcatggctcccccatctcattgtgacttgcaacctggcatgaatcacttagcttctttaaatctctctgaaaatggggccaagagcacccacct

SEQ ID NO: 512574 - DNA, 120 bp, Artificial Sequence
  ENSG00000164509_29 (sequence is synthesized)
tttggggttttgggggttaaatgagagtgaagtgacagtacctgagaggagagtcctgaggaaatggaaggagttgttataatttgtcctggttaggccctgaattgacctcccgggagc

SEQ ID NO: 512575 - DNA, 120 bp, Artificial Sequence
  ENSG00000164509_30 (sequence is synthesized)
tccccgaccatcattcccaggaatggcgtgcctggcttaaagagtgaggaggaacagaccctgtcaccatgacttctactgcccctgccaaatcatgcttttgtttttcagtccacctta

SEQ ID NO: 512576 - DNA, 120 bp, Artificial Sequence
  ENSG00000164509_31 (sequence is synthesized)
tctcctgacatcttaaatactgggcaaggcttggattcttgcttaggctaaataattttttcttatggtaaaatacacgtaaaatatttttccagtttaaacatttgaaagtgtacaatt

SEQ ID NO: 512577 - DNA, 120 bp, Artificial Sequence
  ENSG00000164509_32 (sequence is synthesized)
tagtggcattagaagcattcacaatattgtgcaaccatcaccactatttccagaactcttctatttctgcccaaatagaagccctatacccattcattagtcactccccattcctctcct

SEQ ID NO: 512578 - DNA, 120 bp, Artificial Sequence
  ENSG00000164509_33 (sequence is synthesized)
ggccaagtgggcatcctggaggtcaagtgccccgtttgaccttggacttttctgcgccttgggttttctacgccggcctacttccggcaccttgcgtcccatttcccttgattcttccct

SEQ ID NO: 512579 - DNA, 120 bp, Artificial Sequence
  ENSG00000164509_34 (sequence is synthesized)
tacggtgagctgcccacttgcacggcggcctgctagaacttaggagcgaaaactgaaccacctaagattttccgtgtgaaaccagttttgggcatcaaacgaatgattcaaattgaatgg

SEQ ID NO: 512580 - DNA, 120 bp, Artificial Sequence
  ENSG00000164509_35 (sequence is synthesized)
atctgcaactacaccatcttttaccaagctgaagccaagacagtcaattccagcatcttgcagtacggcctggagtccctgaaacgaaagacctcttacattgttcaggtcatggccagc

SEQ ID NO: 512581 - DNA, 120 bp, Artificial Sequence
  ENSG00000164509_36 (sequence is synthesized)
gcctggcagttcctaacaggccatggacccgtaccttgcccagcggttgaggaatcctgctagactacagcctggcaacctcccccggacttgctgtacctggtgaaataggctaccagc

SEQ ID NO: 512582 - DNA, 120 bp, Artificial Sequence
  ENSG00000164509_37 (sequence is synthesized)
gtctcactgtgtcgcccaggctggagtgtggtggtgcaatctgccacctctgcctactgggttcaagtgattttcctgcctcctgagtagctgggattattggcgcccgccaccatgccc

SEQ ID NO: 512583 - DNA, 120 bp, Artificial Sequence
  ENSG00000164509_38 (sequence is synthesized)
tgggattacagatgtgagccactgcgtccagcccaattcctgagatcttactggggagctgccaatcaccagttacagcgaaaactgaaccacctaagattttccgtgtgaaaccagttt

SEQ ID NO: 512584 - DNA, 120 bp, Artificial Sequence
  ENSG00000164509_39 (sequence is synthesized)
caccaccctttcctgggaatctgtgtctcaggccacgaactggacgatccagcaaggtagccagggcggaactcacaggttccctcagtgcagggtttggtttcattttcatccattttt

SEQ ID NO: 512585 - DNA, 120 bp, Artificial Sequence
  ENSG00000164509_40 (sequence is synthesized)
agatctttaactttggcttcaaagctgttagtgtggttaatagcatttgtcaagcttgtgcaagcttaatgaagtgacacgcttcttggtatttccaaggcaaggctggcacagaaagct

SEQ ID NO: 512586 - DNA, 120 bp, Artificial Sequence
  ENSG00000164509_41 (sequence is synthesized)
gtgggtgtcaagcagaccaggtatctgatcgatctccaggtggaaaacaccatcttaacacccaccatcagagagtccttcccggatagctgggtcatcccatggataactccagaatgt

SEQ ID NO: 512587 - DNA, 120 bp, Artificial Sequence
  ENSG00000164509_42 (sequence is synthesized)
ggatcccagctggcctacctaggatattttcttcagttctgattgcctgtttaagagttaggcccccttcccaggtgattgttataggaatagccttcttttcaggaaagtccctgccct

SEQ ID NO: 512588 - DNA, 64 bp, Artificial Sequence
  ENSG00000164509_43 (sequence is synthesized)
atgaggctttacccttttaatcctgtcaccacaatcatttcttaatgcttcaaacatccatatt

SEQ ID NO: 512589 - DNA, 120 bp, Artificial Sequence
  ENSG00000164509_44 (sequence is synthesized)
gtcaccacaatcatttcttaatgcttcaaacatccatattaagaataatacacaggcagggatgcaggcaagtagaggagatagaagtcacagtgtttgagatccacagggtgatgatat

SEQ ID NO: 512590 - DNA, 120 bp, Artificial Sequence
  ENSG00000164509_45 (sequence is synthesized)
gttgttctagaacttaattaggcagcgtgttcagcgatcctatggatctctctgctgcaatagtatttggtcagaacagacctggggattccctgcctccaaaaaataaaaagctaaaaa

SEQ ID NO: 512591 - DNA, 120 bp, Artificial Sequence
  ENSG00000164509_46 (sequence is synthesized)
gctaaatttaaaaataagaattagttagaaaatctgagaaaagcaatagatattagagaccattcaacctaacctgtttattttccagaggtggaaactgtagagaaatggaatatcttc

SEQ ID NO: 512592 - DNA, 120 bp, Artificial Sequence
  ENSG00000164509_47 (sequence is synthesized)
tataagtgtttggccataactcttagtctagtattccccccactctgccgtgctctgcacttacacttttttttctttctttttcacagataaattaaaacctttctggtgctataacat

SEQ ID NO: 512593 - DNA, 120 bp, Artificial Sequence
  ENSG00000164512_0 (sequence is synthesized)
actcacccattcagatttctgttggtgtaaagcgacattccagctgctgaagctccgtgatctgctgtgtttttccagcccagatccaagagacctggatgctttttgccattctgatgg

SEQ ID NO: 512594 - DNA, 120 bp, Artificial Sequence
  ENSG00000164512_1 (sequence is synthesized)
taaatgatgagacaggctaccatggatttcagcaccccttctgtgtttgatcagcaaagaggtgactcatctgaggaagttgacctgaccatggtttatcaagcagcctctaatggagat

SEQ ID NO: 512595 - DNA, 120 bp, Artificial Sequence
  ENSG00000164512_2 (sequence is synthesized)
gtcaatgctctgactgcagtgattcgggaagacccttctatcctagaatgctgtgacagtgaaggatgcacgcccttgatgcatgcggtttctggacgtcaagcggacacagtgaagctg

SEQ ID NO: 512596 - DNA, 120 bp, Artificial Sequence
  ENSG00000164512_3 (sequence is synthesized)
ctgttgaagatgggagccaatattaacatgcaggatgcttatggccgcacaagtttatgcctggccacctacctgggctggcttgaaggctgtgtgagtctactcagaaacggtgccaag

SEQ ID NO: 512597 - DNA, 120 bp, Artificial Sequence
  ENSG00000164512_4 (sequence is synthesized)
cacaatatcccagataaaaatggccgcctgccactgcatgctgccactgctgagcccgatatgaggctcctcacggtcctgttgcaacagtcgaacatcagcgagattaatcaccaggac

SEQ ID NO: 512598 - DNA, 120 bp, Artificial Sequence
  ENSG00000164512_5 (sequence is synthesized)
aatgagggaatgacaccactccactgggcggctttccacaaccagcctcaacacacacaaatgctgctgaagaagggggcagaccccacccttgtggataaagactttaaaaccgctctc

SEQ ID NO: 512599 - DNA, 120 bp, Artificial Sequence
  ENSG00000164512_6 (sequence is synthesized)
cactgggcagtccagagtggaaataggattctgtgctccatcattctgagccatcaccaggggccgtccataatcaactatgatgatgagagtgggaagacatgtgtacatatcgcagcg

SEQ ID NO: 512600 - DNA, 120 bp, Artificial Sequence
  ENSG00000164512_7 (sequence is synthesized)
gcagcgggcttcagcgatattattcatgagctggcaagagtccctgagtgtaacctgcaggctctggatgtggatgacaggacacctctgcactgggctgcagctgcagggaaggccgaa

SEQ ID NO: 512601 - DNA, 120 bp, Artificial Sequence
  ENSG00000164512_8 (sequence is synthesized)
tgtgtccagtcactgctggagttgggaatggacagcaacctgcgggacatcaatgagagcacgcccttggcctatgccctgtactgcggtcacacggcgtgtgtcaaactcctctcccaa

SEQ ID NO: 512602 - DNA, 120 bp, Artificial Sequence
  ENSG00000164512_9 (sequence is synthesized)
gagagcagaacagagcctactcgaccccctccctcccagagcagtcggccccagaagaaggagagacggttcaacgtgctcaaccaaatattctgcaaaaacaagaaagaagagcagaga

SEQ ID NO: 512603 - DNA, 120 bp, Artificial Sequence
  ENSG00000164512_10 (sequence is synthesized)
cacctttgatagcatcgtgggtaccaactgccaagaacagcctggtgatcaggtggctatggttgaatttaagaagaaaacctcagacaattcaaaatatctcttaccagaaaagaaacc

SEQ ID NO: 512604 - DNA, 120 bp, Artificial Sequence
  ENSG00000164512_11 (sequence is synthesized)
gctggcccgtaaggggcttccaccaatcagaacgcagagtctcccacccatcaccctgggcaataacttcctaacagcctcccatagggccacttcccatgcaggcctgagctctgctcc

SEQ ID NO: 512605 - DNA, 120 bp, Artificial Sequence
  ENSG00000164512_12 (sequence is synthesized)
tcatcatatggcccagcgatctcagaaaagtcgaagtgagcaggatttattaaataacagaactggctgccagatgttactagataacccctggaagagtgattctaatcaggtattttc

SEQ ID NO: 512606 - DNA, 120 bp, Artificial Sequence
  ENSG00000164512_13 (sequence is synthesized)
ctacaaagtttggactgtgtcttcttctgataagctgctggacagattgctcagtgtccggcctggtcaccaagaggtctccgtgccaccacaccttcgccatctacataatccatcatc

SEQ ID NO: 512607 - DNA, 120 bp, Artificial Sequence
  ENSG00000164512_14 (sequence is synthesized)
aggacaaaattttcagcatctttccccaaacagacacaaaatcagggatcttcctttcactcggaacaacctagctcccctaccagatcaaaaatttctatctggagaacctctgcggac

SEQ ID NO: 512608 - DNA, 120 bp, Artificial Sequence
  ENSG00000164512_15 (sequence is synthesized)
aaaccgagtgcttcctgcaattccaagtcaacgaagacacagcacagcagcagaagagagtgaacattctgccaaccccaccagtgatgaaaattaactgtgggccactcgctgcagaaa

SEQ ID NO: 512609 - DNA, 120 bp, Artificial Sequence
  ENSG00000164512_16 (sequence is synthesized)
tgtagatgaatatgtattttcaactctcaaaggacaagattactccagtttgtaagaacgaagaccaatttagtaagctgcattctataagccatcagttttataactcgaaattcttta

SEQ ID NO: 512610 - DNA, 120 bp, Artificial Sequence
  ENSG00000164512_17 (sequence is synthesized)
ttccaaataaagatactccctaaataagcacttagaatatttgggtgtgcatattaagtctgtgaatttctgtgacttccacatgccaaaattaaaagacaaaatatgttatcagtagga

SEQ ID NO: 512611 - DNA, 120 bp, Artificial Sequence
  ENSG00000164512_18 (sequence is synthesized)
aaactgagctatgtttggtttgctttgtggcatgtgcactgtttttttgttattgttctttggttgtttttttgctgaatgattttatgttttgggaaaaaaagtacgctttgctgaata

SEQ ID NO: 512612 - DNA, 120 bp, Artificial Sequence
  ENSG00000164512_19 (sequence is synthesized)
aaagcaaaaaacaaaacaaaaaaaaaaccacatcccagacaaacatgtcttcacatttattgtcattctaacttgaactaatgaaacctatttaaaaataaattcctatgatcagtcaca

SEQ ID NO: 512613 - DNA, 120 bp, Artificial Sequence
  ENSG00000164512_20 (sequence is synthesized)
gtccaccatcatccttcgggctcatttaacacttactatttctatactgtaaatggcaacaagattttccctacctcaacctgactttgagcaggagctgttgctggctaagcagcctga

SEQ ID NO: 512614 - DNA, 120 bp, Artificial Sequence
  ENSG00000164512_21 (sequence is synthesized)
cagagctcatcagtggcagggctgggatgtaaacccaagccatctggctgcagagcccgggcccctctccactatgctcggctgcccccctctcccagatggagcgttgacttcagtcaa

SEQ ID NO: 512615 - DNA, 120 bp, Artificial Sequence
  ENSG00000164512_22 (sequence is synthesized)
ctgagcaggagatccaagtcaggctcctcacggtcctgttgcaacagtcgaacatcagcgagattaatcaccaggacaatgagtgagttcaggtgatctgccaccctggcctcccaaagt

SEQ ID NO: 512616 - DNA, 120 bp, Artificial Sequence
  ENSG00000164520_0 (sequence is synthesized)
gcctgacctcagttgttccagggtaaagaatttgggcagtgcccacacccacgctgttggataacatttcttcaccataccagtgagggtgaatgtgtacacgcccagcttcctgcctgt

SEQ ID NO: 512617 - DNA, 120 bp, Artificial Sequence
  ENSG00000164520_1 (sequence is synthesized)
tactctccacagtatgcgaagaatatccctgacttctagccctgtgcgccttcttttgtttctgctgttgctactaatagccttggagatcatggttggtggtcactctctttgcttcaa

SEQ ID NO: 512618 - DNA, 120 bp, Artificial Sequence
  ENSG00000164520_2 (sequence is synthesized)
cttcactataaaatcattgtccagacctggacagccctggtgtgaagcgcaggtcttcttgaataaaaatcttttccttcagtacaacagtgacaacaacatggtcaaacctctgggcct

SEQ ID NO: 512619 - DNA, 120 bp, Artificial Sequence
  ENSG00000164520_3 (sequence is synthesized)
gatccttccactctgcaagtcgagatgttttgtcaacgtgaagcagaacggtgcactggtgcatcctggcagttcgccaccaatggagagaaatccctcctctttgacgcaatgaacatg

SEQ ID NO: 512620 - DNA, 120 bp, Artificial Sequence
  ENSG00000164520_4 (sequence is synthesized)
acctggacagtaattaatcatgaagccagtaagatcaaggagacatggaagaaagacagagggctggaaaagtatttcaggaagctctcaaagggagactgcgatcactggctcagggaa

SEQ ID NO: 512621 - DNA, 120 bp, Artificial Sequence
  ENSG00000164520_5 (sequence is synthesized)
ttcttagggcactgggaggcaatgccagaaccgacagtgtcaccagtaaatgcttcagatatccactggtcttcttctagtctaccagatagatggatcatcctgggggcattcatcctg

SEQ ID NO: 512622 - DNA, 120 bp, Artificial Sequence
  ENSG00000164520_6 (sequence is synthesized)
ttagttttaatgggaattgttctcatctgtgtctggtggcaaaatggtgagtggcaggctggtctctggcccttgaggacgtcttagtctggtaaggactcaagagaggtgaatcatggg

SEQ ID NO: 512623 - DNA, 120 bp, Artificial Sequence
  ENSG00000164520_7 (sequence is synthesized)
gtgggagaatgtggcagctccctttaaaggtcaaaagccttccctgtgtgggtgtcagtgtgtgtgtgcgatagaaaatttgattgacttctccgtgggcttcctgtctggagagtcagt

SEQ ID NO: 512624 - DNA, 120 bp, Artificial Sequence
  ENSG00000164520_8 (sequence is synthesized)
gatggctataaggatttcccaccatcctccctttcccatcccacctcccactgtttcttcctcagtgtagaaaccccttcccattaaccaatgatccagtcacaatgacccactgctaaa

SEQ ID NO: 512625 - DNA, 120 bp, Artificial Sequence
  ENSG00000164520_9 (sequence is synthesized)
cctaattctcaaggtgatgctatttaggaagtcataactcatgtgagtggagccatgtgggattaagaagtgataggagagcttgctgtctgtctctgctctccactgtgtgaggataca

SEQ ID NO: 512626 - DNA, 120 bp, Artificial Sequence
  ENSG00000164520_10 (sequence is synthesized)
tgtggtcctcgatcgctgacagccttggctcccactgctgtgtgttccctgagtcaagtggaggcggagcctgcaatgagcggagatcgcgcctctgcattccagtcttggcaacagagc

SEQ ID NO: 512627 - DNA, 120 bp, Artificial Sequence
  ENSG00000164520_11 (sequence is synthesized)
aagactccgtctcaaaaaaaaaaaattttttttcagtacatattttttaaaagatagggctgggcacagcagctcacatctataatcccaacactttgggaggcctaggcaggaggatca

SEQ ID NO: 512628 - DNA, 120 bp, Artificial Sequence
  ENSG00000164520_12 (sequence is synthesized)
cttgagcccaggaatctgaagctgcagtgagcctttgctcgtgagattgtggacctatgatcctaccaccagcccacctggttctaacaccccctcctctatgtgtgagagggagagaag

SEQ ID NO: 512629 - DNA, 120 bp, Artificial Sequence
  ENSG00000164520_13 (sequence is synthesized)
aaaagtgagggagaaaagagagataagcaaagaacagagaggaaaaatggaaaataagaggaaattgggggaattaaacagaggggagggcatggatccccgggagttagaagagtagca

SEQ ID NO: 512630 - DNA, 120 bp, Artificial Sequence
  ENSG00000164520_14 (sequence is synthesized)
gcttgtggattactacgcagtggaggaagaagagttgttggaaattatttgagaggtagtataatcatttgtgaggcagttttctgcattcaccatttctcacagactaagttactcata

SEQ ID NO: 512631 - DNA, 120 bp, Artificial Sequence
  ENSG00000164520_15 (sequence is synthesized)
agcaaacgtgcaattcacattacactgaaattcttccctaatacatcatttgcattggaataaagtacggttttcaaacaacctgatatagcagaactgactgtataaattatgtgagca

SEQ ID NO: 512632 - DNA, 78 bp, Artificial Sequence
  ENSG00000164520_16 (sequence is synthesized)
acctgatatagcagaactgactgtataaattatgtgagcacagtgcaagtaattatctcccaggctggagtgtagtgg

SEQ ID NO: 512633 - DNA, 90 bp, Artificial Sequence
  ENSG00000164520_17 (sequence is synthesized)
gaactacggacctcaggtgatctgcccccatgagccactgagcccagacacaagtagttctttctgataaacactttaacactgaatgca

SEQ ID NO: 512634 - DNA, 120 bp, Artificial Sequence
  ENSG00000164520_18 (sequence is synthesized)
ataaatgcttggtgtttcagccaccttgtctattctgttgtagcagcctgaactggctaaggtagcagggtctgatgatcaaatgggacagctgtaaaagtgaggtgggaagggggtcta

SEQ ID NO: 512635 - DNA, 120 bp, Artificial Sequence
  ENSG00000164520_19 (sequence is synthesized)
cagatactaagttttatgaggaaaacttgtgctttatttgaaaatgacacaaaattttgttctaagaaaaattttcagaattcaaaacttagagccctaagacttttcccaatgatagac

SEQ ID NO: 512636 - DNA, 120 bp, Artificial Sequence
  ENSG00000164520_20 (sequence is synthesized)
ttggctttccttgaggtcttggccccagtaggactgctggagtctattacaaaactcatctggaaggacctctgccgttgctgaggcttgaggaaatggttttaaggtcacagtgtaaac

SEQ ID NO: 512637 - DNA, 120 bp, Artificial Sequence
  ENSG00000164530_0 (sequence is synthesized)
agaaggagagacggctggccaccatgcacggctcctgcagtttcctgatgcttctgctgccgctactgctactgctggtggccaccacaggccccgttggagccctcacagatgaggaga

SEQ ID NO: 512638 - DNA, 120 bp, Artificial Sequence
  ENSG00000164530_1 (sequence is synthesized)
aacgtttgatggtggagctgcacaacctctaccgggcccaggtatccccgacggcctcagacatgctgcacatgagatgggacgaggagctggccgccttcgccaaggcctacgcacggc

SEQ ID NO: 512639 - DNA, 120 bp, Artificial Sequence
  ENSG00000164530_2 (sequence is synthesized)
agtgcgtgtggggccacaacaaggagcgcgggcgccgcggcgagaatctgttcgccatcacagacgagggcatggacgtgccgctggccatggaggagtggcaccacgagcgtgagcact

SEQ ID NO: 512640 - DNA, 120 bp, Artificial Sequence
  ENSG00000164530_3 (sequence is synthesized)
acaacctcagcgccgccacctgcagcccaggccagatgtgcggccactacacgcaggtggtatgggccaagacagagaggatcggctgtggttcccacttctgtgagaagctccagggtg

SEQ ID NO: 512641 - DNA, 120 bp, Artificial Sequence
  ENSG00000164530_4 (sequence is synthesized)
ttgaggagaccaacatcgaattactggtgtgcaactatgagcctccggggaacgtgaaggggaaacggccctaccaggaggggactccgtgctcccaatgtccctctggctaccactgca

SEQ ID NO: 512642 - DNA, 120 bp, Artificial Sequence
  ENSG00000164530_5 (sequence is synthesized)
agaactccctctgtgaacccatcggaagcccggaagatgctcaggatttgccttacctggtaactgaggccccatccttccgggcgactgaagcatcagactctaggaaaatgggtactc

SEQ ID NO: 512643 - DNA, 120 bp, Artificial Sequence
  ENSG00000164530_6 (sequence is synthesized)
cttcttccctagcaacggggattccggctttcttggtaacagaggtctcaggctccctggcaaccaaggctctgcctgctgtggaaacccaggccccaacttccttagcaacgaaagacc

SEQ ID NO: 512644 - DNA, 120 bp, Artificial Sequence
  ENSG00000164530_7 (sequence is synthesized)
tgaggagccagttaccttccccaaatcgacccatgttcctatcccaaaatcagcagacaaagtgacagacaaaacaaaagtgccctctaggagcccagagaactctctggaccccaagat

SEQ ID NO: 512645 - DNA, 120 bp, Artificial Sequence
  ENSG00000164530_8 (sequence is synthesized)
gtccctgacaggggcaagggaactcctaccccatgcccaggaggaggctgaggctgaggctgagttgcctccttccagtgaggtcttggcctcagtttttccagcccaggacaagccagg

SEQ ID NO: 512646 - DNA, 120 bp, Artificial Sequence
  ENSG00000164530_9 (sequence is synthesized)
tgagctgcaggccacactggaccacacggggcacacctcctccaagtccctgcccaatttccccaatacctctgccaccgctaatgccacgggtgggcgtgccctggctctgcagtcgtc

SEQ ID NO: 512647 - DNA, 120 bp, Artificial Sequence
  ENSG00000164530_10 (sequence is synthesized)
cttgccaggtgcagagggccctgacaagcctagcgtcgtgtcagggctgaactcgggccctggtcatgtgtggggccctctcctgggactactgctcctgcctcctctggtgttggctgg

SEQ ID NO: 512648 - DNA, 120 bp, Artificial Sequence
  ENSG00000164530_11 (sequence is synthesized)
aatcttctgaaggggataccactcaaagggtgaagaggtcagctgtcctcctgtcatcttccccaccctgtccccagcccctaaacaagatacttcttggttaaggccctccggaaggga

SEQ ID NO: 512649 - DNA, 120 bp, Artificial Sequence
  ENSG00000164530_12 (sequence is synthesized)
aaggctacggggcatgtgcctcatcacaccatccatcctggaggcacaaggcctggctggctgcgagctcaggaggccgcctgaggactgcacaccgggcccacacctctcctgcccctc

SEQ ID NO: 512650 - DNA, 120 bp, Artificial Sequence
  ENSG00000164530_13 (sequence is synthesized)
cctcctgagtcctgggggtgggaggatttgagggagctcactgcctacctggcctggggctgtctgcccacacagcatgtgcgctctccctgagtgcctgtgtagctggggatggggatt

SEQ ID NO: 512651 - DNA, 120 bp, Artificial Sequence
  ENSG00000164530_14 (sequence is synthesized)
cctaggggcagatgaaggacaagccccactggagtggggttctttgagtgggggaggcagggacgagggaaggaaagtaactcctgactctccaataaaaacctgtccaacctgtggcaa

SEQ ID NO: 512652 - DNA, 120 bp, Artificial Sequence
  ENSG00000164530_15 (sequence is synthesized)
gctattgaaggggcatgactggaggcagaggccacagagatgaccacaccagggcaacctgtagtgccagtgcctggttccacccggggggcatctgagaactgtgtccttccattcctg

SEQ ID NO: 512653 - DNA, 120 bp, Artificial Sequence
  ENSG00000164530_16 (sequence is synthesized)
agtccagcacttcccaggccagccatcctaatgagtgtgaagtggtatttcactgtatttccctaatggaactcacacagcttttggcctgagcccccgttaccaagagaaaggaggttt

SEQ ID NO: 512654 - DNA, 120 bp, Artificial Sequence
  ENSG00000164530_17 (sequence is synthesized)
ttgccaaggactccaaggggagtgcacttgatgctggtcgggacccaaagcgcccagccctccctgagacattgtgtgagtcgggctgggcctcaaacacggcccccactgccccacccc

SEQ ID NO: 512655 - DNA, 120 bp, Artificial Sequence
  ENSG00000164532_0 (sequence is synthesized)
gctcactgtccgtagttccgcgccgcgctccccacgccagcgtcctagcagccgcgctcggctggtggccacctcagcctgggacatcccggctgtccccagccccagagggaggaagga

SEQ ID NO: 512656 - DNA, 120 bp, Artificial Sequence
  ENSG00000164532_1 (sequence is synthesized)
cgcggaggggatgctccaggaccccaggactttgtgcagttgatgctcgtttccgccttcgggctgtgcagactgtcgtcctgccgagcgccccggggcgtgcgcacccgccgtagtgct

SEQ ID NO: 512657 - DNA, 120 bp, Artificial Sequence
  ENSG00000164532_2 (sequence is synthesized)
cggtgggccctctcctctccggctgccttcgaagtctctgcggctctggggctttgcggtggggaatagaggccagtgtgcagctctggagtcgttggagctgacacttctggagtccct

SEQ ID NO: 512658 - DNA, 120 bp, Artificial Sequence
  ENSG00000164532_3 (sequence is synthesized)
ggccccgctgtgactgctctcggaaactttgagctgtgtttcgggtctttgtctcccttggggaatctggacggcagttcggacgaccccgtccctggccaggaccgcgtgctggggacc

SEQ ID NO: 512659 - DNA, 120 bp, Artificial Sequence
  ENSG00000164532_4 (sequence is synthesized)
atggagttcacggcgtcccccaagccccaactctcctctcgggccaacgccttctccattgccgcgctcatgtcgagcggcggctctaaggagaaggaggcgacggagaacacaatcaaa

SEQ ID NO: 512660 - DNA, 120 bp, Artificial Sequence
  ENSG00000164532_5 (sequence is synthesized)
cccctggagcaatttgtggagaagtcgtcctgtgcccagcccctgggtgagctgaccagcctggatgctcatggggagtttggtggaggcagtggcagcagcccgtcctcctcctctctg

SEQ ID NO: 512661 - DNA, 120 bp, Artificial Sequence
  ENSG00000164532_6 (sequence is synthesized)
tgcactgagccactgatccccaccacccccatcatccccagtgaggaaatggccaaaattgcctgcagcctggagaccaaggagctttgggacaaattccatgagctgggcaccgagatg

SEQ ID NO: 512662 - DNA, 120 bp, Artificial Sequence
  ENSG00000164532_7 (sequence is synthesized)
atgtttccaaccatccgggtgtccttttcgggggtggatcctgaggccaagtacatagtcctgatggacatcgtccctgtggacaacaagaggtaccgctacgcctaccaccggtcctcc

SEQ ID NO: 512663 - DNA, 120 bp, Artificial Sequence
  ENSG00000164532_8 (sequence is synthesized)
tggctggtggctggcaaggccgacccgccgttgccagccaggctctatgtgcatccagattctccttttaccggtgagcaactactcaaacagatggtgtcttttgaaaaggtgaaactc

SEQ ID NO: 512664 - DNA, 120 bp, Artificial Sequence
  ENSG00000164532_9 (sequence is synthesized)
accaacaatgaactggatcaacatggccatataattttgaactcaatgcataagtaccagccaagggtgcacatcattaagaagaaagaccacacagcctcattgctcaacctgaagtct

SEQ ID NO: 512665 - DNA, 120 bp, Artificial Sequence
  ENSG00000164532_10 (sequence is synthesized)
gaagaatttagaactttcatctttccagaaacagtttttacggcagtcactgcctaccagaatcaactgataacgaagctgaaaatagatagcaatccttttgccaaaggattccgggat

SEQ ID NO: 512666 - DNA, 120 bp, Artificial Sequence
  ENSG00000164532_11 (sequence is synthesized)
tcctccaggctcactgacattgagagggaaagtgtggagagcctgattcaaaagcattcctatgcacgctcacccatccgtacctacggaggagaagaagatgtcttgggggatgagagt

SEQ ID NO: 512667 - DNA, 120 bp, Artificial Sequence
  ENSG00000164532_12 (sequence is synthesized)
cagacaaccccaaatcgagggtcagcctttacaacatctgataatttgtctctcagctcctgggtatcatcttcttccagttttcctgggtttcagcacccacagtccctgactgctctt

SEQ ID NO: 512668 - DNA, 120 bp, Artificial Sequence
  ENSG00000164532_13 (sequence is synthesized)
ggcaccagcacagcatccatagcaacacccattcctcaccccatccagggttctctgccaccatatagccgactgggaatgcctctgacaccatcggccattgccagctccatgcaaggg

SEQ ID NO: 512669 - DNA, 120 bp, Artificial Sequence
  ENSG00000164532_14 (sequence is synthesized)
agtggccccacattcccttcattccacatgccgcgataccatcactattttcagcaggggccctatgctgccattcaaggactacgccattcctctgctgtgatgacgccatttgtatga

SEQ ID NO: 512670 - DNA, 120 bp, Artificial Sequence
  ENSG00000164535_0 (sequence is synthesized)
gcgtttgcgcttgagcgccgataatttggtggcggcgtccggagggtgctggtttgttctcggtgaacggcgcgcggggtctctcctgagtgcgagctacgggaccttcgccatgccggg

SEQ ID NO: 512671 - DNA, 120 bp, Artificial Sequence
  ENSG00000164535_1 (sequence is synthesized)
gatggtactcttcggccggcgctgggccatcgccagcgacgacttggtcttcccagggttcttcgagctggtcgtgcgagtgctgtggtggattggcattctgacgttgtatctcatgca

SEQ ID NO: 512672 - DNA, 120 bp, Artificial Sequence
  ENSG00000164535_2 (sequence is synthesized)
cagaggaaagctggactgtgctggtggagccttgctcagcagttacttgatcgtcctcatgattctcctggcagttgtcatatgtactgtgtcagccatcatgtgtgtcagcatgagagg

SEQ ID NO: 512673 - DNA, 120 bp, Artificial Sequence
  ENSG00000164535_3 (sequence is synthesized)
aacgatttgtaaccctggaccgcggaagtctatgtctaagctgctttacatccgcctggcgctgttttttccagagatggtctgggcctctctgggggctgcctgggtggcagatggtgt

SEQ ID NO: 512674 - DNA, 120 bp, Artificial Sequence
  ENSG00000164535_4 (sequence is synthesized)
tcagtgcgacaggacagttgtaaacggcatcatcgcaaccgtcgtggtcagttggatcatcatcgctgccacagtggtttccattatcattgtctttgaccctcttggggggaaaatggc

SEQ ID NO: 512675 - DNA, 120 bp, Artificial Sequence
  ENSG00000164535_5 (sequence is synthesized)
tccatattcctctgccggccccagccacctggatagtcatgattcaagccagttacttaatggcctcaagacagcagctacaagcgtgtgggaaaccagaatcaagctcttgtgctgttg

SEQ ID NO: 512676 - DNA, 120 bp, Artificial Sequence
  ENSG00000164535_6 (sequence is synthesized)
cattgggaaagacgaccatactcgggttgctttttcgagtacggcagagcttttctcaacctacttttcagacacagatctggtgcccagcgacattgcggcgggcctcgccctgcttca

SEQ ID NO: 512677 - DNA, 120 bp, Artificial Sequence
  ENSG00000164535_7 (sequence is synthesized)
tcagcaacaggacaatatcaggaacaaccaagagcctgcccaggtggtctgccatgccccagggagctcccaggaagctgatctggatgcagaattagaaaactgccatcattacatgca

SEQ ID NO: 512678 - DNA, 120 bp, Artificial Sequence
  ENSG00000164535_8 (sequence is synthesized)
gtttgcagcagcggcctatgggtggcccctctacatctacagaaaccccctcacggggctgtgcaggattggtggtgactgctgcagaagcagaaccacagactatgacttggtcggagg

SEQ ID NO: 512679 - DNA, 120 bp, Artificial Sequence
  ENSG00000164535_9 (sequence is synthesized)
cgatcagctcaactgtcacttcggctccatcctgcacaccacagggctgcagtacagggacttcatccacgtcagcttccatgacaaggtttacgagctgccgtttttagtggctctgga

SEQ ID NO: 512680 - DNA, 120 bp, Artificial Sequence
  ENSG00000164535_10 (sequence is synthesized)
tcacaggaaagagtctgttgtggtcgctgtgagggggaccatgtctctgcaggatgtccttacggacctgtcagcggagagtgaggtgctggacgtggagtgtgaggtgcaggaccgcct

SEQ ID NO: 512681 - DNA, 120 bp, Artificial Sequence
  ENSG00000164535_11 (sequence is synthesized)
agcattgctcctgagtaccggctggtcatagtgggccacagcctcgggggcggggcggccgccctgctggccaccatgctcagagccgcctacccgcaggtcaggtgctacgccttctcc

SEQ ID NO: 512682 - DNA, 120 bp, Artificial Sequence
  ENSG00000164535_12 (sequence is synthesized)
ccaccccgggggctgtggagcaaagctctgcaggaatattctcagagcttcatcgtgtcactcgtcctggggaaggatgtgattcccaggctcagtgtgaccaacttggaagatctgaag

SEQ ID NO: 512683 - DNA, 120 bp, Artificial Sequence
  ENSG00000164535_13 (sequence is synthesized)
agaagaatcttgcgagtggtcgcgcactgcaataaacccaagtacaagatcttgctgcacggtttgtggtacgaactgtttggaggaaaccccaacaacttgcccacggagctggacggg

SEQ ID NO: 512684 - DNA, 120 bp, Artificial Sequence
  ENSG00000164535_14 (sequence is synthesized)
ggcgaccaggaagtcctgacacagcctcttctgggggagcagagcctactgacgcgctggtccccggcctacagcttctccagcgactccccactggactcttctcccaagtacccccct

SEQ ID NO: 512685 - DNA, 120 bp, Artificial Sequence
  ENSG00000164535_15 (sequence is synthesized)
ctctaccctcccggcaggatcatccacctgcaggaggagggcgcctcggggcggtttggctgctgctctgctgctcactatagcgccaagtggtcacacgaagcggaattcagcaaaata

SEQ ID NO: 512686 - DNA, 120 bp, Artificial Sequence
  ENSG00000164535_16 (sequence is synthesized)
ctcataggtccgaagatgctcaccgaccacatgccagacatcctgatgcgggccttggacagcgtggtctccgacagagcggcctgcgtctcctgtccagcacaaggggtctccagtgtg

SEQ ID NO: 512687 - DNA, 120 bp, Artificial Sequence
  ENSG00000164535_17 (sequence is synthesized)
gacgtggcctgaccagggccactggaaactgtcccaggaacgatggactcacgcttttgtccttaaactgacttaccatccgaggagttcccatgacgccaaaacagcgaatgtccatca

SEQ ID NO: 512688 - DNA, 120 bp, Artificial Sequence
  ENSG00000164535_18 (sequence is synthesized)
acaggaatcggatgggaacagaattccatggtctcaatgacttaagtttatgggaagtcattgtggccataatggtagcagaagtagtgagcacgctcaggtgataggacgactcctgag

SEQ ID NO: 512689 - DNA, 120 bp, Artificial Sequence
  ENSG00000164535_19 (sequence is synthesized)
acccagcgaccgtggagacagcctcgggaagccctggcccgtggatggatcccttggctgtctgaggactgctccagaagtgcgggaatccagggcccacccagaagaccgtgaacagtt

SEQ ID NO: 512690 - DNA, 120 bp, Artificial Sequence
  ENSG00000164535_20 (sequence is synthesized)
ccttagcctcccacccccaaggcagctcttttcatccaactcagtttacaggcgtggtttgtttttcaaactgggcttcctggatgtacaaatggaactgtggtgagggtgcgggctggg

SEQ ID NO: 512691 - DNA, 120 bp, Artificial Sequence
  ENSG00000164535_21 (sequence is synthesized)
gttttctcctgggcgtcaccaagggcagccctgggctctggctggggatgaagacgaaacccgatcgggaaagtaagtggagcccccggccccgccgagccacagccccccaactgccta

SEQ ID NO: 512692 - DNA, 120 bp, Artificial Sequence
  ENSG00000164535_22 (sequence is synthesized)
ttcccactgcccagttgtttgtccacatcaggagttgctgattgaattcttgctactcttctggctctggggtcggccagtggattcaggagttgaaacaataaagcgcgcgtcaccata

SEQ ID NO: 512693 - DNA, 120 bp, Artificial Sequence
  ENSG00000164535_23 (sequence is synthesized)
gttgatcccgtctcccaggtactgagcatagtacccagtggttaggttttcattccttcccctgccctcctctagtagccccagtgtctattgtcccctctttgtgtccatgaataccca

SEQ ID NO: 512694 - DNA, 120 bp, Artificial Sequence
  ENSG00000164535_24 (sequence is synthesized)
atgttgagcttccaccgtcgcatcagaccatgcggtgtttgcttttctctgtctgcgttaattcgctgaggatgatggcccgcagctgcatccgttgctgcagaggatgtgtttttgcgc

SEQ ID NO: 512695 - DNA, 120 bp, Artificial Sequence
  ENSG00000164535_25 (sequence is synthesized)
ttttctatgcttgggcccactgtctttaacatcaagtttgtgtttcttatcacagctctgggtgctttacccagcagcctcccccatgcccactccgcagcctggacgctgctgccgggg

SEQ ID NO: 512696 - DNA, 120 bp, Artificial Sequence
  ENSG00000164535_26 (sequence is synthesized)
cctccagcccagcagcacagcactcgcctgtggaccttttcaaatatggctggtgtggagccgtgcccagggccccagccagcgggtcctgctgcccctgttgggaggacgccgcctgtc

SEQ ID NO: 512697 - DNA, 120 bp, Artificial Sequence
  ENSG00000164535_27 (sequence is synthesized)
ctctctgctttcacaacaacctcttccttcgggtctggctgtggcgtcacctcctccagggagctgcccctgcgcctgggctgtgccccatcctctgactcggcactgcctggcccttgc

SEQ ID NO: 512698 - DNA, 120 bp, Artificial Sequence
  ENSG00000164535_28 (sequence is synthesized)
tgtggtgctagtctaggcctcctcctctccacggtttcacctgttacggggctcctgaggacgggaaccaggctttgttcagaaccctggcacaggttctgtgccacggggtccttagaa

SEQ ID NO: 512699 - DNA, 120 bp, Artificial Sequence
  ENSG00000164535_29 (sequence is synthesized)
tacgtgtgtgtgatggggaaggcgcagggcgtgtcttaggcacactccatggtcccctccacccttcacgcctggcccagagctggtcgtgccatcagggccctcaggagccaccgctgg

SEQ ID NO: 512700 - DNA, 120 bp, Artificial Sequence
  ENSG00000164535_30 (sequence is synthesized)
gtttccctctttagtttagggttcagtcccaggaccgaactaggagatggtgccatccccgccatcctccacagaagtgtcaggagcagggaccacctgtcattctcccaccctgcccat

SEQ ID NO: 512701 - DNA, 66 bp, Artificial Sequence
  ENSG00000164535_31 (sequence is synthesized)
ctgctctaacagcttgctacttacaagtcatgtggtcaagactcatcttttttttcttttattttc

SEQ ID NO: 512702 - DNA, 120 bp, Artificial Sequence
  ENSG00000164535_32 (sequence is synthesized)
agttcggccacgtccctggccacgtcgcgggcgatctcgccatcttcgccgcttcctctcaggggccgccgcctcctgagccgcccagccccggggccgccgcgctgcgccgaccgccac

SEQ ID NO: 512703 - DNA, 120 bp, Artificial Sequence
  ENSG00000164535_33 (sequence is synthesized)
cgccgccgccgccatgaacattttccggctgactggggacctgtcccacctggcggccatcgtcatcctgctgctgaagatctggaagacgcgctcctgcgccggtggattggcattctg

SEQ ID NO: 512704 - DNA, 120 bp, Artificial Sequence
  ENSG00000164535_34 (sequence is synthesized)
agttttacctttgcaggaacagtggatgcttatcagtgtctttgattcagaacttcgtggattctgtagttgttttagagaaatggggtcttgctatgtggcccaggctggtctcaacct

SEQ ID NO: 512705 - DNA, 120 bp, Artificial Sequence
  ENSG00000164535_35 (sequence is synthesized)
cctcctgcctcagcctcccaaatagctcagattgtaggtgtgagccacttggcacagcggtagaactttatgtttaaatgttatgtaaaaagtctaaatctgaccagccgtaggaacttg

SEQ ID NO: 512706 - DNA, 120 bp, Artificial Sequence
  ENSG00000164535_36 (sequence is synthesized)
cagccgtaggaacttggctgaagtaaattgtgatatgttcacacagcacaaaacggtgtagctacagaaaaagccacagaaatgtatctgtggaaagatgtttggttgttttgggttttt

SEQ ID NO: 512707 - DNA, 90 bp, Artificial Sequence
  ENSG00000164535_37 (sequence is synthesized)
gagacagggtctcactctgctgcccagtggtgcgacgataactcactgcagcctgaacttcatgtgttccagcgacctataggcgctcgc

SEQ ID NO: 512708 - DNA, 120 bp, Artificial Sequence
  ENSG00000164535_38 (sequence is synthesized)
gctggactataggcgctcgccaccaagccccgttaatttttttttttttagtagagtcaggatccaggctggtcttgtatttttattttagtagagactatgtcgcccaggctggtcttg

SEQ ID NO: 512709 - DNA, 120 bp, Artificial Sequence
  ENSG00000164535_39 (sequence is synthesized)
ttggcctccctaagtgctgggattacaagcgtgcgccaccacacctggcacctgcttcacgtcaggcgctgtgcaaggtgccaggagcacagccatgcacgatggacgtggctgctgatt

SEQ ID NO: 512710 - DNA, 120 bp, Artificial Sequence
  ENSG00000164535_40 (sequence is synthesized)
ccatgcacgatggacgtggctgctgattctgcagtctcagatcccaggagagactcacacatcagtgcacagcgtcatcccatctttgagtctctgctgggcctgccttgtctgaggatt

SEQ ID NO: 512711 - DNA, 120 bp, Artificial Sequence
  ENSG00000164535_41 (sequence is synthesized)
agaatcttgcgagtggtcgcgcactgcaataaacccaaggtaagcgggtgccttgttgagagggtcagcaggacacggggcctgtccctgagatcctgtggagagccgggaggaattgca

SEQ ID NO: 512712 - DNA, 120 bp, Artificial Sequence
  ENSG00000164535_42 (sequence is synthesized)
ccctcagtgcagggcactctatgctgttgctggaagttctccttccaccatctgatcagattctgggctaggactctgtgatgtctaagaaagcaaatggctgcagcaagtgcgggaaat

SEQ ID NO: 512713 - DNA, 120 bp, Artificial Sequence
  ENSG00000164535_43 (sequence is synthesized)
agagtttttaatataatcacagagttgtgcagccatcaccatcatcaagtttataccattttcttcactcctgaaagaaatcctgtaccaggcgggacacagtggctcacacctgtaatc

SEQ ID NO: 512714 - DNA, 120 bp, Artificial Sequence
  ENSG00000164542_0 (sequence is synthesized)
aagcgcagcgcgcgcggaccccgggggcagtttcctagcaaccggcggagcggctacgtcacggtggcaggttctaagcgctgctgggcaccgtaaggccgccgtgtgtaccttccagta

SEQ ID NO: 512715 - DNA, 120 bp, Artificial Sequence
  ENSG00000164542_1 (sequence is synthesized)
gctacgggctggtggaagcgctgctcacagtcagtgtcgaaaagcttcactggcctgagcaagaacttgctaagaagtctattctaaatgcagaagattcattgatcattgacaacaaaa

SEQ ID NO: 512716 - DNA, 120 bp, Artificial Sequence
  ENSG00000164542_2 (sequence is synthesized)
gaagcatttcacatttgtcctcgggagtgctaaaagacattttcacaactggaaccagtagttacaatgtcctactacagagcaaggaggaaaaaaagtatcattcacaaaaacagtctt

SEQ ID NO: 512717 - DNA, 120 bp, Artificial Sequence
  ENSG00000164542_3 (sequence is synthesized)
cctccacctactccaaaagatgtagaaaacccagcaaatctcctaacacttctcgtagcaaagatcctcgcaggatgaaagccctggtgcctgtgacaagcagtggtacttggtactgcc

SEQ ID NO: 512718 - DNA, 120 bp, Artificial Sequence
  ENSG00000164542_4 (sequence is synthesized)
tggagaggcggcctgctgtttttgtcactagttcagtgtcaagtcctgtaaagtttacacatgatatctctgttacagggaatggcatagtactgccacctaaacccaaaagcaaggtca

SEQ ID NO: 512719 - DNA, 120 bp, Artificial Sequence
  ENSG00000164542_5 (sequence is synthesized)
agtggtgccatttctccactcttccaaagccaaagcctcagctgtctagaagctttgaaaagggagatgacttttctgggaagaaattttgtatattgactgctataaaacccaccaact

SEQ ID NO: 512720 - DNA, 120 bp, Artificial Sequence
  ENSG00000164542_6 (sequence is synthesized)
tagagaaagaaaaactgagattcttcaaatctgactatacctacaatcctcagtttgagtatgccaatcctgctctgccaagcgtattagctaagcatagccacgcatctgaccgatttc

SEQ ID NO: 512721 - DNA, 120 bp, Artificial Sequence
  ENSG00000164542_7 (sequence is synthesized)
ttaagcagtctatcaatattatggaactgactttacagaaatatggaagttatgaaaaatttgaacaagccactggtggtagcttgctctctaaaactcgaatctggagtcacgttagga

SEQ ID NO: 512722 - DNA, 120 bp, Artificial Sequence
  ENSG00000164542_8 (sequence is synthesized)
attgtagttcatctcactgaggacctgctttcccgagcgtcaatgacagtagtaaatggatgtccgactctgactatcaatgtgtccactgcacgtgagcattggctggagggaatgctg

SEQ ID NO: 512723 - DNA, 120 bp, Artificial Sequence
  ENSG00000164542_9 (sequence is synthesized)
aggcatgaaataggtacacattattttcgaggtattaacaacctccagcagccatggaacagttggactggacgtaaaaaacatgagctaaagccaaataatcccacagaggaaggacta

SEQ ID NO: 512724 - DNA, 120 bp, Artificial Sequence
  ENSG00000164542_10 (sequence is synthesized)
gcaagcattcacagtgttctgtttagaaaagacccttttttatggagggctgccctcctctactacactgtttatcaagccagccaaatgtctttttgtgaactctttaaagatattggc

SEQ ID NO: 512725 - DNA, 120 bp, Artificial Sequence
  ENSG00000164542_11 (sequence is synthesized)
aggtttgtcaaggaccccaatacaagatgggattattgtgtacgggccaagaggggatggactgatacttcccaaccagggtgttttagtaaagaccaggtatacttggatggaattctt

SEQ ID NO: 512726 - DNA, 120 bp, Artificial Sequence
  ENSG00000164542_12 (sequence is synthesized)
caaatcctccgatacagagataccatagacttccatctgctgactgctctcgggaaggtttcttatgaagatgtggatcgcttaaaaggattggcagttaccgaaaacatgagggtccct

SEQ ID NO: 512727 - DNA, 120 bp, Artificial Sequence
  ENSG00000164542_13 (sequence is synthesized)
catttcctgcaggaccatggccgatatatggaacacttagagaagatcatggaagtgaatgaactgactgacagggaactgaaagatcttatatagtaattagcgttctggcaaacatag

SEQ ID NO: 512728 - DNA, 120 bp, Artificial Sequence
  ENSG00000164542_14 (sequence is synthesized)
ctaagctatgcctccatgtatattaccagttaggtgcagttagcaccagaagatttataaaagaagaaagactacttgtgttttctgaagaagggtcttcagtattcagcggaattttta

SEQ ID NO: 512729 - DNA, 120 bp, Artificial Sequence
  ENSG00000164542_15 (sequence is synthesized)
ggttaagtacagatcttaaactatttccctaaaatgtttctataggttgcagggggaagttattcctattttctgaatctcgacagagtcagatgaaaatactactgctgagcatttttg

SEQ ID NO: 512730 - DNA, 120 bp, Artificial Sequence
  ENSG00000164542_16 (sequence is synthesized)
ccttatcctgctccaggtagcggagagccgcctcccgccgcgcccccgccaccgaggcccgggtcagaggctagaggccgcccgcccctgcgcggccctttcccctgagcccgcggagcc

SEQ ID NO: 512731 - DNA, 120 bp, Artificial Sequence
  ENSG00000164542_17 (sequence is synthesized)
gactcttggtcaaattgcatgataaatttctgcctgagcagtaagcactggcctagtgcttctgcctaaatatggaggtcagctccaactggagactggctgaattccattgctgttcag

SEQ ID NO: 512732 - DNA, 120 bp, Artificial Sequence
  ENSG00000164542_18 (sequence is synthesized)
actccaaagttatattttatttgataaataatggtaattattctcctttgaaaaattagttttgtgttgctccaaaaagctagctatatatctcagctttcttatttcttttatatgttg

SEQ ID NO: 512733 - DNA, 120 bp, Artificial Sequence
  ENSG00000164542_19 (sequence is synthesized)
agggattttaaagggagaggaaaagcaatttgaaaatttttcattaagtgttttattttaacattattgtttcaccttatcagcttataggaactaaattagagaatcacctctttttgt

SEQ ID NO: 512734 - DNA, 120 bp, Artificial Sequence
  ENSG00000164542_20 (sequence is synthesized)
tgtgatcttataagcaaaaacaaagacatttaaaaatattcaaattatttctatgttatggttaattcccactcaggacatgtaaatgtgcgacaagacgagtattacctgtatataaac

SEQ ID NO: 512735 - DNA, 120 bp, Artificial Sequence
  ENSG00000164542_21 (sequence is synthesized)
tccattgcattcatcaaaatttataatctgttatataggctctttgtgacaggaagcaattatattaggaagacagcttcagattctggttctaagctttcatgtgggagttacaaactt

SEQ ID NO: 512736 - DNA, 120 bp, Artificial Sequence
  ENSG00000164542_22 (sequence is synthesized)
gtggccaatttagccgcctacagacaagtgttgggtagcccacactacgtttttgttttctaattgatttctttgttgttttttgtttttttctgagacagattcttgctctttgcccag

SEQ ID NO: 512737 - DNA, 120 bp, Artificial Sequence
  ENSG00000164542_23 (sequence is synthesized)
gaccggggtcccgccgcccggggctcaggtaatggtagccaccggctgggcgcgccgctcgggactccaccctgcgccccgaccccttcggggcgcgcaggaggcgctcgcgaaaaacct

SEQ ID NO: 512738 - DNA, 120 bp, Artificial Sequence
  ENSG00000164542_24 (sequence is synthesized)
gaccccttcggggcgcgcaggaggcgctcgcgaaaaacctgtggagggaagagagaaatcggccccttatcctttcgtcacttattatcaaaaagcttcactggcctgagcaagaacttg

SEQ ID NO: 512739 - DNA, 120 bp, Artificial Sequence
  ENSG00000164542_25 (sequence is synthesized)
attccagagaggttttcctacacaaatacaaaataattggggaagggctactcaccttttttatgaaacagaatatgtaacaagcagaggacaaatagactgacctggttaaacgtaggt

SEQ ID NO: 512740 - DNA, 120 bp, Artificial Sequence
  ENSG00000164542_26 (sequence is synthesized)
tctggatgttgatgggtagcacctgcagtaaacttgaccatgctctgaaaaaagaaatttctgggtattgatggtttataaagccagctttgtgctattggttcagtatattttatcaaa

SEQ ID NO: 512741 - DNA, 120 bp, Artificial Sequence
  ENSG00000164542_27 (sequence is synthesized)
tctttgacttcatcaacccagtaatgacatagtttaaattttaaaatgagagttctgttttgctgtatttctcctgctagcctagctttgtattttatcatcagcttcagtatatacttg

SEQ ID NO: 512742 - DNA, 120 bp, Artificial Sequence
  ENSG00000164542_28 (sequence is synthesized)
tatatatatacctggattcaaatggttcttcatacaacttaatgatcagaaagaatgctgctgtaaacaccccactcaagattgctgctggaatttctacccaaagctgtctgagagttt

SEQ ID NO: 512743 - DNA, 120 bp, Artificial Sequence
  ENSG00000164542_29 (sequence is synthesized)
atctttacctcagtgcaggcttaaataatggtgctaatactggtagatatatactgtgaagcctggttcacattcatgctagaaaatgattttgggaaatcttttataggagaggttaca

SEQ ID NO: 512744 - DNA, 120 bp, Artificial Sequence
  ENSG00000164542_30 (sequence is synthesized)
tgatttttctctttcacatatctagaaggacttgcctcaaagaagaatgttgcagcaaacaggatatactctagctggtgcccaaaggttcttgcaaaaccatgaatcttgcttttagca

SEQ ID NO: 512745 - DNA, 120 bp, Artificial Sequence
  ENSG00000164542_31 (sequence is synthesized)
gtaaagggccagacactttggagcattgaaaggccttagcccctgctccccaactacgtgccatgctgggtagtgtgtatcctgtacatctgtgtgccaggctggggcagactgtgccaa

SEQ ID NO: 512746 - DNA, 120 bp, Artificial Sequence
  ENSG00000164542_32 (sequence is synthesized)
tgctcaccgaacactagaatctgctcttacacctctagcatgtatctcgttgtagcagagttgtgcactttctcagcattgtgtagtgttttctaattgcatctaaaaacttatcaaaag

SEQ ID NO: 512747 - DNA, 120 bp, Artificial Sequence
  ENSG00000164542_33 (sequence is synthesized)
tgattgtgaaaacagtgtcttagaagtataaacagaaatggcaatatttatgtcctgtgattcaagcccaaaggttataaattcaactttcacagggaatagcactgctaatcttacttt

SEQ ID NO: 512748 - DNA, 120 bp, Artificial Sequence
  ENSG00000164542_34 (sequence is synthesized)
atgatttaaatataaaggaaaatcacagcagccttaatttcctgttggtcggatcatttgcagcagttctagttcctgacttttaaaatggatgaaattttctctttgtctgatttggaa

SEQ ID NO: 512749 - DNA, 120 bp, Artificial Sequence
  ENSG00000164542_35 (sequence is synthesized)
aaggaactgcttttttgccttactgctttggtataaggatgaaaaacatgagcactctgcagacaaaatgaccttaaatcacattgattaagatattttaaaagttagcagtgaaccaaa

SEQ ID NO: 512750 - DNA, 120 bp, Artificial Sequence
  ENSG00000164542_36 (sequence is synthesized)
agtagtttcagattagcagaaataaagagctttaagttttaaaagttgagattgaatatttaatgaaagtttattaattctttttccaggaatagcagtaaggtcagtttttttccctaa

SEQ ID NO: 512751 - DNA, 120 bp, Artificial Sequence
  ENSG00000164542_37 (sequence is synthesized)
ttttttccctaaaataaaaagttttaataaacagaaaattatagcaacagtacttaggagaatagttgaagattgtattaattttaattataatagttatttgtcataggctattgatga

SEQ ID NO: 512752 - DNA, 120 bp, Artificial Sequence
  ENSG00000164542_38 (sequence is synthesized)
tagttttgtccactataattttaaaaatagttgtgtcaaatacaaattctggtaaactgttaggttttaacaccagacagtattcaaaggaaattaatgtttgcaaacataaatccatag

SEQ ID NO: 512753 - DNA, 120 bp, Artificial Sequence
  ENSG00000164542_39 (sequence is synthesized)
tcttcatttctttatattgtcacctttgtaaaagtgtttaaaatttgtattgtttgttttgtatatctttgggcatcttgtgtctagctataataaaaagaaacggtgccaaggttctca

SEQ ID NO: 512754 - DNA, 120 bp, Artificial Sequence
  ENSG00000164542_40 (sequence is synthesized)
attctcagggtgtgacggtcctgatattcaactttcttttgttcctgagtttgaaaacacaccccaattatttccatgtcttagccttgaggatgaagagaaaatttaactgtctgaaga

SEQ ID NO: 512755 - DNA, 120 bp, Artificial Sequence
  ENSG00000164542_41 (sequence is synthesized)
gagcggtgggtcatggctggctgcacccgcaaactcactcacctccgtaaacggatccatcgccccaggcgtcggactacgagacgatggaaacggtggttcaaattcaggaagagaaaa

SEQ ID NO: 512756 - DNA, 70 bp, Artificial Sequence
  ENSG00000164542_42 (sequence is synthesized)
acccgccaccatacccagctaatttttgtaattttagtgcagtgatttgcccgccttggcctcccaaagt

SEQ ID NO: 512757 - DNA, 120 bp, Artificial Sequence
  ENSG00000164542_43 (sequence is synthesized)
cccaaagtgttgaggttgcaggtgtgagccaccatgcctggcctctaattgattttttaatgtcttagatggagcatgcaatccctggttcttcctattgtgttaaattcctggcttgct

SEQ ID NO: 512758 - DNA, 120 bp, Artificial Sequence
  ENSG00000164542_44 (sequence is synthesized)
taggctccggtaagtagtttgggaaccgaagcttgattcttgtccatgaacttgttaatgcttcactgaaattgttaatcatcatcaaataaatatttaagcacttattcaaagataaaa

SEQ ID NO: 512759 - DNA, 120 bp, Artificial Sequence
  ENSG00000164542_45 (sequence is synthesized)
ataatgggattttcaaaattatcttcaagtttagcaaattatgatgtgaacgttatgaataatacttttaaattgctcactttaagcccttagcagttttgtgttttacagggctataat

SEQ ID NO: 512760 - DNA, 120 bp, Artificial Sequence
  ENSG00000164542_46 (sequence is synthesized)
acatttcagaacctcatttaagcatttgagaagaaattagctaatgtttatctgcagggcatagttttgagatcataaaggccgacaatatttggtcaaattaactttgttcaggttttt

SEQ ID NO: 512761 - DNA, 120 bp, Artificial Sequence
  ENSG00000164542_47 (sequence is synthesized)
ataatatattagcttcaacttggcattgtcagtgactgaaaatctgtttgtaggataggtaaaactgcatggttctctcgcctgtggtgcatgtcctattttagcatttttgctgataat

SEQ ID NO: 512762 - DNA, 120 bp, Artificial Sequence
  ENSG00000164542_48 (sequence is synthesized)
agttatttggtcttgcggccagcagatattttgctgtttattatagataacatggaatctggccagtcttttgaagccattatgtaaaacttaattatgtaaagccattatgtaaagatt

SEQ ID NO: 512763 - DNA, 120 bp, Artificial Sequence
  ENSG00000164542_49 (sequence is synthesized)
aaaataattttaatcatggtatttactttcctttgttagggtctctttgcttctgcttctgtattctttaatgggtatttgctttttaaaaaatgtgctgagattgtgctaaaaattgtg

SEQ ID NO: 512764 - DNA, 120 bp, Artificial Sequence
  ENSG00000164542_50 (sequence is synthesized)
attcaaattgataacttactaatataaagtggcacttctggatgggagaaggcagcattaacatagtgattacataatccactcttaggctgtactacttccacattgtaaaatggagta

SEQ ID NO: 512765 - DNA, 120 bp, Artificial Sequence
  ENSG00000164542_51 (sequence is synthesized)
aagaaaatacctactttaggagattattttgataattaaatgagagaatgcttagtgcatatattgcagttatcatcgtgcttggcacctacaaagcactaataaagaggttagctgtta

SEQ ID NO: 512766 - DNA, 120 bp, Artificial Sequence
  ENSG00000164543_0 (sequence is synthesized)
gcagtccgagcgccgcgctggggagagcgggtgtttgaaggctccgcggaccggcactaggagccgggggcgggtccgtgaccctccggctgctcggagtgaacaggcggccaggaaaga

SEQ ID NO: 512767 - DNA, 120 bp, Artificial Sequence
  ENSG00000164543_1 (sequence is synthesized)
agcgggcctgaacaccatgatccctttggagaagccaggcagcggcggctcctccccaggcgccacctcaggctcgggccgggcaggccggggtctgagcgggccgtgccggccgccgcc

SEQ ID NO: 512768 - DNA, 120 bp, Artificial Sequence
  ENSG00000164543_2 (sequence is synthesized)
gccgccccaggcccgcgggctgctgacagagatacgcgccgtggtgcgcaccgagcccttccaggacggctacagcctgtgcccgggccgggagctgggcagggggaaatttgcagtggt

SEQ ID NO: 512769 - DNA, 120 bp, Artificial Sequence
  ENSG00000164543_3 (sequence is synthesized)
gagaaaatgtataaagaaagattctgggaaagaatttgctgcaaagttcatgagaaaaagaagaaaaggccaagattgtcggatggaaataattcatgagattgctgtacttgaactagc

SEQ ID NO: 512770 - DNA, 120 bp, Artificial Sequence
  ENSG00000164543_4 (sequence is synthesized)
acaagacaatccttgggtcattaatttacatgaagtttatgagactgcatcagaaatgatcttagttctggaatatgctgctgggggtgaaatctttgaccagtgtgttgcagacagaga

SEQ ID NO: 512771 - DNA, 120 bp, Artificial Sequence
  ENSG00000164543_5 (sequence is synthesized)
agaagcctttaaagaaaaagatgttcaaagacttatgcgacagattttagaaggtgttcactttttacacactcgtgatgtagttcatcttgatttgaagcctcagaatattctgttgac

SEQ ID NO: 512772 - DNA, 120 bp, Artificial Sequence
  ENSG00000164543_6 (sequence is synthesized)
aagtgaatctccattgggtgacattaagattgttgattttggcctttcaagaatattgaagaacagtgaagagctccgagaaattatgggtacccctgaatatgtggctcctgaaattct

SEQ ID NO: 512773 - DNA, 120 bp, Artificial Sequence
  ENSG00000164543_7 (sequence is synthesized)
tagttatgatcctataagcatggcaacagatatgtggagcattggagtgttaacatatgtcatgcttacaggaatatcacctttcttaggcaatgataaacaagaaacattcttaaacat

SEQ ID NO: 512774 - DNA, 120 bp, Artificial Sequence
  ENSG00000164543_8 (sequence is synthesized)
ctcacagatgaatttaagttattctgaggaagaatttgatgttttgtctgagtcggctgttgatttcatcaggacacttttagttaagaaacctgaagatcgagccactgctgaagaatg

SEQ ID NO: 512775 - DNA, 120 bp, Artificial Sequence
  ENSG00000164543_9 (sequence is synthesized)
tctaaagcacccctggttgacacagagcagtattcaagagccttctttcaggatggaaaaggcactagaagaagcaaatgccctccaagaaggtcattctgtgcctgaaattaattcgga

SEQ ID NO: 512776 - DNA, 120 bp, Artificial Sequence
  ENSG00000164543_10 (sequence is synthesized)
taccgacaaatcagaaaccaaggaatccattgtaaccgaagagttaattgtagttacttcatatactctaggacaatgcagacagtctgaaaaagagaaaatggagcaaaaggccatttc

SEQ ID NO: 512777 - DNA, 120 bp, Artificial Sequence
  ENSG00000164543_11 (sequence is synthesized)
caaacgatttaaatttgaggaacctttgctacaagaaattccaggagaatttatctactgagcaatatttccctttagaacttcaagatttctacattgaaaatgttaatattatttatg

SEQ ID NO: 512778 - DNA, 120 bp, Artificial Sequence
  ENSG00000164543_12 (sequence is synthesized)
gacctctggccaaatggtacatgtactggaagtggataaccagtatcacttacacaaacaaaaataactttgtcaaatttgtggagttaggtggaagccagattttaaaagttgccaacc

SEQ ID NO: 512779 - DNA, 120 bp, Artificial Sequence
  ENSG00000164543_13 (sequence is synthesized)
aggagatttaacaggtacagttacccgtttcaatgttatttttaagaagggagatgttggcacctttgaattctacatcctgtttctccagaatgagaatttgtgtacaaagatatttgt

SEQ ID NO: 512780 - DNA, 120 bp, Artificial Sequence
  ENSG00000164543_14 (sequence is synthesized)
attcactttctttaaaaaatccaagtaaaagtgccaaaactacacttctgtaaatctcttgcattattcatatgtgtatctatatctgcataatgtttgttaatgtctactaaaattgct

SEQ ID NO: 512781 - DNA, 120 bp, Artificial Sequence
  ENSG00000164543_15 (sequence is synthesized)
actttttcactttggatttgtttttggcaaaattttagtctaaacagacatctaaattttcgagacttagaataacattcactaaagtttgataatgtcttttttaaatattttcttact

SEQ ID NO: 512782 - DNA, 120 bp, Artificial Sequence
  ENSG00000164543_16 (sequence is synthesized)
tttttctcttcaatgtcactagtaagagaggtggtaatttttcacctctgaaattattctgggtttaggtgtcagctcttgagctgcttccctcatcacaccacactcacatgcatctgt

SEQ ID NO: 512783 - DNA, 120 bp, Artificial Sequence
  ENSG00000164543_17 (sequence is synthesized)
tctctctcacactctatacccctgccacttcctggcacctccccccatgcttgtcatttaattttggccacttgtaggtatcagtgtgatctgatcaacactctggttaccttggtcagt

SEQ ID NO: 512784 - DNA, 120 bp, Artificial Sequence
  ENSG00000164543_18 (sequence is synthesized)
gaaaagatgctactatattgcttttgtcccaaagtgagtaaaatcccctagagcagagagagagagagagagagagagtgtcttcatgccaaccacagcctgtttctgctgagtttctta

SEQ ID NO: 512785 - DNA, 120 bp, Artificial Sequence
  ENSG00000164543_19 (sequence is synthesized)
tcagccctcaagctatgctaggaaaagttataaaatgccaaaatatttataaacatttactttgtccataaaaaatttacattggatactctgtaagtaggaggtactttgtcccaaaaa

SEQ ID NO: 512786 - DNA, 120 bp, Artificial Sequence
  ENSG00000164543_20 (sequence is synthesized)
gatgtataagaatgtactaatagttttatttgattaggattgaacagttcagttgtatctatgccccacagtgaccagtaaagtccaattaaaatatggaaatgtaaaagtgtatgccga

SEQ ID NO: 512787 - DNA, 120 bp, Artificial Sequence
  ENSG00000164543_21 (sequence is synthesized)
ataccttaaagtaactaattatccttacacacaaaaggctcagtgcattaaatatttgcctatcacctgtgtgctgtgtaccgtggccatgcctcgctctgcactatgaacaactcagac

SEQ ID NO: 512788 - DNA, 120 bp, Artificial Sequence
  ENSG00000164543_22 (sequence is synthesized)
ctgtcccttcacggtctgattagggtgtcacacaaagctctctccctaacatggtttctcaactgtcaaaatcatgaaaatgacagcacctaaccactattttaaagtatgtacagtaaa

SEQ ID NO: 512789 - DNA, 120 bp, Artificial Sequence
  ENSG00000164543_23 (sequence is synthesized)
tacccaaatgtgtgtaaatgtcatagacatatacaaagtcagtaatctcacccagtcctgctgtgtgaacctgtcaaagcacctgggagtgccctttacaccattaggtgaaattcatca

SEQ ID NO: 512790 - DNA, 120 bp, Artificial Sequence
  ENSG00000164543_24 (sequence is synthesized)
ggcacttcagacaaccaggttgcactgttttctcactaaattggctttatttatacagtttcctggaacctagcattcctaaacaagctccaaaatgcagaagaagaaattgtgccacag

SEQ ID NO: 512791 - DNA, 120 bp, Artificial Sequence
  ENSG00000164543_25 (sequence is synthesized)
tgatagagtttttaatgaatatccatggccacagttttgagtctcaggtaagtcttggaagaagttaaacacagtattaggcaaatatttatctctctgaaaaaatagggaggaggtgac

SEQ ID NO: 512792 - DNA, 120 bp, Artificial Sequence
  ENSG00000164543_26 (sequence is synthesized)
caggaaaaaataaccactattgaatgacacgtttgtacttgatggatctgtcatcaagttttaaaatcagaatcatttgggctttttaaaaaccattttatactcgtaataaatatattt

SEQ ID NO: 512793 - DNA, 120 bp, Artificial Sequence
  ENSG00000164543_27 (sequence is synthesized)
aatataattgctgtatttgtgagaaagatctgttttcttttagctggccacttcagtttgctgcgtatctttagctgctgttgtgcttaaatactgagtcatagggtgcttttttaagag

SEQ ID NO: 512794 - DNA, 120 bp, Artificial Sequence
  ENSG00000164543_28 (sequence is synthesized)
gcccttcagaatatacttgtaaaggtgtattggcattttttggtttataagataaaaacagggcatgaagagccttcatagtattaggccaaataaaatctattaataactgccagctag

SEQ ID NO: 512795 - DNA, 120 bp, Artificial Sequence
  ENSG00000164543_29 (sequence is synthesized)
ctctacacttatctaaagctgttaatgttcctttttttctatcaccaaatttataaaggactaaacagtactattgagtttactcggtttataaatccagttttaactataattcaacaa

SEQ ID NO: 512796 - DNA, 120 bp, Artificial Sequence
  ENSG00000164543_30 (sequence is synthesized)
tattttggtgtggtgaaacgttgtttatgaaatgtataaaatgtataagttttaatcaactgggaaatgatatttgattgatcttgtgttttgttgttttcaaatgaaaactaggaggta

SEQ ID NO: 512797 - DNA, 120 bp, Artificial Sequence
  ENSG00000164543_31 (sequence is synthesized)
attaatacctttctctagtagtggtatagaggaaggacagatgctcattgttgaatctcttaaatttttccagctaacctcagtttggaagaaaaatgtattaaagggttataaagatca

SEQ ID NO: 512798 - DNA, 120 bp, Artificial Sequence
  ENSG00000164543_32 (sequence is synthesized)
agaaatcaaaatttaggagattagcatacctcgcatttcctttccaacctcttcctcccactcatttattctatgggggtttgtcacaaatgagtagtagatacatgaccttgagtattt

SEQ ID NO: 512799 - DNA, 120 bp, Artificial Sequence
  ENSG00000164543_33 (sequence is synthesized)
cgttttttcatagaaatagaacattttcattcctttttttaattgtaattaccacagtttttagtctttggtctgtttttctgtggattcagtacttattgactgcattttaatagttta

SEQ ID NO: 512800 - DNA, 120 bp, Artificial Sequence
  ENSG00000164543_34 (sequence is synthesized)
gcctccttatttgtatagttttgaaaaaaaaaatctttagttaagtggattgtgagtagatttttttaaggagcatttttataatatttttcctgaatccttgcatatttgacagtgtct

SEQ ID NO: 512801 - DNA, 120 bp, Artificial Sequence
  ENSG00000164543_35 (sequence is synthesized)
ttctattgtgtttatgtgtggcagcaatttactttatatcaaagttttttgtttttgtttttttttttgtgagacacagtctcaccctatcacccaggctggagtgcactggcactatct

SEQ ID NO: 512802 - DNA, 120 bp, Artificial Sequence
  ENSG00000164543_36 (sequence is synthesized)
agtgatcctcccacctcagcctccccaatagctgggtctacaggcatgcaccatgacactcggctagcttttgtttattttttgtagagacagagtctcattatgttgcccaggctggtc

SEQ ID NO: 512803 - DNA, 120 bp, Artificial Sequence
  ENSG00000164543_37 (sequence is synthesized)
gttgcccaggctggtcttgaactcctggttcaagcgatcctcctgccttggccttgcaaagtgctgggtacccagcctcaaagcatattatttttctcaattctatagatgcaacttagt

SEQ ID NO: 512804 - DNA, 120 bp, Artificial Sequence
  ENSG00000164543_38 (sequence is synthesized)
atagatgcaacttagttgcctttgtcccatgcctgtagtgtcagaatgcccaatttttttttttaaccttgttgactttttgttaatgggtagatgttttaaaaagctcactctgactgc

SEQ ID NO: 512805 - DNA, 120 bp, Artificial Sequence
  ENSG00000164543_39 (sequence is synthesized)
aacagaaaaatagatcagaggggtgggacaagtagttgaaaaggcccaggtgagaggagaaagtgccacgggtgagggtggggcaatggagaagcagaaatatcagtggtagtgagaaag

SEQ ID NO: 512806 - DNA, 120 bp, Artificial Sequence
  ENSG00000164543_40 (sequence is synthesized)
ttttaaaagccatgatctgatagagacaatgcttaataacacagagattgtcagtttatgtttggtgtttttaaaatatttaaatattttgtaaaatactagggactcaacaatggtggg

SEQ ID NO: 512807 - DNA, 120 bp, Artificial Sequence
  ENSG00000164543_41 (sequence is synthesized)
gccttatagtttctaatgcttagttttttatctcttagagcaaattaggaatttttttccacaaaactaaatgttttcttctctttctgatactagctcctgaaattcttagttatgatc

SEQ ID NO: 512808 - DNA, 120 bp, Artificial Sequence
  ENSG00000164543_42 (sequence is synthesized)
ctataagcatggcaacagatatgtggtaagagttattaatgaaaaattgatcaaattagtttcaagaaatgagtatggtactaaatttttcttgcattttctttctaatttaggagcatt

SEQ ID NO: 512809 - DNA, 120 bp, Artificial Sequence
  ENSG00000164543_43 (sequence is synthesized)
caagctccaaaatgcagaagaagaaattgtgccacagtgatagagtttttaatgaatatccatggccacagttttgagtctcagacagggaagcttgaggagctacaaggtccagagtgt

SEQ ID NO: 512810 - DNA, 120 bp, Artificial Sequence
  ENSG00000164543_44 (sequence is synthesized)
ccgtggggaaaggcaaacctgccgctgagttggaagacaacagctgctaacacacgaagcctcagaaagccctcgccaggactcagagattctctcgagtgactcgtgtggcaaacatcc

SEQ ID NO: 512811 - DNA, 120 bp, Artificial Sequence
  ENSG00000164543_45 (sequence is synthesized)
actctcagacgctcaacaggtgcgcaactctgctaacgcagtaggctgtcctggccaaagggtggtgctgtgagtcgcctccagcctccgggccgtcccgaaagctgcaccttctccccc

SEQ ID NO: 512812 - DNA, 120 bp, Artificial Sequence
  ENSG00000164548_0 (sequence is synthesized)
attttgctggagcctgcgaccgagtgggagtggagtggagcggctgtggttgccgactctttcctcttccccacggtccagtcagcgggttaattaggccatcggccctcgagccgagac

SEQ ID NO: 512813 - DNA, 120 bp, Artificial Sequence
  ENSG00000164548_1 (sequence is synthesized)
ttgtctcttatttagttctggggagcgcctcgtcgacatgagtgatgtggaggaaaacaacttcgagggcagagagtctcgctctcagtcaaaatctccaacgggaactcctgctcgtgt

SEQ ID NO: 512814 - DNA, 120 bp, Artificial Sequence
  ENSG00000164548_2 (sequence is synthesized)
aaaatcggagagcaggtcaggatctcgtagtccatcaagggtttccaaacactctgaatcccattctcgatcaagatcaaaatccaggtcgaggtcaaggagacattctcatagacgtta

SEQ ID NO: 512815 - DNA, 120 bp, Artificial Sequence
  ENSG00000164548_3 (sequence is synthesized)
cactcgatccagatcccactctcactctcataggagacgatctcgaagtagatcatatacaccagaataccggcggcgaaggagccgaagccattctccaatgtctaaccggagaagaca

SEQ ID NO: 512816 - DNA, 120 bp, Artificial Sequence
  ENSG00000164548_4 (sequence is synthesized)
tactggcagcagggcaaatccagatcccaacacttgccttggagtgtttggcctcagtttgtacacaacagagagggatcttcgtgaagtattttctcgatatggaccattgagtggtgt

SEQ ID NO: 512817 - DNA, 120 bp, Artificial Sequence
  ENSG00000164548_5 (sequence is synthesized)
caatgtggtttatgatcagcgaactgggcgatctcgaggatttgcttttgtgtattttgagagaatagatgactcaaaggaggctatggaaagggcaaatggaatggagctggatggtag

SEQ ID NO: 512818 - DNA, 120 bp, Artificial Sequence
  ENSG00000164548_6 (sequence is synthesized)
aagaattcgggtggattattctataaccaagagagcgcacacaccaacaccaggcatctacatgggcagaccaactcatagtggtgggggtggtggaggaggcggcggcggtggaggtgg

SEQ ID NO: 512819 - DNA, 120 bp, Artificial Sequence
  ENSG00000164548_7 (sequence is synthesized)
ccttctccttattatagtcgatatagatcacgatcaagatctcgttcctacagcccaagacgctattgataacggaatggttgcaattaaggacattttttttcctcttttttttttttt

SEQ ID NO: 512820 - DNA, 120 bp, Artificial Sequence
  ENSG00000164548_8 (sequence is synthesized)
attctgagatttccccaagctgtggattcttcctactccttaagaaaaaaactttggtttatttagcatctacacttttgtcagttgtgttgctgttttccacccattttattatactct

SEQ ID NO: 512821 - DNA, 120 bp, Artificial Sequence
  ENSG00000164548_9 (sequence is synthesized)
taaaagatgtaattgttgtcattttgaacagttaaacatcttgagtataaaaagaaccccaatgttatgttatgctttgtaaatttttttttttgcttttacctagataaacttctagct

SEQ ID NO: 512822 - DNA, 120 bp, Artificial Sequence
  ENSG00000164548_10 (sequence is synthesized)
aatcaaataaggaaagaaactgtctttttaaagcttcttttgtgttagatactgtattagagatctgcatttatcatgagttcctttttttttttaactttatttttgggaaagtaacac

SEQ ID NO: 512823 - DNA, 120 bp, Artificial Sequence
  ENSG00000164548_11 (sequence is synthesized)
atgaagtagttcagtcatgtcaggtttgtctggggtggaatggaacagtcaggtagttgaaagtttttttttagagatgaaaagcttgtgaactcctgtaaaacatgctgtatttgaaat

SEQ ID NO: 512824 - DNA, 120 bp, Artificial Sequence
  ENSG00000164548_12 (sequence is synthesized)
acatctgttaaaacttaaaaactaaagtgtgattttttttgttgttgttaagtttattgaagtttattcccttaatcagtgaaggacaacccttatttattacctagagcagttgtataa

SEQ ID NO: 512825 - DNA, 120 bp, Artificial Sequence
  ENSG00000164548_13 (sequence is synthesized)
ttcgctgttagaaattttggtattgggacagtggataagcaggttatcacatagcatagaattcttaaaagatacatgtggggaaaagtagtctcaaataaaagctaatttctttgaaaa

SEQ ID NO: 512826 - DNA, 120 bp, Artificial Sequence
  ENSG00000164548_14 (sequence is synthesized)
cttcgagggcagatgagcggccgcgtctctgttggaaccggcggcgttgcgtctaaaaaggcgaaagccttgaggttgaaggtgggacgagcctaatgaagtggttaatgttcgtgaaga

SEQ ID NO: 512827 - DNA, 120 bp, Artificial Sequence
  ENSG00000164548_15 (sequence is synthesized)
aattgaagagttttttccaagaatgtggaagataaatcaagataaaagaaggctaatgaaaagtattaaagatcagaaaattaaaattgaatgggggaaaaaattgaacagaagattggt

SEQ ID NO: 512828 - DNA, 120 bp, Artificial Sequence
  ENSG00000164548_16 (sequence is synthesized)
cagatagaagcacttgaatatttttttaaggctattttgaattgtttgaattggggaagaatacacgaagtatgaaaaatgaaaaactcaatgaagaatgaagagaagtagaaagcaaga

SEQ ID NO: 512829 - DNA, 120 bp, Artificial Sequence
  ENSG00000164548_17 (sequence is synthesized)
ctggagccatcgcgattgattcctcccatcccaagatggcttctgggttccactccttccccaaacaccacggataacacccctcccccttttttggaggctgactgatacctggacttc

SEQ ID NO: 512830 - DNA, 120 bp, Artificial Sequence
  ENSG00000164548_18 (sequence is synthesized)
tgggtcctcttccctccccgcccccgcattgcttcctcccttctccccacccctgaggcttccttatgtctgctccgaggtgtgggtccccgtcgcggttgggcgggaggaggcggcagg

SEQ ID NO: 512831 - DNA, 120 bp, Artificial Sequence
  ENSG00000164548_19 (sequence is synthesized)
tttgagagttttgtgaagcccttcttgattatgtatgtagggaataaggcaaaccagaataccatgggagtcagtaaaatgagatacggaggcaatttctcatgaaagggatgttcttcc

SEQ ID NO: 512832 - DNA, 120 bp, Artificial Sequence
  ENSG00000164548_20 (sequence is synthesized)
tcacttttctcttttttaagccattcaatttgtattaaagtgtcctggaaaatagtcattcacactaatggagaatttttacatttttctgcagtagtggtgggggtggtggaggaggcg

SEQ ID NO: 512833 - DNA, 120 bp, Artificial Sequence
  ENSG00000164548_21 (sequence is synthesized)
tgaatgggtcctaggttaagtaaatgtatggtttatgttccagtgtctgtatgatcaagttgtagatgaatttgcatgattacttagttaatagagaattggtgatctggttcaagtagg

SEQ ID NO: 512834 - DNA, 120 bp, Artificial Sequence
  ENSG00000164548_22 (sequence is synthesized)
gaattattgaggacagttagcagtattaacagtgggttattattgagctgaaattttttctggagggtgttgtctaaccatttgtttttcaggagcaatcaatataaataattacggtac

SEQ ID NO: 512835 - DNA, 120 bp, Artificial Sequence
  ENSG00000164548_23 (sequence is synthesized)
taaactatgaaatccaccagaaatatgtgcaaaattttgattactcagaaacttttttcctataattagaattgattctggcaaggggcaacatggcaaaaccctgcttctactaaaaaa

SEQ ID NO: 512836 - DNA, 68 bp, Artificial Sequence
  ENSG00000164548_24 (sequence is synthesized)
gcaaggggcaacatggcaaaaccctgcttctactaaaaaaaaatactgaggcacaggaatcacttgaa

SEQ ID NO: 512837 - DNA, 120 bp, Artificial Sequence
  ENSG00000164548_25 (sequence is synthesized)
tcatttctaattaatggcttactttagaatattagagtataaggtggaaggtggcagttaatagttggaaaaatatgaggcaaattaaactataattgttaacttttttttttttttttt

SEQ ID NO: 512838 - DNA, 82 bp, Artificial Sequence
  ENSG00000164548_26 (sequence is synthesized)
ttttttttttttttgctttttctcttttaggacgctattgataacggaatggttgcaattaaggactgagatttccccaagc

SEQ ID NO: 512839 - DNA, 80 bp, Artificial Sequence
  ENSG00000164574_0 (sequence is synthesized)
gagttggagcggggccggcgccgcagccgcttctgctggctgagctgctgccgccgccgggcggacgggcggacgcgcgg

SEQ ID NO: 512840 - DNA, 120 bp, Artificial Sequence
  ENSG00000164574_1 (sequence is synthesized)
gctgaccggccccgatgaggcggaaggagaagcggctcctgcaggcggtggcgctggtgctggcggccctggtcctcctgcccaacgtggggctttgggcgctgtaccgcgagcggcagc

SEQ ID NO: 512841 - DNA, 120 bp, Artificial Sequence
  ENSG00000164574_2 (sequence is synthesized)
ccgacggcacccctgggggatcgggggcggcggtggcgccggcggcgggacagggctcacacagtcgacaaaagaaaacgtttttcttgggagatgggcagaagctgaaggactggcatg

SEQ ID NO: 512842 - DNA, 120 bp, Artificial Sequence
  ENSG00000164574_3 (sequence is synthesized)
acaaggaggccatccggagggacgctcagcgcgtaggaaatggagaacaaggaagaccttaccccatgaccgatgctgagagagtggatcaggcataccgagaaaatggatttaacatct

SEQ ID NO: 512843 - DNA, 120 bp, Artificial Sequence
  ENSG00000164574_4 (sequence is synthesized)
acgtcagtgataaaatctccttgaatcgctctctcccagatatccggcacccaaactgcaacagcaagcgctacctggagacacttcccaacacaagcatcatcatccccttccacaacg

SEQ ID NO: 512844 - DNA, 120 bp, Artificial Sequence
  ENSG00000164574_5 (sequence is synthesized)
agggctggtcctccctcctccgcaccgtccacagtgtgctcaatcgctcgcctccagagctggtcgccgagattgtactggtcgacgacttcagtgatcgagagcacctgaagaagcctc

SEQ ID NO: 512845 - DNA, 120 bp, Artificial Sequence
  ENSG00000164574_6 (sequence is synthesized)
ttgaagactacatggcccttttccccagtgtgaggattcttcgaaccaagaaacgggaagggctgataaggacccgaatgctgggggcctcagtggcaactggggatgtcatcacattct

SEQ ID NO: 512846 - DNA, 120 bp, Artificial Sequence
  ENSG00000164574_7 (sequence is synthesized)
tggattcacactgtgaagccaatgtcaactggcttccccccttgcttgaccgcattgctcggaaccgcaagaccattgtgtgcccgatgattgatgtaattgaccatgacgactttcggt

SEQ ID NO: 512847 - DNA, 120 bp, Artificial Sequence
  ENSG00000164574_8 (sequence is synthesized)
acgagacacaggcaggggatgccatgcggggagcctttgactgggagatgtactacaagcggatcccgatccctccagaactgcagaaagctgaccccagcgacccatttgagtctcccg

SEQ ID NO: 512848 - DNA, 120 bp, Artificial Sequence
  ENSG00000164574_9 (sequence is synthesized)
tgatggccggtggactgttcgccgtggatcggaagtggttctgggaactcggcgggtatgacccaggcttggagatctggggaggggagcagtatgaaatctccttcaaggtgtggatgt

SEQ ID NO: 512849 - DNA, 120 bp, Artificial Sequence
  ENSG00000164574_10 (sequence is synthesized)
gtgggggccgcatggaggacatcccctgctccagggtgggccatatctacaggaagtatgtgccctacaaggtcccggccggagtcagcctggcccggaaccttaagcgggtggccgaag

SEQ ID NO: 512850 - DNA, 120 bp, Artificial Sequence
  ENSG00000164574_11 (sequence is synthesized)
tgtggatggatgagtacgcagagtacatttaccagcgccggcctgaataccgccacctctccgctggggatgtcgcagtccagaaaaagctccgcagctcccttaactgcaagagtttca

SEQ ID NO: 512851 - DNA, 120 bp, Artificial Sequence
  ENSG00000164574_12 (sequence is synthesized)
agtggtttatgacgaagatagcctgggacctgcccaaattctacccacccgtggagcccccggctgcagcttggggggagatccgaaatgtgggcacagggctgtgtgcagacacaaagc

SEQ ID NO: 512852 - DNA, 120 bp, Artificial Sequence
  ENSG00000164574_13 (sequence is synthesized)
acggggccttgggctccccactaaggctagagggctgcgtccgaggccgtggggaggctgcctggaacaacatgcaggtattcaccttcacctggagagaggacatccggcctggagacc

SEQ ID NO: 512853 - DNA, 120 bp, Artificial Sequence
  ENSG00000164574_14 (sequence is synthesized)
cccagcacaccaagaagttctgctttgatgccatttcccacaccagccctgtcacgctgtacgactgccacagcatgaagggcaaccagctgtggaaataccgcaaagacaagaccctgt

SEQ ID NO: 512854 - DNA, 120 bp, Artificial Sequence
  ENSG00000164574_15 (sequence is synthesized)
accaccctgtcagtggcagctgcatggactgcagtgaaagtgaccataggatcttcatgaacacctgcaacccatcctctctcacccagcagtggctgtttgaacacaccaactcaacag

SEQ ID NO: 512855 - DNA, 120 bp, Artificial Sequence
  ENSG00000164574_16 (sequence is synthesized)
tcttggaaaaattcaataggaactgagccctcatgtccccttggcaggccccccagggtctggcactcactgcagacttcctctttcaagggaggcagggcccctgtgggcactaggtgt

SEQ ID NO: 512856 - DNA, 120 bp, Artificial Sequence
  ENSG00000164574_17 (sequence is synthesized)
aaaaggtgctggccaaatggttcagggtgaagagggctcttgattcaggggctggggtctgcctggtccttgagcccctgagttgtgggggtagggtgaagagcatatcccacaagaggc

SEQ ID NO: 512857 - DNA, 120 bp, Artificial Sequence
  ENSG00000164574_18 (sequence is synthesized)
cccacagggagcagagactgctttaatccctgctgacatcacggaaaagcaacagagccttttcaactttgtcactatgtccccttgaacattatgtgggagaacaccaaggtagcctag

SEQ ID NO: 512858 - DNA, 120 bp, Artificial Sequence
  ENSG00000164574_19 (sequence is synthesized)
gccacccaaaagtgagtcctgcgaggttgcccagccctcagatggctctcctacatgatggtgctttagaaacaaaggtaaaatttgcctgtttggggcagcttttagtatcgatgccac

SEQ ID NO: 512859 - DNA, 120 bp, Artificial Sequence
  ENSG00000164574_20 (sequence is synthesized)
tcatctgcagcagaagagaaagaagtcctcttggggctttttagtttctgccgtcctggggggaacattgcagttactgcacagcttctgttctctgtcacaaccccaggtgatttggtc

SEQ ID NO: 512860 - DNA, 120 bp, Artificial Sequence
  ENSG00000164574_21 (sequence is synthesized)
cggtcaaaggccatacttggggccctaagagtgttcagtattgaatgctgatcagctgccaggtgaggagtcagaagagggagcccccctagacatttctttgcagctatggacatgcgg

SEQ ID NO: 512861 - DNA, 120 bp, Artificial Sequence
  ENSG00000164574_22 (sequence is synthesized)
gatatctccccctgctctctgggtatttgaaatgtcaattttagcactctccaggcacaaggacagcccagcaccagctttacagggcagtgtttcagatggccctgagcccacggaaaa

SEQ ID NO: 512862 - DNA, 120 bp, Artificial Sequence
  ENSG00000164574_23 (sequence is synthesized)
ggccaggtagacctccaaactagaaatgctggctgatttgccctgatccatgcttccatttccctgtctctcttccccaggcaattactggcctcaaaagaggaacagaggtgctgcgag

SEQ ID NO: 512863 - DNA, 120 bp, Artificial Sequence
  ENSG00000164574_24 (sequence is synthesized)
agttctcatacagaactccagaatttttaaagaactctataattggattgcaaactaggatgctacataggattctggtattccacatccaatatggatttctagaatgctgtgattaaa

SEQ ID NO: 512864 - DNA, 120 bp, Artificial Sequence
  ENSG00000164574_25 (sequence is synthesized)
ggagccagccaggtgtaatacagtcaaggcagcccccagcctagagacaatctgtgaaatccaaagttggtggtgttgggaaagcagggggacatgtgtccctcagctcagcagaggctg

SEQ ID NO: 512865 - DNA, 120 bp, Artificial Sequence
  ENSG00000164574_26 (sequence is synthesized)
tggtacaacatggtccttggtgaagacctgcacccctggaacctcccaccatcatcacaactgtagtctcatttgcagtggagaaaagaacccgacgtcccacagccagatatacaccca

SEQ ID NO: 512866 - DNA, 120 bp, Artificial Sequence
  ENSG00000164574_27 (sequence is synthesized)
gctccatgccagcccttcatgtttaccttttgctttgttaattacatgtcagactcctagagggcctccagactaataggaagcatttctgtaaccaacctgccacccactgattcagaa

SEQ ID NO: 512867 - DNA, 120 bp, Artificial Sequence
  ENSG00000164574_28 (sequence is synthesized)
atggaaatcacattccacaatctatggcttccaccagctagcccaggaaatacttgaaatcagcattccaattagtgttgagtctcttgattgtgtcatttaccaattaaataactgaga

SEQ ID NO: 512868 - DNA, 120 bp, Artificial Sequence
  ENSG00000164574_29 (sequence is synthesized)
cctaagtctgggaacagagccacgaatctgcctttgagatgctggcagatctcaaggccatcaattattgggggagggagggacaaacactcccaatcatccaccagtcagactgaatgt

SEQ ID NO: 512869 - DNA, 120 bp, Artificial Sequence
  ENSG00000164574_30 (sequence is synthesized)
gtagctggcgaggaattacttccacttctggcccagcacaagccctgctttggccacctgtctgcaagagaggcggcccctgtgcttgcaacgcttacgtgttgatcccagtgtcctttt

SEQ ID NO: 512870 - DNA, 120 bp, Artificial Sequence
  ENSG00000164574_31 (sequence is synthesized)
ccaaatgagtgctgtagctttagaagtggccctctatagaaagaagtcaaaagatgaggccccttctagaatctaggataacaagagtgttgacagtttgaggagtcgaattgagattca

SEQ ID NO: 512871 - DNA, 120 bp, Artificial Sequence
  ENSG00000164574_32 (sequence is synthesized)
tcatcaaagagcaatgcagcgtcgttaaaataaaaactgtgccttttaaaaagaaaaatgcaaatatagagcaaatccctaaacttgaaccatttcctagtgccttgctagacaaacata

SEQ ID NO: 512872 - DNA, 120 bp, Artificial Sequence
  ENSG00000164574_33 (sequence is synthesized)
aaggggcagggttgtggggaggggaacgtttttggtggtgtgtgcagttcctactggatgagtgtgtgtttcttaatgtctcatttcaagcaggagatgttgggtctggagcaagatctg

SEQ ID NO: 512873 - DNA, 120 bp, Artificial Sequence
  ENSG00000164574_34 (sequence is synthesized)
agactgagatgtcccccaagggtgacaggtcagatttatttcagtcagtgcaagtcacactccaaactaaaggctgggcagtgcgtttagtctgtggcctagaagacctcatcagccccc

SEQ ID NO: 512874 - DNA, 120 bp, Artificial Sequence
  ENSG00000164574_35 (sequence is synthesized)
gagaggaggccttgcattacctcactgggacctgtttgggggccatccctgcggtccaccctctgaacccccagcatgtttgtcctgtttctcaccattgggttaaggggtgccgagcac

SEQ ID NO: 512875 - DNA, 120 bp, Artificial Sequence
  ENSG00000164574_36 (sequence is synthesized)
tagctagacttccacatagtcccaccccaagtgggcggcagtgttcctggcatgaccaggattcctgtgaaagcaggagcagcagcaagccgtcccgggcctgcctttcccatcctttgg

SEQ ID NO: 512876 - DNA, 120 bp, Artificial Sequence
  ENSG00000164574_37 (sequence is synthesized)
ttctcctttccagtctgggttcacaccctgaaaagggatgggtgtgtcctctgagcactctggcatttgtcattgctgagcccatatcagtaggtcctgggacttgacaaagtatgtggg

SEQ ID NO: 512877 - DNA, 120 bp, Artificial Sequence
  ENSG00000164574_38 (sequence is synthesized)
aggggaaggaaggacagaacttgactggctccatttcatggaccaactgatcaattgccagtactaagccactcattgttatggcttcctttttgaaaaccacctgtctcaaggattcag

SEQ ID NO: 512878 - DNA, 120 bp, Artificial Sequence
  ENSG00000164574_39 (sequence is synthesized)
gtttctgctcacatccccagctgatgctcaataaaactcagccaggagcatatggagatgctgacagccaggtaatgggtgagactgtggggtcccttttcctctaaagcctttactctg

SEQ ID NO: 512879 - DNA, 120 bp, Artificial Sequence
  ENSG00000164574_40 (sequence is synthesized)
aggataaggtcacaaagtagggtgtgacttgaaagtatcgtgaccatgtggcccaccagcagcctttccaaaggggaactccagagacatttcataatgcaaacagcactgttgctttaa

SEQ ID NO: 512880 - DNA, 120 bp, Artificial Sequence
  ENSG00000164574_41 (sequence is synthesized)
gaacaaggcctttggaggtggctaaacttgcacgcacgtgtgtgaaaagccatcccatcttctgcctccagttggagctttcagctgttaaaacagtcagaaactattgattcttccctt

SEQ ID NO: 512881 - DNA, 120 bp, Artificial Sequence
  ENSG00000164574_42 (sequence is synthesized)
taggaaaaaatgctcaggcagaacggggtacatccacaggaggaatcggacgagaggatgtgacattcggtccaggagagaaagagcagtttctgttaaagatgtaacaaatggatttcc

SEQ ID NO: 512882 - DNA, 120 bp, Artificial Sequence
  ENSG00000164574_43 (sequence is synthesized)
aaagtctacatgacattcacttttcaaacttcccaccagttgaatttctttttttccttaagaaacaggtgatgtcttggaaaacagctccttatgtctctctgtgcatctccattttcc

SEQ ID NO: 512883 - DNA, 120 bp, Artificial Sequence
  ENSG00000164574_44 (sequence is synthesized)
tagtctctggagtctcaaaaagagtggcaaagcactttacagtagtaactgaggaatcagagtctctgcttcagcgatatctagtttgtacagttgggtgatcttttgtaattcctagga

SEQ ID NO: 512884 - DNA, 120 bp, Artificial Sequence
  ENSG00000164574_45 (sequence is synthesized)
ggtaatgcatttttaatgttttctgaagctttgtaagtgtgagagagggacaagaagtgcagttctgttctggaattccttattgctttcaacggacactctttgtgaaaaatccaagta

SEQ ID NO: 512885 - DNA, 120 bp, Artificial Sequence
  ENSG00000164574_46 (sequence is synthesized)
atattttagttcaaacttgatcttgagccaaggcccactgccacctctgggatgggagtcggacctacataccaagtgacaagttcaccttaacatctgcttccagaatggctttgattc

SEQ ID NO: 512886 - DNA, 120 bp, Artificial Sequence
  ENSG00000164574_47 (sequence is synthesized)
agccgtgccaggcaacagaacagggtcagactcctgctctgttattggcttgaagactaggatcccaaaggggttggaggcagggaatatttgaaaattcagactggaattccaggccaa

SEQ ID NO: 512887 - DNA, 120 bp, Artificial Sequence
  ENSG00000164574_48 (sequence is synthesized)
aagctcaagaccaccagcctctcctcctgcctggaaaaataagcctttgtgaaagactgatttaccatgtacaattgtgattgtgaacgttgttgagtaaacctccagactttctctaaa

SEQ ID NO: 512888 - DNA, 120 bp, Artificial Sequence
  ENSG00000164574_49 (sequence is synthesized)
ccctctccctttgtgtgctagagacccttcagcatacgcagctctgggatgatgccaggattccatttggagacttctgcacccgttgcttttgtgtcttcccatctgcatagcacctga

SEQ ID NO: 512889 - DNA, 120 bp, Artificial Sequence
  ENSG00000164574_50 (sequence is synthesized)
gcacctgagtcacctggaatgggggtaaaatctggttcctggacctgtcggttcaatttctccaggagtagggccagggagtcctttaccaactcctcacctccactcccccaccaccaa

SEQ ID NO: 512890 - DNA, 120 bp, Artificial Sequence
  ENSG00000164574_51 (sequence is synthesized)
cccaggactctgcatactctacaatactacttacagcagtgctttaaggattacattctgtggactgagtcttccttcattgagaggctcaagatccgaaatgtgggcacagggctgtgt

SEQ ID NO: 512891 - DNA, 120 bp, Artificial Sequence
  ENSG00000164574_52 (sequence is synthesized)
cacatttcttagcttctctgagcctccatttcagcatctgtaaaatgttactacctactttataggttttctgatgaggcttaagtgtggttgtgcatgtgaccatcttagcatagtgtg

SEQ ID NO: 512892 - DNA, 120 bp, Artificial Sequence
  ENSG00000164574_53 (sequence is synthesized)
tggcaatggtaagcactcagtgctgtcagctgtttttaccgctgttattatattactgtgttttcccatgtcattaggtctgtgatccaggcttcagcagacaatccaggctgatgcttt

SEQ ID NO: 512893 - DNA, 120 bp, Artificial Sequence
  ENSG00000164574_54 (sequence is synthesized)
tgctgagtgcactaagggatgctggcctggcgggatggtgaactggaagcagaaacgtcatcctctctcttccttcttgccatgcaggtgtggatgtgtgggggccgcatggaggacatc

SEQ ID NO: 512894 - DNA, 120 bp, Artificial Sequence
  ENSG00000164574_55 (sequence is synthesized)
gtgtaggtctgacaggtacctggcacatagcaattgttccttaaacagtgactgctgttattagtgttagcatcaatattaacaataaagactggaacatgtatttaaaagtcttatcta

SEQ ID NO: 512895 - DNA, 120 bp, Artificial Sequence
  ENSG00000164574_56 (sequence is synthesized)
atggctggggtgtcctcaaacatggcagctggctcctccaaagccagcggtcccacagagaaaggtggaagccacggcatctttatgaccgtcatttctgcagtatcctgtgggttacac

SEQ ID NO: 512896 - DNA, 120 bp, Artificial Sequence
  ENSG00000164574_57 (sequence is synthesized)
agctctccagacgccccgttcttggcacagcctcctgagtgcctgtcccagtaggtgtctcagcttctgcctgagcttggaaagactggaggcctcagggttctgtagcccttctgccca

SEQ ID NO: 512897 - DNA, 120 bp, Artificial Sequence
  ENSG00000164574_58 (sequence is synthesized)
tcaggtgaagaagacaggggctcatgggccactctttgttgtggggtgggggggtgtgggagggaaggggagtactctccagctgccaaaggctggtcctcaccacagctctgactggca

SEQ ID NO: 512898 - DNA, 120 bp, Artificial Sequence
  ENSG00000164574_59 (sequence is synthesized)
tttgccttgtgtcttcttaagatgttggaataaggtcttgcttctactcagatggcaggtctgagattgagatgtccagcaaataagcagtgggccagagaagctaggaaggccaaacag

SEQ ID NO: 512899 - DNA, 120 bp, Artificial Sequence
  ENSG00000164574_60 (sequence is synthesized)
gatacgtaggcctagaggagtcctctcagtcaccccaagttttccctttgtacctgttgctctaggagtttgacaaagaccagtgagcataagctccagttgtaaagttacaaaggcctg

SEQ ID NO: 512900 - DNA, 120 bp, Artificial Sequence
  ENSG00000164574_61 (sequence is synthesized)
gattcagatcccagctccatcatcaggagctatctgactttgggcaagttagatcacccccccgagctttctttcctcatctgaaataagggaataataatactacctagcttacagagc

SEQ ID NO: 512901 - DNA, 120 bp, Artificial Sequence
  ENSG00000164574_62 (sequence is synthesized)
tatcgtgaagattaaatgagatcatgtctagaaagtgcttagcatacaacctgggaacatgaccagcaattaataattggtagaaattgttaaagtttcggtgagtaaatatttactgta

SEQ ID NO: 512902 - DNA, 120 bp, Artificial Sequence
  ENSG00000164574_63 (sequence is synthesized)
acctacttgaccagcctatggactctggaagctttctgacagtagtggtaaaggagttactagttaactaataactaattaagcacccaaacttccaaggctacattctccactttattt

SEQ ID NO: 512903 - DNA, 120 bp, Artificial Sequence
  ENSG00000164574_64 (sequence is synthesized)
gtgggagtctgtcttgttctcaagtgaaagcttggaccttctgaggggagggttagcttgtcccatgcccttgtggcctgtcagagtcagcttctaacagcttagacccctggctaaggc

SEQ ID NO: 512904 - DNA, 120 bp, Artificial Sequence
  ENSG00000164574_65 (sequence is synthesized)
atagcaccattactgatctgacccctgtgaacacacaactctgatgccccctcatcgggcctcaactttcagtgcaaaggaccattgtcaggcacagtgaattaaggctttggtattggt

SEQ ID NO: 512905 - DNA, 120 bp, Artificial Sequence
  ENSG00000164574_66 (sequence is synthesized)
gccagagtgccacgatcagatcctagctctgccgtgtcctgccagctgtgtgatcttgggcaaggaatcctcacctcactgagccttggtttctacttccataaagtgggtttaatgaaa

SEQ ID NO: 512906 - DNA, 120 bp, Artificial Sequence
  ENSG00000164574_67 (sequence is synthesized)
cgttaatcctcacagagttgttgagaggattaagtgagaccatgcttattaggtgcttcttaataaattatcctaaagattattatcaatacattaatattattatctgcaacagtggtt

SEQ ID NO: 512907 - DNA, 120 bp, Artificial Sequence
  ENSG00000164574_68 (sequence is synthesized)
gagtagttcagaactggagaacataaattcttgattagcccaaaaaaaaaaaaaacctacaattcttttgatgttatttaggtttgaaaagcagtttatatcctttttttttcttttctt

SEQ ID NO: 512908 - DNA, 85 bp, Artificial Sequence
  ENSG00000164574_69 (sequence is synthesized)
aggcgcccaccaccacgcccagctaatgtagagatagggtttcgacatgttgaccaggctggtcttgactcaaagtgctgggatt

SEQ ID NO: 512909 - DNA, 120 bp, Artificial Sequence
  ENSG00000164574_70 (sequence is synthesized)
gtgtgagccactgtgcctggccagtttatatctattttaaccaccagagttctgaagttgtctcccataaggagaccagccccctaaataaaattaatattcacataagggtaatgttca

SEQ ID NO: 512910 - DNA, 120 bp, Artificial Sequence
  ENSG00000164574_71 (sequence is synthesized)
attaatattcacataagggtaatgttcaaaatatgtaacaactgtgataacacaagcacatccagtcagaacagataccagctataaacaatggtgcatccactccagcgtgtaacaagt

SEQ ID NO: 512911 - DNA, 120 bp, Artificial Sequence
  ENSG00000164574_72 (sequence is synthesized)
gaagttcggtcctgatcatagctaacaggacagtgtgccaagcccttcatacatgctgacttgtttaatcctcacaacaaccttaggagagttgtatcattattatacccgtttcaccag

SEQ ID NO: 512912 - DNA, 120 bp, Artificial Sequence
  ENSG00000164574_73 (sequence is synthesized)
gaaggcaagcaaagctcagaccaaggcctcgcacagccggaagaagcagaactggggcccaaacgcaggtctgcttgactccaaagcccacgctctgacctgctatttttgttgttgttt

SEQ ID NO: 512913 - DNA, 120 bp, Artificial Sequence
  ENSG00000164574_74 (sequence is synthesized)
aaatcatacccagactgttctgaaaacctgccatgttttatggacctctgcctcaccctttctgggattttttttttttttttgcctcttctggtattattcctagtttacttggatatt

SEQ ID NO: 512914 - DNA, 120 bp, Artificial Sequence
  ENSG00000164574_75 (sequence is synthesized)
tattctgcaatttcttagttaatggaattaataacaatctaagtcggaagtggcaaatagggccaggaatggtggccgagatgggaggatctcttgagcctaggagtttgagaccagcct

SEQ ID NO: 512915 - DNA, 120 bp, Artificial Sequence
  ENSG00000164574_76 (sequence is synthesized)
aaaaaaaaaaaaagaaggaaagaaagagagagagagaaggagtggggagggagagagggagggggaaagggagagagagagacagagagagagacacagcaaataggtttctactccctg

SEQ ID NO: 512916 - DNA, 120 bp, Artificial Sequence
  ENSG00000164574_77 (sequence is synthesized)
gacacagcaaataggtttctactccctgccaggccaactctgatccattggtaggggctgccccaggtgggtgttgatatgcattctgaggctgcttccaagcttatcagcaaagagtag

SEQ ID NO: 512917 - DNA, 120 bp, Artificial Sequence
  ENSG00000164574_78 (sequence is synthesized)
tcagtgggggagggatctttttgtgtttcactcaccgccatatcccaagtacctaaagcctggtccaacacagaaaagacactatgagaccaatttttatgagtcataatttttattatt

SEQ ID NO: 512918 - DNA, 80 bp, Artificial Sequence
  ENSG00000164574_79 (sequence is synthesized)
ttctaaaaatatgtaaaatgtataaaagtctagtagttctgatataacactgtcagccataattctggttatcatgttaa

SEQ ID NO: 512919 - DNA, 120 bp, Artificial Sequence
  ENSG00000164574_80 (sequence is synthesized)
ggggatcgggggcggcggtggcgccggcggcgggacagctcgcttccccaccccagcctgggcactgctgttcgactgagaccaggattattcccaccgcccaagagcagagagggctca

SEQ ID NO: 512920 - DNA, 120 bp, Artificial Sequence
  ENSG00000164574_81 (sequence is synthesized)
gatgcacagcctctgccttcgtggagtgggcattttcagcgtctagcacacctcctgccacacaatgcatgccaaataatggatggaagaatggacatgggctgttaccaccagattgaa

SEQ ID NO: 512921 - DNA, 120 bp, Artificial Sequence
  ENSG00000164574_82 (sequence is synthesized)
aaacctgcacatactagaatcacctgggcactctcccagccaacggcttcggcttcctggtgccaccttagtcctccagattcagcatttctatgggtgggccggggaatctgcatgttt

SEQ ID NO: 512922 - DNA, 80 bp, Artificial Sequence
  ENSG00000164576_0 (sequence is synthesized)
cgcgggactcggggcgcagccgagtggctgcaggggtggagtgggccggacgagccgcggggcccgggtgccgcgggttc

SEQ ID NO: 512923 - DNA, 120 bp, Artificial Sequence
  ENSG00000164576_1 (sequence is synthesized)
cgcgcgaggaggccgcgccaccccgggggagctgcccggcagcgagtttgccccgctgccgaaagaaggcgggagccggcaggggccttcgaaaccccctggcaacccaggcccggagtc

SEQ ID NO: 512924 - DNA, 120 bp, Artificial Sequence
  ENSG00000164576_2 (sequence is synthesized)
ggcaacccaggcccggagtccttggggagcggctgtttcctgggacgccctcccggacacccccgctgcagggttacggttctgggcccccggcagaaggctcctccgggtgacccccgg

SEQ ID NO: 512925 - DNA, 80 bp, Artificial Sequence
  ENSG00000164576_3 (sequence is synthesized)
ctcgagccgggaggaagggggcttccggaggcggagggccgggggccgagggagccgggcctctcggacgcggggcaggg

SEQ ID NO: 512926 - DNA, 120 bp, Artificial Sequence
  ENSG00000164576_4 (sequence is synthesized)
cagcgcccgggctggagacggactctgggaccctcggctgcgggggtctcagcgacctgccccgcggcaagcgcggccgcggagtggcctaccggggaccctcccccagagggaccggcc

SEQ ID NO: 512927 - DNA, 120 bp, Artificial Sequence
  ENSG00000164576_5 (sequence is synthesized)
gcggggagatgaacggcttcagcacggaggaggacagccgcgaagggccccccgccgccccagctgccgccgccccgggctacggccagagctgctgcctcatcgaggacggcgagcgct

SEQ ID NO: 512928 - DNA, 120 bp, Artificial Sequence
  ENSG00000164576_6 (sequence is synthesized)
gcgtccggcccgcgggcaacgcctccttcagcaagagggtccagaagagcatctcgcagaagaaactcaagctggacatcgacaagagcgtaaggcacctatatatctgtgattttcaca

SEQ ID NO: 512929 - DNA, 120 bp, Artificial Sequence
  ENSG00000164576_7 (sequence is synthesized)
aaaatttcatccagagtgtccgaaataaaaggaagaggaagacaagtgacgatggcggagattctcccgagcacgacactgacattcctgaggttgatctgttccagctgcaggtgaaca

SEQ ID NO: 512930 - DNA, 120 bp, Artificial Sequence
  ENSG00000164576_8 (sequence is synthesized)
ccctacgacgttataaacgacactacaagttgcagaccagaccaggcttcaataaggcccagttagcagaaactgtgagtcgacacttcaggaacatacctgtgaatgaaaaagagaccc

SEQ ID NO: 512931 - DNA, 120 bp, Artificial Sequence
  ENSG00000164576_9 (sequence is synthesized)
ttgcctacttcatctacatggtgaagagtaacaagagtagactggaccagaaatcggagggtggcaagcagcttgagtgaggatgaagcacatcttaaaggaatgaagtgtaatgcttga

SEQ ID NO: 512932 - DNA, 120 bp, Artificial Sequence
  ENSG00000164576_10 (sequence is synthesized)
tgcacaggtgatatctactacatttaagcccataaagactgttaaatattattgtaaataaaaaagtttgaatgatgaatactgtaaatctttttggtcaggaggattatattctcatga

SEQ ID NO: 512933 - DNA, 120 bp, Artificial Sequence
  ENSG00000164576_11 (sequence is synthesized)
ttcagcatgtgtatagaaagactttcttttacgataactctggactaaaaaaatcaggatcattaaaagaattaaaaactatgtatttcagcattcaacaaagcattaaatcaattctac

SEQ ID NO: 512934 - DNA, 120 bp, Artificial Sequence
  ENSG00000164576_12 (sequence is synthesized)
tggaaatgtgggataagaaatattttggtaatcaccttatccaccaggctgccacgtgtgagctgtagcttggaatagcagcaaggtgcaattggccatggaagtgcatgagcagaccca

SEQ ID NO: 512935 - DNA, 120 bp, Artificial Sequence
  ENSG00000164576_13 (sequence is synthesized)
catctggacttgcatgctgcccgctggcgacatagatatcccgcccgctttgttgcaagctttgtcatttatcagcagatcagtttgacactggtccccctcactcaccctgtgccttgt

SEQ ID NO: 512936 - DNA, 120 bp, Artificial Sequence
  ENSG00000164576_14 (sequence is synthesized)
acacagtaggcactcaatcagtaggtattggctaattgagctgtcactaatagtgccagccttgtaacatccgcttcacacctctcatgactgagacctctgccatttctgttgctcacc

SEQ ID NO: 512937 - DNA, 120 bp, Artificial Sequence
  ENSG00000164576_15 (sequence is synthesized)
acttaactgctagaatgtggaggaaatcctgatgcaccaacaaggaagtttctgatcagataaggatttcaggacagttgcatgtgcaaaactattcgttgaggttccagaaacactgat

SEQ ID NO: 512938 - DNA, 120 bp, Artificial Sequence
  ENSG00000164576_16 (sequence is synthesized)
atagagaccctcacagaagatacggtcccttatgcaccccactatgcttcactctttggggtgcagttagatattatgacttcagccaagcttcttggtaataaatgcattgacacactg

SEQ ID NO: 512939 - DNA, 120 bp, Artificial Sequence
  ENSG00000164576_17 (sequence is synthesized)
acatatttagtaggttggggcaagtatttttagaagttttcatcctaagttcacaaccaccatgcaagctgccaggggccatgtgattcctgcccagaagttcagcttaggattgaaagt

SEQ ID NO: 512940 - DNA, 120 bp, Artificial Sequence
  ENSG00000164576_18 (sequence is synthesized)
ctggctggccttgactccctgggctctggtcatcagcaaatcatgagtttgggcaacaaaggtcaattccatctgatgctcatttttgtgaacaatttgcctccctcttagggagaaaga

SEQ ID NO: 512941 - DNA, 120 bp, Artificial Sequence
  ENSG00000164576_19 (sequence is synthesized)
ttgctaaaataatttttgaaaattacctaatttttttgttgttcaaaacgttgaactcctcaatctaattatatcagagccaaagtatcctgtgaaaacaaagctttatatccaaaaatg

SEQ ID NO: 512942 - DNA, 120 bp, Artificial Sequence
  ENSG00000164576_20 (sequence is synthesized)
tgcttttgcaaaattctttaatctgtgtaatggagggcagagggtatggggtaggagggtgggagaaagaaaagaaaagaatttggattctaatttatgaccatcttgacatatggtcaa

SEQ ID NO: 512943 - DNA, 120 bp, Artificial Sequence
  ENSG00000164576_21 (sequence is synthesized)
aggtgtcattttcctactcagtttcaattctgagttaatttcttaagccttaaataataagaacaatggacagcctggcctggcagagagtttcacagatgacttaatctgagcaccatc

SEQ ID NO: 512944 - DNA, 120 bp, Artificial Sequence
  ENSG00000164576_22 (sequence is synthesized)
acagagaagtcaggactaaaccccctactgagcagggcggcggagtgtccaaaggtctcagttctgtggagcagagtaccacgctttctgtggaatggggacagggtcaccacgctcact

SEQ ID NO: 512945 - DNA, 120 bp, Artificial Sequence
  ENSG00000164576_23 (sequence is synthesized)
aaaatgcagtatgttccattgcagcaaagctttcgcctgtgttcaaaatgcatgtctagcagattgcagccttttaaattaaatatatataaatggttgtatatagaatatactctggac

SEQ ID NO: 512946 - DNA, 120 bp, Artificial Sequence
  ENSG00000164576_24 (sequence is synthesized)
tgtgagggcatcctattttggtatgcctcctggctgtggatggcatgtccagtgctctgtgagtgttttcagtcattcacattcactatgtgtttagagattctctccctgcttacagct

SEQ ID NO: 512947 - DNA, 120 bp, Artificial Sequence
  ENSG00000164576_25 (sequence is synthesized)
ttaacttgctccatggaaatgtccatatcttaatgagtaaaaaagtgtatttttctgatacgtaaaccagaattgtgggcgtgtaggtcacatcactatttctttagcagcaaatctgtt

SEQ ID NO: 512948 - DNA, 120 bp, Artificial Sequence
  ENSG00000164576_26 (sequence is synthesized)
ttcccagttgagagagacaatagcttctgcacaagaatatatgatggtaggatccatctgttcaattgtgtctgaaagaatctttattccaaagcgaaacctggggaaatgttttacctt

SEQ ID NO: 512949 - DNA, 120 bp, Artificial Sequence
  ENSG00000164576_27 (sequence is synthesized)
cagccagatgctgtgtgtgtacttgggtcccttgtctttcctctaaggagaggtgcttgtggaaagtggaggttgtgggcatcttttcaaccttttcaatctgacctttcaacaggtcag

SEQ ID NO: 512950 - DNA, 120 bp, Artificial Sequence
  ENSG00000164576_28 (sequence is synthesized)
gtgagagaaaagacaaagctatttgaacctatgtttttcttatgtccagaaatctgttctttcatcaaaccactaaaccactcgccttagcctcttctgcagtttctggtggctctatct

SEQ ID NO: 512951 - DNA, 120 bp, Artificial Sequence
  ENSG00000164576_29 (sequence is synthesized)
gtgggcaagggactcctgcctgtgagaagtggccaggccctccagagcaacggggtctggcttcagggagcagtggggtgtggggaaagcaatgttcatcttggctgctccatttttata

SEQ ID NO: 512952 - DNA, 120 bp, Artificial Sequence
  ENSG00000164576_30 (sequence is synthesized)
ccatccatcaaggactcttgcgcttctctccacctgtgacgtagcagcattgccttctttcctcttggtgcttctgggcaaaactggaatttgaaatccagaactggcgttgtcttctta

SEQ ID NO: 512953 - DNA, 120 bp, Artificial Sequence
  ENSG00000164576_31 (sequence is synthesized)
aagagtatggttcctgcctcagttccagcctggtatggttctttgatatgccctgaaggttctcacatggaaacatcagtatcctgccattcatgttgttttaagatgttttaaaaacca

SEQ ID NO: 512954 - DNA, 120 bp, Artificial Sequence
  ENSG00000164576_32 (sequence is synthesized)
atggacaaacttcttgcttcaaggaacaaactcttaggttggcaacagcatataaaaaaaaagatcacagctgaatctcatgaaagattaaaaaccaaaggattcaagaccggtgttgta

SEQ ID NO: 512955 - DNA, 120 bp, Artificial Sequence
  ENSG00000164576_33 (sequence is synthesized)
aaatgaagaggaattttacttacatgttacagctgccaagtttttagatgttcctgtcatagctaaatagtcactgctagcctttcagagaacagatagtaacaattgtttgcagctgca

SEQ ID NO: 512956 - DNA, 120 bp, Artificial Sequence
  ENSG00000164576_34 (sequence is synthesized)
gtgttgcatctaattttggtgtttaggctttttattttgtgggaagctttttgttaatatcctgcagggcaactgcctgttgggagggagaggatggaagaaggagcttactctgggggc

SEQ ID NO: 512957 - DNA, 120 bp, Artificial Sequence
  ENSG00000164576_35 (sequence is synthesized)
cttgcctattgagggaggctgttgcccagagcagttgcttcatggaagtcatccaaaggcgctctcagtcattacaatgacaggatctcaaagttgggaaagggctgttaagtcatccag

SEQ ID NO: 512958 - DNA, 120 bp, Artificial Sequence
  ENSG00000164576_36 (sequence is synthesized)
tctagtctccacataggtgctgacattctgcctacaaccatcccaccaaggggttgagcagtctggacttaaacacctccgaggacagagaacccactacctcgtggagaagcctgttct

SEQ ID NO: 512959 - DNA, 120 bp, Artificial Sequence
  ENSG00000164576_37 (sequence is synthesized)
ttgtaaacctctggcttttctatgttctctgtaatttccatcttagtctctgccccatgggggccacatgggacaagttatttttggcaaagcacctaattgctggcactgtcccaaagc

SEQ ID NO: 512960 - DNA, 120 bp, Artificial Sequence
  ENSG00000164576_38 (sequence is synthesized)
atagcgtttgccttttggaaagaaacaatgctaggacatggacactttggtacactgtccttacccctgagtattagtccactcagttccttgttggagaatgttgagaaaaccctactg

SEQ ID NO: 512961 - DNA, 120 bp, Artificial Sequence
  ENSG00000164576_39 (sequence is synthesized)
gctggcttgtttctgccaaagcttggggagaggagagggggatgagaagatgttagcagcctgctaaacctcagacagatgaggactcagttctgtgcttgccccacaaaaacggatgct

SEQ ID NO: 512962 - DNA, 120 bp, Artificial Sequence
  ENSG00000164576_40 (sequence is synthesized)
cacatcatcaggaaattgttcagctggaggatttataacttcgttgctttgcatgaagtttaaagttttcatggttgcccagggcttgtaccttagattcctgtaaggactttgcactgt

SEQ ID NO: 512963 - DNA, 120 bp, Artificial Sequence
  ENSG00000164576_41 (sequence is synthesized)
ttttgctgagaaaacaacgcttcaggacttaaggtctaagcgtcagagaagtgccgtattttcaaggtggaaagtctgttaagcttgctgttgtccaatcatccgtttttagagatgggg

SEQ ID NO: 512964 - DNA, 120 bp, Artificial Sequence
  ENSG00000164576_42 (sequence is synthesized)
aaactaaaactcaaaaagatgtgcctgaggtcatatggcattatcagaaccaacctctggccctcttgacctgtctagcattctttctttctgacctataggatgactctaattcagtct

SEQ ID NO: 512965 - DNA, 120 bp, Artificial Sequence
  ENSG00000164576_43 (sequence is synthesized)
aaatcggctgccctcagattcttgagaacttaaaattgagcagaaattcccaaggccaacctagctctcagggaccaacctgcagaactcaagattgagcgaaatgtttaggccagttga

SEQ ID NO: 512966 - DNA, 120 bp, Artificial Sequence
  ENSG00000164576_44 (sequence is synthesized)
gttttgcaaaatgagtggtaagggaaaacagatctagcctgttatttaaaaccagggttcaaaagccctattgggagaggtagtattgtcctagcatttaaattctcatgaaatgtgctt

SEQ ID NO: 512967 - DNA, 120 bp, Artificial Sequence
  ENSG00000164576_45 (sequence is synthesized)
ggtctgtgatctcttggtcagatatctgccttccaggcgatcctttgaggttgtgtaattcagctggccctggctcctggtccctgttactgagctgggcagtcgaaccgaagggcagat

SEQ ID NO: 512968 - DNA, 120 bp, Artificial Sequence
  ENSG00000164576_46 (sequence is synthesized)
gagctcaagatcatgccttgggaagcatggtgctctaggggtgcctttttattcctttcattgtattatagactgtttccaagtttatggttagaaatggtaaagtgggtctggtgtttt

SEQ ID NO: 512969 - DNA, 120 bp, Artificial Sequence
  ENSG00000164576_47 (sequence is synthesized)
gaggtagaacccagcctagggcaagatatgaactgttcttgaggtagaaatgtctacagtcagttgtttcatctagcttgcatcttaaaacacaaacccttcagttgctttcacttaatg

SEQ ID NO: 512970 - DNA, 120 bp, Artificial Sequence
  ENSG00000164576_48 (sequence is synthesized)
cacacatttgccaatgacagagggttatacaggatccttcttttacatttctattgtctgctacgctcatcagagtatattttggggtacaaggttttgggggttttttttcccattttg

SEQ ID NO: 512971 - DNA, 120 bp, Artificial Sequence
  ENSG00000164576_49 (sequence is synthesized)
taactgccttattgaaaagtaagtgcccttccattccaggcctcctcatattgtacttgtttcctgccaaatctgggggatcatttgtattttaacttcgtaatctatggctctgtactg

SEQ ID NO: 512972 - DNA, 120 bp, Artificial Sequence
  ENSG00000164576_50 (sequence is synthesized)
ttgaaaggctctcaattctgtggggtctccttagtatgtatgtgacttttcatgttgcaatatcacacgatgggatggcccgacttttgctcttaataaataatctgaatgagtaagaga

SEQ ID NO: 512973 - DNA, 120 bp, Artificial Sequence
  ENSG00000164576_51 (sequence is synthesized)
acactgacattcctgaggtaaaggtcaaagaaaccagttgcggaagctggaagaatggattctaatctgattctcacctctggcctggtctgctttttgtgttaagaagtaattttagtc

SEQ ID NO: 512974 - DNA, 120 bp, Artificial Sequence
  ENSG00000164576_52 (sequence is synthesized)
cctctcccagctctctgtgctgtgatcttttcccctattccctaccgtttctcagtgctttatcagaccctgctcctccttagcttaagctttaccttttccaccagttttgtgagatca

SEQ ID NO: 512975 - DNA, 120 bp, Artificial Sequence
  ENSG00000164576_53 (sequence is synthesized)
gcccaccccagccagaactgtttttctactgttatttttgccctcctagccagttactagtcctcaatagaccatttctaagacctcttttgaagccctccccatcctcacccctacctt

SEQ ID NO: 512976 - DNA, 120 bp, Artificial Sequence
  ENSG00000164576_54 (sequence is synthesized)
tttgaaaaagaatgaaggactttggcccctcatattgatcattcattttgtttttaagtgctctccacctgcctgaagcaagaacagctcttttagaggcaggttgatctgttccagctg

SEQ ID NO: 512977 - DNA, 120 bp, Artificial Sequence
  ENSG00000164587_0 (sequence is synthesized)
gggcgcgacaatcggggggcatcctgcggcgaggggaccctgtggggcttgggacgagagacgggggtctttccgtgggaaccgagctaggtgccgggcaagagacgcgcggctggccca

SEQ ID NO: 512978 - DNA, 120 bp, Artificial Sequence
  ENSG00000164587_1 (sequence is synthesized)
cctggatcctggccaactcgggattgagttcgttcctggtctcagaaggcccgttttgctttcagggaggagcttgtgaagtaaggaaatggcacctcgaaaggggaaggaaaagaagga

SEQ ID NO: 512979 - DNA, 120 bp, Artificial Sequence
  ENSG00000164587_2 (sequence is synthesized)
ggcaaggaaaccatctgccgtgtgactggtgggatgaaggtaaaggcagaccgagatgaatcctcaccatatgctgctatgttggctgcccaggatgtggcccagaggtgcaaggagctg

SEQ ID NO: 512980 - DNA, 120 bp, Artificial Sequence
  ENSG00000164587_3 (sequence is synthesized)
ggtatcaccgccctacacatcaaactccgggccacaggaggaaataggaccaagacccctggacctggggcccagtcggccctcagagcccttgcccgctcgggtatgaagatcgggcgg

SEQ ID NO: 512981 - DNA, 120 bp, Artificial Sequence
  ENSG00000164587_4 (sequence is synthesized)
attgaggatgtcacccccatcccctctgacagcactcgcaggaaggggggtcgccgtggtcgccgtctgtgaacaagattcctcaaaatattttctgttaataaattgccttcatgtaaa

SEQ ID NO: 512982 - DNA, 120 bp, Artificial Sequence
  ENSG00000164587_5 (sequence is synthesized)
ctccagccttctctccttcatcaggggctactcaggcatttgatttcttcctcctatttggcttcttgggagaaaggagcctgaggagagctgagatcctggtgctgcatttggggtctt

SEQ ID NO: 512983 - DNA, 120 bp, Artificial Sequence
  ENSG00000164587_6 (sequence is synthesized)
ttccatgctacttgcggcattaagttgccttggtcatctaaagcagaccaaggcgttggagacctcgttttgagtggagatgctggttctaaatatggaccaattcttaaagagccagag

SEQ ID NO: 512984 - DNA, 120 bp, Artificial Sequence
  ENSG00000164587_7 (sequence is synthesized)
tgggaactgttgatccaagtgtagcctgaagcgaaagaggagccttccagacccatgccatatataaacacacgtgggtgtgcattctccccccacaccttctgtgcaaagctgggagct

SEQ ID NO: 512985 - DNA, 120 bp, Artificial Sequence
  ENSG00000164587_8 (sequence is synthesized)
gatcttggagattgttccacatcagtacataaagtacataaagattgtcaccccacaaatacacaccaagtcctattttcatcagcgataaaaaagaaaagttcttgctttccggaagct

SEQ ID NO: 512986 - DNA, 120 bp, Artificial Sequence
  ENSG00000164587_9 (sequence is synthesized)
tgcatgcggctctgagtacccagtgacaccagatggtactcagcgttttgcaagggattaccacaaggccccgtgatggtgcctgccatggttaggacaggctggtggctgggtagggtt

SEQ ID NO: 512987 - DNA, 120 bp, Artificial Sequence
  ENSG00000164587_10 (sequence is synthesized)
agtgagacccagtggagaggatgctgtgtgtcacaggctggagaggtgagaccattgaggtagtcagttgtagaggaaagaaaccagcaagaggggaaaatctgttgggatgctgctttt

SEQ ID NO: 512988 - DNA, 120 bp, Artificial Sequence
  ENSG00000164587_11 (sequence is synthesized)
agcctttgatggcgtgttccaggcagagggaataagcaaataaatgggtcctgagacaaggggttactgtgatgaggcggcgttggttacatgccaaaccttgctagggattttaataac

SEQ ID NO: 512989 - DNA, 77 bp, Artificial Sequence
  ENSG00000164587_12 (sequence is synthesized)
cgttggttacatgccaaaccttgctagggattttaataacaacattgaatcttaacctgatgaaataacagtactcc

SEQ ID NO: 512990 - DNA, 87 bp, Artificial Sequence
  ENSG00000164587_13 (sequence is synthesized)
cttgcaaaaaaaatataacagtactccttaaattgttaaaagtcatgaaagtcaaggacaggagattaaggaggcgtgaaaactaaa

SEQ ID NO: 512991 - DNA, 120 bp, Artificial Sequence
  ENSG00000164587_14 (sequence is synthesized)
aaagtcaaggacaggagattaaggaggcgtgaaaactaaatgcccattgtggtatcctggattggattctggaaccagaatagggtattagtataaaaactagtgaaataggataaaggc

SEQ ID NO: 512992 - DNA, 89 bp, Artificial Sequence
  ENSG00000164587_15 (sequence is synthesized)
tagggtattagtataaaaactagtgaaataggataaaggcagggcacagtggtcgagacaggaggacggattgagcccaggagtttgag

SEQ ID NO: 512993 - DNA, 86 bp, Artificial Sequence
  ENSG00000164587_16 (sequence is synthesized)
gctgagcctgggaagtggaggccgcagtgagctgtgattgcatcactacattcagcctgggtcacagagcaagatcctatctcaaa

SEQ ID NO: 512994 - DNA, 120 bp, Artificial Sequence
  ENSG00000164587_17 (sequence is synthesized)
tacattcagcctgggtcacagagcaagatcctatctcaaaaactaaataagtaaataataaattaaaaaatatgaataaagtctggagttaaagtctggaataaagctagtagtaatgta

SEQ ID NO: 512995 - DNA, 120 bp, Artificial Sequence
  ENSG00000164587_18 (sequence is synthesized)
ctctctttccggtgtggagtctggagacgacgtgcagaaatggcacctcgaaaggggaaggaaaagaaggaagaacaggtcatcagcctcggacctcaggtggctgaaggagagaatgta

SEQ ID NO: 512996 - DNA, 120 bp, Artificial Sequence
  ENSG00000164587_19 (sequence is synthesized)
tgtgcccagtggatgtgcagcggctggtctggtcacttttggcagttaagtttgttaagggaggctgcaagaggcaccttgtgacttaaaaatctctccctgaatatctctgtcaccttg

SEQ ID NO: 512997 - DNA, 120 bp, Artificial Sequence
  ENSG00000164587_20 (sequence is synthesized)
gggtgagtgcgggtccagccttttaaggcctcggccccgcaatacggccacggccacggccgcgtttgagctgcacagcgtagttgagggaacccgggacagacgtgggctcccgcctct

SEQ ID NO: 512998 - DNA, 120 bp, Artificial Sequence
  ENSG00000164587_21 (sequence is synthesized)
acctcgccaaacttttttcttggtgatcgcaggcccacgcctaatctcgtttgtttcctcgtttgcaaaataggaataacaatagcaccgatcccatgggtttgtagtgatcattcaaag

SEQ ID NO: 512999 - DNA, 120 bp, Artificial Sequence
  ENSG00000164587_22 (sequence is synthesized)
aaggaaagcagggaaaactctcgcactatgttggatgcttctaaatctgggcgattctttccgttgctgagtcgggcacgttgcaagttctgggcgctcagggcccagcaccaatgtttg

SEQ ID NO: 513000 - DNA, 120 bp, Artificial Sequence
  ENSG00000164587_23 (sequence is synthesized)
ctgtgcgcttgccctgcgtttatatactcctgatgaccactctgctcgttactttaggggatgttaggaacggagaaactgcaaattggcatttactgaatggccatcatgccgaaacat

SEQ ID NO: 513001 - DNA, 120 bp, Artificial Sequence
  ENSG00000164587_24 (sequence is synthesized)
actcatgcttacgtatttgagatatgctggagcctttctatgcttctcgaggcagaactttgggcttctctcctgtggcgcgttccttacaatagttaacgcactgggtcgtgctcattg

SEQ ID NO: 513002 - DNA, 120 bp, Artificial Sequence
  ENSG00000164587_25 (sequence is synthesized)
gtctgatttgaagataggaacatttaacttcgtacacccaagacttacacttgaagtacttactgtggtcacacacttaactaaagtttatatagggaaggcagaggagagatctaggaa

SEQ ID NO: 513003 - DNA, 120 bp, Artificial Sequence
  ENSG00000164587_26 (sequence is synthesized)
cacctgagacagactagggtagttatttgtggtgtagaggcatcttggcaggaggcagagagtgctgggctgggagtcaggacacgttgtttctatgtttggttttgccactgtctttac

SEQ ID NO: 513004 - DNA, 120 bp, Artificial Sequence
  ENSG00000164587_27 (sequence is synthesized)
tgtgaccataggctgagacactctctatcttcaccatctgcaggatatcgattagtgttagtgtcttctgaaaatgttaaattgttctgaacaccaggaggttcagaaggcctggggctt

SEQ ID NO: 513005 - DNA, 120 bp, Artificial Sequence
  ENSG00000164587_28 (sequence is synthesized)
taggccggaagcagtcttatcctagccttccactttctcattcattctcacccgccttcctcctgtcagtttctctctcccttagatcttgtgacagtatgattgcaattattatgaagg

SEQ ID NO: 513006 - DNA, 120 bp, Artificial Sequence
  ENSG00000164587_29 (sequence is synthesized)
tcataataggttagagttatttagtctcaggacccatcagatttctgagatgggtcttttccattagcctgccttttggatatattttagtgcctttgatatttgatgttggtgacaaag

SEQ ID NO: 513007 - DNA, 120 bp, Artificial Sequence
  ENSG00000164587_30 (sequence is synthesized)
ccttgaattctaagctgaggagttcatgcaggaatcaagcagctccctcgccccatgaagggtgttaggaatggtaccagtacatgggtagctgttggtcttgggtttcttcttgccttt

SEQ ID NO: 513008 - DNA, 120 bp, Artificial Sequence
  ENSG00000164587_31 (sequence is synthesized)
tggggtgcagccttcaggcatctgctgctagatccctaggcttctatcttgtaggtgctgtgagctgagctgttggtagtttctggggaaaggatacttctcatggtactttgccatgtg

SEQ ID NO: 513009 - DNA, 120 bp, Artificial Sequence
  ENSG00000164587_32 (sequence is synthesized)
gccacagttgatacccccccaagtgcaaggagaaagaagttttagtgaggcagaaatgagagaatacagtagagtattggatggaagaagacagggacatgaagcaggactagggtttca

SEQ ID NO: 513010 - DNA, 120 bp, Artificial Sequence
  ENSG00000164587_33 (sequence is synthesized)
agaggcatccagctggcaaaaggctgaggaaggcaatggctgggacgggctagcagttcaggggattctctctaaagaaatgctgttttgtccaggtaagaaaatgtgcttgtccattta

SEQ ID NO: 513011 - DNA, 120 bp, Artificial Sequence
  ENSG00000164587_34 (sequence is synthesized)
gcccacaaatattgtgatttcccaggggttacaagagaggagacacattcttcgtccttacagcgtgatggtcattgaatccttggtttcttgggaattatcttctttccctagttccct

SEQ ID NO: 513012 - DNA, 120 bp, Artificial Sequence
  ENSG00000164587_35 (sequence is synthesized)
ttgcaggagcagcagtggactgcaagtgggctctgggtgcgggttcgacggccatttagcaagttgtgacttgtgtgaaatcactcagattctgagttttggtttcctcatatgtaaaat

SEQ ID NO: 513013 - DNA, 120 bp, Artificial Sequence
  ENSG00000164587_36 (sequence is synthesized)
taggacagtaatgtctaccttgtggagtaatggtaaggattaaatgcaaaagtagatatataaaatgttaatactgagtatagctatattgggccattcaaccccactggactgaactcc

SEQ ID NO: 513014 - DNA, 120 bp, Artificial Sequence
  ENSG00000164587_37 (sequence is synthesized)
atgagggcagagcccatgaccatcatcctccaccatgactgagctgtgttgctcttcactcattaggatatcgtaagcactccttgttggacgaggaagaaatgaccctgtgcttttgtc

SEQ ID NO: 513015 - DNA, 120 bp, Artificial Sequence
  ENSG00000164587_38 (sequence is synthesized)
tgtgcctctgacatcttgcgcacagctcagcctgtttccctttctggaaagtgagttaagaccacgtcaggaaattcgaggaactggcagatggggccacttcatgttcacatccatctg

SEQ ID NO: 513016 - DNA, 120 bp, Artificial Sequence
  ENSG00000164587_39 (sequence is synthesized)
ttagaggatgtcacccccatcccctctgacagcactcgcaggaaggggggtcgccgtggtcgccgtctgtgaacaagattcctcaaaatattttctgttaataaattgccttcatgtaaa

SEQ ID NO: 513017 - DNA, 120 bp, Artificial Sequence
  ENSG00000164588_0 (sequence is synthesized)
gagccgagctgagcctcgcctagctccggcagcctcagcttcagcaccagccgcaccggagcccggaccgcagccactaagggcagcggcggcggcgggagccaggcgcgcagctagcag

SEQ ID NO: 513018 - DNA, 80 bp, Artificial Sequence
  ENSG00000164588_1 (sequence is synthesized)
ccgccgcgacgggcagctgggctcgccggcagccggctcgggcccctaccctctcggctacgtgtctccggcgccgggcg

SEQ ID NO: 513019 - DNA, 120 bp, Artificial Sequence
  ENSG00000164588_2 (sequence is synthesized)
gccggcgagtctggagcccgcgccgtcgccggccgcgtcctccgggcatggaaggaggcggcaagcccaactcttcgtctaacagccgggacgatggcaacagcgtcttccccgccaagg

SEQ ID NO: 513020 - DNA, 80 bp, Artificial Sequence
  ENSG00000164588_3 (sequence is synthesized)
cctgggcaccccgccggggggcggcggggccggcgcgaaggagcacggcaactccgtgtgcttcaaggtggacggcggtg

SEQ ID NO: 513021 - DNA, 120 bp, Artificial Sequence
  ENSG00000164588_4 (sequence is synthesized)
gcggcggtggcggcggcggcggcggcggcgaggagccggcggggggcttcgaagacgccgaggggccccggcggcagtacggcttcatgcagaggcagttcacctccatgctgcagcccg

SEQ ID NO: 513022 - DNA, 120 bp, Artificial Sequence
  ENSG00000164588_5 (sequence is synthesized)
gggtcaacaaattctccctccgcatgtttgggagccagaaggcggtggaaaaggagcaggaaagggttaaaactgcaggcttctggattatccacccttacagtgatttcaggttttact

SEQ ID NO: 513023 - DNA, 120 bp, Artificial Sequence
  ENSG00000164588_6 (sequence is synthesized)
gggatttaataatgcttataatgatggttggaaatctagtcatcataccagttggaatcacattctttacagagcaaacaacaacaccatggattattttcaatgtggcatcagatacag

SEQ ID NO: 513024 - DNA, 120 bp, Artificial Sequence
  ENSG00000164588_7 (sequence is synthesized)
ttttcctattggacctgatcatgaattttaggactgggactgtcaatgaagacagttctgaaatcatcctggaccccaaagtgatcaagatgaattatttaaaaagctggtttgtggttg

SEQ ID NO: 513025 - DNA, 120 bp, Artificial Sequence
  ENSG00000164588_8 (sequence is synthesized)
acttcatctcatccatcccagtggattatatctttcttattgtagaaaaaggaatggattctgaagtttacaagacagccagggcacttcgcattgtgaggtttacaaaaattctcagtc

SEQ ID NO: 513026 - DNA, 120 bp, Artificial Sequence
  ENSG00000164588_9 (sequence is synthesized)
tcttgcgtttattacgactttcaaggttaattagatacatacatcaatgggaagagatattccacatgacatatgatctcgccagtgcagtggtgagaatttttaatctcatcggcatga

SEQ ID NO: 513027 - DNA, 120 bp, Artificial Sequence
  ENSG00000164588_10 (sequence is synthesized)
tgctgctcctgtgccactgggatggttgtcttcagttcttagtaccactactgcaggacttcccaccagattgctgggtgtctttaaatgaaatggttaatgattcttggggaaagcagt

SEQ ID NO: 513028 - DNA, 120 bp, Artificial Sequence
  ENSG00000164588_11 (sequence is synthesized)
attcatacgcactcttcaaagctatgagtcacatgctgtgcattgggtatggagcccaagccccagtcagcatgtctgacctctggattaccatgctgagcatgatcgtcggggccacct

SEQ ID NO: 513029 - DNA, 120 bp, Artificial Sequence
  ENSG00000164588_12 (sequence is synthesized)
gctatgccatgtttgtcggccatgccaccgctttaatccagtctctggattcttcgaggcggcagtatcaagagaagtataagcaagtggaacaatacatgtcattccataagttaccag

SEQ ID NO: 513030 - DNA, 120 bp, Artificial Sequence
  ENSG00000164588_13 (sequence is synthesized)
ctgatatgcgtcagaagatacatgattactatgaacacagataccaaggcaaaatctttgatgaggaaaatattctcaatgaactcaatgatcctctgagagaggagatagtcaacttca

SEQ ID NO: 513031 - DNA, 120 bp, Artificial Sequence
  ENSG00000164588_14 (sequence is synthesized)
actgtcggaaactggtggctacaatgcctttatttgctaatgcggatcctaattttgtgactgccatgctgagcaagttgagatttgaggtgtttcaacctggagattatatcatacgag

SEQ ID NO: 513032 - DNA, 120 bp, Artificial Sequence
  ENSG00000164588_15 (sequence is synthesized)
aaggagccgtgggtaaaaaaatgtatttcattcaacacggtgttgctggtgtcattacaaaatccagtaaagaaatgaagctgacagatggctcttactttggagagatttgcctgctga

SEQ ID NO: 513033 - DNA, 120 bp, Artificial Sequence
  ENSG00000164588_16 (sequence is synthesized)
ccaaaggacgtcgtactgccagtgttcgagctgatacatattgtcgtctttactcactttccgtggacaatttcaacgaggtcctggaggaatatccaatgatgaggagagcctttgaga

SEQ ID NO: 513034 - DNA, 120 bp, Artificial Sequence
  ENSG00000164588_17 (sequence is synthesized)
cagttgccattgaccgactagatcgaataggaaagaaaaattcaattcttctgcaaaagttccagaaggatctgaacactggtgttttcaacaatcaggagaacgaaatcctcaagcaga

SEQ ID NO: 513035 - DNA, 120 bp, Artificial Sequence
  ENSG00000164588_18 (sequence is synthesized)
ttgtgaaacatgacagggagatggtgcaggcaatcgctcccatcaattatcctcaaatgacaaccctgaattccacatcgtctactacgaccccgacctcccgcatgaggacacaatctc

SEQ ID NO: 513036 - DNA, 120 bp, Artificial Sequence
  ENSG00000164588_19 (sequence is synthesized)
caccggtgtacacagcgaccagcctgtctcacagcaacctgcactcccccagtcccagcacacagaccccccagccatcagccatcctgtcaccctgctcctacaccaccgcggtctgca

SEQ ID NO: 513037 - DNA, 120 bp, Artificial Sequence
  ENSG00000164588_20 (sequence is synthesized)
gccctcctgtacagagccctctggccgctcgaactttccactatgcctcccccaccgcctcccagctgtcactcatgcaacagcagccgcagcagcaggtacagcagtcccagccgccgc

SEQ ID NO: 513038 - DNA, 120 bp, Artificial Sequence
  ENSG00000164588_21 (sequence is synthesized)
agactcagccacagcagccgtccccgcagccacagacacctggcagctccacgccgaaaaatgaagtgcacaagagcacgcaggcgcttcacaacaccaacctgacccgggaagtcaggc

SEQ ID NO: 513039 - DNA, 120 bp, Artificial Sequence
  ENSG00000164588_22 (sequence is synthesized)
cactctccgcctcgcagccctcgctgccccatgaggtgtccactctgatttccagacctcatcccactgtgggcgagtccctggcctccatccctcaacccgtgacggcggtccccggaa

SEQ ID NO: 513040 - DNA, 120 bp, Artificial Sequence
  ENSG00000164588_23 (sequence is synthesized)
cgggccttcaggcagggggcaggagcactgtcccgcagcgcgtcaccctcttccgacagatgtcgtcgggagccatccccccgaaccgaggagtccctccagcaccccctccaccagcag

SEQ ID NO: 513041 - DNA, 120 bp, Artificial Sequence
  ENSG00000164588_24 (sequence is synthesized)
ctgctcttccaagagaatcttcctcagtcttaaacacagacccagacgcagaaaagccacgatttgcttcaaatttatgatccctgctgattgtcaaagcagaaagaaatactctcataa

SEQ ID NO: 513042 - DNA, 120 bp, Artificial Sequence
  ENSG00000164588_25 (sequence is synthesized)
actgagactatactcagatcttattttattctatctcctgatagatccctctagcctactatgaagagatattttagacagctgtggcctacacgtgaaatgtaaaaatatatatacata

SEQ ID NO: 513043 - DNA, 120 bp, Artificial Sequence
  ENSG00000164588_26 (sequence is synthesized)
tactataaaatatatatctaaattcccaagagagggtcaaaagacctgtttagcattcagtgttatatgtcttcctttctttaaatcattaaaggatttaaaatgtcgttgtaagattat

SEQ ID NO: 513044 - DNA, 120 bp, Artificial Sequence
  ENSG00000164588_27 (sequence is synthesized)
ttatttctaacctacttttacttaagtcctttgatatgtatatttctctattttatgaagagttcttggattcaatggaaacaaaactgattttaaaaaggcaactcaaatgaactagta

SEQ ID NO: 513045 - DNA, 120 bp, Artificial Sequence
  ENSG00000164588_28 (sequence is synthesized)
aatagcaccaatcaaaactttctttcattagctgtgtctctgcatctaaattgttaatcattaatggtggagaattaaataacaaatcccattttatagatctaaattgtatttcggtgc

SEQ ID NO: 513046 - DNA, 120 bp, Artificial Sequence
  ENSG00000164588_29 (sequence is synthesized)
tttcaatttcaaattaggttaaagaatgcactacttgcttggccaccgtaggagactagcattgccactgtttgttaagaatatcactaacctcaaacatgttcattgatctttcagaaa

SEQ ID NO: 513047 - DNA, 120 bp, Artificial Sequence
  ENSG00000164588_30 (sequence is synthesized)
gctgagggaaaattaatatttgtcttcatgtgttatcggacttttaccaagactcgatcaatgttagttgtaaataactttttcaacccaaataaaaatagctattctgtgttgtatgaa

SEQ ID NO: 513048 - DNA, 120 bp, Artificial Sequence
  ENSG00000164588_31 (sequence is synthesized)
ggtaaaagtcattgtttaagaatttagttttattgcttcacttcaaaacttagagttttaaattttacaaaacctgattgtgagaattattcaattgtaatgcaatggcttgaaacctac

SEQ ID NO: 513049 - DNA, 120 bp, Artificial Sequence
  ENSG00000164588_32 (sequence is synthesized)
aatattattttaacctgcaatgttttatgcaaaattgtatgctcgaatctacaaattgcttgtattacaccaaaaatcgttacttttctttcttcttgccataatcaagcatctgaaaat

SEQ ID NO: 513050 - DNA, 120 bp, Artificial Sequence
  ENSG00000164588_33 (sequence is synthesized)
agtccctgcatgcttctggggaaaaaaaaataggttcaaatcagtcattgtagagaaaggcttacagtatttctcgtttctagaaaagcataacaattcattaattgcctatcttataat

SEQ ID NO: 513051 - DNA, 120 bp, Artificial Sequence
  ENSG00000164588_34 (sequence is synthesized)
tcctataaggctgacttggatctctgacttaagtctagaagtgaggttttcacttttatttaatattattgctattattatttaaataattatttgtaaaccacagcttgatttggagtt

SEQ ID NO: 513052 - DNA, 120 bp, Artificial Sequence
  ENSG00000164588_35 (sequence is synthesized)
aagtgttgtctgtgtcttcactgtagctggtaatttactatggtattaatttaaagaaataaattcaatacagcatcacgtctgtttgggaacacacattttgctctatgtatattgtaa

SEQ ID NO: 513053 - DNA, 120 bp, Artificial Sequence
  ENSG00000164588_36 (sequence is synthesized)
ctaaatggttagtaaactttaaggcatgtggtgactaacgtagcccttagataggaggtttgtcatttttaatgtgttgaaaatagtacagacatggtgacagaaagcaggggtaaagtt

SEQ ID NO: 513054 - DNA, 120 bp, Artificial Sequence
  ENSG00000164588_37 (sequence is synthesized)
gaacgtctatgagcattgtctgtctgttttcttaactctttacatgatctgtgagcacctgcttcttctcaaagaactcccttagtaatcatttgtgcctaatgcatcccacacatgtgg

SEQ ID NO: 513055 - DNA, 120 bp, Artificial Sequence
  ENSG00000164588_38 (sequence is synthesized)
agtatgactggaacacaattgaaagattcctaacaactggctgcggtaaataacccaagttaagagcatgacttaaagtggaggtcttcagtatctctggcactggcaatacatttaaga

SEQ ID NO: 513056 - DNA, 120 bp, Artificial Sequence
  ENSG00000164588_39 (sequence is synthesized)
acatacagagatcacacattatgtgggacagggcctgcagatagacttgaggacagaaaacaaaaacaaaagcagaaactctaaagtggatccttgctgcctgttatgccttttgtggat

SEQ ID NO: 513057 - DNA, 120 bp, Artificial Sequence
  ENSG00000164588_40 (sequence is synthesized)
ataatacctataataccaaaatgagttgttatgtttaatttcaaacaaatcccaactggtgtggaagtaattaactgctagtcgatgtaatgtaatcatcaatatgctggtgacatatga

SEQ ID NO: 513058 - DNA, 120 bp, Artificial Sequence
  ENSG00000164588_41 (sequence is synthesized)
actcctttattttattaaaatatgagaattaacttcaatttattaagattacgtattggtcctttaaattattaaaggtttacatttgataggattaatggatttggtagtgaaatattt

SEQ ID NO: 513059 - DNA, 120 bp, Artificial Sequence
  ENSG00000164588_42 (sequence is synthesized)
ttatatatataaatttttggttttttattttgagcactattgggaaacataagcaaaattgaaatgcatggtctttcagtgcaaccatacaatttttattcactttgtaatagaatggac

SEQ ID NO: 513060 - DNA, 120 bp, Artificial Sequence
  ENSG00000164588_43 (sequence is synthesized)
attaaactaataaaaaggtacagggtaaattatatacatatatgtatgaatgtatatatacttagattaagaaaaaaaaatgactcacattcctgtaatataaaggtccattgctagttg

SEQ ID NO: 513061 - DNA, 120 bp, Artificial Sequence
  ENSG00000164588_44 (sequence is synthesized)
taaaggtccattgctagttgaaaagtgacctcttttctctgtacatagtgaagcccgtatgtatggagttttaatctgtacagaaagaaatgtattattcattggtctttctgctgctgg

SEQ ID NO: 513062 - DNA, 120 bp, Artificial Sequence
  ENSG00000164588_45 (sequence is synthesized)
aaagataatagaatagctgattcttacaacaactgtatgatcagggatgagttagagtatttcttttgtctttgctcaaagccatacatatataaatatatataaagattattaataaat

SEQ ID NO: 513063 - DNA, 120 bp, Artificial Sequence
  ENSG00000164588_46 (sequence is synthesized)
tcaacaaaaaataaactacaatcatgaatattttattttatcaatatatgctaatcaaatgttttattttattaatgagtacagctttgcctctatttttacatcataaaatttccaaga

SEQ ID NO: 513064 - DNA, 120 bp, Artificial Sequence
  ENSG00000164588_47 (sequence is synthesized)
gcttatacttgataatcacataaaatcaattatattctataattctggaatgagaggactttaaatagaacatggatttttcaaccacttctttgtttacctttttcgtatagtaaaata

SEQ ID NO: 513065 - DNA, 120 bp, Artificial Sequence
  ENSG00000164588_48 (sequence is synthesized)
tgagcttattttcttttttgctctgtgcctttttagaatgtggttgttctccaacttcaaaacacaaccattttgtgtaattattggatatacagatgagaaataattttcctgtaataa

SEQ ID NO: 513066 - DNA, 120 bp, Artificial Sequence
  ENSG00000164588_49 (sequence is synthesized)
aaataattgtcctgtaatatatttatacaaacctattttgttataatagttctatgacatacctattttgttataatagttttataacatacctattttgttataatagggccttgggct

SEQ ID NO: 513067 - DNA, 120 bp, Artificial Sequence
  ENSG00000164588_50 (sequence is synthesized)
ggctctattataacaaaacaggtttatataaatacattcatatttatagccttaaacaaaataggtttgtatagtaggcccaaggccctattataacaaaataggtttgtataaatatat

SEQ ID NO: 513068 - DNA, 120 bp, Artificial Sequence
  ENSG00000164588_51 (sequence is synthesized)
tcatatttatagccttgggccctgcaaagttatttggagagtgatagaacctccccacacaagtgggttttaaatgatacctaaaagcctgagatagagtttatcataatgagaataagt

SEQ ID NO: 513069 - DNA, 120 bp, Artificial Sequence
  ENSG00000164588_52 (sequence is synthesized)
agtgaagcattcctgaaaacaaggaggataaatagtagcaatggcaatatattctattcaccaaaaaagtagcttgtctccaggtctggatgacctcttcataagtgaacaattccctga

SEQ ID NO: 513070 - DNA, 120 bp, Artificial Sequence
  ENSG00000164588_53 (sequence is synthesized)
tgaatgctgttccactttaaagagatggttattttgcaatttataaacttaactgagcatactattttcaggacactacaaagtacatagtcaagttattaccgtcattcctataggaca

SEQ ID NO: 513071 - DNA, 120 bp, Artificial Sequence
  ENSG00000164588_54 (sequence is synthesized)
gagaatgatttaaacaatatgacatgtttaaaattttagatgatttatttcaaatcctgaattatgtctacttcaaattatgagcaatctctattatctttcaggactatttaaaaaatc

SEQ ID NO: 513072 - DNA, 120 bp, Artificial Sequence
  ENSG00000164588_55 (sequence is synthesized)
tccatacctcctctttcagcttaggtttttatatttgttaattttactatgttactttgcttctatggccctcacttgcactgtttataatgttaacctgtttgaatgagatatctctcc

SEQ ID NO: 513073 - DNA, 120 bp, Artificial Sequence
  ENSG00000164588_56 (sequence is synthesized)
attatatctttatctttttagaacatgtgccataaaacccatgtggttattttgttcatatgcactacaactagcaaacttttattttatgttcacctactttaaaaagtactcatactg

SEQ ID NO: 513074 - DNA, 120 bp, Artificial Sequence
  ENSG00000164588_57 (sequence is synthesized)
taccatgggaaagaaacatgggccttatagaatggaatgctgagctattttgagtcctgaaaacaatggccaaaaatttaaggaactgtggttgctgcatgcaccaaattgtagcacata

SEQ ID NO: 513075 - DNA, 120 bp, Artificial Sequence
  ENSG00000164588_58 (sequence is synthesized)
caaataaataaaatacagttctataactgtattcaatatggttattttcaaggaaaaataggatagaaattttctttgaaagatttgctattgtacttagggaagtacacctgctattac

SEQ ID NO: 513076 - DNA, 120 bp, Artificial Sequence
  ENSG00000164588_59 (sequence is synthesized)
ccctcaaaagcaatgactttcttaagcaatttcaatttttttcctttttaacaaccctgcacttgcacaaccctgcatctcttgtctcaccctaatgctgaccctgcttccaattcaggc

SEQ ID NO: 513077 - DNA, 120 bp, Artificial Sequence
  ENSG00000164588_60 (sequence is synthesized)
tttgacagggacaaatggagattttaaggttttttaatgagagaagccttgctgacactccccgcatcccaccttgaaaattatttaaagatgatcttaaaagaacctacagataatgct

SEQ ID NO: 513078 - DNA, 120 bp, Artificial Sequence
  ENSG00000164588_61 (sequence is synthesized)
ctgaatttgtttacaaggtccttgatgtggagagaatgagtaatacattaaatgctggggaaataattatcatttagtgaaaaattaagcatgcttttctaaaatgtggatgtttaacag

SEQ ID NO: 513079 - DNA, 120 bp, Artificial Sequence
  ENSG00000164588_62 (sequence is synthesized)
agcacagctgattgggaacactggcagttcaatgcagctggagtgtctcacagggtgaagaggaacccagatcaagtgggaaatagggatttcaaaaaccttctgaaaggcttttaacat

SEQ ID NO: 513080 - DNA, 120 bp, Artificial Sequence
  ENSG00000164588_63 (sequence is synthesized)
cagggcaaaggttttacagtgttgtactttatattcttaatttaagcttatcaacggggaggattcacattgaaatgtctgttttgctaatgtaacaaggaataaaataatttatgacac

SEQ ID NO: 513081 - DNA, 120 bp, Artificial Sequence
  ENSG00000164588_64 (sequence is synthesized)
agcaaaaactgggggctatttacaaccccaccctgccttgtgaggatgctgggtcctaaggaaggtcctaggtttgctaaatagagtaatgggaataggaaactgaaagtttacttgctt

SEQ ID NO: 513082 - DNA, 120 bp, Artificial Sequence
  ENSG00000164588_65 (sequence is synthesized)
tgcgtaagataatatattgcggcagggaaggggtacaagaagataagagctagaacctgtgagaagggaaagaagtgataaaataattttggctaaaataaagcaagttctcaggccagg

SEQ ID NO: 513083 - DNA, 120 bp, Artificial Sequence
  ENSG00000164588_66 (sequence is synthesized)
tagcactttgggaggccaaagtgggaggaatgcttgaggccaggaattggagaccaaccagggcagcatgtcaagacctggtctctacaaggaaaaaaaatttttttaattgaccagtat

SEQ ID NO: 513084 - DNA, 120 bp, Artificial Sequence
  ENSG00000164588_67 (sequence is synthesized)
aaaatttttttaattgaccagtatatacttacatacctgcagtgtttagaaaacccgactataggtggtgtattcctgtagtcctagttactcagaaagttaaggcaggaggatcgcttg

SEQ ID NO: 513085 - DNA, 120 bp, Artificial Sequence
  ENSG00000164588_68 (sequence is synthesized)
aacttaggaggtcaaggctgcagtgagccctgttcgttccactgcactccagcttgggggacagagcaaaaccctttctcaagaaaaacccaaacaaacaaaaaagtgaagccagttctt

SEQ ID NO: 513086 - DNA, 120 bp, Artificial Sequence
  ENSG00000164588_69 (sequence is synthesized)
taatttctattggagatatcacacacgctccaaagagtggcaaaggtgaacattctttggagctattatatttctaatgtaacatcaatggccatttactcccaaagggaaacatctttt

SEQ ID NO: 513087 - DNA, 120 bp, Artificial Sequence
  ENSG00000164588_70 (sequence is synthesized)
tttttttttttttttaagatggagtctggctctgtcacccaggtgggagtgcaatggcaggatcttggcccactgcaacatcagcctcccaggtttaagcaattctcctgcatcagcctc

SEQ ID NO: 513088 - DNA, 80 bp, Artificial Sequence
  ENSG00000164588_71 (sequence is synthesized)
ctaaatttttgtaggtctcgaacccctaacctcaagtgatccgcccgcctcaccctccagaagtgctaggattacaggcc

SEQ ID NO: 513089 - DNA, 120 bp, Artificial Sequence
  ENSG00000164588_72 (sequence is synthesized)
tacaggcctgagccaccgcacccggccctgctatttttttctatgtagttgtttcagtaataccatatgagcagagaatactattgattcattcaattgaagaaatctgaataaattagt

SEQ ID NO: 513090 - DNA, 120 bp, Artificial Sequence
  ENSG00000164588_73 (sequence is synthesized)
tcattcaattgaagaaatctgaataaattagtaaatataataattcttcaaaagaggaccactttatgtttccaatagattatataattgaattcaggtaacgtagagttattcagactt

SEQ ID NO: 513091 - DNA, 120 bp, Artificial Sequence
  ENSG00000164588_74 (sequence is synthesized)
ttttttttaaataacggaattttgcaaaaaaacaggttgcatcgttttctacagagaatattcagatgtgtagaggcaaagagactttcttgaaaggtttttatttcctgttaaatttgt

SEQ ID NO: 513092 - DNA, 120 bp, Artificial Sequence
  ENSG00000164588_75 (sequence is synthesized)
gaggaaaactcctgagaaaggaaagatttacttttgaaggaagaaagaacataacccaaagaaatttgaaagattcaaaaagagttttccaaatgtattctcatttctttctcatatttg

SEQ ID NO: 513093 - DNA, 120 bp, Artificial Sequence
  ENSG00000164588_76 (sequence is synthesized)
ttcaaggtcttagtttccaagcattcaaaattaaatcttgtttgcctaactcttctaacatctattaccaacctaacatattacaattctgtttaaaatgtgcagttctaaatgttcttg

SEQ ID NO: 513094 - DNA, 120 bp, Artificial Sequence
  ENSG00000164588_77 (sequence is synthesized)
cgtgcctcactgtggaaagtgtggtgcatggaactgcagcgtcagtatcacccagaagtataattacaagaagtgcagagtccttggccttaccctgtacctacagaagtccgcttttgg

SEQ ID NO: 513095 - DNA, 120 bp, Artificial Sequence
  ENSG00000164588_78 (sequence is synthesized)
gcaagatccccagatgattcatatgtgtattaatattgaaaaaattggaactagtaagtcctagaggaggtaaattttaagggctttttaagggaacttccaagtgtgaagacatttctg

SEQ ID NO: 513096 - DNA, 120 bp, Artificial Sequence
  ENSG00000164588_79 (sequence is synthesized)
gagatgacaagtcaacatagcatgggatcttggctagacaaggaaagcgagagaacattaaataaacacaagcaacgacaaaccacctatgttataattttatcctggaccatccaaagt

SEQ ID NO: 513097 - DNA, 120 bp, Artificial Sequence
  ENSG00000164588_80 (sequence is synthesized)
ttactcttggtcacgctgtctaacccagcctgcctcctggcacttgctagttagaaccagggaagagaaaactaatatgtgttaggtattataatttccttatgtcacataaattttggt

SEQ ID NO: 513098 - DNA, 120 bp, Artificial Sequence
  ENSG00000164588_81 (sequence is synthesized)
gccatagctagcaatgtttcttaatatcacatcagtacaatgtgtccattgccttctgtaacatttttaatgctatcaataatacattgacattataaaaataaatgaatgtggtcaata

SEQ ID NO: 513099 - DNA, 120 bp, Artificial Sequence
  ENSG00000164588_82 (sequence is synthesized)
aattagatacatacatcaatgggaagagacagtggaaccacagatggaaggaacttgagtcctggaatttctacttggagaagagacagttgtccatgaggtacatccgttggactttaa

SEQ ID NO: 513100 - DNA, 120 bp, Artificial Sequence
  ENSG00000164588_83 (sequence is synthesized)
gaaagggttaaaactgcaggcttctggattatccacccttacagtgatttcaggcgctggttatcctcgctgtgtttactcagaaacagcggccggcaggcaaaagaagggcaatttgca

SEQ ID NO: 513101 - DNA, 120 bp, Artificial Sequence
  ENSG00000164588_84 (sequence is synthesized)
ttgcgtttattacgactttcaaggttaattagatacatacatcaatgggaagaggtaagatgcatctttttcttttttaaatctatatcatgaaattgttaattatggctgttttacaat

SEQ ID NO: 513102 - DNA, 120 bp, Artificial Sequence
  ENSG00000164588_85 (sequence is synthesized)
gaacaactgtgcaatgtgtaatgagttttatgaaattcaagtagaaaaatgtattcgacgactcttttccatgcataagtgatatatttgtatccctaaaatatatgatcaaataatgga

SEQ ID NO: 513103 - DNA, 120 bp, Artificial Sequence
  ENSG00000164588_86 (sequence is synthesized)
tttgaatgaactgaaaaaaatagtgatcgttttatgccaatttattttatttttaaataaatgcactttaatcagcaattattatcttgatcaatacaacccctttcccaccttggtttt

SEQ ID NO: 513104 - DNA, 120 bp, Artificial Sequence
  ENSG00000164588_87 (sequence is synthesized)
ttttaatctaatataaatacatcaagtaccattattttgataaagatgtgtagggtctgattgctaatctggcacatcattagctctgtgagatagtgtggtttttgtatcctctaatat

SEQ ID NO: 513105 - DNA, 120 bp, Artificial Sequence
  ENSG00000164588_88 (sequence is synthesized)
tgaagtttcattgaattcatgattgggtaaaacagattgtttctttatttccaaattgtatatataaaggctttgattttagcatattaattttgcttattgttatgccttgcctatagt

SEQ ID NO: 513106 - DNA, 120 bp, Artificial Sequence
  ENSG00000164588_89 (sequence is synthesized)
aacttattttagtttctccctattagttcatttcataatactaaaaaggaacatattcatgagggacattagtacatagaaaacacaaagagtatagtgaataaatggagtgaatctgac

SEQ ID NO: 513107 - DNA, 120 bp, Artificial Sequence
  ENSG00000164588_90 (sequence is synthesized)
caatcaggcccatattttgctgaatagagcatctgttgttaggcagtgggtgggacctgagagggctcagccaactggagtttccaaagatctgagttaaaccatcatcaagcaaaggag

SEQ ID NO: 513108 - DNA, 120 bp, Artificial Sequence
  ENSG00000164588_91 (sequence is synthesized)
ttcatatccctatcttcaaagtctgaatattaaccattttgacttccttttcttcctaagtctttttgtattaattataacctgaattttatagtctgcataagcgtaagagtccaaaag

SEQ ID NO: 513109 - DNA, 120 bp, Artificial Sequence
  ENSG00000164588_92 (sequence is synthesized)
acttgtagaatgcctaaatcgacactaatgaaagtcatataaagtcatatactggctatagaatattgctttcctccctacagaaatactttttagcattttcaagataaattatgtttt

SEQ ID NO: 513110 - DNA, 120 bp, Artificial Sequence
  ENSG00000164588_93 (sequence is synthesized)
tgtatgtgcttgtcagtgacattttggttcacaggatttcaggaaatgacatgcaataataaaacactgcataatacactgataaaaaggcataaaaatggatcattcttaaaatataga

SEQ ID NO: 513111 - DNA, 120 bp, Artificial Sequence
  ENSG00000164588_94 (sequence is synthesized)
tatgggatatatttaaaatcaaatgaagcacatttgagaaatcagattcatcttgtaatttttctctatatagcacattccatctaaaatggaataaatgttcagttctcaaagcctttt

SEQ ID NO: 513112 - DNA, 120 bp, Artificial Sequence
  ENSG00000164588_95 (sequence is synthesized)
tatgctaatttgagattaataccaaaccaagatgattcttgctaataattgctaatatttattgaaggcttattacacgtcagctagtatgtttgattctttacatatattagctcactg

SEQ ID NO: 513113 - DNA, 120 bp, Artificial Sequence
  ENSG00000164588_96 (sequence is synthesized)
aatcttcctaacaacacaaagatgtaaatataattattgtcattattttacagatgagaacaattaaatacaataaggtaactcgtccagattcatagaactagtaagaagtggagctgg

SEQ ID NO: 513114 - DNA, 120 bp, Artificial Sequence
  ENSG00000164588_97 (sequence is synthesized)
gattccaaacttggcaatcagactcaggagccagtgctcttaactgcaaaactatataggttcttactatgatatataatgttttagttataaatatcttaatattctaccattttatag

SEQ ID NO: 513115 - DNA, 120 bp, Artificial Sequence
  ENSG00000164588_98 (sequence is synthesized)
attgtctaacgaattatagggaacttttcttaagtaagactgtgggccatgcaatacaacagagttgaatagtacctcttaaaacaaggccatggaaaaatattttaacaaatatcctgt

SEQ ID NO: 513116 - DNA, 120 bp, Artificial Sequence
  ENSG00000164588_99 (sequence is synthesized)
gagaggaaagtcactgatataaacatccagtcaattaaaaatacagtagcaatgtgactatttttaatatcttgtggttttagcccagttaccctagagaatggcagcaggatgaacaga

SEQ ID NO: 513117 - DNA, 120 bp, Artificial Sequence
  ENSG00000164588_100 (sequence is synthesized)
tggcatcctatcagataaaatggcaggccatgtggtcatataagagtatactccttaccaccaatgtcctttggcttctggcagtaattacaggcacctagatctgtgtaacatgatgtg

SEQ ID NO: 513118 - DNA, 120 bp, Artificial Sequence
  ENSG00000164588_101 (sequence is synthesized)
ttttaaagatgccatgataaaatttaggaacatcagctcactgctatcattattgtaaaatgcaatttaatatgcacttacagacatttggtaaccaagcacattcaggctagagttgtg

SEQ ID NO: 513119 - DNA, 120 bp, Artificial Sequence
  ENSG00000164588_102 (sequence is synthesized)
ggttggcaacatgtttcttataaataaatgaccttggtaataaatgaaccataagcccatttaggtgaagaatgttttcttgattatatgatacccccatataatatcatatatcatggg

SEQ ID NO: 513120 - DNA, 120 bp, Artificial Sequence
  ENSG00000164588_103 (sequence is synthesized)
tatttaatgcccattagtaatgctgttcaacagggaagaaacagagtcataatccagaatttaatacaaattaatctttccatcacctacatgtttctaaccataatctccaagaaactt

SEQ ID NO: 513121 - DNA, 120 bp, Artificial Sequence
  ENSG00000164588_104 (sequence is synthesized)
gaatggttccaaaactggaaatctctctacctgatttttctaaatgtcaccaggatgtgtttacaagtaaaaatacaacaaataaatcagaaaaagtagctctgtgagcttttgcaataa

SEQ ID NO: 513122 - DNA, 120 bp, Artificial Sequence
  ENSG00000164588_105 (sequence is synthesized)
aaattcagaggaagatgtgagttcacccacatgtctttggttctgggtgttttagtatcaagctggctaatgctaaattcagcaaatttggggaagtaatgtgtgaagtctggaagctgc

SEQ ID NO: 513123 - DNA, 120 bp, Artificial Sequence
  ENSG00000164588_106 (sequence is synthesized)
cactgttctaaatgaatcattcctgaggaaagctgctgccttctataggaagctgcttccatcttcaacaatacatttttttttttctggactgaattagttcaactgaaaaacaacaag

SEQ ID NO: 513124 - DNA, 120 bp, Artificial Sequence
  ENSG00000164588_107 (sequence is synthesized)
aagccctgatgccagataaattagaaaaatattatgaatgagatacagaagctttaaatttttgtgcttatgttattatcattactaaagctgaattagtggttaatacaggaggaaaaa

SEQ ID NO: 513125 - DNA, 120 bp, Artificial Sequence
  ENSG00000164588_108 (sequence is synthesized)
actgatttgagcaactaatttatgaaacacatggtgttaagaagtgaggagggaagttgttttcatgaaccaattataagatcaatagatttgggatgtaaaaatagctttctgtgacat

SEQ ID NO: 513126 - DNA, 120 bp, Artificial Sequence
  ENSG00000164588_109 (sequence is synthesized)
tacactgaaactttatatatattgccaggtgaggtaaaaaccagagacaatttagataaatcaagccagaaatttcttttcttgtaatagctagaaagctgaggtgaatctttccaattt

SEQ ID NO: 513127 - DNA, 120 bp, Artificial Sequence
  ENSG00000164588_110 (sequence is synthesized)
ttatgtttggttttaaaaaactattatttgaattcagcattgtcgttgttgttattgtgtttaaagacagtgatccaagccagactgctatttcataacctatcacaagggtaacaaatt

SEQ ID NO: 513128 - DNA, 120 bp, Artificial Sequence
  ENSG00000164588_111 (sequence is synthesized)
ccttgtgatcttcctaaaagagacatacggtgaggaaatccctggaaattaaatggaatatgtgacaatcacaagccactgaagagataaagagtagattaagggcttagtgaataggag

SEQ ID NO: 513129 - DNA, 120 bp, Artificial Sequence
  ENSG00000164588_112 (sequence is synthesized)
attattcagtttgtaaaggtgaagagttcctttacagctgctgatctcagtcattttatcaacaggagatgaccttcgaaattttttagaggtttaggaaatattaattgcaaatacaaa

SEQ ID NO: 513130 - DNA, 120 bp, Artificial Sequence
  ENSG00000164591_0 (sequence is synthesized)
caggagagaagaaaggaaggaagaaaaggataagtcaagcaaagatattgaggagcaattcattcatccatctatctatccatccattccttccttcgacaaatatctgctgagttccta

SEQ ID NO: 513131 - DNA, 120 bp, Artificial Sequence
  ENSG00000164591_1 (sequence is synthesized)
tcaagcaccattcttggcactaaggatataacagttaacaagcggaagctaccagcagctgaccctcaacatttccaggatgatccccaaggagcagaaggggccagtgatggctgccat

SEQ ID NO: 513132 - DNA, 120 bp, Artificial Sequence
  ENSG00000164591_2 (sequence is synthesized)
gggggacctcactgaaccagtccctacgctggacctgggcaagaagctgagcgtgccccaggacctgatgatggaggagctgtcactacgcaacaacagagggtccctcctcttccagaa

SEQ ID NO: 513133 - DNA, 120 bp, Artificial Sequence
  ENSG00000164591_3 (sequence is synthesized)
gaggcagcgccgtgtgcagaagttcactttcgagttagcagccagccagcgggcgatgctggccggaagcgccaggaggaaggtgactggaacagcggagtcggggacggttgccaatgc

SEQ ID NO: 513134 - DNA, 120 bp, Artificial Sequence
  ENSG00000164591_4 (sequence is synthesized)
caatggccctgaggggccgaactaccgctcggagctccacatcttcccggcctcacccggggcctcactcgggggtcccgagggcgcccaccctgcagccgcccctgctgggtgcgtccc

SEQ ID NO: 513135 - DNA, 120 bp, Artificial Sequence
  ENSG00000164591_5 (sequence is synthesized)
cagccccagcgccctggcgccaggctatgcggagccgctgaagggcgtcccgccagagaagttcaaccacaccgccatctccaagggctaccgctgcccttggcaggagttcgtcagcta

SEQ ID NO: 513136 - DNA, 120 bp, Artificial Sequence
  ENSG00000164591_6 (sequence is synthesized)
ccgggactaccagagcgatggccgaagtcacacccccagccccaacgactaccgaaatttcaacaagaccccggtgccatttggaggacccctcgtggggggcacttttcccaggccagg

SEQ ID NO: 513137 - DNA, 120 bp, Artificial Sequence
  ENSG00000164591_7 (sequence is synthesized)
cacccccttcatcccggagcccctcagtggcttggaactcctccgtctcagacccagcttcaacagagtggcccagggctgggtccgtaacctcccagagtccgaggagctgtagcccta

SEQ ID NO: 513138 - DNA, 120 bp, Artificial Sequence
  ENSG00000164591_8 (sequence is synthesized)
gcctgaatcttcagttccccagtctcgggggcctggtaacatccggagccaagacttgtggacagcacttcacagttgaagaagggccttcacacacaaaacctgattgcaaatggcttc

SEQ ID NO: 513139 - DNA, 120 bp, Artificial Sequence
  ENSG00000164591_9 (sequence is synthesized)
agaggtcaccaagttcagtcgtcccaaaacatgggtgtgtttcaaaattacctggggatgttgttccaaatccagacaactggactgtcccagacttgcagcatcagagtctcctgagtc

SEQ ID NO: 513140 - DNA, 79 bp, Artificial Sequence
  ENSG00000164591_10 (sequence is synthesized)
tggactgtcccagacttgcagcatcagagtctcctgagtcgaggaatctgtattattaatagcaaccagggccgggtgt

SEQ ID NO: 513141 - DNA, 67 bp, Artificial Sequence
  ENSG00000164591_11 (sequence is synthesized)
caggagtttgagaccagtctggccaaaatagtggaaccccgtcgctactaaaaatacaaaaatgagt

SEQ ID NO: 513142 - DNA, 120 bp, Artificial Sequence
  ENSG00000164591_12 (sequence is synthesized)
agattgcgccactgcaccccagcctggacaacagagtgagactccttctcaaaagtaaataaataaatagcaaccagtactccaggtgattccagcataacttatccatggtttgtgtca

SEQ ID NO: 513143 - DNA, 120 bp, Artificial Sequence
  ENSG00000164591_13 (sequence is synthesized)
cttatccatggtttgtgtcattaggagtccacatccacacctctgctctttcctgttcctgtagtgtacactcccccggtgacagggtgctcactggcaccccatcttcctgtgaataac

SEQ ID NO: 513144 - DNA, 120 bp, Artificial Sequence
  ENSG00000164591_14 (sequence is synthesized)
tgcgctagacactgccaggcccgggcctcgaggaggaaaagacagtagggaagacattatagagcatgaagtcaccataattttccctaaagcatgcttattgacaattgaggaacaaag

SEQ ID NO: 513145 - DNA, 120 bp, Artificial Sequence
  ENSG00000164591_15 (sequence is synthesized)
tgttgtggagcagaagaaggagtccctcaccctaggtgtgagatgggattctggaagcttcctgaaggatttgagtgggaccttgtgggaggcgtgagagtccatgaagggggtgtgagg

SEQ ID NO: 513146 - DNA, 120 bp, Artificial Sequence
  ENSG00000164591_16 (sequence is synthesized)
gggagggtatttctggaaagtggaccagcatgtgcaaaaatatggaactgagcacgggtgcagggtgttctgcagaagggagaaggctgtgctagaggagccagtgagggccagcatggg

SEQ ID NO: 513147 - DNA, 120 bp, Artificial Sequence
  ENSG00000164591_17 (sequence is synthesized)
gtgggcttcactaaggaaatggggaaggttttagtgatgggtcttgctgggtgctgtgtggggcgcatattggagaagggtaatgccagaagccaggaagcctgcaagggatgaggccat

SEQ ID NO: 513148 - DNA, 120 bp, Artificial Sequence
  ENSG00000164591_18 (sequence is synthesized)
gggaatggagagaaggggccacccactgggcacctaacaggacaggtgcaaagtggggtgcttattaagattccttctttccactccattttgagcaggctgcttaaagtggtggtgatg

SEQ ID NO: 513149 - DNA, 120 bp, Artificial Sequence
  ENSG00000164591_19 (sequence is synthesized)
atgatgatgatgatggcagctttatatcgagtgcctcagtgcttgggctggtagtagtttctctacatatcttatttctaattctcagaacaaccctgagagaaagatattgttgtcccc

SEQ ID NO: 513150 - DNA, 120 bp, Artificial Sequence
  ENSG00000164591_20 (sequence is synthesized)
actttacagatgtggatatttaggccaaaaggaggaagtgacttgtccaggggcagacaccaaatgggaatctgattccagtggatgtctcttttcagtgcactgggtggtcaatgccca

SEQ ID NO: 513151 - DNA, 120 bp, Artificial Sequence
  ENSG00000164591_21 (sequence is synthesized)
ctcgctctgaaatcatctgactgtgatgccctgccttggagtttagaagttgagtgcaggcttgggagtcagactggatggggtaggttctaactctgccactgctagccggatgaactt

SEQ ID NO: 513152 - DNA, 120 bp, Artificial Sequence
  ENSG00000164591_22 (sequence is synthesized)
gagcaagtcatttcacatctccgagcctctgtttctccaagtgtaagatgaggacaagtataaaacctcctttatgggtttgttgtgaacacagtgcagggcacatttataataagagct

SEQ ID NO: 513153 - DNA, 120 bp, Artificial Sequence
  ENSG00000164591_23 (sequence is synthesized)
cagtcaatggtaggtttcatgcaactgctgctctaggctggaaaagttgttcttgcactggatgcagcatgagaagctggctgctaagatgtcactgggggtcactaaagctgaagcctg

SEQ ID NO: 513154 - DNA, 120 bp, Artificial Sequence
  ENSG00000164591_24 (sequence is synthesized)
aaggaaagcctctcattgctgtagagctctccctgcctctctctctgggggcgatggggaaggtcaggagtccagcccattcccagggtgtgtgggatagcgattgcattttccttttgc

SEQ ID NO: 513155 - DNA, 120 bp, Artificial Sequence
  ENSG00000164591_25 (sequence is synthesized)
tctggagtttcactccccttctgggtcccaagggcccaatggcctgacttttagaattgcttgcaattggtgttttctcttgaatttgggggctgccatttaaagccaggtttccatgag

SEQ ID NO: 513156 - DNA, 120 bp, Artificial Sequence
  ENSG00000164591_26 (sequence is synthesized)
ctgaagaccagccattcaagaatctgaaaagtagacaagaggactccagttgcctcaggttggttctgctgtgctctggaaagtaactgcagccaccaggtatgaaaaggagcctggtgg

SEQ ID NO: 513157 - DNA, 120 bp, Artificial Sequence
  ENSG00000164591_27 (sequence is synthesized)
ggagaccactgcacccaaaacaaatcctttcttcttctgagaatgtgactttttctggtgttgtaaaaaagaaaaaaaaaagaatgctcattgtaaaaataaaaaaataataataagcaa

SEQ ID NO: 513158 - DNA, 120 bp, Artificial Sequence
  ENSG00000164591_28 (sequence is synthesized)
tacacgtgggtgcaagccctctgtctgcacaggcctgttgccagggcacctgtcttccctagggtctggtgcttttagcctctggctccagctcctattgcagcccgaaataaggctgtg

SEQ ID NO: 513159 - DNA, 120 bp, Artificial Sequence
  ENSG00000164591_29 (sequence is synthesized)
acccatggcaaggcaggaatgattctcatcagctgaagccagagctggctgcaggggacaccctgctcgctgcctactgactgctgaccgctgactgcctacagggacgccacgcaactc

SEQ ID NO: 513160 - DNA, 120 bp, Artificial Sequence
  ENSG00000164591_30 (sequence is synthesized)
gacagaccgggaggggcgggaagccagtcacagccacagcgggagcctgcgtttcctgagcactttctgcaggccaggctctgtccccagcgctttctattcattgactgagctctggct

SEQ ID NO: 513161 - DNA, 120 bp, Artificial Sequence
  ENSG00000164591_31 (sequence is synthesized)
ggaacagcgcctccgcacctggtaggtgctcagttaacgtgggagaaatgaagagtgaaggtgccgcacatcttggatattctccaggacatggtgggcgggtgctatgagttttcctgt

SEQ ID NO: 513162 - DNA, 120 bp, Artificial Sequence
  ENSG00000164591_32 (sequence is synthesized)
gagccggaggggcgccgcgccccaggtcacacagcgagtcagccaaggccaagaccaacccgcgctgcgaactcgtggcttcctcactgcagtcctccgtgtttcctgggatggggaggg

SEQ ID NO: 513163 - DNA, 120 bp, Artificial Sequence
  ENSG00000164591_33 (sequence is synthesized)
gtctcctgtgctggagcaactgtggcttcccattcccgccgtcctctcccctaactccgatcttccctcctccaaccgcgtccgcggaatgggggtggggcgaggtggggttgggggctg

SEQ ID NO: 513164 - DNA, 120 bp, Artificial Sequence
  ENSG00000164591_34 (sequence is synthesized)
aaatgaggaccacagagagccactggttagcctaaagtcaaacggtaagccaggctgaggactgtgatgttcccatcagattaggctcctgcctttcagtgtgatccttgaaaagtgtta

SEQ ID NO: 513165 - DNA, 120 bp, Artificial Sequence
  ENSG00000164591_35 (sequence is synthesized)
tctttttaggcatctctccctggatacagaacaaagtaaacaaagtggattagggggttgaggataagccgtggagtgaagggactctggctcctaccaaaaaaaaaaaaaaaaaaaaaa

SEQ ID NO: 513166 - DNA, 120 bp, Artificial Sequence
  ENSG00000164591_36 (sequence is synthesized)
cagcgcctccgcacctggtaggtgctcagttaacgtgggagaaatgaagagtgaaggtgccgcacatcttggatattctccaggacatggtgggcgggtgctatgagttttcctgttctg

SEQ ID NO: 513167 - DNA, 120 bp, Artificial Sequence
  ENSG00000164591_37 (sequence is synthesized)
cagatgaagaggctgcggctcaggaatatgaacaacccggccaaagccacaaaacaaggaagcaccggcagggccgggattcaggtctgggtttgtctgactccagagcccagtgccttg

SEQ ID NO: 513168 - DNA, 120 bp, Artificial Sequence
  ENSG00000164591_38 (sequence is synthesized)
ttctccatggctgctgtgtgctacctctttgatgaacatctagatttgtgtccttctctgaggggtccccagatttcagcagttcgaggccagctcagcttttcctttcaccaatggcct

SEQ ID NO: 513169 - DNA, 120 bp, Artificial Sequence
  ENSG00000164591_39 (sequence is synthesized)
agaagaggccaacaaggtagctttgaggctgccccaaagtggagagtggcagtgaaacattggacgccagagtgagggccacagcgcagtggcctatatgggtttagagcgtgaggcctc

SEQ ID NO: 513170 - DNA, 120 bp, Artificial Sequence
  ENSG00000164591_40 (sequence is synthesized)
cacgtggacttgaatgcagaccccaggcctgcccgtgttgaccttgggcaagtgacttaacctctctgagcctccattgccccacctgtaaaatgaggggtttatagtacctgcttcata

SEQ ID NO: 513171 - DNA, 120 bp, Artificial Sequence
  ENSG00000164591_41 (sequence is synthesized)
caaaaatttgttcacttggaaatgtggagatctttaacttgtaaagatcttgataaaacaagttacaggccgtgagccaccgcgcctggcccatatatgcttttttataataataaaagg

SEQ ID NO: 513172 - DNA, 120 bp, Artificial Sequence
  ENSG00000164591_42 (sequence is synthesized)
ctattttaaagttaaaagaacacaggtctaaaactgaactcctgatctttcccagaaccttctcctccctttgccttccccatctccgtgaatggctgctctatccttccagtggctaag

SEQ ID NO: 513173 - DNA, 120 bp, Artificial Sequence
  ENSG00000164591_43 (sequence is synthesized)
gccagaaaccttgcagtcatcctctctcactcattgcccatacccatggcttacctttaaaaaatatcgagaatctgaccatttctcactacctccaccattatgggcaaagacctgcat

SEQ ID NO: 513174 - DNA, 120 bp, Artificial Sequence
  ENSG00000164591_44 (sequence is synthesized)
ggggaattcatgcaataaacacaaatggccaaagaacttcggaaacagtgctaaacttcactgagcaacaaacacatgcaaattaaactctgaggtgtcatttttgcccatcaggtgggc

SEQ ID NO: 513175 - DNA, 120 bp, Artificial Sequence
  ENSG00000164591_45 (sequence is synthesized)
atttctcggtcccaggcactgggtttagcgttgtaaactagtaactcatccttgttccccgatgatgggcgttaggattcttgcctccccccgacctttttttttggtggagggagaacc

SEQ ID NO: 513176 - DNA, 120 bp, Artificial Sequence
  ENSG00000164597_0 (sequence is synthesized)
attggtccttttatggttcagacttccttcttcatcgactctccctaattctcttcactgttcatccccagcaacttttcttcccaagcatttcctgcgggcttttattaccccaggagt

SEQ ID NO: 513177 - DNA, 120 bp, Artificial Sequence
  ENSG00000164597_1 (sequence is synthesized)
gccaatcaaggcgtggaacagataaagctgtgtagcaactaacgcgtgactcttgtgagtgtggagggcaaacgaagctccctgaaacctccgctctgctctcctgccttacgccgcgcg

SEQ ID NO: 513178 - DNA, 120 bp, Artificial Sequence
  ENSG00000164597_2 (sequence is synthesized)
gcccctgttctgaggtttaatacttgcttcacagataagcgctgcggccacgttccggtgcccaccttctccttggctagggcacgacgccagcccagggggcgcggccctgagctgctg

SEQ ID NO: 513179 - DNA, 120 bp, Artificial Sequence
  ENSG00000164597_3 (sequence is synthesized)
cgagagacagctgaaagcgccggcccgacggccttggctccctcggtgcgctgggcgcagagcactcggaccctgggcgcccactgctcgagtacctgcgcggctcctagccaggcttag

SEQ ID NO: 513180 - DNA, 120 bp, Artificial Sequence
  ENSG00000164597_4 (sequence is synthesized)
cccaggcgcgggctgagagtcagttcgccaggtgggcctggagccatgggctgggtgggcgggcggcgccgggattctgcgtcaccacctgggcggagccgttctgctgctgacgacatc

SEQ ID NO: 513181 - DNA, 120 bp, Artificial Sequence
  ENSG00000164597_5 (sequence is synthesized)
aacccggcacctgccaacatggaaggtggcggcggcagcgtcgctgtagctggcctcggagctcgaggctctggagcggctgcagctacagtccgggaacttctgcaggacgggtgttat

SEQ ID NO: 513182 - DNA, 120 bp, Artificial Sequence
  ENSG00000164597_6 (sequence is synthesized)
agtgactttttaaacgaagactttgatgtaaagacttatacttctcaatctattcatcaagctgtaattgctgaacaactagcaaaacttgcccaaggaatcagtcagttggacagagaa

SEQ ID NO: 513183 - DNA, 120 bp, Artificial Sequence
  ENSG00000164597_7 (sequence is synthesized)
ctacacttacaggttgttgcaagacatgaagatttactggcacaagcaactgggattgagtcgttggaaggtgttcttcagatgatgcagacgagaattggggctttacagggagctgtt

SEQ ID NO: 513184 - DNA, 120 bp, Artificial Sequence
  ENSG00000164597_8 (sequence is synthesized)
gataggataaaagcaaaaattgttgaaccatacaataagatagttgcccggactgcacaactagcaagacttcaggttgcctgtgatttgcttcggaggattattcgtatcttgaatctc

SEQ ID NO: 513185 - DNA, 120 bp, Artificial Sequence
  ENSG00000164597_9 (sequence is synthesized)
agtaagagactccaaggacaactgcaagggggaagtagagagataacaaaagctgctcagagtctcaatgaacttgattatctttctcaaggaatagatctttctggaatagaagtgata

SEQ ID NO: 513186 - DNA, 120 bp, Artificial Sequence
  ENSG00000164597_10 (sequence is synthesized)
gaaaatgatctactttttattgcaagagcccgacttgaagtggaaaatcaagctaagcgcctactagagcagggtttggagactcagaatccaactcaagtcggaacagctcttcaggtt

SEQ ID NO: 513187 - DNA, 120 bp, Artificial Sequence
  ENSG00000164597_11 (sequence is synthesized)
ttctataatcttggaactttgaaggatactattaccagtgttgtggatggatattgtgctactttagaagaaaatatcaacagtgcattagacataaaagttttgactcagccttcccag

SEQ ID NO: 513188 - DNA, 120 bp, Artificial Sequence
  ENSG00000164597_12 (sequence is synthesized)
tcagctgtgagagggggacctggacgatctaccatgccaaccccaggaaatactgcagctttgcgtgcctcattctggaccaatatggagaaacttatggatcatatttatgctgtttgt

SEQ ID NO: 513189 - DNA, 120 bp, Artificial Sequence
  ENSG00000164597_13 (sequence is synthesized)
ggacaggtacaacatctacaaaaagtattggccaagaagagagatcctgtttctcacatttgtttcattgaagaaatagttaaggatggacaaccggaaattttctacacattttggaat

SEQ ID NO: 513190 - DNA, 120 bp, Artificial Sequence
  ENSG00000164597_14 (sequence is synthesized)
tcagttactcaggcactttcttctcaatttcatatggcaacaaactcttcgatgtttttgaagcaggcatttgaaggagaataccctaaattattacgtctttataatgacttatggaag

SEQ ID NO: 513191 - DNA, 120 bp, Artificial Sequence
  ENSG00000164597_15 (sequence is synthesized)
cgtcttcaacaatacagtcagcatatccaagggaattttaatgcaagtggaactacagacctctatgttgacctacaacacatggaagatgatgcacaagatatattcataccaaaaaag

SEQ ID NO: 513192 - DNA, 120 bp, Artificial Sequence
  ENSG00000164597_16 (sequence is synthesized)
tggtttttcccccgggtggtcgtaatcctccttcctctgatgaacttgatggtattattaaaactatagcaagtgaactaaatgttgctgctgttgatacaaacctcacattagctgtgt

SEQ ID NO: 513193 - DNA, 120 bp, Artificial Sequence
  ENSG00000164597_17 (sequence is synthesized)
caaaaaatgtggcaaagaccatccagttatacagtgtaaaatcagagcagcttctctccacacaaggagatgcaagtcaggtgattgggcctcttactgaaggacagagaagaaatgtgg

SEQ ID NO: 513194 - DNA, 120 bp, Artificial Sequence
  ENSG00000164597_18 (sequence is synthesized)
cagtagtgaattcattgtataagttgcaccaatcagtaacaaaggttgtttccagtcagagctcattcccactggcagctgagcaaactataatttcagctctaaaggctattcatgctc

SEQ ID NO: 513195 - DNA, 120 bp, Artificial Sequence
  ENSG00000164597_19 (sequence is synthesized)
ttatggaaaatgctgtgcaacccttactcacttctgtgggagatgctatagaggccataatcatcaccatgcatcaagaagacttttctgggtcattatccagctcaggaaaacctgatg

SEQ ID NO: 513196 - DNA, 120 bp, Artificial Sequence
  ENSG00000164597_20 (sequence is synthesized)
ttccttgttctctgtacatgaaggagctacaaggtttcattgccagagttatgagtgactattttaaacactttgaatgcttggattttgtctttgacaacactgaggctattgcccaaa

SEQ ID NO: 513197 - DNA, 120 bp, Artificial Sequence
  ENSG00000164597_21 (sequence is synthesized)
gagctgttgaactttttatccgccatgccagtctcataagacctcttggtgaaggtgggaaaatgcgacttgctgctgattttgcacagatggagttggctgtgggtccattctgtagac

SEQ ID NO: 513198 - DNA, 120 bp, Artificial Sequence
  ENSG00000164597_22 (sequence is synthesized)
gagtatctgatttaggaaagtcctatcggatgctgagatcattcagacctctgctcttccaggcaagtgaacatgtagccagtagtcctgcattgggggatgtgattccgttcagcatca

SEQ ID NO: 513199 - DNA, 120 bp, Artificial Sequence
  ENSG00000164597_23 (sequence is synthesized)
ttattcagtttttgttcacgagagcacccgctgaactgaaatctcctttccagagggcagagtggtcccacacacgcttctctcagtggctggatgaccatccatctgaaaaggacaggc

SEQ ID NO: 513200 - DNA, 120 bp, Artificial Sequence
  ENSG00000164597_24 (sequence is synthesized)
tcctcctcatcaggggagccctggaagcttatgttcaatcagtgagaagtagagaaggcaaagaatttgcaccagtttatcccataatggttcagctgcttcaaaaggctatgtctgctc

SEQ ID NO: 513201 - DNA, 120 bp, Artificial Sequence
  ENSG00000164597_25 (sequence is synthesized)
ttcagtaatgacatgaaatctttgttcatctccactttgtgctaacccattcatagttggcagttaaacacatactccaaaagactgctactatctactattttaagaatgtaattgatt

SEQ ID NO: 513202 - DNA, 120 bp, Artificial Sequence
  ENSG00000164597_26 (sequence is synthesized)
gttcggtatttcctatcgacgtttatttacctctttagcacttatactttagcataaaaaatgttgagttatcaccacctttcaattccatggacctgatttttccagaaagatgttttc

SEQ ID NO: 513203 - DNA, 120 bp, Artificial Sequence
  ENSG00000164597_27 (sequence is synthesized)
ctctttcagatttttgtacaaggctaaaatgtctttcccatccataaccaagtcctcctatgggtacataaacccaaagtccccacttcttttaaagggatatgatcaagttataacatg

SEQ ID NO: 513204 - DNA, 120 bp, Artificial Sequence
  ENSG00000164597_28 (sequence is synthesized)
taccctgcttcccccaaccctgccttcttcactaaataagcatgtagctcagtggtttccaaatttggctgcacattcataccaatcaccaggggatttttttaaaatcctgatgcccaa

SEQ ID NO: 513205 - DNA, 120 bp, Artificial Sequence
  ENSG00000164597_29 (sequence is synthesized)
cttgcactccacattaattaacatgtctaggagtgggagcctgacagacaccactattaaaaaaaaaaaaaatccccaaaatgattccaatagacaacaaagttgaggaaccactggcac

SEQ ID NO: 513206 - DNA, 120 bp, Artificial Sequence
  ENSG00000164597_30 (sequence is synthesized)
atcccaagctaagatacaaggttaaatggcctttttaagtatgtcatactggatctttaaataaagcaaggcttttgttacactttgtcatgttattaaaagcagacctttgggctgttt

SEQ ID NO: 513207 - DNA, 120 bp, Artificial Sequence
  ENSG00000164597_31 (sequence is synthesized)
aaccgtgtaacaaaaatgccacgtgaaaaataaaaatttttattgtatagcaattctctataaatagtagataatctaagtccttattttctgatggctcttgttccactattaacattg

SEQ ID NO: 513208 - DNA, 120 bp, Artificial Sequence
  ENSG00000164597_32 (sequence is synthesized)
tttttaatttttaaaatcctatcagcagcctcctaattagcagtgttaggaatttgccttatgttttccatctcatctcctgaacctgttattctgagaactcataaataaaattcagcc

SEQ ID NO: 513209 - DNA, 120 bp, Artificial Sequence
  ENSG00000164597_33 (sequence is synthesized)
ttttttttccatttatttgaaataatatacaagaatatagtgtgcaaaatttaggggcaacatcatgaagaagtgtgatgaactgaaatcaattttacagctgtgattcctaaccagaaa

SEQ ID NO: 513210 - DNA, 120 bp, Artificial Sequence
  ENSG00000164597_34 (sequence is synthesized)
caccacttggtaagtaacatgaaaagccatgattgtagctcagagcaaaagcagctgtattgccaatgtatttgctctaattttagacagttggaggaaaattaaagtgcaagtgttgca

SEQ ID NO: 513211 - DNA, 120 bp, Artificial Sequence
  ENSG00000164597_35 (sequence is synthesized)
ctgcagtaagtgcaaagtctgcccccaccataaagattatgatgacaaaatatatttaagatacatggctgaggagatacagaacacgaagttaaaaaatacaatggtgttgactgtttg

SEQ ID NO: 513212 - DNA, 120 bp, Artificial Sequence
  ENSG00000164597_36 (sequence is synthesized)
ttaatagcaccattacagtgactatatcccaatgctattaactaactttaccttggcctgggctaggtctccattggaaataataacggatggctgctgccacctggtgcatcaactcag

SEQ ID NO: 513213 - DNA, 120 bp, Artificial Sequence
  ENSG00000164597_37 (sequence is synthesized)
catgccatggtaactgcagcaggtggctcttaggctgggacaccaacaccagccacctgccccatgttctggtagcctcttggcactgaccagactaggagcgcctatgtttggcacaga

SEQ ID NO: 513214 - DNA, 120 bp, Artificial Sequence
  ENSG00000164597_38 (sequence is synthesized)
tgctgagccatgtggtggttactagaggaaaggccgactcccagcttctgcttcatttcatcatgtgtacaatacagattaataagcagtaaggagccaatgtataaacagcagttacat

SEQ ID NO: 513215 - DNA, 120 bp, Artificial Sequence
  ENSG00000164597_39 (sequence is synthesized)
attttttaaattcccctttcgtacaatttaaaataaaacatgtatacacttctcctctctttctactgtactttagcaccacaggatatcaattttcaagcctattattacctgatagac

SEQ ID NO: 513216 - DNA, 120 bp, Artificial Sequence
  ENSG00000164597_40 (sequence is synthesized)
atatatgaagtttggaagaaaaataaggcaatttggtttaaaatgttgatagttttagcttaatgctctaatggagaaagcaaatcctcactcatattattaaatcatttcaagactcaa

SEQ ID NO: 513217 - DNA, 120 bp, Artificial Sequence
  ENSG00000164597_41 (sequence is synthesized)
aagcccaaggagggtggggatgcaagagaggatgaaggagcagtgcctgggggcatggacatgtgactgcaccttccagtggcgggccacctcactgcctaggcacgggtgctggagcaa

SEQ ID NO: 513218 - DNA, 120 bp, Artificial Sequence
  ENSG00000164597_42 (sequence is synthesized)
ccagcagttggaaatgttggccacaacatcttttgctttctttcattccaaaccttcatatccctgatgtgcaatcctgtgtcccatgcaaccctaaggaccatgcatttgtacctttga

SEQ ID NO: 513219 - DNA, 120 bp, Artificial Sequence
  ENSG00000164597_43 (sequence is synthesized)
aaatcatcatttgctatgaaaagttttgccctagctccgcatcttttacttcatttttatgtgctgcagttactgaattggtggaacacagatgtgagtgaatttttaaaaatacccaag

SEQ ID NO: 513220 - DNA, 120 bp, Artificial Sequence
  ENSG00000164597_44 (sequence is synthesized)
tgcgaaacagttctgaggaggaaacaagaacaacccagcagccacttggataccatggccctccagtagtgccccatgaatgcattcacatacatacgcatgtgctcttgcccacacgtg

SEQ ID NO: 513221 - DNA, 120 bp, Artificial Sequence
  ENSG00000164597_45 (sequence is synthesized)
cacacacccccatgtaccccaaccatgcccagggtggggtgctttaactgtcatacatggcttattaagcaacactcttccctgcaactgctctcaccatcaccagagacctctcagcca

SEQ ID NO: 513222 - DNA, 120 bp, Artificial Sequence
  ENSG00000164597_46 (sequence is synthesized)
ccaaacattcccatttttaccttaccactctgtagctttagctacagttgaccgccatttccttctgtaaactcataaactgggactcagcacatttttattgatgctgagctcacattt

SEQ ID NO: 513223 - DNA, 120 bp, Artificial Sequence
  ENSG00000164597_47 (sequence is synthesized)
tatcagcatggtaggccctgggccaggaaccgaggatacgaagtaagccgagatatggccctgtcctctcagagcttgcattacaccacagccatctgtttctgttctaacttctctggc

SEQ ID NO: 513224 - DNA, 120 bp, Artificial Sequence
  ENSG00000164597_48 (sequence is synthesized)
catttttttttgtgtgtcatttgctgaattatcttcttctagccattccttaaatgctatcatttcccatattttcttcttctcatcctgcctctgccttggttcccaggtgagcttgtc

SEQ ID NO: 513225 - DNA, 120 bp, Artificial Sequence
  ENSG00000164597_49 (sequence is synthesized)
cagacccatgcctctagtgccccttctatacttaagagccctcaggtctgtgactgcctctggatggggccttggcccagtaaacttgctatcatatgtcaccacccacagaaatctcaa

SEQ ID NO: 513226 - DNA, 120 bp, Artificial Sequence
  ENSG00000164597_50 (sequence is synthesized)
ccccagaatggtcaaaataattctaatcttttctctcaaaccttctcattctcttatactccctgtcttggttgggaggtcacaatcacctaactagccaagccggaaaacctttacatc

SEQ ID NO: 513227 - DNA, 120 bp, Artificial Sequence
  ENSG00000164597_51 (sequence is synthesized)
atcattcaactcctctgtcatccttattcctcaaacccactctgttgcgtctctaaaatagctcttgaagtcattctcaactctcccaggggatcccaattctgttggtctgggcccact

SEQ ID NO: 513228 - DNA, 120 bp, Artificial Sequence
  ENSG00000164597_52 (sequence is synthesized)
gcacccagtgatcctttgttagcctgtgtcaggtgatgagttgagttccctaaagccagagtggggctgacatgatgaggtggttctaaaccacatgtgcacacaagaatcatttacata

SEQ ID NO: 513229 - DNA, 120 bp, Artificial Sequence
  ENSG00000164597_53 (sequence is synthesized)
gcttggaaaattcctagtgcccaggtctctcacccttgcctacctcagaatctccagggtaggcctgctatcaggatttctctatagctccccaagaaggtccagggtgcagccaagggc

SEQ ID NO: 513230 - DNA, 120 bp, Artificial Sequence
  ENSG00000164597_54 (sequence is synthesized)
gtgaacccctgccatagtgggtcatatttcagttaggatgaaagactgctgaggaagctatgacaggtcagtaagaaccatcagcctgtcagctttgtttccagaagtgaccctgagccc

SEQ ID NO: 513231 - DNA, 120 bp, Artificial Sequence
  ENSG00000164597_55 (sequence is synthesized)
tcaagcttggtacccacatcccacatgagccactggccctctgggcgtatgtgtggataaagattagctcggaccctgctctttttccttgcttatctgttactcagctatgaacatctg

SEQ ID NO: 513232 - DNA, 120 bp, Artificial Sequence
  ENSG00000164597_56 (sequence is synthesized)
acacagaaatgggagaggttaccagccccggtgaatgttcctggtaaaatctgccctcgggaaaggctttggatttgggtgaggagtttgggcctgggctaacacagggatttgcaatgt

SEQ ID NO: 513233 - DNA, 120 bp, Artificial Sequence
  ENSG00000164597_57 (sequence is synthesized)
ctgtgtggattatttttcccgagtcccaaagattcactcagctgcaacacactcagtcgtcttaaaaagaggattcagttaattgaacacgttcatttttctcatcttaacaagttggtc

SEQ ID NO: 513234 - DNA, 120 bp, Artificial Sequence
  ENSG00000164597_58 (sequence is synthesized)
atttttgtcgtcttaacaagttggaatgagttcatccaaaacagttgtcctgctgtgtgtacatcacaaatctgttttcttttgcttctctttaaaaatgtctcctgagtgatttcatca

SEQ ID NO: 513235 - DNA, 120 bp, Artificial Sequence
  ENSG00000164597_59 (sequence is synthesized)
gcagtgctgttgctaagcctatatttagcaactgaaaatcatgctcagaaatactgtcatgcttttttaaaaaggcatatccatccctccacacatggctgattccagaaccttcatgcc

SEQ ID NO: 513236 - DNA, 120 bp, Artificial Sequence
  ENSG00000164597_60 (sequence is synthesized)
cttagcaaaaaattgagctgtccttcagggtttcaaaaaaagtactgtactcctgctgcaccccaggctcttggcaaggaggggacttttgtcctagagaatgttctttcttatgtatta

SEQ ID NO: 513237 - DNA, 120 bp, Artificial Sequence
  ENSG00000164597_61 (sequence is synthesized)
ttgcaaaacaattttgttcttgcatactgaagcatcactggatgaatttctttcccctgtagacaaaccgagggtgagtattgctctttaaatgtcagtaaatttgttttagcttctggg

SEQ ID NO: 513238 - DNA, 120 bp, Artificial Sequence
  ENSG00000164597_62 (sequence is synthesized)
gcaaaccttgttgtatactcattctgttcctcccagcataatatgttaggttgtcataaaatagggcaaattgaggatagtgtaactactgctgctgaataaatgggaaatagtgaacca

SEQ ID NO: 513239 - DNA, 120 bp, Artificial Sequence
  ENSG00000164597_63 (sequence is synthesized)
acttcaggtagtttcttacttttatttctttatactttattattcattttgttttcataagtggacaaaatttaagagtatgagtttggaagaagtaagagaatgggaacagaaggtaag

SEQ ID NO: 513240 - DNA, 120 bp, Artificial Sequence
  ENSG00000164597_64 (sequence is synthesized)
aattgtgcttccacatccatggtgttttctctacacagattgctggttttacctcaagtccaaagctttaagttgacctgaatatttccagttaacattctctttgtcagaggggcatga

SEQ ID NO: 513241 - DNA, 84 bp, Artificial Sequence
  ENSG00000164597_65 (sequence is synthesized)
ttatcattctgacacattcttttgaaattgaattcttacagctctccacacaaggagatgcaagtcaggtgattgggcctctta

SEQ ID NO: 513242 - DNA, 120 bp, Artificial Sequence
  ENSG00000164597_66 (sequence is synthesized)
attccccaagatgctctcttctcttcctatttcatatttttcctaagtgggaaacctcacccagcaataaagttttctatgtaaaccaccatatcttatgcaaatagggatttttatttc

SEQ ID NO: 513243 - DNA, 120 bp, Artificial Sequence
  ENSG00000164597_67 (sequence is synthesized)
attttcacatgttgttttaatatgagcaagggaagaaatattattgtgattacgttcacttggctctttttgtcctgaaaaaaatgagtatttcttaaaagttatggcttttgtattagt

SEQ ID NO: 513244 - DNA, 120 bp, Artificial Sequence
  ENSG00000164600_0 (sequence is synthesized)
actttttagagatcaatgagatagtgcagatatacacagatctagagactccaggagacgatgcgacactcagcctgaaaagatttggaagacccaaaatgaaaactgattattgaatga

SEQ ID NO: 513245 - DNA, 120 bp, Artificial Sequence
  ENSG00000164600_1 (sequence is synthesized)
aattaaaacctaaggtaatttaagattagagaaccatgttaacactaccgtttgatgagtctgttgtaatgccagaatcccagatgtgcagaaagttttctagagaatgcgaggaccaga

SEQ ID NO: 513246 - DNA, 120 bp, Artificial Sequence
  ENSG00000164600_2 (sequence is synthesized)
agcaaattaagaagccagaaagcttttccaaacagattgtccttcgaggaaagagcatcaaaagggcccctggagaagaaaccgagaaagaagaagaggaggaagacagggaagaggaag

SEQ ID NO: 513247 - DNA, 120 bp, Artificial Sequence
  ENSG00000164600_3 (sequence is synthesized)
atgaaaatgggttgcctagaaggaggggtcttaggaaaaaaaagacaacaaagctgcgattggaaagggtcaagttcaggagacaggaagcgaacgcgcgcgagaggaacaggatgcacg

SEQ ID NO: 513248 - DNA, 120 bp, Artificial Sequence
  ENSG00000164600_4 (sequence is synthesized)
gcctcaacgacgctctggacaacttaagaaaagtggtcccctgttattctaaaacccagaaactgtccaaaatagagactttacgactggccaaaaactacatctgggcactttctgaaa

SEQ ID NO: 513249 - DNA, 120 bp, Artificial Sequence
  ENSG00000164600_5 (sequence is synthesized)
ttctgagaatcggcaagagaccagatctgctcacattcgtccaaaacttatgcaaaggtctttcccagccaactacaaacttggtggcaggctgcttgcagctcaacgccaggagtttcc

SEQ ID NO: 513250 - DNA, 120 bp, Artificial Sequence
  ENSG00000164600_6 (sequence is synthesized)
tgatgggtcagggtggggaggctgcacaccacacaaggtcaccctactctaccttctacccaccctaccacagccctgagctcaccactcccccagggcatgggactcttgataattcca

SEQ ID NO: 513251 - DNA, 120 bp, Artificial Sequence
  ENSG00000164600_7 (sequence is synthesized)
agtccatgaaaccctacaattattgcagtgcgtatgaatccttctatgaaagtacttcccctgagtgtgccagccctcagtttgaaggtcccttaagtcctcccccaattaactataatg

SEQ ID NO: 513252 - DNA, 120 bp, Artificial Sequence
  ENSG00000164600_8 (sequence is synthesized)
gtaaaaattacaattacggcatgcattactgtgcagtgccacccaggggtccccttgggcagggtgccatgttcaggttgcccaccgacagccacttcccttacgacttacatctgcgca

SEQ ID NO: 513253 - DNA, 120 bp, Artificial Sequence
  ENSG00000164600_9 (sequence is synthesized)
gccaatctctcacaatgcaagatgaattaaatgcagtttttcataattaatgaggaaaatgaaaataaacagtggtcattcacctcccctgtctaattaagacaaagcagatgcttgtgg

SEQ ID NO: 513254 - DNA, 120 bp, Artificial Sequence
  ENSG00000164600_10 (sequence is synthesized)
gctgagtaattggcacaactctatctaaggtgtttactagtttctgaagtgtgtttcaactattgtgagaattttctatgtaataataaatctcttttcgtatgagaacttcttttcctt

SEQ ID NO: 513255 - DNA, 120 bp, Artificial Sequence
  ENSG00000164600_11 (sequence is synthesized)
tccttttgtctgtgaagcactgtgattctgtttctactggaaagatttttttctttttaattttcttttaaacttatttaatttgtttgaacaaggtgtctaagaatatactgttgaata

SEQ ID NO: 513256 - DNA, 120 bp, Artificial Sequence
  ENSG00000164600_12 (sequence is synthesized)
aagacatgcacacagcataattcaatgtctattttggttgtacagtaattataaaatgcatgttattaaaaccagatgagtaaaatgatgtgtttataattattaggaattatatattat

SEQ ID NO: 513257 - DNA, 120 bp, Artificial Sequence
  ENSG00000164600_13 (sequence is synthesized)
gtatcttttaaaaattgaaattttaaaatatggagaatatcactaagctgacaatgatattgggagatgaatttgcaacaatataaaaagctatgcaattttctttttattaaggatgaa

SEQ ID NO: 513258 - DNA, 120 bp, Artificial Sequence
  ENSG00000164600_14 (sequence is synthesized)
tctaaatgcattcaattggtaactattcctcttcaagtatttgcagatggggcaacatgatatttgggtagctgatgtcataattcggggacaattatctcaatcatcaagaaaaaaatt

SEQ ID NO: 513259 - DNA, 120 bp, Artificial Sequence
  ENSG00000164600_15 (sequence is synthesized)
tcagcacttgttttgtattattcagaaattaactgtacaggtttgttatcacaatgtataattgtgtttttccaccccacatttttaaggcaattaaatatagatatttccactcgtaaa

SEQ ID NO: 513260 - DNA, 120 bp, Artificial Sequence
  ENSG00000164603_0 (sequence is synthesized)
gtcgctccggttcctctgcctcctctggctgctgcctccgcagctccctcctcctaccccacctcctccatctggggagcgtctgcgggggcctgaggggcggcggcggcggcggcggct

SEQ ID NO: 513261 - DNA, 120 bp, Artificial Sequence
  ENSG00000164603_1 (sequence is synthesized)
gcgatatggagccaggggccggcggccgaaatactgctcgtgcgcagagggccgggtccccgaacactccgccgccccgggagcaggagcggaaactggagcaggagaagctctccggtg

SEQ ID NO: 513262 - DNA, 120 bp, Artificial Sequence
  ENSG00000164603_2 (sequence is synthesized)
tggtgaagagcgtccaccggcggctccgcaagaagtaccgagaagtgggagattttgataagatctggcgagaacactgtgaggatgaagaaactctttgtgaatatgccgttgcaatga

SEQ ID NO: 513263 - DNA, 120 bp, Artificial Sequence
  ENSG00000164603_3 (sequence is synthesized)
aaaatttggcagataatcattgggcaaaaacttgtgagggcgaaggtcgtattgaatggtgttgtagtgtatgcagagaatatttccaaaatggtgggaagagaaaagcacttgagaaag

SEQ ID NO: 513264 - DNA, 120 bp, Artificial Sequence
  ENSG00000164603_4 (sequence is synthesized)
atgaaaaaagagctgtacttgccactaagaccactccagccttaaatatgcatgagtcttctcaacttgaaggtcatttaaccaacctcagctttacaaaccctgaatttataactgagt

SEQ ID NO: 513265 - DNA, 120 bp, Artificial Sequence
  ENSG00000164603_5 (sequence is synthesized)
tgctacaagcctcaggaaaaatcagattacttgatgttggcagctgctttaacccatttctgaagtttgaagaatttctaactgttggcatagatattgtacctgctgtagagagtgtct

SEQ ID NO: 513266 - DNA, 120 bp, Artificial Sequence
  ENSG00000164603_6 (sequence is synthesized)
ataaatgtgatttcctgaacttacagcttcagcaaccactccagcttgcacaggatgctatagatgcttttttgaagcagctgaaaaaccctattgattctcttcctggagagcttttcc

SEQ ID NO: 513267 - DNA, 120 bp, Artificial Sequence
  ENSG00000164603_7 (sequence is synthesized)
atgtggttgttttctctctccttctttcttattttccatctccttaccagcgatggatttgctgcaagaaagcccatgaactgttagtgttaaatggtttattactaatcatcacacctg

SEQ ID NO: 513268 - DNA, 120 bp, Artificial Sequence
  ENSG00000164603_8 (sequence is synthesized)
attcctcccatcagaaccgtcatgctatgatgatgaaaagctggaagattgctatagagtccctgggctttaaacgcttcaagtactcaaaattttcacatatgcatctgatggcattta

SEQ ID NO: 513269 - DNA, 120 bp, Artificial Sequence
  ENSG00000164603_9 (sequence is synthesized)
ggaaaatctctctaaaaaccacaagtgacttggttagtaggaactacccaggaatgttatatattcctcaagatttcaacagtatagaagatgaggaatattctaacccttcctgctatg

SEQ ID NO: 513270 - DNA, 120 bp, Artificial Sequence
  ENSG00000164603_10 (sequence is synthesized)
ttcgatcagatatagaagatgaacaactagcatatggtttcacagaactccctgatgcgccatatgactcagattctggagaaagtcaagccagctctattcctttctatgagctagaag

SEQ ID NO: 513271 - DNA, 120 bp, Artificial Sequence
  ENSG00000164603_11 (sequence is synthesized)
accccatattacttttaagttaatatagaagcaaaaagcccctttcagtccaggctcctaaactaattgcttacaccaattggaaatactaacatgaactcagtactgaaaacctggttt

SEQ ID NO: 513272 - DNA, 120 bp, Artificial Sequence
  ENSG00000164603_12 (sequence is synthesized)
gcataaaagaaatgcagaggtttacagagtttgctatttttttctacttctcaattttaaaatttattcttatatagaaagcttaaagtttcatgcagagtgactcatgtcatagcagaa

SEQ ID NO: 513273 - DNA, 120 bp, Artificial Sequence
  ENSG00000164603_13 (sequence is synthesized)
actactgttactttagcatttagcactatcatagaaaggtacctttttctctttagtgctattgtgaaaacaagcataatttgctatatgttttccttttcaacttttcagtgttgacta

SEQ ID NO: 513274 - DNA, 120 bp, Artificial Sequence
  ENSG00000164603_14 (sequence is synthesized)
taaaccattgaatggaaaactttaagatgtagaaagctgtagattgcactttgatgactcacaagttaaatgtgatacagaaaaatagatcggttagttgttttgtgatgcacttatctt

SEQ ID NO: 513275 - DNA, 120 bp, Artificial Sequence
  ENSG00000164603_15 (sequence is synthesized)
tttcttttttctaactaaaattgtgatgttacagaaagtcattttatgttccttttttgtctgatgatccaatatttactgaactttttgtaattggtgataattctttttatttcttcc

SEQ ID NO: 513276 - DNA, 120 bp, Artificial Sequence
  ENSG00000164603_16 (sequence is synthesized)
ccaaagtagtattttcataactttcttgttgatttgggccttggtgtgaagtatatttacctgagagttcacttttacttttcttaaacttaggcttcatttacaaaatgttttatttaa

SEQ ID NO: 513277 - DNA, 120 bp, Artificial Sequence
  ENSG00000164603_17 (sequence is synthesized)
gcaaggaacaatgtaatactcaataatgacctaaaacacctttttgaaagggtttgcacttggaagagagtttatgttctgttgaaaccaactttgatagggtcctcacctttccgttaa

SEQ ID NO: 513278 - DNA, 120 bp, Artificial Sequence
  ENSG00000164603_18 (sequence is synthesized)
ggaggtgccgcactacaagtttcaaattatatggaaaaacctaaaattaaccctctgttggtgatctcataaaatggttttgaccttttggtatcttaatttctatctaaactttatcag

SEQ ID NO: 513279 - DNA, 120 bp, Artificial Sequence
  ENSG00000164603_19 (sequence is synthesized)
aaaattttctttgaatatatcaattagttggctgtgggaattttccctttccacattaataaatgcctttctgtgtttctgaatcagaagcaaatgattagggaaaaatatatgtccaaa

SEQ ID NO: 513280 - DNA, 120 bp, Artificial Sequence
  ENSG00000164603_20 (sequence is synthesized)
caagacaagattagtttaaacagttaagaacatttagtccacattgtcttgtcagccagcaattgtcatggaagctatcatttttaagagtgccactgtgtggatttttttttcaagtgg

SEQ ID NO: 513281 - DNA, 120 bp, Artificial Sequence
  ENSG00000164603_21 (sequence is synthesized)
ttattacattaaaattacctcatactgaggtttttgcactgaaatatcacagtttcagatttcatggttaatgttgtgcgtatgtttgtatgtttttaaaggaaacttgcattttcaata

SEQ ID NO: 513282 - DNA, 120 bp, Artificial Sequence
  ENSG00000164603_22 (sequence is synthesized)
gttgatcctaaatttcataaactgcacttctttactctggtaaagctgatgtttttgtgcttattgtgaattgccgtagtacctttgaatgtcaaactttatttagaaatataaaactta

SEQ ID NO: 513283 - DNA, 120 bp, Artificial Sequence
  ENSG00000164603_23 (sequence is synthesized)
tcctttatgatataaatggttgagtgtatgtacccagtatttctaattaaatttcacatgctaaattaatgaaagtaacaagattgtaattttttaaagtcagttgattaaatgcaataa

SEQ ID NO: 513284 - DNA, 120 bp, Artificial Sequence
  ENSG00000164603_24 (sequence is synthesized)
atattggttgctcaaatatgccacaaataactcgaaatttttcatttactttcaacagcataagattctttaatatttaggattgactgttctttccagttaagcactgaaggattatgt

SEQ ID NO: 513285 - DNA, 120 bp, Artificial Sequence
  ENSG00000164603_25 (sequence is synthesized)
cttgtagcttccccaagagaaggggaaggaaaaaaaagcactatgttaaggataatacagaactcttttgaactattttggtagtaccttttaccatactgtttgctttttgatttgggt

SEQ ID NO: 513286 - DNA, 120 bp, Artificial Sequence
  ENSG00000164603_26 (sequence is synthesized)
aaatatcttaagagcaaagaaaacaatacaccaaatgaaaatgctttgaaagtaaatgaaaacagcgcttttgaaaggctggtatagtatgaccctggagtcagcctttgtgttacagcg

SEQ ID NO: 513287 - DNA, 120 bp, Artificial Sequence
  ENSG00000164603_27 (sequence is synthesized)
aaaatgttggtgctataaattctgattgtttacagatgttgattctgcttatgctccaaagtgtgcatgatgtattttacgtagtactctgaggaagtctctttataaaacctactacca

SEQ ID NO: 513288 - DNA, 120 bp, Artificial Sequence
  ENSG00000164603_28 (sequence is synthesized)
cttagtataaatttgtttgaatttatatcatttgttactgtaaattcagcttattccaattaggttggcacagatttaaactgatacacattccacaaaaaccaattcagtgtataagta

SEQ ID NO: 513289 - DNA, 120 bp, Artificial Sequence
  ENSG00000164603_29 (sequence is synthesized)
ttgaagtataagcagtcattgcagcttgatgccagatcatgtatgtaataacaagtggaagttaatagggccttctaatactgtatgggtactcctaagaattatttcattttggatata

SEQ ID NO: 513290 - DNA, 120 bp, Artificial Sequence
  ENSG00000164603_30 (sequence is synthesized)
aagaagttatgaggcctcctgtcacattcacagctggttctccaaaataatttggttgtttcaaaaacaaatggtaatcatttggttggattcttcagtatcatgactagatcatgtggt

SEQ ID NO: 513291 - DNA, 120 bp, Artificial Sequence
  ENSG00000164603_31 (sequence is synthesized)
tttaccatagttgccaagtggtgggaggtagcatacctgaaaatgtacgtgtgtgtttgttgtattttttcacattttgtgaacaaagcacatttattaaaaattttaaattttctagta

SEQ ID NO: 513292 - DNA, 120 bp, Artificial Sequence
  ENSG00000164603_32 (sequence is synthesized)
cggcggctccgcaagaagtaccgagaagtgggctttaaacacagctgctttaaaattttgaccaagtccaagaccttaagaaactttgaacagattcttttctcaatgggagattttgat

SEQ ID NO: 513293 - DNA, 120 bp, Artificial Sequence
  ENSG00000164603_33 (sequence is synthesized)
ggcacacacaaacacatacacgctcacagaggaggtgggggtcgctttttgcaagagacgccgaggtaaaacaagacagtgggagattttgataagatctggcgagaacactgtgaggat

SEQ ID NO: 513294 - DNA, 120 bp, Artificial Sequence
  ENSG00000164604_0 (sequence is synthesized)
tattttactgctgtctcaagatcagattattactgtagagaagatttttattttttgtttcattaacagattattataaagcaaaaagcatgcagaaaaagaagcagacgttttacattg

SEQ ID NO: 513295 - DNA, 120 bp, Artificial Sequence
  ENSG00000164604_1 (sequence is synthesized)
ggaattaatgaaagcgtgtctgctagttttgggtaggagaactgggaagttgttgcttaaaattttatatcacctccacaaacaaaactcttcggaaatggtaaaataagaaaatgcatg

SEQ ID NO: 513296 - DNA, 120 bp, Artificial Sequence
  ENSG00000164604_2 (sequence is synthesized)
attctagaggcattcctaagcacccacgtgtcaggctttgtggtgtctgtggtatcatccgaccgtttggactggttagggcttactgagagctccatttctggaaagccttacaagact

SEQ ID NO: 513297 - DNA, 120 bp, Artificial Sequence
  ENSG00000164604_3 (sequence is synthesized)
gaggaatatcagactgcgaatcaccgggaacggttcctttgcagcacagaagcaatctctctccccatcttcgcatattctgatggcaaaacaagtggaagaaaagaggaagcatgactg

SEQ ID NO: 513298 - DNA, 120 bp, Artificial Sequence
  ENSG00000164604_4 (sequence is synthesized)
cagatcagatcagttctctttgtggattatattttcagtaaaatgtatggatctatcttttccttgttcttatatctagatcatgagacttgactgaggctgtatccttatcctccatcc

SEQ ID NO: 513299 - DNA, 120 bp, Artificial Sequence
  ENSG00000164604_5 (sequence is synthesized)
atctatggcgaactatagccatgcagctgacaacattttgcaaaatctctcgcctctaacagcctttctgaaactgacttccttgggtttcataataggagtcagcgtggtgggcaacct

SEQ ID NO: 513300 - DNA, 120 bp, Artificial Sequence
  ENSG00000164604_6 (sequence is synthesized)
cctgatctccattttgctagtgaaagataagaccttgcatagagcaccttactacttcctgttggatctttgctgttcagatatcctcagatctgcaatttgtttcccatttgtgttcaa

SEQ ID NO: 513301 - DNA, 120 bp, Artificial Sequence
  ENSG00000164604_7 (sequence is synthesized)
ctctgtcaaaaatggttctacctggacttatgggactctgacttgcaaagtgattgcctttctgggggttttgtcctgtttccacactgctttcatgctcttctgcatcagtgtcaccag

SEQ ID NO: 513302 - DNA, 120 bp, Artificial Sequence
  ENSG00000164604_8 (sequence is synthesized)
atatttagctatcgcccatcaccgcttctatacaaagaggctgaccttttggacgtgtctggctgtgatctgtatggtgtggactctgtctgtggccatggcatttcccccggttttaga

SEQ ID NO: 513303 - DNA, 120 bp, Artificial Sequence
  ENSG00000164604_9 (sequence is synthesized)
cgtgggcacttactcattcattagggaggaagatcaatgcaccttccaacaccgctccttcagggctaatgattccttaggatttatgctgcttcttgctctcatcctcctagccacaca

SEQ ID NO: 513304 - DNA, 120 bp, Artificial Sequence
  ENSG00000164604_10 (sequence is synthesized)
gcttgtctacctcaagctgatatttttcgtccacgatcgaagaaaaatgaagccagtccagtttgtagcagcagtcagccagaactggacttttcatggtcctggagccagtggccaggc

SEQ ID NO: 513305 - DNA, 120 bp, Artificial Sequence
  ENSG00000164604_11 (sequence is synthesized)
agctgccaattggctagcaggatttggaaggggtcccacaccacccaccttgctgggcatcaggcaaaatgcaaacaccacaggcagaagaaggctattggtcttagacgagttcaaaat

SEQ ID NO: 513306 - DNA, 120 bp, Artificial Sequence
  ENSG00000164604_12 (sequence is synthesized)
ggagaaaagaatcagcagaatgttctatataatgacttttctgtttctaaccttgtggggcccctacctggtggcctgttattggagagtttttgcaagagggcctgtagtaccaggggg

SEQ ID NO: 513307 - DNA, 120 bp, Artificial Sequence
  ENSG00000164604_13 (sequence is synthesized)
atttctaacagctgctgtctggatgagttttgcccaagcaggaatcaatccttttgtctgcattttctcaaacagggagctgaggcgctgtttcagcacaacccttctttactgcagaaa

SEQ ID NO: 513308 - DNA, 120 bp, Artificial Sequence
  ENSG00000164604_14 (sequence is synthesized)
atccaggttaccaagggaaccttactgtgttatatgagggagcatctgtaaatctttagccttgtgaaaactaaccttctctgctgagcaattgtggcccatagccatattttgagaaga

SEQ ID NO: 513309 - DNA, 120 bp, Artificial Sequence
  ENSG00000164604_15 (sequence is synthesized)
aattcaagaatggaatcagcagttttaaggatttgggcaacattctgcagtctttgcaatagttcacctataatcctattttaaatctcagagtgatcctgctgactgccagcaaaggtt

SEQ ID NO: 513310 - DNA, 120 bp, Artificial Sequence
  ENSG00000164604_16 (sequence is synthesized)
tgtaattaagaagggactgaaccactgccctaagtttctttatgtggtcaaaaactagataatgaaagtagcaggtgctaagtatcagtgctaaatgctctgtatgtcactacatatgaa

SEQ ID NO: 513311 - DNA, 120 bp, Artificial Sequence
  ENSG00000164604_17 (sequence is synthesized)
aaaacatcaaaaaacaattagcattggacatcttaataaattaagttgacatgaggtaaatgtgttgataaaaactaattttagaagtttgaagactttaaaacatttcatactactatt

SEQ ID NO: 513312 - DNA, 120 bp, Artificial Sequence
  ENSG00000164604_18 (sequence is synthesized)
gttttgcaaagactaaaatatttggggacttaaagtactgtaatccactaaagacgtgccaatgaattattggaatatcacactttaaaaaccgccttgtaagttctggggagcattcca

SEQ ID NO: 513313 - DNA, 120 bp, Artificial Sequence
  ENSG00000164604_19 (sequence is synthesized)
aagcagtatattggttccaattagagtttactttttttgtattaatacattgctatttctaaataccactttcctcatctactagtaagattgctagcattgaactgtattatgtggttt

SEQ ID NO: 513314 - DNA, 120 bp, Artificial Sequence
  ENSG00000164604_20 (sequence is synthesized)
ttgttgatttggtataaagtttttccaattcatttatattttacaaatgctagatattggtctgggaggcaacattaatggtaccagcctgtcacaactgagcagttctaataatgcaga

SEQ ID NO: 513315 - DNA, 120 bp, Artificial Sequence
  ENSG00000164604_21 (sequence is synthesized)
catcttatttagcactggagcaaatagccaagggaaatcaaatcagtaactggtcatggtcatgcatctaaaagtgcatggaagatcatttattactttttccttttttctcacatggtt

SEQ ID NO: 513316 - DNA, 120 bp, Artificial Sequence
  ENSG00000164604_22 (sequence is synthesized)
tgaaacttaaagtgcacatcactgaaataatgagattttcttctacggtgtgctaccctttctaaactgttctaagaagcaggcagttgatgtatgtttatattttaagtcagctgtcaa

SEQ ID NO: 513317 - DNA, 120 bp, Artificial Sequence
  ENSG00000164604_23 (sequence is synthesized)
ggggagaccacagccttagtatgacatcctgcacaatttgtgaagcatttattctactgaaggcacagtcttgtttatactttctgcacattcagtgtattggtaatttaaattatttca

SEQ ID NO: 513318 - DNA, 120 bp, Artificial Sequence
  ENSG00000164604_24 (sequence is synthesized)
gttttaacttgtgaaagcttatattatgatttctggtattttagaaatacattagagtctgtgagtctcattctttaagatacagatgtgtgaacttcaatataaagttgcatttgccaa

SEQ ID NO: 513319 - DNA, 120 bp, Artificial Sequence
  ENSG00000164604_25 (sequence is synthesized)
aatttacccgtgtagcctgttaattttcttgaaataagttttacatttttggcacataacaactttttttttaatttgggaggcaagcacaaactaggaagactagctttattatggttt

SEQ ID NO: 513320 - DNA, 120 bp, Artificial Sequence
  ENSG00000164604_26 (sequence is synthesized)
tgctttttgattcttgtagctactacattccagactggaaatgtatgaatgataatcaacataatgctgataaactgacataatattatctgtaaaagcattatttggtagtttattata

SEQ ID NO: 513321 - DNA, 120 bp, Artificial Sequence
  ENSG00000164604_27 (sequence is synthesized)
atcatccctctattattcttaaatgccagtagtatttagagatgtgtacctgcttagttaattggctcagaattttaatataaacatcacactttaatttggagcatagtaccatagaaa

SEQ ID NO: 513322 - DNA, 120 bp, Artificial Sequence
  ENSG00000164604_28 (sequence is synthesized)
tttggggttctaaatatacaacttgtaagaagaatggtttacactaacattatgacaaaactagaaaaagttattatttttgtttgctttctgttgttttgtttattggttggtttttgt

SEQ ID NO: 513323 - DNA, 120 bp, Artificial Sequence
  ENSG00000164604_29 (sequence is synthesized)
gtttttgtgaagtttatttttttttggtatttgataattaagattaggaatctaataacacagaattccatattgctatagtacttctgtaaagagaatatcaatataaataaggaaaat

SEQ ID NO: 513324 - DNA, 120 bp, Artificial Sequence
  ENSG00000164604_30 (sequence is synthesized)
gaaatgtttcaatgatatatgcaactattcagttttgctcttataaggacagctcaagccatgaattagtgagcattctgacctcatttttactttacaccaaagttgattagatctgag

SEQ ID NO: 513325 - DNA, 120 bp, Artificial Sequence
  ENSG00000164604_31 (sequence is synthesized)
acaaaatttaatgcacaacagtgagttggatctagcaataaagtctccttggtactgaaatcattatctaaaataaaggaaatgttatcaaaagatgttctgataacattgtgattgtaa

SEQ ID NO: 513326 - DNA, 120 bp, Artificial Sequence
  ENSG00000164604_32 (sequence is synthesized)
ctcaaaaaaatttatagtagaaacgtaattgcaatgatgataataactaactctgcttagaggttcaaatatcaccagcaatcagtaaaaaattcagcaataatcttaaggccagagaga

SEQ ID NO: 513327 - DNA, 120 bp, Artificial Sequence
  ENSG00000164604_33 (sequence is synthesized)
acaggttcaccattgcatagacaagaaaacagatatgggttaagagttggggactgaggagtcaagagcaacggccacgtgaagctgcctgactccacctagctatttggaataaccgat

SEQ ID NO: 513328 - DNA, 120 bp, Artificial Sequence
  ENSG00000164604_34 (sequence is synthesized)
tcccacagttttggtaagaaaccagccccagtaatcagtaagtcaggctgaactgcagtgacttttatttaagcctactcctgactaacttggcatttgcaggtcaagcaggaagcagtt

SEQ ID NO: 513329 - DNA, 120 bp, Artificial Sequence
  ENSG00000164604_35 (sequence is synthesized)
gacaagacacatcctcagtgaatcaatgccatttgtaactcaactggtaacagtagtaatcatacaaaataaaaacctgcttcagtgtcttaatgaccaaatcacattatctattttagc

SEQ ID NO: 513330 - DNA, 120 bp, Artificial Sequence
  ENSG00000164604_36 (sequence is synthesized)
actcattccaaaattcagtatttaatgtaattaatctttaatccataaaaatacatccccactgtagcggggcagggggtgtccaacttccctgtgagactgattatcaataataatgtg

SEQ ID NO: 513331 - DNA, 120 bp, Artificial Sequence
  ENSG00000164604_37 (sequence is synthesized)
tctccctcttggactgagcacacatctgagctgaacggcctttaaattgtttttcataatagtggtgatatgtttgcgtggatacgtctgtactatttcatctggttcattttgcatgta

SEQ ID NO: 513332 - DNA, 120 bp, Artificial Sequence
  ENSG00000164604_38 (sequence is synthesized)
atagatttatctgtgagatgcctggctgaagctaggcattcagtctgtgactgtggaatcctatgcaggtattaaccaaggcagaaagaggtgagtaacttgcccatttctccacagaga

SEQ ID NO: 513333 - DNA, 120 bp, Artificial Sequence
  ENSG00000164604_39 (sequence is synthesized)
ccccatttaaataacacaaaattgaccacagtgattagatgaaaaaattatttgtagataggataatctattgactgaattatcttttgcagatatcagctggttggatttctcaccagg

SEQ ID NO: 513334 - DNA, 120 bp, Artificial Sequence
  ENSG00000164604_40 (sequence is synthesized)
attgtctatagaagttaactgatttatgattgttaacacataaatatggccacttatccatttgcctcaacttccatggatgctacctgaattgtttgttcatttatttactttttcaac

SEQ ID NO: 513335 - DNA, 120 bp, Artificial Sequence
  ENSG00000164604_41 (sequence is synthesized)
aaatatgtgctgggtgctgggcttggtgctgagtgcatagtggaaaacaaagcagaacagtctctcatttagatttcttaatctagtgggaaagaaacaataaatacatagtagcaatga

SEQ ID NO: 513336 - DNA, 120 bp, Artificial Sequence
  ENSG00000164604_42 (sequence is synthesized)
atatccaacaccaacaggtaggaggatatactcttggttaagtttgggggatgtgggggaatgcacagtgttgatgaaactgcaggttcaccgagaaagagccctccctcaggttgtgtg

SEQ ID NO: 513337 - DNA, 120 bp, Artificial Sequence
  ENSG00000164604_43 (sequence is synthesized)
tgtgtgtgtgtgtgtgtgtatgtgttttgtgacaataaactgcataatggaagtacattcagacaatgcatcttcagtagggcttactgagagctccatttctggaaagccttacaagac

SEQ ID NO: 513338 - DNA, 120 bp, Artificial Sequence
  ENSG00000164604_44 (sequence is synthesized)
tttgggatctcgtatatattatacatactccctcaactgagagggaaccccctcattctattcaaagcaccaggaacctttcacccacacttacacgaatcagcgtgttgtattttagaa

SEQ ID NO: 513339 - DNA, 120 bp, Artificial Sequence
  ENSG00000164604_45 (sequence is synthesized)
ccagctcccatgtagttaattctatctacataataacagcaaaatctattttcccttccaaagttcccttcatatcccaactatccacttccaaaacagagatatttcaattgctttaag

SEQ ID NO: 513340 - DNA, 120 bp, Artificial Sequence
  ENSG00000164604_46 (sequence is synthesized)
agacatggaggtgtcttttctgacatactcacatgttcctgcaagataggatgaaaatgcgtgggtaaaatgcaatcaaaggaatgacttatttgtgtgcatcttacgatgacttgcggg

SEQ ID NO: 513341 - DNA, 120 bp, Artificial Sequence
  ENSG00000164604_47 (sequence is synthesized)
ggccctcccaagtaacttgtgaaacagggtgcatatcttttattattaaagcatgccaccccgtcaatgttttttttttgctccttaattggaatacaataaaactccctaatcgcctat

SEQ ID NO: 513342 - DNA, 120 bp, Artificial Sequence
  ENSG00000164604_48 (sequence is synthesized)
cagctgaaaacttggtttggcctccaaaatttacttctattgtaagtacaatgaaactgatttataaccatacagattacatttttcagctaaactgtgtcataatgagttgggttgcac

SEQ ID NO: 513343 - DNA, 120 bp, Artificial Sequence
  ENSG00000164604_49 (sequence is synthesized)
ctgggattactgtaggacagttgcaaacagagccaaaactcttcacttctgtgtattcactattggataaatttactgggtttcattatttcatgccatatgtagcatagactgtattat

SEQ ID NO: 513344 - DNA, 120 bp, Artificial Sequence
  ENSG00000164604_50 (sequence is synthesized)
tattattaaaacaaaagcagtttgcattaatttcatattaaaaagaaaagaaagaagctaagatgataaatggtgatgtttcaaatactggctaaagacattaatcaaggtagatggtaa

SEQ ID NO: 513345 - DNA, 120 bp, Artificial Sequence
  ENSG00000164604_51 (sequence is synthesized)
ccagaattgtgggttatttatggttctaaaaccttgtgagtttatttttctatgcaaaaatatatcattttcatgtttgttaatattctcttataaatgttttaaatggaaattgcagga

SEQ ID NO: 513346 - DNA, 120 bp, Artificial Sequence
  ENSG00000164604_52 (sequence is synthesized)
tatactaagaactgtttactgctgaaattttttgttgttattgtcaactgtgggcatgtcagcatctgtgagttttctaattccctcagaaactttttttacaccacattaaaatggtag

SEQ ID NO: 513347 - DNA, 120 bp, Artificial Sequence
  ENSG00000164604_53 (sequence is synthesized)
aattgctcagttttgatgcaaaaattcataattagtctgtatagtggttaaaatgaaaataacatttgcaaatgactggaatttcttttttggccatcagtcaaaacagtcaaataagtt

SEQ ID NO: 513348 - DNA, 120 bp, Artificial Sequence
  ENSG00000164604_54 (sequence is synthesized)
aaaggcatatttgaattggagcaacgtagagagaagtttttgttgttgttgttgttgttttgataactgtttttgccttatgctgcaatgtaacaggctctaaataatatattaaaacca

SEQ ID NO: 513349 - DNA, 120 bp, Artificial Sequence
  ENSG00000164604_55 (sequence is synthesized)
aaaaagctttaactgtatgaaaagattatataaacaagtcctggtttttaaaatggggcaggagttttacatcatccctttttgccaaagggatgatgtccattagctgctcaatccctt

SEQ ID NO: 513350 - DNA, 120 bp, Artificial Sequence
  ENSG00000164604_56 (sequence is synthesized)
tgggttaaaaggcttttaaagccagttttcctctcaccataacaggcagttattacaaggactggctccctgaaaggtccccagaggaaatcaaggagactgtgtttccctctgagtaat

SEQ ID NO: 513351 - DNA, 120 bp, Artificial Sequence
  ENSG00000164604_57 (sequence is synthesized)
tgaaaaaaaaaaaaaaaaaaaggcctcaaagccacaggtggtttggggttttgaattattcacacctgacattcatagctgcctccttggctccttctggggacgtaggacaacatcgtg

SEQ ID NO: 513352 - DNA, 120 bp, Artificial Sequence
  ENSG00000164604_58 (sequence is synthesized)
ctcagaaagacctaggttccaagttcagcttggaggcagaaagcaattcctttttcttctctctgtgtttggaaaataatagattattgacacaaatattaaaactgatactgtaatgca

SEQ ID NO: 513353 - DNA, 120 bp, Artificial Sequence
  ENSG00000164604_59 (sequence is synthesized)
aagaaaaagaaaaaaagaaaaaaatcagcaatttatagaaagaagctatagtctgtcgggatatccaacaccaacagggcttactgagagctccatttctggaaagccttacaagactga

SEQ ID NO: 513354 - DNA, 120 bp, Artificial Sequence
  ENSG00000164609_0 (sequence is synthesized)
attacgagattggcttggattctgtcggatggacttggggctagctgcggcggggctggaggaggccagataaccatgtcagccacagttgtagatgcagttaatgctgcacccctatcg

SEQ ID NO: 513355 - DNA, 120 bp, Artificial Sequence
  ENSG00000164609_1 (sequence is synthesized)
gggtccaaagaaatgagtttggaagaaccaaagaagatgaccagagaggactggagaaagaagaaggagctagaagaacagcgaaaattgggcaatgctcctgcagaagttgatgaagaa

SEQ ID NO: 513356 - DNA, 120 bp, Artificial Sequence
  ENSG00000164609_2 (sequence is synthesized)
ggaaaagacatcaacccccatattcctcagtatatttcttcagtgccatggtatattgatccttcaaaaagacctactttaaaacaccagagaccacaaccagaaaaacaaaagcagttc

SEQ ID NO: 513357 - DNA, 120 bp, Artificial Sequence
  ENSG00000164609_3 (sequence is synthesized)
agctcatctggagaatggtacaagaggggtgtaaaagagaattccataattactaagtaccgcaaaggagcatgtgaaaattgtggggccatgacacacaaaaagaaagactgctttgag

SEQ ID NO: 513358 - DNA, 120 bp, Artificial Sequence
  ENSG00000164609_4 (sequence is synthesized)
agacctaggcgagttggagccaaatttacaggtactaatatagctccagatgaacatgtccagcctcaactgatgtttgactatgatgggaagagggatcggtggaatggctacaatcca

SEQ ID NO: 513359 - DNA, 120 bp, Artificial Sequence
  ENSG00000164609_5 (sequence is synthesized)
gaagaacacatgaaaattgttgaagagtatgccaaagttgatttggcaaaacgaacattgaaagcccagaaactccaagaggaattagcctcaggaaaattagtggaacaggctaattct

SEQ ID NO: 513360 - DNA, 120 bp, Artificial Sequence
  ENSG00000164609_6 (sequence is synthesized)
ccaaaacaccagtggggagaagaggaaccaaattctcagatggaaaaagatcataatagtgaagatgaggatgaagataaatatgcagatgatattgacatgcctggacagaattttgac

SEQ ID NO: 513361 - DNA, 120 bp, Artificial Sequence
  ENSG00000164609_7 (sequence is synthesized)
tccaagagacgaattactgtccggaatctcaggattcgagaagatattgcaaaatatttgaggaatttagatccaaattctgcctactatgatccaaaaactagagcaatgagagagaat

SEQ ID NO: 513362 - DNA, 120 bp, Artificial Sequence
  ENSG00000164609_8 (sequence is synthesized)
ccttatgccaatgcaggaaagaatccagatgaagtgagttatgctggagataactttgttaggtacacaggagataccatttcaatggctcagacacagttgtttgcatgggaagcctat

SEQ ID NO: 513363 - DNA, 120 bp, Artificial Sequence
  ENSG00000164609_9 (sequence is synthesized)
gacaagggatctgaagtgcatctacaggcagatcctacaaagctagagctgttgtataagtccttcaaagtcaaaaaagaagatttcaaagaacagcagaaagaaagcatcctggaaaag

SEQ ID NO: 513364 - DNA, 120 bp, Artificial Sequence
  ENSG00000164609_10 (sequence is synthesized)
tatggtggccaagaacatttggatgcccctccagctgaattgcttttagcccagactgaagactatgtggagtactcaagacatgggacagtcatcaaaggacaggagcgggctgttgcc

SEQ ID NO: 513365 - DNA, 120 bp, Artificial Sequence
  ENSG00000164609_11 (sequence is synthesized)
tgctctaagtatgaggaggatgtgaagatccacaatcacacacatatctggggatcgtactggaaagaaggccgatggggatacaaatgctgtcactcttttttcaagtattcctattgt

SEQ ID NO: 513366 - DNA, 120 bp, Artificial Sequence
  ENSG00000164609_12 (sequence is synthesized)
actggagaagctgggaaggagattgttaactctgaggagtgtattataaatgagataactggggaagaatctgtgaaaaaacctcaaaccctcatggagctgcatcaagaaaaactgaaa

SEQ ID NO: 513367 - DNA, 120 bp, Artificial Sequence
  ENSG00000164609_13 (sequence is synthesized)
gaggaaaagaagaagaagaaaaagaaaaagaagaagcatcgaaagagcagttcagatagtgatgatgaagaaaagaagcatgaaaaattgaaaaaggcactgaacgcagaggaggcccgc

SEQ ID NO: 513368 - DNA, 120 bp, Artificial Sequence
  ENSG00000164609_14 (sequence is synthesized)
cttcttcatgtcaaggagaccatgcagattgatgagaggaagcggccttacaatagcatgtatgaaactcgagaacctactgaagaggaaatggaggcatatagaatgaaacgtcagagg

SEQ ID NO: 513369 - DNA, 120 bp, Artificial Sequence
  ENSG00000164609_15 (sequence is synthesized)
ccagatgaccccatggcctctttccttggacagtagcaactagtcagaagaccatccaagatagatgcagctgatacattcttttcagcttcttattgatgattgtagatagaaaaatcc

SEQ ID NO: 513370 - DNA, 120 bp, Artificial Sequence
  ENSG00000164609_16 (sequence is synthesized)
ttgtttattcttcttgctgcctggctttaataaatatttcagatgcctcacagtaagttcactcctttccatactgaggaaacaagaaaagaagaagaggcacatgaagtgtgcttttgg

SEQ ID NO: 513371 - DNA, 88 bp, Artificial Sequence
  ENSG00000164609_17 (sequence is synthesized)
aacaagaaaagaagaagaggcacatgaagtgtgcttttgggaatagaatttaaaattggattaagattttatttccgacggagtcttg

SEQ ID NO: 513372 - DNA, 120 bp, Artificial Sequence
  ENSG00000164609_18 (sequence is synthesized)
gtgagtcatgtaaaaaagccttggctctctacctattaagaatgtctctttctctgtatttattaagcttcaaactttattgcttcgatttttgtggccctatatttagtattagcacac

SEQ ID NO: 513373 - DNA, 120 bp, Artificial Sequence
  ENSG00000164609_19 (sequence is synthesized)
gtattagcacaccttggttttgagaaaaaaacagggctttgtttttttaaataattactagcaactctgtgactacatttatttttattttttttagagacaggatcttgctatgttgcc

SEQ ID NO: 513374 - DNA, 120 bp, Artificial Sequence
  ENSG00000164609_20 (sequence is synthesized)
cagtggcttttcacagacaaagtcataatgccctgcagtcttgggctcaagcgattctctcttccttggcctctggagtagactaaatgtgttagtctttgaatggaaaacaactatttt

SEQ ID NO: 513375 - DNA, 120 bp, Artificial Sequence
  ENSG00000164609_21 (sequence is synthesized)
ctcatcattgggtcaatattgactgatcagtagtaggtcttttaccattctggacataagtctaggtgtagaaatcctttcctttatcatagaggatatggtttacattaccgtttgttt

SEQ ID NO: 513376 - DNA, 120 bp, Artificial Sequence
  ENSG00000164609_22 (sequence is synthesized)
tcattgtgattgcccctatgtaacaatcatgaatattagattttttaaattgtagaatatcctaatatttatagccagcagctgttactttgtttgtaaaatttgcaaaaaaacaaaacc

SEQ ID NO: 513377 - DNA, 120 bp, Artificial Sequence
  ENSG00000164609_23 (sequence is synthesized)
tgaagttggtttattgaaagaattataaggatagcttctagggatattagtaatagattgccatgatcctgaagcctcttctcagaacactgtgaagataatactgacagtagaatcagt

SEQ ID NO: 513378 - DNA, 120 bp, Artificial Sequence
  ENSG00000164609_24 (sequence is synthesized)
gaaaacagcctaacaaaacctctgacatcagtatatcaacttttaacagcccactcactggcttttctaaactaccaaaaaccacctgtaggatactgcattaagtcagcatctcagaaa

SEQ ID NO: 513379 - DNA, 120 bp, Artificial Sequence
  ENSG00000164609_25 (sequence is synthesized)
cagtggtgtgagtaactgagtcaaattgtcaagtactttggatatacatagtgtcgagctttagattggtatgaaattaaacagcaatgcaaatagatttaattcctatttactttaaga

SEQ ID NO: 513380 - DNA, 120 bp, Artificial Sequence
  ENSG00000164609_26 (sequence is synthesized)
atgaaaaacaatgttcattttcctacctaaacagggtggttcaacataaaggctgatgttgtgtccgttttgtattttatcttttgttaaagatacataaatgacaatacttaactgtga

SEQ ID NO: 513381 - DNA, 120 bp, Artificial Sequence
  ENSG00000164609_27 (sequence is synthesized)
tttcttgcaaactttgtggcacgttttctgggaagaaaaaactaggatcgtgtaatattaaaaaataaatcgagaggctttttttttttgctctccatattattaagctgcatggactga

SEQ ID NO: 513382 - DNA, 120 bp, Artificial Sequence
  ENSG00000164609_28 (sequence is synthesized)
gagttatgctggagataactttgttaggtacacaggagataccatttcaatggctcagacacagtgtaagtgtttcctctatgtcaagccattttatatcagctcataagacgtttggga

SEQ ID NO: 513383 - DNA, 120 bp, Artificial Sequence
  ENSG00000164609_29 (sequence is synthesized)
agatccacaatcacacagtatgtgctaaactggaacaattttgtgtccttgttggttttgctctgtattgcatttttccactacaactttattagctaaccatttgtattctctatgctt

SEQ ID NO: 513384 - DNA, 120 bp, Artificial Sequence
  ENSG00000164609_30 (sequence is synthesized)
attacgagattggcttggattctgtcggatggacttggggctagctgcggcggggctggaaaaatttacttgagcttcagtttttcctgttaagtcgagatgatccgacttcagtggggt

SEQ ID NO: 513385 - DNA, 120 bp, Artificial Sequence
  ENSG00000164609_31 (sequence is synthesized)
gctcatctggagaatggtacaagaggggtgtaaaagaggtatgtaggcaacctgtatacatcttcatggatatggagagtttaagaacttaatgtaagaatttttaatgcaatactattt

SEQ ID NO: 513386 - DNA, 120 bp, Artificial Sequence
  ENSG00000164609_32 (sequence is synthesized)
aaagtagaaacagataataaaaccctttatctggtattgaaattcacagtgcattactattttatctttgtgtttcttatataaattttacactcctgaactctttaaagtttcacattt

SEQ ID NO: 513387 - DNA, 120 bp, Artificial Sequence
  ENSG00000164609_33 (sequence is synthesized)
attacgagattggcttggattctgtcggatggacttggggctagctgcggcggggctgggtaagaaaatattgttagaacttgcgggcgacggggagttggggaacctgagaaaatgagt

SEQ ID NO: 513388 - DNA, 120 bp, Artificial Sequence
  ENSG00000164609_34 (sequence is synthesized)
cgaaggctcctaattattggatatatcttcacgggggtgatgagccctcaggtgttgagggagcgaggacgggggaccgaaaagccactgtcctgagacccattcatggcactcgtgccc

SEQ ID NO: 513389 - DNA, 120 bp, Artificial Sequence
  ENSG00000164609_35 (sequence is synthesized)
tgccaggccaggcctgcgtcttcagggaaacagtcgggataactatgagagtgtcgcctttgtggcggtgcctcgaagaccttgagcaatccccggactgcgagcagggaaagctgcttc

SEQ ID NO: 513390 - DNA, 120 bp, Artificial Sequence
  ENSG00000164609_36 (sequence is synthesized)
attacgagattggcttggattctgtcggatggacttggggctagctgcggcggggctggatggtgctgtattgaatttttggacggtactgcattggaggattttaagcttgggcagtag

SEQ ID NO: 513391 - DNA, 120 bp, Artificial Sequence
  ENSG00000164609_37 (sequence is synthesized)
gacattgtattaatctgttttcacattgccaatgaagacatagcccagacctgccaatttactaaagaaaggaggccagataaccatgtcagccacagttgtagatgcagttaatgctgc

SEQ ID NO: 513392 - DNA, 120 bp, Artificial Sequence
  ENSG00000164610_0 (sequence is synthesized)
gggctgacatgtcgtcccggcctgggcgcgaggacgtgggggctgcgggcgcgcggcggccgcgtgagccgccggagcaggagctgcagcgacgtcgggagcagaagcggcggcgacacg

SEQ ID NO: 513393 - DNA, 120 bp, Artificial Sequence
  ENSG00000164610_1 (sequence is synthesized)
gggagcagaagcggcggcgacacgacgcgcagcagctgcagcagctcaagcacctggagtccttttacgaaaaacctcctcctgggcttatcaaggaagatgagactaagccagaagatt

SEQ ID NO: 513394 - DNA, 120 bp, Artificial Sequence
  ENSG00000164610_2 (sequence is synthesized)
gcataccagatgtaccaggcaatgaacacgccagggaatttctggctcatgcaccaactaaaggactttggatgccactggggaaagaagtcaaagttatgcagtgttggcgttgcaaac

SEQ ID NO: 513395 - DNA, 120 bp, Artificial Sequence
  ENSG00000164610_3 (sequence is synthesized)
gctatggtcaccgaacgggtgacaaagaatgccctttctttatcaaaggcaaccaaaagttagagcagttcagagtggcacatgaagatcccatgtatgacatcatacgagacaataaac

SEQ ID NO: 513396 - DNA, 120 bp, Artificial Sequence
  ENSG00000164610_4 (sequence is synthesized)
ctcagatgaagataggagcagctccagttcctctgaaggtaaagagaaacacaagaaaaagaagaagaaagaaaagcataagaaaaggaagaaagaaaagaaaaagaagaaaaaacggaa

SEQ ID NO: 513397 - DNA, 120 bp, Artificial Sequence
  ENSG00000164610_5 (sequence is synthesized)
gcacaaatcttccaagtcaaatgagggttctgactcagagtgacaaggatgtgacttgttcaacattctcttctcaaacactgaccaaggaacagaggaagatgcagtcagagaaagcag

SEQ ID NO: 513398 - DNA, 120 bp, Artificial Sequence
  ENSG00000164610_6 (sequence is synthesized)
caggatagagacgccgagagaggagtatatgtgggtcacagcagtgagctcccacccgccttgcagtgaagatgtgaccccaggagagggagtgtctccttccaggtgctagctctggac

SEQ ID NO: 513399 - DNA, 120 bp, Artificial Sequence
  ENSG00000164610_7 (sequence is synthesized)
agcagctgattttaggcaggaaagtttcttcatcgttgtcctccctgctggtcacatgagtttacgattcctttgaagtgtctcccacagggtggcaggactgggagaatctctgaggcg

SEQ ID NO: 513400 - DNA, 120 bp, Artificial Sequence
  ENSG00000164610_8 (sequence is synthesized)
tgtcttccaggccctcccacagcttgtgccctccacagtgtggactcaggtcccatagacatcaggctggagtcttctctgttgttgagaataataaaagctcattatttattttttaaa

SEQ ID NO: 513401 - DNA, 120 bp, Artificial Sequence
  ENSG00000164610_9 (sequence is synthesized)
aacacctcgccttcagaatttccttcccatcttgctgcctgtcccatctggagacttgcgtgctcagcattctgggtctcctctgggttcagtccctggatggaaataaggaaggcctgg

SEQ ID NO: 513402 - DNA, 120 bp, Artificial Sequence
  ENSG00000164610_10 (sequence is synthesized)
tttaacttgttctcatcacagccctcttacagccaaggcacgttctccatcttctagataaggaagcatccaccccaccccccaccaccgtgccatgtgaagaagaaagagggctgtcat

SEQ ID NO: 513403 - DNA, 120 bp, Artificial Sequence
  ENSG00000164610_11 (sequence is synthesized)
tcctcctgggcttatcaaggttagtgtgaagtttgtactcttggttattccacaagacatacttgtagactcagtaacttgttatgaaaaataattgcatgatgttaaatctccttttac

SEQ ID NO: 513404 - DNA, 120 bp, Artificial Sequence
  ENSG00000164610_12 (sequence is synthesized)
ttgtcacaagcctctgcctttgcagaaatttcatcagccatgtttcccttccctgaagaaccagtgcaggcccacgtggattccttggccatgcccctcttctctcttgctggggatggc

SEQ ID NO: 513405 - DNA, 120 bp, Artificial Sequence
  ENSG00000164610_13 (sequence is synthesized)
atctctaagctccttttccttgtcggcctcacccggctcagcccctcggtccatcctctgctggtttcttgagctcagcagctcagagagcagtaaactctgaggagatctgacagctat

SEQ ID NO: 513406 - DNA, 120 bp, Artificial Sequence
  ENSG00000164611_0 (sequence is synthesized)
accgcggcctcagatgaatgcggctgttaagacctgcaataatccagaatggctactctgatctatgttgataaggaaaatggagaaccaggcacccgtgtggttgctaaggatgggctg

SEQ ID NO: 513407 - DNA, 120 bp, Artificial Sequence
  ENSG00000164611_1 (sequence is synthesized)
aagctggggtctggaccttcaatcaaagccttagatgggagatctcaagtttcaacaccacgttttggcaaaacgttcgatgccccaccagccttacctaaagctactagaaaggctttg

SEQ ID NO: 513408 - DNA, 120 bp, Artificial Sequence
  ENSG00000164611_2 (sequence is synthesized)
ctgttcctgcctcagatgatgcctatccagaaatagaaaaattctttcccttcaatcctctagactttgagagttttgacctgcctgaagagcaccagattgcgcacctccccttgagtg

SEQ ID NO: 513409 - DNA, 120 bp, Artificial Sequence
  ENSG00000164611_3 (sequence is synthesized)
gagtgcctctcatgatccttgacgaggagagagagcttgaaaagctgtttcagctgggccccccttcacctgtgaagatgccctctccaccatgggaatccaatctgttgcagtctcctt

SEQ ID NO: 513410 - DNA, 120 bp, Artificial Sequence
  ENSG00000164611_4 (sequence is synthesized)
caagcattctgtcgaccctggatgttgaattgccacctgtttgctgtgacatagatatttaaatttcttagtgcttcagagtttgtgtgtatttgtattaataaagcattctttaacaga

SEQ ID NO: 513411 - DNA, 120 bp, Artificial Sequence
  ENSG00000164611_5 (sequence is synthesized)
cgcgggtggttagttgagccggctccggcggggaaggaggcgggctgcggctgcggctggggctgaagctggggctggggttgggggactgcccggggcttagatggctccgagcccgtt

SEQ ID NO: 513412 - DNA, 120 bp, Artificial Sequence
  ENSG00000164611_6 (sequence is synthesized)
tgagcgtggtctcggactgctaactggaccaacggcaactgtctgatgagtgccagccccaaaccgcgcgctgctcgggaccttagagcctctgactcaggctggaagatttgagagctg

SEQ ID NO: 513413 - DNA, 120 bp, Artificial Sequence
  ENSG00000164611_7 (sequence is synthesized)
gattaagtacttgttggctcacgcccgtgactgttccgctgtttagctcttgttttttgtgtggacactcctaggatagaaagtttggtatgttgctatacctttgcttctcccaccttc

SEQ ID NO: 513414 - DNA, 120 bp, Artificial Sequence
  ENSG00000164611_8 (sequence is synthesized)
ctggggtctggaccttgtaagtatacaaggctgcagtcggatacactggtattgtggacgtggcctggagctggacgagacatttagtgtactttttgggcaattggagtcgtttgttat

SEQ ID NO: 513415 - DNA, 120 bp, Artificial Sequence
  ENSG00000164611_9 (sequence is synthesized)
cactaccaaaagtggggggtgggtttgggggtgagaggtcaagtttatatacacagtatttaagttgtacaggtattttgctgctggaatattcttatggtaagactttttcttcagcaa

SEQ ID NO: 513416 - DNA, 120 bp, Artificial Sequence
  ENSG00000164611_10 (sequence is synthesized)
aaatagaaaaattctttcccttcaatcctctaggtagtatcttttgcaattgcgaaaagtgcttttggcctttagtttcttagtattcagctcagctgtaacttgttatgaatataatat

SEQ ID NO: 513417 - DNA, 120 bp, Artificial Sequence
  ENSG00000164611_11 (sequence is synthesized)
atgaccaaaaactatgatgagactgtctgaatctgggttgctttggacaagtgtacttgttgatggaattatttgcaaggtatcatcttaggtcaggaggggaataggaacaaagatgta

SEQ ID NO: 513418 - DNA, 120 bp, Artificial Sequence
  ENSG00000164611_12 (sequence is synthesized)
gaagacattgttcctgtctgtaaaagcttatcacctagaggaggtaagatgtattcatgaacattgaataagtcccattgtggacagtctttctcacaaggcttttagaagtgagcttta

SEQ ID NO: 513419 - DNA, 120 bp, Artificial Sequence
  ENSG00000164611_13 (sequence is synthesized)
tgtcaagttgagcaatgcctgagagtaatttggtaggattatttctttggtttgaaaaatctacataagacagtgaagacatgtttttcaaatttcttcaacctgctacatgtatctgaa

SEQ ID NO: 513420 - DNA, 120 bp, Artificial Sequence
  ENSG00000164611_14 (sequence is synthesized)
tgccaaaaaggtaagtgttggctataaagacactgtttaaacacttaagcacttttgactcttaaaatgactattggcatcatcctacgtagctttcttccctctgagtagaagggaaat

SEQ ID NO: 513421 - DNA, 120 bp, Artificial Sequence
  ENSG00000164615_0 (sequence is synthesized)
ctctagtcatcgccctcgcagcggcggccaacatcaccgccactgccacccctcccagactgtggacgggaggatggagtcgatggccgtcgctaccgacggcggggagaggccgggggt

SEQ ID NO: 513422 - DNA, 120 bp, Artificial Sequence
  ENSG00000164615_1 (sequence is synthesized)
cccagcgggctcaggtctgtcggcttcccagcgtcgggcggagctgcgtcggagaaagctgctcatgaactcggaacagcgcatcaaccggatcatgggctttcacaggcccgggagcgg

SEQ ID NO: 513423 - DNA, 120 bp, Artificial Sequence
  ENSG00000164615_2 (sequence is synthesized)
cgcggaagaagaaagtcaaacaaaatcaaagcagcaggacagtgataaactgaactccctcagcgttccttccgtttcaaagcgagtagtgctgggtgattcagtcagtacaggaacaac

SEQ ID NO: 513424 - DNA, 120 bp, Artificial Sequence
  ENSG00000164615_3 (sequence is synthesized)
tgaccagcagggtggtgtggccgaggtaaaggggacccaactgggagacaaattggactcgttcattaaaccacctgagtgcagtagtgatgtcaaccttgagctccggcagcggaacag

SEQ ID NO: 513425 - DNA, 120 bp, Artificial Sequence
  ENSG00000164615_4 (sequence is synthesized)
aggggacctgacagcggactcggtccagaggggttcccgccatggcctagagcagtacctttccagattcgaagaagcaatgaagctaaggaaacagctgattagtgaaaaacccagtca

SEQ ID NO: 513426 - DNA, 120 bp, Artificial Sequence
  ENSG00000164615_5 (sequence is synthesized)
agaggatggaaatacaacagaagaatttgactcttttcgaatatttagattggtgggatgtgctcttcttgctcttggagtcagagcttttgtttgcaaatacttgtccatatttgctcc

SEQ ID NO: 513427 - DNA, 120 bp, Artificial Sequence
  ENSG00000164615_6 (sequence is synthesized)
atttcttactttacaacttgcgtacatgggattatacaaatattttcccaagagtgaaaagaagataaagacaacagtactaacagctgcacttctattgtcgggaattcctgccgaagt

SEQ ID NO: 513428 - DNA, 120 bp, Artificial Sequence
  ENSG00000164615_7 (sequence is synthesized)
gataaatcgatcaatggatacctatagcaaaatgggcgaagtcttcacagatctctgtgtctactttttcacttttatcttttgtcatgaactgcttgattattggggctctgaagtacc

SEQ ID NO: 513429 - DNA, 120 bp, Artificial Sequence
  ENSG00000164615_8 (sequence is synthesized)
atgaagcctgtagaactgagaaggagaagcttacaaaaaaaaaaaaatcctcttctatattgcagtgtctctaaaggaggcaaattggtttacaccttcatgtaattcttttactttagg

SEQ ID NO: 513430 - DNA, 120 bp, Artificial Sequence
  ENSG00000164615_9 (sequence is synthesized)
tactttattagatatagaatggcagattctctgatttaaaagggctgagtttgtattattactgatatgaagaatagagtaccaatgtcattaattgatttttcttgttaatcagaattc

SEQ ID NO: 513431 - DNA, 120 bp, Artificial Sequence
  ENSG00000164615_10 (sequence is synthesized)
ctattctgtacctttcctctaacttctcagatttgtaattcttcttttgggagctgagctagtgcttttaggagaacagataaatgtggtctcagccagccctagagactgcttcttgtg

SEQ ID NO: 513432 - DNA, 120 bp, Artificial Sequence
  ENSG00000164615_11 (sequence is synthesized)
tttgtgtcattctgtcctgagaaatgaagtcatctgaaaaataaaatgaaagaaactgaattgtctaatgttaactctgcacattgtaacttttcttgttgagttagtatcttaattttt

SEQ ID NO: 513433 - DNA, 120 bp, Artificial Sequence
  ENSG00000164615_12 (sequence is synthesized)
actccagcacaagtatttaatcaaagaaaagattcatacatgtgaaattggaaggtatttataaaatttttattgctgtataccaaactcagaattggaactttttacatttgagtttca

SEQ ID NO: 513434 - DNA, 120 bp, Artificial Sequence
  ENSG00000164615_13 (sequence is synthesized)
ctttttagaagtatgttttaagcaagcaaaaacaaaatgggatgtgaagaattgaggcatgcaacccaatagcataaatgtcctttttccccccaaatatggtctagatgagttattata

SEQ ID NO: 513435 - DNA, 120 bp, Artificial Sequence
  ENSG00000164615_14 (sequence is synthesized)
aggcgtgagccactgcacctggccttataaatatccttttaactaactcagtaactgccatattttgttgggttgtcttcttaaaagaatataagactaaagtgttaatgtcacttggtg

SEQ ID NO: 513436 - DNA, 120 bp, Artificial Sequence
  ENSG00000164615_15 (sequence is synthesized)
ttaaaagaatataagactaaagtgttaatgtcacttggtgttacatttccttacagatttttgtatagtctaatttggttaatccttgtgacattaaaaacacatacactttttaaaaaa

SEQ ID NO: 513437 - DNA, 120 bp, Artificial Sequence
  ENSG00000164619_0 (sequence is synthesized)
ggacagtggagacgcgccttctcggctctggtccgcgccctggggccctggcctccctggaggggctggggaactggaagctgggccgagagagttcccgctgcagctatcgcgcagtcc

SEQ ID NO: 513438 - DNA, 120 bp, Artificial Sequence
  ENSG00000164619_1 (sequence is synthesized)
ctgcagctatcgcgcagtccctcctgcgcccgggcgcccccagcgggttccgggaggcgcccggtgagcccacgtctgttgcggcggagcgagcgcgctccgggagggccgagagccggc

SEQ ID NO: 513439 - DNA, 120 bp, Artificial Sequence
  ENSG00000164619_2 (sequence is synthesized)
ggcgcccgcctccctccttcgcggacggtctcccgacacgccggctgagagcccttttcgactgtgagctgcggcagctgagcagaggcggcggcgcgggacctgcagtcgccagggatt

SEQ ID NO: 513440 - DNA, 120 bp, Artificial Sequence
  ENSG00000164619_3 (sequence is synthesized)
ccctccaggtgacgatgctctggttctccggcgtcggggctctggctgagcgttactgccgccgctcgcctgggattacgtgctgcgtcttgctgctactcaattgctcgggggtcccca

SEQ ID NO: 513441 - DNA, 120 bp, Artificial Sequence
  ENSG00000164619_4 (sequence is synthesized)
tgtctctggcttcctccttcttgacaggttctgttgcaaaatgtgaaaatgaaggtgaagtcctccagattccatttatcacagacaacccttgcataatgtgtgtctgcttgaacaagg

SEQ ID NO: 513442 - DNA, 120 bp, Artificial Sequence
  ENSG00000164619_5 (sequence is synthesized)
aagtgacatgtaagagagagaagtgccccgtgctgtcccgagactgtgccctggccatcaagcagaggggagcctgttgtgaacagtgcaaaggttgcacctatgaaggaaatacctata

SEQ ID NO: 513443 - DNA, 120 bp, Artificial Sequence
  ENSG00000164619_6 (sequence is synthesized)
acagctccttcaaatggcagagcccggctgagccttgtgttctacgccagtgccaggagggcgttgtcacagagtctggggtgcgctgtgttgttcattgtaaaaaccctttggagcatc

SEQ ID NO: 513444 - DNA, 120 bp, Artificial Sequence
  ENSG00000164619_7 (sequence is synthesized)
tgggaatgtgctgccccacatgtccaggctgtgtgtttgagggtgtgcagtatcaagaaggggaggaatttcagccagaaggaagcaaatgtaccaagtgttcctgcactggaggcagga

SEQ ID NO: 513445 - DNA, 120 bp, Artificial Sequence
  ENSG00000164619_8 (sequence is synthesized)
cacaatgtgtgagagaagtctgtcccattctctcctgtccccagcaccttagtcacatacccccaggacagtgctgccccaaatgtttgggtcagaggaaagtgtttgacctcccttttg

SEQ ID NO: 513446 - DNA, 120 bp, Artificial Sequence
  ENSG00000164619_9 (sequence is synthesized)
ggagctgcctctttcgaagtgatgtttatgacaatggatcctcatttctgtacgataactgcacagcttgtacctgcagggactctactgtggtttgcaagaggaagtgctcccaccctg

SEQ ID NO: 513447 - DNA, 120 bp, Artificial Sequence
  ENSG00000164619_10 (sequence is synthesized)
gtggctgtgaccaaggccaggagggctgttgtgaagagtgcctcctacgagtgcccccagaagacatcaaagtatgcaaatttggcaacaagattttccaggatggagagatgtggtcct

SEQ ID NO: 513448 - DNA, 120 bp, Artificial Sequence
  ENSG00000164619_11 (sequence is synthesized)
ctatcaattgtaccatctgtgcttgtgtgaaaggcaggacggagtgtcgcaataagcagtgcattcccatcagtagctgcccacagggcaaaattctcaacagaaaaggatgctgtccta

SEQ ID NO: 513449 - DNA, 120 bp, Artificial Sequence
  ENSG00000164619_12 (sequence is synthesized)
tttgcactgaaaagcccggcgtttgcacggtgtttggagatccccactacaacacttttgacggtcggacatttaactttcaggggacgtgtcagtacgttttgacaaaagactgctcct

SEQ ID NO: 513450 - DNA, 120 bp, Artificial Sequence
  ENSG00000164619_13 (sequence is synthesized)
cccctgcctcgcccttccaggtgctggtgaagaacgacgcccgccggacacgctccttctcgtggaccaagtcggtggagctggtgctgggcgagagcagggtcagcctgcagcagcacc

SEQ ID NO: 513451 - DNA, 120 bp, Artificial Sequence
  ENSG00000164619_14 (sequence is synthesized)
tcaccgtgcgctggaacggctcgcgcatcgcgctcccctgccgcgcgccacacttccacatcgacctggatggctacctcttgaaagtgaccaccaaagcaggtttggaaatatcttggg

SEQ ID NO: 513452 - DNA, 120 bp, Artificial Sequence
  ENSG00000164619_15 (sequence is synthesized)
atggagacagttttgtagaagtcatggctgcgccgcatctcaagggcaagctctgtggtctttgtggcaactacaatggacataaacgtgatgacttaattggtggagatggaaacttca

SEQ ID NO: 513453 - DNA, 120 bp, Artificial Sequence
  ENSG00000164619_16 (sequence is synthesized)
agtttgatgtggatgactttgctgaatcttggagggtggagtccaatgagttctgcaacagacctcagagaaagccagtgcctgaactgtgtcaagggacagtcaaggtaaagctccggg

SEQ ID NO: 513454 - DNA, 120 bp, Artificial Sequence
  ENSG00000164619_17 (sequence is synthesized)
cccatcgagaatgccaaaagctcaaatcctgggagtttcagacctgccactcgactgtggactacgccactttctaccggtcctgtgtgacagacatgtgtgaatgtccagtccataaaa

SEQ ID NO: 513455 - DNA, 120 bp, Artificial Sequence
  ENSG00000164619_18 (sequence is synthesized)
actgttattgcgagtcatttttggcatatacccgggcctgccagagagagggcatcaaagtccactgggagcctcagcagaattgtgcagccacccagtgtaagcatggtgctgtgtacg

SEQ ID NO: 513456 - DNA, 120 bp, Artificial Sequence
  ENSG00000164619_19 (sequence is synthesized)
atacctgtggtccgggatgtatcaagacgtgtgacaactggaatgaaattggtccatgcaacaagccgtgcgttgctgggtgccactgtccagcaaacttggtccttcacaagggaaggt

SEQ ID NO: 513457 - DNA, 120 bp, Artificial Sequence
  ENSG00000164619_20 (sequence is synthesized)
ttgtgtgcccgattctgtaaacacacacacacagagtatatatgtgtatatatatatagatatattcaaaaacattgcatcatttatatgaactatagggggattattatatgtatattt

SEQ ID NO: 513458 - DNA, 120 bp, Artificial Sequence
  ENSG00000164619_21 (sequence is synthesized)
tttgctataagacatgtattgtttctaggatcctaacctgtaagccattgaacatgttgtataaatacaccaggtgtttttaatttaataaggtggcatgcagatacattggatagtgtt

SEQ ID NO: 513459 - DNA, 120 bp, Artificial Sequence
  ENSG00000164619_22 (sequence is synthesized)
aacatcacatacatttgtcatttttaaggaagttttctaagagccctcaattgcctgcctgtattaattttagttttgagtcaggatttgtaatggagtgggaaatgtgtttctctggag

SEQ ID NO: 513460 - DNA, 120 bp, Artificial Sequence
  ENSG00000164619_23 (sequence is synthesized)
aagggcacatttatctaggggcatttcaggtttccaaagaaaggaatgtatgcctgggaaagacagcaggagattggtgaccggccctaatggtgcatgaaaagcgagtgataggctgtt

SEQ ID NO: 513461 - DNA, 120 bp, Artificial Sequence
  ENSG00000164619_24 (sequence is synthesized)
agaatgtattaggtcatgggctaacattatttccaaaattgattggctggttgccaagaaatatatatttgtcactagggcataaccgaagaatcaagtgatttcttgccatccttgcgt

SEQ ID NO: 513462 - DNA, 120 bp, Artificial Sequence
  ENSG00000164619_25 (sequence is synthesized)
agtcctcaagtcttctaatcatctatgtgtgtatgatggatgtgaccatttatatgtcatgtgttgaaattaaagggtgtctggatgccatgttaattttattgagcatgagaaagtatt

SEQ ID NO: 513463 - DNA, 120 bp, Artificial Sequence
  ENSG00000164619_26 (sequence is synthesized)
tgaagaaactgttgcacaacatatgatgaaattttgatttctctgaatctcagagtaatttaagatgggcaaatccaatgagttgatgtaacccatctacattttgtggctatttcatgt

SEQ ID NO: 513464 - DNA, 120 bp, Artificial Sequence
  ENSG00000164619_27 (sequence is synthesized)
ataaaatgaaaggctttagttatttctagaggagtcccatccaacactatttggcgactgttaatatgttataattattagacagtggaaaagcctttattgactaattgatttaacctc

SEQ ID NO: 513465 - DNA, 120 bp, Artificial Sequence
  ENSG00000164619_28 (sequence is synthesized)
agtccaaagaacagtctctatacttgccctcatttactgataggctgctactagttaccatttgattgtcttgactttcgtcttcagttgaattggtgaaaacatcaacaaaaacaaaac

SEQ ID NO: 513466 - DNA, 120 bp, Artificial Sequence
  ENSG00000164619_29 (sequence is synthesized)
ccactgtgtcttaaaataaaatgttctgcattgtagtcaataaagggcttaagatgtaaaacaatgcattttctctctcaagatgtcctgtgttatactttacaattagttgtatcaact

SEQ ID NO: 513467 - DNA, 120 bp, Artificial Sequence
  ENSG00000164619_30 (sequence is synthesized)
tcagattcattaaattttaacagctgtatttagttataatttttgtatcttacaacagtatatataaagactattattaatagacaaaagcaaacccacgtttttgacaagccagcatat

SEQ ID NO: 513468 - DNA, 120 bp, Artificial Sequence
  ENSG00000164619_31 (sequence is synthesized)
tgccaatgctcgtcaaagacatttatgtttcttttacattcatgacagctaaagtattaacttggaatttttttttttttttttgactggaaaatccctagttgtttgaattaactgaat

SEQ ID NO: 513469 - DNA, 120 bp, Artificial Sequence
  ENSG00000164619_32 (sequence is synthesized)
aaagtgcagggcgtaatagtgactggctgggggcactgggcctttgtgttttttttcattcctgtgtttggatactaatcaccctcgtatctgcagcctgaggtagtcaggtcattgttt

SEQ ID NO: 513470 - DNA, 120 bp, Artificial Sequence
  ENSG00000164619_33 (sequence is synthesized)
caatgctgcccttggaaagaagactttgacttaggtgctttgggatctaagtgtggtttgtgactatccccattatttaagcatttgggggtctcacttttgcttatctgtaacacaaag

SEQ ID NO: 513471 - DNA, 120 bp, Artificial Sequence
  ENSG00000164619_34 (sequence is synthesized)
aggccatgtagtatagtgagcagggttgagaatcgggaaaactagacccctgccactaacaggctaggagactttgggcagtaatgggaggcactgagggtttgcaaatactttcctact

SEQ ID NO: 513472 - DNA, 120 bp, Artificial Sequence
  ENSG00000164619_35 (sequence is synthesized)
tgtaatctcattgattccctgctctgccctgacaggaggggtagggaaaatcagttgacgttgcctggtggttcctaccttctgtaaaacgaacagattccttaagattagctttaaatc

SEQ ID NO: 513473 - DNA, 120 bp, Artificial Sequence
  ENSG00000164619_36 (sequence is synthesized)
ccttttcagttcactgttggttctcatctttgaaagagggcagcataagggaaatgatggagaagggagaattgtggatggttatttatagctcatgattcatccaaggactgagttatt

SEQ ID NO: 513474 - DNA, 120 bp, Artificial Sequence
  ENSG00000164619_37 (sequence is synthesized)
ctccccatgaggctaaccggcctctttcccaacacttaatcatggcagccaggatgggtgaatgatgaaagctcttctgcatgagccggtttcatcatcttgggtgggttgattacaagt

SEQ ID NO: 513475 - DNA, 120 bp, Artificial Sequence
  ENSG00000164619_38 (sequence is synthesized)
ttgtgtggcattcctttagctggggattagcttaatctctgtacatttttctcatttctaattgaagaagaaagggagggcagagaggacagaaaattacttgggtttactaattcaaag

SEQ ID NO: 513476 - DNA, 120 bp, Artificial Sequence
  ENSG00000164619_39 (sequence is synthesized)
agccatctctgatgggagagggtgaggaaatcagctgaatggttggcctgcatattcttttttaggccacaggctacagctgagcaatggcttagtctaatgattgggcacaatgaggat

SEQ ID NO: 513477 - DNA, 120 bp, Artificial Sequence
  ENSG00000164619_40 (sequence is synthesized)
ttaccaagtgcttcaatgagagcagtcctgtttcattcacatgggatgttttcaattggttcttcaactaagctcttgcagagtgagatgacttgaaataaaaatgttctatgaatattg

SEQ ID NO: 513478 - DNA, 120 bp, Artificial Sequence
  ENSG00000164619_41 (sequence is synthesized)
gtaaaactaagttctttcttctctccctctgtaaataggaatatttgagggtcctgacctaaaattttttagctgggaagaaaagatatctctttggcatcgacaagagcaatttttgtt

SEQ ID NO: 513479 - DNA, 120 bp, Artificial Sequence
  ENSG00000164619_42 (sequence is synthesized)
aaaactgtggtacactaagaatcactaactcttcaggttgaaggcctcactcatcttaactcgttgactgcttcctgaccatcagaccgtcctgtaagagggcatctttcaataagaacg

SEQ ID NO: 513480 - DNA, 120 bp, Artificial Sequence
  ENSG00000164619_43 (sequence is synthesized)
agaaagacccaggaggttgactagcttctcccagctttcactgaaacacggataaaccatttcaactggaaaactcttcctttttatgagatatttcagacacacaaaaaggcatagaga

SEQ ID NO: 513481 - DNA, 120 bp, Artificial Sequence
  ENSG00000164619_44 (sequence is synthesized)
aaaatgttgcaaacatccatgactacattaccctaattaagaaacataacctggtaagtagtcaataaatttttcttgaatcaataaataaaacctaataaatgctgtctcatggttgca

SEQ ID NO: 513482 - DNA, 120 bp, Artificial Sequence
  ENSG00000164619_45 (sequence is synthesized)
tgttcactcttaaatactggagactcccagtattttggttgcacctatgaaggaaatacctataacagctccttcaaatggcagagcccggctgagccttgtgttctacgccagtgccag

SEQ ID NO: 513483 - DNA, 120 bp, Artificial Sequence
  ENSG00000164619_46 (sequence is synthesized)
gctgctattctgaaggacatactttactgacacctggtgcagaaaagaaaatatggagtcaatttctaagagaagggaaaaggggattgcgtttcaaaaagtgatttaaacctaagacaa

SEQ ID NO: 513484 - DNA, 120 bp, Artificial Sequence
  ENSG00000164619_47 (sequence is synthesized)
tgcgagacagattcatagaaaggcctgtttattgactcagttctgagttttggtcaatttaaaatctgccccaatttgagggtttttttaaattttattttttatttttttctttgcgta

SEQ ID NO: 513485 - DNA, 120 bp, Artificial Sequence
  ENSG00000164619_48 (sequence is synthesized)
tggggctgtgtgcttagttgaaatatcttcataaaggaggagtgttattaaaaatccagtgaaatacttggaattgtgcttagaccatctgagaacagataatttatccctatatcatag

SEQ ID NO: 513486 - DNA, 120 bp, Artificial Sequence
  ENSG00000164619_49 (sequence is synthesized)
tcttttcttttttgaacctgtttaaataaaattattgaaaatggagttgggggcagaggttttgctttggtgaatttaataatttaaaccacattaagaattctgaagtttgggtagagg

SEQ ID NO: 513487 - DNA, 120 bp, Artificial Sequence
  ENSG00000164619_50 (sequence is synthesized)
gggaaggctggtgaagaggttgcgggctgagaggctgttgccttcaatgtagtaataatagacattcttctatttgaatttgagaaattattttatttatttttaatgctttcctcaact

SEQ ID NO: 513488 - DNA, 120 bp, Artificial Sequence
  ENSG00000164619_51 (sequence is synthesized)
tttattttaatctttccctctgtagaactcaggaaaaaaatttgtgcagttttccgcacatcttcctttctcatctttggggttgcaatacatccactgtgctaggagtgctttttaaag

SEQ ID NO: 513489 - DNA, 120 bp, Artificial Sequence
  ENSG00000164619_52 (sequence is synthesized)
ctgctgcttcaggcatttttatttctctttctctcaccttccttttcactcagcttttggctggggtgcacatgggtggggaggagaagtagggtgtgtgtgtgtgtgtgtgtgtgtatg

SEQ ID NO: 513490 - DNA, 120 bp, Artificial Sequence
  ENSG00000164619_53 (sequence is synthesized)
ttgccccggggatgggagggtggggagcgcgcaccttggcgcttgccctgcgctggtcgatggggatgaagcgaagccccgggagggctgggaaggctggtgaagaggttgcgggctgag

SEQ ID NO: 513491 - DNA, 120 bp, Artificial Sequence
  ENSG00000164619_54 (sequence is synthesized)
ctgcactttttctgcagtgccatcctcagcactcaaagggcaactaatgactttgattatgttcccgatatcagcctttagattaatagaataaatgggagaaacaatggagttcttgct

SEQ ID NO: 513492 - DNA, 120 bp, Artificial Sequence
  ENSG00000164619_55 (sequence is synthesized)
attcagattctagagctcattctgtgtggtagctctgcctttcattcactaattttttattgaggttttgtttcattgctcttctgaaggatagaaggcacagaggactggcccctaccc

SEQ ID NO: 513493 - DNA, 120 bp, Artificial Sequence
  ENSG00000164619_56 (sequence is synthesized)
ccaagacagtttagcttggaagtaaagtcaatgtctccttacaggattgagcctttatgtatgtgccaaaaattatgtatttgtgtgccccaaatacaggggtatagatggcaacagaga

SEQ ID NO: 513494 - DNA, 120 bp, Artificial Sequence
  ENSG00000164619_57 (sequence is synthesized)
gctgcagaggcgagagggcgcagccgggctgagagagcgacggagctccgagctgcagaggccgccgcgcggcggcccccgccagagatgagcggtggggcgggggttcctccctctttt

SEQ ID NO: 513495 - DNA, 120 bp, Artificial Sequence
  ENSG00000164619_58 (sequence is synthesized)
cgggtgaatgaatgattagtcaaacaccacctccccgccccggtccgcccgagattggaagggaggagtctcggagcgactgttcattttttaaggacgaaaggcgtttgcctcggttct

SEQ ID NO: 513496 - DNA, 120 bp, Artificial Sequence
  ENSG00000164619_59 (sequence is synthesized)
tagatggagcaatctgacacaaaacccagggttttatgactgacctagtgcgccagctgcatctggaggaaccagacgcaaacaacgcagagttgagggccaggtgaagcgggatccagc

SEQ ID NO: 513497 - DNA, 120 bp, Artificial Sequence
  ENSG00000164619_60 (sequence is synthesized)
tccccacttcaccccaaccccttcgactcctcaaaacctctgcaagaagctatttccttcggctggcaacttacagccagcaggtcccttcctcgtgcagaataaagccattctgggaaa

SEQ ID NO: 513498 - DNA, 120 bp, Artificial Sequence
  ENSG00000164620_0 (sequence is synthesized)
gagcgtcccgggttgggcagggaactggcagcatagctcctaggatgcgagggccatttgtctccggccgggggtcagatcctcgggaagccgagccatcccatccagccgcttgcccca

SEQ ID NO: 513499 - DNA, 120 bp, Artificial Sequence
  ENSG00000164620_1 (sequence is synthesized)
aaccgggcgcaggccgtggtcacttctctaggaagctccgaagatcccgccactccgtccctcaaaggtgcggaaagccggcttcccccagccctcggagaagattcctgactctccgct

SEQ ID NO: 513500 - DNA, 120 bp, Artificial Sequence
  ENSG00000164620_2 (sequence is synthesized)
cggtcggggcatctgagggcaggagctgcgccaggcgtaccggatagaccagtggacaacacccacgccggaccgcctgtcccctacccggacccagactcggcgccgcacattgccccg

SEQ ID NO: 513501 - DNA, 120 bp, Artificial Sequence
  ENSG00000164620_3 (sequence is synthesized)
ggggggcccggcgcagtcacgcgcgcgcagagctcacgctctccgccccgcacacctgcgctccgccccctggtcctgggcccgcgacgggtgaaggcatttgggaagccagggcggctg

SEQ ID NO: 513502 - DNA, 120 bp, Artificial Sequence
  ENSG00000164620_4 (sequence is synthesized)
cggaggcgatctccctgacccagggccggagttgcccggagcctgccaccgctctcagccagcccgcatccttctctgttcttccctccccccgcctgccacggcgcgggtatccgcagc

SEQ ID NO: 513503 - DNA, 120 bp, Artificial Sequence
  ENSG00000164620_5 (sequence is synthesized)
cacagcccggggccggtgaggcggcgaagggggaggggaggaatcaagggatgagcgccggaagggcgtcgggggccctgagccgcactaggacgcccctggagccggaaccccagcaga

SEQ ID NO: 513504 - DNA, 120 bp, Artificial Sequence
  ENSG00000164620_6 (sequence is synthesized)
agccggaaccagaaccaaatcaccggtaccgggtcggccaggtggtcagggtgggagaaaccaaaaagggagaggggtgcgggagtactgagaggaaggggctgcagaggcctggctcag

SEQ ID NO: 513505 - DNA, 120 bp, Artificial Sequence
  ENSG00000164620_7 (sequence is synthesized)
gccggcgtggaggaggtgcgggcgctgactcaggcaggatttctgctcccgccgcctaagaatgccgtcccatctcgtgctgcagtgtccttgggagggacagaagcgcgaacaagctgg

SEQ ID NO: 513506 - DNA, 120 bp, Artificial Sequence
  ENSG00000164620_8 (sequence is synthesized)
aaaggggaacgctcggggcgtcggggaagcgggaccagggtcgtggtagagagcttgcgttgccgctgacctcttgccgaaaggcgaaacagcactcctggcccggacagctccctggtt

SEQ ID NO: 513507 - DNA, 120 bp, Artificial Sequence
  ENSG00000164620_9 (sequence is synthesized)
gggtagggggtggggccggacctcagccggacgtcttagacgtgcttgtttcagatcctgaggacggcattcctacccctcccccattcccagctgcagccccctaaacccaggaggcgc

SEQ ID NO: 513508 - DNA, 120 bp, Artificial Sequence
  ENSG00000164620_10 (sequence is synthesized)
cccccagggcctcatgtcggaaccacagcctgacctggaaccgccccaacatgggctatatatgctcttcctgcttgtgctggtcttcttcctcatgggcctggtaggcttcatgatctg

SEQ ID NO: 513509 - DNA, 120 bp, Artificial Sequence
  ENSG00000164620_11 (sequence is synthesized)
ccacgtgctcaagaagaagggctaccgctgccgcacgtcgaggggctctgagcctgacgatgcccagcttcagccccctgaggacgatgacatgaatgaggacacagtagagaggattgt

SEQ ID NO: 513510 - DNA, 120 bp, Artificial Sequence
  ENSG00000164620_12 (sequence is synthesized)
tcgctgcatcatccagaatgaagccaatgctgaggccttgaaggagatgctgggggacagtgaaggagaagggacagtgcagctgtccagtgtggatgccacctccagcctgcaggacgg

SEQ ID NO: 513511 - DNA, 120 bp, Artificial Sequence
  ENSG00000164620_13 (sequence is synthesized)
agccccctcccatcatcacacagtgcacctgggctctgcagccccttgcctccattgcagccgcagcaagaggcctccacttgtccgtcagggacgctccaaggaaggaaaaagccgccc

SEQ ID NO: 513512 - DNA, 120 bp, Artificial Sequence
  ENSG00000164620_14 (sequence is synthesized)
ccggacaggggagaccactgtgttctctgtgggcaggttccgggtgacacacattgagaagcgctatggactgcacgaacaccgtgatggctcccccacagacaggagctggggctctgg

SEQ ID NO: 513513 - DNA, 120 bp, Artificial Sequence
  ENSG00000164620_15 (sequence is synthesized)
tgggggacaggacccagggggtggtcaggggtctgggggagggcagcccaaggcagggatgcctgccatggagaggctgccccctgagaggccacagccccaggtcctagccagcccccc

SEQ ID NO: 513514 - DNA, 120 bp, Artificial Sequence
  ENSG00000164620_16 (sequence is synthesized)
agtacagaatggaggactcagggacagcagcctaacccctcgtgcacttgaagggaaccccagagcttctgcagagccaacactgagggccggagggaggggcccaagcccagggctgcc

SEQ ID NO: 513515 - DNA, 120 bp, Artificial Sequence
  ENSG00000164620_17 (sequence is synthesized)
cactcaagaggcaaatgggcagccaagcaaaccagacacttctgatcaccaggtgtctctaccacagggagcagggagtatgtgagtctccttcattgtgctgatggactaccagctggc

SEQ ID NO: 513516 - DNA, 120 bp, Artificial Sequence
  ENSG00000164620_18 (sequence is synthesized)
agggccagggggtgggtgggcgtgaaagccctcccctccactggacagcactgccccccagctgagggaccagctctacttccacctggagttgcacagtctcaggctgggggcctcagg

SEQ ID NO: 513517 - DNA, 120 bp, Artificial Sequence
  ENSG00000164620_19 (sequence is synthesized)
agaggtcacagcccctcagtctcttctccttcccctgcctgcaacaggctgcctgccccgccttccccaacacctcgctccatatgatagagcgtggcagctgggagcaggcccctgccc

SEQ ID NO: 513518 - DNA, 120 bp, Artificial Sequence
  ENSG00000164620_20 (sequence is synthesized)
gtggtgggcccctaaagcaatagcaccgtaggccccctgccctcttagcacaagaggcccaggccctggcctggccttcgtgccctttattcattgtcaataaatccgctcagaccatta

SEQ ID NO: 513519 - DNA, 120 bp, Artificial Sequence
  ENSG00000164626_0 (sequence is synthesized)
gcatactgctagtggcgcgcggaggagcgacgcgtggagaagcggcccacgtgtctgcccagagtcaagtcctgtgttcttcccgctccttacgcatccgcggtccagggcgccctttca

SEQ ID NO: 513520 - DNA, 120 bp, Artificial Sequence
  ENSG00000164626_1 (sequence is synthesized)
gccccgctggtgttcgcccaccccgggccgcgtgagtggggccccacgcagctccccgcactccgtgggccaacttggccaagcaactctgtccggggagcggtgcttgcggggggtgag

SEQ ID NO: 513521 - DNA, 120 bp, Artificial Sequence
  ENSG00000164626_2 (sequence is synthesized)
taccgggcactgcgcatgcggagctccaaattcaaacagctgttttcagaggctggagggcgggcggactggtagcagctggggctaggagaggctttctctaggaggcggccgctcggg

SEQ ID NO: 513522 - DNA, 120 bp, Artificial Sequence
  ENSG00000164626_3 (sequence is synthesized)
agccatggtggaccggggccctctgctcacctcggccatcatcttctacctggccatcggggcggcgatcttcgaagtgctggaggagccacactggaaggaggccaagaaaaactacta

SEQ ID NO: 513523 - DNA, 120 bp, Artificial Sequence
  ENSG00000164626_4 (sequence is synthesized)
cacacagaagctgcatctgctcaaggagttcccgtgcctgggtcaggagggcctggacaagatcctagaggtggtatctgatgctgcaggacagggtgtggccatcacagggaaccagac

SEQ ID NO: 513524 - DNA, 120 bp, Artificial Sequence
  ENSG00000164626_5 (sequence is synthesized)
cttcaacaactggaactggcccaatgcaatgatttttgcagcgaccgtcattaccaccattggatatggcaatgtggctcccaagacccccgccggtcgcctcttctgtgttttctatgg

SEQ ID NO: 513525 - DNA, 120 bp, Artificial Sequence
  ENSG00000164626_6 (sequence is synthesized)
tctcttcggggtgccgctctgcctgacgtggatcagtgccctgggcaagttcttcgggggacgtgccaagagactagggcagttccttaccaagagaggtgtgagtctgcggaaggcgca

SEQ ID NO: 513526 - DNA, 120 bp, Artificial Sequence
  ENSG00000164626_7 (sequence is synthesized)
gatcacgtgcacagtcatcttcatcgtgtggggcgtcctagtccacctggtgatcccacccttcgtattcatggtgactgaggggtggaactacatcgagggcctctactactccttcat

SEQ ID NO: 513527 - DNA, 120 bp, Artificial Sequence
  ENSG00000164626_8 (sequence is synthesized)
caccatctccaccatcggcttcggtgactttgtggccggtgtgaaccccagcgccaactaccacgccctgtaccgctacttcgtggagctctggatctacttggggctggcctggctgtc

SEQ ID NO: 513528 - DNA, 120 bp, Artificial Sequence
  ENSG00000164626_9 (sequence is synthesized)
cctttttgtcaactggaaggtgagcatgtttgtggaagtccacaaagccattaagaagcggcggcggcgacggaaggagtcctttgagagctccccacactcccggaaggccctgcaggt

SEQ ID NO: 513529 - DNA, 120 bp, Artificial Sequence
  ENSG00000164626_10 (sequence is synthesized)
gaaggggagcacagcctccaaggacgtcaacatcttcagctttctttccaagaaggaagagacctacaacgacctcatcaagcagatcgggaagaaggccatgaagacaagcgggggtgg

SEQ ID NO: 513530 - DNA, 120 bp, Artificial Sequence
  ENSG00000164626_11 (sequence is synthesized)
ggagacgggcccgggcccagggctggggcctcaaggcggtgggctcccagcactgcccccttccctggtgcccctggtagtctactccaagaaccgggtgcccaccttggaagaggtgtc

SEQ ID NO: 513531 - DNA, 120 bp, Artificial Sequence
  ENSG00000164626_12 (sequence is synthesized)
acagacactgaggagcaaaggccacgtatcaaggtccccagatgaggaggctgtggcacgggcccctgaagacagctcccctgcccccgaggtgttcatgaaccagctggaccgcatcag

SEQ ID NO: 513532 - DNA, 120 bp, Artificial Sequence
  ENSG00000164626_13 (sequence is synthesized)
cgaggaatgcgagccatgggacgcccaggactaccacccactcatcttccaggacgccagcatcaccttcgtgaacacggaggctggcctctcagacgaggagacctccaagtcctcgct

SEQ ID NO: 513533 - DNA, 120 bp, Artificial Sequence
  ENSG00000164626_14 (sequence is synthesized)
agaggacaacttggcaggggaggagagcccccagcagggggctgaagccaaggcgcccctgaacatgggcgagttcccctcctcctccgagtccaccttcaccagcactgagtctgagct

SEQ ID NO: 513534 - DNA, 120 bp, Artificial Sequence
  ENSG00000164626_15 (sequence is synthesized)
aggcagggccggctccccaccccacctttgatggcctcttcccccctcaccctagggtgtcccgagatgaccgggacgcctggcccctggtgggggggcagcctcggaactgggagtggg

SEQ ID NO: 513535 - DNA, 120 bp, Artificial Sequence
  ENSG00000164626_16 (sequence is synthesized)
gggccaggggccttcctaaccttccatcatcctcagctagatgtatgcccgggacagggcctctgttctccagctgaaccataccctggctgtgggggcatctgtcctgagcttggctgg

SEQ ID NO: 513536 - DNA, 120 bp, Artificial Sequence
  ENSG00000164626_17 (sequence is synthesized)
tgtatctcacaatgcaaagacatgctggctggcgggacaggtgggcaggactgaccctgaggaggccttgcctgcagggtctttgtctcaccatttggtggagtatcacacggttctctg

SEQ ID NO: 513537 - DNA, 120 bp, Artificial Sequence
  ENSG00000164626_18 (sequence is synthesized)
aggtctggggcctcagctgtttaagtttaccggtattactgagctcggcatttggagagggagctctgaagtgtctggggaggtaccgctgtgcgtggggtcaggtgtttccgtaccaca

SEQ ID NO: 513538 - DNA, 120 bp, Artificial Sequence
  ENSG00000164626_19 (sequence is synthesized)
gcaggagcagggcccgcccgcatcccagctgtgggcctgccggtcaggtcgggcacctactacaaaccgtagtggggtggaggctgctggaggtgggagtgaggagatgagggcagggtc

SEQ ID NO: 513539 - DNA, 120 bp, Artificial Sequence
  ENSG00000164626_20 (sequence is synthesized)
tcaaacagtcctgactcacagggcctggaaacaagtcctatgtgggcctggggcctggggtcctcatcctccttgttggtctactcaggcccagcccagagctgtgttccctgtctcagg

SEQ ID NO: 513540 - DNA, 120 bp, Artificial Sequence
  ENSG00000164626_21 (sequence is synthesized)
tcaagcagtggcagacgcaaggctttctgtgggcccccaagtggtaggagggagagtagcagagcatgggttactggaagccgggactgctagggctggtggccagggagctgcaagagt

SEQ ID NO: 513541 - DNA, 120 bp, Artificial Sequence
  ENSG00000164626_22 (sequence is synthesized)
gaggctcagctctggctggttctgcccttacccctcctgcccgcctgagaactgcacaccctgcccgctggccccaggacctgcactcccaatcctgctgtcttctccttccctgtgccc

SEQ ID NO: 513542 - DNA, 120 bp, Artificial Sequence
  ENSG00000164626_23 (sequence is synthesized)
tgaacaaggacctcactgcccgccttcccctcccaccagcccccttgggccaggcagggtgaggccaaattgctcttggcccacaaatgggtgatggtcagatatgtgaatcaagctcct

SEQ ID NO: 513543 - DNA, 120 bp, Artificial Sequence
  ENSG00000164626_24 (sequence is synthesized)
ttctctagctagtgtttgatgtgcacgtgtgtgtgcacagtgcgtgtgtgcacacgcacacctgtgcactcgtgtgtgtttaagaaaggaaaggatttgggctggggagcaaaagataat

SEQ ID NO: 513544 - DNA, 120 bp, Artificial Sequence
  ENSG00000164626_25 (sequence is synthesized)
gtgaaactgttggtggactctctggtgaggggtgggcagaacttgctgctactagagttcttgggttctccatgatgttcaccctggggctggcccactgtgtcctgaatgtttttgtta

SEQ ID NO: 513545 - DNA, 120 bp, Artificial Sequence
  ENSG00000164626_26 (sequence is synthesized)
ttttttgttttattttttaaacaaactgctgtttttatatacctggaatctgttgttggcttcagagccagtggttaaagagcagggtcccaaggattgggagatctagtgtctgccctc

SEQ ID NO: 513546 - DNA, 120 bp, Artificial Sequence
  ENSG00000164626_27 (sequence is synthesized)
ctgccctgcaactcaattgggcctttttcggtgacctcatccaaggccatgatgtcaagggccatgtccccaagcagaggtggagaaggggacactgaggtgagcaaaagcaggaagggg

SEQ ID NO: 513547 - DNA, 120 bp, Artificial Sequence
  ENSG00000164626_28 (sequence is synthesized)
catccactgcgggtgactggaggccgggcaggaagcaagtcatcagagccgctcagctccgttcactctctgccttctgccccactactgtggggcagtggggccagagcccacctcccc

SEQ ID NO: 513548 - DNA, 120 bp, Artificial Sequence
  ENSG00000164626_29 (sequence is synthesized)
aacatgtgaagacagtgatgggcacgtgcccacacccccacttctctagccgtttgcagaggccgccacccagcaggggcctgaaaaggagcagcctcgtatttttctgtgaaatgtttt

SEQ ID NO: 513549 - DNA, 120 bp, Artificial Sequence
  ENSG00000164626_30 (sequence is synthesized)
aatgaaccatgttgttgctggttgtcctggcatcgcgcacactgtatgtacatactggcaacgatgtcaaatgtaatttattttaacatttttacaataaaacatgaggtggacaggcca

SEQ ID NO: 513550 - DNA, 120 bp, Artificial Sequence
  ENSG00000164627_0 (sequence is synthesized)
actgttgctaagactgtgggtcgccggaggtggtgggagttagttttggcagcccgggcctgagagaggtcaagggtcattgcagagccagggaggagatggtgaagcagactatccaga

SEQ ID NO: 513551 - DNA, 120 bp, Artificial Sequence
  ENSG00000164627_1 (sequence is synthesized)
tattcgcgagggtgaagccccctgtccggaagcaccaacaagggatttattccatagatgaagatgaaaaattaatacctagcttggaaatcatcttaccacgtgatttggcagatgggt

SEQ ID NO: 513552 - DNA, 120 bp, Artificial Sequence
  ENSG00000164627_2 (sequence is synthesized)
ttgtgaataataagcgagaaagctacaaatttaaatttcaaagaatttttgatcaggatgcaaaccaagagaccgtttttgaaaacattgccaaaccagttgctgggagtgtcctggcag

SEQ ID NO: 513553 - DNA, 120 bp, Artificial Sequence
  ENSG00000164627_3 (sequence is synthesized)
gttacaatggtaccatctttgcatatgggcaaacaggcagcgggaagacattcactatcacagggggtgcagagcgttacagtgacagaggcattatcccaaggacactgtcatacattt

SEQ ID NO: 513554 - DNA, 120 bp, Artificial Sequence
  ENSG00000164627_4 (sequence is synthesized)
ttgaacagttacaaaaggacagcagcaaaatatatacaacacacatttcctatttggaaatctacaatgaatgtggttatgatcttttggatccaagacatgaagcctccagtttggaag

SEQ ID NO: 513555 - DNA, 120 bp, Artificial Sequence
  ENSG00000164627_5 (sequence is synthesized)
atttgccgaaagtgacaatactggaggatcctgatcagaacattcacctgaaaaacttgactctccatcaggcaaccacagaggaagaagctctgaatttgctttttttaggagacacca

SEQ ID NO: 513556 - DNA, 120 bp, Artificial Sequence
  ENSG00000164627_6 (sequence is synthesized)
accgaatgattgcagagactcctatgaaccaagcttcaacccgttcccactgcattttcaccattcatttgtcaagcaaggaaccaggatctgcaactgtacgacatgccaaactccatc

SEQ ID NO: 513557 - DNA, 120 bp, Artificial Sequence
  ENSG00000164627_7 (sequence is synthesized)
tggttgacctggctggttcagagcgagttgcaaagactggagtagggggccatcttctaacagaggccaagtatatcaacttgtcactacattacttagaacaggttatcattgcccttt

SEQ ID NO: 513558 - DNA, 120 bp, Artificial Sequence
  ENSG00000164627_8 (sequence is synthesized)
cagaaaagcaccgttcgcacattccttatagaaactccatgatgaccagtgtcctaagagacagtttgggagggaactgcatgacaactatgattgcaacactctccttggagaaaagga

SEQ ID NO: 513559 - DNA, 120 bp, Artificial Sequence
  ENSG00000164627_9 (sequence is synthesized)
atcttgatgagtctatatcaacctgcagatttgcacagcgagtggcactcataaagaatgaagctgttcttaatgaagaaattaaccccagattagtgattaaacgcctacaaaaggaaa

SEQ ID NO: 513560 - DNA, 120 bp, Artificial Sequence
  ENSG00000164627_10 (sequence is synthesized)
tccaggaactgaaggatgaactggccatggtcactggggagcagaggacagaggcactcacagaagcagagctccttcagctggaaaaactaataacatcctttttggaagaccaggatt

SEQ ID NO: 513561 - DNA, 120 bp, Artificial Sequence
  ENSG00000164627_11 (sequence is synthesized)
cagacagtagattagaggttggcgcggatatgcgtaaagttcatcactgttttcatcatttaaagaaactattgaatgacaagaagatccttgaaaacaatacagtctcctctgaaagca

SEQ ID NO: 513562 - DNA, 120 bp, Artificial Sequence
  ENSG00000164627_12 (sequence is synthesized)
aagaccaagattgtcaagaaccattaaaagaagaagaatatagaaagctacgagatattctgaaacagagagataacgaaatcaatatcctggtcaacatgttaaaaaaagaaaagaaga

SEQ ID NO: 513563 - DNA, 120 bp, Artificial Sequence
  ENSG00000164627_13 (sequence is synthesized)
aagctcaggaggctctccacttggctggcatggatagacgtgaattcagacagtcccagagcccacccttccgcctaggaaacccagaagaaggtcaaagaatgcgactatcctcagctc

SEQ ID NO: 513564 - DNA, 120 bp, Artificial Sequence
  ENSG00000164627_14 (sequence is synthesized)
cctcacaggcccaggacttcagcattttggggaaaagatccagtttgctccacaagaaaataggaatgagagaggaaatgtcattaggatgccaggaggcttttgaaatcttcaagaggg

SEQ ID NO: 513565 - DNA, 120 bp, Artificial Sequence
  ENSG00000164627_15 (sequence is synthesized)
accacgctgacagcgttaccatcgatgacaacaaacagattctgaaacagagattttctgaagccaaggccctgggagaaagtataaatgaagcaagaagtaaaattggtcacctgaagg

SEQ ID NO: 513566 - DNA, 120 bp, Artificial Sequence
  ENSG00000164627_16 (sequence is synthesized)
aagaaatcacccagcggcatatacagcaagtagccctaggaatctcggaaaacatggccgtgcctctgatgccagaccagcaggaggagaagctgcgatcacaactggaggaagaaaaga

SEQ ID NO: 513567 - DNA, 120 bp, Artificial Sequence
  ENSG00000164627_17 (sequence is synthesized)
gaaggtataaaacaatgttcactcgcctgaaagccctgaaggtggagatcgagcacttgcagctgctcatggacaaagccaaggtgaagctacagaaagagtttgaagtctggtgggcag

SEQ ID NO: 513568 - DNA, 120 bp, Artificial Sequence
  ENSG00000164627_18 (sequence is synthesized)
aggaggccaccaacctgcaggtaaattctccagcagtgaattcactcgatcacacgaagccatttctccagacatctgactcccagcatgaatggtcccaactcctctctaacaaaagtt

SEQ ID NO: 513569 - DNA, 120 bp, Artificial Sequence
  ENSG00000164627_19 (sequence is synthesized)
aagtccaagatcaaggcactggcagattcgatgtctgtgatgtgaatgccaggaaaatcctgccctcgccttgccccagtccacacagccagaaacagagcagcaccagcaccccactgg

SEQ ID NO: 513570 - DNA, 120 bp, Artificial Sequence
  ENSG00000164627_20 (sequence is synthesized)
gcaccccactggaagacagcatccccaagaggccagtgtcgtccatccctctcaccggagacagccagacggactcggacatcatcgccttcatcaaggccagacagagcattctgcaga

SEQ ID NO: 513571 - DNA, 120 bp, Artificial Sequence
  ENSG00000164627_21 (sequence is synthesized)
agcaatgtttgggaagcaattgaatttccaggaaatatccatccatgaattatgccagcaagaatgaagcacagatgaaggcagcgcccctcacttgctctggcttcagaagtgaactat

SEQ ID NO: 513572 - DNA, 120 bp, Artificial Sequence
  ENSG00000164627_22 (sequence is synthesized)
gggctgctgggagcaactagtgactttgattcccatggaggggactgtgtttctttaaggatgctgacctggaggccaccgagaggctggggctggggctgaccacaacatccttcctgt

SEQ ID NO: 513573 - DNA, 120 bp, Artificial Sequence
  ENSG00000164627_23 (sequence is synthesized)
ggttgctggagctgctggcagggccaggcaaggccagagtgctaggggcagggtgaaggcttcagctcactgttgtagtgacgttttgtgtagatctttataagcttttgagaatgtgaa

SEQ ID NO: 513574 - DNA, 120 bp, Artificial Sequence
  ENSG00000164627_24 (sequence is synthesized)
atagcaccatcaaaatataatgtcagaggatgctcacaccagtggaatgtggggggaatatttttatttttaacgatttgccagctctctcccttggcccgtgctctggtttggaagccc

SEQ ID NO: 513575 - DNA, 120 bp, Artificial Sequence
  ENSG00000164627_25 (sequence is synthesized)
agaaatggccatgacaggtccaggcaggatgtcccagccacaggcaaggcagtggaatgcagggcatcctgaaggccaatcctgatctcccagaccacatctttcaccatcagcctcttg

SEQ ID NO: 513576 - DNA, 120 bp, Artificial Sequence
  ENSG00000164627_26 (sequence is synthesized)
gccaggatgacctggaggcagtgcctgaacagctgtgtctccagggagccatctgccctgcagggtctaaggacatcatagcacccagagaacagtgggcagctcccaggggctctgctg

SEQ ID NO: 513577 - DNA, 120 bp, Artificial Sequence
  ENSG00000164627_27 (sequence is synthesized)
agagcttgagagagggcagtgtgggtaccttgggcctcacaaccttcacccagccacttgggaggatttgggctgacactccccacttccacagggaaaaacatagctgcctgggggtct

SEQ ID NO: 513578 - DNA, 120 bp, Artificial Sequence
  ENSG00000164627_28 (sequence is synthesized)
tgtctccatgggccctctccatgacagatccaagggaaggtgggcagccctcaaggaggttcttgaagaactgccccctgggccagggggttccaacccagctgcagccagggaggggca

SEQ ID NO: 513579 - DNA, 120 bp, Artificial Sequence
  ENSG00000164627_29 (sequence is synthesized)
gcggagggtgagcaggagtggcacctggaaatgaagctaactggataaaagtgctggtccactgctcctggtgtctctgtcctataaatacaggacctgatgaccctggaggggagcaga

SEQ ID NO: 513580 - DNA, 120 bp, Artificial Sequence
  ENSG00000164627_30 (sequence is synthesized)
gtggtaatatagtataattggcttgattttctttttcgttttttaggactgggtaacaggatcatgcaggagaagattaaaccattacatttctaagctaggcaggcccatcgagctcct

SEQ ID NO: 513581 - DNA, 120 bp, Artificial Sequence
  ENSG00000164627_31 (sequence is synthesized)
ctaatccacacccctattttatataattagaaggccagagtgaaggggagattcagcttgctgttctatgccactgacaaatgtcccctcttcagggggcttcccctgaccactccatct

SEQ ID NO: 513582 - DNA, 120 bp, Artificial Sequence
  ENSG00000164627_32 (sequence is synthesized)
cgagtcaccccctagttatcccctatcccattaccattttttctgcatcactatctgacatgttatccttccgaacttgcctatttttgaaatacctgcaaccccccataatactaagag

SEQ ID NO: 513583 - DNA, 120 bp, Artificial Sequence
  ENSG00000164627_33 (sequence is synthesized)
ctccaatgcaacagggacctgtttgtcttgctcattgctgtgtcccaagcacagagtcgctgttcagtaaacggtccttcagttcatgagtagacgagccagaacccagatgtgtttctc

SEQ ID NO: 513584 - DNA, 120 bp, Artificial Sequence
  ENSG00000164627_34 (sequence is synthesized)
aggctggtgtcactctgacttcccccaggctctgactgaatcccatcgggacaggggccagcatctctggtccactcctggccctcacagttcaatggaacatagtaagccctctgtaaa

SEQ ID NO: 513585 - DNA, 120 bp, Artificial Sequence
  ENSG00000164627_35 (sequence is synthesized)
gtctgtagaaccagaggaagaccaaattctgattctagaagcctccccaagagtccatggaacacacatgtaactgcacacacacacacacatacacacacacactctcaagagccctga

SEQ ID NO: 513586 - DNA, 120 bp, Artificial Sequence
  ENSG00000164627_36 (sequence is synthesized)
agatggcatggcatttgccccagtcccctatgtagcagcagcagtattcttggcatgccttagtgccctcagccctctagagctgggtagagtctactaacttttattttcttttatttt

SEQ ID NO: 513587 - DNA, 88 bp, Artificial Sequence
  ENSG00000164627_37 (sequence is synthesized)
ccaggctggggtgcagtggtgcgaccatacctcactagtcagcctccaactcctgggctcaagccatacttcacctcagcctccaaag

SEQ ID NO: 513588 - DNA, 120 bp, Artificial Sequence
  ENSG00000164627_38 (sequence is synthesized)
caccaccacacctagctcgttttaaattttttgtagagacagggtctcactgtgtggctcaggatggtctcaaattcctggccttaagcgatgctcccgccttggcctcccaaagtgctg

SEQ ID NO: 513589 - DNA, 120 bp, Artificial Sequence
  ENSG00000164627_39 (sequence is synthesized)
ataccctgccagagtctttcaacattagatctcccactgagacatcatctcctggatccaaaggccttactgacagagatgtgtggcatggccccatgcggggtgtgaaccagcctcctg

SEQ ID NO: 513590 - DNA, 120 bp, Artificial Sequence
  ENSG00000164627_40 (sequence is synthesized)
gggcaatcactaagacaggaaaggaaatgaagacagaaaaacacacaacatgggatctggggccactggtgtccagagcatatgcaaagtgtgtgcagcaactggccaaggggccttttg

SEQ ID NO: 513591 - DNA, 120 bp, Artificial Sequence
  ENSG00000164627_41 (sequence is synthesized)
ctccgaacatcccctaatggaagcccagcctttgatatggacacatgcttgacagcagtgcaccttcccagagttcactggcctctgcaaatgggagaaattgatgcaatgttttgaaaa

SEQ ID NO: 513592 - DNA, 120 bp, Artificial Sequence
  ENSG00000164627_42 (sequence is synthesized)
gactttccagcaatccacctgggatcagtggagccacggatgacaagaagtatctgagttcactctaggccaaaatgtgggattttcaaaaacattttctggaaagcagcctagccagtg

SEQ ID NO: 513593 - DNA, 120 bp, Artificial Sequence
  ENSG00000164627_43 (sequence is synthesized)
actccagcccagtccctgctagaattcaactggctctaccaatcccttgacaagaagtagggtggacggaggttggaggagggaagttaaaatgtagcttgcccagatcttgctaaaaag

SEQ ID NO: 513594 - DNA, 120 bp, Artificial Sequence
  ENSG00000164627_44 (sequence is synthesized)
gagttttagaaagcagatagagaaattgtggtatactgaatacatcattttaattcttcaccaccagtatagaattacacatccaaagctttgtcatggcccactttgactaatgtggtg

SEQ ID NO: 513595 - DNA, 120 bp, Artificial Sequence
  ENSG00000164627_45 (sequence is synthesized)
ttggcaaacctgatccaggcagaggcttgaattgtgctctcatggttgagcttgcctcttgctccagtgatctctcttgggatgaacatgccatgggtagctgctgccccttcagcctgg

SEQ ID NO: 513596 - DNA, 120 bp, Artificial Sequence
  ENSG00000164627_46 (sequence is synthesized)
aacatccagagagcagacctgagcccagtctacagcctggagcagagcctcccaggcaagcccagcccagatcagctgaactatggctcacccaaagacctattggcatgagaatatatg

SEQ ID NO: 513597 - DNA, 120 bp, Artificial Sequence
  ENSG00000164627_47 (sequence is synthesized)
ctgcttgtcataaaccactgaggtttagagtggtttgttatatagcattaattgtagcaatagcagactggcacagaaattggaacccagagacagtatatgactggatctaggatttct

SEQ ID NO: 513598 - DNA, 120 bp, Artificial Sequence
  ENSG00000164627_48 (sequence is synthesized)
cagtgcagagttcattgtctctccatgcagcctgtggaaaggcactgagagcatcctgtatatggaaaagcaggaccaccacctacagccatgatgaagcaacaaggacctgatttaccc

SEQ ID NO: 513599 - DNA, 120 bp, Artificial Sequence
  ENSG00000164627_49 (sequence is synthesized)
tcctgctttaaatgactaaaaatgagacaaaatcctctatacaaaccaatggttttcagccattggataacaagcaatatagggtatgattgatccgcaagagaagggaaacaagtgagg

SEQ ID NO: 513600 - DNA, 120 bp, Artificial Sequence
  ENSG00000164627_50 (sequence is synthesized)
ggagccctatgattgctccaacttactgcctgcagtgagttttcaggctgcagcccaggaagggggaaccaggtagagcccagtggtttccctgagttgaggaaatggagctgggaatcc

SEQ ID NO: 513601 - DNA, 120 bp, Artificial Sequence
  ENSG00000164627_51 (sequence is synthesized)
agggaggacaaagtggcttaaatttgcaaggcagagtcccagggatgagagagagagaaggagagagagaggagaaaaaagagagagaaagagagagagcatgctctggagatcttcaga

SEQ ID NO: 513602 - DNA, 120 bp, Artificial Sequence
  ENSG00000164627_52 (sequence is synthesized)
gggttacccttgagtcttcagctaactaccgatcaacatctgcatgtgaagaaattacccaaggcaggggaaagaaccaccaggaggaagcaggtggaataatttcctgagataacactg

SEQ ID NO: 513603 - DNA, 120 bp, Artificial Sequence
  ENSG00000164627_53 (sequence is synthesized)
tgttgggaagagttcatgtttccaacagccagagtggagaaacctcccaaaacagtcattgtatagagacacataaggtactgcctcagaagtggggccaaattagtcctagatgataga

SEQ ID NO: 513604 - DNA, 120 bp, Artificial Sequence
  ENSG00000164627_54 (sequence is synthesized)
ttgctctggtcccacctaacaaagcttaaaaagccagccccaaaggagtcaaattgtttccagtaagtttccaagtaacttcaatgagtcccaaaacaaagcttcaaaatatctaaagga

SEQ ID NO: 513605 - DNA, 120 bp, Artificial Sequence
  ENSG00000164627_55 (sequence is synthesized)
atatgaaaaacaaaccaaaaagaaaccagcatccaacaatatagaatccacaatgtctggtgtccattaaaaaataatcaggcatgcaaagaagcaggaaaatatgggccatgagaggag

SEQ ID NO: 513606 - DNA, 66 bp, Artificial Sequence
  ENSG00000164627_56 (sequence is synthesized)
ggcatgcaaagaagcaggaaaatatgggccatgagaggagaaaaaaccatcaatagaaatagaggc

SEQ ID NO: 513607 - DNA, 62 bp, Artificial Sequence
  ENSG00000164627_57 (sequence is synthesized)
gccccaggcatggcacagttgatagagtaaatagacagaaacattttttaaaatgcaatggg

SEQ ID NO: 513608 - DNA, 120 bp, Artificial Sequence
  ENSG00000164627_58 (sequence is synthesized)
tagagtaaatagacagaaacattttttaaaatgcaatgggtgtgtgtttcaaatctaggcagaaaaaatgctccttgtaattccttaaacataagcatgtctcattcatctggtcattgt

SEQ ID NO: 513609 - DNA, 120 bp, Artificial Sequence
  ENSG00000164627_59 (sequence is synthesized)
tttgacaaggatgtgccatccattgtgctaagttctgaggagtcagaggtgacagagacagagaaagtgccagcattcttggaaccttctaacgaaggagagggacaagccaggcatggt

SEQ ID NO: 513610 - DNA, 120 bp, Artificial Sequence
  ENSG00000164627_60 (sequence is synthesized)
ctgggcaacaagagcgagactccttctctgaaaaaaaaaaaaagagagggacaataaacaagtaagcaagacaatctgattaagaaggagttggggttagctgggcatggtagcaagcgc

SEQ ID NO: 513611 - DNA, 75 bp, Artificial Sequence
  ENSG00000164627_61 (sequence is synthesized)
aaggagttggggttagctgggcatggtagcaattgaacccaggaggttaaggctgcagtgagctgtgatcacacc

SEQ ID NO: 513612 - DNA, 120 bp, Artificial Sequence
  ENSG00000164627_62 (sequence is synthesized)
tctcagaaaaagaagaaggagttgggggtggggtaggatgggcttggactcactatcaaggtgggtgggagtgtgagaacccggcaaggtgcaaagagagaagcagggaagggaagctta

SEQ ID NO: 513613 - DNA, 120 bp, Artificial Sequence
  ENSG00000164627_63 (sequence is synthesized)
ggacaatgatggcaggttgggtattgggtgatgggaagaggcaaaggacgtggagcttggcaaaaaggggacttgtggggatttgggccatgtgagcatgtgggggagacagtgttcctt

SEQ ID NO: 513614 - DNA, 120 bp, Artificial Sequence
  ENSG00000164627_64 (sequence is synthesized)
ccataacacgtgtccagggactgccagggctccgaggcagagcaggtgtagagaggttggctgtgaatgttggatgttgaaaacatatgtgtcaaatgtgggaggaaaaagcagtgtttc

SEQ ID NO: 513615 - DNA, 120 bp, Artificial Sequence
  ENSG00000164627_65 (sequence is synthesized)
cttgaatacaagctcctcctcaccttgcgaaaagtggcctctgagtgtagccctgaatgcatctcccaaggaataggaggaagcagcaaccttttcagagttaactgctttatttgggtt

SEQ ID NO: 513616 - DNA, 120 bp, Artificial Sequence
  ENSG00000164627_66 (sequence is synthesized)
ttccatggcctcgtgccagccagcagggctgagccagtttcacccacactgagagggaactcagcaaagagcaagcagcatgccagctggtactcttccctctccattcactcagctcct

SEQ ID NO: 513617 - DNA, 120 bp, Artificial Sequence
  ENSG00000164627_67 (sequence is synthesized)
gatctcaggagggcagcccctccccaggccagcacccctccccttctggccccaggtgtgggatgttgttgttttcttttctccgaaacatctcctgggtttgtcttttccatcactgtc

SEQ ID NO: 513618 - DNA, 120 bp, Artificial Sequence
  ENSG00000164627_68 (sequence is synthesized)
tttagactgaggcaagcagtccccatgccttcagccccatgttttgggggtaacctgtgctttgacatgctttgctaaaaactttctaagtctccctctggtgctgggaccagccatgac

SEQ ID NO: 513619 - DNA, 120 bp, Artificial Sequence
  ENSG00000164627_69 (sequence is synthesized)
caacaacgtcatccatgcaggccacccctaacatagtccaggcctcatgtgggtctcagttcccttttcttctttcaggaagttctccagtgcatgcatagggttgaccagatgtcccaa

SEQ ID NO: 513620 - DNA, 120 bp, Artificial Sequence
  ENSG00000164627_70 (sequence is synthesized)
ggtgctctaggacttatgcctatgaagctgttttagggcttcctagtcagtccctggttccaggaaagcagcctgatgaggagatcattcccgctggctggtgtggcatttcttttatgg

SEQ ID NO: 513621 - DNA, 120 bp, Artificial Sequence
  ENSG00000164627_71 (sequence is synthesized)
cactacctgggattgggccaccagacctgcgctaacatgctgatttgatggactcttaacatcataggacaaagaatcgtcatgtgaaccaattagacaataaacaaatgcctaagtgcc

SEQ ID NO: 513622 - DNA, 120 bp, Artificial Sequence
  ENSG00000164627_72 (sequence is synthesized)
acagtcctgaggggtgcagcgggtggcactggaagggcctcctcagcaggttgtcagccagctggaagagcctggggccacctgtctggtcagagtctctctgctgtgggcctcttggag

SEQ ID NO: 513623 - DNA, 120 bp, Artificial Sequence
  ENSG00000164627_73 (sequence is synthesized)
ccagggctggttttgtggtctgactgaagtgacaatgaaattaataggatcctgatgctgtgactgaggccatttccctgtgtctccaaacaggaatgagagaggaaatgtcattaggat

SEQ ID NO: 513624 - DNA, 120 bp, Artificial Sequence
  ENSG00000164627_74 (sequence is synthesized)
tacccaccatttgtatacaggagtacaacagcacagtgtggttgagactacagggcaaacattgtgctaagttagatttcaaagaatttttgatcaggatgcaaaccaagagaccgtttt

SEQ ID NO: 513625 - DNA, 120 bp, Artificial Sequence
  ENSG00000164627_75 (sequence is synthesized)
tgaaaacattgccaaaccagttgctgggagtcctacaggaactggatcaacccagcaagtctgcagttcccaaggtcttcaggatgaggcaccagtgcagttatgtagtatttttccgcc

SEQ ID NO: 513626 - DNA, 120 bp, Artificial Sequence
  ENSG00000164627_76 (sequence is synthesized)
aaagtgatatgttttaaactgacagattttcattgttccatttgatgctaatattttcttctaacaatagcttttctcttaatgatgccttttacttatgtaaacatgtttttctcataa

SEQ ID NO: 513627 - DNA, 120 bp, Artificial Sequence
  ENSG00000164627_77 (sequence is synthesized)
aaacttaaatagtcattttgctttttattaatggaatcaccaccaagcaatctttataagattgtcatttatatggctacattaaataacacagttctgttttcatacatagaaattcta

SEQ ID NO: 513628 - DNA, 120 bp, Artificial Sequence
  ENSG00000164627_78 (sequence is synthesized)
ataatataaaaaattatgtagccaaaaatattgaaacatttatacatgaaaagcttgagtcacagaaacctagggttgaaaggaacttcaaggtctttagccttcctccaagaaatataa

SEQ ID NO: 513629 - DNA, 120 bp, Artificial Sequence
  ENSG00000164627_79 (sequence is synthesized)
cttacaaaagtgagcagaagtttttatatattcacttgcccttaggctcttaatttaactccacactgagcattttcgacactgacttgttttgagaaaggttatcataagggagctttt

SEQ ID NO: 513630 - DNA, 120 bp, Artificial Sequence
  ENSG00000164627_80 (sequence is synthesized)
ccgtttctgctacctcaaatgcgtgtatcttttttcttagcctttcttcctttactcttctctcagaaatatttctctttactatccttactacatggagctttgtttccagctaagttt

SEQ ID NO: 513631 - DNA, 120 bp, Artificial Sequence
  ENSG00000164627_81 (sequence is synthesized)
gcttttttcagaagtttatctcctaattcagttccaaccagggttgccagatttagaaaatgaaaaatataggactcccagttaaatgtgaatttcagataaatggtgaacacgttttta

SEQ ID NO: 513632 - DNA, 120 bp, Artificial Sequence
  ENSG00000164627_82 (sequence is synthesized)
tgcaaccttgtctgtaaatttcctttgctgaagttcacatctccatcagtgcactgaactacgcagaggacactcttctgtggctgcattttcctctgcctgcagccatttccatctgga

SEQ ID NO: 513633 - DNA, 120 bp, Artificial Sequence
  ENSG00000164627_83 (sequence is synthesized)
tcctgctctgttctccccttgctggtttctcagcttacctgcagtcccccattggccactcttcttgagctgtctcctgttggtggcacagcagtgtttattatgcttgacactcctagg

SEQ ID NO: 513634 - DNA, 120 bp, Artificial Sequence
  ENSG00000164627_84 (sequence is synthesized)
ttaccttgagtcctcctttactcttgtcctggacaataacaattcctgttcattcttcttccgcagggggatctttccctccttccctcctcatctttacttccccttccccttctccct

SEQ ID NO: 513635 - DNA, 120 bp, Artificial Sequence
  ENSG00000164627_85 (sequence is synthesized)
cctgtctgtccctgcttgtctgttccctacactgccctcattcaggtttctgcccacccacttgcccacccagcctcctgctctagacactccctgtccaggccatcttgcactgcctgg

SEQ ID NO: 513636 - DNA, 120 bp, Artificial Sequence
  ENSG00000164627_86 (sequence is synthesized)
ttaatcattcagaaatattgtaccaattctactctttccctccttcagtgacttactattgtctgcagaatgaagtataagttccttattcaaggactcatatgcaggaactttccagaa

SEQ ID NO: 513637 - DNA, 120 bp, Artificial Sequence
  ENSG00000164627_87 (sequence is synthesized)
ttgtcctcttcctatttccctagtgccattgacatcgttactttgcatcagtgcctaccaccctttccgatactctcactctttcactataatatattattgaaaactcccttcgggaag

SEQ ID NO: 513638 - DNA, 120 bp, Artificial Sequence
  ENSG00000164627_88 (sequence is synthesized)
tcgggaagttttaaattatgtaatcatttggcatacagataaaaggaagcattattttagtttatatcactgtattagtaaatgttacattatatagtttatcctaataaaatgtaataa

SEQ ID NO: 513639 - DNA, 120 bp, Artificial Sequence
  ENSG00000164627_89 (sequence is synthesized)
ttatataaatagcaagaaatgttttgacttttccctatttagcaaatgacacacactttcttgtatttgaattaattagataattaaaaatgtgatttttaaataaaatttaaaatggca

SEQ ID NO: 513640 - DNA, 120 bp, Artificial Sequence
  ENSG00000164627_90 (sequence is synthesized)
ctgaaacagagagataacgaaatcagtatcctttctgaagtgatgaagaaacttcctctatcctggtttgaaaggggaatgagagaggaaatgtcattaggatgccaggaggcttttgaa

SEQ ID NO: 513641 - DNA, 120 bp, Artificial Sequence
  ENSG00000164627_91 (sequence is synthesized)
tcagcaaaggccctggtcaggtatcagcatcacacagtgttcctgctggagagaggagacagcatgcaaagtcaagattcaggtggaactgaactgctagggtggattttgttgctgtcc

SEQ ID NO: 513642 - DNA, 120 bp, Artificial Sequence
  ENSG00000164627_92 (sequence is synthesized)
ctacccttccagaagccctatagcattacagtgctgaatgagaaagagagttaacaaagttattagccccaagacaaaaactagttcagaatttaaggaaaataaacatattagacattg

SEQ ID NO: 513643 - DNA, 120 bp, Artificial Sequence
  ENSG00000164631_0 (sequence is synthesized)
agtgccctcgcttcctgtgcgtccccaggtcaccgctcgccctagttcccaggctttggcctccggtgggcgagaatcgcggagcctgcggggctgggcgccgaagagccgggccggcac

SEQ ID NO: 513644 - DNA, 80 bp, Artificial Sequence
  ENSG00000164631_1 (sequence is synthesized)
ccaagcgggcgcggggctgtgcgggccaggcggaggctcaagcggggatccccgagcacgacccccggagccgacggcgc

SEQ ID NO: 513645 - DNA, 120 bp, Artificial Sequence
  ENSG00000164631_2 (sequence is synthesized)
gcggcgggacccgggcccggcccgtgtgcgtcctcgacggcccggccccggctccgcaggacggtgagccccagggagacggatctgggctccgggagggacgccccgcctggatttgtc

SEQ ID NO: 513646 - DNA, 120 bp, Artificial Sequence
  ENSG00000164631_3 (sequence is synthesized)
gatttgtcccgtaggcccggcccgggcccctctggagcagaacggccttggtgaggtggacaggaagggacctcgcgagcagacgcgcgcccgcgacagcaatcccgccccggcctgtcg

SEQ ID NO: 513647 - DNA, 120 bp, Artificial Sequence
  ENSG00000164631_4 (sequence is synthesized)
ggagcggtggggcagaggctgcggagccccaggaggatctgcctccgctttcacagtcctccagatttttccaagagcagcagaaaatgaataaatccctggggccagtgtcattcaagg

SEQ ID NO: 513648 - DNA, 120 bp, Artificial Sequence
  ENSG00000164631_5 (sequence is synthesized)
acgtggctgtggacttcacccaggaggaatggcagcagctggatcctgagcagaagataacttacagggatgtgatgctggagaactacagcaatctagtttctgtggggtatcacatta

SEQ ID NO: 513649 - DNA, 120 bp, Artificial Sequence
  ENSG00000164631_6 (sequence is synthesized)
tcaaaccggatgttatcagcaagttggagcaaggagaagagccatggatagtagaaggagaattcctacttcagagctatccagatgaagtctggcaaactgatgacctaatagagagaa

SEQ ID NO: 513650 - DNA, 120 bp, Artificial Sequence
  ENSG00000164631_7 (sequence is synthesized)
tccaggaagaggaaaataaaccttcaaggcaaactgtgttcattgagaccctgattgaagagagaggtaatgttcctggtaaaacttttgatgtagaaacgaaccctgttccttcaagaa

SEQ ID NO: 513651 - DNA, 120 bp, Artificial Sequence
  ENSG00000164631_8 (sequence is synthesized)
aaatagcctataaaaatagcctctgtgactcatgtgaaaagtgtttaacgtctgtttcagaatatattagtagtgatggaagctatgcaagaatgaaagctgatgaatgtagtggatgtg

SEQ ID NO: 513652 - DNA, 120 bp, Artificial Sequence
  ENSG00000164631_9 (sequence is synthesized)
ggaaatcactcctccatattaagcttgagaaaactcatccaggagatcaagcttatgaatttaatcaaaatggggaaccttatactctaaatgaagaaagtctttatcagaaaattcgta

SEQ ID NO: 513653 - DNA, 120 bp, Artificial Sequence
  ENSG00000164631_10 (sequence is synthesized)
ttttggagaaaccttttgaatatattgaatgccagaaagccttccaaaaggacactgtttttgttaatcacatggaagaaaagccctataagtggaatggatctgaaatagcctttctcc

SEQ ID NO: 513654 - DNA, 120 bp, Artificial Sequence
  ENSG00000164631_11 (sequence is synthesized)
agatgtcggacctcactgtacatcagacatctcatatggaaatgaagccctatgaatgcagtgaatgtgggaaatccttctgtaaaaagtcaaaatttattatacatcagaggactcaca

SEQ ID NO: 513655 - DNA, 120 bp, Artificial Sequence
  ENSG00000164631_12 (sequence is synthesized)
caggagagaaaccttacgaatgtaatcagtgtgggaaatccttctgccagaagggaacccttactgtgcatcagagaacacacacaggggagaagccctatgaatgtaatgaatgtggga

SEQ ID NO: 513656 - DNA, 120 bp, Artificial Sequence
  ENSG00000164631_13 (sequence is synthesized)
agaacttttaccagaagttacacctcattcagcatcagagaactcactcaggagagaagccctatgaatgtagttattgtggaaaatccttttgccagaagacacacctcacacaacatc

SEQ ID NO: 513657 - DNA, 120 bp, Artificial Sequence
  ENSG00000164631_14 (sequence is synthesized)
agagaacacattcaggagagagaccttatgtttgtcatgactgtgggaaaaccttctcgcagaagtcagcacttaatgaccatcagaaaattcacacaggtgtgaaactctacaagtgta

SEQ ID NO: 513658 - DNA, 120 bp, Artificial Sequence
  ENSG00000164631_15 (sequence is synthesized)
gtgaatgtgggaaatgcttctgccgcaagtctactctcacgacccacctgaggacccacacaggagagaaaccgtatgaatgtaatgagtgtggaaaattcttctctcggttgtcatatc

SEQ ID NO: 513659 - DNA, 120 bp, Artificial Sequence
  ENSG00000164631_16 (sequence is synthesized)
tcactgtacattatagaactcattcaggagagaaaccctatgaatgtaatgaatgtggaaaaaccttctacctgaattcagccctcatgagacatcagagagtgcacacaggagagaaac

SEQ ID NO: 513660 - DNA, 120 bp, Artificial Sequence
  ENSG00000164631_17 (sequence is synthesized)
cttacgaatgtaatgaatgtggaaagttattctcccagttgtcatacctcactatccatcatagaactcattcaggagtaaaaccctatgaatgtagtgaatgtgggaaaaccttctacc

SEQ ID NO: 513661 - DNA, 120 bp, Artificial Sequence
  ENSG00000164631_18 (sequence is synthesized)
agaactcagccctttgtagacatcggagaatacacaaaggagagaagccctatgaatgctatatatgtggaaaattcttctctcagatgtcatacctcactatacatcatagaattcatt

SEQ ID NO: 513662 - DNA, 120 bp, Artificial Sequence
  ENSG00000164631_19 (sequence is synthesized)
caggagagaagccctatgaatgtagtgaatgtgggaaaaccttctgccagaattcagcccttaatcgacatcagagaacacacacaggagagaaagcctacgaatgttatgaatgtggga

SEQ ID NO: 513663 - DNA, 120 bp, Artificial Sequence
  ENSG00000164631_20 (sequence is synthesized)
agtgcttctctcagatgtcctatctcactatacatcatcgaattcattcaggagagaaaccctttgaatgtaatgagtgtggaaaagccttctctcggatgtcatacctcactgtacatt

SEQ ID NO: 513664 - DNA, 120 bp, Artificial Sequence
  ENSG00000164631_21 (sequence is synthesized)
actgaatgtggaaaaaaattctaccacaaatcagcattcaacagccatcagagaattcataggagaggcaatatgaatgtaatagatgtgggaaggcttctctgaagtcagacctcattt

SEQ ID NO: 513665 - DNA, 120 bp, Artificial Sequence
  ENSG00000164631_22 (sequence is synthesized)
tatatcagagaaccctttcagtatagtgaatcagaaactcctgcctgaagtcaaacaccttgtacatcagagagttcacacaggttagtgtggacatccccttgtgtgttggactcataa

SEQ ID NO: 513666 - DNA, 120 bp, Artificial Sequence
  ENSG00000164631_23 (sequence is synthesized)
tctgaagactcacagaatggaaaccatgattataacaagaccacatggtataacaatactagactatagacaagtaaaaatttataaatattaagaatgtatatacatgtcaccatggat

SEQ ID NO: 513667 - DNA, 120 bp, Artificial Sequence
  ENSG00000164631_24 (sequence is synthesized)
tggaactgttttgcatatcagggaaatcatagccaaggggaaatctatcagtataaggaatgtggaagacataatcctttggaaactgttaatactaaaagatatgtttctgatacaata

SEQ ID NO: 513668 - DNA, 120 bp, Artificial Sequence
  ENSG00000164631_25 (sequence is synthesized)
gcaaacttgaaaaaaaaaaaagaaatagaagattcctgctgtgaataaacatacttcttgtgtaaatagaaactgtaaagtcatcaggatagctagttaagtcggtaaccttaaactcat

SEQ ID NO: 513669 - DNA, 120 bp, Artificial Sequence
  ENSG00000164631_26 (sequence is synthesized)
gtaagcagttcccaaagaacataggacttatgtttggggagagggttgtttttattacagtacattacaggaattgtatgttcacttcgaatcatgtttgaaaaaacgttgtatccttat

SEQ ID NO: 513670 - DNA, 120 bp, Artificial Sequence
  ENSG00000164631_27 (sequence is synthesized)
tttgtaattcatatagtaagagtattctaaacagcactacattaatatcatttgataggtataaagtatactttttcttgcactcttctctaggatttaatgcattgatcattcttaatg

SEQ ID NO: 513671 - DNA, 120 bp, Artificial Sequence
  ENSG00000164631_28 (sequence is synthesized)
aacaatatcagctctaaaggaccaatgcttttataatgttttcaactgtatctgagtcagccagagagataaatatccatgtataaaatagatagaaaactttgcttggtaatttaaaat

SEQ ID NO: 513672 - DNA, 120 bp, Artificial Sequence
  ENSG00000164631_29 (sequence is synthesized)
taataatgccagttttccaagagtgagaaaatcattgcactctatacagttttaagatatacttaaaatattcccatttgtatctatttttttttctactgttttttatttggacactta

SEQ ID NO: 513673 - DNA, 120 bp, Artificial Sequence
  ENSG00000164631_30 (sequence is synthesized)
cataacagtgcagagcacaatgctgtgtaacataggaattcactgtgttttcatttgatgtcgtactggttttaaaccttgtgctctactccttcctgttaatgaattaagaacacattc

SEQ ID NO: 513674 - DNA, 120 bp, Artificial Sequence
  ENSG00000164631_31 (sequence is synthesized)
taacaagggtctgtggcagacattgccgagtgactttctaacataggaattcactgtgttttcatttgatgtcgtactggttttaaaccttgtgctctactccttcctgttaatgaatta

SEQ ID NO: 513675 - DNA, 120 bp, Artificial Sequence
  ENSG00000164631_32 (sequence is synthesized)
agaacacattctaacaagggtctgtggcagacattgccgagtgactttcttagtcactcccttactctgctggcggagtttggttatccatttatcctcaaaaggaagtgagataaatcc

SEQ ID NO: 513676 - DNA, 120 bp, Artificial Sequence
  ENSG00000164631_33 (sequence is synthesized)
tgattagttttaaccagtgacactccccttctcgttgccagcagttgatttacagtggtcacagggcccaattctagacataaaacaaaggatatacctgacagactacttctggaaaag

SEQ ID NO: 513677 - DNA, 120 bp, Artificial Sequence
  ENSG00000164631_34 (sequence is synthesized)
gttttctcaaaggcccaaggattcaagcaaagggaagtggaatcttgtggtgaacagtaccttgtctggatgtggtgcctggtaaccatctttcagcaatggattatagtttaatcatgg

SEQ ID NO: 513678 - DNA, 120 bp, Artificial Sequence
  ENSG00000164631_35 (sequence is synthesized)
cctgagcagaaatactgaaagaccctgagacctggatgatgtctttgagccaccaaaccaagcagccttgtagccactcctcctttggactgtttcttttgtgagagactaaacttattt

SEQ ID NO: 513679 - DNA, 120 bp, Artificial Sequence
  ENSG00000164631_36 (sequence is synthesized)
ttaagccagttgatttaggatgctctattactaataactgaagacattctaattggtacagactgaaacctttataggagttatgcagttcagaagtggactttaggtaagtcatttatt

SEQ ID NO: 513680 - DNA, 120 bp, Artificial Sequence
  ENSG00000164631_37 (sequence is synthesized)
ttaagctgttgatatagagatttattttctgtaaattttgacgtaaatagtttgagcattagaaatcaacttgaaacaataaaatgtatgcttccttgaactgtcatatcgttgacctgc

SEQ ID NO: 513681 - DNA, 120 bp, Artificial Sequence
  ENSG00000164631_38 (sequence is synthesized)
aaaattcacctttggaacgtgacacaatgttaggcatacctccttttttctaatacatggaatacattttgttggaggtaatttatgtgattcatataccactgctacagtgttagctga

SEQ ID NO: 513682 - DNA, 120 bp, Artificial Sequence
  ENSG00000164631_39 (sequence is synthesized)
caacatatagtatgaggtaaggatctaattctgtttcctctcacatgattacttgatagctaagcatctgattggtttactgctttaccactgagctgaaatgccgtgttttccatttat

SEQ ID NO: 513683 - DNA, 120 bp, Artificial Sequence
  ENSG00000164631_40 (sequence is synthesized)
taaaatcacacatggctcctgtttttgtcactcagcactttttctccatattcttcaagacgattgtgagtatggtacgtaacaggaattacatctggtaagttgtatagttttgtgtag

SEQ ID NO: 513684 - DNA, 120 bp, Artificial Sequence
  ENSG00000164631_41 (sequence is synthesized)
gaactctatattcatagcatatttgtggaaatgatacctatggaggtttctcacactggtgtgtcattatacattaattgtacaatatgcattttcagtaaaatatttgaaaactgtaaa

SEQ ID NO: 513685 - DNA, 80 bp, Artificial Sequence
  ENSG00000164638_0 (sequence is synthesized)
cgtggcgggcgcgccgaggaccccaggccgggccgggccgagcagaggctgccatgggctccgtggggagccagcgcctt

SEQ ID NO: 513686 - DNA, 120 bp, Artificial Sequence
  ENSG00000164638_1 (sequence is synthesized)
ctgccatgggctccgtggggagccagcgccttgaggagcccagcgtggcaggcacaccagacccgggcgtagtgatgagcttcaccttcgacagtcaccagctggaggaggcggcggagg

SEQ ID NO: 513687 - DNA, 120 bp, Artificial Sequence
  ENSG00000164638_2 (sequence is synthesized)
cggctcagggccagggccttagggccaggggcgtcccagctttcacggatactacattggacgagccagtgcccgatgaccgttatcacgccatctactttgcgatgctgctggctggcg

SEQ ID NO: 513688 - DNA, 120 bp, Artificial Sequence
  ENSG00000164638_3 (sequence is synthesized)
tgggcttcctgctgccatacaacagcttcatcacggacgtggactacctgcatcacaagtacccagggacctccatcgtgtttgacatgagcctcacctacatcttggtggcactggcag

SEQ ID NO: 513689 - DNA, 120 bp, Artificial Sequence
  ENSG00000164638_4 (sequence is synthesized)
ctgtcctcctgaacaacgtcctggtggagagactgaccctgcacaccaggatcaccgcaggctacctcttagccttgggccctctcctttttatcagcatctgcgacgtgtggctgcagc

SEQ ID NO: 513690 - DNA, 120 bp, Artificial Sequence
  ENSG00000164638_5 (sequence is synthesized)
tcttctctcgggaccaggcctacgccatcaacctggccgctgtgggcaccgtggccttcggctgcacagtgcagcaatccagcttctacgggtacacggggatgctgcccaagcggtaca

SEQ ID NO: 513691 - DNA, 120 bp, Artificial Sequence
  ENSG00000164638_6 (sequence is synthesized)
cgcagggggtgatgaccggggagagcacggcgggcgtgatgatctctctgagccgcatcctcacgaagctgctgctgcccgacgagcgcgccagcacgctcatcttcttcctggtgtcgg

SEQ ID NO: 513692 - DNA, 120 bp, Artificial Sequence
  ENSG00000164638_7 (sequence is synthesized)
tggcgctggagctgctgtgtttcctgctgcacctgttagtgcggcgcagccgcttcgtgctcttctataccacacggccgcgtgacagccaccggggcaggccaggcctgggcaggggct

SEQ ID NO: 513693 - DNA, 120 bp, Artificial Sequence
  ENSG00000164638_8 (sequence is synthesized)
atggctaccgcgtgcaccacgacgttgtcgccggggacgtccacttcgagcacccagccccggccctggcccccaacgagtccccaaaggacagcccagcccacgaggtgaccggcagcg

SEQ ID NO: 513694 - DNA, 120 bp, Artificial Sequence
  ENSG00000164638_9 (sequence is synthesized)
gcggggcctacatgcgctttgatgtgccgcggccaagggtccagcgcagctggcccaccttcagagccctgttactgcaccgctacgtggtggcgcgggtgatctgggccgacatgctct

SEQ ID NO: 513695 - DNA, 120 bp, Artificial Sequence
  ENSG00000164638_10 (sequence is synthesized)
ccatcgccgtgacctacttcatcacgctgtgcctgttccccggcctcgagtctgagatccgccactgcatcctgggcgagtggctgcccatcctcatcatggctgtgttcaacctgtcag

SEQ ID NO: 513696 - DNA, 120 bp, Artificial Sequence
  ENSG00000164638_11 (sequence is synthesized)
ggtcttcatccccctcttcatcctgtgcgtctaccccagcggcatgcccgccctccgtcaccccgcctggccctgcatcttctcactgctcatgggcatcagcaacggctacttcggcag

SEQ ID NO: 513697 - DNA, 120 bp, Artificial Sequence
  ENSG00000164638_12 (sequence is synthesized)
cgtgcccatgatcctggcggcaggcaaagtgagccccaagcagcgggagctggcagggaacaccatgaccgtgtcctacatgtcagggctgacgctggggtccgccgtggcctactgcac

SEQ ID NO: 513698 - DNA, 120 bp, Artificial Sequence
  ENSG00000164638_13 (sequence is synthesized)
ctacagcctcacccgcgacgctcacggcagctgcctgcacgcctccaccgccaatggttccatcctcgcaggcctctgagccagccccgcccactgccagggacgccgagggcctgacca

SEQ ID NO: 513699 - DNA, 120 bp, Artificial Sequence
  ENSG00000164638_14 (sequence is synthesized)
ggggccccgaggcctgagggcccctcccctgtccccacctcagtgcctgcggggccctgagcctccccctgtgccagcagccccactccctcagggtccagccatgccccaccctggact

SEQ ID NO: 513700 - DNA, 120 bp, Artificial Sequence
  ENSG00000164638_15 (sequence is synthesized)
gaagttctgcaaagtcctccgaggaccggaacacgtttctgcgacccggggctctggccagcactgtgttctgcgtttggtctcatacctgcgtctaccttccatctgtgtccagcggcc

SEQ ID NO: 513701 - DNA, 120 bp, Artificial Sequence
  ENSG00000164638_16 (sequence is synthesized)
ccggctccagcccagccagcactctgcagggtcacacgcaccgtgtccccacccaggacagcagacacccgccagagtgtgcgcgcccagtgactgcaccccggccctcatcacccaccg

SEQ ID NO: 513702 - DNA, 120 bp, Artificial Sequence
  ENSG00000164638_17 (sequence is synthesized)
gcactgatcggggcaccgcctggcccagcctccaccagggacccctcctcatgaactctggagccctgagaggagaggggcagccccccaccttgtcaccctcagggcttccccttctgt

SEQ ID NO: 513703 - DNA, 120 bp, Artificial Sequence
  ENSG00000164638_18 (sequence is synthesized)
cctcattcttagagactgcttctcccaaacataacgcgttagccatgaaggagtcggagccctgggtccgaatggacccgcctgcggtctgcatcagcctctgggaaaccacagcagtga

SEQ ID NO: 513704 - DNA, 120 bp, Artificial Sequence
  ENSG00000164638_19 (sequence is synthesized)
tgccagctgggcacgtcaggacctccccacacacccacacgatgccacaggtcagggggctgtgcctgactagggagccctcccattgccttcctggcccgggatagaagaggggaggta

SEQ ID NO: 513705 - DNA, 120 bp, Artificial Sequence
  ENSG00000164638_20 (sequence is synthesized)
agtctgggggctacgaagccgggcccccacaccctggctgaagtcagcttgacctaggtcttgaccctcatccagcaagggactcgacagacccaagggtccctggaacgtagggagggg

SEQ ID NO: 513706 - DNA, 120 bp, Artificial Sequence
  ENSG00000164638_21 (sequence is synthesized)
ctgggggtcagtccagcccgggcctcccagaacaccaggcccgtgtgggtggcaccctgaggtcaggggatcctaagggtgtccttccagagacggtgtttccagggggaggaccgcccc

SEQ ID NO: 513707 - DNA, 120 bp, Artificial Sequence
  ENSG00000164638_22 (sequence is synthesized)
cgcttccagatccccggccccggctgtgactgccctgtttcacccctgctgtgtcccatcccccgtctgtccactaactgtaccgcaccggccattaaaagatgaaggcagaccgctgca

SEQ ID NO: 513708 - DNA, 120 bp, Artificial Sequence
  ENSG00000164638_23 (sequence is synthesized)
ctcgggataccggtggaactcgggctgccccgcataagccggtcctcagtcttcccatctgtgaggtgggccgggtggatcagggagcaggagggtgtcctcacactgggtaggcttggt

SEQ ID NO: 513709 - DNA, 120 bp, Artificial Sequence
  ENSG00000164638_24 (sequence is synthesized)
ttgtgggcagcgctgggtagtggggtgagagctgggagcacttagggtttgtcgctcaccttgaccgcccgccccccccaccccttcgtgaggatcagggaggatggccacatgcagccc

SEQ ID NO: 513710 - DNA, 120 bp, Artificial Sequence
  ENSG00000164638_25 (sequence is synthesized)
atttgaaggggaaacaaagtgggcggggcttggcccctgcccctcagggactgcactgcatcctaggagtcagagcctcctggcttcgagcctcatcccttttgctgatttgtgcaattt

SEQ ID NO: 513711 - DNA, 120 bp, Artificial Sequence
  ENSG00000164638_26 (sequence is synthesized)
agcctcatcccttttgctgatttgtgcaatttggacaaaatcctgcactgttctgtgcctcatttctttctttttttattttttttttgagactgagtcttgctcttgtcacccaggctg

SEQ ID NO: 513712 - DNA, 66 bp, Artificial Sequence
  ENSG00000164638_27 (sequence is synthesized)
agcctctcaagtagctgggattacaggtacgcaccaccacacctggctaatttgtcttgtggagac

SEQ ID NO: 513713 - DNA, 72 bp, Artificial Sequence
  ENSG00000164638_28 (sequence is synthesized)
gttcctgtgcctcatttttgttttttctttctttacaagacaggctctcgctctgtcactgaggctggagtg

SEQ ID NO: 513714 - DNA, 68 bp, Artificial Sequence
  ENSG00000164638_29 (sequence is synthesized)
actgcacccgtcctgtgcctcatttttgttttttctttctttacaagacaggctctcgctctgtcact

SEQ ID NO: 513715 - DNA, 120 bp, Artificial Sequence
  ENSG00000164638_30 (sequence is synthesized)
tgaatacaggcgcgtgccaccacgtctggccagattcttttattttgtgtagagatggggtcttgctgttgcccagactggtctcaaagtctgggcctcaagtgttccccctgccttggc

SEQ ID NO: 513716 - DNA, 120 bp, Artificial Sequence
  ENSG00000164638_31 (sequence is synthesized)
caaagtgccaggattacaggtatgagtcactgcgcctggcctgttctgtccttagcttccccaaggaatggggctggtccaggttttgatgtgggtcccgtaaaggagggcacgagggcc

SEQ ID NO: 513717 - DNA, 120 bp, Artificial Sequence
  ENSG00000164638_32 (sequence is synthesized)
ggccacctatgctctggcaggcatcctccctggggcccaggtgggcggccacttgggccaagactgcgccaggtgacaccagagtgtttcccagagcccatgccgggcccttcccttgcc

SEQ ID NO: 513718 - DNA, 120 bp, Artificial Sequence
  ENSG00000164638_33 (sequence is synthesized)
cgaggccggctggctgccctccatgggttaccctctttgcaaagccccgaatgtcctctgcaggccacccacactaaccaggtcagtcactgggcagccagacccccacctatagcttcc

SEQ ID NO: 513719 - DNA, 120 bp, Artificial Sequence
  ENSG00000164638_34 (sequence is synthesized)
ctaggccccagtgcagagatgccgtccacccccatctaggtgagggcttggggccactcttagcattagtatcattttcttctagtatcattttgtggtaggcatggctggaaatgtgca

SEQ ID NO: 513720 - DNA, 75 bp, Artificial Sequence
  ENSG00000164638_35 (sequence is synthesized)
tctagtatcattttgtggtaggcatggctggaaatgtgcagctttgctttttttttttttttttttggttcagct

SEQ ID NO: 513721 - DNA, 81 bp, Artificial Sequence
  ENSG00000164638_36 (sequence is synthesized)
acaggcatgagccaccatgcctggcactggttttttgagatggaatctcgttatgtcaccccattgccgtgggttcaagcg

SEQ ID NO: 513722 - DNA, 87 bp, Artificial Sequence
  ENSG00000164638_37 (sequence is synthesized)
tctctgtcacccccaggccagagtgcagtggtgcgatctcaactcactgcaacctccacccgccgggtccctgtgattttcccacct

SEQ ID NO: 513723 - DNA, 71 bp, Artificial Sequence
  ENSG00000164638_38 (sequence is synthesized)
cacccccaggccagagtgcagtggtgcgatctcaactcactgcaacctccacccgccgggtccctgtgatt

SEQ ID NO: 513724 - DNA, 74 bp, Artificial Sequence
  ENSG00000164638_39 (sequence is synthesized)
agtagagacggggtttcaccacattgctcaggctggtctgaaactcctggcctgacgctctaccacacctggct

SEQ ID NO: 513725 - DNA, 120 bp, Artificial Sequence
  ENSG00000164638_40 (sequence is synthesized)
gccgatgagctcatttagatggctgcatggggtcaccgcccctgcacgcgtggcacccaacttcttccagtcgaatcctgcttcttggtgccctgatatggcagaatgcccccagacacc

SEQ ID NO: 513726 - DNA, 120 bp, Artificial Sequence
  ENSG00000164638_41 (sequence is synthesized)
acccctactccagcccctgaaataaaccactccagacaattttatttttccaattaaatcttttctttttttttatgaaaaaagatcacacagaatttgccaacaaacaaaattccaaaa

SEQ ID NO: 513727 - DNA, 120 bp, Artificial Sequence
  ENSG00000164638_42 (sequence is synthesized)
ctgcgacgtgtggctgcagctcttctctcgggaccaggcctacgccatcaacctggccgctgtgggcaccgtggccttcggctgcacagcaatccagcttctacgggtacacggggatgc

SEQ ID NO: 513728 - DNA, 120 bp, Artificial Sequence
  ENSG00000164638_43 (sequence is synthesized)
acagcctcctcttgtaaatagagagtacaaaggcttctccgagtagtgtgtatgccgggcagacgctgatgccacggggagaggccttagaaggagcacaggaaagtcccaggtaagaac

SEQ ID NO: 513729 - DNA, 120 bp, Artificial Sequence
  ENSG00000164645_0 (sequence is synthesized)
gagaacaccagaggactggcagttgggagcctgatggaggacaagtagggcctcgaggacaggtgcgtgacagaagcacaggaaaaaaaagaaaaatgaagaaataaaaacacgagttca

SEQ ID NO: 513730 - DNA, 120 bp, Artificial Sequence
  ENSG00000164645_1 (sequence is synthesized)
tcagtaaagaggtaccctggcagcataaatattatgataagctaaaagctggaatcatctggaaaaataaataagactcctcatgtccttttcggtccataaccagaagggcagcaaaag

SEQ ID NO: 513731 - DNA, 120 bp, Artificial Sequence
  ENSG00000164645_2 (sequence is synthesized)
gcctttgccactggaacctcttctttttctccaagtcccacgtagcaattacctgcactttcaagaagagaaacaacgactacacctaaagaaattccttcttgataggatgtttctagt

SEQ ID NO: 513732 - DNA, 120 bp, Artificial Sequence
  ENSG00000164645_3 (sequence is synthesized)
ggccaagatacaagcaaatgtagaaagaaaagatgttgctgactactatgaacaaatgtttcagtcagttttgaaacatcacctaggagaagcagtgacaggattgctgctcatctatcc

SEQ ID NO: 513733 - DNA, 120 bp, Artificial Sequence
  ENSG00000164645_4 (sequence is synthesized)
gatgaaacagtattttttattcaacaaatgaaaattatagtcatttctcataacattccaatgaggctttttatgcaatggcatgtttcagtgataaaagttccagttatgtatctcgac

SEQ ID NO: 513734 - DNA, 120 bp, Artificial Sequence
  ENSG00000164645_5 (sequence is synthesized)
gatgtgacacagtcacagtccctaaaggaggtcatcacagattttctcacacaaactcataaactgtcactctacctttgccagactatgaaagtaggcactaaaggaccaggcgataac

SEQ ID NO: 513735 - DNA, 120 bp, Artificial Sequence
  ENSG00000164645_6 (sequence is synthesized)
ttacaccaagttgcacctgacctactcctcccagaacaaatcataaagtacttgtgcaaatccgaagaattcatggacccggcaacatttataaacatgtataatagacccatacacatc

SEQ ID NO: 513736 - DNA, 120 bp, Artificial Sequence
  ENSG00000164645_7 (sequence is synthesized)
actctggattctgaggtggtatggcctgctccttcacgtttctaggattgagagggataatgtgcccatgtctcttaaggagtttgtgctacttaaataaaaaaaacatttttaaagtta

SEQ ID NO: 513737 - DNA, 120 bp, Artificial Sequence
  ENSG00000164647_0 (sequence is synthesized)
aggcgccgcgtggggcccgcacctctgggcagcagcggcagccgagactcacggtcaagctaaggcgaagagtgggtggctgaagccatactattttatagaattaatggaaagcagaaa

SEQ ID NO: 513738 - DNA, 120 bp, Artificial Sequence
  ENSG00000164647_1 (sequence is synthesized)
agacatcacaaaccaagaagaactttggaaaatgaagcctaggagaaatttagaagaagacgattatttgcataaggacacgggagagaccagcatgctaaaaagacctgtgcttttgca

SEQ ID NO: 513739 - DNA, 120 bp, Artificial Sequence
  ENSG00000164647_2 (sequence is synthesized)
tttgcaccaaacagcccatgctgatgaatttgactgcccttcagaacttcagcacacacaggaactctttccacagtggcacttgccaattaaaatagctgctattatagcatctctgac

SEQ ID NO: 513740 - DNA, 120 bp, Artificial Sequence
  ENSG00000164647_3 (sequence is synthesized)
ttttctttacactcttctgagggaagtaattcaccctttagcaacttcccatcaacaatatttttataaaattccaatcctggtcatcaacaaagtcttgccaatggtttccatcactct

SEQ ID NO: 513741 - DNA, 120 bp, Artificial Sequence
  ENSG00000164647_4 (sequence is synthesized)
cttggcattggtttacctgccaggtgtgatagcagcaattgtccaacttcataatggaaccaagtataagaagtttccacattggttggataagtggatgttaacaagaaagcagtttgg

SEQ ID NO: 513742 - DNA, 120 bp, Artificial Sequence
  ENSG00000164647_5 (sequence is synthesized)
gctgtactgcatgcaatttatagtctgtcttacccaatgaggcgatcctacagatacaagttgctaaactgggcatatcaacaggtccaacaaaataaagaagatgcctggattgagcat

SEQ ID NO: 513743 - DNA, 120 bp, Artificial Sequence
  ENSG00000164647_6 (sequence is synthesized)
gatgtttggagaatggagatttatgtgtctctgggaattgtgggattggcaatactggctctgttggctgtgacatctattccatctgtgagtgactctttgacatggagagaatttcac

SEQ ID NO: 513744 - DNA, 120 bp, Artificial Sequence
  ENSG00000164647_7 (sequence is synthesized)
tatattcagagcaagctaggaattgtttcccttctactgggcacaatacacgcattgatttttgcctggaataagtggatagatataaaacaatttgtatggtatacacctccaactttt

SEQ ID NO: 513745 - DNA, 120 bp, Artificial Sequence
  ENSG00000164647_8 (sequence is synthesized)
atgatagctgttttccttccaattgttgtcctgatatttaaaagcatactattcctgccatgcttgaggaagaagatactgaagattagacatggttgggaagacgtcaccaaaattaac

SEQ ID NO: 513746 - DNA, 120 bp, Artificial Sequence
  ENSG00000164647_9 (sequence is synthesized)
aaaactgagatatgttcccagttgtagaattactgtttacacacatttttgttcaatattgatatattttatcaccaacatttcaagtttgtatttgttaataaaatgattattcaagga

SEQ ID NO: 513747 - DNA, 120 bp, Artificial Sequence
  ENSG00000164647_10 (sequence is synthesized)
atatagaatatgttgactttaccccataaaaaataacaaatgtttttcaacagcaaagatcttatacttgttccaattaataatgtgctctcctgttgttttccctattgcttctaatta

SEQ ID NO: 513748 - DNA, 120 bp, Artificial Sequence
  ENSG00000164649_0 (sequence is synthesized)
gctcgggcgcggggcgttcttggtgcgccgggccgtggtgagtccgggctcccgtggccgcgtgctgggaggagactggagcccggttaggaagaatggagttggcgactcgctaccaga

SEQ ID NO: 513749 - DNA, 120 bp, Artificial Sequence
  ENSG00000164649_1 (sequence is synthesized)
tccctaaagaagtggctgacatctttaacgcccccagtgatgatgaagagtttgttggcttccgagatgatgttcccatggaaaccctctcgtcagaggagagctgcgatagttttgact

SEQ ID NO: 513750 - DNA, 120 bp, Artificial Sequence
  ENSG00000164649_2 (sequence is synthesized)
cactagagtcagggaaacagcaggatgtgcgctttcattccaaatacttcacagaagagctaagaagaatttttatagaggacactgactcagagactgaggattttgcaggatttacgc

SEQ ID NO: 513751 - DNA, 120 bp, Artificial Sequence
  ENSG00000164649_3 (sequence is synthesized)
agagtgatctgaatggaaagactaacccagaagtaatggtcgtggagtcagatttgagtgatgatggcaaagcatctttggtgagcgaggaagaggaagatgaagaagaagataaggcta

SEQ ID NO: 513752 - DNA, 120 bp, Artificial Sequence
  ENSG00000164649_4 (sequence is synthesized)
cccctagaagaagcaggtctagaagaagtagtattggtcttcgagtagcctttcagttccccaccaagaagctggccaacaaaccagataaaaacagttcttccgagcagttgttttcta

SEQ ID NO: 513753 - DNA, 120 bp, Artificial Sequence
  ENSG00000164649_5 (sequence is synthesized)
gcgcacgcttacagaatgagaaaaaaacaattcttgaaagaaagaaagactgtagacaggtgatacaaagggaagattctacctctgagtctgaggatgactctcgggatgagagccagg

SEQ ID NO: 513754 - DNA, 120 bp, Artificial Sequence
  ENSG00000164649_6 (sequence is synthesized)
agagttcagatgctttgctgaaaaggaccatgaacatcaaggagaacaaagccatgcttgcccagttattggcggaattgaactcgatgccagatttcttcccagtacgaaccccaacct

SEQ ID NO: 513755 - DNA, 120 bp, Artificial Sequence
  ENSG00000164649_7 (sequence is synthesized)
cagcttctaggaagaagacagtgaggcgggccttctcggagggacagatcacgcggcgtatgaacccaacccggagtgcgcggcctcctgagaagtttgctctagagaacttcactgtct

SEQ ID NO: 513756 - DNA, 120 bp, Artificial Sequence
  ENSG00000164649_8 (sequence is synthesized)
cagccgctaaatttgcggaagagttttacagcttccgaagaaggaagacaattggggggaaatgccgggagtacagacgacgtcaccgtatatcttcttttcggccagtggaggatatca

SEQ ID NO: 513757 - DNA, 120 bp, Artificial Sequence
  ENSG00000164649_9 (sequence is synthesized)
ccgaagaggacttagaaaatgttgccataactgttcgagataaaatctatgataaagttctgggtaacacgtgccatcagtgtcgacaaaagaccatcgacaccaagacagtgtgtcgga

SEQ ID NO: 513758 - DNA, 120 bp, Artificial Sequence
  ENSG00000164649_10 (sequence is synthesized)
accagggttgctgtggtgtgcgaggacagttctgtggaccatgcctgcggaaccgctatggggaggatgtcagatcggcattgctggacccggattgggtgtgtcccccctgtcgtggga

SEQ ID NO: 513759 - DNA, 120 bp, Artificial Sequence
  ENSG00000164649_11 (sequence is synthesized)
tctgcaattgcagctactgtcggaagcgtgacggccgctgtgccacaggaatcctcattcatctggccaagttttatggttatgacaatgttaaggaatatctggagagcttacaaaagg

SEQ ID NO: 513760 - DNA, 120 bp, Artificial Sequence
  ENSG00000164649_12 (sequence is synthesized)
tggtagaagacaattaagaggaaaacaaacagaaccagccacctcaccatagagtactccaacaagacatgcataccattggtgcctaagaaagatttttttacagttgtgtttttatac

SEQ ID NO: 513761 - DNA, 120 bp, Artificial Sequence
  ENSG00000164649_13 (sequence is synthesized)
agaaattctttgtagaaattactattttttgttaaagattgtttatatgcttacaaagatttctcaggaagacagcagagcagaggaatctatatagatgtatgcacagacctgtctgta

SEQ ID NO: 513762 - DNA, 120 bp, Artificial Sequence
  ENSG00000164649_14 (sequence is synthesized)
tgctgaactttgttaaaaatatctgccagttattaaaaagcacagtttaaatggggtggggttaaagttcaggtaagtaagttagagagaaaacattgtatgatcagctcctgcacttga

SEQ ID NO: 513763 - DNA, 120 bp, Artificial Sequence
  ENSG00000164649_15 (sequence is synthesized)
tctatctatctttggcttcccaaacagtaactcactccaggccaagtgtgccttagcacgagtgaccacagtttaatagaccacacacatcgtttaacctgctcttggtcattggaaatt

SEQ ID NO: 513764 - DNA, 120 bp, Artificial Sequence
  ENSG00000164649_16 (sequence is synthesized)
tacactgaacaaagtgcaattaactgtagaacagttttatttttattaaaacttgactgaacaaaaggggaccatcaacattgtagacactggacactggaggccttacagagtgctagc

SEQ ID NO: 513765 - DNA, 120 bp, Artificial Sequence
  ENSG00000164649_17 (sequence is synthesized)
ctcttccttcaggactcacctggggcctgctgcttttatattttgaaagagtttaagggctaataatttaatttgttgtttgttaaaaattaaaatctccgttctttccggctgcattgc

SEQ ID NO: 513766 - DNA, 78 bp, Artificial Sequence
  ENSG00000164649_18 (sequence is synthesized)
tgttaaaaattaaaatctccgttctttccggctgcattgcttttgcatgttcacatatgatgtacttttatgatgtag

SEQ ID NO: 513767 - DNA, 120 bp, Artificial Sequence
  ENSG00000164649_19 (sequence is synthesized)
ctcctaggttcaagtgattctcctacctcctgagtaactgggattacagtcgtgtgccaccacgctcagccctgagttagtttctagtatttttttctgactttcactctaaggatagcg

SEQ ID NO: 513768 - DNA, 120 bp, Artificial Sequence
  ENSG00000164649_20 (sequence is synthesized)
ttgaaaaaagaatgcacgtgtgagttactaaaaagttagaataatgtgcatgggaacagtgcagcaacatgctagaaaatcctcactgcactccagcagaggctagaggaatgccagtgt

SEQ ID NO: 513769 - DNA, 120 bp, Artificial Sequence
  ENSG00000164649_21 (sequence is synthesized)
taccttacgcttctagaagcagagccactccagccagaacccattttgcagtcttctcttcgctcttcagcctgaaggtccagatgtagctggggcctctcagtttggttctatacacag

SEQ ID NO: 513770 - DNA, 120 bp, Artificial Sequence
  ENSG00000164649_22 (sequence is synthesized)
ggcactcgtaggtctgtttggtttcttgtctgtccacgggggtggcttttgcaaagatgaccggcatagggcatgccagctccttgagacgggcttcaacaatggttcctgcttgggtgt

SEQ ID NO: 513771 - DNA, 120 bp, Artificial Sequence
  ENSG00000164649_23 (sequence is synthesized)
cccagcgggcgcctatggcaaaaacacagcggttgcaattgtgtggcagcttgctactaatgataatgatcaagtaagttgtttgatgcaataaacattcaacattctggttttgtcata

SEQ ID NO: 513772 - DNA, 120 bp, Artificial Sequence
  ENSG00000164649_24 (sequence is synthesized)
ggtgcgccgggccgtggtgagtccgggctcccgtggccgcgtgctgggaggagactggagcccggttaggaagaatggagttggcgactcgctaccagagcacttcgcaggcatagtttg

SEQ ID NO: 513773 - DNA, 120 bp, Artificial Sequence
  ENSG00000164649_25 (sequence is synthesized)
ttcccgtgtgacttacttacttatataaaccacgagtaccatccattctgtatctgtttgcattggaaaagctcaggcctgatattttccctattagggaatcttctcctttgctagatt

SEQ ID NO: 513774 - DNA, 120 bp, Artificial Sequence
  ENSG00000164649_26 (sequence is synthesized)
tttcaactcaactccacgttgcctttaaccaaaatttctccttgaggtgtatgacagaaatggaaggaacaaacaaacaaggcaggctgaggggaaagacacagattatgaagaggcagc

SEQ ID NO: 513775 - DNA, 120 bp, Artificial Sequence
  ENSG00000164649_27 (sequence is synthesized)
acttgttttattgagagtcgcgagactcactgcttccaccttgcttccgactggtgtttactttcctccacctgcgtgcctggcccgggagaaggggaggcggggccgccagcgttggaa

SEQ ID NO: 513776 - DNA, 120 bp, Artificial Sequence
  ENSG00000164649_28 (sequence is synthesized)
agctgctcgggcgcggggcgttcttggtgcgccgggccgtggtgagtccgggctcccgtggccgcgtgctgggaggagactggagcccggttaggaagaatggagttggcgactcgctac

SEQ ID NO: 513777 - DNA, 120 bp, Artificial Sequence
  ENSG00000164649_29 (sequence is synthesized)
ttcccttccatttgtatcttaaggctccagggaaaatgaaaaatagggattccttctggaaggagagcaagctgaccagtgaatagaagaattaatgttgttagattttccattgtcaga

SEQ ID NO: 513778 - DNA, 120 bp, Artificial Sequence
  ENSG00000164649_30 (sequence is synthesized)
gcaaaacttgcttacagtcctctagttttatgcaagtaatccctgtacctgtccttcagcaaagtgatttccctctgatttgttttgtttttcctgggccaggctgagagggaggtggag

SEQ ID NO: 513779 - DNA, 120 bp, Artificial Sequence
  ENSG00000164649_31 (sequence is synthesized)
tttgagagtttaaaatatttataatttttttataactgctcaacacatctccatgttctgcttgtgttcattgtgcaggggaaatgccgggagtacagacgacgtcaccgtatatcttct

SEQ ID NO: 513780 - DNA, 120 bp, Artificial Sequence
  ENSG00000164651_0 (sequence is synthesized)
attgtattgcacacctctaaaaaaaacactgcctctgatttatcaatataaaaaagatcctctgagaggaggagggcacttttgtgtgatggcaacttcacttctagggcgtggtgcttg

SEQ ID NO: 513781 - DNA, 120 bp, Artificial Sequence
  ENSG00000164651_1 (sequence is synthesized)
ctcccgaatcagacgccggcagccaaacttgtcccctcctgtagagtaggaagcggccgggcgccggggctgttgggggtgccaggaagaaccgaggttgggatcgactcctctggccat

SEQ ID NO: 513782 - DNA, 120 bp, Artificial Sequence
  ENSG00000164651_2 (sequence is synthesized)
gcttgccgctacctgtaataagataggcagccccagcccgtctccctcctccctctcggacagctcttcttccttcggcaaaggcttccacccctggaaacgctcctcgtcctcttcttc

SEQ ID NO: 513783 - DNA, 120 bp, Artificial Sequence
  ENSG00000164651_3 (sequence is synthesized)
cgccagctgcaacgtagtgggttccagtctctcaagcttcggcgtgtccggggcctccaggaacggcggctcgtcctcggcggctgcggcggccgcggcagcagccgcggctgccgcggc

SEQ ID NO: 513784 - DNA, 120 bp, Artificial Sequence
  ENSG00000164651_4 (sequence is synthesized)
cctggtgtccgactcgttcagctgcggcggctcgcctggctccagcgccttctccctcacctccagcagcgccgcagccgccgccgccgccgccgcagccgccgcctccagctcgccctt

SEQ ID NO: 513785 - DNA, 120 bp, Artificial Sequence
  ENSG00000164651_5 (sequence is synthesized)
cgccaacgactactctgttttccaggcccccggagtttccgggggcagcggcggcggcggcgggggcggcggcggcggctcctccgcgcactcgcaggacggctcccaccagccggtgtt

SEQ ID NO: 513786 - DNA, 120 bp, Artificial Sequence
  ENSG00000164651_6 (sequence is synthesized)
catctccaaggtgcacacctctgtggacgggctgcagggcatctacccgcgggtgggcatggcgcacccgtacgagtcgtggtttaagccctcgcacccgggcctgggtgctgcgggcga

SEQ ID NO: 513787 - DNA, 120 bp, Artificial Sequence
  ENSG00000164651_7 (sequence is synthesized)
gtgggggccggctggatcgacgtgcagaacccgaacagcgcggctgcgctgcccggctcgctgcaccctgccgccggggggctccaaacctcgctgcactcgccgctcggaggctacaac

SEQ ID NO: 513788 - DNA, 120 bp, Artificial Sequence
  ENSG00000164651_8 (sequence is synthesized)
tcggattactcgggcctgagtcactcggccttcagcagcggcgcctcctcgcacctgctcagccccgccgggcagcacctcatggacggcttcaagccagtgctacccggctcctacccg

SEQ ID NO: 513789 - DNA, 120 bp, Artificial Sequence
  ENSG00000164651_9 (sequence is synthesized)
ccagtgctacccggctcctacccggactcggccccgtcgccgctggccggcgcggggggctccatgttgagcgctgggccttcggcgccgctggggggctccccgcgctcctcagctcgc

SEQ ID NO: 513790 - DNA, 120 bp, Artificial Sequence
  ENSG00000164651_10 (sequence is synthesized)
gactgccccaactgccaggaggcagagcggctgggccctgccggggcgagcttgcggcgcaagggcctgcacagctgccacatcccgggctgcggcaaggtgtacggcaagacttcgcac

SEQ ID NO: 513791 - DNA, 120 bp, Artificial Sequence
  ENSG00000164651_11 (sequence is synthesized)
ctcaaggcgcacctgcgctggcacacgggcgagcggcccttcgtgtgcaactggcttttctgcggcaagcgcttcacgcgctccgacgagctgcagcggcacctgcggacccacaccggc

SEQ ID NO: 513792 - DNA, 120 bp, Artificial Sequence
  ENSG00000164651_12 (sequence is synthesized)
gagaagcgcttcgcctgtccagtttgcaacaagcgcttcatgcgcagcgaccacctcagcaagcacgtgaagacgcacagtggcggcggcggcggcggcggctcggcgggctcgggcagc

SEQ ID NO: 513793 - DNA, 120 bp, Artificial Sequence
  ENSG00000164651_13 (sequence is synthesized)
ggcggcaagaagggcagcgacaccgacagcgagcacagcgccgcgggcagcccgccctgccactccccagagctgctgcagccccccgagcccgggcaccgcaacggcctagagtgacgc

SEQ ID NO: 513794 - DNA, 120 bp, Artificial Sequence
  ENSG00000164651_14 (sequence is synthesized)
attgtattgcacacctctaaaaaaaacactgcctctgatttatcaatataaaaaagatcctctgagaggaggagggcacttttgtgtgatggcaacttcacttctaggggaagaaccgag

SEQ ID NO: 513795 - DNA, 120 bp, Artificial Sequence
  ENSG00000164651_15 (sequence is synthesized)
ttcaactccagcctttccctattgcatccgactcgctctctgtctctttctgtttctgcccctcttccttcttccttctgtgacttaactttgtaaaggggatatggacaagtaagtaac

SEQ ID NO: 513796 - DNA, 120 bp, Artificial Sequence
  ENSG00000164651_16 (sequence is synthesized)
ggccctggctttccctttccacgggtaacgctgcctgaacccgttgcagccggaacccgcgcctcgtcgggcctttatttctcgttctctcttccttgtcctcccctcctccacccccca

SEQ ID NO: 513797 - DNA, 120 bp, Artificial Sequence
  ENSG00000164651_17 (sequence is synthesized)
ggttgtgaagggcgtaacttttagagggaacggccactggaggtagagctggactaatccagtgcctggtagacagcgggcctcgcgcgggcaggagcggctcggctgacaagcctgagc

SEQ ID NO: 513798 - DNA, 120 bp, Artificial Sequence
  ENSG00000164651_18 (sequence is synthesized)
ggagcggtggagagggagaggctggaggcctgggcagaacagcgccgcccgggcagacggctgcttggttccagagccgctgtactgagcacctcggcttcggagcaccctgccaggccc

SEQ ID NO: 513799 - DNA, 120 bp, Artificial Sequence
  ENSG00000164651_19 (sequence is synthesized)
ctgggcatcgccggacgtcctactcaggctgtcggggcttggtgggggtgacttttggcagcccgagacccagagtttgtagagtttagatctcccaatgtcagtctgcctctttttctt

SEQ ID NO: 513800 - DNA, 120 bp, Artificial Sequence
  ENSG00000164651_20 (sequence is synthesized)
tgttccctgaggtggaaccgatgcaagtttcagcaaagggcagtcttgtcgaatcgctgcagcagctttctttcatctttatagcatatattttatttttaaaaaaactagggggaaaat

SEQ ID NO: 513801 - DNA, 120 bp, Artificial Sequence
  ENSG00000164651_21 (sequence is synthesized)
agcaaccttccatttggtttcccttctataatagttttttcctctaacggggagcaatctttctctcgaaactgctaatattgatcccaaagttactttgactgcattaacttaacttac

SEQ ID NO: 513802 - DNA, 120 bp, Artificial Sequence
  ENSG00000164651_22 (sequence is synthesized)
ggggtgggggcgggggtgagggtaggtgcttttttcttatgcaaaaatactcctttccggtgagaccagattaactatctccatgtttgtccttttctacctcgttttttcaccactccc

SEQ ID NO: 513803 - DNA, 120 bp, Artificial Sequence
  ENSG00000164651_23 (sequence is synthesized)
aaacataacctcccaatcttttttgttagtccggccgtcaattgtatagtaccaatttcgtaaattctctcaattcatgaagatcgtagggttaaacttttttgtgtgtgatttaaactt

SEQ ID NO: 513804 - DNA, 120 bp, Artificial Sequence
  ENSG00000164651_24 (sequence is synthesized)
acaaacaagtgaagaagctatcgtttatttcagacgaggctgtagtttaaataccaaaagagggaaaataaaaaagaacctttgtaaaatatatctgaacctaatggtttgtacaactgg

SEQ ID NO: 513805 - DNA, 120 bp, Artificial Sequence
  ENSG00000164651_25 (sequence is synthesized)
agaatcgttctagattagttaccaattaaatataactccgccagtgtaagggtgtgaggtgcagttgtccaggagacgattttgtatagtatttttcttgtacattacttccagtaaata

SEQ ID NO: 513806 - DNA, 120 bp, Artificial Sequence
  ENSG00000164651_26 (sequence is synthesized)
tttgaaaatatattgaagtaaacttgattttttttttttgtcacaagaaaatattaagagttattgttgcagttctgatgagctgcaggttttttgaactcacttctggaggtgcagagc

SEQ ID NO: 513807 - DNA, 120 bp, Artificial Sequence
  ENSG00000164651_27 (sequence is synthesized)
cacaaacgcactttcggggcctagttttgctcgaatatgaatttagataggtatcaagctgtaactaagacaatatttgataaatgttggatgacatttaatttaatggagcatgtactt

SEQ ID NO: 513808 - DNA, 120 bp, Artificial Sequence
  ENSG00000164651_28 (sequence is synthesized)
atttgcatttgctggcagttcaggcatagttaaagtgagagttctcctatatttcataataagtggtctgccaaaacccatgtattaaataaattgtccaagtgaaactcgactaacttt

SEQ ID NO: 513809 - DNA, 120 bp, Artificial Sequence
  ENSG00000164651_29 (sequence is synthesized)
ggcctttgtgtatttcctgaaggtaatattgttaactgttaataaatacttctgacactacatttaaatgtttgcagattctgcaaactaattgctcattgtaatgttgaaataatttgg

SEQ ID NO: 513810 - DNA, 120 bp, Artificial Sequence
  ENSG00000164651_30 (sequence is synthesized)
atatttcacattgaaatgaaaagcctttctctggagcattttagatttgcattttaaatgcatgaaatgtaattgatttatttgtaatattttaaatggtataataaactcagataaaag

SEQ ID NO: 513811 - DNA, 120 bp, Artificial Sequence
  ENSG00000164654_0 (sequence is synthesized)
cccttccaaggccgaggcgccgctgcgcgtcctccaggcgtggtggtggggtcgtgggtcccagcccagtggtccaggtcacgggccgcacggccgcggccgccatcttgcccgcgtccg

SEQ ID NO: 513812 - DNA, 120 bp, Artificial Sequence
  ENSG00000164654_1 (sequence is synthesized)
ggctcctgcggcgggcggggcggtgtcccggccggaagcggctgtgcggcggccgcgctgccacctcagggaaatttggatatgtgcagtgcatctcctcgaagatgctgatggtggaaa

SEQ ID NO: 513813 - DNA, 120 bp, Artificial Sequence
  ENSG00000164654_2 (sequence is synthesized)
tttcttgaaaccgctctcgtaatttgccacgtgctgttgcaaatattctggtgaatgaacacagaatcagcatggctttcctttgctgagaaatcactgatgggaagtgagacttgttaa

SEQ ID NO: 513814 - DNA, 120 bp, Artificial Sequence
  ENSG00000164654_3 (sequence is synthesized)
acttgaaagtgaatggacctgagtggaccctttgatcacatcagtaaacatgagcggtaccaaacctgatattttatgggcaccacaccatgttgatagatttgttgtgtgtgactcaga

SEQ ID NO: 513815 - DNA, 120 bp, Artificial Sequence
  ENSG00000164654_4 (sequence is synthesized)
actaagtctttatcatgtggaatctactgtgaattcagaactcaaagctggatctttacgtttatctgaagactctgcagctacattactgtcaataaattcagatacaccctatatgaa

SEQ ID NO: 513816 - DNA, 120 bp, Artificial Sequence
  ENSG00000164654_5 (sequence is synthesized)
atgtgttgcctggtatcttaattatgatcctgaatgtctgctggcagttggacaagcaaatggtcgagttgtacttacaagccttggtcaagatcataactcaaagttcaaagatttgat

SEQ ID NO: 513817 - DNA, 120 bp, Artificial Sequence
  ENSG00000164654_6 (sequence is synthesized)
aggaaaagagtttgttccaaaacatgcacgacaatgtaatacccttgcctggaatccactggatagtaactggctagctgctggtttagataagcacagagctgacttttcagtgctaat

SEQ ID NO: 513818 - DNA, 120 bp, Artificial Sequence
  ENSG00000164654_7 (sequence is synthesized)
atgggatatctgcagcaaatatactcctgatatagttcccatggaaaaagtgaaactttcagcaggtgaaactgaaacaacattattagtaacaaaaccactttatgagttaggacagaa

SEQ ID NO: 513819 - DNA, 120 bp, Artificial Sequence
  ENSG00000164654_8 (sequence is synthesized)
tgatgcttgtctgtctctttgttggcttccacgagaccagaaacttctccttgctggtatgcatcgtaacctagctatatttgatcttcggaatacaagccaaaagatgttcgtaaatac

SEQ ID NO: 513820 - DNA, 120 bp, Artificial Sequence
  ENSG00000164654_9 (sequence is synthesized)
aaaagctgttcagggtgtgacggtagacccatatttccacgatcgtgttgcttccttctatgaaggtcaggttgcaatatgggatcttagaaaatttgagaagccagttttgacattgac

SEQ ID NO: 513821 - DNA, 120 bp, Artificial Sequence
  ENSG00000164654_10 (sequence is synthesized)
tgagcaaccaaaacccttaacaaaagtagcatggtgtcccactaggactggtctacttgccactttaacaagggatagtaatattattagattgtatgatatgcagcatacacccactcc

SEQ ID NO: 513822 - DNA, 120 bp, Artificial Sequence
  ENSG00000164654_11 (sequence is synthesized)
cattggggatgaaactgaacccacaataattgaaagaagtgtgcaaccttgtgacaattacattgcttcctttgcgtggcatccaacaagtcaaaatcgaatgatagttgtaactcccaa

SEQ ID NO: 513823 - DNA, 120 bp, Artificial Sequence
  ENSG00000164654_12 (sequence is synthesized)
ccgaacaatgtcagacttcactgtttttgaaaggatatctcttgcctggagcccaattacatctttaatgtgggcttgtggtcgtcatttatatgaatgtacggaagaagaaaatgataa

SEQ ID NO: 513824 - DNA, 120 bp, Artificial Sequence
  ENSG00000164654_13 (sequence is synthesized)
ttctttagaaaaagatatagcaacgaagatgcgtcttcgggctttatcaaggtatggacttgatacagagcaggtgtggaggaaccacattttagctggaaatgaagatccacagctcaa

SEQ ID NO: 513825 - DNA, 120 bp, Artificial Sequence
  ENSG00000164654_14 (sequence is synthesized)
gtcactctggtatactctgcactttatgaagcaatacacagaagatatggatcagaaatctccaggcaacaaaggatcattggtttatgcaggaattaaatcaattgtaaagtcatcgtt

SEQ ID NO: 513826 - DNA, 120 bp, Artificial Sequence
  ENSG00000164654_15 (sequence is synthesized)
gggaatggtggaaagcagcagacataattggagtgggttggataagcaaagtgatattcaaaatttaaatgaagagagaatcttagctttacagctttgtgggtggataaagaaaggaac

SEQ ID NO: 513827 - DNA, 120 bp, Artificial Sequence
  ENSG00000164654_16 (sequence is synthesized)
ggatgtagacgtggggccatttttgaactcccttgtacaagaaggggaatgggaaagagctgctgctgtggcattgttcaacttggatattcgccgagcaatccaaatcctgaatgaagg

SEQ ID NO: 513828 - DNA, 120 bp, Artificial Sequence
  ENSG00000164654_17 (sequence is synthesized)
ggcatcttctgaaaaaggagatctgaatctcaatgtggtagcaatggctttatcgggttatacggatgagaagaactccctttggagagaaatgtgtagcacactgcgattacagctaaa

SEQ ID NO: 513829 - DNA, 120 bp, Artificial Sequence
  ENSG00000164654_18 (sequence is synthesized)
taacccgtatttgtgtgtcatgtttgcatttctgacaagtgaaacaggatcttacgatggagttttgtatgaaaacaaagttgcagtacgtgacagagtggcatttgcttgtaaattcct

SEQ ID NO: 513830 - DNA, 120 bp, Artificial Sequence
  ENSG00000164654_19 (sequence is synthesized)
tagtgatactcagttaaatagatacatcgaaaagttgaccaatgaaatgaaagaggctggaaatttggaaggaattttgcttacaggccttactaaagatggagtggacttaatggagag

SEQ ID NO: 513831 - DNA, 120 bp, Artificial Sequence
  ENSG00000164654_20 (sequence is synthesized)
atgaaagggttcagtactggattgagaattatagaaatttattagatgcctggaggttttggcataaacgagctgaatttgatattcacaggagtaagttggatcccagttccaagcctt

SEQ ID NO: 513832 - DNA, 120 bp, Artificial Sequence
  ENSG00000164654_21 (sequence is synthesized)
tagcacaagtttttgtgagttgcaatttctgtggcaagtcaatctcctacagctgttcagctgtgcctcatcagggcagaggttttagtcagtatggtgtgagtggctcaccaacgaaat

SEQ ID NO: 513833 - DNA, 120 bp, Artificial Sequence
  ENSG00000164654_22 (sequence is synthesized)
ctaaagtcacaagttgtcctggctgtcgaaaaccacttcctcgatgtgcgctttgtctcattaatatgggaacaccagtttctagctgtcctggaggaaccaaatcagatgaaaaagtgg

SEQ ID NO: 513834 - DNA, 120 bp, Artificial Sequence
  ENSG00000164654_23 (sequence is synthesized)
acttgagcaaggacaaaaaattagcccaatttaacaactggtttacatggtgtcataattgcaggcacggtggacatgctggacatatgcttagttggttcagggaccatgcagagtgcc

SEQ ID NO: 513835 - DNA, 120 bp, Artificial Sequence
  ENSG00000164654_24 (sequence is synthesized)
ctgtgtcggcatgcacgtgtaaatgtatgcagttggatacaacagggaatctggtacctgcagagactgtccagccataaaatgttaccaccttaagagaacccttcaagtgtggagctt

SEQ ID NO: 513836 - DNA, 120 bp, Artificial Sequence
  ENSG00000164654_25 (sequence is synthesized)
tctagtaggtgtccttcatagctcagaaacatacctcagaacaagccattcatgacttacctgtaatgggaaaataaatcattctatcagatcagcagttttgatgtttgagtgattttg

SEQ ID NO: 513837 - DNA, 120 bp, Artificial Sequence
  ENSG00000164654_26 (sequence is synthesized)
atatgcttcacagagacaaatgctgccaaaataaacatcgaagtatagacatgagttctgttcagcaggttgaaaagtctgatttagaaaaactttctaagttttggttgaaattatgaa

SEQ ID NO: 513838 - DNA, 120 bp, Artificial Sequence
  ENSG00000164654_27 (sequence is synthesized)
cactctagaagcagaatttctggaagagccaagaacagactttgagcctatatcttcaaagctgaaactggatatctttcaataaaatatgtgcacttttaaaataaaatgactaattct

SEQ ID NO: 513839 - DNA, 120 bp, Artificial Sequence
  ENSG00000164654_28 (sequence is synthesized)
gtgattcagacaatagttttaagttcagctgtgcttagatttctttcagattaatttaaaattacagatttttacttttagaattgcagagcccctatcccacactggagaatatttttt

SEQ ID NO: 513840 - DNA, 120 bp, Artificial Sequence
  ENSG00000164654_29 (sequence is synthesized)
attactgtctgttatatatgtgtctatgtgtgtgtgtatatttatgtgtgtatgtataaatatgtattttttaaaggagccttttccctcctttgattttaagataagcaatcttttggc

SEQ ID NO: 513841 - DNA, 120 bp, Artificial Sequence
  ENSG00000164654_30 (sequence is synthesized)
ataacattatcgtcttcctagaaaagccaagatgaagaatctatcttacaactttttctcttcagtagagaaaaacatgtaccatttcaggtgaacatacaaaattttcactttctacct

SEQ ID NO: 513842 - DNA, 120 bp, Artificial Sequence
  ENSG00000164654_31 (sequence is synthesized)
tttgccttccaatgtcctgatttgtcttcaaaggtttttctccatattaatttgtcatcttatcctcatcacctgagaacattttactgcatacaaagtctatgcaagattatatgtaac

SEQ ID NO: 513843 - DNA, 120 bp, Artificial Sequence
  ENSG00000164654_32 (sequence is synthesized)
tagccatttagtataatctatgtcagtgtttctgtgctgtcaaattccgtcctgatttggaataccataccttgttctttccaaggtagactaggaagtgttggggaaatggggtcactt

SEQ ID NO: 513844 - DNA, 120 bp, Artificial Sequence
  ENSG00000164654_33 (sequence is synthesized)
cagagaccattttagatgtaagtttttaaatgtaagtgttactggggctaagtcaggtactttatttaaaacatttttttttctcatttcatagctagatagttgtaagagaaatacaaa

SEQ ID NO: 513845 - DNA, 120 bp, Artificial Sequence
  ENSG00000164654_34 (sequence is synthesized)
gaatttacaagatgcttctctgtcatctgccatatgcagagggactgaactaggaattttgtagttgaagctgtgttcataaagagtaaatcttattttatagattttggagaaataaaa

SEQ ID NO: 513846 - DNA, 120 bp, Artificial Sequence
  ENSG00000164654_35 (sequence is synthesized)
caagaattttaagagctttcgtattagcagttttgccttataaaaactaagatttgtcagattagtttgaggtgtaacctaaatattaaaagtagattaaatttattttttaccttgagt

SEQ ID NO: 513847 - DNA, 120 bp, Artificial Sequence
  ENSG00000164654_36 (sequence is synthesized)
gtctgatacataaaacccttttctaggaaaacattggaagtagtacatatttactctaaatgtctcacctgcatgacagtcttttcaaatgaaagacatggtaattgcaattttttttta

SEQ ID NO: 513848 - DNA, 120 bp, Artificial Sequence
  ENSG00000164654_37 (sequence is synthesized)
aagattgctattaagggtactttttccagccttcatttgagtaaatcttaattgatttcattttattaacatataccctttacctttaatatttcatttgaagtgttcctttcaaactta

SEQ ID NO: 513849 - DNA, 120 bp, Artificial Sequence
  ENSG00000164654_38 (sequence is synthesized)
ctgtcttaaatatgaaagtcagctttaagtaatgtcagactcatatgcattttcattctcattagctaaagtaaaatgtaaaattatctcaaatagttacaagttttggaaatacagtat

SEQ ID NO: 513850 - DNA, 120 bp, Artificial Sequence
  ENSG00000164654_39 (sequence is synthesized)
aaaacatgaatgtaaagtctattatgtaatatgcttatttgtaatcctaatatatgagggtgacatttttaagattgtatgtatgtgtcaacctcttaaatgttttctgtgaagcccaaa

SEQ ID NO: 513851 - DNA, 120 bp, Artificial Sequence
  ENSG00000164654_40 (sequence is synthesized)
cggccgcgctgccacctcaggtcagtgagcgcgacccggttcgcgtctcgactctcgggagcgccgcggccgcagcgaggggccggagatagcctagttgaaaggcccgggcgtctcggc

SEQ ID NO: 513852 - DNA, 120 bp, Artificial Sequence
  ENSG00000164654_41 (sequence is synthesized)
atagcctagttgaaaggcccgggcgtctcggcggggagcgcgttccgcgctgtagggtaatcgcgccgggcggccggccgcctggccgggcctcagcgggagccaccgggggctgcgggc

SEQ ID NO: 513853 - DNA, 120 bp, Artificial Sequence
  ENSG00000164654_42 (sequence is synthesized)
gcagggaacacgctacagccttcgccgcggcgggcttgtggggagcggcgtcccagcctttcccgggaggctcagccaggtgcctggagcgggagagtcggactcagattcctgctttac

SEQ ID NO: 513854 - DNA, 120 bp, Artificial Sequence
  ENSG00000164654_43 (sequence is synthesized)
atttttaacatagttatcgatgcataatgtctttatagatagcaattaagtaaaaatattaagtctaattaagcaattgtttaagttacacaagtctcatgaagtgcattgggaaacttt

SEQ ID NO: 513855 - DNA, 120 bp, Artificial Sequence
  ENSG00000164654_44 (sequence is synthesized)
cacaagtctcatgaagtgcattgggaaactttctgctttttctcttctttgaaagggcttgtacagatgagaattacctgtcccttgatagatttttttttttttttgagacaaagtctt

SEQ ID NO: 513856 - DNA, 81 bp, Artificial Sequence
  ENSG00000164654_45 (sequence is synthesized)
aattcttgtcaccacccccggccaatttttgtatttttaacagagacggagtttcaccatgttggccagactggtcgtgaa

SEQ ID NO: 513857 - DNA, 120 bp, Artificial Sequence
  ENSG00000164654_46 (sequence is synthesized)
gcatgtgtcaccacccccggccaatttttgtatttttaacagagacggagtttcaccatgttggccagactggtcgtgaactcctagcctcaagtggtctgcccgcctcagcctcccaaa

SEQ ID NO: 513858 - DNA, 120 bp, Artificial Sequence
  ENSG00000164654_47 (sequence is synthesized)
cctgttccttgaatgttaagtaaaattcacttgtaaactgggcctggtattttccttgtggaaagattttaaactactgatttggtctctccaaagttttaaatttagattgtttcttag

SEQ ID NO: 513859 - DNA, 120 bp, Artificial Sequence
  ENSG00000164654_48 (sequence is synthesized)
tgggtttggatttttttttccatttttatattggctattaaaaatgtaggggagcttctgtcattcagtttcgcttcatctaaactagaacctaccatcaaaattgctatttcaatatga

SEQ ID NO: 513860 - DNA, 120 bp, Artificial Sequence
  ENSG00000164654_49 (sequence is synthesized)
tgtgtgattcatatttggaacacagttttagaaatgctttttgaaagtaactttaaataaaatattatgatatagttaatgaagatcattttattttgtcataggaggaaccaaatcaga

SEQ ID NO: 513861 - DNA, 120 bp, Artificial Sequence
  ENSG00000164654_50 (sequence is synthesized)
acagaccctctcagagcacagcagcttttacatcttcaagatcatcagcaggagatctgtctcctgctgcttctctcttacctcgagactgtctttcaaaggacttacttaattagagaa

SEQ ID NO: 513862 - DNA, 120 bp, Artificial Sequence
  ENSG00000164654_51 (sequence is synthesized)
agaaggaagaaagcaagatcacttctactggatttcagacagtagggataccttgtgaataaaacagacaagacacctgcccttttggagcttatgcgctactgggagaagagataagac

SEQ ID NO: 513863 - DNA, 120 bp, Artificial Sequence
  ENSG00000164654_52 (sequence is synthesized)
gcaaaatatgttgtatttgtggcatagttcatatttacactatcataaaattatggccgagaagttaaatattctaaatgtgtcaacatagttctctgtaaaactgacttactttccaaa

SEQ ID NO: 513864 - DNA, 120 bp, Artificial Sequence
  ENSG00000164654_53 (sequence is synthesized)
cggtgagctctgttctcttctcatatgagtaatgaaaattaagaggatgaatgaaacctcacacatgttgtggactttgctgaataggttagcaaatgactgcaggccttttgtatattt

SEQ ID NO: 513865 - DNA, 120 bp, Artificial Sequence
  ENSG00000164659_0 (sequence is synthesized)
tcattgacacagtgagggaggcaaaacagtgtggatgcagcagaataaccacaaccaggattttgaactgaataagtaagaaagattatcactttgaatatacggaatgtgatagcagtg

SEQ ID NO: 513866 - DNA, 120 bp, Artificial Sequence
  ENSG00000164659_1 (sequence is synthesized)
gctccaggtggagagttgccattccaaattctgcagtggactgctctggcctgcctgacccagtgagaggcaaagaatgcactcttcttggatccctcgtggaaactacatagaatctaa

SEQ ID NO: 513867 - DNA, 120 bp, Artificial Sequence
  ENSG00000164659_2 (sequence is synthesized)
tcgtgatgactgcacggtgtctttgatctatgctgtgcaccttaagaagtcaggctatgtcttctttgagtaccagtatgtcgacaacaacatcttctttgagttctttattcaaaatga

SEQ ID NO: 513868 - DNA, 120 bp, Artificial Sequence
  ENSG00000164659_3 (sequence is synthesized)
tcagtgccaggagatggacaccaccactgacaagtgggtaaaacttacagacaatggagaatggggctctcattctgtaatgctgaaatcaggcacaaacatactctactggagaactac

SEQ ID NO: 513869 - DNA, 120 bp, Artificial Sequence
  ENSG00000164659_4 (sequence is synthesized)
aggcatccttatgggttctaaggcggtcaagcctgtgctggtaaaaaatatcacaattgaaggggtggcgtacacatcagaatgttttccttgcaagccaggcacattcagcaacaaacc

SEQ ID NO: 513870 - DNA, 120 bp, Artificial Sequence
  ENSG00000164659_5 (sequence is synthesized)
aggttcattcaactgccaggtgtgtcccagaaacacctattctgagaaaggagccaaagaatgtataaggtgtaaagacgactctcaattttcagaggaaggatccagtgagtgtacaga

SEQ ID NO: 513871 - DNA, 120 bp, Artificial Sequence
  ENSG00000164659_6 (sequence is synthesized)
gcgccctccctgtaccacaaaagactatttccagatccatactccatgtgatgaagaaggaaagacacagataatgtacaagtggatagagcccaaaatctgccgggaggatctcacaga

SEQ ID NO: 513872 - DNA, 120 bp, Artificial Sequence
  ENSG00000164659_7 (sequence is synthesized)
tgctattagattgcccccttctggagagaagaaggattgtccgccttgcaaccctggattttataacaatggatcatcttcttgccatccctgtcctcctggaacattttcagatggaac

SEQ ID NO: 513873 - DNA, 120 bp, Artificial Sequence
  ENSG00000164659_8 (sequence is synthesized)
caaagaatgtagaccatgtccagcaggaacggagcctgcacttggctttgaatataaatggtggaatgtccttcctggcaacatgaaaacttcctgcttcaatgttgggaattcaaagtg

SEQ ID NO: 513874 - DNA, 120 bp, Artificial Sequence
  ENSG00000164659_9 (sequence is synthesized)
cgatggaatgaatggttgggaggtggctggagatcatatccagagtggggctggaggttctgacaatgattacctgatcttaaacttgcatatcccaggatttaaaccaccaacatctat

SEQ ID NO: 513875 - DNA, 120 bp, Artificial Sequence
  ENSG00000164659_10 (sequence is synthesized)
gactggagccacgggttctgaactaggaagaataacatttgtctttgagaccctctgttcagctgactgtgttttgtacttcatggtggatattaatagaaaaagtacaaatgtggtaga

SEQ ID NO: 513876 - DNA, 120 bp, Artificial Sequence
  ENSG00000164659_11 (sequence is synthesized)
atcgtggggtggaaccaaagaaaaacaagcttacacccatatcatcttcaagaatgcaacttttacatttacatgggcattccagagaactaatcagggtcaagataatagacggttcat

SEQ ID NO: 513877 - DNA, 120 bp, Artificial Sequence
  ENSG00000164659_12 (sequence is synthesized)
caatgacatggtgaagatttattctatcacagccactaatgcagttgatggggtggcgtcctcatgccgtgcctgtgccctcggttctgaacagtcgggttcatcgtgtgtcccctgccc

SEQ ID NO: 513878 - DNA, 120 bp, Artificial Sequence
  ENSG00000164659_13 (sequence is synthesized)
acctgtccatacatcaggtctatggcaaagaggcttgtattccatgcgggcctgggagtaaaaacaatcaggaccattcggtttgctatagtgactgctttttctaccatgaaaaagaaa

SEQ ID NO: 513879 - DNA, 120 bp, Artificial Sequence
  ENSG00000164659_14 (sequence is synthesized)
atcagagtttgcactatgactttagcaacctcagcagtgtgggctcattaatgaatggccccagcttcacctccaaaggaacaaaatacttccatttcttcaatatcagtttatgtgggc

SEQ ID NO: 513880 - DNA, 120 bp, Artificial Sequence
  ENSG00000164659_15 (sequence is synthesized)
atgaggggaagaagatggctctctgtaccaacaatataacagactttacagtaaaagaaatagtggcagggtcagatgattacacaaatttggtaggggcatttgtatgccagtcaacaa

SEQ ID NO: 513881 - DNA, 120 bp, Artificial Sequence
  ENSG00000164659_16 (sequence is synthesized)
ttattccttctgaaagtaagggtttccgagcagccttatcatcacaatccatcattctggcagatacattcataggagtcacagttgaaaccacattgaaaaatattaatataaaagaag

SEQ ID NO: 513882 - DNA, 120 bp, Artificial Sequence
  ENSG00000164659_17 (sequence is synthesized)
atatgttcccagttccaacaagccaaataccagatgtgcatttcttttataagtcttctacagcaacaacatcttgtattaatggccgatcaactgctgtgaaaatgaggtgtaatccta

SEQ ID NO: 513883 - DNA, 120 bp, Artificial Sequence
  ENSG00000164659_18 (sequence is synthesized)
ctaaatctggagcaggagtgatttcagtccccagcaagtgcccagcaggtacctgtgatgggtgtacgttctatttcctgtgggagagtgctgaagcttgccctctgtgtacggagcatg

SEQ ID NO: 513884 - DNA, 120 bp, Artificial Sequence
  ENSG00000164659_19 (sequence is synthesized)
acttccatgagattgagggagcctgcaagagaggatttcaggaaaccttgtatgtgtggaatgaacctaaatggtgcattaaaggaatttctttgcctgagaaaaagttggcaacctgtg

SEQ ID NO: 513885 - DNA, 120 bp, Artificial Sequence
  ENSG00000164659_20 (sequence is synthesized)
aaacggttgacttttggctgaaggtgggagccggtgtgggagcttttactgccgttttgctggtggctctgacctgctacttctggaaaaagaatcaaaaactggaatacaaatattcca

SEQ ID NO: 513886 - DNA, 120 bp, Artificial Sequence
  ENSG00000164659_21 (sequence is synthesized)
agttagtaatgacgactaactcaaaagagtgtgaactcccggctgcagacagttgtgctatcatggaaggagaagataatgaagaggaagttgtatattccaataaacagtcactactag

SEQ ID NO: 513887 - DNA, 120 bp, Artificial Sequence
  ENSG00000164659_22 (sequence is synthesized)
gaaaactcaaatctttggcaaccaaggaaaaagaagaccattttgaatctgttcaactgaaaacctcaagatccccaaatatatgaagagacagtgctgtagccttgagactaatgaaca

SEQ ID NO: 513888 - DNA, 120 bp, Artificial Sequence
  ENSG00000164659_23 (sequence is synthesized)
aagaaacctgctctagttttacaggaccatattttagggtctgtcctcatacctgtcacattggtgatctcacagaggagggccatgccgctgaaaagggaaggagattgaaacatttga

SEQ ID NO: 513889 - DNA, 120 bp, Artificial Sequence
  ENSG00000164659_24 (sequence is synthesized)
ttgccttatcacatggtcaagtaccttgccaaataaaggaaagcaaatgatttgggtctcaactgaagatgaagctcaactcaggaagagatttatctgtatatacacataactgaaaac

SEQ ID NO: 513890 - DNA, 120 bp, Artificial Sequence
  ENSG00000164659_25 (sequence is synthesized)
caagtttaagcccaccaatgcactgctgatgcatgccatataattaatgggtaacttttattctttatgatgtctacataacaagtgtgatttggaaggcacatgtgagcatatgcatta

SEQ ID NO: 513891 - DNA, 80 bp, Artificial Sequence
  ENSG00000164659_26 (sequence is synthesized)
ggcgctcgccgccctggagccccgcctggatttgctgctgggcgctcgccggctgccaggcggcctgggctggggacctg

SEQ ID NO: 513892 - DNA, 120 bp, Artificial Sequence
  ENSG00000164659_27 (sequence is synthesized)
ccggctgccaggcggcctgggctggggacctgccctcctcctccagccgcccgcttcctccttgccaggagctttctcctgtgcttctggagagtatctagaaatgaagaaccaggtatg

SEQ ID NO: 513893 - DNA, 120 bp, Artificial Sequence
  ENSG00000164659_28 (sequence is synthesized)
cagtaagtgtggtgaaggcacctattccttgggcagtggcatcaaatttgatgaatgggatgaattgccggcaggattttctaacatcgcaacattcatggacactgtggtgggcccttc

SEQ ID NO: 513894 - DNA, 120 bp, Artificial Sequence
  ENSG00000164659_29 (sequence is synthesized)
ttctttgtttatattttggggaaaattaaaatttttttaaggtatatttttcccattatttattttcctgaccttaaaacagcttttctactaaaaaatggtgagcaatgaagacaataa

SEQ ID NO: 513895 - DNA, 120 bp, Artificial Sequence
  ENSG00000164659_30 (sequence is synthesized)
ggtgacggagcggcgagacgagcgcacagcagtcgcggcccgggagccggagctgccgccgcaccccgggaaggctgccttgccgccggcccgccgaccgcggccggacgaagatgctgt

SEQ ID NO: 513896 - DNA, 120 bp, Artificial Sequence
  ENSG00000164659_31 (sequence is synthesized)
atttaaatttcaggaagagttagcatgtgcttgggttatctagatttataattgcctttgaaattccatcctcgttggagctggtaagaagggcttgactgaaagtttgaaggaatctaa

SEQ ID NO: 513897 - DNA, 120 bp, Artificial Sequence
  ENSG00000164659_32 (sequence is synthesized)
aaaacaaaaaagtaagaaaggtaacgagaagccctaattctccattaatgcaaactagctgctagtatcatagaagtcaaatgacttaaaacagtttatgtagtgctagaagtataatta

SEQ ID NO: 513898 - DNA, 120 bp, Artificial Sequence
  ENSG00000164659_33 (sequence is synthesized)
aagtaaataggaaagcttgtcaatcaaatcactggcaaaatcatgaagaagagagtgagaaggtttgtctataagtacagatgactgtatgaaatactggggtaatttcatggtctccag

SEQ ID NO: 513899 - DNA, 120 bp, Artificial Sequence
  ENSG00000164659_34 (sequence is synthesized)
aaaatgtcagtgggacttttgttctttgtcaagcaccagaggttatatggttatttttctgctgcaagactttgaggatgttgactttctcagaaactttttaaaaaaataatccaataa

SEQ ID NO: 513900 - DNA, 120 bp, Artificial Sequence
  ENSG00000164659_35 (sequence is synthesized)
ggcaggaattcagttttgaaaaattacatataattgtattcataataagaatgtggttatttcataagcagttatgaaagaattattgttcttattcaaaagtgatccagataattgtga

SEQ ID NO: 513901 - DNA, 120 bp, Artificial Sequence
  ENSG00000164659_36 (sequence is synthesized)
tattttctatggtgggctactggtattagcacgacttggatattatttgttgaaggaagtatgaatgaagttggatttgaccaatttcgtgtaaaccttaattgatttaaaactgggaaa

SEQ ID NO: 513902 - DNA, 120 bp, Artificial Sequence
  ENSG00000164659_37 (sequence is synthesized)
gaggggggtttcctggccattgctgatctaaggtgctcttatttgtttccaataaacagtaatctttatagaccttaatgcagatttaaaaaaatagttgtgattggctgagagaggcag

SEQ ID NO: 513903 - DNA, 120 bp, Artificial Sequence
  ENSG00000164659_38 (sequence is synthesized)
ggcatatatgtagggaaatgatttgccccaagcattccaatgaagtatgacttgtaacttttgtgtctgaaggtggtgtctttatttttgtggaaaatgggagaaaaatgaataattgtg

SEQ ID NO: 513904 - DNA, 120 bp, Artificial Sequence
  ENSG00000164659_39 (sequence is synthesized)
tttatttggctgattggtaatacactagaccattctgttattattgaatgaatgttttgtgtatatctctgctgttgcacatatgagtataggtgaggttgtcattgtttgctctgggat

SEQ ID NO: 513905 - DNA, 120 bp, Artificial Sequence
  ENSG00000164659_40 (sequence is synthesized)
tcagggagggagtcactttgcataaacctttttttgcatttaatttcttgaatgttcttataaagaagacattatgttggcattcttcatttttatcctgccaacagagtgcttatgagc

SEQ ID NO: 513906 - DNA, 120 bp, Artificial Sequence
  ENSG00000164659_41 (sequence is synthesized)
atgtctgcattttgatcaaaatttaaacagaagagtgaaaatacatttgaaatgaaccctttcagaggaaccctggcaaagctgtatagactggacagagtgagaaaacttccacagcca

SEQ ID NO: 513907 - DNA, 120 bp, Artificial Sequence
  ENSG00000164659_42 (sequence is synthesized)
cctgtcacctttctcctcatcttccactgtgttcaatatgtatgttccaagccatagagataattgggattttctcccaggtagcttctttcttctcctgtcactggactaaaatctctg

SEQ ID NO: 513908 - DNA, 120 bp, Artificial Sequence
  ENSG00000164659_43 (sequence is synthesized)
acatgtcaaaaatgccttaaattttaatgaactctccgaaaatgtagttgatattggagaatttattttatttctaattttagatattaaatatattttgtcagcacagtcccatctttg

SEQ ID NO: 513909 - DNA, 120 bp, Artificial Sequence
  ENSG00000164659_44 (sequence is synthesized)
ggaaggaggtgattttttcccttggattccagtggtttgtcattttatttcaagcactgaagaagtatgacagaaagaatattatggggaaaatatttagaccaatcctggctataaaat

SEQ ID NO: 513910 - DNA, 120 bp, Artificial Sequence
  ENSG00000164659_45 (sequence is synthesized)
ttcctttagttttatgcctggcctttgcaaagctcagtgaaatgttgaaaggaataaattaatcatgtttctgtgacttttgattgacacttgttccttttcccccctaagtggtagaag

SEQ ID NO: 513911 - DNA, 120 bp, Artificial Sequence
  ENSG00000164659_46 (sequence is synthesized)
aagttatttgttatttttctaaaaggcacaattttgaagccttaactacttcattaagtcaactgttgcctataacatctcttagcactcgtcaaaacgtatttaaatcaattttccaat

SEQ ID NO: 513912 - DNA, 120 bp, Artificial Sequence
  ENSG00000164659_47 (sequence is synthesized)
ggatgagaacatgtcttctgtggataaattatattatgtcatttaacaacattgagcattttgatatgtgttcactgaattaaaaaacctgaatttcattattgttgacttttcccctct

SEQ ID NO: 513913 - DNA, 120 bp, Artificial Sequence
  ENSG00000164659_48 (sequence is synthesized)
ttagttactagtaatcacatcctttctaggattaaaaatatttcatagtatttttgtgtagatgtctgtccttattttcttcccaaagaaaaaaggttgtttaaattgattatgtggaag

SEQ ID NO: 513914 - DNA, 120 bp, Artificial Sequence
  ENSG00000164659_49 (sequence is synthesized)
aattacttgggtccagtctttagcatctggggtctccaggtccccaggtgggtcatgattgactgcttcttcaagacccatcttgccaactctcacttgatgtctgtcaatagaactact

SEQ ID NO: 513915 - DNA, 120 bp, Artificial Sequence
  ENSG00000164659_50 (sequence is synthesized)
tcctgtggcacatggttatttctaatgggaggctaatgtgtacataatttctctcttcctcatagaaataaatttctctgggggttgctgtgagaggatgacttcattagccatgtttaa

SEQ ID NO: 513916 - DNA, 120 bp, Artificial Sequence
  ENSG00000164659_51 (sequence is synthesized)
agtgagtgtactgctcacgtttatctttgtacactaagagtatgtagagttgatcttcagagaaactaaacctccctcatatctatttatagtaatcatgaatatgattgcagttgacag

SEQ ID NO: 513917 - DNA, 120 bp, Artificial Sequence
  ENSG00000164659_52 (sequence is synthesized)
gcccaactcctaaactgagtttgcccaaagaaaatgtccttagaggagtaaacttttagaaatctcaacacccgactcattcgttggaagctaaaatggaattcatcttcatactaactg

SEQ ID NO: 513918 - DNA, 120 bp, Artificial Sequence
  ENSG00000164659_53 (sequence is synthesized)
gctacagattattctcttgctggattttacttttattttaacatttttacatgagttccttttagaatcataaatgaaagaagtaaaactttaagatgggaatgaataattgaaaagaga

SEQ ID NO: 513919 - DNA, 120 bp, Artificial Sequence
  ENSG00000164659_54 (sequence is synthesized)
attatatttactattataattgatattattcgctattatgattacacttgtctagatcagagcccagcaaacattttttttgtaaagggtcagatagtacatagttttggctttgcaggg

SEQ ID NO: 513920 - DNA, 120 bp, Artificial Sequence
  ENSG00000164659_55 (sequence is synthesized)
agggcatgtgggctctattgcatttactcaactctgccattgtagtatgaaagcaaccacatacaaaatgtaaatggatgggcgtggctgcattccaataaaactttatttatggacact

SEQ ID NO: 513921 - DNA, 120 bp, Artificial Sequence
  ENSG00000164659_56 (sequence is synthesized)
ctgcagcattgttttcgttggttgtcaaacatcatcagtaaggagttagatattttcatctgtcaaagtgatagaatactatgcaactctgcagctgttaaagattgagatagctatgtg

SEQ ID NO: 513922 - DNA, 120 bp, Artificial Sequence
  ENSG00000164659_57 (sequence is synthesized)
tactgataaatcaataggtccaagatagagtgaaaacaaatggactattgtatttatattaaatatacatttatgtttgtatttgcatagcaaactgttaacagtggctgccttttggga

SEQ ID NO: 513923 - DNA, 120 bp, Artificial Sequence
  ENSG00000164659_58 (sequence is synthesized)
atagtgaactaatgagagtgtttagtctttgaaagcaatacatttttgtgatattggaattttcacaaagatactattttataatataaaagtgggggctaataaaagatattacattca

SEQ ID NO: 513924 - DNA, 120 bp, Artificial Sequence
  ENSG00000164659_59 (sequence is synthesized)
ttaccttcctatcccagtgcatgtcatagttcttggcactcagtaaatgctagttgaataaataagtgaatgaatgcagaacaggggttaaattagggaacaacagtacagcaaactgtt

SEQ ID NO: 513925 - DNA, 120 bp, Artificial Sequence
  ENSG00000164659_60 (sequence is synthesized)
gtgctatgcagagaaggtcaaagacaatggccttctcattcctgatgtccgcatggtgatgtggcttgatgtttctattctcacttgtcattgacacagtgagggaggcaaaacagtgtg

SEQ ID NO: 513926 - DNA, 120 bp, Artificial Sequence
  ENSG00000164659_61 (sequence is synthesized)
ctggctgtcaaggtgagatggacctatatttcagctccgatcaagttgatattttctgtgttaatggaccaataaattctctatggatatcaaccaagtgtcagaaactgaggtttgatt

SEQ ID NO: 513927 - DNA, 120 bp, Artificial Sequence
  ENSG00000164659_62 (sequence is synthesized)
gcttagatcctctattgctgcctagaatattggcagatttctccaccaggggcaaccttgtctggttctcagtgtatcaaatcacttatgcagtcagttgaaacctgaagcttggagcta

SEQ ID NO: 513928 - DNA, 120 bp, Artificial Sequence
  ENSG00000164663_0 (sequence is synthesized)
gggccccagaatttaaaggatgagatggggagtaagggaagagagggggctaagagaagctgggggagtcctgatggatgtagaactggggtagactgcaggggggtgggaatcgaatgt

SEQ ID NO: 513929 - DNA, 120 bp, Artificial Sequence
  ENSG00000164663_1 (sequence is synthesized)
gcgtgttatggggagttgctccagaaggtctgcaagggtcagggcagaaatgctgtagtgaaagatcaagtgtaagagagcctttggtgcagaagacgaggaaccatggtaatagagaag

SEQ ID NO: 513930 - DNA, 120 bp, Artificial Sequence
  ENSG00000164663_2 (sequence is synthesized)
aggaaacctaaccaatgactgtggaataatatggaagaagatggaaaaaacttgtttaatgggttgagaaagtggcgacttctataagacatggatagatgcaaacatgtagggcggtta

SEQ ID NO: 513931 - DNA, 120 bp, Artificial Sequence
  ENSG00000164663_3 (sequence is synthesized)
cggctcgcccaggaccactccatcctgaaccctcagaagtggtgctgcttagagtgtgccaccaccgagtccgtgtgggcctgcctcaagtgctcccacgtggcctgcggccgctatatt

SEQ ID NO: 513932 - DNA, 120 bp, Artificial Sequence
  ENSG00000164663_4 (sequence is synthesized)
gaggaccacgccctgaaacactttgaggagacgggacacccgctagccatggaagtccgggatctctacgtgttctgttacctgtgcaaggactacgtgctcaatgataacccagagggg

SEQ ID NO: 513933 - DNA, 120 bp, Artificial Sequence
  ENSG00000164663_5 (sequence is synthesized)
gacctgaagctgctaagaagctccctcctggcggtccggggccagaaacaggacacgccggtgagacgtgggcggacgctgcggtccatggcttcgggtgaggacgtggtcctgccgcag

SEQ ID NO: 513934 - DNA, 120 bp, Artificial Sequence
  ENSG00000164663_6 (sequence is synthesized)
cgcgctcctcagggacagccgcagatgctcacggctctgtggtaccggcgtcagcgcctgctggccaggacgctgcggctgtggttcgagaagagctcccggggccaggcgaagctggag

SEQ ID NO: 513935 - DNA, 120 bp, Artificial Sequence
  ENSG00000164663_7 (sequence is synthesized)
cagcggcggcaggaggaggccctggagcgcaagaaggaggaggcgcggaggcggcggcgcgaggtgaaacggcggctgctggaggagctggccagcacccctccgcgcaagagtgcacgg

SEQ ID NO: 513936 - DNA, 120 bp, Artificial Sequence
  ENSG00000164663_8 (sequence is synthesized)
aagagtgcacggctgctcctgcacacgccccgcgacgcgggcccggctgcctcgcgccccgccgccctccctacctcacgcagagtgcccgccgccacactcaagctgcgtcgccagccg

SEQ ID NO: 513937 - DNA, 120 bp, Artificial Sequence
  ENSG00000164663_9 (sequence is synthesized)
ggcgtcacgggcctgcgcaacctgggcaacacctgctacatgaactccatcctccaggtgctcagccacctccagaagttccgagaatgtttcctcaaccttgacccttccaaaacggaa

SEQ ID NO: 513938 - DNA, 120 bp, Artificial Sequence
  ENSG00000164663_10 (sequence is synthesized)
catctgtttcccaaagccaccaacgggaagactcagctttctggcaagccaaccaacagctcggccacggagctgtccttgagaaatgacagggccgaggcatgcgagcgggagggcttc

SEQ ID NO: 513939 - DNA, 120 bp, Artificial Sequence
  ENSG00000164663_11 (sequence is synthesized)
tgctggaacggcagggcctccattagtcggagtctggagctcatccagaacaaggagccgagttcaaagcacatttccctctgccgtgaactgcacaccctcttccgagtcatgtggtcc

SEQ ID NO: 513940 - DNA, 120 bp, Artificial Sequence
  ENSG00000164663_12 (sequence is synthesized)
gggaagtgggccctagtgtcgcccttcgccatgctccactcagtgtggagcctgatccctgccttccgcggctacgaccaacaggacgcgcaggaatttctctgcgagctgctgcacaag

SEQ ID NO: 513941 - DNA, 120 bp, Artificial Sequence
  ENSG00000164663_13 (sequence is synthesized)
gtgcagcaggaactcgagtctgagggcaccacacgccggatcctcatccccttctcccagaggaagctcaccaaacaggtcttaaaggtggtgaataccatatttcatgggcagctgctc

SEQ ID NO: 513942 - DNA, 120 bp, Artificial Sequence
  ENSG00000164663_14 (sequence is synthesized)
agtcaggtcacatgtatatcatgcaattacaaatccaataccattgagcccttttgggacctatccctggaattccctgaacgctatcactgcatagaaaaggggtttgtccctttgaat

SEQ ID NO: 513943 - DNA, 120 bp, Artificial Sequence
  ENSG00000164663_15 (sequence is synthesized)
caaacagagtgcttgctcactgagatgctggccaaattcacagagacagaggccctggaagggagaatctacgcttgtgaccagtgtaacagcaaacgacgaaaatccaatcccaaaccc

SEQ ID NO: 513944 - DNA, 120 bp, Artificial Sequence
  ENSG00000164663_16 (sequence is synthesized)
cttgttctgagtgaagctagaaagcagttaatgatctacagactacctcaggttctccggctgcaccttaaaagattcaggtggtctggccgtaatcatcgagagaagattggggtccat

SEQ ID NO: 513945 - DNA, 120 bp, Artificial Sequence
  ENSG00000164663_17 (sequence is synthesized)
gtcgtctttgaccaggtattaaccatggaaccttactgctgcagggacatgctctcctctcttgacaaagagacctttgcctatgatctctccgcagtggtcatgcatcacgggaaaggg

SEQ ID NO: 513946 - DNA, 120 bp, Artificial Sequence
  ENSG00000164663_18 (sequence is synthesized)
tttggctcaggacactacacagcctattgctacaacacagagggaggtttttgggtccactgcaatgactcaaagctgaatgtatgcagtgtcgaggaagtgtgcaaaacccaggcctac

SEQ ID NO: 513947 - DNA, 120 bp, Artificial Sequence
  ENSG00000164663_19 (sequence is synthesized)
atccttttttacactcaaagaacagtgcagggcaatgcaagaatctcagaaacccatctccaagctcaggtgcagtccagcaacaatgatgaaggcagaccacagacattttcctgaatg

SEQ ID NO: 513948 - DNA, 120 bp, Artificial Sequence
  ENSG00000164663_20 (sequence is synthesized)
ggaggcatgtatcaaagactggcttttgtgtattggtgtccatacatctttcctcttataggaaataaggctactgcaggaacagattactaggtttgccttgctgggtctagagtagaa

SEQ ID NO: 513949 - DNA, 120 bp, Artificial Sequence
  ENSG00000164663_21 (sequence is synthesized)
ggtgccaggtgattcgtgtcctgtcgtaaattttatagtctctttcttttgaatgagtttgggagttccctcctttcctaaaaacaaaagaagtaacttctatgaagatcctttcatcag

SEQ ID NO: 513950 - DNA, 120 bp, Artificial Sequence
  ENSG00000164663_22 (sequence is synthesized)
ttgcttctgaatatagagggatctgggtggaggaaagcggggcgggggggtaaatcaatcatatccacacaggagagcagccatgttttctctccatgatgtgattcccctgctaatcag

SEQ ID NO: 513951 - DNA, 120 bp, Artificial Sequence
  ENSG00000164663_23 (sequence is synthesized)
gacctccttgcagcaccagaagaaccctccggatgtgagcagtcctggacagagcacgtgaggaggggccctgggctagcagtttgctggatgggattggctccaagatgggagatgaag

SEQ ID NO: 513952 - DNA, 120 bp, Artificial Sequence
  ENSG00000164663_24 (sequence is synthesized)
tctaaagggtttattcccacaaaggaagtaaccttcaagggtttaaaacaaacttccttttttggggatagcagctgaagagtggagtgagatgcatggaacaaatttccccatgcaaag

SEQ ID NO: 513953 - DNA, 120 bp, Artificial Sequence
  ENSG00000164663_25 (sequence is synthesized)
tgggatggttttcatatgtcataccctccctacttgctgctgtcatataatcattccatacttctgagactggcatgaataccccttcattctaaagaaggggcaggtcatataaagaag

SEQ ID NO: 513954 - DNA, 120 bp, Artificial Sequence
  ENSG00000164663_26 (sequence is synthesized)
caatagactagcacatgttccatgctgagccaaaggacactcctggctatctcagttctgtagcagatccctggttcaggtctagggcaagcacatggtttggtttaaattgattcttag

SEQ ID NO: 513955 - DNA, 120 bp, Artificial Sequence
  ENSG00000164663_27 (sequence is synthesized)
gttttctcagaactcaattgagggtgggcagagatagctgatgctccagggcttattgaaggcctgtcacccgttctcacttcagtgcggcatgcagcttcttagcctgcagcttctttc

SEQ ID NO: 513956 - DNA, 120 bp, Artificial Sequence
  ENSG00000164663_28 (sequence is synthesized)
ttgctcctggagagctagaacattcatgttcacagggtttgggagcttttggttctctagggtatgttaactgcttaggagtccacctcgtacatatctgaagagttgattaccaatggc

SEQ ID NO: 513957 - DNA, 120 bp, Artificial Sequence
  ENSG00000164663_29 (sequence is synthesized)
cttgacctgtttcctcccaaatctgataatccctactgttgctttaccccccatactcagtccatcagagaaaaaaacaagagtgccccgtcctttcccccagtgctagtaaaatacatc

SEQ ID NO: 513958 - DNA, 120 bp, Artificial Sequence
  ENSG00000164663_30 (sequence is synthesized)
ttcctttttaaattgggtcagtttctaaacagaatgaaattgcccagataaaaacccttgtccccatcaggcaccacttcattcttagttcttcacttagatttgctggtgaaagtgaat

SEQ ID NO: 513959 - DNA, 120 bp, Artificial Sequence
  ENSG00000164663_31 (sequence is synthesized)
gcaaaccctaacttttgttgctgtggtcactgcagtgagcctcactcaacctgtcactatgaatgctcatcttttgactgagtatatcatattaatgtttgaattcaggtagaagtacag

SEQ ID NO: 513960 - DNA, 120 bp, Artificial Sequence
  ENSG00000164663_32 (sequence is synthesized)
ttgtcacttgaagggagtagatgtggaagggcgttcggggaggagtgggaagtggggaaagccaggctaaagaatgagggttatagctttagcaatgttgatgagccacatttcccacac

SEQ ID NO: 513961 - DNA, 120 bp, Artificial Sequence
  ENSG00000164663_33 (sequence is synthesized)
agatctgtagcatttgctgttgacctcttttgagatgaactctcccataggccctgccaggcagcactgagacatggaggaaattcagacaaaaaatggctcaccctgatagggaaggag

SEQ ID NO: 513962 - DNA, 120 bp, Artificial Sequence
  ENSG00000164663_34 (sequence is synthesized)
tgactatattttaaattaaacttgctttttccaacactgtgaggtttctgtaatatttagcttttatttggaagcgatagcgtatggcattttttatgctgtttggtttatattgtctac

SEQ ID NO: 513963 - DNA, 120 bp, Artificial Sequence
  ENSG00000164663_35 (sequence is synthesized)
tgcaggcttctttgtataagctttgcctgggctcaccctctcctggacactgttttaaagtgtcaccgctgtccatgctgccagaggctctgatgtgaagctgtactctcaagatccacg

SEQ ID NO: 513964 - DNA, 120 bp, Artificial Sequence
  ENSG00000164663_36 (sequence is synthesized)
tttttaagtcggcatgattagtaatgactttttgtggcaatagaaaagcccattaactcaaaaaaaccaaggagagtaaaaaggaaaggaaactatgaatcgtgcctcatctttcattga

SEQ ID NO: 513965 - DNA, 120 bp, Artificial Sequence
  ENSG00000164663_37 (sequence is synthesized)
acaagatagagaagaactaatagagcatctactttacccctcaggctgtccagtggggataattattaataaacatttaatggaaaattcaaagatcttccaatttaatttttaaaaata

SEQ ID NO: 513966 - DNA, 120 bp, Artificial Sequence
  ENSG00000164663_38 (sequence is synthesized)
gttttataccaaatattataaggatttattaagcagattaaggactttgtgaaataagtgcttaacttagctgagcacgcatatatcaaagtaataaaagaaactaacatcagagtctcc

SEQ ID NO: 513967 - DNA, 120 bp, Artificial Sequence
  ENSG00000164663_39 (sequence is synthesized)
actgagctacacatttgtgaaaggtgcccactgcagttacagacacctcaggtacccagaggcggcagcactggacacttaggacgttagtatttaaggagatttttattaaagaagagt

SEQ ID NO: 513968 - DNA, 120 bp, Artificial Sequence
  ENSG00000164663_40 (sequence is synthesized)
tccctgctgcataagccaatggctattgtgagggaaatgtccctttgcctttaatttatttacgtactgggtatagatgaatgtctcagttgcatctgaaattgaatcattctaaagaga

SEQ ID NO: 513969 - DNA, 120 bp, Artificial Sequence
  ENSG00000164663_41 (sequence is synthesized)
agaaaataagaaccaggtaaaaactgactagatgctgccaaatcaaacccaaggtctcctaaccgaaccttaatgggcctgcttctctcccagggcaagtagttaagagtctcattccag

SEQ ID NO: 513970 - DNA, 120 bp, Artificial Sequence
  ENSG00000164663_42 (sequence is synthesized)
gaaccctttgtagttagttggctggcatgtttacttgctgctgtagccagccaagatgagtgcacctaggccctcaaaaaggatttttttttacctcaatctagcctgaccctcatatct

SEQ ID NO: 513971 - DNA, 120 bp, Artificial Sequence
  ENSG00000164663_43 (sequence is synthesized)
gtggttgcctctgagacgaacatccatgctagtataaaaatagttaggaatgcccttggcagaactgaagctcttattaaatggtggacagagctcttgccagctttgatccagcccctc

SEQ ID NO: 513972 - DNA, 120 bp, Artificial Sequence
  ENSG00000164663_44 (sequence is synthesized)
atggtggacagagctcttgccagctttgatccagcccctcagtctcggagttatggggcagggttggggggcagtgctacactgtaaagaatttccaggctgggcgcggtggctcatgcc

SEQ ID NO: 513973 - DNA, 120 bp, Artificial Sequence
  ENSG00000164663_45 (sequence is synthesized)
aaaaaaaaaaaagaatttccagatgtctcttaaaatgtcatgaataaaattggaaactgtagaagtgttaatgtgtcctatggactcaatagcagagtttatttttgtttttaatggcaa

SEQ ID NO: 513974 - DNA, 120 bp, Artificial Sequence
  ENSG00000164663_46 (sequence is synthesized)
ggcttctagagtcaatgattgtatgagtttgctactctggctgtgcttacagcttcatccaagtacaagggaagaaccaatgaggtggattggctgacagtggggcatgccccagcataa

SEQ ID NO: 513975 - DNA, 120 bp, Artificial Sequence
  ENSG00000164663_47 (sequence is synthesized)
gccctagagaggtcgacagtagtgcagaatgaaaacttggtcggggatggcgggtggtgggtgggaggagggtgggctggccgggagggagaaatggagtttgttctacttactgataaa

SEQ ID NO: 513976 - DNA, 120 bp, Artificial Sequence
  ENSG00000164663_48 (sequence is synthesized)
gctttgtgaactaattttatacaattcataaaatttggtgccttgtactcaattacggtttgcatggaattgaaaagattaagggaaaggatttcttcttgtcatttcaagtggcaaatg

SEQ ID NO: 513977 - DNA, 120 bp, Artificial Sequence
  ENSG00000164663_49 (sequence is synthesized)
ggtctgtgtagtgtttaaaggacatctggtatcacagacttttaaaaagcatttcatgtctcttgtgtgtgaatgcaaattattcttaccagcaagttctgaaattatgttacaatgtcc

SEQ ID NO: 513978 - DNA, 120 bp, Artificial Sequence
  ENSG00000164663_50 (sequence is synthesized)
aaattctttgtatttgtgactgttcatcaaatggctgcttttcaaggcagactgtgtactccattgtttttcacttcccttgtcatgttccatacattgacttgggcctttttaaatcag

SEQ ID NO: 513979 - DNA, 120 bp, Artificial Sequence
  ENSG00000164663_51 (sequence is synthesized)
gctggggggctaccccttcttaaatgaatactatatccctatctgaggttacctcttgtgagtggaagggttgctttcccaggtggttgggagagcacaaatgttgagaaaaggcctttt

SEQ ID NO: 513980 - DNA, 120 bp, Artificial Sequence
  ENSG00000164663_52 (sequence is synthesized)
agtctttatcaaaacaatgactaatgctgggcaacatatagcagaagtcaaacaaaaatgattcctcctgaaatggtaccttcattggttctgatgttcttttgcaaaaaatgtccggaa

SEQ ID NO: 513981 - DNA, 120 bp, Artificial Sequence
  ENSG00000164663_53 (sequence is synthesized)
gcagtatagaaaaccccctgtatgtgaaccttagattgtaaggcaagccagtgcactgtgtaatatgcaaagggagtggtgcaaaagagaaggcacccgtcccagctctccatgcccttt

SEQ ID NO: 513982 - DNA, 120 bp, Artificial Sequence
  ENSG00000164663_54 (sequence is synthesized)
ccctggcaggcgctgactgagatggcgctgagtgaatgtggaaggtgctaagacccagtctcttcactgcagggctgtttacagccagtttcttttactctgaccttaaggtttccactg

SEQ ID NO: 513983 - DNA, 120 bp, Artificial Sequence
  ENSG00000164663_55 (sequence is synthesized)
agctcatgaaacttcaacatatggtgtttaaaagtttcccactcaaatgcacacttgaaaattgggtccctcagcctcattactgaactaaataagtgaagaagttgtatctttggggta

SEQ ID NO: 513984 - DNA, 120 bp, Artificial Sequence
  ENSG00000164663_56 (sequence is synthesized)
aaactttccagggccacttaattttttaaccagttaagtacgcatcttcctggtggttcagactttttaagtcagtgctaaagctgaaaagcgccttctaaatatgactgtgagtttagt

SEQ ID NO: 513985 - DNA, 120 bp, Artificial Sequence
  ENSG00000164663_57 (sequence is synthesized)
ttgtatcttacatttagtaactgttctgttgggccaggactatgactttaattactatgtacttattcatcccacactctgcactaaatacaccatagctactatagcattgtggcaggc

SEQ ID NO: 513986 - DNA, 120 bp, Artificial Sequence
  ENSG00000164663_58 (sequence is synthesized)
actcatttttgtggactcattccatacttctgctggcatatttcgtttaaaatctagctaaagattttcatagtactgtgttaactagccagggctgaaaagtgtgacaggatatcaaat

SEQ ID NO: 513987 - DNA, 120 bp, Artificial Sequence
  ENSG00000164663_59 (sequence is synthesized)
tgactttccttggggaaaatgttgctttggcaatagtgaagtccaactccttcatttacagaattagtgattactcatcaatttttgaaagttgtagattaagtagttttatttactaaa

SEQ ID NO: 513988 - DNA, 120 bp, Artificial Sequence
  ENSG00000164663_60 (sequence is synthesized)
tgtagattaagtagttttatttactaaattcttaaccactttgaagatttaagccagttgaaatgaaacattggctggatgcagttggctagcacctgtaatcccaacactttgggaggc

SEQ ID NO: 513989 - DNA, 120 bp, Artificial Sequence
  ENSG00000164663_61 (sequence is synthesized)
agctcaagaccagcctgggaaacatagatttgaaatcttttcaaaaatgtataaaaatttaataaataaataaatgaatccttactcaaccataattatggctttaaaacccaaccaaca

SEQ ID NO: 513990 - DNA, 120 bp, Artificial Sequence
  ENSG00000164663_62 (sequence is synthesized)
gtaaacacttacttgaagccaaaacagtaaattttgaatgaaatttgaattatgcttttggaagctgccatgtcttaattcttgctggattttgattttcaattttggaagtttttatca

SEQ ID NO: 513991 - DNA, 120 bp, Artificial Sequence
  ENSG00000164663_63 (sequence is synthesized)
aaactgtccagtcatgagtatatcaggtagcagcctttaaggatctaagtttcattcctataaagaacaggaggtgctggtatttcttgtcttagcaagtgatctgatgcaggtctaaat

SEQ ID NO: 513992 - DNA, 120 bp, Artificial Sequence
  ENSG00000164663_64 (sequence is synthesized)
gggggttagcatctatactatggcttaaaagtttcctccttggtcaccatttgggaggtgatggcttcaaagctaagctttgctctcatgtgacccttctttatcttaatacccaataag

SEQ ID NO: 513993 - DNA, 120 bp, Artificial Sequence
  ENSG00000164663_65 (sequence is synthesized)
atataaacctctcagagtcaacccagtgtagactcaaagggtcttagcttcatctatcagataagatctatctgatttatacaaagaatggtgctgtttttatatacatactaaaaaaat

SEQ ID NO: 513994 - DNA, 120 bp, Artificial Sequence
  ENSG00000164663_66 (sequence is synthesized)
ctaattctcaaacaattttcttaatatttatgccagcaaggtcaggaaagactattttgtcctgtttaactttagtagtgaacaaactgctagagacatctgtcatccttaacaggccac

SEQ ID NO: 513995 - DNA, 120 bp, Artificial Sequence
  ENSG00000164663_67 (sequence is synthesized)
tgtggtccttatatactgaccctcctttccaattaacgtcctttaatcccatactagttccataagagacttggcacataaaagcagtattttttttaatgcctagtaaactggccagaa

SEQ ID NO: 513996 - DNA, 120 bp, Artificial Sequence
  ENSG00000164663_68 (sequence is synthesized)
aaaaatattgccatggtggacctgtttctatccacctctttctatggctatataagtctatacatgccagttccgtacatactccatttccaaagagcccccaaaccctggacagtagca

SEQ ID NO: 513997 - DNA, 120 bp, Artificial Sequence
  ENSG00000164663_69 (sequence is synthesized)
ctaccatgaattttagggtcacaaaacatttccttctgaaggaagcagctgcctcagcagtgtcactttagtgaccactgcccaggcttacttcactttgcctccccctacacatcactg

SEQ ID NO: 513998 - DNA, 120 bp, Artificial Sequence
  ENSG00000164663_70 (sequence is synthesized)
ccctctttctgccaccaaacctcactattccagcaatgatgcctccctggtgtctggaaaacccatctggtgcactaaaatgctatgcaacaccaaatggcttcttcccctaatattgct

SEQ ID NO: 513999 - DNA, 120 bp, Artificial Sequence
  ENSG00000164663_71 (sequence is synthesized)
caacaatgtaaattcttcaagaataaacttcatgctaggttaacatcaatgtatggttacagcttccttttttttttttcccttttaaaatgaagcaaaccacctccattaaaatccatg

SEQ ID NO: 514000 - DNA, 120 bp, Artificial Sequence
  ENSG00000164663_72 (sequence is synthesized)
ttttggggcttgtttttgtctctcaagtgtgaaatataaatcatgtttttatgatttttgtaaatctttttacaccttgtttttgtaagcaaaagtttcttattaaaagaataaaatgac

SEQ ID NO: 514001 - DNA, 120 bp, Artificial Sequence
  ENSG00000164663_73 (sequence is synthesized)
attctgtaaagtgagggagggcaaatgagacctggactggaaccaggtggagtcaggaataagagtgtggtggaagggcgaaaggaaacagataagagatgggtgtctgtaggacgattc

SEQ ID NO: 514002 - DNA, 120 bp, Artificial Sequence
  ENSG00000164663_74 (sequence is synthesized)
tgggaccagaagagctgaaaggagactagagttagggtgtaagaagtgatggccatctgggacaaggataactgggtaattacgttaattgaagaggttcagcaagatccaaggtgaaaa

SEQ ID NO: 514003 - DNA, 120 bp, Artificial Sequence
  ENSG00000164663_75 (sequence is synthesized)
agtgcttcttttgctgggcaaattgtgtgaaagatgggagggcagcactgttgctattatggatattaacttatcaggacaataaggtcaaagtccctgttagagctaattagattctcc

SEQ ID NO: 514004 - DNA, 120 bp, Artificial Sequence
  ENSG00000164663_76 (sequence is synthesized)
ttgacaaaaattggaggtagcaacaaagaaaatcaatgctgtgaagtagattagaaaacaggctcggagaagttaaggaaggtcttgtaataaatggacaccatgatgttgactggtctc

SEQ ID NO: 514005 - DNA, 120 bp, Artificial Sequence
  ENSG00000164663_77 (sequence is synthesized)
tgttactccacatcatgtgctcttcttgcatgagccagacagcccctgagagttcagcatgtttcagtaacaggatcttgacagccagccattctgcagcaaaccacctactccaagggg

SEQ ID NO: 514006 - DNA, 120 bp, Artificial Sequence
  ENSG00000164663_78 (sequence is synthesized)
ggaactcgagtctgagggcaccacacgccggatcctcatccccttctcccagaggaagctcaccaaacaggtcttaaaggtggtgaataccatatttcatgggcagctgctcagtcaggc

SEQ ID NO: 514007 - DNA, 120 bp, Artificial Sequence
  ENSG00000164663_79 (sequence is synthesized)
cgcgccctggtgacagctcgcgcgtgctgatgatggcgattctttggatgggaagagaccttgaaaggacctctagtttatcctgcaactccagtcaatatcccacttaaatcattccag

SEQ ID NO: 514008 - DNA, 120 bp, Artificial Sequence
  ENSG00000164663_80 (sequence is synthesized)
ggtgcgtgcgctttactctgtggggtgggggacacggaaaggggttgatttgtccacattttattgttttccttttatttccatcccatggattacctagagggaaattacatacatcaa

SEQ ID NO: 514009 - DNA, 90 bp, Artificial Sequence
  ENSG00000164663_81 (sequence is synthesized)
ccatcccatggattacctagagggaaattacatacatcaaaaatccagtggaaagaattgtgaaaattgggttggctttgggaggccgcg

SEQ ID NO: 514010 - DNA, 120 bp, Artificial Sequence
  ENSG00000164663_82 (sequence is synthesized)
ttcagcctgggtgacagagcaagactcttatctcaaaaaaaataaaaagaattatgaaagttggattcaaattttgggtatattactaagtaacaacatatggttgttctaagaattaaa

SEQ ID NO: 514011 - DNA, 120 bp, Artificial Sequence
  ENSG00000164663_83 (sequence is synthesized)
ggtatattactaagtaacaacatatggttgttctaagaattaaaaggaactgacatgtaaaagtgcttagaacaggacctaggccctgtgcaatggctcacacctgtaattccaacactt

SEQ ID NO: 514012 - DNA, 120 bp, Artificial Sequence
  ENSG00000164663_84 (sequence is synthesized)
aggcagaggcgggaggattgcttgaggccgagggttcaagactagcctgggcaacatagcgagactgcatctctacaaaaaatttaaaaattatccaggtgtaatggtgtgcacctgtga

SEQ ID NO: 514013 - DNA, 120 bp, Artificial Sequence
  ENSG00000164663_85 (sequence is synthesized)
acttgggaggctgaggtgggagaattgctcaagcccaggagtttgaagttgcaatgagctatgatttcaccactgcattctagcctgggcaacagagtgagatcctgactcaaataaata

SEQ ID NO: 514014 - DNA, 120 bp, Artificial Sequence
  ENSG00000164663_86 (sequence is synthesized)
aataaataaataagaagagcagttgcctaccacatagtacttattcagtcagtgttagaggatattgtagtattatcaaaagtattggttattgataatattactgttttgtggtaatgc

SEQ ID NO: 514015 - DNA, 120 bp, Artificial Sequence
  ENSG00000164663_87 (sequence is synthesized)
tacttctgcacaccccagtttccttcttggttatgcagaaacagtagaacctgtgtaacctcaaggagatattgtatgaatctcactagccgcagcttataataaagccgagaacattta

SEQ ID NO: 514016 - DNA, 120 bp, Artificial Sequence
  ENSG00000164674_0 (sequence is synthesized)
ggaacctggatctaaggagggaagaggcgttgcccctgctggcatagtcaggtaccagcccagccaggtattgaacgggctgagcttttcatgatggttcctgctgacctggaaacatct

SEQ ID NO: 514017 - DNA, 120 bp, Artificial Sequence
  ENSG00000164674_1 (sequence is synthesized)
taaatggaagggcgtgagcgcttggtccatgcagtgaagctcttccaacctgggtcaacgaaaacggagaagaaatggcccaagaaatagatctgagtgctctcaaggagttagaacgcg

SEQ ID NO: 514018 - DNA, 120 bp, Artificial Sequence
  ENSG00000164674_2 (sequence is synthesized)
aggccattctccaggtcctgtaccgagaccaggcggttcaaaacacagaggaggagaggacacggaaactgaaaacacacctgcagcatctccggtggaaaggagcgaagaacacggact

SEQ ID NO: 514019 - DNA, 120 bp, Artificial Sequence
  ENSG00000164674_3 (sequence is synthesized)
gggagcacaaagagaagtgctgtgcgcgctgccagcaggtgctggggttcctgctgcaccggggcgccgtgtgccggggctgcagccaccgcgtgtgtgcccagtgccgagtgttcctga

SEQ ID NO: 514020 - DNA, 120 bp, Artificial Sequence
  ENSG00000164674_4 (sequence is synthesized)
gggggacccatgcctggaagtgcacggtgtgcttcgaggacaggaatgtcaaaataaaaactggagaatggttctatgaggaacgagccaagaaatttccaactggaggcaaacatgaga

SEQ ID NO: 514021 - DNA, 120 bp, Artificial Sequence
  ENSG00000164674_5 (sequence is synthesized)
cagttggagggcagctcttgcaatcttatcagaagctgagcaaaatttctgtggttcctcctactccacctcctgtcagcgagagccagtgcagccgcagtcctggcaggttacaggaat

SEQ ID NO: 514022 - DNA, 120 bp, Artificial Sequence
  ENSG00000164674_6 (sequence is synthesized)
ttggtcagtttagaggatttaataagtccgtggaaaatttgtttctgtctcttgctacccacgtgaaaaagctctccaaatcccagaatgatatgacttctgagaagcatcttctcgcca

SEQ ID NO: 514023 - DNA, 120 bp, Artificial Sequence
  ENSG00000164674_7 (sequence is synthesized)
cgggccccaggcagtgtgtgggacagacagagagacggagccagtctgacactgcggtcaacgtcaccaccaggaaggtcagtgcaccagatattctgaaacctctcaatcaagaggatc

SEQ ID NO: 514024 - DNA, 120 bp, Artificial Sequence
  ENSG00000164674_8 (sequence is synthesized)
ccaaatgctctactaaccctattttgaagcaacagaatctcccatccagtccggcacccagtaccatattctctggaggttttagacacggaagtttaattagcattgacagcacctgta

SEQ ID NO: 514025 - DNA, 120 bp, Artificial Sequence
  ENSG00000164674_9 (sequence is synthesized)
attttgacaatgctaatgtcactggagaaatagaatttgccattcattattgcttcaaaacccattctttagaaatatgcatcaaggcctgtaagaaccttgcctatggagaagaaaaga

SEQ ID NO: 514026 - DNA, 120 bp, Artificial Sequence
  ENSG00000164674_10 (sequence is synthesized)
agaaaaagtgcaatccgtatgtgaagacctacctgttgcccgacagatcctcccagggaaagcgcaagactggagtccaaaggaacaccgtggacccgacctttcaggagaccttgaagt

SEQ ID NO: 514027 - DNA, 120 bp, Artificial Sequence
  ENSG00000164674_11 (sequence is synthesized)
atcaggtggcccctgcccagctggtgacccggcagctgcaggtctcggtgtggcatctgggcacgctggcccggagagtgtttcttggagaagtgatcattcctctggccacgtgggact

SEQ ID NO: 514028 - DNA, 120 bp, Artificial Sequence
  ENSG00000164674_12 (sequence is synthesized)
ttgaagacagcacaacacagtccttccgctggcatccgctccgggccaaggcggagaaatacgaagacagcgttcctcagagtaatggagagctcacagtccgggctaagctggttctcc

SEQ ID NO: 514029 - DNA, 120 bp, Artificial Sequence
  ENSG00000164674_13 (sequence is synthesized)
cttcacggcccagaaaactccaagaggctcaagaagggacagatcagccatcacttcatggtcaactttgtttggtagtgctaggagccaagaatttacctgtgcggccagatggcacct

SEQ ID NO: 514030 - DNA, 120 bp, Artificial Sequence
  ENSG00000164674_14 (sequence is synthesized)
tgaactcatttgttaagggctgtctcactctgccagaccaacaaaaactgagactgaagtcgccagtcctgaggaagcaggcttgcccccagtggaaacactcatttgtcttcagtggcg

SEQ ID NO: 514031 - DNA, 120 bp, Artificial Sequence
  ENSG00000164674_15 (sequence is synthesized)
taaccccagctcagctgaggcagtcaagcttggagttaactgtctgggatcaggccctctttggaatgaacgaccgcttgcttggaggaaccagacttggttcaaagggagacacagctg

SEQ ID NO: 514032 - DNA, 120 bp, Artificial Sequence
  ENSG00000164674_16 (sequence is synthesized)
ttggcggggatgcatgctcactatcgaagctccagtggcagaaagtcctttccagccccaatctatggacagacatgactcttgtcctgcactgacatgaaggcctcaaggttccaggtt

SEQ ID NO: 514033 - DNA, 120 bp, Artificial Sequence
  ENSG00000164674_17 (sequence is synthesized)
gcagcaggcgtgaggcactgtgcgtctgcagaggggctacgaaccaggtgcagggtcccagctggagacccctttgaccttgagcagtctccatctgcggccctgtcccatggcttaacc

SEQ ID NO: 514034 - DNA, 120 bp, Artificial Sequence
  ENSG00000164674_18 (sequence is synthesized)
gcctattggtatctgtgtatatttacgttaaacacaattatgttacctaagcctctggtgggttatctcctctttgagatgtagaaaatggccagattttaataaacgttgttacccatg

SEQ ID NO: 514035 - DNA, 120 bp, Artificial Sequence
  ENSG00000164674_19 (sequence is synthesized)
aagaagaattgacttccttctctgcagagccggctctggtctcttctcttgaagcagatgcgaaggctccccgaatgagaaagaatactcggaatcagcggtgaattgcagtgatctttc

SEQ ID NO: 514036 - DNA, 120 bp, Artificial Sequence
  ENSG00000164674_20 (sequence is synthesized)
tctttttattgctatttctaaatttccttggcttgaaaattacttctgctttgcagaaattatctgcttgcagctgtggataatttataacaatctctggtgaaacctcagaaaagagat

SEQ ID NO: 514037 - DNA, 120 bp, Artificial Sequence
  ENSG00000164674_21 (sequence is synthesized)
atgcttttgtcttagatggatgtcagcagctgctgcagaacccggtgaaaacaccccccgggtagcacgaggctctgcgagccgtaactccgacaaacgcagaacttcttgaggctttct

SEQ ID NO: 514038 - DNA, 120 bp, Artificial Sequence
  ENSG00000164674_22 (sequence is synthesized)
tcttctaaggagtatgacacagttaaaaaggaaaaaagaaccacaagcaaaacagttgccagtgaaataggagagggagctctttaaacaaggctggctgcagctggcctccgccgctca

SEQ ID NO: 514039 - DNA, 120 bp, Artificial Sequence
  ENSG00000164675_0 (sequence is synthesized)
gttgctaggatacgaccaacagctgagaacgcggcgagtatggaagctgcgtcttaggagcctgggaaagcacttcgacgagaatagtttggtttcgtacacaggaaaatgtctaatcaa

SEQ ID NO: 514040 - DNA, 120 bp, Artificial Sequence
  ENSG00000164675_1 (sequence is synthesized)
caggagaagtatgaagctcagaatatagtcaattcaacagaagagagtgatgatgcttttgatactgtcactattccagttccctcagaagagcctcaagagtcagatcaaactgaagag

SEQ ID NO: 514041 - DNA, 120 bp, Artificial Sequence
  ENSG00000164675_2 (sequence is synthesized)
catgaatctggaatagaacaattcagtgagagccatgcaatacatgttgaggagcagagtgaccaaagcttttcaagcctggaaccagacaatgaacaactcatggaagaggttatatca

SEQ ID NO: 514042 - DNA, 120 bp, Artificial Sequence
  ENSG00000164675_3 (sequence is synthesized)
ccaagacaagtttcatatactccgcaacatcatgaaaagcaatatgcaatgcagaggccaaatgatgatagtttggcatttctggataaaataaagtctgtaaaggaatctttgcaagaa

SEQ ID NO: 514043 - DNA, 120 bp, Artificial Sequence
  ENSG00000164675_4 (sequence is synthesized)
tcagtggaagattctctagcaacagtaaaagttgtacttattccagtgggccaggaaattgtaataccttttaaggttgataccattcttaaatatcttaaggaccatttttcacactta

SEQ ID NO: 514044 - DNA, 120 bp, Artificial Sequence
  ENSG00000164675_5 (sequence is synthesized)
ttaggtatcccacattctgtactgcagataagatactcaggaaaaattcttaaaaataatgagactctagtacaacatggagttaagccacaggaaattgtacaagtggaaatcttttct

SEQ ID NO: 514045 - DNA, 120 bp, Artificial Sequence
  ENSG00000164675_6 (sequence is synthesized)
acaaatccagatctgtatccagtcagaagaatagatggattaactgatgtctctcaaatcataactgtcactgtccaaactggacttgatcaataccagcaggtacctgttgagattgtc

SEQ ID NO: 514046 - DNA, 120 bp, Artificial Sequence
  ENSG00000164675_7 (sequence is synthesized)
aaatctgactttcacaaaccatttcttggtggattcagacataaagtaacaggagtagagtatcacaatgctggaacacaaactgtacctaaaaggattcccgaaagactcagtatattt

SEQ ID NO: 514047 - DNA, 120 bp, Artificial Sequence
  ENSG00000164675_8 (sequence is synthesized)
tgtagggatacgcagacagtttttcagaaaaaaaatctccaacaaactacaaatacaacatccacacagatgactaacattggtgtatatgtatcaaatatgactgataaactggtaaca

SEQ ID NO: 514048 - DNA, 120 bp, Artificial Sequence
  ENSG00000164675_9 (sequence is synthesized)
ccaggaaagtatttttcagcagcagaataccatgctcaaagactaaaggcggtgatagtgatacagacttactacaggcaatggcatgctaaaatcttcgtagagaatttaagaagacag

SEQ ID NO: 514049 - DNA, 120 bp, Artificial Sequence
  ENSG00000164675_10 (sequence is synthesized)
aaaagcttaagactggaatgggaaacacagcaagaactaaggaagataagagaaaaagaagaatggataaaattggactatcaccggaggcataatcctaaaacaaatgaagattttgaa

SEQ ID NO: 514050 - DNA, 120 bp, Artificial Sequence
  ENSG00000164675_11 (sequence is synthesized)
tttctttataatgcattagaattctggcggcaagaagaacttacacgtattaaccaatcttttactggagctgaaaggaaagctgctctgtgtgaacttctggaaaaagagactcagata

SEQ ID NO: 514051 - DNA, 120 bp, Artificial Sequence
  ENSG00000164675_12 (sequence is synthesized)
atatggcaaatcaggaagcagcaatacaagcttttttggataagtgttcagctccaaaaatatggagaacccctaatggcaaaacaattgagatggatacgcagttcaccatcagagcca

SEQ ID NO: 514052 - DNA, 120 bp, Artificial Sequence
  ENSG00000164675_13 (sequence is synthesized)
gagagctgcaaaatatctataagtgcattatgctgaaaaatatctcccaagatgagaggctggatgtgctgttaactcttaaacacactgtaaaggaacatgaatgtaaactaactcagg

SEQ ID NO: 514053 - DNA, 120 bp, Artificial Sequence
  ENSG00000164675_14 (sequence is synthesized)
aaattctagaattgattgacagagaggttgaccttatgatgagaggagtcaaacatcataaccttgaaggactcagaaaaagaattgcgacactcttttttcattatatcaaaacacctc

SEQ ID NO: 514054 - DNA, 120 bp, Artificial Sequence
  ENSG00000164675_15 (sequence is synthesized)
tgtttaatcctgaagttgcaaaataccttaaggtccctcaagacccattgaaattttataagaagatttacttttgccacagttgccagctttatttgccttctacagaattttctgtat

SEQ ID NO: 514055 - DNA, 120 bp, Artificial Sequence
  ENSG00000164675_16 (sequence is synthesized)
catccacctcacgccgcatataccggtgtcgtaactgcattaaccttcagaatgaggctcaaaaacgagaatcatttttgaagtacaaatgtttacttcaacagctctactatacagaag

SEQ ID NO: 514056 - DNA, 120 bp, Artificial Sequence
  ENSG00000164675_17 (sequence is synthesized)
ctgattatgaagatgattctaaaattgctttcttgatgcagctacaagacattcagtacctgacagagaacatctgggcgtcccagtcagtcctcagtgcttgcgacaatctcagtgatc

SEQ ID NO: 514057 - DNA, 120 bp, Artificial Sequence
  ENSG00000164675_18 (sequence is synthesized)
tggtcatggtcagatggaataaatccctggagtggtccccctggaactgcattcttcttaccaaagatgaagcagctgctcatctcaagctaacaagtattgaagagggatatgaacgct

SEQ ID NO: 514058 - DNA, 120 bp, Artificial Sequence
  ENSG00000164675_19 (sequence is synthesized)
catttattcacaagatcaaacacaaacatatcctggctaagaactatttttctcaggttccagtgctggcttcatttatacttgatgatggtgaaattgatgagatcagatggaagtatc

SEQ ID NO: 514059 - DNA, 120 bp, Artificial Sequence
  ENSG00000164675_20 (sequence is synthesized)
actcagacacaacacctaagattatagaatcccagaggcctcctcattaggtgatccaggagtatttgtttgatgatcggcattttgttcactgctaatagggtaatacagaggtcacag

SEQ ID NO: 514060 - DNA, 120 bp, Artificial Sequence
  ENSG00000164675_21 (sequence is synthesized)
agtatggaaatggaatttaatctgtttattgattttgttttttgtttttcatagtattttgagttatataaagagaaaacatttctatataagtaagtattctttgttaggaagttggtg

SEQ ID NO: 514061 - DNA, 120 bp, Artificial Sequence
  ENSG00000164675_22 (sequence is synthesized)
ggtgctaaattgaaatgcaattttgttactgaaattaatattttggggtaaagaaaacattttaaaatgtgttttcacattaaattttttaaattttttcaagtatattagagttaaaat

SEQ ID NO: 514062 - DNA, 120 bp, Artificial Sequence
  ENSG00000164675_23 (sequence is synthesized)
caaacagccaaataaaaactagacaactttcaagttatttattttagatagaatgtagttataggaagctaatcagtatgtggaggggaggaaacattataaagtgctctttcttgaaaa

SEQ ID NO: 514063 - DNA, 120 bp, Artificial Sequence
  ENSG00000164675_24 (sequence is synthesized)
cttctttaagtaggataaaaaaatttatattttagtataggcatttgaatctttgcagtttatcgtctgctttcaccttccatccttctcataatcccaataaaacaacacttgaaacta

SEQ ID NO: 514064 - DNA, 120 bp, Artificial Sequence
  ENSG00000164675_25 (sequence is synthesized)
gagcaactgccggcctccgcccccagccgcagccggtcactggcggcgccttccgcgccaagcttgggggccttttcggggtcctacatggcacggcttccgacccccggcccgggacgg

SEQ ID NO: 514065 - DNA, 120 bp, Artificial Sequence
  ENSG00000164675_26 (sequence is synthesized)
ggctcgcaggccccagaggggcaggctggagaaggaggaggttaggtgtcttcaggagggttgctgagcccaaggacgcgccatcgccgcggagaaggagccggaccccttgggcggagc

SEQ ID NO: 514066 - DNA, 120 bp, Artificial Sequence
  ENSG00000164675_27 (sequence is synthesized)
gcccaatgtgtggtccctcacgccgtcccgcaccttgctttttagggttctttttccgctttctgagcccttttataccttacgtttagaaggggaaaatcatcctcccacaccttctcc

SEQ ID NO: 514067 - DNA, 120 bp, Artificial Sequence
  ENSG00000164675_28 (sequence is synthesized)
ccgactttttgccttttttgtcttgaagttacccaaaggtctgtgtattgttctcagtggtcccaagaattactcgaatatagttgtttttctgagggaggatggatggagataactatc

SEQ ID NO: 514068 - DNA, 120 bp, Artificial Sequence
  ENSG00000164675_29 (sequence is synthesized)
tggcattatagtaaatgctccatctataatggagacgtgtgctaacgtgttttcatgaggttgactgatatatttgctaatttaatgcctaggaggcatgaagataaaataatcattcaa

SEQ ID NO: 514069 - DNA, 120 bp, Artificial Sequence
  ENSG00000164675_30 (sequence is synthesized)
ggctcctcccctttctcctgccatgtttcttctccccgccccctcgcctctggctcctcccccttttccctatcgcgttcctcctttgcagcccccatccccctcctctggctcctcttc

SEQ ID NO: 514070 - DNA, 120 bp, Artificial Sequence
  ENSG00000164675_31 (sequence is synthesized)
ttccctaccgcgatcctccttccagaccccggcccccagcccgcctctagctccttcccttatttcctgccgcgctcctccttcccgacaccgcccctccgcctctggctactcctcttc

SEQ ID NO: 514071 - DNA, 120 bp, Artificial Sequence
  ENSG00000164675_32 (sequence is synthesized)
tctcctgccgcactcctccttcccggccccacctccccgcctctggctcatccccttctcttctgccgccctcctccttcccggccccgcccccagtctttggctcctccccctaccctg

SEQ ID NO: 514072 - DNA, 120 bp, Artificial Sequence
  ENSG00000164675_33 (sequence is synthesized)
ccgcgctcctccttcccggcccctccccgctgccctcttctggctcctcccccccacccgcctctggctcctctccttcccacccctgccgtgctccggcaggaagaggtggtgccaggg

SEQ ID NO: 514073 - DNA, 120 bp, Artificial Sequence
  ENSG00000164675_34 (sequence is synthesized)
tctttaggtttttgaaggtatagactcaataattgtactgtatgactctctcaaatttctcttaagtaattatatggcaattaataaaagaaaatgaactcacatatgtagaaaaactcc

SEQ ID NO: 514074 - DNA, 120 bp, Artificial Sequence
  ENSG00000164675_35 (sequence is synthesized)
catgctcaaagactaaaggcggtgagataacttttattgtggatgaatactaaaaatttgatatataagccagttgttccgagtgtgtctctttctccaagccacatttgcttgagaaag

SEQ ID NO: 514075 - DNA, 120 bp, Artificial Sequence
  ENSG00000164675_36 (sequence is synthesized)
aatgctcatgagtatgggtcatatttcactgctaacaaagcagtctttatctccagtattcccccatgtaaagaaccagcatcctaaatgctcctaatccttccttttctcttagggaaa

SEQ ID NO: 514076 - DNA, 120 bp, Artificial Sequence
  ENSG00000164675_37 (sequence is synthesized)
cccagcttctttgtgtattgcctttggccattattagccttctcaacactgctgtcccttggccttaaatcttgtcacagtagaatcaccaagggaactttcgagactaattgaaaccaa

SEQ ID NO: 514077 - DNA, 120 bp, Artificial Sequence
  ENSG00000164675_38 (sequence is synthesized)
ataggacagtagtcgattttctctgatattaacatagccgctccaactctgttttatttttttgcatagtctctcatttttcattcttttactttcaacctatttgatctacctcctacc

SEQ ID NO: 514078 - DNA, 120 bp, Artificial Sequence
  ENSG00000164675_39 (sequence is synthesized)
atcaatttactgtgagtaaaaatgacctgaaagcagtgactttaagagattttgcttttcaaatgacaagaaatctggagctaggctattcagcccaagacctttagagacaaacttgta

SEQ ID NO: 514079 - DNA, 120 bp, Artificial Sequence
  ENSG00000164675_40 (sequence is synthesized)
gtgaaaaaaagttaagtctgttgacttaattgccctgaaggagacagtataccaggggaaccatggggttaactttatagcaggctttatcagtgccagttattccagcctgataatttt

SEQ ID NO: 514080 - DNA, 120 bp, Artificial Sequence
  ENSG00000164675_41 (sequence is synthesized)
ttactttttcagtccaaactaaatttcaccaaataaaggaatatatggagttattatataatttggggaagagtgaagtttgagtgggatttaggggaagcagtattctgattgtctcaa

SEQ ID NO: 514081 - DNA, 120 bp, Artificial Sequence
  ENSG00000164675_42 (sequence is synthesized)
tgcaaaacaagggtgtgtataaatgggccaacattaggtctggactgtgaagtagaccaaggtcacgttcctttggaaacaaagttaaaagagatgggaaatgtttcttagaagttctct

SEQ ID NO: 514082 - DNA, 120 bp, Artificial Sequence
  ENSG00000164675_43 (sequence is synthesized)
gaagttcagcaccttggttgtataattgaggctgcttctctctgtcaaagtgacgtgcaacctctaggcaagagtggaatgtttgtttcttactgatctaatttcagacaggaaagtttc

SEQ ID NO: 514083 - DNA, 120 bp, Artificial Sequence
  ENSG00000164675_44 (sequence is synthesized)
tgatagtttctgaatttagagaacgaagtttctcagtgagtaagaagatagcagtcactaaaagaaggggattgttgaaatattttatagttgtagagtgtccttgggagaaatactgtt

SEQ ID NO: 514084 - DNA, 120 bp, Artificial Sequence
  ENSG00000164675_45 (sequence is synthesized)
tttgttaattttgtagctgacctgattagtgcctgttattccagcctgacaattttttactttctcagtcttaattaatttttactttcttactatactgggcatgggtggtgactctat

SEQ ID NO: 514085 - DNA, 120 bp, Artificial Sequence
  ENSG00000164675_46 (sequence is synthesized)
gatgtcatcagaatcataaactcctttcatctttctactccattaagctcatcatgagcttgttactgtatgaagataaaatggttgactaactttcatcatgcctgcattccatgtgag

SEQ ID NO: 514086 - DNA, 120 bp, Artificial Sequence
  ENSG00000164675_47 (sequence is synthesized)
aagaagggaaaagtcaaggcagcatgttccatgaatgccaccttcaaggatttccccggaaagccccacccagtgacttctacttgcatcccattggcttgaactatgtcatgtgactat

SEQ ID NO: 514087 - DNA, 120 bp, Artificial Sequence
  ENSG00000164683_0 (sequence is synthesized)
agtgtgtgcggaacgcaagcagccgagagcggagaggcgccgctgtagttaactcctccctgcccgccgcgccgaccctccccaggaacccccagggagccagcatgaagcgagctcacc

SEQ ID NO: 514088 - DNA, 120 bp, Artificial Sequence
  ENSG00000164683_1 (sequence is synthesized)
ccgagtacagctcctcggacagcgagctggacgagaccatcgaggtggagaaggagagtgcggacgagaatggaaacttgagttcggctctaggttccatgtccccaactacatcttccc

SEQ ID NO: 514089 - DNA, 120 bp, Artificial Sequence
  ENSG00000164683_2 (sequence is synthesized)
agattttggccagaaaaagacggagaggaataattgagaagcgccgacgagaccggatcaataacagtttgtctgagctgagaaggctggtacccagtgcttttgagaagcagggatctg

SEQ ID NO: 514090 - DNA, 120 bp, Artificial Sequence
  ENSG00000164683_3 (sequence is synthesized)
ctaagctagaaaaagccgagatcctgcagatgaccgtggatcacctgaaaatgctgcatacggcaggagggaaaggttactttgacgcgcacgcccttgctatggactatcggagtttgg

SEQ ID NO: 514091 - DNA, 120 bp, Artificial Sequence
  ENSG00000164683_4 (sequence is synthesized)
gatttcgggaatgcctggcagaagttgcgcgttatctgagcatcattgaaggactagatgcctctgacccgcttcgagttcgactggtttcgcatctcaacaactacgcttcccagcggg

SEQ ID NO: 514092 - DNA, 120 bp, Artificial Sequence
  ENSG00000164683_5 (sequence is synthesized)
aagccgcgagcggcgcccacgcgggcctcggacacattccctgggggaccgtcttcggacatcacccgcacatcgcgcacccgctgttgctgccccagaacggccacgggaacgcgggca

SEQ ID NO: 514093 - DNA, 120 bp, Artificial Sequence
  ENSG00000164683_6 (sequence is synthesized)
ccacggcctcacccacggaaccgcaccaccagggcaggctgggctcggcacatccggaggcgcctgctttgcgagcgccccctagcggcagcctcggaccggtgctccctgtggtcacct

SEQ ID NO: 514094 - DNA, 120 bp, Artificial Sequence
  ENSG00000164683_7 (sequence is synthesized)
ccgcctccaaactgtcgccgcctctgctctcctcagtggcctccctgtcggccttccccttctctttcggctccttccacttactgtctcccaatgcactgagcccttcagcacccacgc

SEQ ID NO: 514095 - DNA, 120 bp, Artificial Sequence
  ENSG00000164683_8 (sequence is synthesized)
aggctgcaaaccttggcaagccctatagaccttgggggacggagatcggagctttttaaagaactgatgtagaatgagggaggggaaagtttaaaatcccagctgggctggactgttgcc

SEQ ID NO: 514096 - DNA, 120 bp, Artificial Sequence
  ENSG00000164683_9 (sequence is synthesized)
aaaaggtacactttcagataattttttttttaaagactaaaggtttgttggtttacttttatcttttttaatgtttttttcatcatgtcatgtattagcagtttttaaaaactagttgtt

SEQ ID NO: 514097 - DNA, 120 bp, Artificial Sequence
  ENSG00000164683_10 (sequence is synthesized)
aaattttgttcaagacattaaattgaaatagtgagtataagccaacactttgtgataggtttgtactgtgcctaatttactttgtaaaccagaatgattccgtttttgcctcaaaatttg

SEQ ID NO: 514098 - DNA, 120 bp, Artificial Sequence
  ENSG00000164683_11 (sequence is synthesized)
gggaatcttaacatttagtatttttggtctgtttttctccttgtatagttatggtctgtttttagaattaattttccaaaccactatgcttaatgttaacatgattctgtttgttaatat

SEQ ID NO: 514099 - DNA, 120 bp, Artificial Sequence
  ENSG00000164683_12 (sequence is synthesized)
tttgacagattaaggtgttgtataaataatattcttttggggggaggggaactatattgaattttatatttctgagcaaagcgttgacaaatcagatgatcagctttatccaagaaagaa

SEQ ID NO: 514100 - DNA, 120 bp, Artificial Sequence
  ENSG00000164683_13 (sequence is synthesized)
gactagtaaattgtctgcctcctatagcagaaaggtgaatgtacaaactgttggtggccctgaatccatctgaccagctgctggtatctgccaggactggcagttctgatttagttagga

SEQ ID NO: 514101 - DNA, 120 bp, Artificial Sequence
  ENSG00000164683_14 (sequence is synthesized)
gagagccgctgataggttaggtctcatttggagtgttggtggaaaggaaactgaaggtaattgaatagaatacgcctgcatttaccagccccagcaacacaaagaatttttaatcacacg

SEQ ID NO: 514102 - DNA, 120 bp, Artificial Sequence
  ENSG00000164683_15 (sequence is synthesized)
gatctcaaattcacaaatgttaacatggataagtgatcatggtgtgcgagtggtcaattgagtagtacagtggaaactgttaaatgcataacctaattttcctgggactgccatattttc

SEQ ID NO: 514103 - DNA, 120 bp, Artificial Sequence
  ENSG00000164683_16 (sequence is synthesized)
ttttaactggaaatttttatgtgagttttccttttggtgcatggaactgtggttgccaaggtatttaaaagggctttcctgcctccttctctttgatttatttaatttgatttgggctat

SEQ ID NO: 514104 - DNA, 120 bp, Artificial Sequence
  ENSG00000164683_17 (sequence is synthesized)
aaaatatcatttttcaggtttattcttttagcaggtgtagttaaacgacctccactgaactgggtttgacctctgttgtactgatgtgttgtgactaaataaaaaagaaagaacaaagta

SEQ ID NO: 514105 - DNA, 120 bp, Artificial Sequence
  ENSG00000164683_18 (sequence is synthesized)
aatggagcaagtaggtaaagctctcagcatagctatctgcaccttctgaatcttcccctcattaatctcatccgccttggaaaatagctgtgttgcttgtgcctagatgaattcgtacac

SEQ ID NO: 514106 - DNA, 120 bp, Artificial Sequence
  ENSG00000164683_19 (sequence is synthesized)
agataccagcgtattttgtgaagacaactgattttgctttagtccatgctttacgatttacaaagcatgtatctttgtatatatgtttgcatattttaaattgttccccaaaggaacttg

SEQ ID NO: 514107 - DNA, 120 bp, Artificial Sequence
  ENSG00000164683_20 (sequence is synthesized)
agtgaattcaccaccccagctctctgcggattgagctagtgcatcttttggaaaaatacctattatttgtgaggtcttcaaaagttgtgacagccctgattcagatcaggtagctttcac

SEQ ID NO: 514108 - DNA, 120 bp, Artificial Sequence
  ENSG00000164683_21 (sequence is synthesized)
atttgtccattgctattttgagaaaaagcatttaaaaacaatatgtggtcttatttttggtatacgggattttaaaaaaaaggtgctgccacatgcctcttgaggaaagaaatgtattct

SEQ ID NO: 514109 - DNA, 120 bp, Artificial Sequence
  ENSG00000164683_22 (sequence is synthesized)
gctgacctccgcgcgtcgcaggctggcggcagcctgcggccagggaacccctaggtgccttccagcccaagtggcaaaaaaagtctgagtgcggggagggtgtgggggcgacctctcaga

SEQ ID NO: 514110 - DNA, 120 bp, Artificial Sequence
  ENSG00000164683_23 (sequence is synthesized)
gcacatagaatcttctccagtgaattcaccaccccagctctctgcggattgagctagtgcatcttttggaaaaatacctattatttgtgaggtcttcaaaagttgtgacagccctgattc

SEQ ID NO: 514111 - DNA, 120 bp, Artificial Sequence
  ENSG00000164683_24 (sequence is synthesized)
tggtaatgccttcctttgttttgcttgccttctgcagataattgagaagcgccgacgagaccggatcaataacagtttgtctgagctgagaaggctggtacccagtgcttttgagaagca

SEQ ID NO: 514112 - DNA, 120 bp, Artificial Sequence
  ENSG00000164684_0 (sequence is synthesized)
acacaagctcaggagtagctgccatgcacatcagtgtccattaaaatgacttgtagcaaatctctacgttcaaagtctaactttgacagacaaccttacttccagcgaagtctactcccc

SEQ ID NO: 514113 - DNA, 120 bp, Artificial Sequence
  ENSG00000164684_1 (sequence is synthesized)
tccctccggagggaagaatgggctgcggttaagcgtttgccctggtgtcagggccaactgcttcgaagcgccagactttcggagactgtgggtggggagcattaagcgggaaatgacctt

SEQ ID NO: 514114 - DNA, 120 bp, Artificial Sequence
  ENSG00000164684_2 (sequence is synthesized)
cacatttcagtcagaggacttaaaacgtgactgtggtaaaaaaatgtctcatcaacacgtgttttccttggccatggaggaagatgtgaaaacagcagacaccaaaaaagccagccggat

SEQ ID NO: 514115 - DNA, 120 bp, Artificial Sequence
  ENSG00000164684_3 (sequence is synthesized)
ccttgaccatgaaaaagaaaacactcgctccatctgtctccttgagcaaaaaagaaaagttgtttcctccaacattgatgttcctccagcaaggaaatcttcagaggaactagacatgga

SEQ ID NO: 514116 - DNA, 120 bp, Artificial Sequence
  ENSG00000164684_4 (sequence is synthesized)
caaggtgacagcagcaatggtactaaccagcttgtcgactagccctttggttcgaagtcctcccgtgcggccgaacgagagcctcagcggatcctggaaggagggcggctgcgtgccttc

SEQ ID NO: 514117 - DNA, 120 bp, Artificial Sequence
  ENSG00000164684_5 (sequence is synthesized)
cagcaccagcagcagcggctactggagctggagcgcccccagcgaccagtccaacccgtccacgccgtcgccgccgctctcggctgacagcttcaagcccttccgcagccccgcgcagcc

SEQ ID NO: 514118 - DNA, 120 bp, Artificial Sequence
  ENSG00000164684_6 (sequence is synthesized)
agacgacggcatcgacgaggcggaggccagcaacctgctcttcgacgagcccattcccaggaaaagaaagaattccatgaaggtgatgttcaaatgcctctggaaaaactgtgggaaggt

SEQ ID NO: 514119 - DNA, 120 bp, Artificial Sequence
  ENSG00000164684_7 (sequence is synthesized)
gctgagcactgcagcaggtatccagaaacacatccgaaccatccatctggggcgcgttggagactctgactacagtgatggagaagaggacttttactacactgagatcaagctcaacac

SEQ ID NO: 514120 - DNA, 120 bp, Artificial Sequence
  ENSG00000164684_8 (sequence is synthesized)
agactcagtggcagacgggctgagcagcctggccccggtctcaccttcccagtccctggcttcacctcctactttccccatcccagattcaagccgaacagaaactccttgtgccaaaac

SEQ ID NO: 514121 - DNA, 120 bp, Artificial Sequence
  ENSG00000164684_9 (sequence is synthesized)
ggagactaagttgatgacgccgttgagccgctcagctcccaccaccctctacctcgtgcacactgaccatgcttaccaggccacaccccctgtgaccattccaggatcggccaagttcac

SEQ ID NO: 514122 - DNA, 120 bp, Artificial Sequence
  ENSG00000164684_10 (sequence is synthesized)
ccccaatggcagcagcttcagcatttcctggcaatctcctccggtcactttcacaggcatcccagtgtcacccacacatcatccggtgggcacaggagagcagagacagcatgcgcacac

SEQ ID NO: 514123 - DNA, 120 bp, Artificial Sequence
  ENSG00000164684_11 (sequence is synthesized)
ggtcctgtcctccccacccagaggcacagtcagcttaaggaagcccaggggagagggcaaaaagtgtcggaaggtgtacgggatggagaaccgagacatgtggtgtaccgcctgccgctg

SEQ ID NO: 514124 - DNA, 120 bp, Artificial Sequence
  ENSG00000164684_12 (sequence is synthesized)
gaagaaggcctgccagaggttcctcgactgagagacccccaggcagaggggctcagggccctgagccgctcctgccctggcctgccactgcaggtgttggaaagagcttttcctactgaa

SEQ ID NO: 514125 - DNA, 120 bp, Artificial Sequence
  ENSG00000164684_13 (sequence is synthesized)
taaaacacagttgaagccaggaaaagccctttcaggaaccttggaggaataacagcaaaaacacagaaaaattgtttaagtcaccacctatgacaaaagaaagttgctcttactgagaac

SEQ ID NO: 514126 - DNA, 120 bp, Artificial Sequence
  ENSG00000164684_14 (sequence is synthesized)
ccagcttggagcagctataactagttttttttccttcaaaagaaaagtcaactttttttgctgtatgtctagacttaaaactgtggacttctgtagcaattgaaccaacaaagcccattt

SEQ ID NO: 514127 - DNA, 120 bp, Artificial Sequence
  ENSG00000164684_15 (sequence is synthesized)
tacctagaaaggaggcatattttgataagctttctgaattatgccattttcaagatttttttgacacttaaaaaacaagctacaggttattcagtagcatttgtacaaagatcaatactt

SEQ ID NO: 514128 - DNA, 120 bp, Artificial Sequence
  ENSG00000164684_16 (sequence is synthesized)
acttttgttgtgaataatcttttccgtatcttccatttgacttcttggagcagtatatgtcaggatgtgttgcaagacagcgcagcactctgggcatcttttctatggctttttgtttgt

SEQ ID NO: 514129 - DNA, 120 bp, Artificial Sequence
  ENSG00000164684_17 (sequence is synthesized)
ttttcttttaagaatggccccacactgaaccatggtagagctattagtttgtagggccccagatggcataaactcgagaagggattgtccacggaaatcaccagcagacttcagcccgaa

SEQ ID NO: 514130 - DNA, 120 bp, Artificial Sequence
  ENSG00000164684_18 (sequence is synthesized)
gctgagttcaggaagtccagctgtcactgttgggaaacatctaggagtcttccttggatccataagaagctcttcccctaaaggcagcacagctaactctactctctacctgccacaact

SEQ ID NO: 514131 - DNA, 120 bp, Artificial Sequence
  ENSG00000164684_19 (sequence is synthesized)
cagtcaagaattggcacctgtagccatctgggtaagcctcgatgcttctttcagggatgtgacacaaatggcaactcggagctatttgttactgcttgtctgtcaagattgtagccaggt

SEQ ID NO: 514132 - DNA, 120 bp, Artificial Sequence
  ENSG00000164684_20 (sequence is synthesized)
taatgggtcattttccttctctccagactccaccactgactgatttcagaagaggtagagaactccaaactgtcccagcaggtttgctttagacaacagagcacagcccacatggcccta

SEQ ID NO: 514133 - DNA, 120 bp, Artificial Sequence
  ENSG00000164684_21 (sequence is synthesized)
cctgttcagaaagtcatgttagatcaacaaaccacttccattctgagtgcacttttataggttttatgctttagcatgtccgggagatgagttaattaacaatataaacattatgtgagt

SEQ ID NO: 514134 - DNA, 120 bp, Artificial Sequence
  ENSG00000164684_22 (sequence is synthesized)
aaatggaaggtccaaactttaagtttttcttataaaaatattggagctattcatttaagaatttgctcaaaagggaacataacgccaaaaggaaaatgcatgtaggtataggaatttctc

SEQ ID NO: 514135 - DNA, 120 bp, Artificial Sequence
  ENSG00000164684_23 (sequence is synthesized)
agtttagtagggccagggcttgcactatgttccatttattgggcttcgtaacttacttgcttgtttgtttgggggatagtggtgtggggagaggggagtcgtcaagccctataaataagc

SEQ ID NO: 514136 - DNA, 120 bp, Artificial Sequence
  ENSG00000164684_24 (sequence is synthesized)
tcattctctatctacccgactctcaattgccctgctaaagagttatttctcctatacctatgcaaagtaggaagagcaccttataggaggcactgtatagggacaggggacatgggatca

SEQ ID NO: 514137 - DNA, 120 bp, Artificial Sequence
  ENSG00000164684_25 (sequence is synthesized)
gccataggaatgttaaatgaaattgcacagaggaaagtttaatatatgtctagagattatacatacacttttttaagcgtaaaaagaagacatctagtaatgacagatattctttttata

SEQ ID NO: 514138 - DNA, 120 bp, Artificial Sequence
  ENSG00000164684_26 (sequence is synthesized)
tacaagcaaaagaaagtataaggaggttctacagtgcaacatccacaatctgtgcattcacatattatgggacttttattttttaaactctcatataaattttttaaaattactccttgg

SEQ ID NO: 514139 - DNA, 120 bp, Artificial Sequence
  ENSG00000164684_27 (sequence is synthesized)
aagagatcctggtttttttcttcatttatttttttctttaaaaacatttattttaagagaagagaaaaagagcttcatctaattttgcatcttgattaccaatcagtactagtcacagca

SEQ ID NO: 514140 - DNA, 120 bp, Artificial Sequence
  ENSG00000164684_28 (sequence is synthesized)
ccagcaatactgtatgttttagactgacaaggtcagccaggaaatggcatttttttaaacgcagaaatgtgtttgtttcctctactctaacacgtcctttctcctcctggtgtcctgtca

SEQ ID NO: 514141 - DNA, 120 bp, Artificial Sequence
  ENSG00000164684_29 (sequence is synthesized)
ccccccatgcagcaccactgatgcgagatgatgctctggcctggtccaggaagccctgagccatgggcagattgcccagtggccttgggcggccagagcttgtcacctgtttaaacaagt

SEQ ID NO: 514142 - DNA, 120 bp, Artificial Sequence
  ENSG00000164684_30 (sequence is synthesized)
tcaccatgtgtttaaatgacagggtacagtcctggaccagaggtttttctcttcagcaaagctccctggcccttgatcgttggactgttactaatagaaaaagattcaagtcatgaagta

SEQ ID NO: 514143 - DNA, 120 bp, Artificial Sequence
  ENSG00000164684_31 (sequence is synthesized)
taaaatccatcccccatcccagaactttgaaacacaaggagggagagatctttgctatggagcagtcctggagcaaagccccgtggcttccacccccagatatataccccataagtagtg

SEQ ID NO: 514144 - DNA, 120 bp, Artificial Sequence
  ENSG00000164684_32 (sequence is synthesized)
ctgagctccagcttagctgagccaagctcagtccttatctggtgttcagccagtgcacaggtataagcagaactacagagctgaatgtagcttccctgggatctcttctcctttctaaag

SEQ ID NO: 514145 - DNA, 120 bp, Artificial Sequence
  ENSG00000164684_33 (sequence is synthesized)
catttttcacacagttctgtacctcctacccaagttggggctgctttctgcctgctagcccacggctctgtgtactttcttttctggcttcaggtgcagacagaccctcagtaccttcct

SEQ ID NO: 514146 - DNA, 120 bp, Artificial Sequence
  ENSG00000164684_34 (sequence is synthesized)
ggacacagacacatattccctggaccaaggcgtggaataactagtagaccaccaagccacaggtggctggtcttgaagaaaagggattatactccttacaggccacccagaaagctatga

SEQ ID NO: 514147 - DNA, 120 bp, Artificial Sequence
  ENSG00000164684_35 (sequence is synthesized)
attccaatatacaccactgatcgtgcaagttagggttttttttttttaaacgtagcattattttgttatattttggaactaaatgaagtgccaaattaaccagacattcgtttgatgcca

SEQ ID NO: 514148 - DNA, 120 bp, Artificial Sequence
  ENSG00000164684_36 (sequence is synthesized)
tctctgtggaaccaagttctctgtgtgtgttcgtttggctgggaggagggggaggactgggcagactgctcccacagcaggctggcagtggaactggagccctggccaccgcagggagct

SEQ ID NO: 514149 - DNA, 120 bp, Artificial Sequence
  ENSG00000164684_37 (sequence is synthesized)
cagaggccaatctacgcaaaaggcatgcaaaacaatggattctggtcccaaaatatttctaagtaaggcatgatgtagccttttgattttttttttatcctttgacaccccagccttcag

SEQ ID NO: 514150 - DNA, 120 bp, Artificial Sequence
  ENSG00000164684_38 (sequence is synthesized)
aaaaggtttttcatctctctccaaagaagtcatttcatagtgactgacaggacattctccagagagcgacaaagcagagtggccagcaggcagtggtgttaagccttgggccttcccagc

SEQ ID NO: 514151 - DNA, 120 bp, Artificial Sequence
  ENSG00000164684_39 (sequence is synthesized)
agatgtgtgctgcattggtgggtgggaggcagtgtgacagcctggagaaaacacacaggtagcaagggagtcaggggggaggtacaagagggctgtggacacctggctcttgctcatctt

SEQ ID NO: 514152 - DNA, 120 bp, Artificial Sequence
  ENSG00000164684_40 (sequence is synthesized)
cttggtgctgatcagctggtggtcaccatccctaagtacctcccagggagctgccattttctcctctgggagcagctgcctgaagcaaggagagaatgacctgaagggaagtacctccgg

SEQ ID NO: 514153 - DNA, 120 bp, Artificial Sequence
  ENSG00000164684_41 (sequence is synthesized)
ccaagagtgcagggctgctgtgcctagcctgagcgggccatctctagcagatatggacttctctccaccacactagctgaaaagttttctcccttggttggcaaaagccagtgtcaggaa

SEQ ID NO: 514154 - DNA, 120 bp, Artificial Sequence
  ENSG00000164684_42 (sequence is synthesized)
aaaagctgtgggtttctgaccaagaatgtgtgcgcttagctgcaaagtgcctgtcagcagctccaggcaccaacaaggtgcccttttattagacaattcctgcccgaacataaccatatt

SEQ ID NO: 514155 - DNA, 120 bp, Artificial Sequence
  ENSG00000164684_43 (sequence is synthesized)
gcagatgaaaattttcaatagagaatgacacaattcttgacctttctaaaaacttttcaaagagatagtcacatgtgtatatgttgcaaaagatttttgaaactgaaatgtcctccatta

SEQ ID NO: 514156 - DNA, 120 bp, Artificial Sequence
  ENSG00000164684_44 (sequence is synthesized)
aatctcaagagcactcgagttttaagtctgctgtttctggtgtcacactaagacacacttttgaaagcagccctgggttctgaattagttggcactgctgaatccatgttcccccttcat

SEQ ID NO: 514157 - DNA, 120 bp, Artificial Sequence
  ENSG00000164684_45 (sequence is synthesized)
cagactccaaagtgcagcattcacttgcaaaggttgagagaaaagtggccagaattgtacatataacagagaataccttgagaatagtagcaaaatactgtaaataatattcatttcctc

SEQ ID NO: 514158 - DNA, 120 bp, Artificial Sequence
  ENSG00000164684_46 (sequence is synthesized)
agggaaaaataaagggcatgcaaaaataggtctggagactcctgaaactaggaagaattttgttatcactaaagtcttttatagtcagaacaatttttttttcaaatgaacatggtatca

SEQ ID NO: 514159 - DNA, 120 bp, Artificial Sequence
  ENSG00000164684_47 (sequence is synthesized)
tttcaagacaaatttatgtgaactgggcagtactgacatttgtgaggcataggggagtgccctgggaaaacggtttggagctgacctgtagcctaaggctaacatttgaaccacaggtgc

SEQ ID NO: 514160 - DNA, 120 bp, Artificial Sequence
  ENSG00000164684_48 (sequence is synthesized)
aatgcctgggggtgggggagggggacggggtgggggtggtattcctagactcacgtaaggctttttctgaatgtaattgtgaatacaaagccttgctggtcctttttatcattacccaat

SEQ ID NO: 514161 - DNA, 120 bp, Artificial Sequence
  ENSG00000164684_49 (sequence is synthesized)
ggatgactgtttattagctatcagcagaattccgtaggcgaaagcaagccgtgaacgatgtacattttgctttaatagcatgttagcgaacaaacttccatggacttttgtggacaaggt

SEQ ID NO: 514162 - DNA, 120 bp, Artificial Sequence
  ENSG00000164684_50 (sequence is synthesized)
gctgctttttctcatgaccctgtagaattgctatcgaccacatcttctgtagcactgacctgtgtgaactcagggaagaatttgtgcatacaaatgagtggaaacagagcaggattcatg

SEQ ID NO: 514163 - DNA, 120 bp, Artificial Sequence
  ENSG00000164684_51 (sequence is synthesized)
aatatgaatgagaatgtgaatcattttggagaatgccctgggcacacgggtcaactggaaatttcatttctctaagaaagtagccctaccagcggcacggactgttcctgttcctcatac

SEQ ID NO: 514164 - DNA, 120 bp, Artificial Sequence
  ENSG00000164684_52 (sequence is synthesized)
ctgtggggattcctccatattggaactgtttcatgtatcttttttgcattgtaactagccaaacctgaagtcagtaaataaaatgagattagcactttttttaggtaccagttgtatcac

SEQ ID NO: 514165 - DNA, 120 bp, Artificial Sequence
  ENSG00000164684_53 (sequence is synthesized)
tgagtaatgcacaccaatagagcaagaaagtataaaatgtatttaagaccaactggtttgcttattatgactgactttgaaaaagcccatatccaatgatatacatgctttaaaaggtat

SEQ ID NO: 514166 - DNA, 120 bp, Artificial Sequence
  ENSG00000164684_54 (sequence is synthesized)
atctatcgtaggaccaggaaccaaaatgggaattttacttctggtcctgttttgtaaatagttcctttttttgaagacaatctcatgttttataacttttgttgtgggtctgagaatcac

SEQ ID NO: 514167 - DNA, 120 bp, Artificial Sequence
  ENSG00000164684_55 (sequence is synthesized)
aatggtaatatgtcttggcaaaacataacctttaaatacaaaaacaattataacttaattttccaaataaaacaagaaatacactgattaggcttctacagttctaagagacatgacact

SEQ ID NO: 514168 - DNA, 120 bp, Artificial Sequence
  ENSG00000164684_56 (sequence is synthesized)
ttggtaataagcgtcagtactctacttctcaagttaactggaaatattttacaagatgcagtgttttgtaatcacaaagaacgcagacattttgtgagaaatgaccttggttttatacat

SEQ ID NO: 514169 - DNA, 120 bp, Artificial Sequence
  ENSG00000164684_57 (sequence is synthesized)
tgtagcttattttttaaaatatagtattttaccaggcaggaagtattaatattataagtaattcttgctcaccaaacaaagggctatgtctcttttaagcaaatgttttgatgcatatct

SEQ ID NO: 514170 - DNA, 120 bp, Artificial Sequence
  ENSG00000164684_58 (sequence is synthesized)
ttttaattaaccctctgcagcaagggtagaaatacagatcagatggaatgggtattataggagaatcaagatagcaacagctactccttttaccattactagtgtgttttcaaagtatgg

SEQ ID NO: 514171 - DNA, 120 bp, Artificial Sequence
  ENSG00000164684_59 (sequence is synthesized)
atgataaattctgtgtcacaaagacaagtttaccacttgacctaccagaatcacagatacttgcatttaactagcaagtatcatttggtggaaatttctaaaatcatagtagacaggccc

SEQ ID NO: 514172 - DNA, 120 bp, Artificial Sequence
  ENSG00000164684_60 (sequence is synthesized)
aaagatagaattcttaggtgatcagtagtgtttaaaataattttgtcctcagcactaactatataactgtaatttctacataagaacaagtgcttccaaaatatagtggagggaaaaaat

SEQ ID NO: 514173 - DNA, 120 bp, Artificial Sequence
  ENSG00000164684_61 (sequence is synthesized)
aaggaaaataaaaaaacaaaacaaaaagaacaagtgcttgatttttcactgtgaagaactagcaggcacatgaggttgtgatcagaaagtgactgagttcccaagaaccaggaaacagag

SEQ ID NO: 514174 - DNA, 120 bp, Artificial Sequence
  ENSG00000164684_62 (sequence is synthesized)
agaggggagttgtgaagagtttattaaaactgtacaaataattcagagctttgccaaaaccatttcataatgctgtacagttttttcaagcccactcactgttaaaacaagaaagcacct

SEQ ID NO: 514175 - DNA, 120 bp, Artificial Sequence
  ENSG00000164684_63 (sequence is synthesized)
tttctttctaagattttagtaatccaaaagctagcctaattagccaagtatgcagataacatcaaaagcaaagctgagatagaacagccatacacccgttgggcagctcttatgaggtgg

SEQ ID NO: 514176 - DNA, 120 bp, Artificial Sequence
  ENSG00000164684_64 (sequence is synthesized)
tcagaaggtcactcagaccttggtttcaaataggctttagaatctgcacacttgaggactagaaatgcacagagttagggaaagccatgtacaggcttggctcctagtctttgagatgag

SEQ ID NO: 514177 - DNA, 120 bp, Artificial Sequence
  ENSG00000164684_65 (sequence is synthesized)
gcgtcttgcaaatctctgttttcactccttggaatgtctccattgttagcattaaagtccccaagaagtttttattgctgtacggttttgaacccaatgagtctcatttccaaaagattc

SEQ ID NO: 514178 - DNA, 120 bp, Artificial Sequence
  ENSG00000164684_66 (sequence is synthesized)
ctaattctatataggagaggttgcaaatgtcagtgcctcagaaggaccaggcaagttctgtaaatgattgatgtggataaggcaaagaggaacacaagaatggtggagaccaggttgaac

SEQ ID NO: 514179 - DNA, 120 bp, Artificial Sequence
  ENSG00000164684_67 (sequence is synthesized)
tgcagaacacatgccctctttgaaggggtgcccacactcagctctagacaatcagaaccatgcagaaatcaggcccagggctgctagatcttctgacgtggaagtatgatattacctgac

SEQ ID NO: 514180 - DNA, 120 bp, Artificial Sequence
  ENSG00000164684_68 (sequence is synthesized)
acgtaagtgttgacaactaactcaaactcttggccaacactgtgcagaccaaagagaagctgtacacagacaggtgcagcctgcagcccccagtttcaactattgggaaaagtggatttc

SEQ ID NO: 514181 - DNA, 120 bp, Artificial Sequence
  ENSG00000164684_69 (sequence is synthesized)
acattccacagttgtcaggtcaggttcatccatcagccccacaaactcacatgtcggcactatctgggcaactaaaataaaagaggggaaagagatcatttctccccagatatcattctc

SEQ ID NO: 514182 - DNA, 120 bp, Artificial Sequence
  ENSG00000164684_70 (sequence is synthesized)
atggcagacttgaatatagatacgctgagttatccagctctctcactctgcctccttttggcatgcccaggctgtgccccgtaaagtgttgaatcactgttatcctaattttcttagtgt

SEQ ID NO: 514183 - DNA, 120 bp, Artificial Sequence
  ENSG00000164684_71 (sequence is synthesized)
tttctaccgtggccactgtgatgaggggctggcaaagagcagcctcgtgccttccgagaaggctgccaggagcctctgaagcttgaagcgagcacacattgcctccttgtgccaaagccc

SEQ ID NO: 514184 - DNA, 120 bp, Artificial Sequence
  ENSG00000164684_72 (sequence is synthesized)
ttggccagcctccccacactccttccctctccatccggcctcatgagtcttcgttaccaagtaaaattaccactgcttcacctctgatacagcagaagccttgcttcagaactggtaggc

SEQ ID NO: 514185 - DNA, 120 bp, Artificial Sequence
  ENSG00000164684_73 (sequence is synthesized)
atttaggctatttcagagtgtccactaacctcaaaaggaggtttttccacatacaaaaccctagcatctttgaggggaaagcaaaatgagaataaattatgtcatgaaaaaaattagaag

SEQ ID NO: 514186 - DNA, 120 bp, Artificial Sequence
  ENSG00000164684_74 (sequence is synthesized)
ttgcttccttcatttagatggactaagttattttaaactctatcttacatcagagtcctgatggtgttgggatagtcactgaccctttcacgtatgtaataagatacgtctcgttcacac

SEQ ID NO: 514187 - DNA, 120 bp, Artificial Sequence
  ENSG00000164684_75 (sequence is synthesized)
actatttcatttgatctttgtaagaacccagtgtagaataggaatatttaaaatcaacattacccacctccaaggccaacccagagtagtcttgaacctgagtcagcctcagtattgctt

SEQ ID NO: 514188 - DNA, 120 bp, Artificial Sequence
  ENSG00000164684_76 (sequence is synthesized)
gcaaggaagagggaaggggctcattaaaggcctggctcaaaccttagtcttccagactgactagggacgtaagaagacccagggacccaccatgttctcaaaccatctattcagtccagg

SEQ ID NO: 514189 - DNA, 120 bp, Artificial Sequence
  ENSG00000164684_77 (sequence is synthesized)
cctttcagcatagacataaagagcccacccgttactcagtcatgttgccaagtgcaaactgatttatccccagatgaatccctttactgtagcagatccctaatccctaaatttcagcca

SEQ ID NO: 514190 - DNA, 120 bp, Artificial Sequence
  ENSG00000164684_78 (sequence is synthesized)
atttggtagttaattataggagtttattagctaaatgtatgttctgagtaaaagttttgactctttggggaaaatttattttgctgctagcatacaacatttgctatgtatataaactta

SEQ ID NO: 514191 - DNA, 120 bp, Artificial Sequence
  ENSG00000164684_79 (sequence is synthesized)
agtcaatgccagaaattttaaaaccagctcaaatttataatctgtaatgatcaaatcaaaacatactgtaaactcagagttggaaacgcctggtaatatggttaagtcatgtttaaatat

SEQ ID NO: 514192 - DNA, 120 bp, Artificial Sequence
  ENSG00000164684_80 (sequence is synthesized)
gaatgcaatttaaatgacattggcaatgcctgagatttctttcattgtgaatgattaaaaggcagtccaatatatgaatggatttcatcttacctttctcccgttaatttactaggtgta

SEQ ID NO: 514193 - DNA, 120 bp, Artificial Sequence
  ENSG00000164684_81 (sequence is synthesized)
acatcttgagtgtaaagtcattcacaggcagttgggttgtggagctagaaggagcctcaaaaaaaaactttttggccagactcctacatcatgaacagggtttttgatgaataatattta

SEQ ID NO: 514194 - DNA, 120 bp, Artificial Sequence
  ENSG00000164684_82 (sequence is synthesized)
ttattatgtttctaaagtaatacagtgttggagaatgaaacagtttagtcctttcctcttctgatggaaaagaatcatagcgccgttgccatgacaataacaggatgtagaaagacccat

SEQ ID NO: 514195 - DNA, 120 bp, Artificial Sequence
  ENSG00000164684_83 (sequence is synthesized)
gaagaaagaaagaagaaagctatggttccgaaagcaggtaaccacagattttgaaaggaggcagagatggtgattaaactgtagtccttgttttttaaaatgttctttcatgttaggcac

SEQ ID NO: 514196 - DNA, 120 bp, Artificial Sequence
  ENSG00000164684_84 (sequence is synthesized)
caccacatagttaataactaccaacttctaaagagaagatccccttgatttatttatatcatgaaaatactaaaaatcaattctcaagtctaattaactattacattatcttgctaggtc

SEQ ID NO: 514197 - DNA, 88 bp, Artificial Sequence
  ENSG00000164684_85 (sequence is synthesized)
ttctcaagtctaattaactattacattatcttgctaggtccttttccctaaatttttaattcagaaaattaaccagaattggccagat

SEQ ID NO: 514198 - DNA, 76 bp, Artificial Sequence
  ENSG00000164684_86 (sequence is synthesized)
gggagtccaaggcaggaggaagaaagagtgaaaacaaaagaagaaagagggaaaccctgtctttactaaaaataca

SEQ ID NO: 514199 - DNA, 120 bp, Artificial Sequence
  ENSG00000164684_87 (sequence is synthesized)
gaggctgaggcaggagaatcccttgaaactgcaggcagaggttgcagtgagccaagatttcactgctgcacctggggtgagactaccattaaggaaggaaatttcctttaaacagaaaaa

SEQ ID NO: 514200 - DNA, 120 bp, Artificial Sequence
  ENSG00000164684_88 (sequence is synthesized)
cagaaaaaaacaaaggtgctcatctatttcttctgaattctctctacatccttgacttaagaggaaaaccagcactcaagaaacagctttaaaagagaacagtccccattctagctacca

SEQ ID NO: 514201 - DNA, 120 bp, Artificial Sequence
  ENSG00000164684_89 (sequence is synthesized)
gtcttgctttcccccatcttggcaagccccagtgaatttgccattgaaagattaccctcccctttgccctcatctgcctgagctagaggccaggctgttgttaatgttttttcagttcca

SEQ ID NO: 514202 - DNA, 120 bp, Artificial Sequence
  ENSG00000164684_90 (sequence is synthesized)
aagcccctgatgggacattcttgtttctgtgctactgctttctctctcttaaattaaggtgcaaggggataaatattactataactgggatgtaaggctcagtcagtgtggctattccct

SEQ ID NO: 514203 - DNA, 120 bp, Artificial Sequence
  ENSG00000164684_91 (sequence is synthesized)
cccttcgggggaaatattccatctgtctgaacggttttaggtgatcatgaggagagcggcttagtcacacagccagccacgctcatcacaaaagatttgttcagactcactgtaaagaat

SEQ ID NO: 514204 - DNA, 120 bp, Artificial Sequence
  ENSG00000164684_92 (sequence is synthesized)
gacaaggcagatagctaatcctttcactgtgcctcaaagcccgccgtgcaagtcaccaaccctaccggtcctctccacgtgcgaggctaatagagtgatcagaaccaggaatgtgagctg

SEQ ID NO: 514205 - DNA, 120 bp, Artificial Sequence
  ENSG00000164684_93 (sequence is synthesized)
ggttccaccttaggaggggacaatgaggacagagcaagagggctccatgtttaattactccaggctctgacttctgcccacaattacagagcatgaaagcagaattggcctttagtaagt

SEQ ID NO: 514206 - DNA, 120 bp, Artificial Sequence
  ENSG00000164684_94 (sequence is synthesized)
gaaaaggaagtggctcctgcagcatataattgttataatttcgtatttatggaaagagaaaaggacttcagtccactcatgttgttaagcacttgtccctcactccactggagccccctt

SEQ ID NO: 514207 - DNA, 120 bp, Artificial Sequence
  ENSG00000164684_95 (sequence is synthesized)
cctatgttttgggcacagatggctgggaccgagaggaaagaggaagagcggctgccagagtgtgaatatacccctcagggatatacagcggagtttcatgataaactacccatactttcc

SEQ ID NO: 514208 - DNA, 120 bp, Artificial Sequence
  ENSG00000164684_96 (sequence is synthesized)
caaaaaaggttgaggagcaatacataactttgcagattacaaacccttgttttactttttaaaccttttttccatactctgcttattggaaatcgatggctgtgatgtgaccaacacctg

SEQ ID NO: 514209 - DNA, 120 bp, Artificial Sequence
  ENSG00000164684_97 (sequence is synthesized)
tgatgatagcaaagcccctcctttcacagtctcctgactgttcggggaacctccttggtcattggtagaaagctttagaaaagacttagctttttagggaagaactaaaaaatctccaaa

SEQ ID NO: 514210 - DNA, 120 bp, Artificial Sequence
  ENSG00000164684_98 (sequence is synthesized)
acatactagtcccatgacttcgataactgaaaatgtcctgggtgtaaactaacccaggaatgtggatcatacatgttttttttaaaaaaaatccctgaatcaatattttcctacaacaca

SEQ ID NO: 514211 - DNA, 120 bp, Artificial Sequence
  ENSG00000164684_99 (sequence is synthesized)
ccctaaaattcctatttttgtaattaatggttggacagtgatcagccatttaaacataggctttctggaataaccagacactagaatagtttccaaagtgttttgcgtatcaaaatccta

SEQ ID NO: 514212 - DNA, 120 bp, Artificial Sequence
  ENSG00000164684_100 (sequence is synthesized)
tatacttagaagaagaactcaggataagaaaaaatcgctaggtcccaaagggttcatgactatcatcagatgcaactgcgagtggcctacggtcattttttcaaatgagaagactggaga

SEQ ID NO: 514213 - DNA, 120 bp, Artificial Sequence
  ENSG00000164684_101 (sequence is synthesized)
gagagaacaacagtaatcacaaaacctctgttgcccttagtccatgacaatgtttaaggaaactttaaaaaattaagccatcttctgaattgttttctacaccaaatctaaaatattaaa

SEQ ID NO: 514214 - DNA, 120 bp, Artificial Sequence
  ENSG00000164684_102 (sequence is synthesized)
atgaaattattaaatatttaaaatggggtatttagtggaaatgcaatcagtagaaaacattgctttttagtgcctgctaaacaagtaaaggagaaagaatgaagagaaaacagcagtcct

SEQ ID NO: 514215 - DNA, 120 bp, Artificial Sequence
  ENSG00000164684_103 (sequence is synthesized)
tcctgtgtgacactcgtgtggaaatgacaggcattcacatgtcattgagtgctaactcaaaagctaggtggcaatgctgtccaatgtttagagatcttttgaaatataattttaccacca

SEQ ID NO: 514216 - DNA, 120 bp, Artificial Sequence
  ENSG00000164684_104 (sequence is synthesized)
ttcagaggtaagtacttgcttaacagaagtctttaatgttagtgaatgaatgtataaaattataaactatgcattttcaaagagtagcatgtattttgtatcgaatccaagtaaattttt

SEQ ID NO: 514217 - DNA, 120 bp, Artificial Sequence
  ENSG00000164684_105 (sequence is synthesized)
ttcatagctacctaccacaactgcaaattattcaaaataaacttggatacatatccttatggggatatgggaagcccatctatattctcctacttgatgtttttaaagattgaaacttta

SEQ ID NO: 514218 - DNA, 120 bp, Artificial Sequence
  ENSG00000164684_106 (sequence is synthesized)
ttctgaaacatcaggctctaaaaaattccatcattaagatgaataaatgggaaatggtttatttgttacttcgtaagcataaatgggaaatgttggctgttagaaaatgtgcccagttct

SEQ ID NO: 514219 - DNA, 120 bp, Artificial Sequence
  ENSG00000164684_107 (sequence is synthesized)
ttaaaggtggatgttctagtaacactggattaacaagcaaacaaaactgcatgaagtgaacgaatatttcattggataaagttagcataggttttatctgctgggtttaattctcaatcc

SEQ ID NO: 514220 - DNA, 120 bp, Artificial Sequence
  ENSG00000164684_108 (sequence is synthesized)
cagaaaaaaatattcttcaaggggtatcagttatagtttcaaagaacaaaatatgaaaatattgtccagcaaagcaaatcattgatcttttttcaaaattacttatattttggaaagtct

SEQ ID NO: 514221 - DNA, 120 bp, Artificial Sequence
  ENSG00000164684_109 (sequence is synthesized)
atatagaatatccacaaatttcttcagccctcttgttgatttcatattttcatgaaactttttcccctaataatttgtcttcgctctttaatcagtgctttactacattactcagcctga

SEQ ID NO: 514222 - DNA, 120 bp, Artificial Sequence
  ENSG00000164684_110 (sequence is synthesized)
aaaaatatcttttccttcatctgacaatgtggaaataaagaactccatttctgtcattctggttctcttcagtgtccattgagaaagtttctcaactgtttgtaaaatacggggggaaaa

SEQ ID NO: 514223 - DNA, 120 bp, Artificial Sequence
  ENSG00000164684_111 (sequence is synthesized)
aaacacgcatttctaaacctggtacttaaggttatactggattgtttgctacctaattagaagttattggggaaggggcattgtgtctttttatatgatttttagccaaatccagatgtt

SEQ ID NO: 514224 - DNA, 120 bp, Artificial Sequence
  ENSG00000164684_112 (sequence is synthesized)
ctgatacacatttctgaatacctgtctgactgtaaatacagcctgtggaggttcaggttgataaacctttcacctgactgctccacagccatgctccttgccagcttctggcacattgta

SEQ ID NO: 514225 - DNA, 120 bp, Artificial Sequence
  ENSG00000164684_113 (sequence is synthesized)
catagatttgttgaatgtttaaatgatgttgtttttctaaatgctgttctctaaaacaattttttgaatttcttttgctttccattgttttggactttgtgtgttcgttttttaaaaaaa

SEQ ID NO: 514226 - DNA, 120 bp, Artificial Sequence
  ENSG00000164684_114 (sequence is synthesized)
aaaatgtttcctaaatatttaacaccaggaaaaatatttttaaatacactggtgctaattgaaacagaaggaaattttcagatcgaagatgtacaatgttaaatgttcataccagttaaa

SEQ ID NO: 514227 - DNA, 120 bp, Artificial Sequence
  ENSG00000164684_115 (sequence is synthesized)
ctgcactttcccaaggggacagctggcatctacttgaaatgggcatcaagagaccaccaaatgtttacagtttctgtggcccgtttaagtgtaaaatgcagaagtggctctgtcccccca

SEQ ID NO: 514228 - DNA, 120 bp, Artificial Sequence
  ENSG00000164684_116 (sequence is synthesized)
gagttaaggatttgctacactggtcctctggaagcatttaagtagaagaaaaggcttatagtcagaatcactttagtaatcgtcttctggtccttggacttttctgttctgtaatgcttg

SEQ ID NO: 514229 - DNA, 120 bp, Artificial Sequence
  ENSG00000164684_117 (sequence is synthesized)
taacaatgaatatggtgttgccaatctagtctgatatcattgttgacctgtacttactttgtggatggttctacctggggttgcactggcacaaacagagccagaacactggactttcaa

SEQ ID NO: 514230 - DNA, 120 bp, Artificial Sequence
  ENSG00000164684_118 (sequence is synthesized)
aagaccattttgacttctacagtgtccacacacatgaatttaaatgcacttgtaactggttaattaccatgaagtaagtctaacttccacttaataaaagtttttgtgtatctgcttcta

SEQ ID NO: 514231 - DNA, 120 bp, Artificial Sequence
  ENSG00000164684_119 (sequence is synthesized)
acaaaattgttctttttaatgtcctccgttacctgtaagaacagaactcagtttgaaagacttgggatctgaaaccacttgaaaaagaagcaattctgtctcccttcttactctggggca

SEQ ID NO: 514232 - DNA, 120 bp, Artificial Sequence
  ENSG00000164684_120 (sequence is synthesized)
aaatttcattgaatggaacggtggaatgggttaactggccaaaattaatgaaccagagcaacctcttcatctcagtgaatgattaccagtggctcttcactttaacaacatggaaatctt

SEQ ID NO: 514233 - DNA, 120 bp, Artificial Sequence
  ENSG00000164684_121 (sequence is synthesized)
acgaggaggtggtcgtcgaggtggtggacggcgacgaagacgacgaggacggcgaggagcgtttcgtgcccctcggacccggccacgcagtccccaggggcccggcccggggcgcgttga

SEQ ID NO: 514234 - DNA, 120 bp, Artificial Sequence
  ENSG00000164684_122 (sequence is synthesized)
gctccaaacagccctctggggatccaggcttcttccttctagtgcagaccttcttaacctggaatccacagatccccaaatggatacacagaatccaggaagtcgaattccatgaaggtg

SEQ ID NO: 514235 - DNA, 120 bp, Artificial Sequence
  ENSG00000164684_123 (sequence is synthesized)
gatcggccaagttcacccccaatggcagcagcttcagcatttcctggcaatctcctccggtcactttcacaggcatcccagacctcacaaaagcttcttattgtcaaccactggcatctc

SEQ ID NO: 514236 - DNA, 120 bp, Artificial Sequence
  ENSG00000164684_124 (sequence is synthesized)
gaggtttccagcaaagtctaacgccttctgtggaactgataaaaatgaaagtggctgaatgaattgtgctgtgctctgttgatgaatatttattaaattccatagaggaatagccaagaa

SEQ ID NO: 514237 - DNA, 120 bp, Artificial Sequence
  ENSG00000164687_0 (sequence is synthesized)
acagcacgctgccacgccgacgcagacccctctctgcacgccagcccgcccgcacccaccatggccacagttcagcagctggaaggaagatggcgcctggtggacagcaaaggctttgat

SEQ ID NO: 514238 - DNA, 120 bp, Artificial Sequence
  ENSG00000164687_1 (sequence is synthesized)
gaatacatgaaggagctaggagtgggaatagctttgcgaaaaatgggcgcaatggccaagccagattgtatcatcacttgtgatggtaaaaacctcaccataaaaactgagagcactttg

SEQ ID NO: 514239 - DNA, 120 bp, Artificial Sequence
  ENSG00000164687_2 (sequence is synthesized)
tctgcaactttacagatggtgcattggttcagcatcaggagtgggatgggaaggaaagcacaataacaagaaaattgaaagatgggaaattagtggtggagtgtgtcatgaacaatgtca

SEQ ID NO: 514240 - DNA, 120 bp, Artificial Sequence
  ENSG00000164687_3 (sequence is synthesized)
cctgtactcggatctatgaaaaagtagaataaaaattccatcatcactttggacaggagttaattaagagaatgaccaagctcagttcaatgagcaaatctccatactgtttctttcttt

SEQ ID NO: 514241 - DNA, 120 bp, Artificial Sequence
  ENSG00000164687_4 (sequence is synthesized)
tttttttcattactgtgttcaattatctttatcataaacattttacatgcagctatttcaaagtgtgttggattaattaggatcatccctttggttaataaataaatgtgtttgtgctaa

SEQ ID NO: 514242 - DNA, 120 bp, Artificial Sequence
  ENSG00000164687_5 (sequence is synthesized)
gggagcgtgcgcgcctcttgcccgcccgcgggccgcaagattccggaggtggtccaccccgtggtccacctacctctgcttctttcccttcgcccaaacggcagcccttccgcattgctt

SEQ ID NO: 514243 - DNA, 120 bp, Artificial Sequence
  ENSG00000164687_6 (sequence is synthesized)
cctgtcctttagcgcgcgcacccgtcacctcacgctgcacttctttcgaccccctccaggcgaccctgtatttcccttttttccccctttactcatccttccccttcctgccaccattct

SEQ ID NO: 514244 - DNA, 120 bp, Artificial Sequence
  ENSG00000164687_7 (sequence is synthesized)
gtctctcccatttaccccatcgtggcagcacccactcccctttccctccctgtcgcatcttttgttccctgtggcgcgcaggtcaccctccgttttcttcatggggacgcggtgctggcg

SEQ ID NO: 514245 - DNA, 120 bp, Artificial Sequence
  ENSG00000164687_8 (sequence is synthesized)
aacagaactcagtttggaagaaaaaaaagcaaaataacaagttaaatactagaacactaattattaagaaagtcctagtggagatagagaagtgacatgacataggagaggatttggctg

SEQ ID NO: 514246 - DNA, 120 bp, Artificial Sequence
  ENSG00000164687_9 (sequence is synthesized)
gagttggggggagttcttgctttgctgccacgtcacagtgaaatcttggcaagccaccaaactgcacacatttttctatatctttaaaataaggaatatttgccataaccaaaagaataa

SEQ ID NO: 514247 - DNA, 120 bp, Artificial Sequence
  ENSG00000164687_10 (sequence is synthesized)
agatatattcaacacattagttttctgtaaaacatgcatattataagcaaaacaacagcttctggcttctctcaaacccgtgaattctgaaagaaattttctccatctatgaagtagatt

SEQ ID NO: 514248 - DNA, 120 bp, Artificial Sequence
  ENSG00000164687_11 (sequence is synthesized)
agagctcagatttggagccagggtgccagtgctcttggttcccagctccatcactttctagttgaatgatcttgggcaagttacttccgtgcctcgctttctcatcagtaaaatggagac

SEQ ID NO: 514249 - DNA, 120 bp, Artificial Sequence
  ENSG00000164687_12 (sequence is synthesized)
agtaacatctgccttttacagggctgttgtaaggcttacctgaatttcatatatgtaaagtgctggctcataccgtgggatatatgtttacaatagttatcaataagcaaataagtgaaa

SEQ ID NO: 514250 - DNA, 120 bp, Artificial Sequence
  ENSG00000164690_0 (sequence is synthesized)
acaagctctccaggcttgctaccatttaaaatcagactctttttgtcttttgattgctgtctcgcgacccaactccgatgtgttccgttatcagcggccggcagcctgccattccagccc

SEQ ID NO: 514251 - DNA, 120 bp, Artificial Sequence
  ENSG00000164690_1 (sequence is synthesized)
ctgtctgggtggggagcggtggagagtcccccgcagccgcggcgggcaaggttatataggaagagaaagagcgaggcagccagcgagggagagagcgagcgggcgagccggagcgaggaa

SEQ ID NO: 514252 - DNA, 120 bp, Artificial Sequence
  ENSG00000164690_2 (sequence is synthesized)
gggaaagcgcaagagagagcgcacacgcacacacccgccgcgcgcactcgcgcacggacccgcacggggacagctcggaagtcatcagttccatgggcgagatgctgctgctggcgagat

SEQ ID NO: 514253 - DNA, 120 bp, Artificial Sequence
  ENSG00000164690_3 (sequence is synthesized)
gtctgctgctagtcctcgtctcctcgctgctggtatgctcgggactggcgtgcggaccgggcagggggttcgggaagaggaggcaccccaaaaagctgacccctttagcctacaagcagt

SEQ ID NO: 514254 - DNA, 120 bp, Artificial Sequence
  ENSG00000164690_4 (sequence is synthesized)
ttatccccaatgtggccgagaagaccctaggcgccagcggaaggtatgaagggaagatctccagaaactccgagcgatttaaggaactcacccccaattacaaccccgacatcatattta

SEQ ID NO: 514255 - DNA, 120 bp, Artificial Sequence
  ENSG00000164690_5 (sequence is synthesized)
aggatgaagaaaacaccggagcggacaggctgatgactcagaggtgtaaggacaagttgaacgctttggccatctcggtgatgaaccagtggccaggagtgaaactgcgggtgaccgagg

SEQ ID NO: 514256 - DNA, 120 bp, Artificial Sequence
  ENSG00000164690_6 (sequence is synthesized)
gctgggacgaagatggccaccactcagaggagtctctgcactacgagggccgcgcagtggacatcaccacgtctgaccgcgaccgcagcaagtacggcatgctggcccgcctggcggtgg

SEQ ID NO: 514257 - DNA, 120 bp, Artificial Sequence
  ENSG00000164690_7 (sequence is synthesized)
aggccggcttcgactgggtgtactacgagtccaaggcacatatccactgctcggtgaaagcagagaactcggtggcggccaaatcgggaggctgcttcccgggctcggccacggtgcacc

SEQ ID NO: 514258 - DNA, 120 bp, Artificial Sequence
  ENSG00000164690_8 (sequence is synthesized)
tggagcagggcggcaccaagctggtgaaggacctgagccccggggaccgcgtgctggcggcggacgaccagggccggctgctctacagcgacttcctcactttcctggaccgcgacgacg

SEQ ID NO: 514259 - DNA, 120 bp, Artificial Sequence
  ENSG00000164690_9 (sequence is synthesized)
gcgccaagaaggtcttctacgtgatcgagacgcgggagccgcgcgagcgcctgctgctcaccgccgcgcacctgctctttgtggcgccgcacaacgactcggccaccggggagcccgagg

SEQ ID NO: 514260 - DNA, 120 bp, Artificial Sequence
  ENSG00000164690_10 (sequence is synthesized)
gcactggggcctcgggcgctgttcgccagccgcgtgcgcccgggccagcgcgtgtacgtggtggccgagcgtgacggggaccgccggctcctgcccgccgctgtgcacagcgtgacccta

SEQ ID NO: 514261 - DNA, 120 bp, Artificial Sequence
  ENSG00000164690_11 (sequence is synthesized)
tcctgcccgccgctgtgcacagcgtgaccctaagcgaggaggccgcgggcgcctacgcgccgctcacggcccagggcaccattctcatcaaccgggtgctggcctcgtgctacgcggtca

SEQ ID NO: 514262 - DNA, 120 bp, Artificial Sequence
  ENSG00000164690_12 (sequence is synthesized)
gctacgcggtcatcgaggagcacagctgggcgcaccgggccttcgcgcccttccgcctggcgcacgcgctcctggctgcactggcgcccgcgcgcacggaccgcggcggggacagcggcg

SEQ ID NO: 514263 - DNA, 120 bp, Artificial Sequence
  ENSG00000164690_13 (sequence is synthesized)
ggggcggcggcggcagagtagccctaaccgctccaggtgctgccgacgctccgggtgcgggggccaccgcgggcatccactggtactcgcagctgctctaccaaataggcacctggctcc

SEQ ID NO: 514264 - DNA, 120 bp, Artificial Sequence
  ENSG00000164690_14 (sequence is synthesized)
tggacagcgaggccctgcacccgctgggcatggcggtcaagtccagctgaagccggggggccgggggaggggcgcgggagggggcggggcggggcagcaacagcaacgcaaagcaaaaag

SEQ ID NO: 514265 - DNA, 120 bp, Artificial Sequence
  ENSG00000164690_15 (sequence is synthesized)
acactcggaaaaggcgcacgaaccagactgagttataataagaataagaataataaagtaggacagtccaaagtagactctaaggaaacaaggaccccgggaagttttgttgttgtgctt

SEQ ID NO: 514266 - DNA, 120 bp, Artificial Sequence
  ENSG00000164690_16 (sequence is synthesized)
agttgatatatattttttgaatttttttggttattgttttattttggttattttttcctcctctcctggctatttatttgtttggtatgaatagatgttttaaataatatgaaccggacc

SEQ ID NO: 514267 - DNA, 120 bp, Artificial Sequence
  ENSG00000164690_17 (sequence is synthesized)
ttcaagagccttaaatagtttgtttcttggataatttattatgatcatgtgaactgtactcacgggggaaagattattttgtgaggccaagcaacctgctcagagtctatttttctacat

SEQ ID NO: 514268 - DNA, 120 bp, Artificial Sequence
  ENSG00000164690_18 (sequence is synthesized)
gtccctcgtcccggctgtcagaaagcaaacctctgtccccgccatccctcccttccatctcctgcttctcagcaagtgcaaactcaaacgtgcttcatgggggtccacaaattatatttt

SEQ ID NO: 514269 - DNA, 120 bp, Artificial Sequence
  ENSG00000164690_19 (sequence is synthesized)
tattattttaatttaactagtttccgatgtaacagccatctcctctgttgtctttatggtttcatattccctttgtattcaccattttgccacattcttggaagccaagactgttacaca

SEQ ID NO: 514270 - DNA, 120 bp, Artificial Sequence
  ENSG00000164690_20 (sequence is synthesized)
tttttttttttttttttttttttggacaaactggaagaactgttatttttaacttcaaagaatttattagaaaataatattttttaaaagcgcacatagtgacgagcccacgaggatgga

SEQ ID NO: 514271 - DNA, 120 bp, Artificial Sequence
  ENSG00000164690_21 (sequence is synthesized)
tttttaaaagcgcacatagtgacgagcccacgaggatggagcctgcagtttgtacagagaaaacaaaggatgtttttgcattaataaattgagaaataacgctgtaaatttactaaaatg

SEQ ID NO: 514272 - DNA, 120 bp, Artificial Sequence
  ENSG00000164690_22 (sequence is synthesized)
tatttttgaatattttgtaatagttttatagaaataaaatgtgccatgcacagaacgcttagtatctaataactaagaattcctgttgcagccctttttcttttagtttttggcttcttt

SEQ ID NO: 514273 - DNA, 120 bp, Artificial Sequence
  ENSG00000164690_23 (sequence is synthesized)
gtttgggaaacctagcgctgacaggagctcccaatattctatttagatgtgttgcttatactgtgaactcagactgactgacttaggtaaccaaagtaggcacacaaaccaacttgtttc

SEQ ID NO: 514274 - DNA, 120 bp, Artificial Sequence
  ENSG00000164690_24 (sequence is synthesized)
ttctcatggctggagaaacctcagctctgtttgtatttattgtgtgaagctctttctacactcccaaaggttgggagtgccattcgtggggactgtgctgtccccctcaccccacccctt

SEQ ID NO: 514275 - DNA, 120 bp, Artificial Sequence
  ENSG00000164690_25 (sequence is synthesized)
aactagcaaagcctgatgtgtaagcccagaggaggtggcctggggatggccaccaacaaccttctcttaggactcctgtgtgtggttgctgggcagacccctggcctgaccctgtttgtg

SEQ ID NO: 514276 - DNA, 120 bp, Artificial Sequence
  ENSG00000164690_26 (sequence is synthesized)
cttctctgatctgtagggaggaggctcattgctgctttctgaggtcctgttgtgtcccttccagaaagcatccttagaagagaggacccggtttgatcttctctgaagctcctatcctct

SEQ ID NO: 514277 - DNA, 120 bp, Artificial Sequence
  ENSG00000164690_27 (sequence is synthesized)
tttcttgagggtccccttaaatctgagtggcaagcccacagtggcgagggccagtcgctggaatgtcggggctgctgttgaggtcctcaggctacactggttgtctgtgtcacatggcgg

SEQ ID NO: 514278 - DNA, 120 bp, Artificial Sequence
  ENSG00000164690_28 (sequence is synthesized)
tcgggcgtggactttgatccctgttgagagagcatgctgctgtgggcgctgggctggggaaggtccttccatgcttcatgctgccttggaggtttggccaagagggtctctgcccttggc

SEQ ID NO: 514279 - DNA, 120 bp, Artificial Sequence
  ENSG00000164690_29 (sequence is synthesized)
ggttgtcagggtcccaggtggaggactactcccagttctttggcttacggaaggtgtctgccatgctttgtgctttgggccgaatcgtctgagcaggctgggccttggaagagttgcgct

SEQ ID NO: 514280 - DNA, 120 bp, Artificial Sequence
  ENSG00000164690_30 (sequence is synthesized)
gcatgagcttggggcctcccagcagctgcagcctgtgtagaaggtggtccaggcttagggaacaggagtgaacagacttcagccccacctggcaggggctggctcccgaggttgggccca

SEQ ID NO: 514281 - DNA, 120 bp, Artificial Sequence
  ENSG00000164690_31 (sequence is synthesized)
gtccctgagggtctgctctgctacgggtctgcccttgagtggccttccgtggagggtgtgtgaccaggtggatggcgcagggcctctggagccctctcctcaggagcagtcctcagcctt

SEQ ID NO: 514282 - DNA, 120 bp, Artificial Sequence
  ENSG00000164690_32 (sequence is synthesized)
tttctgtaaaagacttttctttggtgttctaggtggtcagcaggttccaggctggtgtttacaatctcggaggaagtgcgatggtttctgttcttttgacagttcagtctgatttcaagt

SEQ ID NO: 514283 - DNA, 120 bp, Artificial Sequence
  ENSG00000164690_33 (sequence is synthesized)
cagtcgaaagcgaaccagaagcaccgggcacagcagctcctctggctgtgtagacagacctggcaatgtggccgtgcagcccagacgatcagagagaagccaggcgttgaccaagcccca

SEQ ID NO: 514284 - DNA, 120 bp, Artificial Sequence
  ENSG00000164690_34 (sequence is synthesized)
aggtgcctgaggccatggtgcaactctgctggtgactggggcaccttggagcagagcttcacccggatgggaaatcctcactcctgggtggcactccctcctggacaggcccggtggcag

SEQ ID NO: 514285 - DNA, 120 bp, Artificial Sequence
  ENSG00000164690_35 (sequence is synthesized)
agtgtccgtgctgctgggtgctgtccccagccctcctggtccatcttcttaagatgcgtccactgctttatatttaaaattctctttttcacaggcaaggaaaggaaaccactgcttaga

SEQ ID NO: 514286 - DNA, 120 bp, Artificial Sequence
  ENSG00000164690_36 (sequence is synthesized)
gacactaggtacagggcatcaagagggtgcagcccagccccgccaggacgaggcgccgacttctcattcagggttgacggagccaagagtttgtgcaaaatgtatgcatggtggttgctg

SEQ ID NO: 514287 - DNA, 120 bp, Artificial Sequence
  ENSG00000164690_37 (sequence is synthesized)
ccagcctccctcatgactaaatgcatatctattcctgtcaaaacgtgtatcacaatgtacttgaaactgttatctttgtgctctattgtttgaataattaaagaaattacagagactctc

SEQ ID NO: 514288 - DNA, 120 bp, Artificial Sequence
  ENSG00000164690_38 (sequence is synthesized)
gagcggaggaagggaacaggttaaagaaaacaagaaacacaatcagaccacagaaaagccaggcagaaaagggttcgacgggcaaaaagaatgtggctgtccagataaagaatgtctgtc

SEQ ID NO: 514289 - DNA, 120 bp, Artificial Sequence
  ENSG00000164690_39 (sequence is synthesized)
ccggccccggcctgtgctgcaagtggcaactcacctagccgcctgccacccaggctcccgcccaccgcgcagccccgccagcggcttctcgcctcccctctgcctcggatagggttaggg

SEQ ID NO: 514290 - DNA, 120 bp, Artificial Sequence
  ENSG00000164690_40 (sequence is synthesized)
gctgtttcaggacctggagaaaggcccccagctctaccctgagaggacgtgctcctccacgctcctccgcaaatgctgtccctcttccccagcccagggcccggctcttcggtgtgtctg

SEQ ID NO: 514291 - DNA, 120 bp, Artificial Sequence
  ENSG00000164690_41 (sequence is synthesized)
ggccattccaacccccgtctccccacctctccgcatggccctcgcgccttgagactgggcagggcaggctgatggaggggccgggaggggtggcggttgcccaggctaacgtgtccgtcg

SEQ ID NO: 514292 - DNA, 120 bp, Artificial Sequence
  ENSG00000164691_0 (sequence is synthesized)
gacatagctgccctaaaaggaatgaggaagcgagagctctccagtgtctggctggctccgtccgtgtgacagcccatgatgttctttccggtctctgtaatattctgaatttccacctgc

SEQ ID NO: 514293 - DNA, 120 bp, Artificial Sequence
  ENSG00000164691_1 (sequence is synthesized)
ccgccccttcgcttataatgcagagcatgtgaagggagaccggctcggtctctctctctcccagtggactagaaggagcagagagttatgctgtttctcccattctttacagctcaccgg

SEQ ID NO: 514294 - DNA, 120 bp, Artificial Sequence
  ENSG00000164691_2 (sequence is synthesized)
atgtaaaagaactctggctagagaccctccaaggacagaggcacagccacacgggagtgaaatccacccctggacagtcagccgcaatactgatgaagctgagaagcagccacaatgctt

SEQ ID NO: 514295 - DNA, 120 bp, Artificial Sequence
  ENSG00000164691_3 (sequence is synthesized)
caaaaacactaaacgccaataatatggagacactaatcgaatgtcaatcagagggtgatatcaaggaacatcccctgttggcatcatgtgagagtgaagacagtatttgccagctcattg

SEQ ID NO: 514296 - DNA, 120 bp, Artificial Sequence
  ENSG00000164691_4 (sequence is synthesized)
aagttaagaagagaaagaaggtgctgtcctggccctttctcatgagaaggctctcccctgcatcagatttttctggggctttggagacagacttgaaagcatcgctatttgatcagccct

SEQ ID NO: 514297 - DNA, 120 bp, Artificial Sequence
  ENSG00000164691_5 (sequence is synthesized)
tgtcaattatctgcggtgacagtgacacactccccagacccatccaggacattctcactattctatgccttaaaggcccttcaacggaagggatattcaggagagcagccaacgagaaag

SEQ ID NO: 514298 - DNA, 120 bp, Artificial Sequence
  ENSG00000164691_6 (sequence is synthesized)
cccgtaaggagctgaaggaggagctcaactctggggatgcggtggatctggagaggctccccgtgcacctcctcgctgtggtctttaaggacttcctcagaagtatcccccggaagctac

SEQ ID NO: 514299 - DNA, 120 bp, Artificial Sequence
  ENSG00000164691_7 (sequence is synthesized)
tttcaagcgacctctttgaggagtggatgggtgctctggagatgcaggacgaggaggacagaatcgaggccctgaaacaggttgcagataagctcccccggcccaacctcctgctactca

SEQ ID NO: 514300 - DNA, 120 bp, Artificial Sequence
  ENSG00000164691_8 (sequence is synthesized)
agcacttggtctatgtgctgcacctcatcagcaagaactctgaggtgaacaggatggactccagcaatctggccatctgcattggacccaacatgctcaccctggagaatgaccagagcc

SEQ ID NO: 514301 - DNA, 120 bp, Artificial Sequence
  ENSG00000164691_9 (sequence is synthesized)
tgtcatttgaagcccagaaggacctgaacaacaaggtgaagacactggtggaattcctcattgataactgctttgaaatatttggggagaacattccagtgcattccagtatcacttctg

SEQ ID NO: 514302 - DNA, 120 bp, Artificial Sequence
  ENSG00000164691_10 (sequence is synthesized)
atgactccctggagcacactgacagttcagatgtgtcgaccctgcagaatgactcagcctacgacagcaacgaccctgatgtggaatccaacagcagcagtggcatcagctctcccagca

SEQ ID NO: 514303 - DNA, 120 bp, Artificial Sequence
  ENSG00000164691_11 (sequence is synthesized)
ggcagccccaggtgcccatggccacagctgctggcttggatagcgcgggcccacaggatgcccgagaggtcagcccagagcccattgtgagcaccgtggccaggctgaaaagctccctcg

SEQ ID NO: 514304 - DNA, 120 bp, Artificial Sequence
  ENSG00000164691_12 (sequence is synthesized)
cacagcccgataggagatactcagagcccagcatgccatcctcccaggagtgcctcgagagccgggtgacaaaccaaacactaacaaagagtgaaggggacttccccgtgccccgggtag

SEQ ID NO: 514305 - DNA, 120 bp, Artificial Sequence
  ENSG00000164691_13 (sequence is synthesized)
gctctcgtttggaaagtgaggaggctgaagacccatttccagaggaggtcttccctgcagtgcaaggcaaaaccaagaggccggtggacctgaagatcaagaacttggccccgggttcgg

SEQ ID NO: 514306 - DNA, 120 bp, Artificial Sequence
  ENSG00000164691_14 (sequence is synthesized)
tgctcccgcgggcactggttctcaaagccttctccagcagctcgctggacgcgtcctctgacagctcgcccgtggcttctccttccagtcccaaaagaaatttcttcagcagacatcagt

SEQ ID NO: 514307 - DNA, 120 bp, Artificial Sequence
  ENSG00000164691_15 (sequence is synthesized)
ctttcaccacaaagacagagaaaggcaagcccagccgagaaattaaaaagcactccatgtctttcacctttgcccctcacaaaaaagtgctgaccaaaaacctcagcgcgggctctggga

SEQ ID NO: 514308 - DNA, 120 bp, Artificial Sequence
  ENSG00000164691_16 (sequence is synthesized)
gaaagccagcttgccggccgaatcgtgcaggaaaatgggtgtgaaacccacaaccaaacagcccgcggcttctgcctgagaccccacgccctctcggtggatgatgtgttccagggagct

SEQ ID NO: 514309 - DNA, 120 bp, Artificial Sequence
  ENSG00000164691_17 (sequence is synthesized)
gactgggagaggcctggaagcccaccctcttatgaagaggccatgcagggcccggcagccagactagtggcctccgagagccagaccgtggggagcatgacggtggggagcatgagggcg

SEQ ID NO: 514310 - DNA, 120 bp, Artificial Sequence
  ENSG00000164691_18 (sequence is synthesized)
aggatgctggaggcgcactgcctcctaccccctcttccacctgctcaccacgtagaggactcaagacacaggggcagcaaagagccactccctggccacggactctctcccctgcctgag

SEQ ID NO: 514311 - DNA, 120 bp, Artificial Sequence
  ENSG00000164691_19 (sequence is synthesized)
cgatggaaacagagcagaactgtccatgcttctggggactctctggggcacgtgtctggcccagggagacctgagctcctcccgctgaggaccgtctccgagtccgtgcagaggaataag

SEQ ID NO: 514312 - DNA, 120 bp, Artificial Sequence
  ENSG00000164691_20 (sequence is synthesized)
cgggactgtctcgtgcgacgatgtagccagccggtctttgaggctgaccaattccaatatgccaaagaatcgtatatttaggagggaggccatacgccatgccatagcttgtgctatctg

SEQ ID NO: 514313 - DNA, 120 bp, Artificial Sequence
  ENSG00000164691_21 (sequence is synthesized)
taaatatgagacttgtaaagaactgcctgtagattgtttttaaaaggtcttgaataagctccttgagaaagttgtggaaagccctcctcagtgaggatagctacaccatggccatggcgc

SEQ ID NO: 514314 - DNA, 120 bp, Artificial Sequence
  ENSG00000164691_22 (sequence is synthesized)
atcagatagtctctgtgtacctggatttgtgcaatatgtaaaaatgtatcaaatgtattatagataaggtgttaggtgcaaaggatgtctaataatccctgcacacgttttgaacttgca

SEQ ID NO: 514315 - DNA, 120 bp, Artificial Sequence
  ENSG00000164691_23 (sequence is synthesized)
gtgaagtacactgctgttccttgcttcctggggcacttttctcttggttagtgtttaaaaattatcttcgcttttttaatgtggcctcaaatgtcatgccaattttcacatcttccacaa

SEQ ID NO: 514316 - DNA, 120 bp, Artificial Sequence
  ENSG00000164691_24 (sequence is synthesized)
actccatttagggagaaatgtttaaatctctggtataagtttactccataccagagtaaactatatattactctatataagcagtcttgcaataactaatcaccaccatagaagaaagaa

SEQ ID NO: 514317 - DNA, 120 bp, Artificial Sequence
  ENSG00000164691_25 (sequence is synthesized)
acagactgcaaggaacagagttgagtgtctggagtcatcaaaggcattaaaaactccagtaaaagctggggccgtagcaaaaatcatgaaaaacacttcaacgtgtcctttcaatcatcc

SEQ ID NO: 514318 - DNA, 120 bp, Artificial Sequence
  ENSG00000164691_26 (sequence is synthesized)
aattaaatgtgggtagattaatgaaaatgtattacatcaatattaactcatctatagcactttgagtatctttgtagttcatgatatcctatcctataatgtggaggtaaatgattttat

SEQ ID NO: 514319 - DNA, 120 bp, Artificial Sequence
  ENSG00000164691_27 (sequence is synthesized)
atgcattgggggtcatatataaaacttcaatgtaatttcactacaataaattgccttccttatttgaaagtaaaaatgttctttttttattgacatgttaactcctttccctcaattaat

SEQ ID NO: 514320 - DNA, 120 bp, Artificial Sequence
  ENSG00000164691_28 (sequence is synthesized)
agaaatccactaagaaaatcattcacatattggttcactcaacaagcatttattaaatatatattcactattctagactaatagcaagaccggggatcttgtttaggaagaagcagtccc

SEQ ID NO: 514321 - DNA, 120 bp, Artificial Sequence
  ENSG00000164691_29 (sequence is synthesized)
tgttctccagaatttgcaaaaccattaaaaaagcacctactttaagccattttttttcagcaaggagtcattctgccagaaaaatgtagtacacaaatacaggataatataacaaatgta

SEQ ID NO: 514322 - DNA, 120 bp, Artificial Sequence
  ENSG00000164691_30 (sequence is synthesized)
aaatttctcatttctagtgaattaaactttccagtaattttacatctcacctcattcttatgatgctcagtttgcttaattattggcaaacataatggtaaaatgtttgtactgtattag

SEQ ID NO: 514323 - DNA, 120 bp, Artificial Sequence
  ENSG00000164691_31 (sequence is synthesized)
agctttactgttcgattattaagatatttatccagtatcttagagatgctggacttcaattttccttattttatctttttaaaataaaatatcatgcatgcttctgatttgttatagaaa

SEQ ID NO: 514324 - DNA, 120 bp, Artificial Sequence
  ENSG00000164691_32 (sequence is synthesized)
aatgtctccaactgactcagaatcacagtgaaaatataaaatgcaaaatgcttttgtcatagttccactctctcagatacatgtatctaatgaaactgaataaatccgtgtcttctgtca

SEQ ID NO: 514325 - DNA, 120 bp, Artificial Sequence
  ENSG00000164692_0 (sequence is synthesized)
gtgtcccatagtgtttccaaacttggaaagggcgggggagggcgggaggatgcggagggcggaggtatgcagacaacgagtcagagtttccccttgaaagcctcaaaagtgtccacgtcc

SEQ ID NO: 514326 - DNA, 120 bp, Artificial Sequence
  ENSG00000164692_1 (sequence is synthesized)
tcaaaaagaatggaaccaatttaagaagccagccccgtggccacgtcccttcccccattcgctccctcctctgcgcccccgcaggctcctcccagctgtggctgcccgggcccccagccc

SEQ ID NO: 514327 - DNA, 120 bp, Artificial Sequence
  ENSG00000164692_2 (sequence is synthesized)
cagccctcccattggtggaggcccttttggaggcaccctagggccagggaaacttttgccgtataaatagggcagatccgggctttattattttagcaccacggcagcaggaggtttcgg

SEQ ID NO: 514328 - DNA, 120 bp, Artificial Sequence
  ENSG00000164692_3 (sequence is synthesized)
ctaagttggaggtactggccacgactgcatgcccgcgcccgccaggtgatacctccgccggtgacccaggggctctgcgacacaaggagtctgcatgtctaagtgctagacatgctcagc

SEQ ID NO: 514329 - DNA, 120 bp, Artificial Sequence
  ENSG00000164692_4 (sequence is synthesized)
tttgtggatacgcggactttgttgctgcttgcagtaaccttatgcctagcaacatgccaatctttacaagaggaaactgtaagaaagggcccagccggagatagaggaccacgtggagaa

SEQ ID NO: 514330 - DNA, 120 bp, Artificial Sequence
  ENSG00000164692_5 (sequence is synthesized)
aggggtccaccaggccccccaggcagagatggtgaagatggtcccacaggccctcctggtccacctggtcctcctggcccccctggtctcggtgggaactttgctgctcagtatgatgga

SEQ ID NO: 514331 - DNA, 120 bp, Artificial Sequence
  ENSG00000164692_6 (sequence is synthesized)
aaaggagttggacttggccctggaccaatgggcttaatgggacctagaggcccacctggtgcagctggagccccaggccctcaaggtttccaaggacctgctggtgagcctggtgaacct

SEQ ID NO: 514332 - DNA, 120 bp, Artificial Sequence
  ENSG00000164692_7 (sequence is synthesized)
ggtcaaactggtcctgcaggtgctcgtggtccagctggccctcctggcaaggctggtgaagatggtcaccctggaaaacccggacgacctggtgagagaggagttgttggaccacagggt

SEQ ID NO: 514333 - DNA, 120 bp, Artificial Sequence
  ENSG00000164692_8 (sequence is synthesized)
gctcgtggtttccctggaactcctggacttcctggcttcaaaggcattaggggacacaatggtctggatggattgaagggacagcccggtgctcctggtgtgaagggtgaacctggtgcc

SEQ ID NO: 514334 - DNA, 120 bp, Artificial Sequence
  ENSG00000164692_9 (sequence is synthesized)
cctggtgaaaatggaactccaggtcaaacaggagcccgtgggcttcctggtgagagaggacgtgttggtgcccctggcccagctggtgcccgtggcagtgatggaagtgtgggtcccgtg

SEQ ID NO: 514335 - DNA, 120 bp, Artificial Sequence
  ENSG00000164692_10 (sequence is synthesized)
ggtcctgctggtcccattgggtctgctggccctccaggcttcccaggtgcccctggccccaagggtgaaattggagctgttggtaacgctggtcctgctggtcccgccggtccccgtggt

SEQ ID NO: 514336 - DNA, 120 bp, Artificial Sequence
  ENSG00000164692_11 (sequence is synthesized)
gaagtgggtcttccaggcctctccggccccgttggacctcctggtaatcctggagcaaacggccttactggtgccaagggtgctgctggccttcccggcgttgctggggctcccggcctc

SEQ ID NO: 514337 - DNA, 120 bp, Artificial Sequence
  ENSG00000164692_12 (sequence is synthesized)
cctggaccccgcggtattcctggccctgttggtgctgccggtgctactggtgccagaggacttgttggtgagcctggtccagctggctccaaaggagagagcggtaacaagggtgagccc

SEQ ID NO: 514338 - DNA, 120 bp, Artificial Sequence
  ENSG00000164692_13 (sequence is synthesized)
ggctctgctgggccccaaggtcctcctggtcccagtggtgaagaaggaaagagaggccctaatggggaagctggatctgccggccctccaggacctcctgggctgagaggtagtcctggt

SEQ ID NO: 514339 - DNA, 120 bp, Artificial Sequence
  ENSG00000164692_14 (sequence is synthesized)
tctcgtggtcttcctggagctgatggcagagctggcgtcatgggccctcctggtagtcgtggtgcaagtggccctgctggagtccgaggacctaatggagatgctggtcgccctggggag

SEQ ID NO: 514340 - DNA, 120 bp, Artificial Sequence
  ENSG00000164692_15 (sequence is synthesized)
cctggtctcatgggacccagaggtcttcctggttcccctggaaatatcggccccgctggaaaagaaggtcctgtcggcctccctggcatcgacggcaggcctggcccaattggcccagct

SEQ ID NO: 514341 - DNA, 120 bp, Artificial Sequence
  ENSG00000164692_16 (sequence is synthesized)
ggagcaagaggagagcctggcaacattggattccctggacccaaaggccccactggtgatcctggcaaaaacggtgataaaggtcatgctggtcttgctggtgctcggggtgctccaggt

SEQ ID NO: 514342 - DNA, 120 bp, Artificial Sequence
  ENSG00000164692_17 (sequence is synthesized)
cctgatggaaacaatggtgctcagggacctcctggaccacagggtgttcaaggtggaaaaggtgaacagggtccccctggtcctccaggcttccagggtctgcctggcccctcaggtccc

SEQ ID NO: 514343 - DNA, 120 bp, Artificial Sequence
  ENSG00000164692_18 (sequence is synthesized)
gctggtgaagttggcaaaccaggagaaaggggtctccatggtgagtttggtctccctggtcctgctggtccaagaggggaacgcggtcccccaggtgagagtggtgctgccggtcctact

SEQ ID NO: 514344 - DNA, 120 bp, Artificial Sequence
  ENSG00000164692_19 (sequence is synthesized)
ggtcctattggaagccgaggtccttctggacccccagggcctgatggaaacaagggtgaacctggtgtggttggtgctgtgggcactgctggtccatctggtcctagtggactcccagga

SEQ ID NO: 514345 - DNA, 120 bp, Artificial Sequence
  ENSG00000164692_20 (sequence is synthesized)
gagaggggtgctgctggcatacctggaggcaagggagaaaagggtgaacctggtctcagaggtgaaattggtaaccctggcagagatggtgctcgtggtgctcctggtgctgtaggtgcc

SEQ ID NO: 514346 - DNA, 120 bp, Artificial Sequence
  ENSG00000164692_21 (sequence is synthesized)
cctggtcctgctggagccacaggtgaccggggcgaagctggggctgctggtcctgctggtcctgctggtcctcggggaagccctggtgaacgtggtgaggtcggtcctgctggccccaat

SEQ ID NO: 514347 - DNA, 120 bp, Artificial Sequence
  ENSG00000164692_22 (sequence is synthesized)
tcctgctggtgctgctggtcaacctggtgctaaaggagaaagaggagccaaagggcctaagggtgaaaacggtgttgttggtcccacaggccccgttggagctgctggcccagctggtcc

SEQ ID NO: 514348 - DNA, 120 bp, Artificial Sequence
  ENSG00000164692_23 (sequence is synthesized)
aaatggtccccccggtcctgctggaagtcgtggtgatggaggcccccctggtatgactggtttccctggtgctgctggacggactggtcccccaggaccctctggtatttctggccctcc

SEQ ID NO: 514349 - DNA, 120 bp, Artificial Sequence
  ENSG00000164692_24 (sequence is synthesized)
tggtccccctggtcctgctgggaaagaagggcttcgtggtcctcgtggtgaccaaggtccagttggccgaactggagaagtaggtgcagttggtccccctggcttcgctggtgagaaggg

SEQ ID NO: 514350 - DNA, 120 bp, Artificial Sequence
  ENSG00000164692_25 (sequence is synthesized)
tccctctggagaggctggtactgctggacctcctggcactccaggtcctcagggtcttcttggtgctcctggtattctgggtctccctggctcgagaggtgaacgtggtctaccaggtgt

SEQ ID NO: 514351 - DNA, 120 bp, Artificial Sequence
  ENSG00000164692_26 (sequence is synthesized)
tgctggtgctgtgggtgaacctggtcctcttggcattgccggccctcctggggcccgtggtcctcctggtgctgtgggtagtcctggagtcaacggtgctcctggtgaagctggtcgtga

SEQ ID NO: 514352 - DNA, 120 bp, Artificial Sequence
  ENSG00000164692_27 (sequence is synthesized)
tggcaaccctgggaacgatggtcccccaggtcgcgatggtcaacccggacacaagggagagcgcggttaccctggcaatattggtcccgttggtgctgcaggtgcacctggtcctcatgg

SEQ ID NO: 514353 - DNA, 120 bp, Artificial Sequence
  ENSG00000164692_28 (sequence is synthesized)
ccccgtgggtcctgctggcaaacatggaaaccgtggtgaaactggtccttctggtcctgttggtcctgctggtgctgttggcccaagaggtcctagtggcccacaaggcattcgtggcga

SEQ ID NO: 514354 - DNA, 120 bp, Artificial Sequence
  ENSG00000164692_29 (sequence is synthesized)
taagggagagcccggtgaaaaggggcccagaggtcttcctggcttaaagggacacaatggattgcaaggtctgcctggtatcgctggtcaccatggtgatcaaggtgctcctggctccgt

SEQ ID NO: 514355 - DNA, 120 bp, Artificial Sequence
  ENSG00000164692_30 (sequence is synthesized)
gggtcctgctggtcctaggggccctgctggtccttctggccctgctggaaaagatggtcgcactggacatcctggtacagttggacctgctggcattcgaggccctcagggtcaccaagg

SEQ ID NO: 514356 - DNA, 120 bp, Artificial Sequence
  ENSG00000164692_31 (sequence is synthesized)
ccctgctggcccccctggtccccctggccctcctggacctccaggtgtaagcggtggtggttatgactttggttacgatggagacttctacagggctgaccagcctcgctcagcaccttc

SEQ ID NO: 514357 - DNA, 120 bp, Artificial Sequence
  ENSG00000164692_32 (sequence is synthesized)
tctcagacccaaggactatgaagttgatgctactctgaagtctctcaacaaccagattgagacccttcttactcctgaaggctctagaaagaacccagctcgcacatgccgtgacttgag

SEQ ID NO: 514358 - DNA, 120 bp, Artificial Sequence
  ENSG00000164692_33 (sequence is synthesized)
actcagccacccagagtggagcagtggttactactggattgaccctaaccaaggatgcactatggatgctatcaaagtatactgtgatttctctactggcgaaacctgtatccgggccca

SEQ ID NO: 514359 - DNA, 120 bp, Artificial Sequence
  ENSG00000164692_34 (sequence is synthesized)
acctgaaaacatcccagccaagaactggtataggagctccaaggacaagaaacacgtctggctaggagaaactatcaatgctggcagccagtttgaatataatgtagaaggagtgacttc

SEQ ID NO: 514360 - DNA, 120 bp, Artificial Sequence
  ENSG00000164692_35 (sequence is synthesized)
caaggaaatggctacccaacttgccttcatgcgcctgctggccaactatgcctctcagaacatcacctaccactgcaagaacagcattgcatacatggatgaggagactggcaacctgaa

SEQ ID NO: 514361 - DNA, 120 bp, Artificial Sequence
  ENSG00000164692_36 (sequence is synthesized)
aaaggctgtcattctacagggctctaatgatgttgaacttgttgctgagggcaacagcaggttcacttacactgttcttgtagatggctgctctaaaaagacaaatgaatggggaaagac

SEQ ID NO: 514362 - DNA, 120 bp, Artificial Sequence
  ENSG00000164692_37 (sequence is synthesized)
aatcattgaatacaaaacaaataagccatcacgcctgcccttccttgatattgcacctttggacatcggtggtgctgaccaggaattctttgtggacattggcccagtctgtttcaaata

SEQ ID NO: 514363 - DNA, 120 bp, Artificial Sequence
  ENSG00000164692_38 (sequence is synthesized)
aatgaactcaatctaaattaaaaaagaaagaaatttgaaaaaactttctctttgccatttcttcttcttcttttttaactgaaagctgaatccttccatttcttctgcacatctacttgc

SEQ ID NO: 514364 - DNA, 120 bp, Artificial Sequence
  ENSG00000164692_39 (sequence is synthesized)
ttaaattgtgggcaaaagagaaaaagaaggattgatcagagcattgtgcaatacagtttcattaactccttcccccgctcccccaaaaatttgaatttttttttcaacactcttacacct

SEQ ID NO: 514365 - DNA, 120 bp, Artificial Sequence
  ENSG00000164692_40 (sequence is synthesized)
gttatggaaaatgtcaacctttgtaagaaaaccaaaataaaaattgaaaaataaaaaccataaacatttgcaccacttgtggcttttgaatatcttccacagagggaagtttaaaaccca

SEQ ID NO: 514366 - DNA, 120 bp, Artificial Sequence
  ENSG00000164692_41 (sequence is synthesized)
aacttccaaaggtttaaactacctcaaaacactttcccatgagtgtgatccacattgttaggtgctgacctagacagagatgaactgaggtccttgttttgttttgttcataatacaaag

SEQ ID NO: 514367 - DNA, 120 bp, Artificial Sequence
  ENSG00000164692_42 (sequence is synthesized)
gtgctaattaatagtatttcagatacttgaagaatgttgatggtgctagaagaatttgagaagaaatactcctgtattgagttgtatcgtgtggtgtattttttaaaaaatttgatttag

SEQ ID NO: 514368 - DNA, 120 bp, Artificial Sequence
  ENSG00000164692_43 (sequence is synthesized)
cattcatattttccatcttattcccaattaaaagtatgcagattatttgcccaaatcttcttcagattcagcatttgttctttgccagtctcattttcatcttcttccatggttccacag

SEQ ID NO: 514369 - DNA, 120 bp, Artificial Sequence
  ENSG00000164692_44 (sequence is synthesized)
aagctttgtttcttgggcaagcagaaaaattaaattgtacctattttgtatatgtgagatgtttaaataaattgtgaaaaaaatgaaataaagcatgtttggttttccaaaagaacatat

SEQ ID NO: 514370 - DNA, 120 bp, Artificial Sequence
  ENSG00000164692_45 (sequence is synthesized)
attgtgtgaaactttatgtcctgagctgaggttctcttcttccaaatttctgaacaagatggtcagcttctccatagtatctacacctagtactgaaaatatgaaaattgcttaggccaa

SEQ ID NO: 514371 - DNA, 120 bp, Artificial Sequence
  ENSG00000164692_46 (sequence is synthesized)
agaatgggcttttcaatagcacactgcaaaactgggcccaagtatttaaaacatctctaaaaaatatctaggttggcaggtttttatccctagttttaacagtctgaaagagggttcgtt

SEQ ID NO: 514372 - DNA, 120 bp, Artificial Sequence
  ENSG00000164692_47 (sequence is synthesized)
tattgttccagtatagcctatataatatccatttcccattctctggctaactccatctcactcttggaggtaatgctatttcataccaacatgaaaggtgaggattaagggagatagaaa

SEQ ID NO: 514373 - DNA, 120 bp, Artificial Sequence
  ENSG00000164692_48 (sequence is synthesized)
aaacataattagaggaatgactaatattgcactgctgaaataggttgtgaaaaaaaaattgaatataatagacataatgggagaaaagagccccactttacattttcaattttctcaatc

SEQ ID NO: 514374 - DNA, 120 bp, Artificial Sequence
  ENSG00000164692_49 (sequence is synthesized)
cggagtccatttaactaaagtttcccattcaatttggaaaaaaaaaaaaaatatgtctcttgacatgtgctctgaaagtgtgattttcctcttctgtctttaaagggtcaccatggtgat

SEQ ID NO: 514375 - DNA, 120 bp, Artificial Sequence
  ENSG00000164692_50 (sequence is synthesized)
agttagccccatttcaatatatcctctaaaatatctggaaattgtctatatgcaatgggcttgttaagtccatccctgcaagtgtgcctgggggctcgttatttatttatgtgaacttga

SEQ ID NO: 514376 - DNA, 120 bp, Artificial Sequence
  ENSG00000164692_51 (sequence is synthesized)
cattagatcttccaattaaatatatatccgtcaagtgcctgctatgcaacagggaatataccagatagaagatggaaaataacggaaggattaacatttgcacactgctttacaaagtat

SEQ ID NO: 514377 - DNA, 120 bp, Artificial Sequence
  ENSG00000164692_52 (sequence is synthesized)
aaaagtttcatgaatattgttttattttaattctctgataacctcataagggtggtaatattgaagaacattctgacacagatagtcattttttatttctatattttcttctaagagatg

SEQ ID NO: 514378 - DNA, 120 bp, Artificial Sequence
  ENSG00000164692_53 (sequence is synthesized)
cgggaatgatccacttgaagaaaagagtagcatttacaagggtttgtttgtgatttgactccatctttttgtttgcatttagggtccaaatggtccccccggtcctgctggaagtcgtgg

SEQ ID NO: 514379 - DNA, 120 bp, Artificial Sequence
  ENSG00000164692_54 (sequence is synthesized)
tcgtggtgatggaggcccccctgtgagtatttacaatggactctcgccgcttttcttttttcagaatctattaaggacacttgaaagttttgaaatttttggtaaatttggactaccatg

SEQ ID NO: 514380 - DNA, 120 bp, Artificial Sequence
  ENSG00000164692_55 (sequence is synthesized)
aggaaacttttgagattcaagttcattctattcagagcaattccgatattgatgttaacttgaactcagctggaactcagtgtatgttgctatcagctcacttgaggtaataaccaaggt

SEQ ID NO: 514381 - DNA, 120 bp, Artificial Sequence
  ENSG00000164692_56 (sequence is synthesized)
gggccctaggcagtttaattgtaaagtcggaaaaaatattccttttggcgtttattaatatgccccttcttctgcctgaccatgtccttctcctttgcaggcaatgctatcacaacaatt

SEQ ID NO: 514382 - DNA, 120 bp, Artificial Sequence
  ENSG00000164692_57 (sequence is synthesized)
catccttaagaggactgaagcaggttatagaggaatcgcagctgtgcactcccactaccctcatctcttcagtcaccatgtcattaacagcatctctctctgctatattctccctccttt

SEQ ID NO: 514383 - DNA, 120 bp, Artificial Sequence
  ENSG00000164692_58 (sequence is synthesized)
caatagcccagccttctttgtgtttcaaagcaggcaagaagcctgtctagctagctgtttaaattggaattcttctagagtttgattcttcattttcttctttctccactaaaattgatt

SEQ ID NO: 514384 - DNA, 120 bp, Artificial Sequence
  ENSG00000164692_59 (sequence is synthesized)
taacagaaaaatcttcattccctgtaggcatttaattaaacctagttgagaagtgtgtgggattcctcaattatgaacaaaacacgtatattggctttctttaaaaaaaaaaaaaaagaa

SEQ ID NO: 514385 - DNA, 120 bp, Artificial Sequence
  ENSG00000164692_60 (sequence is synthesized)
gaaaaaagaaaaggcaaagtccttcgaaactcagagtcccattcatttatcattaactcctatcattctacatagttctgattccaatatgccagggtaccagtggcatgacattgtttt

SEQ ID NO: 514386 - DNA, 120 bp, Artificial Sequence
  ENSG00000164692_61 (sequence is synthesized)
tcctcatagaaatttgccatagtctctcctccattatttggttggttacagcctcataaaggaagacaggagttgcttctttctgcaagaaagaaggttaaaaactataaatatttcccc

SEQ ID NO: 514387 - DNA, 120 bp, Artificial Sequence
  ENSG00000164692_62 (sequence is synthesized)
caaatggccagggtattattttattgcatcacattgtttgcatcttaagatctagaatctttgctgctctcttccaggcccttggtgattaacagaaaggaaatgaccttgtacatttgc

SEQ ID NO: 514388 - DNA, 120 bp, Artificial Sequence
  ENSG00000164692_63 (sequence is synthesized)
agtggcatctatttgttgatgagtattgcaggctctcaagtagagctcagttgagccaggaaatctgtccagcacacactgaggggctgtggcttccaagatgctcagaaagcacaaaat

SEQ ID NO: 514389 - DNA, 120 bp, Artificial Sequence
  ENSG00000164692_64 (sequence is synthesized)
cgggaagacaataaatgagggaactcagttttatcacaaagcccttaaagctattgaaggcaccttactggtaccaggattagaacagagtcccattgctgtggccatcctactacatat

SEQ ID NO: 514390 - DNA, 120 bp, Artificial Sequence
  ENSG00000164692_65 (sequence is synthesized)
taatcaatctcagtaggctaccaatttcttaaacatacactgtccagtattagtgctactctgaaaggtgcccctattagaccttagaggccaaagtcaaaatttgcttccttttgatat

SEQ ID NO: 514391 - DNA, 75 bp, Artificial Sequence
  ENSG00000164692_66 (sequence is synthesized)
accttagaggccaaagtcaaaatttgcttccttttgatatactgattttactgatttcggatggagttcccctct

SEQ ID NO: 514392 - DNA, 68 bp, Artificial Sequence
  ENSG00000164692_67 (sequence is synthesized)
gtggcacgatctcagctcactgcgacttccgcctccccagtttaagtaattatagctaatttttgtat

SEQ ID NO: 514393 - DNA, 120 bp, Artificial Sequence
  ENSG00000164692_68 (sequence is synthesized)
tcaggtgatccacccaccttgacctcctaaagtgctgggattacacatgtgagccaccccacccagcctgatttcctttcctttgtgtatatacccagcagtgtgattgctggatcttat

SEQ ID NO: 514394 - DNA, 120 bp, Artificial Sequence
  ENSG00000164692_69 (sequence is synthesized)
gtgtatatacccagcagtgtgattgctggatcttatggtagttctatttttagttttttgaggaacccctcctactatgtacaactattatgtatccataacaatttaaatttttttatt

SEQ ID NO: 514395 - DNA, 120 bp, Artificial Sequence
  ENSG00000164692_70 (sequence is synthesized)
tgtttccctgcctagaggctataaaaactctatttcaccaccccaagtgtctttataaatctcaaccacatatttttaaatgttgtgccattggtctcaaggatgaatcagatacaaaag

SEQ ID NO: 514396 - DNA, 120 bp, Artificial Sequence
  ENSG00000164692_71 (sequence is synthesized)
tattcatgccaagatgtaaactcaccgtcatcactagagaaaagatatccaaggatatgtcctagtaataggaggtcattagcctttttctaagctgaagacagtttattctcacaatct

SEQ ID NO: 514397 - DNA, 120 bp, Artificial Sequence
  ENSG00000164692_72 (sequence is synthesized)
gtgacagattgatcactgaataacttcacttaagatttttattcatggcattttctttatacagatcacatgtcacttatctaagaagctttaataccaccttacttagacacacactat

SEQ ID NO: 514398 - DNA, 120 bp, Artificial Sequence
  ENSG00000164692_73 (sequence is synthesized)
aaagacacagcttaaaattatgcagaatgatttttgttctttccacgcacttaggaatgatacaatctctaattgcgtttactcctctgcaatatgaaatgctggcatcatttatcctgt

SEQ ID NO: 514399 - DNA, 120 bp, Artificial Sequence
  ENSG00000164692_74 (sequence is synthesized)
aggaagaatgaaactctggaagttctgaatcgttccattaaaccttatacgtgacaacaactagaaaccatctcatctccataaaatatatcaactttttgaattcatttcatttgggat

SEQ ID NO: 514400 - DNA, 120 bp, Artificial Sequence
  ENSG00000164692_75 (sequence is synthesized)
actgaatgacacgaggctcactttttacagagcaacatcccgtgattacataaagctggccatctacatgtggagaaggagggcagagatgatactaatgatacttcttaccattgtgtg

SEQ ID NO: 514401 - DNA, 120 bp, Artificial Sequence
  ENSG00000164692_76 (sequence is synthesized)
acccattcacattcaatttaccttcttccttcaaactagaatctcctgagtagggttgttttggaggggaaggttagcattccatcgaataaggggaatgtcattttatcttctctgcct

SEQ ID NO: 514402 - DNA, 120 bp, Artificial Sequence
  ENSG00000164692_77 (sequence is synthesized)
ttagactgcccccaagggggggtctaaaggggggttaaaagaacagaagaatgagagaactaacttatttcataagtaaattcagtttttgtatgtattttatatttatttatttatacg

SEQ ID NO: 514403 - DNA, 120 bp, Artificial Sequence
  ENSG00000164692_78 (sequence is synthesized)
tattaatttcgtacttaaattcagatgataaattcagagtattcttatcagatagtgccttctgaaatgctgaaatgtatactatgtccatgcattgttttttctttagcatgtttttta

SEQ ID NO: 514404 - DNA, 120 bp, Artificial Sequence
  ENSG00000164692_79 (sequence is synthesized)
aatggtaatgtgtgcccagaacttaaaatttcttgagacttcagtggcctaaactataatttatagttatgtgtattttattttacttattagtatggcctacatttaacttttaatgct

SEQ ID NO: 514405 - DNA, 120 bp, Artificial Sequence
  ENSG00000164692_80 (sequence is synthesized)
ttttctacaatatgctataaatataagaaaaattaaaattcactaacagcaagactacatacccacccaggtcccgctcccaaagacacacatagagggacatacacacaacaatcctaa

SEQ ID NO: 514406 - DNA, 120 bp, Artificial Sequence
  ENSG00000164692_81 (sequence is synthesized)
aaatgactttgtagagataggtcacttggaatgtgtgttgaaatgttgttggtttttttggtttgtttgtttgtttgttttttgttagactgatagggagcccctcccactaaagacacc

SEQ ID NO: 514407 - DNA, 120 bp, Artificial Sequence
  ENSG00000164692_82 (sequence is synthesized)
cttgatactgttatttcaaggatgaacttatttatctgggacagacatcttcagaatgacacatgccaaacagtggttcttattaaatcaaaggttcagatattatcagattcagaaata

SEQ ID NO: 514408 - DNA, 120 bp, Artificial Sequence
  ENSG00000164692_83 (sequence is synthesized)
atagaaagataattgtttttcagatttttatttatttccagttctgtgatgacttccctctcagtaaacagcaatccgattccagtggacctgaattattctaaacaaacaaacaatagc

SEQ ID NO: 514409 - DNA, 120 bp, Artificial Sequence
  ENSG00000164692_84 (sequence is synthesized)
aacaaactgtgggggaaaattcagagttcccaaaacataaatgaattagtatgggttgtcactcttttctcctcacgctgtttatgcttttgttttaatctagaaacattgtattcattg

SEQ ID NO: 514410 - DNA, 80 bp, Artificial Sequence
  ENSG00000164694_0 (sequence is synthesized)
cggctgccggtgtgcggccgggagcgatcgccgcggggcaggggcgcggcgggcaccgcgcagagcgcgcagaacagacg

SEQ ID NO: 514411 - DNA, 80 bp, Artificial Sequence
  ENSG00000164694_1 (sequence is synthesized)
ctcggcactccccagactccggccagcgcccccctgccagccgcaagcacccagccccggcccaccccgggctctcgatg

SEQ ID NO: 514412 - DNA, 120 bp, Artificial Sequence
  ENSG00000164694_2 (sequence is synthesized)
tgtcctgggcggcgctgctgctcttggccgcgctgctccccgtcgcctcctcggcggcggcctcagttgaccacccactgaagccaaggcatgtgaaactgctgtccactaaaatgggcc

SEQ ID NO: 514413 - DNA, 120 bp, Artificial Sequence
  ENSG00000164694_3 (sequence is synthesized)
tgaaagtcacgtgggacccacccaaagatgctaccagtagacctgtggagcattacaacattgcctatgggaagtcactgaaaagtcttaaatacatcaaggtgaatgcggagacatact

SEQ ID NO: 514414 - DNA, 120 bp, Artificial Sequence
  ENSG00000164694_4 (sequence is synthesized)
ccttccttattgaggatgtggagccgggggtagtgtactttgtgctgcttactgcagaaaaccacagtggagtgagccgtcctgtttacagagctgaaagcccacctggaggtgaatgga

SEQ ID NO: 514415 - DNA, 120 bp, Artificial Sequence
  ENSG00000164694_5 (sequence is synthesized)
tcgagattgatggttttcccattaagggtccaggaccatttaatgaaaccgtcacagaaaaggaagtgcccaacaagcccttgcgtgtgcgtgtccggtcctcagatgacaggctgtccg

SEQ ID NO: 514416 - DNA, 120 bp, Artificial Sequence
  ENSG00000164694_6 (sequence is synthesized)
ttgcgtggaaggcaccacgcctgtctggagccaagagtccacgcagatcacggggttttctcctgggctacggggagagtggccggaagatgaattatgttccactgacaagagatgaac

SEQ ID NO: 514417 - DNA, 120 bp, Artificial Sequence
  ENSG00000164694_7 (sequence is synthesized)
ggacacacgaaattaaaaagctagcctcggaatccgtgtatgtggtctccctgcagtccatgaactctcagggccggagccaaccagtctacagggctgccctaacaaagcgaaagattt

SEQ ID NO: 514418 - DNA, 120 bp, Artificial Sequence
  ENSG00000164694_8 (sequence is synthesized)
cagaagaggacgaattggatgtacctgacgacatcagcgtccgggttatgtcatctcagtctgtgcttgtgtcctgggtggatcctgttctggaaaaacagaagaaagttgttgcatcaa

SEQ ID NO: 514419 - DNA, 120 bp, Artificial Sequence
  ENSG00000164694_9 (sequence is synthesized)
gacagtacaccgtgcgctatcgagagaagggggaattggccaggtgggattataagcagatcgctaacaggcgtgtgctgattgagaacctgattccagacactgtgtatgaatttgcag

SEQ ID NO: 514420 - DNA, 120 bp, Artificial Sequence
  ENSG00000164694_10 (sequence is synthesized)
tccgtatttcacagggtgaaagagatggcaaatggagtacgtcagtcttccaaagaacaccagaatctgcccctaccacagctcctgaaaacttgaacgtctggccagtcaatggcaaac

SEQ ID NO: 514421 - DNA, 120 bp, Artificial Sequence
  ENSG00000164694_11 (sequence is synthesized)
ctacagttgtcgctgcatcttgggatgcgctaccagagactgaggggaaagtgaaagaatacattctttcatacgccccggctctcaaaccatttggagcaaagtccctcacctatcctg

SEQ ID NO: 514422 - DNA, 120 bp, Artificial Sequence
  ENSG00000164694_12 (sequence is synthesized)
gagacactacttctgccctggtggatggtctgcagcctggggaacgctatcttttcaaaatccgggccacaaacaggagaggcctgggacctcactccaaagccttcattgtcgctatgc

SEQ ID NO: 514423 - DNA, 120 bp, Artificial Sequence
  ENSG00000164694_13 (sequence is synthesized)
caacaaccagtaaggcggatgttgagcagaacacggaggacaatgggaaacccgaaaaacctgagccttcctcaccttctcccagagctccagcttcctcccaacacccctctgtgcctg

SEQ ID NO: 514424 - DNA, 120 bp, Artificial Sequence
  ENSG00000164694_14 (sequence is synthesized)
cttctccccaagggagaaatgccaaggaccttcttcttgacttgaagaacaaaatattggctaatggtggggcgccccgaaaaccccagcttcgcgccaagaaggcagaggagctggatc

SEQ ID NO: 514425 - DNA, 120 bp, Artificial Sequence
  ENSG00000164694_15 (sequence is synthesized)
ttcagtcgacagaaatcactggggaggaggagctgggttcccgggaggactcgcccatgtcaccctcagacacccaagaccagaaacggaccctgaggccgccaagtagacacggccact

SEQ ID NO: 514426 - DNA, 120 bp, Artificial Sequence
  ENSG00000164694_16 (sequence is synthesized)
cggtggttgctcccggcaggactgcagtgagggcccggatgccagcgctgccccgaagggaaggcgtagataagcctggcttttccctggccacgcagccccgcccaggggcgcccccct

SEQ ID NO: 514427 - DNA, 120 bp, Artificial Sequence
  ENSG00000164694_17 (sequence is synthesized)
cggcttcggcctctcctgcccaccacgcgtccacccagggcacctctcatcgtccttccctgcctgccagcttgaatgacaacgacttggtggactcagacgaagatgagcgcgctgtgg

SEQ ID NO: 514428 - DNA, 120 bp, Artificial Sequence
  ENSG00000164694_18 (sequence is synthesized)
gctccctccaccccaagggcgccttcgcccagccccggccagccctgtcccccagccgccagtccccgtccagcgttctccgcgacagaagctctgtgcaccccggcgcaaagccagcct

SEQ ID NO: 514429 - DNA, 120 bp, Artificial Sequence
  ENSG00000164694_19 (sequence is synthesized)
cgccggcccggaggaccccccattcaggggccgcagaggaagattccagtgcctcagccccaccctcaagactttctccaccccatgggggatcatctcggctgctgcccacccagccac

SEQ ID NO: 514430 - DNA, 120 bp, Artificial Sequence
  ENSG00000164694_20 (sequence is synthesized)
acctgagctctccactttccaagggcgggaaggatggtgaggacgccccagccaccaactccaatgcgccatcacggtccaccatgtcctcctccgtctcttctcatctctcgtccagga

SEQ ID NO: 514431 - DNA, 120 bp, Artificial Sequence
  ENSG00000164694_21 (sequence is synthesized)
cgcaggtctctgagggagcggaggcttctgatggtgaaagccacggtgacggcgatagggaagacggcggaaggcaggcggaggccacggcccagacgctgcgggcccggcctgcctctg

SEQ ID NO: 514432 - DNA, 120 bp, Artificial Sequence
  ENSG00000164694_22 (sequence is synthesized)
gacacttccatttgctcagacacaaaccctttgctgccaacgggaggtctccaagcaggttcagcattgggcggggacctcggctgcagccctccagctccccacagtcgactgtgccct

SEQ ID NO: 514433 - DNA, 120 bp, Artificial Sequence
  ENSG00000164694_23 (sequence is synthesized)
cccgagcccaccccagggttccctctcactctgattcccaccctaagcttagctcaggtatccatggagacgaggaggatgagaagccgcttcctgccaccgttgtcaatgaccacgtgc

SEQ ID NO: 514434 - DNA, 120 bp, Artificial Sequence
  ENSG00000164694_24 (sequence is synthesized)
cttcctcctccaggcagcccatctcccggggctgggaggacttaaggagaagcccgcagagaggggccagcctgcatcggaaggaacccatcccagagaaccccaaatccacaggggcag

SEQ ID NO: 514435 - DNA, 120 bp, Artificial Sequence
  ENSG00000164694_25 (sequence is synthesized)
atacacatcctcagggcaagtactcctccctggcctccaaggctcaggatgttcaacagagcacagacgcggacacggagggtcattctcccaaagcacagccagggtccacagaccgcc

SEQ ID NO: 514436 - DNA, 120 bp, Artificial Sequence
  ENSG00000164694_26 (sequence is synthesized)
acgcgtcccctgctcgtccgcccgcagcacggtcacagcagcatcccagtgttcccagaaggatgacacccggccgggccccacaacagcagccccctcctcccgtcgccacgtcccagc

SEQ ID NO: 514437 - DNA, 120 bp, Artificial Sequence
  ENSG00000164694_27 (sequence is synthesized)
gccgggcggccccgccccacgtcgcagggccgctcccactcctcctcggacccttacacggcgagctccagagggatgctccccacggccctccagaaccaggacgaggatgcccagggc

SEQ ID NO: 514438 - DNA, 120 bp, Artificial Sequence
  ENSG00000164694_28 (sequence is synthesized)
agctacgacgacgacagcacagaagtcgaggcccaggatgtgcgggcccccgcgcacgccgcgcgcgccaaggaggcagctgcgtcccttcccaagcaccagcaggtggagtctcccaca

SEQ ID NO: 514439 - DNA, 120 bp, Artificial Sequence
  ENSG00000164694_29 (sequence is synthesized)
caagcaccagcaggtggagtctcccacaggcgcaggggcaggtggcgaccacaggtcccagcgcggacatgcggcctcccccgccaggcccagccgacccggcggcccccagtcccgcgc

SEQ ID NO: 514440 - DNA, 120 bp, Artificial Sequence
  ENSG00000164694_30 (sequence is synthesized)
aagtcggagcctccttccaagcggcccctgtcctccaagtcccagcagtcggtctcagccgaggacgacgaggaggaggacgcgggattttttaaaggcgggaaagaagaccttctgtct

SEQ ID NO: 514441 - DNA, 120 bp, Artificial Sequence
  ENSG00000164694_31 (sequence is synthesized)
tcctctgtgccaaagtggccctcttcctccactcccaggggcggcaaagacgccgatgggagcctcgccaaggaagagagggagcctgccatcgcgcttgcccctcgcggagggagcctg

SEQ ID NO: 514442 - DNA, 120 bp, Artificial Sequence
  ENSG00000164694_32 (sequence is synthesized)
gctcctgtgaagcgacctctccccccacctccaggcagctcccccagggcctcccacgtcccttcccgactgccgcctcgcagcgctgccaccgtgagccccgtcgcgggcacccacccc

SEQ ID NO: 514443 - DNA, 120 bp, Artificial Sequence
  ENSG00000164694_33 (sequence is synthesized)
tggccgcagtacaccacgcgcgccccacctggccacttctccaccaccccgatgctgtccttgcgccagaggatgatgcatgccagattccgtaaccctctctcccgacagcctgccaga

SEQ ID NO: 514444 - DNA, 120 bp, Artificial Sequence
  ENSG00000164694_34 (sequence is synthesized)
ccctcttacagacaaggttataatggcagaccaaatgtagaagggaaagtccttcctggtagtaatggaaaaccgaatggacagagaattatcaatggccctcaaggaacaaagtgggtt

SEQ ID NO: 514445 - DNA, 120 bp, Artificial Sequence
  ENSG00000164694_35 (sequence is synthesized)
gtggaccttgatcgtgggttagtattgaatgcagaaggaaggtacctccaagattcacatggaaatcctcttcggattaaactaggaggagatggtcgaaccattgtagatctggaaggg

SEQ ID NO: 514446 - DNA, 120 bp, Artificial Sequence
  ENSG00000164694_36 (sequence is synthesized)
acccccgtggtgagtcctgacggcctcccactctttgggcaggggcgacatggcacacctctggccaatgcccaagataagccaattttgagtcttggaggaaagccgctggtgggcttg

SEQ ID NO: 514447 - DNA, 120 bp, Artificial Sequence
  ENSG00000164694_37 (sequence is synthesized)
gaggtcatcaaaaaaaccacccatccccctaccactaccatgcagcccaccactactacgacgcccctgcctaccactacaaccccgaggcccaccactgccaccacccgccgcacgacc

SEQ ID NO: 514448 - DNA, 120 bp, Artificial Sequence
  ENSG00000164694_38 (sequence is synthesized)
accacccgccgcacgaccaccaggcgtccaacaaccacagtccgaaccactacgcggacaaccaccaccaccacccccacacccaccactcccatccccacctgtccccctgggaccttg

SEQ ID NO: 514449 - DNA, 120 bp, Artificial Sequence
  ENSG00000164694_39 (sequence is synthesized)
gaacggcacgacgatgatggcaacctgataatgagctccaatgggatcccagagtgctacgctgaagaagatgagttctcaggcttggagactgacactgcagtacctacggaagaggcc

SEQ ID NO: 514450 - DNA, 120 bp, Artificial Sequence
  ENSG00000164694_40 (sequence is synthesized)
tacgttatatatgatgaagattatgaatttgagacgtcaaggccaccaaccaccactgagccttcgaccactgctaccacaccgagggtgatcccagaggaaggcgccatcagttccttt

SEQ ID NO: 514451 - DNA, 120 bp, Artificial Sequence
  ENSG00000164694_41 (sequence is synthesized)
cctgaagaagaatttgatctggctggaaggaaacgatttgttgctccttacgtgacgtacctaaataaagacccatcagccccgtgctctctgactgatgcactggatcacttccaagtg

SEQ ID NO: 514452 - DNA, 120 bp, Artificial Sequence
  ENSG00000164694_42 (sequence is synthesized)
gacagcctggatgaaatcatccccaatgacctgaagaagagtgacctgcctccccagcatgctccccgcaacatcaccgtggtggccgtggaaggttgccactcatttgtcattgtggac

SEQ ID NO: 514453 - DNA, 120 bp, Artificial Sequence
  ENSG00000164694_43 (sequence is synthesized)
tgggacaaagccaccccaggagatgtggtcacaggttacttggtttacagtgcatcctatgaagacttcatcaggaacaagtggtccactcaagcttcatcagtaactcacttgcccatt

SEQ ID NO: 514454 - DNA, 120 bp, Artificial Sequence
  ENSG00000164694_44 (sequence is synthesized)
gagaacctaaagcccaacacgaggtattattttaaagtgcaagcacaaaatcctcatggctacggacctatcagcccttcggtctcatttgtcaccgaatcagataatcctctgcttgtt

SEQ ID NO: 514455 - DNA, 120 bp, Artificial Sequence
  ENSG00000164694_45 (sequence is synthesized)
gtgaggcccccaggcggtgagcctatctggatcccattcgctttcaaacatgatcccagctacacggactgccatggacggcaatatgtgaagcgcacgtggtatcgaaagttcgtggga

SEQ ID NO: 514456 - DNA, 120 bp, Artificial Sequence
  ENSG00000164694_46 (sequence is synthesized)
gttgttctttgtaattcactgaggtataaaatctacctcagtgacaacctgaaagatacattctacagcattggagacagctggggaagaggtgaagaccattgccaatttgtggattca

SEQ ID NO: 514457 - DNA, 120 bp, Artificial Sequence
  ENSG00000164694_47 (sequence is synthesized)
caccttgatggaagaacagggcctcagtcctatgtagaagccctccctactattcaaggctactatcgccagtatcgtcaggagcctgtcaggtttgggaacatcggcttcggaaccccc

SEQ ID NO: 514458 - DNA, 120 bp, Artificial Sequence
  ENSG00000164694_48 (sequence is synthesized)
tactactatgtgggctggtacgagtgtggggtctccatccctggaaagtggtaatcacaggaccgtcatgctgcaagcttgccctgcccagccccaccaactaagtcgcactaggggctg

SEQ ID NO: 514459 - DNA, 120 bp, Artificial Sequence
  ENSG00000164694_49 (sequence is synthesized)
tgagcaaagacagccagcgtgctcagccccgctgccctaggtgccaggaaggtcatagatggacactggccattctggtcatctcagtctggaactcagtcccacttcttggcctggaca

SEQ ID NO: 514460 - DNA, 120 bp, Artificial Sequence
  ENSG00000164694_50 (sequence is synthesized)
atgaacaggattcagttttgctgttaactttgcttctctacttttttttgtttgtttgtaatagcacatcccagagacatcagaaaccagcaactgattcagtgtgatttccagactttt

SEQ ID NO: 514461 - DNA, 120 bp, Artificial Sequence
  ENSG00000164694_51 (sequence is synthesized)
taggcatgaaattcggacacttcagtatttccaggaatagcatatgcacgctgttcttgcttcatggaatgctacatgctttctgtttttctcattttggatttctccaaaactaactga

SEQ ID NO: 514462 - DNA, 120 bp, Artificial Sequence
  ENSG00000164694_52 (sequence is synthesized)
atttaagcttcaggtccctttgtatgcagtagaaaggaattattaaaaacaccaccaaagaaaataaatatatcctacttgaaatttactctatggacttacccactgctagaataaatg

SEQ ID NO: 514463 - DNA, 120 bp, Artificial Sequence
  ENSG00000164694_53 (sequence is synthesized)
tatcaaatcttatttgtaaattctcaattttgatatatatatgtatatatgcatatacatatccacacttgtctgcaagaatattgattaaaattgctaaatttgtacttgttcaccaga

SEQ ID NO: 514464 - DNA, 120 bp, Artificial Sequence
  ENSG00000164694_54 (sequence is synthesized)
ccggtccccacctgggtggaccggacagcctcttgggcttctggtaaaatgagttagctcttaaattttcacacatataaagcactagacttgctaccgtgaatgatgtaagagatcacc

SEQ ID NO: 514465 - DNA, 120 bp, Artificial Sequence
  ENSG00000164694_55 (sequence is synthesized)
gtgaggaggagggctcctggaagcttgccccgtcgcggggaaaagcgggtgcaggatggggctgaagtggattctcctcgcggtgttggaatggacctgccgtgtcatgggaagcctgtc

SEQ ID NO: 514466 - DNA, 120 bp, Artificial Sequence
  ENSG00000164695_0 (sequence is synthesized)
agccaggaaatgccctggagtgtgtgtcacctgtccaggacgacttgttgattcccaggagggccgcctttccggtctgggtccccgagaggactgccttgctcacctgtcccctcggcg

SEQ ID NO: 514467 - DNA, 120 bp, Artificial Sequence
  ENSG00000164695_1 (sequence is synthesized)
cggccccggggagctcccgagaggcccccgggatcgctggccctccgaactccacagcaatgagcaagttgggcaagttctttaaagggggcggctcttctaagagccgagccgctccca

SEQ ID NO: 514468 - DNA, 120 bp, Artificial Sequence
  ENSG00000164695_2 (sequence is synthesized)
gtccccaggaggccctggtccgacttcgggagactgaggagatgctgggcaagaaacaagagtacctggaaaatcgaatccagagagaaatcgccctggccaagaagcacggcacgcaga

SEQ ID NO: 514469 - DNA, 120 bp, Artificial Sequence
  ENSG00000164695_3 (sequence is synthesized)
ataagcgagctgcattacaggcactaaagagaaagaagaggttcgagaaacagctcactcagattgatggcacactttctaccattgagttccagagagaagccctggagaactcacaca

SEQ ID NO: 514470 - DNA, 120 bp, Artificial Sequence
  ENSG00000164695_4 (sequence is synthesized)
ccaacactgaggtgttgaggaacatgggctttgcagcaaaagcgatgaaatctgttcatgaaaacatggatctgaacaaaatagatgatttgatgcaagagatcacagagcaacaggata

SEQ ID NO: 514471 - DNA, 120 bp, Artificial Sequence
  ENSG00000164695_5 (sequence is synthesized)
tcgcccaagaaatctcagaagcattttctcaacgggttggctttggtgatgactttgatgaggatgagttgatggcagaacttgaagaattggaacaggaggaattaaataagaagatga

SEQ ID NO: 514472 - DNA, 120 bp, Artificial Sequence
  ENSG00000164695_6 (sequence is synthesized)
caaatatccgccttccaaatgtgccttcctcttctctcccagcacagccaaatagaaaaccaggcatgtcgtccactgcacgtcgatcccgagcagcatcttcccagagggcagaagaag

SEQ ID NO: 514473 - DNA, 120 bp, Artificial Sequence
  ENSG00000164695_7 (sequence is synthesized)
tttttgatacctaaattaatgagctatagataaaatataaaaaatgtttttaccaagttcagaagttaacaaagactctgctttataattatattgaatgaataattgtgttttaagcct

SEQ ID NO: 514474 - DNA, 120 bp, Artificial Sequence
  ENSG00000164695_8 (sequence is synthesized)
aatgaataattgtgttttaagcctcctaagtaaaagtaaaaaaggagtcatgtgcatacatagaatcagtgatggaggccaggcacggtatctcatgcctataatcccagcactttggga

SEQ ID NO: 514475 - DNA, 70 bp, Artificial Sequence
  ENSG00000164695_9 (sequence is synthesized)
ctaaaaaaaaaaaatacatttagtatagcggggggtgggggggagaaataatgttatttcctatgcgaat

SEQ ID NO: 514476 - DNA, 120 bp, Artificial Sequence
  ENSG00000164695_10 (sequence is synthesized)
gggggtgggggggagaaataatgttatttcctatgcgaatgacgtgtatccctgtacccatggtaaatgtaaatatactgtgtctcttttgggagagccttttagtagaggagtcttata

SEQ ID NO: 514477 - DNA, 120 bp, Artificial Sequence
  ENSG00000164695_11 (sequence is synthesized)
tgagtctctacataagtagtttcacttgagttttgcagtttgaaatcttaaaggagctttaattgacatttattataccaattaagcttggaatggggcaatggatgcatttcccaaaac

SEQ ID NO: 514478 - DNA, 120 bp, Artificial Sequence
  ENSG00000164695_12 (sequence is synthesized)
gtgtgaaagcactaacagcttatattgctgaatgagaatctcctgggtgtaatttagccacttagggaactgcgtgaacactcccaggccattatgatgctgttacagcttcagtgtata

SEQ ID NO: 514479 - DNA, 120 bp, Artificial Sequence
  ENSG00000164695_13 (sequence is synthesized)
aatgcatgagtattctttctgttctgttttgtgctctcttgtacatttatttaccctttacagaatatttcttgtaaatacataaaaatattggcaattaaaagtacatcttgaataaaa

SEQ ID NO: 514480 - DNA, 120 bp, Artificial Sequence
  ENSG00000164707_0 (sequence is synthesized)
ctgctttgcaggcccaggctcaaggcaaattataagtagggaaccaatttgagggaaagacatgtgaacagagttaaggtaccacgtcctgggagcgaccagcagccccacctgaagtcc

SEQ ID NO: 514481 - DNA, 120 bp, Artificial Sequence
  ENSG00000164707_1 (sequence is synthesized)
gcatgcaactctgacaagctcaggtgcttgttttaaggaaaggggctactagagtcttaccaacagcgagcccaggtgggagatgaaacaggtactccccaaaataggtcatccgaggga

SEQ ID NO: 514482 - DNA, 120 bp, Artificial Sequence
  ENSG00000164707_2 (sequence is synthesized)
ggaaaactgatggagagcacaatgtgctctgagcgtttttaatgtttttaagcttttaaatgatttcttcaaggccgagcagcagcagcaaaggtgtggcttaaaggattaagggggttt

SEQ ID NO: 514483 - DNA, 120 bp, Artificial Sequence
  ENSG00000164707_3 (sequence is synthesized)
ctgctgacacctagaatgaagttactctattactaatcaagccgagaggaggcccactatgcccccgtttatcatcctttcccagttcctttttgctggtcacaaaacgatgctcatcaa

SEQ ID NO: 514484 - DNA, 120 bp, Artificial Sequence
  ENSG00000164707_4 (sequence is synthesized)
tcccacctaaagcaggaggccaggagcccagcctcttgtagaaacagcgagggtataactgccctcccgttctgcccccaagacgaaggaggactctcggaagccaagaaaggtttaaga

SEQ ID NO: 514485 - DNA, 120 bp, Artificial Sequence
  ENSG00000164707_5 (sequence is synthesized)
agtctttctggatagagagcagtgcccaggcaggaagcctttcgccggcagagcggggtccaaggacgagctggagaggacagaggcgcgatgggcctgctgcagggcctgctccgagtc

SEQ ID NO: 514486 - DNA, 120 bp, Artificial Sequence
  ENSG00000164707_6 (sequence is synthesized)
cggaagctgctgctggtcgtctgcgtcccgctcctgctgctgcctctgcccgtcctccaccccagcagcgaggcctcgtgtgcttacgtgctgatcgtgactgctgtgtactgggtgtcg

SEQ ID NO: 514487 - DNA, 120 bp, Artificial Sequence
  ENSG00000164707_7 (sequence is synthesized)
gaggcagtgcctctgggagctgcagccctggtgccggccttcctttacccgttcttcggagtcctccggtccaatgaggtggcggcggagtacttcaagaacaccacgctgctgctggtg

SEQ ID NO: 514488 - DNA, 120 bp, Artificial Sequence
  ENSG00000164707_8 (sequence is synthesized)
ggggtcatctgcgtggcggctgccgtggagaagtggaacctgcataagcgcattgctctgcgcatggtcttgatggccggagccaagccgggcatgctgctgctctgcttcatgtgctgt

SEQ ID NO: 514489 - DNA, 120 bp, Artificial Sequence
  ENSG00000164707_9 (sequence is synthesized)
accacgttgctgtccatgtggctgtccaacacctccaccaccgccatggtgatgcccatcgtggaggccgtgctgcaggagctggtcagtgctgaggacgagcagctcgtggcgggcaac

SEQ ID NO: 514490 - DNA, 120 bp, Artificial Sequence
  ENSG00000164707_10 (sequence is synthesized)
tccaacaccgaagaggccgaacccatcagtctggatgtaaagaacagccaaccttctctggaactcatctttgtcaatgaagagtccaacgcagacctcaccactctgatgcacaacgag

SEQ ID NO: 514491 - DNA, 120 bp, Artificial Sequence
  ENSG00000164707_11 (sequence is synthesized)
aacctgaatggtgtgccctcgatcaccaaccccatcaaaactgcaaaccaacaccagggcaagaagcaacacccatcccaggaaaagccacaagtcctgacccccagccccaggaagcag

SEQ ID NO: 514492 - DNA, 120 bp, Artificial Sequence
  ENSG00000164707_12 (sequence is synthesized)
caggtcccaccatgaccagatgatctgcaagtgcctctccctgagcatatcctactccgctaccattggcggcctgaccaccatcatcggcacctccaccagcctcatcttcctggaaca

SEQ ID NO: 514493 - DNA, 120 bp, Artificial Sequence
  ENSG00000164707_13 (sequence is synthesized)
cttcaacaaccagtatccagccgcagaggtggtgaactttggcacctggttcctcttcagcttccccatatccctcatcatgctggtggtcagctggttctggatgcactggctgttcct

SEQ ID NO: 514494 - DNA, 120 bp, Artificial Sequence
  ENSG00000164707_14 (sequence is synthesized)
gggctgcaattttaaagagacctgctctctgagcaagaagaagaagaccaaaagggaacagttgtcagagaagaggatccaagaagaatatgaaaaactgggagacattagctacccaga

SEQ ID NO: 514495 - DNA, 120 bp, Artificial Sequence
  ENSG00000164707_15 (sequence is synthesized)
aatggtgactggatttttcttcatcctgatgaccgtactgtggtttacccgggagcctggctttgtccctggctgggattctttctttgaaaagaaaggctaccgtactgatgccacagt

SEQ ID NO: 514496 - DNA, 120 bp, Artificial Sequence
  ENSG00000164707_16 (sequence is synthesized)
ctctgtcttccttggcttcctcctcttcctcattccagcgaagaagccctgctttgggaaaaagaatgatggagagaaccaggagcactcactggggaccgagcccatcatcacgtggaa

SEQ ID NO: 514497 - DNA, 120 bp, Artificial Sequence
  ENSG00000164707_17 (sequence is synthesized)
ggacttccagaagaccatgccctgggagattgtcattctggttgggggaggctatgctctggcttctggtagcaagagctctggcctctctacatggattgggaaccagatgttgtccct

SEQ ID NO: 514498 - DNA, 120 bp, Artificial Sequence
  ENSG00000164707_18 (sequence is synthesized)
gagcagcctcccaccgtgggctgtcaccctgctggcatgcatcctcgtgtccattgtcactgagtttgtgagcaacccagcaaccatcaccatcttcctgcccatcctgtgcagcctgtc

SEQ ID NO: 514499 - DNA, 120 bp, Artificial Sequence
  ENSG00000164707_19 (sequence is synthesized)
tgaaacgctgcacattaaccccctctacaccctgatcccagtcaccatgtgcatctcctttgcagtgatgctgcctgtgggcaatccccctaatgccatcgtcttcagctatgggcactg

SEQ ID NO: 514500 - DNA, 120 bp, Artificial Sequence
  ENSG00000164707_20 (sequence is synthesized)
ccagatcaaagatatggtgaaagctggcctgggagtcaacgttattggactggtgatagtaatggtggccatcaacacctggggagttagcctcttccacctggacacttacccagcatg

SEQ ID NO: 514501 - DNA, 120 bp, Artificial Sequence
  ENSG00000164707_21 (sequence is synthesized)
ggcgagggtcagcaacatcactgatcaagcctaacgccaagtgtacaaactggcccaaccacaggagctgccagtatccagcagtatctggaccacaggcaaagaaaaccactaggacca

SEQ ID NO: 514502 - DNA, 120 bp, Artificial Sequence
  ENSG00000164707_22 (sequence is synthesized)
ccaggagcacacaaccccagacccacgccggagggcatccctccaccagaagattccgccacctcaagtgaactgcaggaatcctccaacaaccacaaacacatgcttcgctgttagtgt

SEQ ID NO: 514503 - DNA, 120 bp, Artificial Sequence
  ENSG00000164707_23 (sequence is synthesized)
cttcttcctgccctcagcaccacagctcaagaaaacctaaagtttcaatacaagccataggctcacagaaaaagaaaaagaaaataaaaattaaattaaaaaaaaagaagacaaagaaaa

SEQ ID NO: 514504 - DNA, 120 bp, Artificial Sequence
  ENSG00000164707_24 (sequence is synthesized)
ggagactgcccaactttgtgcccaccccaggaccccctcagccatgcccccacattccccttcctcttccctctctcctctttcccatcccagctcttggactctgaagcttccctgaac

SEQ ID NO: 514505 - DNA, 120 bp, Artificial Sequence
  ENSG00000164707_25 (sequence is synthesized)
tccctgttctggctcttccttcctccttcacttctgggctcttttcccccaaatgctcaagggtacacactgctctttgcccccaaatgctcaaggatcactgcaaaaccctggggccag

SEQ ID NO: 514506 - DNA, 120 bp, Artificial Sequence
  ENSG00000164707_26 (sequence is synthesized)
tctgcatccatgagccccattctatttacagagcaaagggaaggagaaatgtcacccactccatatggcccacctccgccctaagcccttgagctatgctccaacccacagggtcagccc

SEQ ID NO: 514507 - DNA, 120 bp, Artificial Sequence
  ENSG00000164707_27 (sequence is synthesized)
cagcctccacctctcacatactgcttttctttgctactcataggtctggatgtaaagaacagccaaccttctctggaactcatctttgtcaatgaagagtgagtatgactgccctctccc

SEQ ID NO: 514508 - DNA, 120 bp, Artificial Sequence
  ENSG00000164707_28 (sequence is synthesized)
agacagcgcctctcagagtccataggggaggtcagaaaagaggggacctagacccataaacagctctttgagatgtaccacccaagctcaccaccttgccacaccacccccccaccccgc

SEQ ID NO: 514509 - DNA, 120 bp, Artificial Sequence
  ENSG00000164707_29 (sequence is synthesized)
ccaacctcccccatttcctctccatacctaggagtgacctgtcaggacctggagagtcactcccttaaccacagtgttgcagtgatgaggaagaaataaaaaggccacactgaatctcag

SEQ ID NO: 514510 - DNA, 120 bp, Artificial Sequence
  ENSG00000164707_30 (sequence is synthesized)
tggatatatgaactgtccacacagccaccatgcagaatctcttctaaattcatgtcccttttaggaaaatagtatgtttaatttgttaacggaaaaccgttcacatctcgatgccactgc

SEQ ID NO: 514511 - DNA, 120 bp, Artificial Sequence
  ENSG00000164707_31 (sequence is synthesized)
agattcttggagaatcatgaaatattttctagatattagataaggtcttggtagatttggtcttgttagatatggcaaagaaaacttaggtgacaggtaggggatgaggggacaggaggt

SEQ ID NO: 514512 - DNA, 120 bp, Artificial Sequence
  ENSG00000164707_32 (sequence is synthesized)
gagagggccttgtgatgatgggaagcagagctggaaaaggagaagcagcctcagacattcctggaggaagctctattaacagctgattccatttggagattctatttcaaaatgtggccc

SEQ ID NO: 514513 - DNA, 120 bp, Artificial Sequence
  ENSG00000164707_33 (sequence is synthesized)
acaggcatgccacaatgaatagtccacatttaaaagctggatttgtaatacagctcagctctgtcatttgcccttgttgtaaaaaaggagaacgcacattgggtgaaatcagcgttcaca

SEQ ID NO: 514514 - DNA, 120 bp, Artificial Sequence
  ENSG00000164707_34 (sequence is synthesized)
gtgggacagacgtggaagggtgccatcaggaaatcgctttatttttctccaccactatcttcaatcatagcatattggatttcttgatgacatcacccttgatgatatcccaggcaaatc

SEQ ID NO: 514515 - DNA, 120 bp, Artificial Sequence
  ENSG00000164707_35 (sequence is synthesized)
ccgtagctctcctggttcctttcaggtattataacaatctcatgttcagacatttgggagactagtccaaattcaaatcaaaacttcaacttctcagccaaagcttctcccatacccacc

SEQ ID NO: 514516 - DNA, 120 bp, Artificial Sequence
  ENSG00000164707_36 (sequence is synthesized)
cacccctcaccctaggcctgcagaagaaagaaggtgaaagtaagtcgggggagggagttgagcttctttctgtcttcctccacctccctcttctcctcctcccctaaccgcaccctcact

SEQ ID NO: 514517 - DNA, 120 bp, Artificial Sequence
  ENSG00000164707_37 (sequence is synthesized)
ctgctgcttctgacttttctgggcttaggacagcagctctagggtacaggaaagataaatgggtgagaagggtctggatgggggctattgaggtctggggttggtgccctctctgagatt

SEQ ID NO: 514518 - DNA, 120 bp, Artificial Sequence
  ENSG00000164707_38 (sequence is synthesized)
tcagtccctggctctttcatctgtggggcaactgccttcagggtctttggagcatcccattatggcgccctctgcagggcctcaggcctgatggcagggccttgctctgggattaacact

SEQ ID NO: 514519 - DNA, 120 bp, Artificial Sequence
  ENSG00000164707_39 (sequence is synthesized)
cacgccaccctccagggcctgtgctctggtggttaactcccccacaacccctgtattggggctgcctctgcctctgggcaggcctgtcccaggtgacccaggaaaaggccatcctcactg

SEQ ID NO: 514520 - DNA, 120 bp, Artificial Sequence
  ENSG00000164707_40 (sequence is synthesized)
tggccttttctcctccctgtggcctctctggcatcaccctactggcttcttgcctttgctcttttccacacaaaaatgtatccccaaactccaaaagaaaagcctgagttgtccctagaa

SEQ ID NO: 514521 - DNA, 120 bp, Artificial Sequence
  ENSG00000164707_41 (sequence is synthesized)
ctctaagcatcttttgtgctggtgggaactgggtcatttgctgggtgtgcagacagcactcttgcggccaccacctcccatgctacctgaggatcctcgcctaccctcctcacccagttt

SEQ ID NO: 514522 - DNA, 120 bp, Artificial Sequence
  ENSG00000164707_42 (sequence is synthesized)
acagagcctgaagagggaccatggccgcaggacccacatcccgcatgtgtgtgcccaatacgctctctgtcttcacagtggctgagctggtggctcccactgtcctcgcaactaagacaa

SEQ ID NO: 514523 - DNA, 120 bp, Artificial Sequence
  ENSG00000164707_43 (sequence is synthesized)
actggaaacattcactgatcactcagtgtgtcagttacactgatggctaagttctcatcttcttctgtcctcaaggcaaaggttggggaccagcaggggtgggagagactcaccccctga

SEQ ID NO: 514524 - DNA, 120 bp, Artificial Sequence
  ENSG00000164707_44 (sequence is synthesized)
ggtgtacttgctgatcagaagtcctccccctccgccaccctctccctctcccttgactttccctgagtacaatccaggccctccctgctcctgtcacctccgatacgcatatcacaagtt

SEQ ID NO: 514525 - DNA, 120 bp, Artificial Sequence
  ENSG00000164707_45 (sequence is synthesized)
cccctttctagatagtggtcttcccagagtcagtcagtgagaacatgagagtcagccagtgagaacatgagagtcagccagtgagaacatggtcagggggcataggctttccagagagac

SEQ ID NO: 514526 - DNA, 120 bp, Artificial Sequence
  ENSG00000164707_46 (sequence is synthesized)
agactcctggactcctaccctcctctgccacttagcatccccgtgctaagtactggtgtaaatggaggtatgaatgccaggaccatagatctgtgatgaggattaacaatgtctgggggt

SEQ ID NO: 514527 - DNA, 120 bp, Artificial Sequence
  ENSG00000164707_47 (sequence is synthesized)
taaagcccatatatgtgcactctgtatctaatatccactccacatctgctgttaggacgattgttaatatcaaaggaaagtgctgcccctgccctcagaaggaagcaggcccctggcccc

SEQ ID NO: 514528 - DNA, 120 bp, Artificial Sequence
  ENSG00000164707_48 (sequence is synthesized)
actaatccttacagcatctcagaaggcaaggaagacaagggagagattagtcttctctggagactagaaaactggaatccagagagtttaagtcccttacaccaaacgcctgatgcaggg

SEQ ID NO: 514529 - DNA, 120 bp, Artificial Sequence
  ENSG00000164707_49 (sequence is synthesized)
ggacctcccctcccaagagtcggcctcactgacgtggctcctgtgtcctctgcttggttccagcaggtccaacgcagacctcaccactctgatgcacaacgaggtatggccttggggttt

SEQ ID NO: 514530 - DNA, 120 bp, Artificial Sequence
  ENSG00000164707_50 (sequence is synthesized)
ttctgtgctttggaatcacttgaaaatccctcagcacttcttcatggaaacccaagattcagaaccagattttcaacagctacagatccaccttagagttcctttcagtgaggattccat

SEQ ID NO: 514531 - DNA, 69 bp, Artificial Sequence
  ENSG00000164707_51 (sequence is synthesized)
tacagatccaccttagagttcctttcagtgaggattccattgacaaaatgttattattaaaaaggacac

SEQ ID NO: 514532 - DNA, 89 bp, Artificial Sequence
  ENSG00000164707_52 (sequence is synthesized)
cttcagcctgggcaacagagcgagacccccatctccacatttacaggggaaagcagagtttacctgcacacagttactcgaacttattt

SEQ ID NO: 514533 - DNA, 120 bp, Artificial Sequence
  ENSG00000164707_53 (sequence is synthesized)
aaagcagagtttacctgcacacagttactcgaacttatttcacctcccccaaatctggttatacatcttttcatgagaagtataaaaggccaattaaacattggacttcagctgggtaca

SEQ ID NO: 514534 - DNA, 120 bp, Artificial Sequence
  ENSG00000164707_54 (sequence is synthesized)
cagctactggggaggctgaggcaggaggatcgctgtggcccaggagtttgaccccagcctggacaacacagtgagaccctgtctctaaaacaaacaaaaaactgtggacttgcttgtgat

SEQ ID NO: 514535 - DNA, 120 bp, Artificial Sequence
  ENSG00000164707_55 (sequence is synthesized)
ttttttttattttcttttttttcatcttatatataaagggttcttcattagctaataaagtcccagaaaggctggctctcctctaagggcagagccatgttctgcctagtttcaaagcct

SEQ ID NO: 514536 - DNA, 120 bp, Artificial Sequence
  ENSG00000164707_56 (sequence is synthesized)
atgttctgcctagtttcaaagcctcttcaagtggagaacttgacaccaggctgggcggggcaggcctggctgaggtgccctggtgtatatgctccccctggcttctggcctctggttccc

SEQ ID NO: 514537 - DNA, 120 bp, Artificial Sequence
  ENSG00000164707_57 (sequence is synthesized)
cactgcgggatgtccacttcagctgtttttttaccaaagggtcgggctgacaccagagccataggacccgtccagggagagggcctgtgatcatggagtagagatttaaacctgtgacct

SEQ ID NO: 514538 - DNA, 120 bp, Artificial Sequence
  ENSG00000164707_58 (sequence is synthesized)
tgctatcattatccaaagaatttacccattgacctaggctgcaagggcagcagcttacaacatataggggcccatcaggtaaaacaggatggaccaagagaaattgtttcccaacctgtt

SEQ ID NO: 514539 - DNA, 120 bp, Artificial Sequence
  ENSG00000164707_59 (sequence is synthesized)
tcctgtgtatcagggaacaggctggaccggaagtggctgtcttctcctttgtcactgaaggagacgggaatgtttcctcccatccaccctgagtttttgtcatcagttcagaccacagac

SEQ ID NO: 514540 - DNA, 120 bp, Artificial Sequence
  ENSG00000164707_60 (sequence is synthesized)
ccagttagagacactgcatttgactgtgatgcgggagggagtcccaccctcggggaatgtgttacggtgtcaaggttgagttttgtgttagcttcagcaatgttccatttggattcccct

SEQ ID NO: 514541 - DNA, 120 bp, Artificial Sequence
  ENSG00000164707_61 (sequence is synthesized)
gcctgtaccttcccttttggaatatcctgctcacctccttctagtttacaactttcttgctgtattttatgtaagctgccctgactcctatgggagtcaacacgagtataaataaataat

SEQ ID NO: 514542 - DNA, 120 bp, Artificial Sequence
  ENSG00000164707_62 (sequence is synthesized)
gtcacttccctggtcactttagcctggggatcatttccaagtagtatagttgcagatcttcgaacgccattcctgtgttctgtgaattcaagacaacatgggttttataaccctttgact

SEQ ID NO: 514543 - DNA, 120 bp, Artificial Sequence
  ENSG00000164707_63 (sequence is synthesized)
atttccaagtagtatagttgcagatcttcgaacgccattcctgtgttctgtgaattcaagacaacatgggttttataaccctttgactctgctcagcatctcccagatcaagacgaagga

SEQ ID NO: 514544 - DNA, 120 bp, Artificial Sequence
  ENSG00000164708_0 (sequence is synthesized)
gtccccgtccagagtcctctgtggtccctgctgccaccatggccactcaccgcctcgtgatggtccggcacggcgagagcacatggaaccaggagaaccgtttctgtggctggttcgatg

SEQ ID NO: 514545 - DNA, 120 bp, Artificial Sequence
  ENSG00000164708_1 (sequence is synthesized)
cagagctgagtgaaaaggggaccgaggaggccaagcggggagccaaggccatcaaggatgccaagatggagtttgacatctgctacacgtcagtgctgaagcgggccatccgcaccctct

SEQ ID NO: 514546 - DNA, 120 bp, Artificial Sequence
  ENSG00000164708_2 (sequence is synthesized)
gggccatcctggacggcacggaccagatgtggctgcctgtggtgcgcacttggcgcctcaatgagcggcattacgggggcctcacaggcctcaacaaggcagaaacggccgccaagcacg

SEQ ID NO: 514547 - DNA, 120 bp, Artificial Sequence
  ENSG00000164708_3 (sequence is synthesized)
ccggggaactccccacctgcgagagcctcaaggacaccattgcccgggccctgcccttctggaacgaggagattgttccccagatcaaggccggcaagcgagtgctcattgcagcccacg

SEQ ID NO: 514548 - DNA, 120 bp, Artificial Sequence
  ENSG00000164708_4 (sequence is synthesized)
ggaacagcctgcggggcattgtcaagcacctggaagggatgtcagaccaggcgatcatggagctgaacctgcccacggggatccccattgtgtatgagctgaacaaggagctgaagccca

SEQ ID NO: 514549 - DNA, 120 bp, Artificial Sequence
  ENSG00000164708_5 (sequence is synthesized)
ccaagcccatgcagttcctgggtgatgaggaaacggtgcggaaggccatggaggctgtggctgcccagggcaaggccaagtgaggggtgggcttgggcaataaaggcacctcccccaaca

SEQ ID NO: 514550 - DNA, 80 bp, Artificial Sequence
  ENSG00000164713_0 (sequence is synthesized)
ggccggagcggcgggcgcggccgggccgccatggaccacaagccgctgctgcaggagcggccgcccgcctacaacctgga

SEQ ID NO: 514551 - DNA, 120 bp, Artificial Sequence
  ENSG00000164713_1 (sequence is synthesized)
ccgcccgcctacaacctggaggccggccagggcgactacgcgtgcggcccgcacggctacggcgccatccccgccgcgcccccgccgccgccctacccctacctcgtcacagggataccc

SEQ ID NO: 514552 - DNA, 120 bp, Artificial Sequence
  ENSG00000164713_2 (sequence is synthesized)
acctcgtcacagggatacccacccaccatcccagggtctacaacatccacagccggaccgtcacccgctatcctgccaactctatcgtggtcgtaggaggctgtcctgtctgcagggttg

SEQ ID NO: 514553 - DNA, 120 bp, Artificial Sequence
  ENSG00000164713_3 (sequence is synthesized)
ttgctgttttgccttgaggaagcgacgatgccccaactgtggagccaccttcgcttaaagggaacaccaggcccggctttcctacacccagctctctttttctaatgtaaatgttgtgta

SEQ ID NO: 514554 - DNA, 120 bp, Artificial Sequence
  ENSG00000164713_4 (sequence is synthesized)
caataattttatttgattaagcttcaggactgttttgtaaagcgaggtgggaccgatgtggcacacgccagctgcggtttcccggagcgtggagaggcagtgctgctgctcccgcccgag

SEQ ID NO: 514555 - DNA, 120 bp, Artificial Sequence
  ENSG00000164713_5 (sequence is synthesized)
gctcatgacaactcaataaagcactgcttttattttttgcagtcttcaatttgagaaaggtgagaaataatgttttcaataaatgagattcataccattgttgacctggtgctgcttact

SEQ ID NO: 514556 - DNA, 120 bp, Artificial Sequence
  ENSG00000164713_6 (sequence is synthesized)
cagcctggggactggccctggaagctctgaggacccccgccctaacccccaggacctcacagctctgcttgtgggagtgggtccggcttgacttggatcttgaccagagccctttatggg

SEQ ID NO: 514557 - DNA, 120 bp, Artificial Sequence
  ENSG00000164713_7 (sequence is synthesized)
agggacagacaggctgcccgaatgcggtgtgggagagtgcgggtccgctcacccttggctctgaacacattttgtgggggcaaaagggtggattccttttcctagatcttggggcattgc

SEQ ID NO: 514558 - DNA, 120 bp, Artificial Sequence
  ENSG00000164713_8 (sequence is synthesized)
ggcaaagagggagaaaagaccctatcagcagtagacatgtggacggcaacctccctgaacaacctggtgagagctcagggcagacaggtccactgctccagaaacgcccatgtgtggagg

SEQ ID NO: 514559 - DNA, 120 bp, Artificial Sequence
  ENSG00000164713_9 (sequence is synthesized)
aaatgaaattaaggcttttaatagacatacagaaaatagcctgggatcgaataacttcagttaactaaactagaactaaaccataaacttaactttggctaaaatgtgagcatgtccacg

SEQ ID NO: 514560 - DNA, 120 bp, Artificial Sequence
  ENSG00000164713_10 (sequence is synthesized)
aagacagtttgcagcttggctgctctggaagggaggggccgtctggtgccctgcggggaccatcacgcccagacttacgccttggacacgtcgtgttctccatagagccagccatccttc

SEQ ID NO: 514561 - DNA, 120 bp, Artificial Sequence
  ENSG00000164713_11 (sequence is synthesized)
tcctcggggatgagcagcgtgatgacatctccctgtgcaaagctgagtaaggtcttgttggagcccgcagtgtgcgggaagatggtcttcactttctgcttcttcatcatgttcagtccc

SEQ ID NO: 514562 - DNA, 120 bp, Artificial Sequence
  ENSG00000164713_12 (sequence is synthesized)
gttgcaaccgaaactgatcgctgtaaactgggatcttcggaagtacctgttggagggagtgtagcagtaatggcttttcaaagcatgagaatcaataggcacattccaatgagcaaaccc

SEQ ID NO: 514563 - DNA, 120 bp, Artificial Sequence
  ENSG00000164713_13 (sequence is synthesized)
caggaatccacctgttctcatcttgccaacaatgctccttccacggaaactgaccctgtcctatttcctcgctttgatcattgcccagaaggaacagggactgttgagaaacagaggcag

SEQ ID NO: 514564 - DNA, 120 bp, Artificial Sequence
  ENSG00000164713_14 (sequence is synthesized)
cgtgcagcctgaaggcatgcaccgtgcagaagaggatccctgcggctgcgggctcttttccaggcccaaggacaaggcggtgtgtgccgggttgatctgcactgctttagccaggatggc

SEQ ID NO: 514565 - DNA, 120 bp, Artificial Sequence
  ENSG00000164713_15 (sequence is synthesized)
tcttcttagagagacaaaccgctccaacgccaaactgccctcgcaattccaatcgcaaaggcaggctagggccacagttcaaacccaactgccaatgtccacaaagaaaagaagaaagct

SEQ ID NO: 514566 - DNA, 120 bp, Artificial Sequence
  ENSG00000164713_16 (sequence is synthesized)
ggaaatgcagttggtcttgccatgctggccgctcagcttctcacccccaggcctaagaaggacaaggtgaggatgagttccatttacagagtcctcaccaggtgccagtcacgatctcaa

SEQ ID NO: 514567 - DNA, 120 bp, Artificial Sequence
  ENSG00000164713_17 (sequence is synthesized)
tgtctcacagctgccatcccgccaggctcccaggaggaaggtgctgctatttattatccacaggacagaccccacagctggcaagtggctgggccaggaaccagctagggcaggtttgtc

SEQ ID NO: 514568 - DNA, 120 bp, Artificial Sequence
  ENSG00000164713_18 (sequence is synthesized)
ccatactctctacccatgagcacgaggctgtgctgttcatgtctccattcaaacacaggctgatatttccactccaggggaaaaaaggtagaaaaaaatatatatatatgtatgtatata

SEQ ID NO: 514569 - DNA, 77 bp, Artificial Sequence
  ENSG00000164713_19 (sequence is synthesized)
ccaggctggagtgcagtggcaggatcacagctcactgtagtctggacttcccaggcttaaaggatcctcccttgcca

SEQ ID NO: 514570 - DNA, 74 bp, Artificial Sequence
  ENSG00000164713_20 (sequence is synthesized)
tcatttttaaatttttttgtagagacagtgtctcgctatgttgcccagcctggtcttgacctcctggcctcaag

SEQ ID NO: 514571 - DNA, 120 bp, Artificial Sequence
  ENSG00000164713_21 (sequence is synthesized)
tcccaggctagtaatacaacaagcatctttaatttaaaacaatgcaagatctctttctgctttattcttgcagattcttcatgattacaacataaacctgcgcccccttaacctgccact

SEQ ID NO: 514572 - DNA, 76 bp, Artificial Sequence
  ENSG00000164713_22 (sequence is synthesized)
atgattacaacataaacctgcgcccccttaacctgccactctctacttcgctggtgttgaacccaccagcagtttt

SEQ ID NO: 514573 - DNA, 72 bp, Artificial Sequence
  ENSG00000164713_23 (sequence is synthesized)
atcctccaccagcaattttcattctgcttttaccaataagaaccagagtcatctgaatcactgggatgcaca

SEQ ID NO: 514574 - DNA, 120 bp, Artificial Sequence
  ENSG00000164713_24 (sequence is synthesized)
ccaataagaaccagagtcatctgaatcactgggatgcacagagtattacatactttaactgtgtattttagttaactgacaggacttccttcaaaggcaaatgcctgcagaccatcatct

SEQ ID NO: 514575 - DNA, 120 bp, Artificial Sequence
  ENSG00000164713_25 (sequence is synthesized)
tcctctactgggccatcctagtcatcattctggaaaactctgttcttttgcccaatagcttcacacgctgtggtccagggctctctctcacaaacagcttgactgccgcaaccttcacac

SEQ ID NO: 514576 - DNA, 120 bp, Artificial Sequence
  ENSG00000164713_26 (sequence is synthesized)
catgggggcctgtgagacaccccacgtggatgggttggggccatggcacaggtctcgagggtcctgggtgctaaagactgtgcagaaggacggggtctgaccagtgaagcagccggcaac

SEQ ID NO: 514577 - DNA, 77 bp, Artificial Sequence
  ENSG00000164713_27 (sequence is synthesized)
tgcagaaggacggggtctgaccagtgaagcagccggcaacatctgcagacagtcactggctccaacttttgtttttg

SEQ ID NO: 514578 - DNA, 87 bp, Artificial Sequence
  ENSG00000164713_28 (sequence is synthesized)
tttatttgtaaatagataattctcaacagtatgtttactctggataaacatcagtcagtgcgtagaactggtaaatgtcagagaaat

SEQ ID NO: 514579 - DNA, 120 bp, Artificial Sequence
  ENSG00000164713_29 (sequence is synthesized)
acatcagtcagtgcgtagaactggtaaatgtcagagaaatgtatcacttatcagagcgtctcacagtctagtcctgtatttcttctgaactcacgctctgcaaagccagggctgaatgta

SEQ ID NO: 514580 - DNA, 120 bp, Artificial Sequence
  ENSG00000164713_30 (sequence is synthesized)
tctaccatacctgcttgtttacctccaaaccttgcaatacatttatacaaaatatttatttcacagcttatcttaaaacaaatgtaaaaggtatcttcaaataaatcagactgaatctct

SEQ ID NO: 514581 - DNA, 120 bp, Artificial Sequence
  ENSG00000164713_31 (sequence is synthesized)
cggaaggggcatttggaagtaagtgcaccagcaggacagacctcagtgggagaagcgacggccgtaagagctgctttatccaaagttggcttgaaacgctcttccacgagctggaccagg

SEQ ID NO: 514582 - DNA, 120 bp, Artificial Sequence
  ENSG00000164713_32 (sequence is synthesized)
ttgagtgtactggtaatggatgcagctttggccaactagctgagtgagaacacaaggagccgtgactccgacgcccaggcctgtgtcctggatgggccgtgtgcagcgaatccgttggcg

SEQ ID NO: 514583 - DNA, 120 bp, Artificial Sequence
  ENSG00000164713_33 (sequence is synthesized)
actcctaactaccaagaaaaggagctctcggaggagatttcgtcgagtgctacgtgtggctgtgataagggcaggcaaagcgtcttagcactctacagctctggcgtggttggagggagg

SEQ ID NO: 514584 - DNA, 120 bp, Artificial Sequence
  ENSG00000164713_34 (sequence is synthesized)
gctgaagcgagttgccgcgttctctctggcggcgcgacaccggcccgtggaccgcccggccgccctccaggacccggtctgcaggagcggagagggcggtgtggacaccgcctgcaggcg

SEQ ID NO: 514585 - DNA, 120 bp, Artificial Sequence
  ENSG00000164715_0 (sequence is synthesized)
gtcacatgacgcagcccatcatggcggcgggagcgcggcttcccaggcccgccgctccgcagggctgctggcgttgctgctgttgagaggcggcggcggcggcgcaggcgggcgggaagg

SEQ ID NO: 514586 - DNA, 120 bp, Artificial Sequence
  ENSG00000164715_1 (sequence is synthesized)
atggtgtttctgcgactggagcggcaggtgcggaccgggagccggaccgaggtttggcagaagcaacgtgtgctcgggagcaaccggcgcgggtgccactgaggcagcggagggaggcag

SEQ ID NO: 514587 - DNA, 120 bp, Artificial Sequence
  ENSG00000164715_2 (sequence is synthesized)
gatcgactgacgggcgaacggacggacggacggaaggcgactcgagggccggccccggagccgcgccgtgggcgagatgccggggccgccggcgttgcggcggaggctgctgctgctgct

SEQ ID NO: 514588 - DNA, 120 bp, Artificial Sequence
  ENSG00000164715_3 (sequence is synthesized)
gctggtcctcctgatcgccggcagtgctggggccgcgccacttccgcaaacaggtgcaggggaggcgccacctgctgcagaagtttcctcatcttttgtgatcctgtgtgtgtgcagttt

SEQ ID NO: 514589 - DNA, 120 bp, Artificial Sequence
  ENSG00000164715_4 (sequence is synthesized)
aataatattaatagtgttaattgcaaactgtgtatcctgctgtaaggacccagaaatagactttaaggaatttgaagataattttgatgatgagatagatttcacaccaccagcagaaga

SEQ ID NO: 514590 - DNA, 120 bp, Artificial Sequence
  ENSG00000164715_5 (sequence is synthesized)
cactccctctgttcagtccccagcagaggtcttcacactttcagtaccaaatatttcactcccagctccctcgcaattccagccttctgtagagggattgaagtctcaagttgcccgcca

SEQ ID NO: 514591 - DNA, 120 bp, Artificial Sequence
  ENSG00000164715_6 (sequence is synthesized)
cagtctaaactacatacaggaaattggaaatggctggtttggaaaggttctcttgggagagatttacacgggcactagcgtagcaagagtcatcgtgaaggagttaaaagcaagtgccaa

SEQ ID NO: 514592 - DNA, 120 bp, Artificial Sequence
  ENSG00000164715_7 (sequence is synthesized)
cccaaaggaacaagatacttttttgaaaaatggagaaccttactacattcttcagcatccaaatattcttcagtgtgttggacagtgcgtagaagcgattccctacctcctggtgtttga

SEQ ID NO: 514593 - DNA, 120 bp, Artificial Sequence
  ENSG00000164715_8 (sequence is synthesized)
gttctgtgacttgggtgacctgaaggcgtatctgcgcagcgagcaggagcacatgcggggggactcacagaccatgctgctgcagaggatggcgtgcgaggtcgccgcggggctggccgc

SEQ ID NO: 514594 - DNA, 120 bp, Artificial Sequence
  ENSG00000164715_9 (sequence is synthesized)
catgcacaagctgcacttcctgcacagtgatttagccctgcggaattgttttctcacctccgacttaaatgtgaaagtgggagattacggaataggattcagcaggtacaaggaggatta

SEQ ID NO: 514595 - DNA, 120 bp, Artificial Sequence
  ENSG00000164715_10 (sequence is synthesized)
tattgaaacagatgataaaaaagttttccctctgcgatggactgctccagaattagtaaccagctttcaagacagactgctaactgcagatcagactaagtatagtaatatctggtctct

SEQ ID NO: 514596 - DNA, 120 bp, Artificial Sequence
  ENSG00000164715_11 (sequence is synthesized)
gggtgtgacactttgggagctttttgacaatgccgcacagccgtattcaaacctttccaacttagatgtcctcaaccaagtcattagagagagagacacaaaactcccgaagccccagct

SEQ ID NO: 514597 - DNA, 120 bp, Artificial Sequence
  ENSG00000164715_12 (sequence is synthesized)
ggagcagccctactctgatagatggtatgaagtcttacagttctgttggctgtcaccagaaaagagacccgcggctgaagatgtgcacaggctgctgacttacctgcggctgcagagcca

SEQ ID NO: 514598 - DNA, 120 bp, Artificial Sequence
  ENSG00000164715_13 (sequence is synthesized)
gcgggactcagaggtcgactttgaacagcagtggaacgctctgaagccgaacacaaacagcagagactcctccaacaatgctgcattcccaattctcgaccactttgccagggaccggct

SEQ ID NO: 514599 - DNA, 120 bp, Artificial Sequence
  ENSG00000164715_14 (sequence is synthesized)
gggtcgtgaaatggaggaagtcctcaccgtgaccgaaaccagccagggcctgagcttcgagtatgtctgggaggccgctaagcacgaccactttgacgagcgcagccggggccacctgga

SEQ ID NO: 514600 - DNA, 120 bp, Artificial Sequence
  ENSG00000164715_15 (sequence is synthesized)
cgaaggcttgtcctacacgagcatcttctatccggttgaagtttttgagagttcgctttcagatcctgggcccggaaagcaagatgacagcggccaggatgtccccctgagggtccctgg

SEQ ID NO: 514601 - DNA, 120 bp, Artificial Sequence
  ENSG00000164715_16 (sequence is synthesized)
agtggttcctgtttttgatgcccacaacctttctgttggaagcgactattatatccagttagaagaaaaaagtggtagtaacttggagcttgattacccaccagcgctgctcacaaccga

SEQ ID NO: 514602 - DNA, 120 bp, Artificial Sequence
  ENSG00000164715_17 (sequence is synthesized)
catggataatccagaaaggactggccctgaactgtcccagctcacggcgctcaggagcgttgaacttgaggagtccagtacagatgaggacttcttccaaagcagtacagaccccaaaga

SEQ ID NO: 514603 - DNA, 120 bp, Artificial Sequence
  ENSG00000164715_18 (sequence is synthesized)
ctctagcttaccaggggacttacacgtgaccagtggccccgagagccctttcaacaatatatttaatgatgtggacaaatcggaagatttgcccagtcaccaaaaaatattcgacttaat

SEQ ID NO: 514604 - DNA, 120 bp, Artificial Sequence
  ENSG00000164715_19 (sequence is synthesized)
ggaattaaacggagttcaagccgactttaaacctgccactttaagttccagtttggataaccccaaagagtcagtcataacaggccactttgagaaagaaaagccccgtaagatttttga

SEQ ID NO: 514605 - DNA, 120 bp, Artificial Sequence
  ENSG00000164715_20 (sequence is synthesized)
cagtgagcctctctgcctatcagataatcttatgcaccaagataattttgatccattgaatgttcaagaattgtcagaaaactttttatttcttcaagagaaaaacttactaaaaggctc

SEQ ID NO: 514606 - DNA, 120 bp, Artificial Sequence
  ENSG00000164715_21 (sequence is synthesized)
attgtccagcaaagaacacataaatgatcttcagacagaacttaagaatgctggttttactgaagctatgttagaaacgtcatgtagaaactctttagatactgagcttcagtttgctga

SEQ ID NO: 514607 - DNA, 120 bp, Artificial Sequence
  ENSG00000164715_22 (sequence is synthesized)
aaataagccaggcttgtctttgttgcaggaaaacgtaagcacaaagggtgacgatacagatgtcatgctcacaggtgacactttgagcacctcattgcagtcttccccggaagtgcaggt

SEQ ID NO: 514608 - DNA, 120 bp, Artificial Sequence
  ENSG00000164715_23 (sequence is synthesized)
acctcctacctccttcgaaacagaagaaacgccccgtcgggtacccccagactcactcccaacacagggagaaacccagcccacgtgtttagatgttattgtcccggaggactgtctcca

SEQ ID NO: 514609 - DNA, 120 bp, Artificial Sequence
  ENSG00000164715_24 (sequence is synthesized)
ccaggacatcagtccagacgctgtgactgtcccggttgaaattctctcaactgatgccagaacccacagcctggataacaggtcccaggactctcctggcgagagtgaggagaccctgcg

SEQ ID NO: 514610 - DNA, 120 bp, Artificial Sequence
  ENSG00000164715_25 (sequence is synthesized)
actcaccgaaagtgactctgttcttgctgatgacatccttgccagcagggtgagtgtagggagtagtctcccggaactgggacaggaattgcacaataaaccattttcggaagaccatca

SEQ ID NO: 514611 - DNA, 120 bp, Artificial Sequence
  ENSG00000164715_26 (sequence is synthesized)
cagtcatcgccggctagagaaaaacttagaggctgtggagactttaaatcagctcaattctaaagacgcagcaaaagaagcaggcttggtgtctgccctctcctcggactcaaccagtca

SEQ ID NO: 514612 - DNA, 120 bp, Artificial Sequence
  ENSG00000164715_27 (sequence is synthesized)
ggacagcctcctggaggacagcttgtcagcacccttcccagcctctgagccgtccctggaaaccccggactctctggagtcagtggatgtccacgaagcgctactggactctttaggatc

SEQ ID NO: 514613 - DNA, 120 bp, Artificial Sequence
  ENSG00000164715_28 (sequence is synthesized)
tcacactccccagaaactagtgccccccgataagccggcagacagtggctacgaaacagagaacttggagtctcccgagtggaccttgcatcccgctcccgagggcaccgcagactcaga

SEQ ID NO: 514614 - DNA, 120 bp, Artificial Sequence
  ENSG00000164715_29 (sequence is synthesized)
accagccaccacgggcgatggcggccacagcggtctgcctcccaacccggtcattgtcatctcagatgccggcgatggtcacagaggcacagaagtgacccctgagacgttcacagctgg

SEQ ID NO: 514615 - DNA, 120 bp, Artificial Sequence
  ENSG00000164715_30 (sequence is synthesized)
ctcccagggttcataccgagactctgcgtacttctcagacaatgactctgagcccgagaaaaggtctgaggaggtcccgggaacctccccatccgccttggtgttggtacaggagcagcc

SEQ ID NO: 514616 - DNA, 120 bp, Artificial Sequence
  ENSG00000164715_31 (sequence is synthesized)
cctacccgagccagtcctccccgagcaaagtcctgctgcccaggatagctgcctggaagccagaaagagccagccagatgaaagttgtctgtctgctttgcacaactccagtgacctgga

SEQ ID NO: 514617 - DNA, 120 bp, Artificial Sequence
  ENSG00000164715_32 (sequence is synthesized)
attaagagccacgccggagccagcacagactggtgttccccagcaggtgcatcccacggaagacgaggccagcagtccctggagtgtgctgaatgcagaacttagcagcggcgatgactt

SEQ ID NO: 514618 - DNA, 120 bp, Artificial Sequence
  ENSG00000164715_33 (sequence is synthesized)
cgagacacaggacgatcgcccctgcaccctcgcttccacggggaccaacacgaacgaactccttgcctacaccaattctgcgctggacaagtccctgtccagccactccgagggcccgaa

SEQ ID NO: 514619 - DNA, 120 bp, Artificial Sequence
  ENSG00000164715_34 (sequence is synthesized)
gttgaaggagccggacatcgaagggaagtacctggggaaactcggggtgtcagggatgctcgacctctcagaggacgggatggatgcagacgaggaggacgaaaacagcgacgactcgga

SEQ ID NO: 514620 - DNA, 120 bp, Artificial Sequence
  ENSG00000164715_35 (sequence is synthesized)
cgaggacctgcgggccttcaacctgcatagcctcagctccgagtcggaggacgagaccgagcaccccgtgcccatcatcctcagcaacgaggacggaaggcacctgcggagtctgttgaa

SEQ ID NO: 514621 - DNA, 120 bp, Artificial Sequence
  ENSG00000164715_36 (sequence is synthesized)
gcccacagcggccaatgcccccgacccactgcccgaggactggaagaaggaaaagaaggcagtcacgtttttcgatgatgtcacagtctacctgtttgaccaggagaccccaaccaaaga

SEQ ID NO: 514622 - DNA, 120 bp, Artificial Sequence
  ENSG00000164715_37 (sequence is synthesized)
gaaagctccaccgacgaagaaggtggtggctttgagtgggatgatgacttctccccagatccttttatgtcaaagacaacaagtaacctgctcagctccaagccttctctccaaacatcc

SEQ ID NO: 514623 - DNA, 120 bp, Artificial Sequence
  ENSG00000164715_38 (sequence is synthesized)
aagtacttttctccgccgccaccggcccggagcacggagcagagctggccgcactcggcgccttactcccggttctccatctctcccgccaacattgccagcttttccctcacacacctg

SEQ ID NO: 514624 - DNA, 120 bp, Artificial Sequence
  ENSG00000164715_39 (sequence is synthesized)
accgactcggacatcgagcagggcggaagcagcgaagacggagaaaaggactaggtggctgccaacgcgcacgctcgggtccgaggctgctcccctggagcggcgcccctgcgccctcag

SEQ ID NO: 514625 - DNA, 120 bp, Artificial Sequence
  ENSG00000164715_40 (sequence is synthesized)
cccgagcagcgacatccactcgccatttgctgacatgagattgggaggaagaatccagaggtgaagagggagacggctcttagctgcgttcaaggcggggccctcgggagcccaggtgca

SEQ ID NO: 514626 - DNA, 120 bp, Artificial Sequence
  ENSG00000164715_41 (sequence is synthesized)
gagcgaggccgtgtccaggagccggcgtccctcagtgccccgtgcacccgcggccgcggcctcccaggcagtgctcatgcgctggccgtcgggggaggcaggggcacagcctccatgtgc

SEQ ID NO: 514627 - DNA, 120 bp, Artificial Sequence
  ENSG00000164715_42 (sequence is synthesized)
gcgcgcgtgtggagctgtgtgcaccgcatgtgtgctttccacaggggcgtctctgcgtccacgcctgcacatcccggcgcacgtgtgggcaccacagaggacacgtgaggggaatggtca

SEQ ID NO: 514628 - DNA, 120 bp, Artificial Sequence
  ENSG00000164715_43 (sequence is synthesized)
ccagtgagccatatttattatttctagagaaatcacgaactgctttctgtaattgcactgtggataaatgttccgagagtctccattgttgtacaggatcttcagttattcgaggggaat

SEQ ID NO: 514629 - DNA, 120 bp, Artificial Sequence
  ENSG00000164715_44 (sequence is synthesized)
gaggcaggtcaagccgatgctagccactagtttgattttttttctgttttatagtttgcgctgcatggtacttgtgaagcttaaatattttgagtgttctactgtgtctaggattgttgg

SEQ ID NO: 514630 - DNA, 120 bp, Artificial Sequence
  ENSG00000164715_45 (sequence is synthesized)
gattgtacatatggtactctttcataaatgataaatgattctgaatgttagtgttttatgttcatataggaaatattttcattgagtccaaaataccactgttttgttgatggacttgaa

SEQ ID NO: 514631 - DNA, 120 bp, Artificial Sequence
  ENSG00000164715_46 (sequence is synthesized)
tgcatttttgtctcttcttgatgaagcggctttgccgcagcaaatgaggcttctctctgaggagctgagaggtcttgcagcctctccttgtcattctcccaccccacatcccatttttta

SEQ ID NO: 514632 - DNA, 120 bp, Artificial Sequence
  ENSG00000164715_47 (sequence is synthesized)
aagcccttttggtaaaaaccaacaggttgtggccgcagacctcagatggacccggcccatccctggggacgtgctggcgtggcaggtccagagagctgcaccctgcacggggcaccgcac

SEQ ID NO: 514633 - DNA, 120 bp, Artificial Sequence
  ENSG00000164715_48 (sequence is synthesized)
cgcttccctccgcgcagctcttctgcctggttttcggaggccaggctgctgggaagcttccgtgttcctgtcagtccttccttcaagaagccggggaactcaggcagactcatctccgca

SEQ ID NO: 514634 - DNA, 120 bp, Artificial Sequence
  ENSG00000164715_49 (sequence is synthesized)
gagcataccagccgtgggggaccgttcgacttgatgatgtgtgcacacttcaggtggtggggacttgagctttaaaaaaacctccacagccgaatcttctcctccgagccactccacgtc

SEQ ID NO: 514635 - DNA, 120 bp, Artificial Sequence
  ENSG00000164715_50 (sequence is synthesized)
acgtccagctgggcctggccagtctgtggttatccatgtgggatgagataacaccacatcctgcagctgtgaagggggatggacaagggacgacggccgacggcagagcatcagcagccg

SEQ ID NO: 514636 - DNA, 120 bp, Artificial Sequence
  ENSG00000164715_51 (sequence is synthesized)
acacatagttcgggtcggggccttgggtggtcctgcatggcccgggactcatctcacggaccctccgttctgcattaagccccaggttctcttctggctttgaaagggcccgagtgctcc

SEQ ID NO: 514637 - DNA, 120 bp, Artificial Sequence
  ENSG00000164715_52 (sequence is synthesized)
cagtgtagcttcgtcacatcgtcacgagcccctgtggtcatgggcgacctcacacctccctccctgagttctgctctgacataaggaagtcctcggtggctggtgcagcgcggctgtgct

SEQ ID NO: 514638 - DNA, 120 bp, Artificial Sequence
  ENSG00000164715_53 (sequence is synthesized)
gtgctggggaggcagccgttccttcgggggtccttgggcctgcagtcccctcatactcacccttcacccaacatattttccggtgctgatatgtttccagactccagcgcaacctggggt

SEQ ID NO: 514639 - DNA, 120 bp, Artificial Sequence
  ENSG00000164715_54 (sequence is synthesized)
gctctccagacccgtgcaggggccgcctggggtacacggaaggaagttgagtcctagtgcaaaatgcaggcggacgttgccagagagtgcgcagcaaatgaccttcattgccagttccac

SEQ ID NO: 514640 - DNA, 120 bp, Artificial Sequence
  ENSG00000164715_55 (sequence is synthesized)
cctactcctctcattttttatactaagcaataactttccaaagcaagaagttcaggatggagagagtcccctcctgtgtaggcatggggtggatgcggtgcccacctgggctatgtgggg

SEQ ID NO: 514641 - DNA, 120 bp, Artificial Sequence
  ENSG00000164715_56 (sequence is synthesized)
agcaccactgtctcgggatgcgcgaattttttttttttttttaattaacagggcattagaagatgattttgccaaaattgtcatgactctgaattcttgctgtggggacttcctgagttt

SEQ ID NO: 514642 - DNA, 120 bp, Artificial Sequence
  ENSG00000164715_57 (sequence is synthesized)
tctcagtttttacatctaagattagtcttggctgaagagaaatgagacgtgattatactactttttcaattgcaggtttaaggagttcagatttaatgaccaaagtcatacagatcatgg

SEQ ID NO: 514643 - DNA, 120 bp, Artificial Sequence
  ENSG00000164715_58 (sequence is synthesized)
tacagatcatggaatctgtcgtcgtcttatacagtgtcagcctcgagtacatttattaaccttttggggctgtcagttttccactaggattaagattttggccgggcgcggtggctcacg

SEQ ID NO: 514644 - DNA, 87 bp, Artificial Sequence
  ENSG00000164715_59 (sequence is synthesized)
tgcttgggaggctgaggtgggaggatggctagagcccaggagatgggttagcctgggtaacagccagaccctgtctcaaaaaaaaaa

SEQ ID NO: 514645 - DNA, 120 bp, Artificial Sequence
  ENSG00000164715_60 (sequence is synthesized)
ctagcctgggtaacagccagaccctgtctcaaaaaaaaaaacaatttttttcataacataattcccatttttatttattttgagtcactcataattaattgccaaaaaagcattttatac

SEQ ID NO: 514646 - DNA, 120 bp, Artificial Sequence
  ENSG00000164715_61 (sequence is synthesized)
attgagttggggggtagtggatcttagtgtggtgttgcatggaggggcgagattttatatttataatcaacacgtgggttaacatgtttttttgaaatccaagcaatacacaggaaattt

SEQ ID NO: 514647 - DNA, 120 bp, Artificial Sequence
  ENSG00000164715_62 (sequence is synthesized)
aagtagaataaaaattgcagcccatttttgaaatgtcagcatgtgctgtgttcagttcaggtttttgttgtttgttttgttattttttaactaataagttggttatcagtggtgggtttt

SEQ ID NO: 514648 - DNA, 120 bp, Artificial Sequence
  ENSG00000164715_63 (sequence is synthesized)
caaaatgtacttgttctaataagttgtacaatgaactaaatcagtggcattctctagataatgtgggggaaggttagaatattttctggccttctatggggtagcaacccagaatcaatc

SEQ ID NO: 514649 - DNA, 120 bp, Artificial Sequence
  ENSG00000164715_64 (sequence is synthesized)
tgaattagtcctgttttggtggagtttgtacattttaaatcctataacaaaaataatctagttttcatttccttactagctagatgcgaatttgtctttttgaatgaccctgtcaataag

SEQ ID NO: 514650 - DNA, 120 bp, Artificial Sequence
  ENSG00000164715_65 (sequence is synthesized)
ccagaaagggcaacccagaaaaagtgctccccacatccttctgagacttggcctgtgtgtgtggacgagaagccattcaccgtaagggtgcagaaagctcgaccaagccgaattgcaaac

SEQ ID NO: 514651 - DNA, 120 bp, Artificial Sequence
  ENSG00000164715_66 (sequence is synthesized)
aacgttcgttctatttttaaatgtacaggttcgatcgtttctatagaaatgggtttatctaagaaaagtcttggtttgtcttgctgctgtaaaaggcctttccaaacccctccttttatt

SEQ ID NO: 514652 - DNA, 120 bp, Artificial Sequence
  ENSG00000164715_67 (sequence is synthesized)
cctgtttcccgaaataaggtatttgtagagttaaggacctactgcatgcctgtccccagggccccggtggaaggaaggcagcgcctgctcttccttaactcagcccatcatctgaaaatt

SEQ ID NO: 514653 - DNA, 120 bp, Artificial Sequence
  ENSG00000164715_68 (sequence is synthesized)
cagaagtgaaccaagggttagacgccagaggttgggcttctgttagagtggcttcaaaacatgagccttatgggaagtagccttaaaaaaagaatgggtatacgcagtgacttccgatgg

SEQ ID NO: 514654 - DNA, 120 bp, Artificial Sequence
  ENSG00000164715_69 (sequence is synthesized)
aaatctccaaaacaatattcctaagtagcaatggggttggctcaagtctttattaacaaagaacattctctttcatctataaagaaattcttaaagatgcattgacagtgttgaattacc

SEQ ID NO: 514655 - DNA, 120 bp, Artificial Sequence
  ENSG00000164715_70 (sequence is synthesized)
aacagcctgtgaagatcagtttgaccggtgtggacacgtgctggttaagcactcaggcctacgtgggccgagcgggatcttgatcatggggctggtgtatggatccaccgtcggattccg

SEQ ID NO: 514656 - DNA, 120 bp, Artificial Sequence
  ENSG00000164715_71 (sequence is synthesized)
tctgcagaggaggacgtagggggccgtcacacccaccaggcctccctgctgtgctttaacacaggcagaagaggttcatggcaatataatagtcaatgaactttcagtttaaattgtgta

SEQ ID NO: 514657 - DNA, 120 bp, Artificial Sequence
  ENSG00000164715_72 (sequence is synthesized)
tcaatgaactttcagtttaaattgtgtacatttttaaattgtaagatttttactgtatattgatgcatagtgtgattcaataaattgcttgtaatttaaaaactatttaatattcaaaat

SEQ ID NO: 514658 - DNA, 120 bp, Artificial Sequence
  ENSG00000164715_73 (sequence is synthesized)
agtcatctggcagaagtcattcaagcccgacattcttttggccacaccgtgctgccttagatgagcttttctgtagtagtctccatcctagttagtgttttaaaatgggaatgaaatggc

SEQ ID NO: 514659 - DNA, 120 bp, Artificial Sequence
  ENSG00000164715_74 (sequence is synthesized)
actttgataacaaattttagtggaatagtctgagagaaaccagcagcttcgtataaaatgatctcattcacaggggaggcgccacctgctgcagaagtttcctcatcttttgtgatcctg

SEQ ID NO: 514660 - DNA, 120 bp, Artificial Sequence
  ENSG00000164729_0 (sequence is synthesized)
aaaaaacaaaaaaagaaagaaaagaagcagagttggactcagtgggaaaataggcgtgctaccacctcaggagagttccagggaagaatcccacccccactccaatgaggtcacaatggc

SEQ ID NO: 514661 - DNA, 120 bp, Artificial Sequence
  ENSG00000164729_1 (sequence is synthesized)
agaatcccacccccactccaatgaggtcacaatggctggagctctgaggggcccaggctccctgagccaggaggagaggagaaagtccaaggaaagatggctggcagtcacccctatttc

SEQ ID NO: 514662 - DNA, 120 bp, Artificial Sequence
  ENSG00000164729_2 (sequence is synthesized)
aaccagcctgactccacacacccatcgccgccctccgctccacccagcctccgctggtaccagcgctgccagccctctgatgccaccagtggcctgctggtggccctgctgggtgggggc

SEQ ID NO: 514663 - DNA, 120 bp, Artificial Sequence
  ENSG00000164729_3 (sequence is synthesized)
ctgcctgctggcttcgtgggccccctttctcgtatggcttaccaggcttccaacctgccctcgctggagctgctcatctggcgatgcctcttccacctccctattgccctgctacttaaa

SEQ ID NO: 514664 - DNA, 120 bp, Artificial Sequence
  ENSG00000164729_4 (sequence is synthesized)
ctgcgtggcgacccccttctgggaactcctgacatccgaagccgggccttcttctgtgccctgctcaacatcctcagcattggatgtgcctacagtgcggttcaggtggtgcccgctggc

SEQ ID NO: 514665 - DNA, 120 bp, Artificial Sequence
  ENSG00000164729_5 (sequence is synthesized)
aacgctgccactgttcgcaaaggttcttccaccgtctgctccgccgtcctcactctctgccttgagagccagggtctcagtggctacgactggtgtggactgttgggctgcatcctagga

SEQ ID NO: 514666 - DNA, 120 bp, Artificial Sequence
  ENSG00000164729_6 (sequence is synthesized)
ctaatcatcattgtgggacctggactctggacactacaggaggggaccacgggtgtctacaccgccctgggctatgtggaggctttcctgggaggcctggcgctgtccctgaggcttctg

SEQ ID NO: 514667 - DNA, 120 bp, Artificial Sequence
  ENSG00000164729_7 (sequence is synthesized)
gtctatcgttctctgcactttcccccctgcctcccaacagtggccttcctatctggcttggtggggctgctgggctctgtgccaggcctctttgtgctgcaggcccccgtgttgcccagt

SEQ ID NO: 514668 - DNA, 120 bp, Artificial Sequence
  ENSG00000164729_8 (sequence is synthesized)
gcccaccctgccctggtgtgcgctgtcctacattccgaggtggttgtggcccttatactgcagtattatatgctccatgagactgtggcaccttctgacatcgtggcggcaggggttgtg

SEQ ID NO: 514669 - DNA, 120 bp, Artificial Sequence
  ENSG00000164729_9 (sequence is synthesized)
ctgggcagcattgccatcattacagcccagaacctcagctgtgagaggacagggagggtggaggagtgagatagaacttgggagcccgggggttgggagggacagggataaataaaggca

SEQ ID NO: 514670 - DNA, 120 bp, Artificial Sequence
  ENSG00000164729_10 (sequence is synthesized)
aagactgaagacaaacatgggaggagaagtgactggaaaagaactggtgtgggagagggatacctctcagagtcaagggtgacttggggacttggtggagagggactacgtggaagacct

SEQ ID NO: 514671 - DNA, 120 bp, Artificial Sequence
  ENSG00000164729_11 (sequence is synthesized)
ggggccagcctgggaccaagggatgtggagtccaggctgggtcctagaatcagggcataactaaggggtaaagtctgaggagcagatccaaagggctgaggcagggaggccgtgggccat

SEQ ID NO: 514672 - DNA, 120 bp, Artificial Sequence
  ENSG00000164729_12 (sequence is synthesized)
ggggaggacttcactcagcagcaaagagaagagcattggggctggagtgttccggcaaagacagagccagcagctgcgctgggggagggaagcgtgcctccccacccctcccctcacggg

SEQ ID NO: 514673 - DNA, 120 bp, Artificial Sequence
  ENSG00000164729_13 (sequence is synthesized)
gaaggtttcctttcctcgtgcttgtgccccccgcttggggtggtgacgtgacattgacatcaaacaaggattacagtgaatgtgaaaaaaaaaaaaaaagatacctgaatagacatttct

SEQ ID NO: 514674 - DNA, 120 bp, Artificial Sequence
  ENSG00000164729_14 (sequence is synthesized)
atgacattttaaaagccatgaatttattttggcacaaatattttatcatatgcagtcacttctttgtaaatgattttttgtaaagtcattggatataaaagagtgattttcctcacctga

SEQ ID NO: 514675 - DNA, 120 bp, Artificial Sequence
  ENSG00000164729_15 (sequence is synthesized)
gtacatgaaaagaaaatgctgaaatcaatgtataaatcaaatcatctgtactagcactgttaatctagaagaaagtggttgcatagagaagagtaagaatgtagaccagcttattgaagt

SEQ ID NO: 514676 - DNA, 120 bp, Artificial Sequence
  ENSG00000164733_0 (sequence is synthesized)
ggctccggcaaccgctccggcaacgccaaccgctccgctgcgcgcaggctgggctgcaggctctcggctgcagcgctgggtgtcttcaggcctatggagagcagcttgcgtgggctgggc

SEQ ID NO: 514677 - DNA, 120 bp, Artificial Sequence
  ENSG00000164733_1 (sequence is synthesized)
ctgcagtacctggtttgcatagatgattggcaggtgggcagcacggggaaggacctgtgagtggccaacctggttcaggtggatctaggatccggcttccaacatgtggcagctctgggc

SEQ ID NO: 514678 - DNA, 120 bp, Artificial Sequence
  ENSG00000164733_2 (sequence is synthesized)
ctccctctgctgcctgctggtgttggccaatgcccggagcaggccctctttccatcccctgtcggatgagctggtcaactatgtcaacaaacggaataccacgtggcaggccgggcacaa

SEQ ID NO: 514679 - DNA, 120 bp, Artificial Sequence
  ENSG00000164733_3 (sequence is synthesized)
cttctacaacgtggacatgagctacttgaagaggctatgtggtaccttcctgggtgggcccaagccaccccagagagttatgtttaccgaggacctgaagctgcctgcaagcttcgatgc

SEQ ID NO: 514680 - DNA, 120 bp, Artificial Sequence
  ENSG00000164733_4 (sequence is synthesized)
acgggaacaatggccacagtgtcccaccatcaaagagatcagagaccagggctcctgtggctcctgctgggccttcggggctgtggaagccatctctgaccggatctgcatccacaccaa

SEQ ID NO: 514681 - DNA, 120 bp, Artificial Sequence
  ENSG00000164733_5 (sequence is synthesized)
tgcgcacgtcagcgtggaggtgtcggcggaggacctgctcacatgctgtggcagcatgtgtggggacggctgtaatggtggctatcctgctgaagcttggaacttctggacaagaaaagg

SEQ ID NO: 514682 - DNA, 120 bp, Artificial Sequence
  ENSG00000164733_6 (sequence is synthesized)
cctggtttctggtggcctctatgaatcccatgtagggtgcagaccgtactccatccctccctgtgagcaccacgtcaacggctcccggcccccatgcacgggggagggagatacccccaa

SEQ ID NO: 514683 - DNA, 120 bp, Artificial Sequence
  ENSG00000164733_7 (sequence is synthesized)
gtgtagcaagatctgtgagcctggctacagcccgacctacaaacaggacaagcactacggatacaattcctacagcgtctccaatagcgagaaggacatcatggccgagatctacaaaaa

SEQ ID NO: 514684 - DNA, 120 bp, Artificial Sequence
  ENSG00000164733_8 (sequence is synthesized)
cctgggctggggagtggagaatggcacaccctactggctggttgccaactcctggaacactgactggggtgacaatggcttctttaaaatactcagaggacaggatcactgtggaatcga

SEQ ID NO: 514685 - DNA, 120 bp, Artificial Sequence
  ENSG00000164733_9 (sequence is synthesized)
atcagaagtggtggctggaattccacgcaccgatcagtactgggaaaagatctaatctgccgtgggcctgtcgtgccagtcctgggggcgagatcggggtagaaatgcattttattcttt

SEQ ID NO: 514686 - DNA, 120 bp, Artificial Sequence
  ENSG00000164733_10 (sequence is synthesized)
aagttcacgtaagatacaagtttcagacagggtctgaaggactggattggccaaacatcagacctgtcttccaaggagaccaagtcctggctacatcccagcctgtggttacagtgcaga

SEQ ID NO: 514687 - DNA, 120 bp, Artificial Sequence
  ENSG00000164733_11 (sequence is synthesized)
caggccatgtgagccaccgctgccagcacagagcgtccttccccctgtagactagtgccgtagggagtacctgctgccccagctgactgtggccccctccgtgatccatccatctccagg

SEQ ID NO: 514688 - DNA, 120 bp, Artificial Sequence
  ENSG00000164733_12 (sequence is synthesized)
gagcaagacagagacgcaggaatggaaagcggagttcctaacaggatgaaagttcccccatcagttcccccagtacctccaagcaagtagctttccacatttgtcacagaaatcagagga

SEQ ID NO: 514689 - DNA, 120 bp, Artificial Sequence
  ENSG00000164733_13 (sequence is synthesized)
gagacggtgttgggagccctttggagaacgccagtctcccaggccccctgcatctatcgagtttgcaatgtcacaacctctctgatcttgtgctcagcatgattctttaatagaagtttt

SEQ ID NO: 514690 - DNA, 120 bp, Artificial Sequence
  ENSG00000164733_14 (sequence is synthesized)
attttttcgtgcactctgctaatcatgtgggtgagccagtggaacagcgggagacctgtgctagttttacagattgcctccttatgacgcggctcaaaaggaaaccaagtggtcaggagt

SEQ ID NO: 514691 - DNA, 120 bp, Artificial Sequence
  ENSG00000164733_15 (sequence is synthesized)
tgtttctgacccactgatctctactaccacaaggaaaatagtttaggagaaaccagcttttactgtttttgaaaaattacagcttcaccctgtcaagttaacaaggaatgcctgtgccaa

SEQ ID NO: 514692 - DNA, 120 bp, Artificial Sequence
  ENSG00000164733_16 (sequence is synthesized)
ggctgcagggctccggcaaccgctccggcaacgccaaccgctccgctgcgcgcaggctgggctgcaggctctcggctgcagcgctgggtggatctaggatccggcttccaacatgtggca

SEQ ID NO: 514693 - DNA, 120 bp, Artificial Sequence
  ENSG00000164733_17 (sequence is synthesized)
cttgaagtctactctgatgggatctcagatcctttgtcactgcctatagacttgtagctgctgtctctctttgtccctgcagagaatcacgtcctggaactgcatgttcttgcgactctt

SEQ ID NO: 514694 - DNA, 120 bp, Artificial Sequence
  ENSG00000164733_18 (sequence is synthesized)
gggacttcatcttaacttctcgctgccccagccatgttttcaaccatggcatccctcccccaattagttccctgtcatcctcgtcaaccttctctgtaagtgcctggtaagcttgccctt

SEQ ID NO: 514695 - DNA, 120 bp, Artificial Sequence
  ENSG00000164733_19 (sequence is synthesized)
gcttaagaactcaaaacatagctgtgctctatttttttgttgttgttgtgactgacagagtgagattccgtctcccaggctggagtgcagtggcgccttctcagctcactgcaacctgca

SEQ ID NO: 514696 - DNA, 86 bp, Artificial Sequence
  ENSG00000164733_20 (sequence is synthesized)
ctgcttcagccttccgagtagctgggatgacaggcactcaccaatatgcctgggtaatttttgtatttttaagtacatacaggacg

SEQ ID NO: 514697 - DNA, 70 bp, Artificial Sequence
  ENSG00000164733_21 (sequence is synthesized)
ctgcctgtattttttatcagccacaaatccagcaacaagctgaggattcagctcataaaacaggcttggt

SEQ ID NO: 514698 - DNA, 120 bp, Artificial Sequence
  ENSG00000164733_22 (sequence is synthesized)
agcaacaagctgaggattcagctcataaaacaggcttggtgtcttggtgatctcacataaccaagatgctaccccgtggggaaccacatccccctggatgccctccagccttggtttggg

SEQ ID NO: 514699 - DNA, 120 bp, Artificial Sequence
  ENSG00000164733_23 (sequence is synthesized)
ctggagtcagggcctgtatacagtattttgaatttgtatgccactggtttgcattgctggtcaggaactctagtgctttgcatagccctggtttagaaacatgttatagcagttcttggt

SEQ ID NO: 514700 - DNA, 120 bp, Artificial Sequence
  ENSG00000164733_24 (sequence is synthesized)
atagagcaaactagaagaaccagcaatcattccactgtcctgccaaggtacacctcagtactccccttcccaactgaagtggtatgaggctagctctttccaaaagcattcaagtttggc

SEQ ID NO: 514701 - DNA, 120 bp, Artificial Sequence
  ENSG00000164733_25 (sequence is synthesized)
ttctgatgtgactcagaatttaggaaccagatgctagatcaaataagctctgaaaatctgaggaacattgtaggaaaggtttgttaagcatctcttaagtgccatgatgagcataacagc

SEQ ID NO: 514702 - DNA, 63 bp, Artificial Sequence
  ENSG00000164733_26 (sequence is synthesized)
ttgttaagcatctcttaagtgccatgatgagcataacagccggcaaggtcaggagttcaagac

SEQ ID NO: 514703 - DNA, 71 bp, Artificial Sequence
  ENSG00000164733_27 (sequence is synthesized)
gaggcggaggttgcagtgagccaagacagtgccagtgcactccagcctcggtgacagcgcaaggctccgtc

SEQ ID NO: 514704 - DNA, 68 bp, Artificial Sequence
  ENSG00000164733_28 (sequence is synthesized)
cagaggaatctgtgtctcaccaaaaaaaaaaagaaaaagaaagatgcttaacaaaggttaccataagc

SEQ ID NO: 514705 - DNA, 120 bp, Artificial Sequence
  ENSG00000164733_29 (sequence is synthesized)
aaaagaaaaagaaagatgcttaacaaaggttaccataagccacaaattcataaccacttatccttccagtttcaagtagaatatattcataacctcaataaagttctccctgctcccaaa

SEQ ID NO: 514706 - DNA, 120 bp, Artificial Sequence
  ENSG00000164733_30 (sequence is synthesized)
ggggctggcccaggctacggcggctgcagggctccggcaaccgctccggcaacgccaaccgctccgctgcgcgcaggctgggctgcaggctctcggctgcagcgctgggctggtgtgcag

SEQ ID NO: 514707 - DNA, 120 bp, Artificial Sequence
  ENSG00000164733_31 (sequence is synthesized)
gcagtggtgcgaccacggctcacggcagcctcagccacccagatgtaagcgatctggttcccacctcagcctcccgagtagtggatctaggatccggcttccaacatgtggcagctctgg

SEQ ID NO: 514708 - DNA, 120 bp, Artificial Sequence
  ENSG00000164733_32 (sequence is synthesized)
ggcccaggctacggcggctgcagggctccggcaaccgctccggcaacgccaaccgctccgctgcgcgcaggctgggctgcaggctctcggctgcagcgctggcacgctggcggccccttg

SEQ ID NO: 514709 - DNA, 120 bp, Artificial Sequence
  ENSG00000164733_33 (sequence is synthesized)
atatcactcacttgggaaagtgtctcaagctgttctacaaatccatgcaaaggccgtttaaaaatagcagcgaaggccctggactcggtctcgtccagcacagccccttggctctctctc

SEQ ID NO: 514710 - DNA, 120 bp, Artificial Sequence
  ENSG00000164733_34 (sequence is synthesized)
tgggctctggccgcctggcccccggggacccacacgaggtcatggcgtgcttcgggcaggggggcggggatcccatagacacctcagctccttaagagttctccgcctgggccaggacga

SEQ ID NO: 514711 - DNA, 120 bp, Artificial Sequence
  ENSG00000164733_35 (sequence is synthesized)
agagaactggtggtgtttttaagtaccttagggaagtttagcgtctgctcagttgagaatcagtgttctacccggaagggcactcgtagcctggtctgctgtaatggtggctatcctgct

SEQ ID NO: 514712 - DNA, 120 bp, Artificial Sequence
  ENSG00000164733_36 (sequence is synthesized)
gcggctgcagggctccggcaaccgctccggcaacgccaaccgctccgctgcgcgcaggctgggctgcaggctctcggctgcagcgctgggatttgcctggccaactttctgcgcaagatc

SEQ ID NO: 514713 - DNA, 120 bp, Artificial Sequence
  ENSG00000164733_37 (sequence is synthesized)
ccacgcaattcctgggaccccagaagacaggtcctgttgaagaacaggaatctggcactgggtgggctggggaggaagccgcacggtgttaaatccataaacaggaagagaaaccagaca

SEQ ID NO: 514714 - DNA, 82 bp, Artificial Sequence
  ENSG00000164733_38 (sequence is synthesized)
ggggcgcaccctgctcctggactccagtaaagggaggccgggcagagtccctggggcgccacctccccctcggtggagtctg

SEQ ID NO: 514715 - DNA, 120 bp, Artificial Sequence
  ENSG00000164733_39 (sequence is synthesized)
ctgcctcagtctctcaactagctgcgattacaggtggatctaggatccggcttccaacatgtggcagctctgggcctccctctgctgcctgctggtgttggccaatgcccggagcaggcc

SEQ ID NO: 514716 - DNA, 120 bp, Artificial Sequence
  ENSG00000164733_40 (sequence is synthesized)
gcggctgcagggctccggcaaccgctccggcaacgccaaccgctccgctgcgcgcaggctgggctgcaggctctcggctgcagcgctgggaagagaaaccagacagcgaaaccaagaggc

SEQ ID NO: 514717 - DNA, 120 bp, Artificial Sequence
  ENSG00000164733_41 (sequence is synthesized)
aaccgctccgctgcgcgcaggctgggctgcaggctctcggctgcagcgctgggtgagtgctggggacccggggccaccgcagcgtggatctaggatccggcttccaacatgtggcagctc

SEQ ID NO: 514718 - DNA, 120 bp, Artificial Sequence
  ENSG00000164733_42 (sequence is synthesized)
gcgtgagccactgcacccggctactgccttcttactgtcgccacagcctggataaaatacgattcttctgagccttttttttttttttaatacagagtttcactcttgttgcctaggctg

SEQ ID NO: 514719 - DNA, 90 bp, Artificial Sequence
  ENSG00000164733_43 (sequence is synthesized)
acccagcccctctgagcctcttgaatacaactggggtcatgcctgctttgcaggtggatctaggatccggcttccaacatgtggcagctc

SEQ ID NO: 514720 - DNA, 120 bp, Artificial Sequence
  ENSG00000164733_44 (sequence is synthesized)
caggaccgccgagggaggcgcctgcgaggaagagctcggccgggtccggagactgctgcctgggaccgcgctcccagcgcctgggcctcggtgtctccgggccaaactgccgacataatc

SEQ ID NO: 514721 - DNA, 120 bp, Artificial Sequence
  ENSG00000164733_45 (sequence is synthesized)
tagcggggatggctccaccttaacaacaaggtggtggcacagaactttctgctccagctgcctgcagcctcgccttggttccgcagtagcggtgttcactggcggctgcagatccgaaat

SEQ ID NO: 514722 - DNA, 120 bp, Artificial Sequence
  ENSG00000164733_46 (sequence is synthesized)
ttattccctgcaagctgtgcttatctagggagcgtcccttggagggtttggggtctgggaggtctgctcgcaccacttgctgcagctgggggtgggtccacgagtggcctcgggcacttg

SEQ ID NO: 514723 - DNA, 120 bp, Artificial Sequence
  ENSG00000164733_47 (sequence is synthesized)
ggtagcacacagtggtctggagagctggtggtgcttctctcagaggttttcattagaggctgtcttttcagctgtaatggtggctatcctgctgaagcttggaacttctggacaagaaaa

SEQ ID NO: 514724 - DNA, 120 bp, Artificial Sequence
  ENSG00000164733_48 (sequence is synthesized)
cacacacacacatacaaactaatactacacattttgcagatttcagaaatgaacccagtttccaggcagaggttcacgggggtgcttctcttgctttaaaagctgagttgggcaaatcgt

SEQ ID NO: 514725 - DNA, 79 bp, Artificial Sequence
  ENSG00000164733_49 (sequence is synthesized)
acccgggagttcaagaccagtctggccaacgtagcaagaccccatttctaccaaagaaaataaaagctgagtttgagcc

SEQ ID NO: 514726 - DNA, 120 bp, Artificial Sequence
  ENSG00000164733_50 (sequence is synthesized)
ccccatttctaccaaagaaaataaaagctgagtttgagccccaggagcgtcccctggtgttgagagatcagttgcctacaaggtctgaggtgcccctgtggccctttgaggggactgctg

SEQ ID NO: 514727 - DNA, 120 bp, Artificial Sequence
  ENSG00000164733_51 (sequence is synthesized)
ctggctggcggggaagcgctggagagaaagtgggagcaacactggagagtcttgggggattcggggtggggacaactctgacaaggcaagttatagaaactttctgagtcccagtttcca

SEQ ID NO: 514728 - DNA, 120 bp, Artificial Sequence
  ENSG00000164733_52 (sequence is synthesized)
tcagtacaaaaatcacaatccctctggccatgaatgatggcgaggattaggtggagtggcgggcagagcatccagcagattgcaagtccacgtgtacaggtggcgaagcagctccctttc

SEQ ID NO: 514729 - DNA, 120 bp, Artificial Sequence
  ENSG00000164733_53 (sequence is synthesized)
aaccgctccggcaacgccaaccgctccgctgcgcgcaggctgggctgcaggctctcggctgcagcgctggggtcttgctttgtctcccaggctggtgtgcagtggtgcgaccacggctca

SEQ ID NO: 514730 - DNA, 120 bp, Artificial Sequence
  ENSG00000164733_54 (sequence is synthesized)
cggcagcctcagccacccagatgtaagcgatctggttcccacctcagcctcccgagtagtgtcttcaggcctatggagagcagcttgcgtgggctgggcctgcagtacctggtttgcata

SEQ ID NO: 514731 - DNA, 120 bp, Artificial Sequence
  ENSG00000164733_55 (sequence is synthesized)
aaaatagaaatgatgactctgggatgcaaacgttggctgtcctatgtataaggagatggcttttcacgctcccagtgactgaggaagtttctcccagatggcgctgctctgagcctggtg

SEQ ID NO: 514732 - DNA, 120 bp, Artificial Sequence
  ENSG00000164733_56 (sequence is synthesized)
agctcctaggttccttcgcagtgacagccactcttttctatttcacgctggcggccccttgagccccaacctggataccataggggaggagcagagaagccaggaacaccacagccctgg

SEQ ID NO: 514733 - DNA, 120 bp, Artificial Sequence
  ENSG00000164733_57 (sequence is synthesized)
gcctcacctaggtaacgctgattcctccacggaggatgtgcttctgagtggtccgttgggtgctgtgctgatgagcatcacccagcattttacgacacatgtgctgccccagagggctgg

SEQ ID NO: 514734 - DNA, 120 bp, Artificial Sequence
  ENSG00000164733_58 (sequence is synthesized)
ctcctcttagaaatcctgacgcagctcctaggttccttcgcagtgacagccactcttttctatttgtacgtagctgtagtgttttgtgggtggatctaggatccggcttccaacatgtgg

SEQ ID NO: 514735 - DNA, 120 bp, Artificial Sequence
  ENSG00000164736_0 (sequence is synthesized)
gcagtgtcactaggccggctgggggccctgggtacgctgtagaccagaccgcgacaggccagaacacgggcggcggcttcgggccgggagacccgcgcagccctcggggcatctcagtgc

SEQ ID NO: 514736 - DNA, 120 bp, Artificial Sequence
  ENSG00000164736_1 (sequence is synthesized)
ctcactccccaccccctcccccgggtcgggggaggcggcgcgtccggcggagggttgaggggagcggggcaggcctggagcgccatgagcagcccggatgcgggatacgccagtgacgac

SEQ ID NO: 514737 - DNA, 120 bp, Artificial Sequence
  ENSG00000164736_2 (sequence is synthesized)
cagagccagacccagagcgcgctgcccgcggtgatggccgggctgggcccctgcccctgggccgagtcgctgagccccatcggggacatgaaggtgaagggcgaggcgccggcgaacagc

SEQ ID NO: 514738 - DNA, 120 bp, Artificial Sequence
  ENSG00000164736_3 (sequence is synthesized)
ggagcaccggccggggccgcgggccgagccaagggcgagtcccgtatccggcggccgatgaacgctttcatggtgtgggctaaggacgagcgcaagcggctggcgcagcagaatccagac

SEQ ID NO: 514739 - DNA, 120 bp, Artificial Sequence
  ENSG00000164736_4 (sequence is synthesized)
ctgcacaacgccgagttgagcaagatgctgggcaagtcgtggaaggcgctgacgctggcggagaagcggcccttcgtggaggaggcagagcggctgcgcgtgcagcacatgcaggaccac

SEQ ID NO: 514740 - DNA, 120 bp, Artificial Sequence
  ENSG00000164736_5 (sequence is synthesized)
cccaactacaagtaccggccgcggcggcgcaagcaggtgaagcggctgaagcgggtggagggcggcttcctgcacggcctggctgagccgcaggcggccgcgctgggccccgagggcggc

SEQ ID NO: 514741 - DNA, 120 bp, Artificial Sequence
  ENSG00000164736_6 (sequence is synthesized)
cgcgtggccatggacggcctgggcctccagttccccgagcagggcttccccgccggcccgccgctgctgcctccgcacatgggcggccactaccgcgactgccagagtctgggcgcgcct

SEQ ID NO: 514742 - DNA, 120 bp, Artificial Sequence
  ENSG00000164736_7 (sequence is synthesized)
ccgctcgacggctacccgttgcccacgcccgacacgtccccgctggacggcgtggaccccgacccggctttcttcgccgccccgatgcccggggactgcccggcggccggcacctacagc

SEQ ID NO: 514743 - DNA, 120 bp, Artificial Sequence
  ENSG00000164736_8 (sequence is synthesized)
tacgcgcaggtctcggactacgctggccccccggagcctcccgccggtcccatgcacccccgactcggcccagagcccgcgggtccctcgattccgggcctcctggcgccacccagcgcc

SEQ ID NO: 514744 - DNA, 120 bp, Artificial Sequence
  ENSG00000164736_9 (sequence is synthesized)
ccgcaacaccagcaccagcaccagcaccagcaccaccccccgggccccggacagccgtcgccccctccggaggcactgccctgccgggacggcacggaccccagtcagcccgccgagctc

SEQ ID NO: 514745 - DNA, 120 bp, Artificial Sequence
  ENSG00000164736_10 (sequence is synthesized)
ctcggggaggtggaccgcacggaatttgaacagtatctgcacttcgtgtgcaagcctgagatgggcctcccctaccaggggcatgactccggtgtgaatctccccgacagccacggggcc

SEQ ID NO: 514746 - DNA, 120 bp, Artificial Sequence
  ENSG00000164736_11 (sequence is synthesized)
atttcctcggtggtgtccgacgccagctccgcggtatattactgcaactatcctgacgtgtgacaggtccctgatccgccccagcctgcaggccagaagcagtgttacacacttcctgga

SEQ ID NO: 514747 - DNA, 120 bp, Artificial Sequence
  ENSG00000164736_12 (sequence is synthesized)
ggagctaaggaaatcctcagactcctgggtttttgttgttgctgttgttgttttttaaaaggtgtgttggcatataatttatggtaatttattttgtctgccacttgaacagtttggggg

SEQ ID NO: 514748 - DNA, 120 bp, Artificial Sequence
  ENSG00000164736_13 (sequence is synthesized)
ggtgaggtttcatttaaaatttgttcagagatttgtttcccatagttggattgtcaaaaccctatttccaagttcaagttaactagctttgaatgtgtcccaaaacagcttcctccattt

SEQ ID NO: 514749 - DNA, 120 bp, Artificial Sequence
  ENSG00000164736_14 (sequence is synthesized)
cctgaaagtttattgatcaaagaaatgttgtcctgggtgtgttttttcaatcttctaaaaaataaaatctggaatcctgcttttttgctctactagtacctctgtcacactagtcttatc

SEQ ID NO: 514750 - DNA, 120 bp, Artificial Sequence
  ENSG00000164736_15 (sequence is synthesized)
aaaaaccagttcttaagatcaatgttaagtttattagttaatgtaaatttctcatcctcgaaaagggtgaacataaatgcctttaaggagtatatctaaaaataaacattaggatatcta

SEQ ID NO: 514751 - DNA, 120 bp, Artificial Sequence
  ENSG00000164736_16 (sequence is synthesized)
agtttgatgtaattgtttcaggaaggaaaaaagaaaagcattctggaatgagcctacttcaagtaatcttagtttctaaaactaacagttaatattttcaattccagtatatcactttaa

SEQ ID NO: 514752 - DNA, 120 bp, Artificial Sequence
  ENSG00000164736_17 (sequence is synthesized)
gtagaaggggatgtccaagtaattttggttttctaactgttgaatcataagcttgacctgcccccagaggctttttggatgtttttatctgtgttttgccatctctttacactcctcgac

SEQ ID NO: 514753 - DNA, 120 bp, Artificial Sequence
  ENSG00000164736_18 (sequence is synthesized)
attcagtttaccttaatcttcacatttttacaccttgggaagtggcaagcatcgctgggtttaagataaaggagtcacaaaaactaatcaaaataaaatttgcattatgacaacttttaa

SEQ ID NO: 514754 - DNA, 120 bp, Artificial Sequence
  ENSG00000164741_0 (sequence is synthesized)
agtctgaatttagtagacagaagtcactaggaatgccttgacaggatcctgccttagctaaggctccctccagctgcagagggtgtttttgttagactcacacactgcgtgaaactgctc

SEQ ID NO: 514755 - DNA, 120 bp, Artificial Sequence
  ENSG00000164741_1 (sequence is synthesized)
agaatagagccatgatctcaaccacgaaatgggaacttagattttggagaaactaacggggacggacttctttcctagcctgagtgttgagcagtgtcatgccttggcgtttcagctcct

SEQ ID NO: 514756 - DNA, 120 bp, Artificial Sequence
  ENSG00000164741_2 (sequence is synthesized)
cgttgtctaggtggtgaaatgacagaactcattcgcttctttgattggtgattttgaaataatctttcatcaagttccatctcctttaccctcatatggaatatatctctctgtctgttg

SEQ ID NO: 514757 - DNA, 120 bp, Artificial Sequence
  ENSG00000164741_3 (sequence is synthesized)
ttaaactacgatgacatgtctgtagctatcagaaagagaagctgggaagaacatgtgacccactggatgggacagccttttaattctgatgatcgtaacacagcatgtcatcatggacta

SEQ ID NO: 514758 - DNA, 120 bp, Artificial Sequence
  ENSG00000164741_4 (sequence is synthesized)
gtagctgacagcttgcaggcaagtatggaaaaagatgcaactctaaatgtggaccgcaaagagaagtgtgtttcactacctgactgctgtcatggatcagagctgagagattttcctggg

SEQ ID NO: 514759 - DNA, 120 bp, Artificial Sequence
  ENSG00000164741_5 (sequence is synthesized)
aggccaatgggtcatctttcaaaggatgtggacgaaaatgacagccatgaaggtgaagatcagtttctttctctggaagccagcacagaaacactagtgcatgtttctgatgaggataac

SEQ ID NO: 514760 - DNA, 120 bp, Artificial Sequence
  ENSG00000164741_6 (sequence is synthesized)
aatgctgatttatgccttacagatgataaacaggttttaaatacccaagggcagaaaacatcaggccaacatatgatccaaggagcaggctccttagaaaaggcactgcccatcatacaa

SEQ ID NO: 514761 - DNA, 120 bp, Artificial Sequence
  ENSG00000164741_7 (sequence is synthesized)
agtaaccaagtttcttctaactcctggggaatagctggtgaaactgaattagcactggtaaaagaaagtggggagagaaaagttactgactctataagtaaaagcctggagctttgcaat

SEQ ID NO: 514762 - DNA, 120 bp, Artificial Sequence
  ENSG00000164741_8 (sequence is synthesized)
gaaataagcttaagtgaaataaaagatgcacccaaagtaaatgcagtggatactttgaacgtgaaagatattgcacctgagaaacaattgcttaactctgctgtaattgctcagcaacga

SEQ ID NO: 514763 - DNA, 120 bp, Artificial Sequence
  ENSG00000164741_9 (sequence is synthesized)
aggaaacctgacccccctaaagatgaaaatgaaagaagcacctgcaatgtagtacaaaatgagttcttggatactccttgcacaaacagaggactgccattattaaaaacagattttgga

SEQ ID NO: 514764 - DNA, 120 bp, Artificial Sequence
  ENSG00000164741_10 (sequence is synthesized)
agctgccttctgcagcctccttcctgccccaatggaatgtcagctgaaaatggcctggagaagagtggtttttcacaacatcaaaacaaaagtccaccaaaggtcaaggcagaagatggc

SEQ ID NO: 514765 - DNA, 120 bp, Artificial Sequence
  ENSG00000164741_11 (sequence is synthesized)
atgcagtgtttacaattaaaggagaccctggccacccaggaacccacagataaccaagtcagacttcgtaagagaaaggaaataagagaagatcgagatagggcgcggctggactccatg

SEQ ID NO: 514766 - DNA, 120 bp, Artificial Sequence
  ENSG00000164741_12 (sequence is synthesized)
gtgctgctgattatgaaactggaccagcttgatcaggacatagaaaatgccctcagcaccagctcctctccatcaggcacaccaacaaacctgcggcggcacgttcctgatctggaatca

SEQ ID NO: 514767 - DNA, 120 bp, Artificial Sequence
  ENSG00000164741_13 (sequence is synthesized)
ggatctgaaagtggagcagataccatttcagtaaatcagacacgagtaaatttgtcttctgacactgagtccacggacctcccatcttccactccagtagccaattctggaaccaaaccc

SEQ ID NO: 514768 - DNA, 120 bp, Artificial Sequence
  ENSG00000164741_14 (sequence is synthesized)
aagactacggctattcaaggtatttcagagaaggaaaaggctgaaattgaagccaaggaagcttgtgattggctacgggcaactggtttcccccagtatgcacagctttatgaagatttc

SEQ ID NO: 514769 - DNA, 120 bp, Artificial Sequence
  ENSG00000164741_15 (sequence is synthesized)
ctgttccccatcgatatttccttggtcaagagagagcatgattttttggacagagatgccattgaggctctatgcaggcgtctaaatactttaaacaaatgtgcggtgatgaagctagaa

SEQ ID NO: 514770 - DNA, 120 bp, Artificial Sequence
  ENSG00000164741_16 (sequence is synthesized)
attagtcctcatcggaaacgaagtgacgattcagacgaggatgagccttgtgccatcagtggcaaatggactttccaaagggacagcaagaggtggtcccggcttgaagagtttgatgtc

SEQ ID NO: 514771 - DNA, 120 bp, Artificial Sequence
  ENSG00000164741_17 (sequence is synthesized)
ttttctccaaaacaagacctggtccctgggtccccagacgactcccacccgaaggacggccccagccccggaggcacgctgatggacctcagcgagcgccaggaggtgtcttccgtccgc

SEQ ID NO: 514772 - DNA, 120 bp, Artificial Sequence
  ENSG00000164741_18 (sequence is synthesized)
agcctcagcagcactggcagcctccccagccacgcgccccccagcgaggatgctgccaccccccggactaactccgtcatcagcgtttgctcctccagcaacttggcaggcaatgacgac

SEQ ID NO: 514773 - DNA, 120 bp, Artificial Sequence
  ENSG00000164741_19 (sequence is synthesized)
tctttcggcagcctgccctctcccaaggaactgtccagcttcagcttcagcatgaaaggccacgaaaaaactgccaagtccaagacgcgcagtctgctgaaacggatggagagcctgaag

SEQ ID NO: 514774 - DNA, 120 bp, Artificial Sequence
  ENSG00000164741_20 (sequence is synthesized)
ctcaagagctcccatcacagcaagcacaaagcgccctcaaagctggggttgatcatcagcgggcccatcttgcaagaggggatggatgaggagaagctgaagcagctcaactgcgtggag

SEQ ID NO: 514775 - DNA, 120 bp, Artificial Sequence
  ENSG00000164741_21 (sequence is synthesized)
atctccgccctcaatggcaaccgcatcaacgtccccatggtacgaaagaggagcgtttccaactccacgcagaccagcagcagcagcagccagtcggagaccagcagcgcggtcagcacg

SEQ ID NO: 514776 - DNA, 120 bp, Artificial Sequence
  ENSG00000164741_22 (sequence is synthesized)
cccagccctgttacgaggacccggagcctcagtgcgtgcaacaagcgggtgggcatgtacttagagggcttcgatcctttcaatcagtcaacatttaacaacgtggtggagcagaacttt

SEQ ID NO: 514777 - DNA, 120 bp, Artificial Sequence
  ENSG00000164741_23 (sequence is synthesized)
aagaaccgcgagagctacccagaggacacggtgttctacatccctgaagatcacaagcctggcactttccccaaagctctcaccaatggcagtttctccccctcggggaataacggctct

SEQ ID NO: 514778 - DNA, 120 bp, Artificial Sequence
  ENSG00000164741_24 (sequence is synthesized)
gtgaactggaggacgggaagcttccacggccctggccacatcagcctcaggagggaaaacagtagcgacagccccaaggaactgaagagacgcaattcttccagctccatgagcagccgc

SEQ ID NO: 514779 - DNA, 120 bp, Artificial Sequence
  ENSG00000164741_25 (sequence is synthesized)
ctgagcatctacgacaacgtgccgggctccatcctctactccagttcaggggacctggcggatctggagaacgaggacatcttccccgagctggacgacatcctctaccacgtgaagggg

SEQ ID NO: 514780 - DNA, 120 bp, Artificial Sequence
  ENSG00000164741_26 (sequence is synthesized)
atgcagcggatagtcaatcagtggtcggagaagttttctgatgagggagattcggactcagccctggactcggtctctccctgcccgtcctctccaaaacagatacacctggatgtggac

SEQ ID NO: 514781 - DNA, 120 bp, Artificial Sequence
  ENSG00000164741_27 (sequence is synthesized)
aacgaccgaaccacacccagcgacctggacagcacaggcaactccctgaatgaaccggaagagccctccgagatcccggaaagaagggattctggggttggggcttccctaaccaggtcc

SEQ ID NO: 514782 - DNA, 120 bp, Artificial Sequence
  ENSG00000164741_28 (sequence is synthesized)
aacaggcaccgactgagatggcacagtttccagagctcacatcggccaagcctcaactctgtatcactacagattaactgccagtctgtggcccagatgaacctgctgcagaaatactca

SEQ ID NO: 514783 - DNA, 120 bp, Artificial Sequence
  ENSG00000164741_29 (sequence is synthesized)
ctcctaaagctaacggccctgctggagaaatacacaccttctaacaagcatggttttagctgggccgtgcccaagttcatgaagaggatcaaggttccagactacaaggaccggagtgtg

SEQ ID NO: 514784 - DNA, 120 bp, Artificial Sequence
  ENSG00000164741_30 (sequence is synthesized)
tttggatcaggttgggctcttcagaaaatcgggggtcaagtcccggattcaggctctgcgccagatgaatgaaggtgccatagactgtgtcaactacgaaggacagtctgcttatgacgt

SEQ ID NO: 514785 - DNA, 120 bp, Artificial Sequence
  ENSG00000164741_31 (sequence is synthesized)
ggcagacatgctgaagcagtattttcgagatcttcctgagccactaatgacgaacaaactctcggaaacctttctacagatctaccaatatgtgcccaaggaccagcgcctgcaggccat

SEQ ID NO: 514786 - DNA, 120 bp, Artificial Sequence
  ENSG00000164741_32 (sequence is synthesized)
caaggctgccatcatgctgctgcctgacgagaaccgggaggttctgcagaccctgctttatttcctgagcgatgtcacagcagccgtaaaagaaaaccagatgaccccaaccaacctggc

SEQ ID NO: 514787 - DNA, 120 bp, Artificial Sequence
  ENSG00000164741_33 (sequence is synthesized)
cgtgtgcttagcgccttccctcttccatctcaacaccctgaagagagagaattcctctcccagggtaatgcaaagaaaacaaagtttgggcaaaccagatcagaaagatttgaatgaaaa

SEQ ID NO: 514788 - DNA, 120 bp, Artificial Sequence
  ENSG00000164741_34 (sequence is synthesized)
cctagctgccactcaagggctggcccatatgatcgccgagtgcaagaagcttttccaggttcccgaggaaatgagccgatgtcgtaattcctataccgaacaagagctgaagcccctcac

SEQ ID NO: 514789 - DNA, 120 bp, Artificial Sequence
  ENSG00000164741_35 (sequence is synthesized)
tctggaagcactcgggcacctgggtaatgatgactcagctgactaccaacacttcctccaggactgtgtggatggcctgtttaaagaagtcaaagagaagtttaaaggctgggtcagcta

SEQ ID NO: 514790 - DNA, 120 bp, Artificial Sequence
  ENSG00000164741_36 (sequence is synthesized)
ctccacttcggagcaggctgagctgtcctataagaaggtgagcgaaggaccccctctgaggctttggaggtcagtcattgaagtccctgctgtgccagaggaaatcttaaagcgcctact

SEQ ID NO: 514791 - DNA, 120 bp, Artificial Sequence
  ENSG00000164741_37 (sequence is synthesized)
taaagaacagcacctctgggatgtagacctgttggattcaaaagtgatcgaaattctggacagccaaactgaaatttaccagtatgtccaaaacagtatggcacctcatcctgctcgaga

SEQ ID NO: 514792 - DNA, 120 bp, Artificial Sequence
  ENSG00000164741_38 (sequence is synthesized)
ctacgttgttttaagaacctggaggactaatttacccaaaggagcctgtgcccttttactaacctctgtggatcacgatcgcgcacctgtggtgggtgtgagggttaatgtgctcttgtc

SEQ ID NO: 514793 - DNA, 120 bp, Artificial Sequence
  ENSG00000164741_39 (sequence is synthesized)
caggtatttgattgaaccctgtgggccaggaaaatccaaactcacctacatgtgcagagttgacttaaggggccacatgccagaatggtacacaaaatcttttggacatttgtgtgcagc

SEQ ID NO: 514794 - DNA, 120 bp, Artificial Sequence
  ENSG00000164741_40 (sequence is synthesized)
tgaagttgtaaagatccgggattccttcagtaaccagaacactgaaaccaaagacaccaaatctaggtgatcactgaagcaacgcaaccgcttccaccaccatggtgtttgtttctagaa

SEQ ID NO: 514795 - DNA, 120 bp, Artificial Sequence
  ENSG00000164741_41 (sequence is synthesized)
cttttgccagtccttgaagaatgggttctgtgtctaatcctgaaacaaagaaaactacaagctggagtgtaggaattgactatagcaatttgatacatttttaaagctgcttcctgtttg

SEQ ID NO: 514796 - DNA, 120 bp, Artificial Sequence
  ENSG00000164741_42 (sequence is synthesized)
ttgagggtctgtattcatagaccttgactggaatatgtaagactgtgcaaaaaaaaaaaaaaaatttatgtgtattcttattcaaattgcttctgagaagcaaaactctttaaatacatt

SEQ ID NO: 514797 - DNA, 120 bp, Artificial Sequence
  ENSG00000164741_43 (sequence is synthesized)
atggaagataatgaagatacttcattctcttgtgatatcagtgtatgcgtacctgtgtcgctttatttgcagtgtgttgagggactggtgtatccactggaatagttggtactcttggat

SEQ ID NO: 514798 - DNA, 120 bp, Artificial Sequence
  ENSG00000164741_44 (sequence is synthesized)
gtgttttctcaccaagatgagcaaagaaaggtttgcacagaggagtgtgaatgtgtgtttgttgctggctgaatggcaatagatgtctaaggtggattcagtgtctggcacactgagaca

SEQ ID NO: 514799 - DNA, 120 bp, Artificial Sequence
  ENSG00000164741_45 (sequence is synthesized)
cctccaagaaggagattgatgcatcaggttcagtttaacctggaatatctgactacccctgaatccacccagaaagggggcccaacacccttgtccatttatgggtattttttttcgaag

SEQ ID NO: 514800 - DNA, 120 bp, Artificial Sequence
  ENSG00000164741_46 (sequence is synthesized)
ttattaagcatattccttttccacgaacctcttctgtactttgattgtaataggttggctcttacacccattccaaatgcagtttatttttagacccgattgcaaatagtgatgtagttt

SEQ ID NO: 514801 - DNA, 120 bp, Artificial Sequence
  ENSG00000164741_47 (sequence is synthesized)
gacccgattgcaaatagtgatgtagttttaaccagtatggattagttcagggatgaactgctccctctagccttactggctctgatccacagggttttgttttgttttgttttgtttttt

SEQ ID NO: 514802 - DNA, 120 bp, Artificial Sequence
  ENSG00000164741_48 (sequence is synthesized)
cgataacacttactcttaaatcaagcatcaacactttttccctgttagaattctttgcatttttgtgtttgtaacagaaacgccttaagacactatgtttgggaatataggaaactatgt

SEQ ID NO: 514803 - DNA, 120 bp, Artificial Sequence
  ENSG00000164741_49 (sequence is synthesized)
gtgtcccaaggaaatccctgtaaatttaactcacctacaaaaggctttttccccgcctttggttgttaacggcattcctgaaagccacatgtgtttattcattgggcttgttcttatcag

SEQ ID NO: 514804 - DNA, 120 bp, Artificial Sequence
  ENSG00000164741_50 (sequence is synthesized)
caaataggttttctggttttatgactttttgtcttattttatttttcctacatttctttttttttttttttcctttagaatgccctggaaatatatttaagtggtaatgaaaaatagtaa

SEQ ID NO: 514805 - DNA, 120 bp, Artificial Sequence
  ENSG00000164741_51 (sequence is synthesized)
tcatagtaaaacgcaacaagaagaaaaccaacccaaaccagtgaagttttttagaacctttagaagggtggtctttattcaggttttactgtaatggtaaggattgactcaagagacagt

SEQ ID NO: 514806 - DNA, 120 bp, Artificial Sequence
  ENSG00000164741_52 (sequence is synthesized)
attagtaaatttattgtgtatggatcaaaagtgaataatgtatgaatgagagctgtaagaaggatttttattttgttataatttagttaccattttcagtgttatttcaaaggttctttg

SEQ ID NO: 514807 - DNA, 120 bp, Artificial Sequence
  ENSG00000164741_53 (sequence is synthesized)
aagaattttggggcagggcatcagattagagttttaaaatttgagtattttggatatcagtgttcctcatgaagatatacatggatattcaattttgatggcttccagatttgtaagatt

SEQ ID NO: 514808 - DNA, 120 bp, Artificial Sequence
  ENSG00000164741_54 (sequence is synthesized)
gtatgttgtatataccattctattaagaaacatgtccactgtgctttcaaacatagataaagcatgataaagattattatttaagatatacttgtatttatacctcagatattcttttgg

SEQ ID NO: 514809 - DNA, 120 bp, Artificial Sequence
  ENSG00000164741_55 (sequence is synthesized)
gttttgtacctcaaggcttttttcttcttattgtaaatacactttacgtgaatacagtctaagtgaagaaaataaataaaaggaagaggtttataacttgctctatatctgtacagatta

SEQ ID NO: 514810 - DNA, 120 bp, Artificial Sequence
  ENSG00000164741_56 (sequence is synthesized)
taatcaataagtgcactattattaaatgtttaaagtaagggaaaagtctgggctgccttccttaatattgcatctcactcccacccttaaaaccacagattgcaaagcatagcattttag

SEQ ID NO: 514811 - DNA, 120 bp, Artificial Sequence
  ENSG00000164741_57 (sequence is synthesized)
catcaactacaatcaaaagagcgatttgctgaaggaaaaatcggactgcaaatcattccaaggccaaactgcaactgagccacccactcccaaacaggaaaccctggtgaaggttcagga

SEQ ID NO: 514812 - DNA, 120 bp, Artificial Sequence
  ENSG00000164741_58 (sequence is synthesized)
agcacggagattctctccaacaaaggtccagttaggaaacgacgctgagaggatgacgacaacgtgcaacagcagaaagatgcttgcaagcagagtcagggtcaccagtgaatgccacaa

SEQ ID NO: 514813 - DNA, 120 bp, Artificial Sequence
  ENSG00000164741_59 (sequence is synthesized)
aagttctctttcccactgtttaatttgacaagagaagaatttgaaggatatgaacattttcaagaactctgctgaggtcacttagagcgccatcacaacttatttgtgtgactaattgcc

SEQ ID NO: 514814 - DNA, 120 bp, Artificial Sequence
  ENSG00000164741_60 (sequence is synthesized)
tagattgtaagctctttgagggcagggcttgtctcttacacatctttataatcccctgcagcggctttcagtattttgtacttgtaggcacctaataaatttattatttgctatactgaa

SEQ ID NO: 514815 - DNA, 120 bp, Artificial Sequence
  ENSG00000164741_61 (sequence is synthesized)
gaggctgcggccacgaggaagaggggcggggggcggagcctgggaatggggcggggccggagaacagcccgtcgctaaggcctgcgacccagacagcggggaggaggcggtgccgcccgc

SEQ ID NO: 514816 - DNA, 120 bp, Artificial Sequence
  ENSG00000164741_62 (sequence is synthesized)
cgcccctcggggggtgggcccagcgggagggcccggctggcggagcgcgcgggagacagttcgctccgactgcccgagcgagggcgcttcgctcccagccaggacatggccgcacctctc

SEQ ID NO: 514817 - DNA, 120 bp, Artificial Sequence
  ENSG00000164741_63 (sequence is synthesized)
cacctctccgcatcaggagcgccggctcacggacttctcgcccaactccctgagcgctccctcgtttcgatctttagaaaaccccgctttctttctggggccgtgacgaggggcagggag

SEQ ID NO: 514818 - DNA, 120 bp, Artificial Sequence
  ENSG00000164741_64 (sequence is synthesized)
cggcgagcaaggatgcgttgaggaccgcgagggcgcgcgtctcgggtgccgccgtgggtcccgacgcggaagccgagccgcctccgcctgcctcgacttccccacagcgcttccgccgcc

SEQ ID NO: 514819 - DNA, 120 bp, Artificial Sequence
  ENSG00000164741_65 (sequence is synthesized)
agttggcgcttcccggggccgcagtgccagccgcaatgccggcctcctgaaggcaggcgacagcctgcggccgggagcacagcgcggggcggagtaccgaggcatggtcgcggcgcccgg

SEQ ID NO: 514820 - DNA, 120 bp, Artificial Sequence
  ENSG00000164741_66 (sequence is synthesized)
gctgcgctgaaggcgtctgcgagcggatgggggaccccaaggcccacgtgatggcgcgccccctgcgagcccctctccggaggtcctttagcgatcacatcagggactccacggccagag

SEQ ID NO: 514821 - DNA, 120 bp, Artificial Sequence
  ENSG00000164741_67 (sequence is synthesized)
actttaaaattaaaatcatgaagtacaagggggaaattgatactactggcatattatgagcagcctcctgctcatgccctgctccctgctggctgccagccccagtgtgtgaatggctcc

SEQ ID NO: 514822 - DNA, 120 bp, Artificial Sequence
  ENSG00000164741_68 (sequence is synthesized)
gctgttgcatatagtgctggggtggacctggtttcaggacaccagggagcctggggtcggctcacaaaacccccattgttccttttccatcttcctttagaaacctaaagatgtaatgtt

SEQ ID NO: 514823 - DNA, 120 bp, Artificial Sequence
  ENSG00000164741_69 (sequence is synthesized)
ctccgggtcatcagcagcagattttattttgacttcaggtcattcactgttgagctctggagttggctcccattgtgttaggctctcattgctgttttcccatcatgtgttatctgcgcc

SEQ ID NO: 514824 - DNA, 120 bp, Artificial Sequence
  ENSG00000164741_70 (sequence is synthesized)
ttttgaccctaaatgctttcgatctcatcaagaactcagaagtgattcttacccttttttcaagacaaaagggaccttgtttttcacactctatcagatgcacctaattaggggccgtgc

SEQ ID NO: 514825 - DNA, 120 bp, Artificial Sequence
  ENSG00000164741_71 (sequence is synthesized)
ttgcttggattaaaaagatatgaagatggttcttttgccctgttatgcagatgtgtaattcaacgactacccacttggtcaaaccatcaaaatatgtaaaaattaaagaataataatcta

SEQ ID NO: 514826 - DNA, 120 bp, Artificial Sequence
  ENSG00000164741_72 (sequence is synthesized)
caaggtatttcagagaaggaaaaggctggtaagttgacattttggttctgttttctcgccaatctattttagaataaatttcaccttaaaataggcattttattaaatatataaaatgta

SEQ ID NO: 514827 - DNA, 120 bp, Artificial Sequence
  ENSG00000164741_73 (sequence is synthesized)
tacatctcatgaatatatgggaaaatgttgtttaaattctgtaaaagaaatttgttttgctcaatatgtaagaaaaatatacgtggttttctgacataatgacattgtgttagaataaga

SEQ ID NO: 514828 - DNA, 120 bp, Artificial Sequence
  ENSG00000164741_74 (sequence is synthesized)
tatgtgtttcttggggtcttccttgtaactgcaaccacaatttttttttcttaagcaaaagaattaaatgttgatcaaggttctggggaatgaatttggaaattagttattaataattac

SEQ ID NO: 514829 - DNA, 120 bp, Artificial Sequence
  ENSG00000164741_75 (sequence is synthesized)
caaggtttatttttactcttaatgacttagtagccacagaaaaagatgtaattgatgcttaaagctgatgccatactatcaaaaatatagtgatgaagcaatgtgaataattgtattgaa

SEQ ID NO: 514830 - DNA, 120 bp, Artificial Sequence
  ENSG00000164741_76 (sequence is synthesized)
gaaaaaaattatagtatttttctgtgttctgtgctttaattataattatttaacagtattatgggaaatggacaaggactgatgagaaatgaaaatatgaaaaattagacatggattggt

SEQ ID NO: 514831 - DNA, 120 bp, Artificial Sequence
  ENSG00000164741_77 (sequence is synthesized)
agatctatgtgtttttaaaaaatcatactatcttatgtgttctgtgtaataaaaacgaaaacagattaaaggtatattatctaacttgaagtacatcacttagtttgtagacatttgtga

SEQ ID NO: 514832 - DNA, 120 bp, Artificial Sequence
  ENSG00000164741_78 (sequence is synthesized)
gattatcagacaacacattggcagtgagttcatctgctctactctgctttggaataacacatgtgattaaccagataggcattttccaaaaacaaactatgtcactgaagaatgcaagac

SEQ ID NO: 514833 - DNA, 120 bp, Artificial Sequence
  ENSG00000164741_79 (sequence is synthesized)
tgtttctttagagccttccatgcttaacttgaaagctgtcaacccaggaggctgaaacagagctagattatgaatcctgagtgaatagctcattctttgcgcccatgcttttgctgcatg

SEQ ID NO: 514834 - DNA, 120 bp, Artificial Sequence
  ENSG00000164741_80 (sequence is synthesized)
ctgccatgtggtacaaggctgagaggtatgcactatgatagctaatgaagcacttcctttatatcgcactgaccagaactcttacttgaagcccgtatattatgccactgaaatctcaca

SEQ ID NO: 514835 - DNA, 120 bp, Artificial Sequence
  ENSG00000164741_81 (sequence is synthesized)
atgtgagcttttgttctggctagcagaggcagttgcttgtcctttctgtagctaaatttcatgcaccaaagttgttagaccctttactaatatgtgtaggtctaagtcataaaaccagct

SEQ ID NO: 514836 - DNA, 120 bp, Artificial Sequence
  ENSG00000164741_82 (sequence is synthesized)
tctgctatgtttgcaagaatgttttgttttgttttgtctgccttttcaatgcagcatcccctaaagccaatcatttgtaattttgaggccattgagagataaaaggcttgaagtaaaagt

SEQ ID NO: 514837 - DNA, 120 bp, Artificial Sequence
  ENSG00000164741_83 (sequence is synthesized)
catcggccctcctgaactcactcatctatgtcaaatatagtgatacagttaacattctaagaacagagattgagaagaaacttaatttaggatgaaaagaatggcatcagatggaccaaa

SEQ ID NO: 514838 - DNA, 120 bp, Artificial Sequence
  ENSG00000164741_84 (sequence is synthesized)
attaattacactgtgtaatcctcgatgtaactgagaaatattcaatgtgacccatttgttatatttaaacatattattatcataaggtattatgtaattagggcctcctttcctggactg

SEQ ID NO: 514839 - DNA, 120 bp, Artificial Sequence
  ENSG00000164741_85 (sequence is synthesized)
gattttgtgtctcattgcatgctttcagaaagtgacctaaagaacaatacatagtgattgtcataacaatctatgaaatataggcttcggttaaccaaaatgcaaatatcaaatatttaa

SEQ ID NO: 514840 - DNA, 120 bp, Artificial Sequence
  ENSG00000164741_86 (sequence is synthesized)
aagttcctcaaaacttataaatttttaaatgaaaaaattatgaaccacattctcaaacttgaggtgtatcaagtccttcagggagtcctccatggttccttcctctccctcattgaacac

SEQ ID NO: 514841 - DNA, 120 bp, Artificial Sequence
  ENSG00000164741_87 (sequence is synthesized)
atcccatcagtcacaaaataccataactacacatccccaaactggcggcttctcttcaatcccttctccaagcccttggtatcagtagccaccatttttcactgtgtgaaagctgatttt

SEQ ID NO: 514842 - DNA, 120 bp, Artificial Sequence
  ENSG00000164741_88 (sequence is synthesized)
acaaattgggtcattcttgtaatattcaggtaaaacagaatagaagaaccagggagaaagcactcaagacatatagcacctgctccaagaattaaatcttccacaagcccagctgctgaa

SEQ ID NO: 514843 - DNA, 120 bp, Artificial Sequence
  ENSG00000164741_89 (sequence is synthesized)
actgcccattggaacatgaaaccagtttttctctcatagctactgaaacaacctgctatgagtctaaggccagttttaaccaccactgtcactcatgaatcagagcttgccagctcccca

SEQ ID NO: 514844 - DNA, 120 bp, Artificial Sequence
  ENSG00000164741_90 (sequence is synthesized)
gaattttactagtgccaatgaactttctggaaaaacaatatgtaacatttttccttttagaaaacctccaaccttctccttgttctttagacaaagatcatctggtttgtgtgtatgccc

SEQ ID NO: 514845 - DNA, 120 bp, Artificial Sequence
  ENSG00000164741_91 (sequence is synthesized)
cgagttgcaattcttgcttcccaaataaaatttagagatttgtctctagattgcatttaacttagacacctggatctaacacacctattattttagcttgttttcagactgctataaaga

SEQ ID NO: 514846 - DNA, 62 bp, Artificial Sequence
  ENSG00000164741_92 (sequence is synthesized)
acacctattattttagcttgttttcagactgctataaagagatacccaagactgggtaattt

SEQ ID NO: 514847 - DNA, 120 bp, Artificial Sequence
  ENSG00000164741_93 (sequence is synthesized)
actgacttcgtgccctccatgttccttgacagcctgggcctctcctactggattaatacctgatgagtacctgatcacgcaacagtgaaacaacacaagaaattgaagccaaggaagctt

SEQ ID NO: 514848 - DNA, 120 bp, Artificial Sequence
  ENSG00000164741_94 (sequence is synthesized)
taaggaaatccatcagcttccttaagactgtagaccccaattctccaggttcaaggtggaaggacgctcctaactgaggaaacggacctgtcaacccccactcttagaagatctagaaca

SEQ ID NO: 514849 - DNA, 120 bp, Artificial Sequence
  ENSG00000164741_95 (sequence is synthesized)
gcactgtccaggagaactgtctggatgataggaatgttctttatctgcacaggccaatacagtagggccgtgcccaagttcatgaagaggatcaaggttccagactacaaggaccggagt

SEQ ID NO: 514850 - DNA, 120 bp, Artificial Sequence
  ENSG00000164741_96 (sequence is synthesized)
cgttcttgagaatcaaccttgaaagttaaagacaaggccacctgccagccccaccctcccacctcccctgcgtgcttgcctgcggcgctgcgtttccctttgaaaacgcgaggtcacctg

SEQ ID NO: 514851 - DNA, 120 bp, Artificial Sequence
  ENSG00000164741_97 (sequence is synthesized)
agatgatagttcacaaaatttgtgacggacgaaggatgcagataccatgagcggctttagagatgtgattcaggaacgctgccatgctagatggaagcagttgtaagtgtttaatgtcag

SEQ ID NO: 514852 - DNA, 120 bp, Artificial Sequence
  ENSG00000164741_98 (sequence is synthesized)
agagccctggatgtcatttggaaaaacactagagacagacggctggcagcagcggtaaaatcagtaaagttggaagtggatgaagataagagcacaaagggatccaatttttccaactcg

SEQ ID NO: 514853 - DNA, 120 bp, Artificial Sequence
  ENSG00000164741_99 (sequence is synthesized)
gaagtggcaattggtttgtctccttacacctttccccagaagaggcttttccatgttgctggagaagaaaacatcacctaggccggtgtgtgcctggcagaacactgcactccaatttcc

SEQ ID NO: 514854 - DNA, 120 bp, Artificial Sequence
  ENSG00000164741_100 (sequence is synthesized)
agtttcaccaatgataagagaaacctgagataccaacagtcagcacagaccacaggtcatgtttgacagtgcaaagctgcaaggtccttcagaccaagcaaataggagagtgggctccaa

SEQ ID NO: 514855 - DNA, 120 bp, Artificial Sequence
  ENSG00000164741_101 (sequence is synthesized)
agcctgtcaacagggtcccgaaagctaaaagggaaactttcctaaagaacccgggaaacaatgtaaggatgctaaattggtcatttacggatgccctccctggttagaagaaacttcctt

SEQ ID NO: 514856 - DNA, 120 bp, Artificial Sequence
  ENSG00000164742_0 (sequence is synthesized)
agcgggcggccgggacaagccgccggcgcgggctccgggcgtgcgacgaggagttcgcttgcccagagctggaggcgctgttccgcggctacacgctgcggctggagcaggcggccacgc

SEQ ID NO: 514857 - DNA, 120 bp, Artificial Sequence
  ENSG00000164742_1 (sequence is synthesized)
ggcgggcgcgctggcgctggccgagctgctgggcgcgccggggcccgcgcccggcctggccaagggctcacacccggtgcactgcgtcctcttcctggcgctgctcgtggtaaccaacgt

SEQ ID NO: 514858 - DNA, 120 bp, Artificial Sequence
  ENSG00000164742_2 (sequence is synthesized)
tcctggcgctgctcgtggtaaccaacgtccggtccctgcaggtgccccagctgcagcaggtcggccagctggcgctgctcttcagcctcaccttcgcgctgctctgctgtcctttcgcgc

SEQ ID NO: 514859 - DNA, 120 bp, Artificial Sequence
  ENSG00000164742_3 (sequence is synthesized)
tgggcggccccgcccggggttccgccggggccgctggggggccagcgaccgccgaacaaggggtttggcagctccttttggtcaccttcgtgtcctatgccttgctgcccgtgcgcagcc

SEQ ID NO: 514860 - DNA, 120 bp, Artificial Sequence
  ENSG00000164742_4 (sequence is synthesized)
tgctggccataggctttgggctcgtggtggctgcgtcgcacttgctggtcacagccaccttggtccccgccaagcgcccacgtctctggaggacgctcggtgccaatgccttgctcttcg

SEQ ID NO: 514861 - DNA, 120 bp, Artificial Sequence
  ENSG00000164742_5 (sequence is synthesized)
tcggtgtgaacatgtatggggtctttgtgcggattctgactgagcgttcacagaggaaggcgttcctgcaggcccggagctgcattgaggaccgactgaggctggaggatgagaacgaga

SEQ ID NO: 514862 - DNA, 120 bp, Artificial Sequence
  ENSG00000164742_6 (sequence is synthesized)
agcaggagcggctcctcatgagcctcctgccccggaacgttgccatggagatgaaggaggacttcctgaagccccctgagaggattttccacaagatttacatccagaggcacgacaatg

SEQ ID NO: 514863 - DNA, 120 bp, Artificial Sequence
  ENSG00000164742_7 (sequence is synthesized)
tgagcatcctgtttgctgacatcgtgggtttcacgggcttggcatcccagtgcacagcccaggagctggtgaaactcctcaatgagctcttcggcaagttcgatgaattagccacggaga

SEQ ID NO: 514864 - DNA, 120 bp, Artificial Sequence
  ENSG00000164742_8 (sequence is synthesized)
accactgtcgccgcatcaagattctcggggactgctactactgcgtgtcgggcctcacccagcccaagactgaccatgcccactgctgtgtggagatgggactcgacatgattgatacca

SEQ ID NO: 514865 - DNA, 120 bp, Artificial Sequence
  ENSG00000164742_9 (sequence is synthesized)
tcacatctgtggctgaagccaccgaggtggatctgaacatgcgtgtgggtctgcacacgggcagggtcctctgtggtgtcctgggcttgcgcaagtggcagtacgacgtgtggtccaatg

SEQ ID NO: 514866 - DNA, 120 bp, Artificial Sequence
  ENSG00000164742_10 (sequence is synthesized)
atgtgaccttggccaatgtcatggaagccgctggcctgccagggaaggttcatatcacaaagacgaccctagcgtgcttgaatggggactacgaggtagaaccgggttacggacatgaga

SEQ ID NO: 514867 - DNA, 120 bp, Artificial Sequence
  ENSG00000164742_11 (sequence is synthesized)
ggaacagtttcttgaaaactcataacatcgaaaccttttttattgtgccatcccatcgccgaaagatatttccaggcctgattctctcagatataaaaccggccaaaaggatgaagttca

SEQ ID NO: 514868 - DNA, 120 bp, Artificial Sequence
  ENSG00000164742_12 (sequence is synthesized)
agactgtctgctacctgctggtgcagctcatgcactgccggaaaatgttcaaggccgagatccccttctccaatgtcatgacctgcgaggacgatgacaagcggagggcattaagaacag

SEQ ID NO: 514869 - DNA, 120 bp, Artificial Sequence
  ENSG00000164742_13 (sequence is synthesized)
cctcggaaaaactcagaaaccgctcatctttttctaccaacgttgtctacaccaccccgggcactcgcgtcaacaggtacatcagccgcctcttagaagcccgccagacagagctggaga

SEQ ID NO: 514870 - DNA, 120 bp, Artificial Sequence
  ENSG00000164742_14 (sequence is synthesized)
tggcagacctgaacttctttaccctgaagtacaaacatgtcgaacgggagcaaaagtaccaccagcttcaggacgagtatttcaccagcgccgttgtcctcaccctcatcctggctgcct

SEQ ID NO: 514871 - DNA, 120 bp, Artificial Sequence
  ENSG00000164742_15 (sequence is synthesized)
tatttggccttgtctaccttctaatattcccacagagtgtggtcgtcctgctcctgctagtattctgcatctgcttcctggtggcctgtgtcctgtacctgcacatcacccgggtccagt

SEQ ID NO: 514872 - DNA, 120 bp, Artificial Sequence
  ENSG00000164742_16 (sequence is synthesized)
gttttccagggtgcctgacgattcagattcgcactgtcctgtgtattttcatagtggtcttaatctactcagtagcccaaggttgtgtggtgggctgcctgccttgggcctggagctcca

SEQ ID NO: 514873 - DNA, 120 bp, Artificial Sequence
  ENSG00000164742_17 (sequence is synthesized)
agcccaacagttccctggtggtcctttcgtctgggggccagcgcacagccctgcccaccctgccctgcgagtctacacaccatgccctgctctgctgcctggtgggcaccctcccgctag

SEQ ID NO: 514874 - DNA, 120 bp, Artificial Sequence
  ENSG00000164742_18 (sequence is synthesized)
ccatatttttccgggtgtcctccttgccaaaaatgatcctgctctccgggctcaccacgtcctacatcctcgttctggagctcagcggatacaccaggactgggggtggtgccgtctccg

SEQ ID NO: 514875 - DNA, 120 bp, Artificial Sequence
  ENSG00000164742_19 (sequence is synthesized)
ggcgcagctacgagccgattgtggccatcctgctcttctcctgtgcgctggccctgcatgccaggcaggtggacatcaggctgaggctggactacctctgggccgcacaggcagaggagg

SEQ ID NO: 514876 - DNA, 120 bp, Artificial Sequence
  ENSG00000164742_20 (sequence is synthesized)
agcgagaggacatggagaaggtgaagctggacaacaggcgcatcctcttcaacctcctgccggcccacgtcgcccagcacttcctcatgtccaaccctcggaacatggacctctactacc

SEQ ID NO: 514877 - DNA, 120 bp, Artificial Sequence
  ENSG00000164742_21 (sequence is synthesized)
agtcctactcccaggtgggcgtcatgtttgcctccatccccaacttcaatgacttctacatcgagctggacggcaacaacatgggggtggagtgtctgcggcttctcaacgagatcatcg

SEQ ID NO: 514878 - DNA, 120 bp, Artificial Sequence
  ENSG00000164742_22 (sequence is synthesized)
ccgactttgacgagctcatggaaaaagacttttacaaggacatagagaagatcaagaccatcgggagcacctacatggccgctgtggggctagcgcccacctcggggaccaaggctaaga

SEQ ID NO: 514879 - DNA, 120 bp, Artificial Sequence
  ENSG00000164742_23 (sequence is synthesized)
agtccatctcctcccacctgagcacgctggcggactttgccattgagatgtttgacgttctggatgaaatcaactaccagtcttacaacgactttgtcctccgagttggcatcaatgttg

SEQ ID NO: 514880 - DNA, 120 bp, Artificial Sequence
  ENSG00000164742_24 (sequence is synthesized)
gccctgtggtggctggagtgattggcgctcgcaggccccagtacgacatctggggaaacacagtcaacgtggccagtcggatggatagcacaggggtccagggcagaatccaggtgactg

SEQ ID NO: 514881 - DNA, 120 bp, Artificial Sequence
  ENSG00000164742_25 (sequence is synthesized)
aggaagtccaccggctgctgagaaggtgcccctaccactttgtgtgccgaggcaaagtcagtgtcaagggcaaaggcgagatgttgacatactttctagaaggcaggactgatggaaacg

SEQ ID NO: 514882 - DNA, 120 bp, Artificial Sequence
  ENSG00000164742_26 (sequence is synthesized)
gctcccaaatcaggtccctgggcttggatcggaaaatgtgtccatttgggagagctggccttcagggcagacgtccccccgtgtgccccatgcctggcgtctcagtcagggctgggctcc

SEQ ID NO: 514883 - DNA, 120 bp, Artificial Sequence
  ENSG00000164742_27 (sequence is synthesized)
ctccacactccccaggccagtacctgccctctgcagcagctgggaaggaggcttagtggagcccacgtgggcctctggggtgcacatggggtgggaatgctccgggggtgacacaggcca

SEQ ID NO: 514884 - DNA, 120 bp, Artificial Sequence
  ENSG00000164742_28 (sequence is synthesized)
cggtggctccagccaggaccagccagaccagcagagcagggagccacttgccagggtggaggaggagcattgtccaggcatggcctgtggcccgagggccaaccaccgagcaggcacagc

SEQ ID NO: 514885 - DNA, 120 bp, Artificial Sequence
  ENSG00000164742_29 (sequence is synthesized)
acagcagtgactcggtgaggggaggacacccgactgtgcacacttccaggcctccctggagaggtgtccactccatccttccctccgtggcgtagggagcactgtttctttccagcaagc

SEQ ID NO: 514886 - DNA, 120 bp, Artificial Sequence
  ENSG00000164742_30 (sequence is synthesized)
ctgttcaggtttggccaggtcggcatcaatgtaaggaccttcagagcatcccagggttacagcaagagccactgaggtgtggctggcagagcaactgaggagctctgcgagagtgtgccc

SEQ ID NO: 514887 - DNA, 120 bp, Artificial Sequence
  ENSG00000164742_31 (sequence is synthesized)
tctgagacagccctgtccgccccgcccaggtgggacctgacatacaggcggctccagccctgggcagcggcttcaagagccagagtgggaagtcaggcctctctgggaaggtcacaaggc

SEQ ID NO: 514888 - DNA, 120 bp, Artificial Sequence
  ENSG00000164742_32 (sequence is synthesized)
ctggggttgttcacaccacaggcacaatacagagctgtccactcttgaactggaccgtctggggagaattgagaagctgcctctcactgcatggatagtggtggctgctggctttcaagc

SEQ ID NO: 514889 - DNA, 120 bp, Artificial Sequence
  ENSG00000164742_33 (sequence is synthesized)
gtggttttttgctaagagccagaggcaggtcttctggagttctcaggggggccctgtgaccccctctccacaaccatggccagcatcggcttcttgctgcacctgtgcattctccacccc

SEQ ID NO: 514890 - DNA, 120 bp, Artificial Sequence
  ENSG00000164742_34 (sequence is synthesized)
tccgccaatggcttccagctcctaaaacacctggacattccccatcctgcaccggcactgtgtttgttcagagaaaacgaagggtgtcatttcttcttttccctgtggcatcgtggatcc

SEQ ID NO: 514891 - DNA, 120 bp, Artificial Sequence
  ENSG00000164742_35 (sequence is synthesized)
tttacatttagcaacaacagtgtgaggctccacttctgttgaatatgagcggctgtcacacccatgagcaagtttccttgatggaagatgctgtttctccggcagaaccaaccctccagg

SEQ ID NO: 514892 - DNA, 120 bp, Artificial Sequence
  ENSG00000164742_36 (sequence is synthesized)
acgaagtttcagaattggctgatggtcgtgagtgcaggtgtccctgttgtaatttgcagggaaattgactgcaggtgatagtgttgacgtctgacgtctgacaacctcctatgtgcatgt

SEQ ID NO: 514893 - DNA, 120 bp, Artificial Sequence
  ENSG00000164742_37 (sequence is synthesized)
ctaaatagtcacaatgaagatgaaaataaggatgatggggacggggtccaggagggccactgggaaggcactatccagaaatagtggacagaggtctggcatgtggaaaccttggatctc

SEQ ID NO: 514894 - DNA, 120 bp, Artificial Sequence
  ENSG00000164742_38 (sequence is synthesized)
ggtcacagggaggaaggcagctagaaatgggagggaagcttctgggtaggcaccatagtaggggaatgtctaaagacccactgctctgagatgtggtcagagaggtttctgtggactgca

SEQ ID NO: 514895 - DNA, 120 bp, Artificial Sequence
  ENSG00000164742_39 (sequence is synthesized)
gatgaggcctgagccctgcctatgctcaaagccagcagggttgggggtccgcctcctcactgctcctcaacagctgtaaccctttcctgagggccccgacttttcagaataggagcagag

SEQ ID NO: 514896 - DNA, 120 bp, Artificial Sequence
  ENSG00000164742_40 (sequence is synthesized)
agaagcccagacttccttccctggagtgtagacctgtgtgtgggacctgctccaggctgatccctgtccgcacaggtgggtgatgtccttggctgctgccgtcagaggcagccccctgca

SEQ ID NO: 514897 - DNA, 120 bp, Artificial Sequence
  ENSG00000164742_41 (sequence is synthesized)
cagggaggggctgatcctgcctcagctgtgtggccatgtgggggcagcaggggcctgggccatagctgggggaggccagaccctgagggctttgcagggcggccagtgcagtgatgcctg

SEQ ID NO: 514898 - DNA, 120 bp, Artificial Sequence
  ENSG00000164742_42 (sequence is synthesized)
gcgcttccagctgagacaggagtccggacagaggtgggcagggtggatggcttcgggcagggaaggcgggtagaggctgcatgtgggggcccctgtctgcctgtccttagggtgtggatt

SEQ ID NO: 514899 - DNA, 120 bp, Artificial Sequence
  ENSG00000164742_43 (sequence is synthesized)
aggctctggcttctgtgatggtgcaagaggcaggatggtctccagacaccttcttgcagagtgattttgaccaatgcctttccagcaccttcccctggttatgacagggagctcccaggc

SEQ ID NO: 514900 - DNA, 120 bp, Artificial Sequence
  ENSG00000164742_44 (sequence is synthesized)
caggccacatgaccccacaggtaggctgaccccatggacccactggagactttgagggcagagctcgggcacctttcatcttccttgggtggtcctcatgtcgctgtccgctcatgttcc

SEQ ID NO: 514901 - DNA, 120 bp, Artificial Sequence
  ENSG00000164742_45 (sequence is synthesized)
tggtgttctggcatcaccttgtgccggtgggggctgggctcccgtgaggtcctagggcagaaggaggtgcttgcagggcctctcgctgctactgggacatccacaggacctaatgtttat

SEQ ID NO: 514902 - DNA, 120 bp, Artificial Sequence
  ENSG00000164742_46 (sequence is synthesized)
gtggaatctccaggctgccatcgagggctcctgagctcatcctgaggacccagggtccatctgagctggctgtgggctgagatcctggctggggccctgctgtcaacctctcctccaggc

SEQ ID NO: 514903 - DNA, 120 bp, Artificial Sequence
  ENSG00000164742_47 (sequence is synthesized)
cctgccttgtccctgctcctgtgctttcctctcttcaggacaaatggtttgtccttatggtcccctttccactaggattttctcatcctcatctgtctatcccagccggatttaaagcag

SEQ ID NO: 514904 - DNA, 120 bp, Artificial Sequence
  ENSG00000164742_48 (sequence is synthesized)
tcacttcagacaggagccacagggagcctgtgagggagtagtgcggtggtggtgagtgtggctgccctggctcccccagctcaccgtggtgctgtccttgacccacgagctgttgagaag

SEQ ID NO: 514905 - DNA, 120 bp, Artificial Sequence
  ENSG00000164742_49 (sequence is synthesized)
ggtgcagagcccctggcacagccaaccctgttgcccccagtgccgctgcccagcttcggccatccaggtggtgggtagacagaggagtgaaccccaaaggtgtccatgccccagttctaa

SEQ ID NO: 514906 - DNA, 120 bp, Artificial Sequence
  ENSG00000164742_50 (sequence is synthesized)
tagggatctaaggatgggaggggaacttggtttatctgggtgggctcagtgaccccttggaatggctgagggaggcaggagagcctggaaagattcgaagtgtcacagagatggtgccgt

SEQ ID NO: 514907 - DNA, 120 bp, Artificial Sequence
  ENSG00000164742_51 (sequence is synthesized)
cattgctggcttaaagacaaggggccaggagccaacaccagaggccactccacaaccccagcgccagtcagcaaggaagccgggtgtcgctcacacaaccagaaggagctgagtttggca

SEQ ID NO: 514908 - DNA, 120 bp, Artificial Sequence
  ENSG00000164742_52 (sequence is synthesized)
acaacccaagtgagcctgaagcagattcgccccagagcctccaggcgtgagtggagcccagtccagcgacaccttggtttggcctgtgagactgagaagagagccagccacgccatgctg

SEQ ID NO: 514909 - DNA, 120 bp, Artificial Sequence
  ENSG00000164742_53 (sequence is synthesized)
tgcctggggtccacagagccgggaggtcacacatgtacatcctggaagctgcccaaggtgtggccacttgtagggcagtgagaggaagccgtcgcggggaccatgctgccttctctgggc

SEQ ID NO: 514910 - DNA, 120 bp, Artificial Sequence
  ENSG00000164742_54 (sequence is synthesized)
tcacgactgttctggaaaggaccccatggcagacttggcaaggtctccacttcaggggcaaacatctccatcatcagcaactccaaaccccagccacttcctgggagttcaggaactgtg

SEQ ID NO: 514911 - DNA, 120 bp, Artificial Sequence
  ENSG00000164742_55 (sequence is synthesized)
tttagccataatgtcccttggggtttggtgaaaaacaacttcctttttatttgtgggaaaactgtattatattgccttatttatttttaatcatgtacaatattcatgtacaaatgttag

SEQ ID NO: 514912 - DNA, 120 bp, Artificial Sequence
  ENSG00000164742_56 (sequence is synthesized)
agccattcgggtaggattctctctaaattatttattgaagaggctttgtaaatagtgcaccagtgacaggtgctgcctgtttactcgtaccaaaaatgaagacaagccccacacccacct

SEQ ID NO: 514913 - DNA, 120 bp, Artificial Sequence
  ENSG00000164742_57 (sequence is synthesized)
cagcccttgcttggccatgctgtggccctttggaaatgaccctgtgtgctcccctcgcgacccttgcatgcctttcatgcctgatgccgtagagtagaacacagccccggaatgcttcca

SEQ ID NO: 514914 - DNA, 120 bp, Artificial Sequence
  ENSG00000164742_58 (sequence is synthesized)
gttgcttgcaagggaccatgccggcccgggtggtccatgcctgcggggtgtctgtatcctgcaggaggacgcccctacagacccagcaacccaagttgccagcccgtgtttctcagactt

SEQ ID NO: 514915 - DNA, 120 bp, Artificial Sequence
  ENSG00000164742_59 (sequence is synthesized)
taaagccaccagggcttctggaacacctgtcatagaagcaataactctaactctatactgtagagatgagtctggtccgaagcagattagtaatttagagataagccatgcatacaagtt

SEQ ID NO: 514916 - DNA, 120 bp, Artificial Sequence
  ENSG00000164742_60 (sequence is synthesized)
tgccccattctctggcttggggtggtgggaggcggggagctgccactcccaaagcctccaccccttcctgaagacccagctatgaaaccgcagttcctgtgggttgggctgcccaggctg

SEQ ID NO: 514917 - DNA, 120 bp, Artificial Sequence
  ENSG00000164742_61 (sequence is synthesized)
gtcagagctcagcaccccaggtctggtgagcagacagagccggcgttaaaccccgatcaggtcattgtcaccacacccttgcttggatgaggaaggaaggaggcaaaggcacccactcca

SEQ ID NO: 514918 - DNA, 120 bp, Artificial Sequence
  ENSG00000164742_62 (sequence is synthesized)
tccaagatccgttccaattgatgagcctcagtactggcctcacactgaccaacggtggtatgctgcagtttgttggtttggtgcagagtctaaaggataacatatcaaggcttacctgtg

SEQ ID NO: 514919 - DNA, 120 bp, Artificial Sequence
  ENSG00000164742_63 (sequence is synthesized)
ataggccattttaaggaaatggtggcactctgaaggctgtccccattcaccttccacaatgctggtaccatcctggtagaagagccctctgaacaggacacctgttcaggcctgggggcc

SEQ ID NO: 514920 - DNA, 120 bp, Artificial Sequence
  ENSG00000164742_64 (sequence is synthesized)
ccatgctaggcttgcctgggtgtgagaaggtcgaactgggtggcttaggccttcaaattgagcttgggggtgtccaagagaggggtcttattcgaggaactcacataccccaaataacca

SEQ ID NO: 514921 - DNA, 120 bp, Artificial Sequence
  ENSG00000164742_65 (sequence is synthesized)
tcagtgcacaaatcattccatgctctttggcaccaggcaggagatgctgcaggcaggtgtccgtagttggcaaaaatgggcagtaggggaaatggagttgcttcaacctttctcagtccc

SEQ ID NO: 514922 - DNA, 120 bp, Artificial Sequence
  ENSG00000164742_66 (sequence is synthesized)
ggccctcactgcacccaccaagtcaagcagagctgggtgggctgagaccagcatcccagctggactgagcctggggggaggggctggagccaaggagcccccctgggtgggggcatcagg

SEQ ID NO: 514923 - DNA, 120 bp, Artificial Sequence
  ENSG00000164742_67 (sequence is synthesized)
agcaggggcagggcctgaggactgctccccctgcatggagggcaggccaggatggagcccagggtagactttgaggaaggctcagtgggctcagcagaaggaaggctcttctcatagttg

SEQ ID NO: 514924 - DNA, 120 bp, Artificial Sequence
  ENSG00000164742_68 (sequence is synthesized)
tggtttttcacagatggatttgggtgatctgagtgtggtcaggccctgccgttggggaatgaatgccacacggggtttgtctgtaagctgcagtgtctgtgattctgtgtgaactgacag

SEQ ID NO: 514925 - DNA, 120 bp, Artificial Sequence
  ENSG00000164742_69 (sequence is synthesized)
cagggagctgaaggacaggccccggccttgggagaggacacgggcatgggctgctggatgcagggctcccagggctgtgaaggcagaggggtctctggaggcagacagggtgggctgggg

SEQ ID NO: 514926 - DNA, 120 bp, Artificial Sequence
  ENSG00000164742_70 (sequence is synthesized)
gccagcagcagggggcagagccccagccagggcagctgcttcctgcacatagacattcctcctgcgcagggccaagtgcccatgagcacagccccagacagacacggtggggagcttgga

SEQ ID NO: 514927 - DNA, 120 bp, Artificial Sequence
  ENSG00000164742_71 (sequence is synthesized)
gccctccgctcacctagaggagccctgggacacgcactggaaagtattctaggggcttcctgccttatccttctgtttgttcatacacttagtgaaagcagatcctgtactaggatgtga

SEQ ID NO: 514928 - DNA, 120 bp, Artificial Sequence
  ENSG00000164742_72 (sequence is synthesized)
ggatatctgtcacctgcgtggtccattccataaacaccagattccatttcagttgccacacattttggggctagacttccctaaacaacatgccattgtgaaataatgcatatatttgta

SEQ ID NO: 514929 - DNA, 120 bp, Artificial Sequence
  ENSG00000164742_73 (sequence is synthesized)
tttttaaatttccctgaaaatttaatctattctgttccatatgaagtctgtttcactaccttaaaaaatagatactccactagaggctgtgcttaattcaaatccatgtgtgtgcctgca

SEQ ID NO: 514930 - DNA, 120 bp, Artificial Sequence
  ENSG00000164742_74 (sequence is synthesized)
ttacatgtgtgaacacgtgtttctgtcgtgtgtgtcatgcacatctgtgtgttgcatagcataagccaaatgaaaatcatttgttcatgggattcatatgaggaacaaaattaaatttga

SEQ ID NO: 514931 - DNA, 120 bp, Artificial Sequence
  ENSG00000164742_75 (sequence is synthesized)
atacagtcagataactgccacgcagggcatttggggaaccatccccgaatgccctgatgtgatttccctcagaaaatccttgttattagaggagaaggtctgggcaggggcagcagcatc

SEQ ID NO: 514932 - DNA, 120 bp, Artificial Sequence
  ENSG00000164742_76 (sequence is synthesized)
tcagacatcaagtcaactttatcatctactacatcagcactgaagtccaggggcattgaggcactaactaggttccattttctttggtttggttacttattttttctttttgggttctcg

SEQ ID NO: 514933 - DNA, 120 bp, Artificial Sequence
  ENSG00000164742_77 (sequence is synthesized)
gtgtgcagaggctgtagagagagcctcagggcggtgaccgctgcaggaattcggccctccagctcccctccagttaccaggagccgatttggaggccaggccttcccagctgagtgtctg

SEQ ID NO: 514934 - DNA, 120 bp, Artificial Sequence
  ENSG00000164742_78 (sequence is synthesized)
tcagcttcattctctctcagctgtgcagtggaagagcaacaacagacaggtgaccttcttgggttgtgcttcacaatggactgggaaaaacatctttgaaatcaggaaatcaggccgggc

SEQ ID NO: 514935 - DNA, 65 bp, Artificial Sequence
  ENSG00000164742_79 (sequence is synthesized)
ttggcgggagcctgtagtcccagctacacgggaggctaaggtgggagaattgcttgaacccggga

SEQ ID NO: 514936 - DNA, 120 bp, Artificial Sequence
  ENSG00000164742_80 (sequence is synthesized)
aaaaaaaaaaaaagaaagaaagaaatcagaaaatcgaccacagtggtagccacctggcctaatgctgtgtttttgtacctgacaggggtcactcattttaggcacaactccttcattctt

SEQ ID NO: 514937 - DNA, 120 bp, Artificial Sequence
  ENSG00000164742_81 (sequence is synthesized)
gacaggggtcactcattttaggcacaactccttcattctttgtgaaattagtgagtttccttctacccgtcaccagattcaatatgttctattaatacaccgataaccacaggggaaggg

SEQ ID NO: 514938 - DNA, 120 bp, Artificial Sequence
  ENSG00000164742_82 (sequence is synthesized)
cacttgtcgctctcccacctggttaccacagtctccatgggtcttttgccgtgaccacaaataaaggaaacactcatcactagtatctaagtcgggctttacagtaactatgcaccttct

SEQ ID NO: 514939 - DNA, 120 bp, Artificial Sequence
  ENSG00000164742_83 (sequence is synthesized)
gtgtgcttcacctcactctctacttcaaacagcccatggagggaggtattattatactccttatgttgacagtgaagaatctgaggcccagagaggttggggacttgagtaaagtcacac

SEQ ID NO: 514940 - DNA, 120 bp, Artificial Sequence
  ENSG00000164742_84 (sequence is synthesized)
agccctgagaggcaggaccagggttccattcctgctctatccagttccaagcccttgtgttttccattatgtttagtgcctctttgctaacagcaacatctgcaagatttgtgttggttt

SEQ ID NO: 514941 - DNA, 120 bp, Artificial Sequence
  ENSG00000164742_85 (sequence is synthesized)
tgatggagaactctagctcatccacatgctagtgcccaagtggtggaggggccacctcagcaggtgggttctgaatgcagccaaggctgtccccgcaatgggtgagactcgctccaactg

SEQ ID NO: 514942 - DNA, 120 bp, Artificial Sequence
  ENSG00000164742_86 (sequence is synthesized)
cccgccctcagagcaggtgcctaagtcctccctggcactggcaggccttacctcacattgctaaattaaagcaatgcaattcctcttgggtaagaggaattcctccttctttactaactg

SEQ ID NO: 514943 - DNA, 120 bp, Artificial Sequence
  ENSG00000164742_87 (sequence is synthesized)
atccccagcaaggaaataaaatgttaggctttaaaaatccctactttgtcatatcagactatattctaaaactatatttgagcgaaacctgtcattgcgtctaatttcaaatatacagaa

SEQ ID NO: 514944 - DNA, 120 bp, Artificial Sequence
  ENSG00000164742_88 (sequence is synthesized)
tctccttaagagctgttgccttatttttttgtaaagcctctctgacatcaaatggggagaaatggtggcacctccagacaccctgaaactacacaccatttcttccctgctcagcttctg

SEQ ID NO: 514945 - DNA, 120 bp, Artificial Sequence
  ENSG00000164742_89 (sequence is synthesized)
ctcaggagttctgtgagctatgggaaggccattggttgtatttgctacttttactttcatcttcctctgctgtagagccatttaatgttattgtcatatgctgctggtgaggtaaaggtg

SEQ ID NO: 514946 - DNA, 120 bp, Artificial Sequence
  ENSG00000164742_90 (sequence is synthesized)
ggtccgggtgccttcccaggggttagaggatgttcaaagggccgatttcagcaggagttcagagggcttatgatggatggtgagagatttgacaaccaccagagcacatgtgctctgacc

SEQ ID NO: 514947 - DNA, 120 bp, Artificial Sequence
  ENSG00000164742_91 (sequence is synthesized)
ctctcctgggcattggttcctgctggtaccgggcggttcagaccttcaaataggttgctttcaaaagagctttcaggcacttattgagaattaatgtttaaacagacataatagcctaga

SEQ ID NO: 514948 - DNA, 120 bp, Artificial Sequence
  ENSG00000164742_92 (sequence is synthesized)
tgaactcccaagagatctattaaatcttgtgggctgaataaatatctcgtgcaggactgtgcaacagtagcccagagcatcctgcctgtgggcatccacctcccaggtgagggcagtggg

SEQ ID NO: 514949 - DNA, 120 bp, Artificial Sequence
  ENSG00000164742_93 (sequence is synthesized)
aagctggcccgacggcagccagaacttgtttctcacctcccaccagcaaccccccacccaactctgggccccaggcacacgaagcacaagtctcaggggaccattcccacattgggggat

SEQ ID NO: 514950 - DNA, 120 bp, Artificial Sequence
  ENSG00000164742_94 (sequence is synthesized)
cctgagggagcccatcaccgcctcttgcatacaactgtccactaggaggcacgcccagtgtgggagagatgtatggtcttgccttccacctgtaaaaactgcacatatgcaagccatttg

SEQ ID NO: 514951 - DNA, 120 bp, Artificial Sequence
  ENSG00000164742_95 (sequence is synthesized)
cactctggaactgcatgccgtgaaaactcctaatggtgtggaacttagtttgaatttgaaatcacgccgcatgcacaaagggacaggcccaggcccgacctcaggtcatccgcccgctgg

SEQ ID NO: 514952 - DNA, 120 bp, Artificial Sequence
  ENSG00000164742_96 (sequence is synthesized)
ctgcagagcatccctgggagccaaggcgaggcccgtggagcctgagctttgtgtagctcgagctttgtgtagctcgtgcacttattatgcaccacctcccttcagtcaccactcctcttc

SEQ ID NO: 514953 - DNA, 120 bp, Artificial Sequence
  ENSG00000164742_97 (sequence is synthesized)
ctccgccatcctcatttatactgattgcacaccccccgctcaaacaacaatgtccttattatgatgaccatctcgtagtggtacattccattcctatttaaggtaagcccaaagcccact

SEQ ID NO: 514954 - DNA, 120 bp, Artificial Sequence
  ENSG00000164742_98 (sequence is synthesized)
tttggattttctcgactgtccgagaaaagttgtgtaagcgcctgcgttcttctgggtttggctagatagggttgtgtccctctatggaatggagagtgatgtgggcaagggtgtcatttt

SEQ ID NO: 514955 - DNA, 120 bp, Artificial Sequence
  ENSG00000164742_99 (sequence is synthesized)
ctcgcacaatacaactcactgaggatgcttctgtagaagtgagaaacacgatgagtacattcagaattacaataactcactctcactgggtaacttctcatgatagatttgtatgatcaa

SEQ ID NO: 514956 - DNA, 120 bp, Artificial Sequence
  ENSG00000164742_100 (sequence is synthesized)
tacgggtctatttttatgtcaactgaacactgtagggtaccttccagtctttttcaagattgttaaattgagacaagtaattgaataatttgtcctatttttattttaaaaaaagtgaat

SEQ ID NO: 514957 - DNA, 120 bp, Artificial Sequence
  ENSG00000164742_101 (sequence is synthesized)
ggactgaaatgttaaatgtgaatgtacatttcttaattgcaacttttctactgagtgtttgcactatactttctggaatcttatttaacaaaaataaagggaaaaaattgcttgactaaa

SEQ ID NO: 514958 - DNA, 120 bp, Artificial Sequence
  ENSG00000164742_102 (sequence is synthesized)
ttggaggactgtatagttcctagtcctgcattccttcatcacattctccaccttcatttctaaacgactcgtttccctcagccgaccccaggatgtcacttctggcagacccagtgttat

SEQ ID NO: 514959 - DNA, 120 bp, Artificial Sequence
  ENSG00000164742_103 (sequence is synthesized)
atttgcataattactgaaaacagcaactttttgaaaagattaaatctagtttcattcatttaactttgtcattattcataggtaatatcttgagtttttaaattaaaaaaatgctaacta

SEQ ID NO: 514960 - DNA, 120 bp, Artificial Sequence
  ENSG00000164742_104 (sequence is synthesized)
ggactctagcagggtgagttgttttctgtaaggtccctgcgtattaattttagtttatatttatactttcagaagtgttaagtgtaaaaaggacttcttttatccgtgaaatcacttttt

SEQ ID NO: 514961 - DNA, 120 bp, Artificial Sequence
  ENSG00000164742_105 (sequence is synthesized)
tatccgtgaaatcactttttgaagatttcaaaatgtctgtataatacatagatttaaaataaaatttctaataactctataaaacctacgtgaacaaaataataaaatttatttagagca

SEQ ID NO: 514962 - DNA, 120 bp, Artificial Sequence
  ENSG00000164742_106 (sequence is synthesized)
aatggaaatttgtaccatttctgaaatggaagaattcaatataatgaaaataccaagttaatctatccagttaacttcagtgccaatcaaagttacaatgcaagtggaaggaagggaagt

SEQ ID NO: 514963 - DNA, 120 bp, Artificial Sequence
  ENSG00000164742_107 (sequence is synthesized)
tttggcaagcttttcacctgggagaataaacaaatgaaaaaagccaagagacatgtgaggagggtgaaaaacggatgtggacctagcagcttgcaggtcatctgcacattccactatagg

SEQ ID NO: 514964 - DNA, 120 bp, Artificial Sequence
  ENSG00000164742_108 (sequence is synthesized)
ggcctggatgtcctcctggggttttggtctcccaccctgcaacggggacgactgtgcacgtagcttcaggtcctgcccaacagccactgtcaccagtgctgcaaggatgagctcctgcca

SEQ ID NO: 514965 - DNA, 120 bp, Artificial Sequence
  ENSG00000164742_109 (sequence is synthesized)
tcagcccttatcccccagggcattcacgccagctctgttcttctctcagcactctctcctgatcgtaaacataattgattatggaaaatatggagaacacaaagatgcacaagggagaaa

SEQ ID NO: 514966 - DNA, 120 bp, Artificial Sequence
  ENSG00000164742_110 (sequence is synthesized)
atgaaaagcatttatctggaatcctaccatctcacaaaaaagctatcatgaacattttgttccttccagtttcttaagtttgtgtgtctgtatttttttaataaacttgactggatggta

SEQ ID NO: 514967 - DNA, 120 bp, Artificial Sequence
  ENSG00000164743_0 (sequence is synthesized)
aagacgacctccgcagagctgatggcattgagatccattcccggaggggtcagctcctgacgggttcctgagccagtcttaacctgggcaaaggagatgaggagccgagcctgatgcatt

SEQ ID NO: 514968 - DNA, 120 bp, Artificial Sequence
  ENSG00000164743_1 (sequence is synthesized)
gtgatggccatctgcccagaattggcccaaacggacaaaagtgctcttgcaaacctttctgatgagactgagactttgaagaactctactgatgaggtacagacttccagctcattcagc

SEQ ID NO: 514969 - DNA, 120 bp, Artificial Sequence
  ENSG00000164743_2 (sequence is synthesized)
tcctctggaggacggcagtcctcgcccctgacctctgggagcaaactggagagggaaaagcagactccaagcttggaacaaggagacacacaatctgagcttttggactataaaaattat

SEQ ID NO: 514970 - DNA, 120 bp, Artificial Sequence
  ENSG00000164743_3 (sequence is synthesized)
gaaaagaagttgagtaaaaaatggatcaactacctcaagctcaaagactctaactttgaacggcaccaaccagacaccaaacttccaacagaaatcactcgggtatcagatgaagaattg

SEQ ID NO: 514971 - DNA, 120 bp, Artificial Sequence
  ENSG00000164743_4 (sequence is synthesized)
aatgccctgcagtcttattgcaccatgaagataaatttgattcatcgtagaggggattctaagaagaagacgagcagcagacataaaaagctgcatcttggattggatgtagaggcttca

SEQ ID NO: 514972 - DNA, 120 bp, Artificial Sequence
  ENSG00000164743_5 (sequence is synthesized)
aacacatatcttatcagtgtccctattgtaacaggaaaagagcggagctggccctgtctgcctttctgaaacaaaagaagactttactggagtcatttctactccaagagagaatagatg

SEQ ID NO: 514973 - DNA, 120 bp, Artificial Sequence
  ENSG00000164743_6 (sequence is synthesized)
aacatcttcataccaaagactttctcacccgtattggagaagcacatcaagactttcccaggctttcagatgaccccagaataatctggaaaagactgactgagaaaagtcatatcagat

SEQ ID NO: 514974 - DNA, 120 bp, Artificial Sequence
  ENSG00000164743_7 (sequence is synthesized)
actctggttttgaaagatcagagacagagcagaagttgcagcgagatggaaatagtgcttgtcatttaccattttctctgccatttctcaagcgacttactctaatcaaaccagagctgg

SEQ ID NO: 514975 - DNA, 120 bp, Artificial Sequence
  ENSG00000164743_8 (sequence is synthesized)
tgattgttaatgataatgtgtaatgtggatagatgtctttgttgtgtatttgagtaattaccataatttctacaggcacttgggaaactaacttaagactttactatgcttccttcacag

SEQ ID NO: 514976 - DNA, 120 bp, Artificial Sequence
  ENSG00000164743_9 (sequence is synthesized)
atttgaggactaagaactttcactttttttttcctattatagaaggcactgttgtagttggaatagttataaaaacttttacaaaattccaagagaactatgttggtagtttgggccagg

SEQ ID NO: 514977 - DNA, 120 bp, Artificial Sequence
  ENSG00000164743_10 (sequence is synthesized)
atgttgatggtacagaagcaaagtagtatggggatgtaagagaaacttaaaaagtaataactgtctttggcgatcaaatggctatggggaattaataaatagtagatgtttgaaatgtta

SEQ ID NO: 514978 - DNA, 120 bp, Artificial Sequence
  ENSG00000164744_0 (sequence is synthesized)
agaagcttttcaaaattccgtcttcaagaagaaacacccgtggaggaagaagacattatacaaaacaaatttagaaactgtatgtatagcttcatgtttttcataaaataggaatgagga

SEQ ID NO: 514979 - DNA, 120 bp, Artificial Sequence
  ENSG00000164744_1 (sequence is synthesized)
caaatgttgctcttcatcctaccagctgtttgttctttggtaggggatcatgagtggaaaaacaaaggcaagaagggctgccatgttttttagacgttgctctgaagacgccagcggtag

SEQ ID NO: 514980 - DNA, 120 bp, Artificial Sequence
  ENSG00000164744_2 (sequence is synthesized)
cgccagtggcaatgctttgttatcagaggacgaaaatcctgatgcgaatggggtaactcgatcatggaagattattctaagtacaatgcttacactgacttttcttcttgtaggactcct

SEQ ID NO: 514981 - DNA, 120 bp, Artificial Sequence
  ENSG00000164744_3 (sequence is synthesized)
aaatcatcagtggcttaaagaaacagatgttcctcagaaatccagacaattatatgccataattgcagaatatggttcaaggctttataaatatcaggccagacttcgtatgcctaaaga

SEQ ID NO: 514982 - DNA, 120 bp, Artificial Sequence
  ENSG00000164744_4 (sequence is synthesized)
gcaactggaacttttaaagaaggaaagccagaatctggaaaacaattttcgtcaaattctatttttgatcgaacaaatagatgtcctgaaggcattgctaagagatatgaaggatggtat

SEQ ID NO: 514983 - DNA, 120 bp, Artificial Sequence
  ENSG00000164744_5 (sequence is synthesized)
agaccaagtcgagatggctgattatgccctgaagtcggccggagcctccatcattgaagctgggacctcagaaagttataaaaataataaagcaaaattgtactggcatgggataggttt

SEQ ID NO: 514984 - DNA, 120 bp, Artificial Sequence
  ENSG00000164744_6 (sequence is synthesized)
cctaaatcatgaaatgcctccagatattattcttcagccggatgtctaccctggaaagtgctgggcttttccaggttcccagggtcataccctaatcaagcttgctacaaagatcatacc

SEQ ID NO: 514985 - DNA, 120 bp, Artificial Sequence
  ENSG00000164744_7 (sequence is synthesized)
aactgctgttaccatggagcacatctcagagaaggtgtctccgtcaggaaacatctccagtgcacccaaggaattttctgtctatggcatcacaaaaaaatgtgaaggagaagaaatttt

SEQ ID NO: 514986 - DNA, 120 bp, Artificial Sequence
  ENSG00000164744_8 (sequence is synthesized)
cctaggtcagtttatatataacaaaacaggaaccaccgttcaaacatttgaactccagcatgcagtttctgaatatttattatgtgtgaaacttaatatctttagcaactggggacaccc

SEQ ID NO: 514987 - DNA, 120 bp, Artificial Sequence
  ENSG00000164744_9 (sequence is synthesized)
gaagtatacttgtttatatcgattcagggtccatggcacaccaggcaagcacatctagaagagttggtacagaaggccatgccacatgtccagaatattcaagaatgcttattctcttag

SEQ ID NO: 514988 - DNA, 120 bp, Artificial Sequence
  ENSG00000164744_10 (sequence is synthesized)
atgataccgcacccataggaattgagaattgggagtgggaagaaaacctcaaagtggttcatacttgcctgtaaaaagtaaatgcattttactaataaaaaaatatggaagtaaattaaa

SEQ ID NO: 514989 - DNA, 120 bp, Artificial Sequence
  ENSG00000164744_11 (sequence is synthesized)
aacagaagaatcagaagcttttcaaaattccgtcttcaagaagaaacacccgtggaggaagaagacattatacaaaacaaatttagaaactgggatcatgagtggaaaaacaaaggcaag

SEQ ID NO: 514990 - DNA, 120 bp, Artificial Sequence
  ENSG00000164746_0 (sequence is synthesized)
gggtttggttggctgcagccagccagccgtgtaaaaactccaacgccgggcgccgcgggcagcacccacggagacccgcggggagctgctgcagctcctggcaactggtcaagcaggcag

SEQ ID NO: 514991 - DNA, 120 bp, Artificial Sequence
  ENSG00000164746_1 (sequence is synthesized)
cgtccagcgcacccgcgaacaccaggtccggcagcatctgtcttttcccgcagcgtgcagcgcctgaccatgaggaacacaagcaaggaacttcagggcgccacgcaccgctacgctccc

SEQ ID NO: 514992 - DNA, 120 bp, Artificial Sequence
  ENSG00000164746_2 (sequence is synthesized)
tgcgattggtattaccacgtcccagtgaagcgctctgagaaggccgtggatgccccaccagcgtcccagatcccaggtctcagcaatttgggagactcacacagcgagaacctgcctggg

SEQ ID NO: 514993 - DNA, 120 bp, Artificial Sequence
  ENSG00000164746_3 (sequence is synthesized)
actcggagatactggataaaagaaacagattcggaatatgtgaagctcgcgaaacaaggtggcaggcccgatttgttgaagcactttgcccctggaaccaggaaaggctctccagtggcc

SEQ ID NO: 514994 - DNA, 120 bp, Artificial Sequence
  ENSG00000164746_4 (sequence is synthesized)
tactccctgccagactggtatatccaccacagcaagccaccgacagccagccagcaagaagtgcgggctgtctccatgccggattacatggttcatgaagaatttaaccccgatcaagcc

SEQ ID NO: 514995 - DNA, 120 bp, Artificial Sequence
  ENSG00000164746_5 (sequence is synthesized)
aatggtagctatgcatccagaagagggcccttcgacttcgacatgaaaacagtttggcaaagagaggctgaggaacttgaaaaggagaaaaaaaagctgaggctaccggccattgactca

SEQ ID NO: 514996 - DNA, 120 bp, Artificial Sequence
  ENSG00000164746_6 (sequence is synthesized)
aagtatctgagcaaagcaggcaccccacttggccctaagaatcctgcaggaagtagactctccttcccccccgtgcctggtcaaaaaaacagttcacctaccaatttttccaaactcatt

SEQ ID NO: 514997 - DNA, 120 bp, Artificial Sequence
  ENSG00000164746_7 (sequence is synthesized)
agcaatggttataaggatgagtggttgcagcagcagcagcgagctgactcagacaagaggaccccgaagacctccagggcatcagtgttatctcagtccccacgagacctggaaggtccc

SEQ ID NO: 514998 - DNA, 120 bp, Artificial Sequence
  ENSG00000164746_8 (sequence is synthesized)
ttctcaaagcccagaagaatctgtatctgcatcaacaccagcagagctcaaataaatcctgatgcaatatgtatttaggataatttttaaatggctaaatatgacatgactgtattatag

SEQ ID NO: 514999 - DNA, 120 bp, Artificial Sequence
  ENSG00000164746_9 (sequence is synthesized)
ctatatttctgaggctttttttgtattttattaatatagactctcattgaataatttaccttgcagcagatttgacattgctgcatagaaggggcaggtgttggtttttgtttcttgcat

SEQ ID NO: 515000 - DNA, 120 bp, Artificial Sequence
  ENSG00000164746_10 (sequence is synthesized)
ttctctgggatgtgaaacacttggctaacaaacacaactaaggcctctggtaccctctgccctgctggcctggtgatgtcccagtgtctcagaactgatcacttgctcctcctattgtgt

SEQ ID NO: 515001 - DNA, 120 bp, Artificial Sequence
  ENSG00000164746_11 (sequence is synthesized)
gaaccactcttagcaggcattgctactggattcttaactagagaaaacttacagaacaggtgttaagccttttccaatatttagtattgtagtcttcatagaaatcatttctagttacag

SEQ ID NO: 515002 - DNA, 120 bp, Artificial Sequence
  ENSG00000164746_12 (sequence is synthesized)
agttacagaaaaatttaactccagaatatggtgatacagtttatgttaagaaacatattttaatttattatgccatgaatttataaacatttaatataaaacattataacatttgctgtt

SEQ ID NO: 515003 - DNA, 120 bp, Artificial Sequence
  ENSG00000164746_13 (sequence is synthesized)
gagaatgttttcaaaaagccaaataaagtcacagatattttagcttctttcccagaataaacttatcatgcatttgcttacctaaaatttaagtttcaaattagttctctatatgagata

SEQ ID NO: 515004 - DNA, 120 bp, Artificial Sequence
  ENSG00000164746_14 (sequence is synthesized)
cttaatcgagcatatatatttatattcattgatcaaactgatatgctacaggagaatgtatgcaatgtgtaaaaaatgcaaatggctgtatgcattgaataaaaataatatacaattaga

SEQ ID NO: 515005 - DNA, 120 bp, Artificial Sequence
  ENSG00000164746_15 (sequence is synthesized)
gatgttgtggttccgcggcgcgctgggagtttgggtttggttggctgcagccagccagccgtgtaaaaactccaacgccgggcgccgcgggcagcacccacggagacccgcggggagctg

SEQ ID NO: 515006 - DNA, 120 bp, Artificial Sequence
  ENSG00000164746_16 (sequence is synthesized)
gccctgttcagtgtggcagcctcgcgggcggtgaggggggcgtttgttcctaatttcttccatataaaaatattactacagagtctgtatgtttagcttagggccttgggaaagctaggt

SEQ ID NO: 515007 - DNA, 120 bp, Artificial Sequence
  ENSG00000164749_0 (sequence is synthesized)
ggagcctcggttcccctcgggcggctgaaggaggggctgagcctcaggacccctaggccaggccgtgttgaaagcagataccccgaggcctcgcccagcctgcgctggagggaagaaggc

SEQ ID NO: 515008 - DNA, 120 bp, Artificial Sequence
  ENSG00000164749_1 (sequence is synthesized)
gctggaggagcaccagcgaaagcagccagtctgagatattgacactacagaaaaaactgacagcttactccttgtattgattctactcttctctacaaatatagactccgttccctacca

SEQ ID NO: 515009 - DNA, 120 bp, Artificial Sequence
  ENSG00000164749_2 (sequence is synthesized)
cagccttatagttctgccccagagacaagtatgaataccacagacaacggtgtcaactgtctgtgtgctatctgtggggacagagcaacaggaaaacactatggggcatccagctgtgat

SEQ ID NO: 515010 - DNA, 120 bp, Artificial Sequence
  ENSG00000164749_3 (sequence is synthesized)
gggtgcaagggtttcttcagacgcagcattcgtaagagtcacgtttattcttgcaggttcagtcggcaatgtgttgttgacaaggacaaaaggaatcaatgtagatattgtcgattaaga

SEQ ID NO: 515011 - DNA, 120 bp, Artificial Sequence
  ENSG00000164749_4 (sequence is synthesized)
aagtgttttagagcgggaatgaaaaaagaagctgtacaaaatgaacgtgacagaataagcaccagaagaagcacatttgatggcagcaacatcccctccattaacacactggcacaagct

SEQ ID NO: 515012 - DNA, 120 bp, Artificial Sequence
  ENSG00000164749_5 (sequence is synthesized)
gaagttcggtctcgccagatctcagtctcaagccctgggtcaagcactgacataaacgttaagaaaattgcaagtattggtgatgtctgtgaatctatgaaacagcagctcttagtcttg

SEQ ID NO: 515013 - DNA, 120 bp, Artificial Sequence
  ENSG00000164749_6 (sequence is synthesized)
gtggaatgggctaaatatattcctgccttctgtgaattaccattggatgatcaggtggcactgttgagagctcacgcaggggagcacttactgcttggagctacaaagagatccatgatg

SEQ ID NO: 515014 - DNA, 120 bp, Artificial Sequence
  ENSG00000164749_7 (sequence is synthesized)
agctgtgaagttgagattagccgtgtggccaatcgtgttctagatgagctggttagaccatttcaagaaatccagattgatgacaatgagtatgcttgtttaaaggcaattgtatttttt

SEQ ID NO: 515015 - DNA, 120 bp, Artificial Sequence
  ENSG00000164749_8 (sequence is synthesized)
gatccagatgcaaaagggctaagcgatccagtaaaaattaagaacatgaggttccaagtgcagatcggtttggaggactacatcaatgatcggcagtatgactcccgggggaggtttgga

SEQ ID NO: 515016 - DNA, 120 bp, Artificial Sequence
  ENSG00000164749_9 (sequence is synthesized)
gagttgcttctgctcctgcccacactgcagagcatcacgtggcaaatgattgagcaaatacagtttgttaaactttttgggatggttaaaattgacaatctacttcaggaaatgctatta

SEQ ID NO: 515017 - DNA, 120 bp, Artificial Sequence
  ENSG00000164749_10 (sequence is synthesized)
ggtggggcttccaatgatggcagtcatctccatcatccaatgcatccacatttgtctcaagacccattaactggacaaactatacttttaggtcccatgtcaacactggttcatgcagac

SEQ ID NO: 515018 - DNA, 120 bp, Artificial Sequence
  ENSG00000164749_11 (sequence is synthesized)
cagatctcaactcctgaaaccccactcccttccccaccacaaggctctgggcaagaacagtacaaaatagctgcaaaccaagcatcagtcatttcacaccagcatctctccaaacaaaag

SEQ ID NO: 515019 - DNA, 120 bp, Artificial Sequence
  ENSG00000164749_12 (sequence is synthesized)
caattgtgaaaatgtgtttacttcagaacggcactacataaatgtgaaaagttgttgatcttgaaatatctcaggatagcacttttggcaaactcttagccaaggcttcttcattggtgc

SEQ ID NO: 515020 - DNA, 120 bp, Artificial Sequence
  ENSG00000164749_13 (sequence is synthesized)
tgttataagatggtgtcctattttcttgtttatacgttcattctgtttgttattgctactatgtaaaactttcacatgcaaccaatgtatatctgagtttgaagatgtttatatagggta

SEQ ID NO: 515021 - DNA, 120 bp, Artificial Sequence
  ENSG00000164749_14 (sequence is synthesized)
ggattagcactcacagattgaaagcaaaacacatcaaaacactcatcacgcactctgggcttgtggtgccacttgtatgtgtgtttctaaatcaatgatgagggtatcagaaccaatact

SEQ ID NO: 515022 - DNA, 120 bp, Artificial Sequence
  ENSG00000164749_15 (sequence is synthesized)
gatgtgatacagaacaaagtgttcgtttttgactgaaaatagtagatcagaaatctcagtttaatataaaatgagctaagtttttaaaaataaattataaacttggagattagaaaaata

SEQ ID NO: 515023 - DNA, 120 bp, Artificial Sequence
  ENSG00000164749_16 (sequence is synthesized)
aagcagttgctgtagaataggctgtatctttttcaagaagaatctcttatggacagtctgtggtaaagaagcaactctttgctttagagttaaatattcctatcttaagtttagaaaaat

SEQ ID NO: 515024 - DNA, 120 bp, Artificial Sequence
  ENSG00000164749_17 (sequence is synthesized)
acaaaaaaccattccaaggatgactggatactttttgaaatctgactttctttgaagatgtatgttaagcaaaaacatgttgcttttatcagttaggatacagggtgaactgtaacaaag

SEQ ID NO: 515025 - DNA, 120 bp, Artificial Sequence
  ENSG00000164749_18 (sequence is synthesized)
aaacccctaaaacagtgactaaatcaagagaggaatctatttctttctcctgaaacaatttagaaaatagttatccattgactagaaattagtacatgcccacagctggctcccacggta

SEQ ID NO: 515026 - DNA, 120 bp, Artificial Sequence
  ENSG00000164749_19 (sequence is synthesized)
gccaggagaattatctataggtggaaagtctgtgtcagccaaagccatgtcactctgagagaactgattctgaggacaagttagccatctaccacccatgtcccttatttggtcctcaca

SEQ ID NO: 515027 - DNA, 120 bp, Artificial Sequence
  ENSG00000164749_20 (sequence is synthesized)
ataacactttaggagagatatcattatcgctgttttataaataagggaaactttagcttgagggtttaaggaacataaccaaagttcacaaacataacgagtgagagaaacacattcaag

SEQ ID NO: 515028 - DNA, 120 bp, Artificial Sequence
  ENSG00000164749_21 (sequence is synthesized)
cccaggtctagttgactttaatgaatctttggtgtggaatgaaaaatgtgaacttcttactcatagtgtggtttttaaatatatgcagttgagtgatgattggatactattcatcatatt

SEQ ID NO: 515029 - DNA, 120 bp, Artificial Sequence
  ENSG00000164749_22 (sequence is synthesized)
gcctataatatatatttaccgataagcagtgagtgtaaaattgttgtagcttgaataagaaaccacttttgtagttttaaccagactttctcttaaaaacattagataaaataaaagatt

SEQ ID NO: 515030 - DNA, 120 bp, Artificial Sequence
  ENSG00000164749_23 (sequence is synthesized)
caccggatggattctgatgaaaacgaaaacaaagtaaaatgactggcttagcagattctttgaaatgtagcagcccagggatgtaccaaatgtcgaattctagactgaggagtagagttc

SEQ ID NO: 515031 - DNA, 120 bp, Artificial Sequence
  ENSG00000164749_24 (sequence is synthesized)
attggagtcttaaactctctgatatcacttaaagctggagtttattttaaaacaaatgaagcatgggccacctcatgatgcagtggctcctctctggttgaggagagggaaaattggaaa

SEQ ID NO: 515032 - DNA, 120 bp, Artificial Sequence
  ENSG00000164749_25 (sequence is synthesized)
aactggtcgagtaattatcaataattttttttaaaaagaggatcccaaactgtaaaagattgaaataatctttctcaggattttttaaatgtctaagattatgatgtcatatctcccact

SEQ ID NO: 515033 - DNA, 120 bp, Artificial Sequence
  ENSG00000164749_26 (sequence is synthesized)
taccttataagtaaaaaggttaatatcaagtaacttattagctcttaaagtaaaattgaacttattaaaagctatctatgatttaatagatttaataaaattccttcacgacctggtacc

SEQ ID NO: 515034 - DNA, 120 bp, Artificial Sequence
  ENSG00000164749_27 (sequence is synthesized)
cttgtgaaactgtaaaatatatcatatggggggagttttttaactcttattttttgaaaatttactgtagcttctatttcgtgaataagaatgttttgattttgatcatacaaataactt

SEQ ID NO: 515035 - DNA, 120 bp, Artificial Sequence
  ENSG00000164749_28 (sequence is synthesized)
ttgtagatttttgtttacttttgggggggttcccttagaagacattaaaaaaaaatactgccttggtctgtgcaggctgctgtaatgaaatactatgaacttggcagcttataaacaaca

SEQ ID NO: 515036 - DNA, 120 bp, Artificial Sequence
  ENSG00000164749_29 (sequence is synthesized)
gaaatttatttctcgctgttctcaatggtgggaagtccaagattaagggatcaacaaattaggcctctggatcatacatggcattttctagctgtgtccttatacataaaaggaaaaagg

SEQ ID NO: 515037 - DNA, 120 bp, Artificial Sequence
  ENSG00000164749_30 (sequence is synthesized)
tagctctctcgagtctctttaataaagatactaattctcatgactgaatcaccctccaaaggccccacctcctaataccatcactctggggactaggtgtcagcatgtgaattttggaaa

SEQ ID NO: 515038 - DNA, 120 bp, Artificial Sequence
  ENSG00000164749_31 (sequence is synthesized)
acacaaaaattcagaacatagcaaatacctttgaagtataaaagataaaattcatttttagtgaaccctgtaatttattcgtgtatatttactaaacagctgtatctttgaaattgttag

SEQ ID NO: 515039 - DNA, 120 bp, Artificial Sequence
  ENSG00000164749_32 (sequence is synthesized)
taatgattctgcttcaataactatggtcagggaatttataatattatatttttatatactgaactgccatagatgctggaaaaaaggaactgatgttttcagcatattttcaaaatattg

SEQ ID NO: 515040 - DNA, 120 bp, Artificial Sequence
  ENSG00000164749_33 (sequence is synthesized)
aggaactgatgttttcagcatattttcaaaatattgataagggaagttattacttttatatagtattcaacttttttcaggtaatagaagtgaataatttattgtgaaataattcatttt

SEQ ID NO: 515041 - DNA, 120 bp, Artificial Sequence
  ENSG00000164749_34 (sequence is synthesized)
gaaatcaaaaattagtagattttttaccatgttaaattatagtgagattaaagtattactaaactgtgatgctatgtttgtttcactaaactttctaaataaaaactgagaaaaaaaaaa

SEQ ID NO: 515042 - DNA, 120 bp, Artificial Sequence
  ENSG00000164749_35 (sequence is synthesized)
taacaggatcctgacatttaattgtctctgcctgagcattctgtcaactttggaacttgtatgagcacagacggggtttcaccgttttagacaggagggtcccgatctccagacgtcgtg

SEQ ID NO: 515043 - DNA, 120 bp, Artificial Sequence
  ENSG00000164751_0 (sequence is synthesized)
aatccagattcggctaggaaaagacaagctttccagagaatgtttcagagaaagttacgtggagcgtgggcgtttcgcagactcctaagtggtctggaacctaacctgcagtgtctctga

SEQ ID NO: 515044 - DNA, 120 bp, Artificial Sequence
  ENSG00000164751_1 (sequence is synthesized)
gcttctggcaagtatgaggcaaggatttcacagaagaacttggagcaaaaattcccactgtcatagctataggctgtccagtcttgagggagctgcaggaacaggaaaaagagaccttca

SEQ ID NO: 515045 - DNA, 120 bp, Artificial Sequence
  ENSG00000164751_2 (sequence is synthesized)
gagaagacatggcttccagaaaagagaatgcgaagagtgcaaacagagtgctaagaataagccagttggatgcacttgaactaaacaaggccctggagcagctagtttggtcccagttta

SEQ ID NO: 515046 - DNA, 120 bp, Artificial Sequence
  ENSG00000164751_3 (sequence is synthesized)
ctcagtgctttcatggatttaaacctgggctgttagctcgctttgagccagaggtgaaagcgtgcttatgggttttcttgtggagattcaccatctactccaaaaatgccacagtgggac

SEQ ID NO: 515047 - DNA, 120 bp, Artificial Sequence
  ENSG00000164751_4 (sequence is synthesized)
agtcagttttgaatattaagtacaaaaatgatttttcccctaacctgagatatcagccacccagtaaaaatcaaaaaatctggtatgctgtttgtacaattggtggcaggtggttagaag

SEQ ID NO: 515048 - DNA, 120 bp, Artificial Sequence
  ENSG00000164751_5 (sequence is synthesized)
aacgatgctatgatttgtttcgaaaccatcatttagcatcatttgggaaagtcaagcagtgtgtgaattttgtgattggacttttgaaattaggtgggctgattaattttttgattttcc

SEQ ID NO: 515049 - DNA, 120 bp, Artificial Sequence
  ENSG00000164751_6 (sequence is synthesized)
ttcagaggggaaagtttgcaactttgacagaacgtctcctaggtattcattctgtattttgcaagcctcaaaacatatgtgaagttggctttgaatacatgaatagggaacttctctggc

SEQ ID NO: 515050 - DNA, 120 bp, Artificial Sequence
  ENSG00000164751_7 (sequence is synthesized)
atggttttgctgaatttctgatttttctcttaccacttatcaatgtccagaagttgaaagccaagctgtcttcatggtgtattcctcttactggtgcacctaatagtgacaatacattag

SEQ ID NO: 515051 - DNA, 120 bp, Artificial Sequence
  ENSG00000164751_8 (sequence is synthesized)
ccaccagtggcaaagaatgcgctctatgtggagagtggcccaccatgcctcacaccataggatgtgagcatattttctgttatttctgtgctaagagtagtttcttatttgacgtgtact

SEQ ID NO: 515052 - DNA, 120 bp, Artificial Sequence
  ENSG00000164751_9 (sequence is synthesized)
ttacttgtcctaagtgtggcacagaagtacacagtctgcagccactgaaatcaggaatcgagatgtcagaagtaaatgctctttagaaactaaaattgcttcctttgaggaaaaaaatgc

SEQ ID NO: 515053 - DNA, 120 bp, Artificial Sequence
  ENSG00000164751_10 (sequence is synthesized)
accgtgtttaaattcttaatattagtcatcctaagtataccatttatgtatcctttataaggaatgtgctcctagccactgtcttctcctttccaggcatgactgaaatctaatcactgg

SEQ ID NO: 515054 - DNA, 120 bp, Artificial Sequence
  ENSG00000164751_11 (sequence is synthesized)
aaaccatgtgattctaaatatattatgtaaatgttaatgtattatgttttttaaatcattgcattcaatttttaatgtcaagaataatggacagcttttgtcaggtgactactaacaatg

SEQ ID NO: 515055 - DNA, 120 bp, Artificial Sequence
  ENSG00000164751_12 (sequence is synthesized)
ctccttcattttactacttcttaaaacaaggttggattctaaagataaagattttggagactctgggatgagtgtgcatttattttcagagttgacataatatgataatgtgacaattat

SEQ ID NO: 515056 - DNA, 120 bp, Artificial Sequence
  ENSG00000164751_13 (sequence is synthesized)
tgacataatatgataatgtgacaattatgagactgttttaaaccttaagacctgatgcctcagttgtaacttttttttttttttctgagacggtgtcctgctctgtcacccaggctggag

SEQ ID NO: 515057 - DNA, 61 bp, Artificial Sequence
  ENSG00000164751_14 (sequence is synthesized)
gtggcgcgatctctgctcactgcagcaggtgcatgccaccatgcccgggtaatttttgtat

SEQ ID NO: 515058 - DNA, 75 bp, Artificial Sequence
  ENSG00000164751_15 (sequence is synthesized)
acctgcttggccgcctcagttgtaatgttatgcttttctctgaagccaatttttaagaagttcagtcctcagctg

SEQ ID NO: 515059 - DNA, 120 bp, Artificial Sequence
  ENSG00000164751_16 (sequence is synthesized)
ttctctgaagccaatttttaagaagttcagtcctcagctgtctgacccctccacagttggctttatattcagaaagtaaaaattacttaaggcagcttggaagtgaggcctgggaactac

SEQ ID NO: 515060 - DNA, 120 bp, Artificial Sequence
  ENSG00000164751_17 (sequence is synthesized)
tttattgaaacaaaaggggtctttagcatgggaatagtaacagcagtgcataatcaagataattctgtatccttcactctttttctctgcctttttttacttaaaagtaaattcagactc

SEQ ID NO: 515061 - DNA, 120 bp, Artificial Sequence
  ENSG00000164751_18 (sequence is synthesized)
ttaaaatggtatagaattattagcttgaacattgaattatctcgtcttaactagaatgttttttaaaaaacagtttttaaatgtttttaaataaacatcttgctagtatgatggaaatac

SEQ ID NO: 515062 - DNA, 120 bp, Artificial Sequence
  ENSG00000164751_19 (sequence is synthesized)
actgccagttcatttttctcttcacctttcattgaacaagtactcaggtgccaggtactgatgtagccattagaggcacaacagtatattaagcaggaaaaatcaagttaccttcatgga

SEQ ID NO: 515063 - DNA, 120 bp, Artificial Sequence
  ENSG00000164751_20 (sequence is synthesized)
gtttacattctgtgattgaatgaactgtaagtttaatttaggttcaatttagtgtaagatactgaagaagttttgtagtttgagttaagagtattttacatcttaagaatttgccttctt

SEQ ID NO: 515064 - DNA, 120 bp, Artificial Sequence
  ENSG00000164751_21 (sequence is synthesized)
ttgccttctgtaattttaaaacattattgtagaaaacaccaacaattcaggaaaaaatataaaatcaactttcccacaattttttgagagagatcatcactatattttactatatttgta

SEQ ID NO: 515065 - DNA, 120 bp, Artificial Sequence
  ENSG00000164751_22 (sequence is synthesized)
gatttgttgcacgtacatttcttatttacaaaattattataatgcataaaaaatagcattttttcctatgtataaatattcttcaaaactattttagggctgagcacaatggctcatgcc

SEQ ID NO: 515066 - DNA, 120 bp, Artificial Sequence
  ENSG00000164751_23 (sequence is synthesized)
tgtaatcccaggctccctacttagggaggctgagcccaggagtttgagttcgtttctaaaaaaataaaaatatatacaaacgtctttgttttttgtttgtttgtttgtttttggtgagaa

SEQ ID NO: 515067 - DNA, 120 bp, Artificial Sequence
  ENSG00000164751_24 (sequence is synthesized)
acccaggttggagtgcagtggtgtgatcatggctaaccgcagcctttccctcccagggctcaagcgatcctcccatctgagcctcccaagttgctgggaccacaggcccataccaccatg

SEQ ID NO: 515068 - DNA, 65 bp, Artificial Sequence
  ENSG00000164751_25 (sequence is synthesized)
cgatcctcccatctgagcctcccaagttgctgggaccacaggcccataccaccatgcctggctaa

SEQ ID NO: 515069 - DNA, 120 bp, Artificial Sequence
  ENSG00000164751_26 (sequence is synthesized)
caggcatgagccactgcacccagccataatatatttttaaaatgctatgtatatgccatcatattcctattcctattattatttaaccaccatcatagagcatttaggttcttttcactt

SEQ ID NO: 515070 - DNA, 120 bp, Artificial Sequence
  ENSG00000164751_27 (sequence is synthesized)
actttctgttgtgaataatgcaatgttgaatctgagttcattaagtgaagagtccagctgcacactgcaggcccagtctggatgtaggtgctcagatggttctctttgagacaggcttta

SEQ ID NO: 515071 - DNA, 120 bp, Artificial Sequence
  ENSG00000164751_28 (sequence is synthesized)
tcctttggctctcatttttttgatgagtgtacatggcatgagggacacagattccgctagaattcaaatcccacttgtgtataacctagggcaatgtgccacatctctgcacatctgttc

SEQ ID NO: 515072 - DNA, 120 bp, Artificial Sequence
  ENSG00000164751_29 (sequence is synthesized)
attgtaaggattacatgtttagtgtatataaagctcttaaaacaatgcctgacacatagtaaatagaatataatagtagtgctttcctttgctgttgtcagtattactctgagtcggttt

SEQ ID NO: 515073 - DNA, 120 bp, Artificial Sequence
  ENSG00000164751_30 (sequence is synthesized)
cattctcacacagaatgatggccgctagaagctcaaggcttataatctgctagctttctgatcccactggcatgagatactcttgcctaatagttacagctaaagtccaggagctcactg

SEQ ID NO: 515074 - DNA, 120 bp, Artificial Sequence
  ENSG00000164751_31 (sequence is synthesized)
ttactggtctgccttggattatgtgcacattcctgaaccagccactatagctaggggatggaaaatactgttcctggttacttaaatgtaggtgatgctcctcccatataccacatgaac

SEQ ID NO: 515075 - DNA, 120 bp, Artificial Sequence
  ENSG00000164751_32 (sequence is synthesized)
ctaaaggagtcctggaggaggccgttcaccacaggaaactgaggtgttcttagaagggtggatgctggcagatctctactagttagagtctacatttgccttactcatttcaaaagtcca

SEQ ID NO: 515076 - DNA, 120 bp, Artificial Sequence
  ENSG00000164751_33 (sequence is synthesized)
cattgcagtctcattttaccagtgatctagcttgataaggacattcataagtaactggatgattctttaacattgcagatttgaaaggattaaataaagtcaacaaaattgttatatcaa

SEQ ID NO: 515077 - DNA, 120 bp, Artificial Sequence
  ENSG00000164751_34 (sequence is synthesized)
gggtgtccgcttcggcttttcggcccttcggctcttcggcttgtcggcgttcgcggttgtttggccatccagtgccttcagcagcgccgctaaagcgcagttctcgttggtgtaactttt

SEQ ID NO: 515078 - DNA, 120 bp, Artificial Sequence
  ENSG00000164751_35 (sequence is synthesized)
ggaggtaagaactaagacgttcttaaaccctactacgtgctggaatcctgaagtgcctgccatcattcaaacttaagcactaactctctagagagacactgccattcataccacagaacg

SEQ ID NO: 515079 - DNA, 120 bp, Artificial Sequence
  ENSG00000164751_36 (sequence is synthesized)
actagaggagcagagaccacaggactgtgatggtgaagaccacagtttagaaggattaaaagcccagagatatatgtatctttatcatagacacatatatctgttagcagttaaaaacta

SEQ ID NO: 515080 - DNA, 120 bp, Artificial Sequence
  ENSG00000164751_37 (sequence is synthesized)
ccagaataagattacgttgttacaaagaaagttgaatgtgttacaaatagacaagatctatcttgttttaaatcactgccttcttgattttagcacttatgtagatcaagtagatttaaa

SEQ ID NO: 515081 - DNA, 120 bp, Artificial Sequence
  ENSG00000164751_38 (sequence is synthesized)
atagattagttttaccagaggggcatcagacttctaaaattctacccagattttttctgtcatatttacataactgcctactgaacttttccacttagatgtctcataggatcctcagat

SEQ ID NO: 515082 - DNA, 120 bp, Artificial Sequence
  ENSG00000164754_0 (sequence is synthesized)
aggcgcacaggtaccattttgaccgtaaacatcctgccgatttgaaccgaggatttgggcggcaggaagagccgcggcgtaacggcagccatcttgtttgtttgagtgaatcggaaagga

SEQ ID NO: 515083 - DNA, 120 bp, Artificial Sequence
  ENSG00000164754_1 (sequence is synthesized)
ggcgccggctgtggcggcggcgggagctgctcggaagctacacctcgcaagggctcccccctttccccaccccctcccccgacccttttcccctccccgggccacccagcccgcccaact

SEQ ID NO: 515084 - DNA, 120 bp, Artificial Sequence
  ENSG00000164754_2 (sequence is synthesized)
cccagcggagagcaaggttttcttctgttttcatagccagccagaacaatgttctacgcacattttgttctcagtaaaagagggcctctggccaaaatttggctagcggcccattgggat

SEQ ID NO: 515085 - DNA, 120 bp, Artificial Sequence
  ENSG00000164754_3 (sequence is synthesized)
aagaagctaaccaaagcccatgtgttcgagtgtaatttagagagcagcgtggagagtatcatctcaccaaaggtgaaaatggcattacggacatcaggacatctcttactgggagtagtt

SEQ ID NO: 515086 - DNA, 120 bp, Artificial Sequence
  ENSG00000164754_4 (sequence is synthesized)
cgaatctatcacaggaaagccaaataccttcttgcagactgtaatgaagcattcattaagataaagatggcttttcggccaggtgtggttgacctgcctgaggaaaatcgggaagcagct

SEQ ID NO: 515087 - DNA, 120 bp, Artificial Sequence
  ENSG00000164754_5 (sequence is synthesized)
tataatgccattactttacctgaagaatttcatgactttgatcagccactgcctgacttagatgacatcgatgtggcccagcagttcagcttgaatcagagtagagtggaagagataacc

SEQ ID NO: 515088 - DNA, 120 bp, Artificial Sequence
  ENSG00000164754_6 (sequence is synthesized)
atgagagaagaagttgggaacatcagtattttacaagaaaatgattttggtgattttggaatggatgatcgtgagataatgagagaaggcagtgcttttgaggatgacgacatgttagta

SEQ ID NO: 515089 - DNA, 120 bp, Artificial Sequence
  ENSG00000164754_7 (sequence is synthesized)
agcactactacttctaacctcctattagagtctgaacagagcaccagcaatctgaatgagaaaattaaccatttagaatatgaagatcaatataaggatgataattttggagaaggaaat

SEQ ID NO: 515090 - DNA, 120 bp, Artificial Sequence
  ENSG00000164754_8 (sequence is synthesized)
gatggtggaatattagatgacaaacttattagtaataatgatggcggtatctttgatgatccccctgccctctctgaggcaggggtgatgttgccagagcagcctgcacatgacgatatg

SEQ ID NO: 515091 - DNA, 120 bp, Artificial Sequence
  ENSG00000164754_9 (sequence is synthesized)
gatgaggatgataatgtatcaatgggtgggcctgatagtcctgattcagtggatcccgttgaaccaatgccaaccatgactgatcaaacaacacttgttccaaatgaggaagaagcattt

SEQ ID NO: 515092 - DNA, 120 bp, Artificial Sequence
  ENSG00000164754_10 (sequence is synthesized)
gcattggagcctattgatataactgttaaagaaacaaaagccaagaggaagaggaagctaattgttgacagtgtcaaagagttggatagcaagacaattagagcccaacttagtgattat

SEQ ID NO: 515093 - DNA, 120 bp, Artificial Sequence
  ENSG00000164754_11 (sequence is synthesized)
tcagatattgttactactttggatctggcaccgcccaccaagaaattgatgatgtggaaagagacaggaggagtagaaaaactgttttctttacctgctcagcctttgtggaataacaga

SEQ ID NO: 515094 - DNA, 120 bp, Artificial Sequence
  ENSG00000164754_12 (sequence is synthesized)
ctactgaagctctttacacgctgtcttacaccgcttgtaccagaagaccttagaaaaaggaggaaaggaggagaggcagataatttggatgaattcctcaaagaatttgaaaatccagag

SEQ ID NO: 515095 - DNA, 120 bp, Artificial Sequence
  ENSG00000164754_13 (sequence is synthesized)
gttcctagagaggaccagcaacagcagcatcagcagcgtgatgttatcgatgagcccattattgaagagccaagccgcctccaggagtcagtgatggaggccagcagaacaaacatagat

SEQ ID NO: 515096 - DNA, 120 bp, Artificial Sequence
  ENSG00000164754_14 (sequence is synthesized)
gagtcagctatgcctccaccaccacctcagggagttaagcgaaaagctggacaaattgacccagagcctgtgatgcctcctcagcaggtagagcagatggaaataccacctgtagagctt

SEQ ID NO: 515097 - DNA, 120 bp, Artificial Sequence
  ENSG00000164754_15 (sequence is synthesized)
gctaataccagagttagaacttctgccagaaaaagagaaggagaaagagaaggaaaaagaagatgatgaagaggaagaggatgaagatgcatcagggggcgatcaagatcaggaagaaag

SEQ ID NO: 515098 - DNA, 120 bp, Artificial Sequence
  ENSG00000164754_16 (sequence is synthesized)
aagatggaacaaaaggactcagcagatgcttcatggtcttcagcgtgctcttgctaaaactggagctgaatctatcagtttgcttgagttatgtcgaaatacgaacagaaaacaagctgc

SEQ ID NO: 515099 - DNA, 120 bp, Artificial Sequence
  ENSG00000164754_17 (sequence is synthesized)
cgcaaagttctacagcttcttggttcttaaaaagcagcaagctattgagctgacacaggaagaaccgtacagtgacatcatcgcaacacctggaccaaggttccatattatataaggagc

SEQ ID NO: 515100 - DNA, 120 bp, Artificial Sequence
  ENSG00000164754_18 (sequence is synthesized)
tagaagcattatagctagtgtttgattcactagtgcttacaaattgcccccatgtgtaggggacacagaaccctttgagaaaacttagatttttgtctgtacaaagtctttgcctttttc

SEQ ID NO: 515101 - DNA, 120 bp, Artificial Sequence
  ENSG00000164754_19 (sequence is synthesized)
cttcttcatttttttccagtacattaaatttgtcaatttcatctttgagggaaactgattagatgggttgtgtttgtgttctgatggagaaaacagcaccccaaggactcagaagatgat

SEQ ID NO: 515102 - DNA, 120 bp, Artificial Sequence
  ENSG00000164754_20 (sequence is synthesized)
tttaacagttcagaacagatgtgtgcaatattggtgcatgtaataatgttgagtggcagtcaaaagtcatgatttttatcttagttcttcattactgcattgaaaaggaaaacctgtctg

SEQ ID NO: 515103 - DNA, 120 bp, Artificial Sequence
  ENSG00000164754_21 (sequence is synthesized)
agaaaatgcctgacagtttaatttaaaactatggtgtaagtctttgacaagaaaaaaaaacaaacaaacacttctttccatcagtaacactggcaatcttcctgttaaccactctcctta

SEQ ID NO: 515104 - DNA, 120 bp, Artificial Sequence
  ENSG00000164754_22 (sequence is synthesized)
gggatggtatctgaaacaacaatggtcaccctcttgagattcgttttaagtgtaattccataatgagcagaggtgtacgcgaaattgtgttatgactgatagccttcagctacaaaaaga

SEQ ID NO: 515105 - DNA, 120 bp, Artificial Sequence
  ENSG00000164754_23 (sequence is synthesized)
taggactgacctggtttaaagtgttctattttgtaaatcattccatttgagtctttctgatgaacttggctatactgaaatctgttattttagtgaggctccaaaatgagcaaagctagg

SEQ ID NO: 515106 - DNA, 120 bp, Artificial Sequence
  ENSG00000164754_24 (sequence is synthesized)
cctgattagagtagagtgactattaaaaaacataactttctaggagctataaatcaaagttttaaaaagatgtttggatatatttgagtattccgatcatgaaaacagaaattgccctgc

SEQ ID NO: 515107 - DNA, 120 bp, Artificial Sequence
  ENSG00000164754_25 (sequence is synthesized)
ctactacaaggacagactgatgggaaattatgcacctggtcaacttagcttttaagcagacgatgctgtaaaaactaacggcttctctgatatttattgtaagttttagtactgatctcc

SEQ ID NO: 515108 - DNA, 120 bp, Artificial Sequence
  ENSG00000164754_26 (sequence is synthesized)
ttttccagtgctgcacactcctggtttggaactttaatagcgttgcaacgaaatcctatatccagtttcctgtaatttaattgaagaaaaatacatccaaataaagactttattattaac

SEQ ID NO: 515109 - DNA, 120 bp, Artificial Sequence
  ENSG00000164754_27 (sequence is synthesized)
agaccagatagcatcagaaatcatgtgactgttatgattatcagaatgtcttaactttttagggcaaagttaacactgaaagttctagcttaagtgttgaaacttttgtgggaaaaaaaa

SEQ ID NO: 515110 - DNA, 120 bp, Artificial Sequence
  ENSG00000164754_28 (sequence is synthesized)
atcacttttgaaactcagacttcagtgtatacccaataatttaaaattatgtgaaatgttttaaatttgtgaactcgtaattactgttttaatgattcagtttcttcagagtggtaattg

SEQ ID NO: 515111 - DNA, 120 bp, Artificial Sequence
  ENSG00000164754_29 (sequence is synthesized)
tataaaattgctattgcagctttacattcaatatgatgtgcctgtaaaccaaggagttttccccgtttgtaaaaagacattgtagataattgaatgtttgattttagaaaggtcattagt

SEQ ID NO: 515112 - DNA, 120 bp, Artificial Sequence
  ENSG00000164754_30 (sequence is synthesized)
ttcttgttacacattttgttagtctggtttttgttgcttatcgggtttaatattgttcttgaaaatagttgatgctatgttatgtataacttttctaataaaagttgtgttataagctgt

SEQ ID NO: 515113 - DNA, 120 bp, Artificial Sequence
  ENSG00000164754_31 (sequence is synthesized)
ttgagtaaatctttatggagctaaaattttatctggccttcttcattaaagaaagcattatgtatgtcttagtgtactagtttaaaaaataaatggttctataatactgttcaaaactgt

SEQ ID NO: 515114 - DNA, 120 bp, Artificial Sequence
  ENSG00000164754_32 (sequence is synthesized)
caagtggtatttagggaggccttttaaagtatcttggttttgacagaaaatggtaaggaatgagtccagaggaagaagagcaacaggatatagacagtccactcggagtgagagaatatg

SEQ ID NO: 515115 - DNA, 120 bp, Artificial Sequence
  ENSG00000164754_33 (sequence is synthesized)
ttctgggagtcggtgcagtctttcctgactctttttgaatagtattgctttagagtgctccagagtgagcatccttgactctgaagttggttctgatttattatttggcaaacattcctg

SEQ ID NO: 515116 - DNA, 120 bp, Artificial Sequence
  ENSG00000164754_34 (sequence is synthesized)
cacaccttcagtactaggcagttttaggtcatcttattaagtaatcagaataaacttcaaatacctgagaaaatgtaaagcagtatctgtctgcttcattcaaactttgactaccattga

SEQ ID NO: 515117 - DNA, 120 bp, Artificial Sequence
  ENSG00000164754_35 (sequence is synthesized)
gttcagctaggataggaaagctaagcaagtatgaaggaggaaatagtagggtttggtttagggctttccaatcttaagtccatagaataaatgaatttgtgcaaagggaggcttttagat

SEQ ID NO: 515118 - DNA, 120 bp, Artificial Sequence
  ENSG00000164754_36 (sequence is synthesized)
aaccttaggcttcttgttcagcctccatcaagaatactctgccaattttaagaactagttttctgtgccctctggtggtaagagttgtcaataagagcatttttctgtatgagctcagga

SEQ ID NO: 515119 - DNA, 120 bp, Artificial Sequence
  ENSG00000164754_37 (sequence is synthesized)
ataggaacacagtaatgagtaggtgactttcataaccaccctccttctggtaattctttagtttcttttaaagactttggttttaatgttcttaactctttctgtaaagcctgagagaag

SEQ ID NO: 515120 - DNA, 120 bp, Artificial Sequence
  ENSG00000164754_38 (sequence is synthesized)
atataggaagtggacccagaaaagcaatgtcctcactcctattatttgctgccgtgagacattcaagactctcagagagaaagcttatgatttataagttacaatataataaccttacag

SEQ ID NO: 515121 - DNA, 120 bp, Artificial Sequence
  ENSG00000164754_39 (sequence is synthesized)
tttataaaaaatcaaaaaagatatatactgtaataaatttttccttgtggggaagtatagagatataatctcagtatttctttttgactagaaaacttcagccactgtgtattttcatat

SEQ ID NO: 515122 - DNA, 120 bp, Artificial Sequence
  ENSG00000164754_40 (sequence is synthesized)
ttaaaataagctactttaaaagcatatatcttaaattgtcttatttgtattgctttaagcctcagcaggtagagcagatggaaataccacctgtagagcttcccccagaagaacctccaa

SEQ ID NO: 515123 - DNA, 120 bp, Artificial Sequence
  ENSG00000164754_41 (sequence is synthesized)
cttttactttcagctcttagtattttggggtctatttttttttcctctctcaaaattaaaacaatagatttgttttaaatctgttgtttttaaaatacatattaaacatttactcaagca

SEQ ID NO: 515124 - DNA, 120 bp, Artificial Sequence
  ENSG00000164754_42 (sequence is synthesized)
ttttatagttttcatattaaagagagaagaaaaattttaaatttcttatgtcttgataagtatttaaattgtcagatgatgtttacattaacttttttttcccctcttaggttttcttct

SEQ ID NO: 515125 - DNA, 120 bp, Artificial Sequence
  ENSG00000164754_43 (sequence is synthesized)
aacaaatgattctgatccattctgagatctacaaaggctgttaccctgcaggtccatctcacgtcccccaggaggccggggaaaccctgggctgcggagggaggggaggaggtttgaacg

SEQ ID NO: 515126 - DNA, 120 bp, Artificial Sequence
  ENSG00000164754_44 (sequence is synthesized)
tcgccccgggcccgccctcggcccggacccatgcagcttgggcccgcatcatcgcttgttcggtaacaaatgattctgatccattctgagatctacaaaggctgttaccctgcaggtttt

SEQ ID NO: 515127 - DNA, 80 bp, Artificial Sequence
  ENSG00000164754_45 (sequence is synthesized)
actcctgggggcgggagggcgagggagaaggcagccctcgccgcgcccacgcgtgctgccaccctcccggcgcccaagcg

SEQ ID NO: 515128 - DNA, 120 bp, Artificial Sequence
  ENSG00000164754_46 (sequence is synthesized)
attaagagtctgccagaacattagtcatctagaaaatcatgttgcaatatttatgtatgtatatttagttgaaataaacagtatatttagtggtacagttgatttatatcctgaagttct

SEQ ID NO: 515129 - DNA, 120 bp, Artificial Sequence
  ENSG00000164754_47 (sequence is synthesized)
ttaagaggggccagtaaccaaaacctccatgatcagcagcagtccacagaccacatagtgtgtgtagatagcatccttatagcgcaatatagaagcatactttcagccaaatgtttgctt

SEQ ID NO: 515130 - DNA, 120 bp, Artificial Sequence
  ENSG00000164754_48 (sequence is synthesized)
gcacatagaggactttgccttgtaatttaagaaaaacagactcttcagtttgtactctaaatgctaagtgattgctcagcagcattaagtacagttttctattagttcaaaatacacaat

SEQ ID NO: 515131 - DNA, 120 bp, Artificial Sequence
  ENSG00000164754_49 (sequence is synthesized)
ctcaaggtaatttaggagcttttaggagatgtagaaatacttcatttttcattggacttgttttgtcagctttttgggggtcatttttattcaggatgaagatgcatcagggggcgatca

SEQ ID NO: 515132 - DNA, 120 bp, Artificial Sequence
  ENSG00000164754_50 (sequence is synthesized)
aacaaatgattctgatccattctgagatctacaaaggctgttaccctgcaggtccatctcacgtcccccaggaggccggggaaaccctgggctgcggagggaggggaggaggttttcttc

SEQ ID NO: 515133 - DNA, 120 bp, Artificial Sequence
  ENSG00000164756_0 (sequence is synthesized)
atggagtttcttgaaagaacgtatcttgtgaatgataaagctgccaagatgtatgctttcacactagaaagtgtggaactccaacagaaaccggtgaataaagatcagtgtcccagagag

SEQ ID NO: 515134 - DNA, 120 bp, Artificial Sequence
  ENSG00000164756_1 (sequence is synthesized)
agaccagaggagctggagtcaggaggcatgtaccactgccacagtggctccaagcccacagaaaagggggcgaatgagtacgcctatgccaagtggaaactctgttctgcttcagcaata

SEQ ID NO: 515135 - DNA, 120 bp, Artificial Sequence
  ENSG00000164756_2 (sequence is synthesized)
tgcttcattttcatgattgcagaggtcgtgggtgggcacattgctgggagtcttgctgttgtcacagatgctgcccacctcttaattgacctgaccagtttcctgctcagtctcttctcc

SEQ ID NO: 515136 - DNA, 120 bp, Artificial Sequence
  ENSG00000164756_3 (sequence is synthesized)
ctgtggttgtcatcgaagcctccctctaagcggctgacatttggatggcaccgagcagagatccttggtgccctgctctccatcctgtgcatctgggtggtgactggcgtgctagtgtac

SEQ ID NO: 515137 - DNA, 120 bp, Artificial Sequence
  ENSG00000164756_4 (sequence is synthesized)
ctggcatgtgagcgcctgctgtatcctgattaccagatccaggcgactgtgatgatcatcgtttccagctgcgcagtggcggccaacattgtactaactgtggttttgcaccagagatgc

SEQ ID NO: 515138 - DNA, 120 bp, Artificial Sequence
  ENSG00000164756_5 (sequence is synthesized)
cttggccacaatcacaaggaagtacaagccaatgccagcgtcagagctgcttttgtgcatgcccttggagatctatttcagagtatcagtgtgctaattagtgcacttattatctacttt

SEQ ID NO: 515139 - DNA, 120 bp, Artificial Sequence
  ENSG00000164756_6 (sequence is synthesized)
aagccagagtataaaatagccgacccaatctgcacattcatcttttccatcctggtcttggccagcaccatcactatcttaaaggacttctccatcttactcatggaaggtgtgccaaag

SEQ ID NO: 515140 - DNA, 120 bp, Artificial Sequence
  ENSG00000164756_7 (sequence is synthesized)
agcctgaattacagtggtgtgaaagagcttattttagcagtcgacggggtgctgtctgtgcacagcctgcacatctggtctctaacaatgaatcaagtaattctctcagctcatgttgct

SEQ ID NO: 515141 - DNA, 120 bp, Artificial Sequence
  ENSG00000164756_8 (sequence is synthesized)
acagcagccagccgggacagccaagtggttcggagagaaattgctaaagcccttagcaaaagctttacgatgcactcactcaccattcagatggaatctccagttgaccaggaccccgac

SEQ ID NO: 515142 - DNA, 120 bp, Artificial Sequence
  ENSG00000164756_9 (sequence is synthesized)
tgccttttctgtgaagacccctgtgactagctcagtcacaccgtcagtttcccaaatttgacaggccaccttcaaacatgctgctatgcagtttctgcatcatagaaaataaggaaccaa

SEQ ID NO: 515143 - DNA, 120 bp, Artificial Sequence
  ENSG00000164756_10 (sequence is synthesized)
aggaagaaattcatgtcatggtgcaatgcacattttatctatttatttagttccattcaccatgaaggaagaggcactgagatccatcaatcaattggattatatactgatcagtagctg

SEQ ID NO: 515144 - DNA, 120 bp, Artificial Sequence
  ENSG00000164756_11 (sequence is synthesized)
tgttcaattgcaggaatgtgtatatagattattcctgagtggagccgaagtaacagctgtttgtaactatcggcaataccaaattcatctcccttccaataatgcatcttgagaacacat

SEQ ID NO: 515145 - DNA, 120 bp, Artificial Sequence
  ENSG00000164756_12 (sequence is synthesized)
aggtaaatttgaactcaggaaagtcttactagaaatcagtggaagggacaaatagtcacaaaattttaccaaaacattagaaacaaaaaataaggagagccaagtcaggaataaaagtga

SEQ ID NO: 515146 - DNA, 120 bp, Artificial Sequence
  ENSG00000164756_13 (sequence is synthesized)
ctctgtatgctaacgccacattagaacttggttctctcaccaagctgtaatgtgatttttttttctactctgaattggaaatatgtatgaatatacagagaagtgcttacaactaatttt

SEQ ID NO: 515147 - DNA, 120 bp, Artificial Sequence
  ENSG00000164756_14 (sequence is synthesized)
tatttacttgtcacattttggcaataaatccctcttatttctaaattctaacttgtttatttcaaaactttatataatcactgttcaaaaggaaatattttcacctaccagagtgcttaa

SEQ ID NO: 515148 - DNA, 120 bp, Artificial Sequence
  ENSG00000164756_15 (sequence is synthesized)
acactggcaccagccaaagaatgtggttgtagagacccagaagtcttcaagaacagccgacaaaaacattcgagttgaccccaccaagttgttgccacagataatttagatatttacctg

SEQ ID NO: 515149 - DNA, 120 bp, Artificial Sequence
  ENSG00000164756_16 (sequence is synthesized)
caagaaggaataaagcagatgcaaccaattcattcagtccacgagcatgatgtgagcactgctttgtgctagacattgggcttagcattgaaactataaagaggaatcagacgcagcaag

SEQ ID NO: 515150 - DNA, 120 bp, Artificial Sequence
  ENSG00000164756_17 (sequence is synthesized)
tgcttctgtgttctggtagcaactcaacactatctgtggagagtaaactgaagatgtgcaggccaacattctggaaatcctatgtcaatgggtttggtttggaacctggacttctgcatt

SEQ ID NO: 515151 - DNA, 120 bp, Artificial Sequence
  ENSG00000164756_18 (sequence is synthesized)
tttaaaagttacccagagatgcttctaaagatgagccatagtctagaagattgtcaaccacaggagttcattgagtgggacagctagacacatacattggcagctacaatagtatcatga

SEQ ID NO: 515152 - DNA, 120 bp, Artificial Sequence
  ENSG00000164756_19 (sequence is synthesized)
attgcaatgatgtagtggggtataaaaggaaagcgatggatattgccggatgggcatggccagtgatgtttcacgtcattgaggtgacagctctgctggactttgaattacatatggagg

SEQ ID NO: 515153 - DNA, 120 bp, Artificial Sequence
  ENSG00000164756_20 (sequence is synthesized)
ctctccaggaagacgaagaagagaaggacattctaggcaaaaagaagactaggcacaaggcacacttatgtttgtctgttagcttttagttgaaaaagcaaaatacatgatgcaaagaaa

SEQ ID NO: 515154 - DNA, 120 bp, Artificial Sequence
  ENSG00000164756_21 (sequence is synthesized)
gggctgccagcatgctgtcacctctcaataggagatcagttaatgcatactgaaggaaggcttgttggagaagaatcctctcctgaaccctgtggagactctagaatcctgcggatgtct

SEQ ID NO: 515155 - DNA, 120 bp, Artificial Sequence
  ENSG00000164756_22 (sequence is synthesized)
ctctccctaagtaagagatgttacttcctggagggaatgcagtgttgggaatctgaagacccagctttgagctgaatttgctttgtgatacctgaaggagctgcaaatgaacacttcata

SEQ ID NO: 515156 - DNA, 120 bp, Artificial Sequence
  ENSG00000164756_23 (sequence is synthesized)
ttttaagaagcatcaagaaagcctgcctgtctaactttggaaatatcaccctcatgctgtcttcccaggatgtctctctccctaagtaagagatgttacttcctggagggaatgcagtgt

SEQ ID NO: 515157 - DNA, 120 bp, Artificial Sequence
  ENSG00000164756_24 (sequence is synthesized)
tgggaatctgaagacccagctttgagctgaatttgctttgtgatacctggagagaagacgtgttttcttgacaacagcacagtacctagtgagttcaacaacaacgacaacaacagccgc

SEQ ID NO: 515158 - DNA, 120 bp, Artificial Sequence
  ENSG00000164756_25 (sequence is synthesized)
gtcagactctagcaaggtactagaaacctagcaggcattaataattgttgaggcaatgactctgaggctatatctgggccttgtcattatttatcatttatatttgtatttttttctgaa

SEQ ID NO: 515159 - DNA, 120 bp, Artificial Sequence
  ENSG00000164756_26 (sequence is synthesized)
atttgagggccaagaaaacattgactttgactgaggaggtcacatctgtgccatctctgcaaatcaatcagcaccactgaaataactacttagcattctgctgagctttccctgctcagt

SEQ ID NO: 515160 - DNA, 120 bp, Artificial Sequence
  ENSG00000164756_27 (sequence is synthesized)
agagacaaatatactcatcccccacctcagtgagcttgtttaggcaaccaggattagagctgctcaggttcccaacgtctcctgccacatcgggttctcaaaatggaaagaatggtttat

SEQ ID NO: 515161 - DNA, 120 bp, Artificial Sequence
  ENSG00000164756_28 (sequence is synthesized)
gccaaatcacttttcctgtctgaaggaccactgaatggttttgtttttccatattttgcataggacgccctaaagactaggtgacttggcaaacacacaagtgttagtataattctttgc

SEQ ID NO: 515162 - DNA, 120 bp, Artificial Sequence
  ENSG00000164756_29 (sequence is synthesized)
ttctgcttctttttgaaaatcatgtttagatttgattttaagtcagaaattcactgaatgtcaggtaatcattatggagggagatttgtgtgtcaaccaaagtaattgtcccatggcccc

SEQ ID NO: 515163 - DNA, 120 bp, Artificial Sequence
  ENSG00000164756_30 (sequence is synthesized)
agggtatttctgttgtttccctgaaattctgcttttttagtcagctagattgaaaactctgaacagtagatgtttatatggcaaaatgcaagacaatctacaagggagattttaaggatt

SEQ ID NO: 515164 - DNA, 120 bp, Artificial Sequence
  ENSG00000164756_31 (sequence is synthesized)
ttgagatgaaaaaacagatgctactcaggggctttatgaaccatccatcaattctgaagttctgactctcccattaccctttccctggtgtggtcagaactccaggtcactggaagttag

SEQ ID NO: 515165 - DNA, 120 bp, Artificial Sequence
  ENSG00000164756_32 (sequence is synthesized)
tggaatcatgtagttgaattctttacttcaagacattgtattctctccagctatcaaaacattaatgatcttttatgtcttttttttgttattgttatactttaagttctggggtacatg

SEQ ID NO: 515166 - DNA, 81 bp, Artificial Sequence
  ENSG00000164756_33 (sequence is synthesized)
cttttatgtctgtctttcaaagcaacactctgttcttctgagtagtgaaatcaggtcaactttaccaccagcctccatttt

SEQ ID NO: 515167 - DNA, 120 bp, Artificial Sequence
  ENSG00000164756_34 (sequence is synthesized)
gtagtgaaatcaggtcaactttaccaccagcctccatttttaatatgcttcaccatcatccagcacctacttaagatttatctagggctctgtggtgatgttaggacccataaaagaaat

SEQ ID NO: 515168 - DNA, 120 bp, Artificial Sequence
  ENSG00000164756_35 (sequence is synthesized)
ttatgccttccatatgtttggttacagatgggaaatgggaatgttgaaggacatgaaagaaaggatgtttacacattaagcatcagttctgaagctagattgtctgagtttgaatcttag

SEQ ID NO: 515169 - DNA, 120 bp, Artificial Sequence
  ENSG00000164756_36 (sequence is synthesized)
ctcttccctttattagctctgtgacctcgagctagttacttaaatgctctgatcctctatttcctgatcagtgaaacctccctattcaaatgtgtgagagtttaataaattaggacactt

SEQ ID NO: 515170 - DNA, 120 bp, Artificial Sequence
  ENSG00000164756_37 (sequence is synthesized)
aaaaatgttggagcagtgcatagcatgtagtgttcagtacatgttaaatgttgttttttattatgtacaaacatgagtgggcacagaattttaaatcatctcaacttttgagaaattttg

SEQ ID NO: 515171 - DNA, 120 bp, Artificial Sequence
  ENSG00000164756_38 (sequence is synthesized)
agttatcaacaccgttcccacaagacagtggcaaaattattggtgagaattaaacagctgtttctcagaggaagcaatggaggcttgctgggataaaggcatttactgagaggctgttac

SEQ ID NO: 515172 - DNA, 120 bp, Artificial Sequence
  ENSG00000164756_39 (sequence is synthesized)
ctagtgagagtgatgaattaattaaaatagtcgaatccctttctgactgtctctgaaagcttccgcttttatctttgaagagcagaattgtcactccaaggacatttattaataaaaaga

SEQ ID NO: 515173 - DNA, 120 bp, Artificial Sequence
  ENSG00000164756_40 (sequence is synthesized)
acaactgtccagtgcaatgaaggcaaagtcataggtctcccaagtcttaccccattcctgtgaaatatcaagttcttggcttttctctgtcatgtagcctcaactttctctgaccgggtg

SEQ ID NO: 515174 - DNA, 120 bp, Artificial Sequence
  ENSG00000164756_41 (sequence is synthesized)
catttctttctctggtttctaaattgccagtggcaaatttggatcacttacttaatatctgttaaattttgtgacccaacaaagtcttttagcactgtggtgtcaaaaagaaaaacacct

SEQ ID NO: 515175 - DNA, 120 bp, Artificial Sequence
  ENSG00000164756_42 (sequence is synthesized)
cccaggcatatacattttatagattcctggagaatgttgctctccagctccatccccacccaatgaaatatgatccagagagtcttgcaaagagacaagcctcattttccacaattagct

SEQ ID NO: 515176 - DNA, 120 bp, Artificial Sequence
  ENSG00000164756_43 (sequence is synthesized)
ctaaagtgcctccaggaaatgattttctcagctcatctctctgtattccctgttttggatcacagggcaatctgtttaaatgactaattacagaaatcattaaaggcaccaagcaaatgt

SEQ ID NO: 515177 - DNA, 120 bp, Artificial Sequence
  ENSG00000164756_44 (sequence is synthesized)
catctctgaatacacacatcccaagctttacaaatcctgcctggcttgacagtgatgaggccacttaacagtccagcgcaggcggatgttaaaaaaaataaaaaggtgaccatctgcggt

SEQ ID NO: 515178 - DNA, 120 bp, Artificial Sequence
  ENSG00000164756_45 (sequence is synthesized)
ttagttttttaactttctgatttcacacttaacgtctgtcattctgttactgggcacctgtttaaattctattttaaaatgttaatgtgtgttgtttaaaataaaatcaagaaagagaga

SEQ ID NO: 515179 - DNA, 120 bp, Artificial Sequence
  ENSG00000164756_46 (sequence is synthesized)
acaattgaatcagatatcatatgaaagacatacacacttcatgtaatgctacctgcaagtctccctagaaaagcagtttttgtaggtgaaaacaatgaagccaggtaatattgcaaggag

SEQ ID NO: 515180 - DNA, 120 bp, Artificial Sequence
  ENSG00000164756_47 (sequence is synthesized)
gctgtaattttagcagacctaccaacaacactgatgtaggaagctcattattttaatttctggagccttttaattttttctttagaaagtgtataaataattgcagtgctgctttgcttc

SEQ ID NO: 515181 - DNA, 120 bp, Artificial Sequence
  ENSG00000164756_48 (sequence is synthesized)
tctgacagctgcttagaggtcatcttagaactaaattccaaagaaataattttaggctgataaagagtccagaaaaaggaggagggagagaaaaagaaagaattagtttagtgtagcgaa

SEQ ID NO: 515182 - DNA, 120 bp, Artificial Sequence
  ENSG00000164758_0 (sequence is synthesized)
gtgttacgtcacagtgggcggaagtcgcggccgctgttttgaaatcgggccgcggggggtctctcaagctggttccaacgctgaggccccacagcctcccaattccgggcagacccctga

SEQ ID NO: 515183 - DNA, 120 bp, Artificial Sequence
  ENSG00000164758_1 (sequence is synthesized)
cacctgctgtctggccccttccggcctgaagctgcagccgcgccatgtccacccctccgttggccgcgtcggggatggcgcccgggcccttcgccgggccccaggctcagcaggccgccc

SEQ ID NO: 515184 - DNA, 120 bp, Artificial Sequence
  ENSG00000164758_2 (sequence is synthesized)
gggaagtcaacacggcgtcgctgtgccgcatcgggcaggagacagtgcaggacatcgtgtaccgcaccatggagatcttccagctcctgaggaacatgcagctgccaaatggtgtcactt

SEQ ID NO: 515185 - DNA, 120 bp, Artificial Sequence
  ENSG00000164758_3 (sequence is synthesized)
accacactggaacatatcaagaccggttaacaaagctacaggataatcttcgccaactttcagttctcttcaggaagctgagattggtatatgacaaatgcaatgaaaactgtggtggga

SEQ ID NO: 515186 - DNA, 120 bp, Artificial Sequence
  ENSG00000164758_4 (sequence is synthesized)
tattccatatgtggaagaagatggctcaaagaatgatgatcgggctggcccacctcgttttgctagtgaagagaggcgagaaattgctgaagtaaataaaaaactcaaacagaagaatca

SEQ ID NO: 515187 - DNA, 120 bp, Artificial Sequence
  ENSG00000164758_5 (sequence is synthesized)
acagctgaaacaaattatggatcaattacgaaatctcatctgggatataaatgccatgttggcaatgaggaactaagctgatatttaaatttcctgctttacacatgttataccattgtt

SEQ ID NO: 515188 - DNA, 120 bp, Artificial Sequence
  ENSG00000164758_6 (sequence is synthesized)
ttttccctcaagtattttttccctgtgaagaagattatttatctgcttttattttagtcactaaaactaaagtttttatttttacattgtgatttttacattaaaatattaacttttttt

SEQ ID NO: 515189 - DNA, 120 bp, Artificial Sequence
  ENSG00000164758_7 (sequence is synthesized)
aatgctattttatgaaagattattgtaataaactttgatggggtttgtattttggttaatcttcatgaattgaataattgtttttttaaagcaaaataaagttttttaaataaatgttaa

SEQ ID NO: 515190 - DNA, 120 bp, Artificial Sequence
  ENSG00000164758_8 (sequence is synthesized)
tacttttatagtgtttcataattaaatatttgctgattgagtagggtttttttaaatttttattttattttattttattttttacttctcccatcttcctgctggaagtattgtttagtt

SEQ ID NO: 515191 - DNA, 120 bp, Artificial Sequence
  ENSG00000164758_9 (sequence is synthesized)
gtacatgacaaccaatgttataaaggctgttttgcaaaagaaacctgaaagggtaatgcatagaatgcattgaaatggtcaactattaaagctcttatttcaggccatcacctgaattga

SEQ ID NO: 515192 - DNA, 120 bp, Artificial Sequence
  ENSG00000164761_0 (sequence is synthesized)
ggagacgcaccggagcgctcgcccagccgccgcctccaagcccctgaggtttccggggaccacaatgaacaacttgctgtgctgcgcgctcgtgtttctggacatctccattaagtggac

SEQ ID NO: 515193 - DNA, 120 bp, Artificial Sequence
  ENSG00000164761_1 (sequence is synthesized)
cacccaggaaacgtttcctccaaagtaccttcattatgacgaagaaacctctcatcagctgttgtgtgacaaatgtcctcctggtacctacctaaaacaacactgtacagcaaagtggaa

SEQ ID NO: 515194 - DNA, 120 bp, Artificial Sequence
  ENSG00000164761_2 (sequence is synthesized)
gaccgtgtgcgccccttgccctgaccactactacacagacagctggcacaccagtgacgagtgtctatactgcagccccgtgtgcaaggagctgcagtacgtcaagcaggagtgcaatcg

SEQ ID NO: 515195 - DNA, 120 bp, Artificial Sequence
  ENSG00000164761_3 (sequence is synthesized)
cacccacaaccgcgtgtgcgaatgcaaggaagggcgctaccttgagatagagttctgcttgaaacataggagctgccctcctggatttggagtggtgcaagctggaaccccagagcgaaa

SEQ ID NO: 515196 - DNA, 120 bp, Artificial Sequence
  ENSG00000164761_4 (sequence is synthesized)
tacagtttgcaaaagatgtccagatgggttcttctcaaatgagacgtcatctaaagcaccctgtagaaaacacacaaattgcagtgtctttggtctcctgctaactcagaaaggaaatgc

SEQ ID NO: 515197 - DNA, 120 bp, Artificial Sequence
  ENSG00000164761_5 (sequence is synthesized)
aacacacgacaacatatgttccggaaacagtgaatcaactcaaaaatgtggaatagatgttaccctgtgtgaggaggcattcttcaggtttgctgttcctacaaagtttacgcctaactg

SEQ ID NO: 515198 - DNA, 120 bp, Artificial Sequence
  ENSG00000164761_6 (sequence is synthesized)
gcttagtgtcttggtagacaatttgcctggcaccaaagtaaacgcagagagtgtagagaggataaaacggcaacacagctcacaagaacagactttccagctgctgaagttatggaaaca

SEQ ID NO: 515199 - DNA, 120 bp, Artificial Sequence
  ENSG00000164761_7 (sequence is synthesized)
tcaaaacaaagaccaagatatagtcaagaagatcatccaagatattgacctctgtgaaaacagcgtgcagcggcacattggacatgctaacctcaccttcgagcagcttcgtagcttgat

SEQ ID NO: 515200 - DNA, 120 bp, Artificial Sequence
  ENSG00000164761_8 (sequence is synthesized)
caataaaggcatgcaaacccagtgaccagatcctgaagctgctcagtttgtggcgaataaaaaatggcgaccaagacaccttgaagggcctaatgcacgcactaaagcactcaaagacgt

SEQ ID NO: 515201 - DNA, 120 bp, Artificial Sequence
  ENSG00000164761_9 (sequence is synthesized)
accactttcccaaaactgtcactcagagtctaaagaagaccatcaggttccttcacagcttcacaatgtacaaattgtatcagaagttatttttagaaatgataggtaaccaggtccaat

SEQ ID NO: 515202 - DNA, 120 bp, Artificial Sequence
  ENSG00000164761_10 (sequence is synthesized)
cagtaaaaataagctgcttataactggaaatggccattgagctgtttcctcacaattggcgagatcccatggatgagtaaactgtttctcaggcacttgaggctttcagtgatatctttc

SEQ ID NO: 515203 - DNA, 120 bp, Artificial Sequence
  ENSG00000164761_11 (sequence is synthesized)
tcattaccagtgactaattttgccacagggtactaaaagaaactatgatgtggagaaaggactaacatctcctccaataaaccccaaatggttaatccaactgtcagatctggatcgtta

SEQ ID NO: 515204 - DNA, 120 bp, Artificial Sequence
  ENSG00000164761_12 (sequence is synthesized)
tctactgactatattttcccttattactgcttgcagtaattcaactggaaattaaaaaaaaaaaactagactccattgtgccttactaaatatgggaatgtctaacttaaatagctttga

SEQ ID NO: 515205 - DNA, 120 bp, Artificial Sequence
  ENSG00000164761_13 (sequence is synthesized)
gatttcagctatgctagaggcttttattagaaagccatatttttttctgtaaaagttactaatatatctgtaacactattacagtattgctatttatattcattcagatataagatttgt

SEQ ID NO: 515206 - DNA, 120 bp, Artificial Sequence
  ENSG00000164761_14 (sequence is synthesized)
taaagaaacggtatgacttaattttagaaagaaaattatattctgtttattatgacaaatgaaagagaaaatatatatttttaatggaaagtttgtagcatttttctaataggtactgcc

SEQ ID NO: 515207 - DNA, 120 bp, Artificial Sequence
  ENSG00000164761_15 (sequence is synthesized)
tctaataggtactgccatatttttctgtgtggagtatttttataattttatctgtataagctgtaatatcattttatagaaaatgcattatttagtcaattgtttaatgttggaaaacat

SEQ ID NO: 515208 - DNA, 120 bp, Artificial Sequence
  ENSG00000164761_16 (sequence is synthesized)
aaatgcattatttagtcaattgtttaatgttggaaaacatatgaaatataaattatctgaatattagatgctctgagaaattgaatgtaccttatttaaaagattttatggttttataac

SEQ ID NO: 515209 - DNA, 120 bp, Artificial Sequence
  ENSG00000164761_17 (sequence is synthesized)
gaaaaatgaaaatgctagagttttgtgcaacataatagtagcagtaaaaaccaagtgaaaagtctttccaaaactgtgttaagagggcatctgctgggaaacgatttgaggagaaggtac

SEQ ID NO: 515210 - DNA, 120 bp, Artificial Sequence
  ENSG00000164764_0 (sequence is synthesized)
ctcgccggccgctcgggcagctcccgggccgcggccagccgaggatcagagcgcttgccccgggggtctgtcgcgtcgcaggcgccgccggagccctggccatgaggaccctgtggatgg

SEQ ID NO: 515211 - DNA, 120 bp, Artificial Sequence
  ENSG00000164764_1 (sequence is synthesized)
ctgtggcccggggcccaggccggctgcgccgaggccgggcgctgctgtcccggccgggaccccgcctgcttcgcccgcggctggaggctggacagggtctacgggacgtgtttctgcgac

SEQ ID NO: 515212 - DNA, 120 bp, Artificial Sequence
  ENSG00000164764_2 (sequence is synthesized)
gtctacgggacgtgtttctgcgaccaagcctgtcgcttcaccggggactgctgcttcgactacgacagggcgtgcccagctcgcccgtgcttcgtgggggaatggagcccctggagtggt

SEQ ID NO: 515213 - DNA, 120 bp, Artificial Sequence
  ENSG00000164764_3 (sequence is synthesized)
tgtgcagaccagtgcaagcctacaacccgtgtgcggaggcgctcggtgcagcaggagcctcagaacggcggggcgccctgcccacccctggaagagagagctggctgcctggagtactcc

SEQ ID NO: 515214 - DNA, 120 bp, Artificial Sequence
  ENSG00000164764_4 (sequence is synthesized)
accccgcagggccaggactgcgggcacacctatgttcctgcctttataactacctctgcattcaacaaggagagaacacgacaagctacgtctccacactggtctacacacacagaggat

SEQ ID NO: 515215 - DNA, 120 bp, Artificial Sequence
  ENSG00000164764_5 (sequence is synthesized)
gctggatactgtatggagtttaagacagagtccttgactcctcactgtgctctggaaaactggcccttgactagatggatgcagtatctccgagagggatacacggtgtgtgtggattgt

SEQ ID NO: 515216 - DNA, 120 bp, Artificial Sequence
  ENSG00000164764_6 (sequence is synthesized)
cagcctccagctatgaactctgtgagccttcgttgttctggagatggcctggactccgatggaaatcagactctccattggcaagcaattggtaatcctcggtgtcaaggaacttggaaa

SEQ ID NO: 515217 - DNA, 120 bp, Artificial Sequence
  ENSG00000164764_7 (sequence is synthesized)
aaagttcggcgagtagaccagtgttcttgtccagctgttcacagttttatttttatatagatggtgatataaatatttccaaatgcatttgtaaacattctaaatattctcaagtcatgt

SEQ ID NO: 515218 - DNA, 120 bp, Artificial Sequence
  ENSG00000164764_8 (sequence is synthesized)
tcaatgtttcctaaaccttcaattttggccaaagtccccaaacacatcattgccacactctgaagtagagaaagaaaatttaggggccagttctcaaggaacacaggtcctttattttta

SEQ ID NO: 515219 - DNA, 120 bp, Artificial Sequence
  ENSG00000164764_9 (sequence is synthesized)
ttttaactaagttgaagacccactcaaaaagctcttgtggttttatgttcttgacctttcaactggagtcctctcattcagcaggtggcccgtgagacacagaatacatgtctgtttgct

SEQ ID NO: 515220 - DNA, 120 bp, Artificial Sequence
  ENSG00000164764_10 (sequence is synthesized)
aaagtaaaattactgtaactcagtccgattattggtgacggaagtgtcatttaaggggatctatgttttgaaccttgcagtctattttataatcttttaaaagtttctcactttaaaaca

SEQ ID NO: 515221 - DNA, 120 bp, Artificial Sequence
  ENSG00000164764_11 (sequence is synthesized)
tgtatacaggtatgcacactctacacatatatttccatatatttaatattccataaattctgaaataatttcaagcaaattatcacaaataatttttccacagggcaaattatttaaaat

SEQ ID NO: 515222 - DNA, 120 bp, Artificial Sequence
  ENSG00000164764_12 (sequence is synthesized)
tttagtaagcattctgtaatgaaaaaccaagttatactaaaaacattttttgaagaagaaattttttttttgcttaagaagtgaaaggatcaaatgctcattgtaggtcaatgggagttc

SEQ ID NO: 515223 - DNA, 120 bp, Artificial Sequence
  ENSG00000164764_13 (sequence is synthesized)
ttttaaatgttataattttcatgaaaagaaatgttgacaccagtgaatgaaacaattgctttcattctgaaaattctaccaccatttgcatctaagattatttccaaggcttaaagcctg

SEQ ID NO: 515224 - DNA, 120 bp, Artificial Sequence
  ENSG00000164764_14 (sequence is synthesized)
aagctgaataaaataatctttcagagtccagcttcaagtttagttgatgtaagctcactatttttttcctaccgcatgcattttctaatgtttggggtggatggtgtgtcggttatggaa

SEQ ID NO: 515225 - DNA, 120 bp, Artificial Sequence
  ENSG00000164764_15 (sequence is synthesized)
atggcatgtttaaggacctgggatgacaagtcattctgcagtcagccacagagccaaatttggactcctcaaccagaactccatgaaaagcctgactttgccaaacactgtgctggaaaa

SEQ ID NO: 515226 - DNA, 120 bp, Artificial Sequence
  ENSG00000164764_16 (sequence is synthesized)
gctaagcccctttcatttgtgaagtaaattttaaattcaagatatttagtttagagaattgagtcttgagatgtaaactacatgagatttctttggtttcaattgaataatattcactaa

SEQ ID NO: 515227 - DNA, 120 bp, Artificial Sequence
  ENSG00000164764_17 (sequence is synthesized)
caaatgatttactaaaatacgtatttcttggtccttatcatgtaatgacagattcacaacagcaataaggatggagatttccccaataattaataacaccgagagtagcaatatttttta

SEQ ID NO: 515228 - DNA, 120 bp, Artificial Sequence
  ENSG00000164764_18 (sequence is synthesized)
ctgtattttcatttaattgtcaaagttgtttttgtggaaaattaaattcttcagaaattaataataaaatatgtgagtctcatcaaggctagcaactttaagtcagtattaacattttca

SEQ ID NO: 515229 - DNA, 120 bp, Artificial Sequence
  ENSG00000164764_19 (sequence is synthesized)
tttaagtcagtattaacattttcatactgtttctaacatttattaagctagatttttgaagctatgtctgggtaatttccaatgttacttaaaagtttttttttctttgagacagagtct

SEQ ID NO: 515230 - DNA, 120 bp, Artificial Sequence
  ENSG00000164764_20 (sequence is synthesized)
cgcctggcctgttacttaaaatttttatactagtaaataaactttttgttcacatttataaaagctctatatttgtttgactagaaaataacccaaattttctggaccagtcagagaatg

SEQ ID NO: 515231 - DNA, 120 bp, Artificial Sequence
  ENSG00000164764_21 (sequence is synthesized)
ataaaatttcaccaaaaataaaacaaaaaaatccttcagaactgataggtataggtacaacaactactaatagcaataaagcaatggtgcttttatagttccgatatgtgttataacatt

SEQ ID NO: 515232 - DNA, 120 bp, Artificial Sequence
  ENSG00000164764_22 (sequence is synthesized)
taacataattgaggtgtataaaataaatttttcaccttatgcatttaatttttggtggatgaccagtaattgctttcttattgaagttaaatttttgttatttctattcttgagaaaatt

SEQ ID NO: 515233 - DNA, 120 bp, Artificial Sequence
  ENSG00000164764_23 (sequence is synthesized)
ttatgggctagaggagttaactgttaaataacagttttgaaaagcttgttattaattttagcaaagcccaagggaaatagttcagaactgaaacatgtagtccaagtgatgaatgaaaaa

SEQ ID NO: 515234 - DNA, 120 bp, Artificial Sequence
  ENSG00000164764_24 (sequence is synthesized)
ccaaaagtttttattttcaaatttaaaaatcaaagtatataagacctcttggcactcttttttaataagtaccttagtcttagggccctatccccaggcactctaaaaagatttacgaac

SEQ ID NO: 515235 - DNA, 120 bp, Artificial Sequence
  ENSG00000164764_25 (sequence is synthesized)
tctaaaatcccttaatagactgattttcaaaagtgctcatggaaaataattcgaacaaaaataaatacagccaccaggaaagaagggaaaagaagcaagggataatggccatttttgaag

SEQ ID NO: 515236 - DNA, 120 bp, Artificial Sequence
  ENSG00000164764_26 (sequence is synthesized)
agaaaagtgaaaaacaagtgaaggaaaaaaagaatagaaaaaggaataaggtaactataatcacagtattctttttggagttttgctttggtttttattcgagaatgttacaattaagca

SEQ ID NO: 515237 - DNA, 120 bp, Artificial Sequence
  ENSG00000164764_27 (sequence is synthesized)
taaaccgcaacagcaataatttaaagtgtttggttatcatctggcataaaaatttcagttagctatcttttctagatgtgcacaaaattgatgttaataaaactggttcctgccctctaa

SEQ ID NO: 515238 - DNA, 120 bp, Artificial Sequence
  ENSG00000164764_28 (sequence is synthesized)
aatagcaggagtggcctgtgcctcaacaacatgcttttgctgcagataatcagccagagcctgtttctctactcctcgctaagaatgctttgtttcccgtaaggaaagcttttagctaat

SEQ ID NO: 515239 - DNA, 120 bp, Artificial Sequence
  ENSG00000164764_29 (sequence is synthesized)
ctataatctatagaaactatgcttatcattggctgtcagtaaatatgtgggtcagactctgtttgtggctttcagctctgaaggctgtcagctccctgatcccactctgcactctatttc

SEQ ID NO: 515240 - DNA, 120 bp, Artificial Sequence
  ENSG00000164764_30 (sequence is synthesized)
tgtgtctgtctttaattcttctagtgctgctgggttagggtcttcacgaccgaactggtctcggcagtggaagaacatggaaacactaggctgacttagtctcccagcctacatctttct

SEQ ID NO: 515241 - DNA, 69 bp, Artificial Sequence
  ENSG00000164764_31 (sequence is synthesized)
agactagctctcaggccttcagcaacagactgaaggctgtgctgtcggcttccctacttttgaggtttt

SEQ ID NO: 515242 - DNA, 75 bp, Artificial Sequence
  ENSG00000164764_32 (sequence is synthesized)
gactggcttcctggctcctcgcccgtgcttcgtgggggaatggagcccctggagtggttgtgcagaccagtgcaa

SEQ ID NO: 515243 - DNA, 120 bp, Artificial Sequence
  ENSG00000164776_0 (sequence is synthesized)
acgttagcctccggtcatcaaatagcaaaacccaaaacaacagcagatgatatcttccaagtgtctgctcgggacacggcttcagccctctgtggtcccctctccccggggggctttggg

SEQ ID NO: 515244 - DNA, 120 bp, Artificial Sequence
  ENSG00000164776_1 (sequence is synthesized)
attcttgtcaagctccttcaagagcctgcaagcacttaaccagccacccagagttccctcactgaagatctgagcatgacccgggacgaggcactgccggactctcattctgcacaggac

SEQ ID NO: 515245 - DNA, 120 bp, Artificial Sequence
  ENSG00000164776_2 (sequence is synthesized)
ttctatgagaattatgagcccaaagagatcctgggcaggggcgttagcagtgtggtcaggcgatgcatccacaagcccacgagccaggagtacgccgtgaaggtcatcgacgtcaccggt

SEQ ID NO: 515246 - DNA, 120 bp, Artificial Sequence
  ENSG00000164776_3 (sequence is synthesized)
ggaggcagcttcagcccggaggaggtgcgggagctgcgagaagccacgctgaaggaggtggacatcctgcgcaaggtctcagggcaccccaacatcatacagctgaaggacacttatgag

SEQ ID NO: 515247 - DNA, 120 bp, Artificial Sequence
  ENSG00000164776_4 (sequence is synthesized)
accaacactttcttcttcttggtgtttgacctgatgaagagaggggagctctttgactacctcactgagaaggtcaccttgagtgagaaggaaaccagaaagatcatgcgagctctgctg

SEQ ID NO: 515248 - DNA, 120 bp, Artificial Sequence
  ENSG00000164776_5 (sequence is synthesized)
tgccagctggagccgggagagaggctgcgagaggtctgcgggacccccagttacctggcccctgagattatcgagtgctccatgaatgaggaccacccgggctacgggaaagaggtggac

SEQ ID NO: 515249 - DNA, 120 bp, Artificial Sequence
  ENSG00000164776_6 (sequence is synthesized)
atgtggagcactggcgtcatcatgtacacgctgctggccggctccccgcccttctggcaccggaagcagatgctgatgctgaggatgatcatgagcggcaactaccagtttggctcgccc

SEQ ID NO: 515250 - DNA, 120 bp, Artificial Sequence
  ENSG00000164776_7 (sequence is synthesized)
gagtgggatgattactcggacaccgtgaaggacctggtctcccgattcctggtggtgcaaccccagaaccgctacacagcggaagaggccttggcacaccccttcttccagcagtacttg

SEQ ID NO: 515251 - DNA, 120 bp, Artificial Sequence
  ENSG00000164776_8 (sequence is synthesized)
gtggaggaagtgcggcacttcagcccccgggggaagttcaaggtgatcgctctgaccgtgctggcttcagtgcggatctactaccagtaccgccgggtgaagcctgtgacccgggagatc

SEQ ID NO: 515252 - DNA, 120 bp, Artificial Sequence
  ENSG00000164776_9 (sequence is synthesized)
gtcatccgagacccctatgccctccggcctctgcgccggctcatcgacgcctacgctttccgaatctatggccactgggtgaagaaggggcagcagcagaaccgggcagcccttttcgag

SEQ ID NO: 515253 - DNA, 120 bp, Artificial Sequence
  ENSG00000164776_10 (sequence is synthesized)
aacacacccaaggccgtgctcctctccctggccgaggaggactactgaggggctggccagtcagggagggctagggggcaggtggggaggggaagccatggaaatacaagtcaaaggggt

SEQ ID NO: 515254 - DNA, 120 bp, Artificial Sequence
  ENSG00000164776_11 (sequence is synthesized)
gtgggtgttcccaccacacagcaatacctgcaggctggggcaggccctgggtgggcagagatcacacgtggcctgagaaccaggaaccccctgctcctctacttcctagatgagccacca

SEQ ID NO: 515255 - DNA, 120 bp, Artificial Sequence
  ENSG00000164776_12 (sequence is synthesized)
tctccatttctctttaggggaggcccagagttactgacactcaggctttcttcccttagggtcacagggtgaggatcaaagacacaaatgtctgagatacacaattgcaggagattttat

SEQ ID NO: 515256 - DNA, 120 bp, Artificial Sequence
  ENSG00000164776_13 (sequence is synthesized)
aggagattttattggccccatgacatccagtgacagtgtgggagcaggctactctccagggacatgtttttggaggcatatggagaagggggcccaggcgaggtggctcacacctgtaat

SEQ ID NO: 515257 - DNA, 75 bp, Artificial Sequence
  ENSG00000164776_14 (sequence is synthesized)
ggcccaggaattcaaggctagagtgagccgtgatcaccagtgcactctagcctgggcaacagagaaagaccctgt

SEQ ID NO: 515258 - DNA, 120 bp, Artificial Sequence
  ENSG00000164776_15 (sequence is synthesized)
aacatggccttggcccacgtccaggcctcgggtgctcaatcaaccatctgcagaatagagatggtctgggtttctcccctaacttaattgttccctggaataaaaattccaccatttcaa

SEQ ID NO: 515259 - DNA, 120 bp, Artificial Sequence
  ENSG00000164776_16 (sequence is synthesized)
ctttcttcttcttggtgtttgacctgtaagtacccagcactggagcaagccacacctgagagaacctccgactgctgtcccctccccaaccccagggctgcctggagaccacagccagct

SEQ ID NO: 515260 - DNA, 120 bp, Artificial Sequence
  ENSG00000164776_17 (sequence is synthesized)
agctctgctccaccccgagtactaacgccactttcatccccaaagtgctgttcacttggagaaaccctttgtttggggtcctgccctcctgaagccaggacagataagagaaacctctcc

SEQ ID NO: 515261 - DNA, 120 bp, Artificial Sequence
  ENSG00000164776_18 (sequence is synthesized)
ttctcttggatgacaacatgaacatcaagctcacagactttggcttttcctgccagctggagccgggagagaggctgcgaggtctcccgattcctggtggtgcaaccccagaaccgctac

SEQ ID NO: 515262 - DNA, 120 bp, Artificial Sequence
  ENSG00000164776_19 (sequence is synthesized)
accaacactttcttcttcttggtgtttgacctatgggaagacactgatacaatggagatggaacagaaatggtgcttgggctgggactctcccaagtccaccaacttcagggcccagggc

SEQ ID NO: 515263 - DNA, 120 bp, Artificial Sequence
  ENSG00000164778_0 (sequence is synthesized)
tctctcatcgtctgggcgagcggggcggctcgtggtgtttctaacccagttcgtggattcaaaggtggctccgcgccgagcgcggccggcgacttgtaggacctcagccctggccgcggc

SEQ ID NO: 515264 - DNA, 120 bp, Artificial Sequence
  ENSG00000164778_1 (sequence is synthesized)
cgccgcgcacgccctcggaagactcggcggggtgggggcgcgggggtctccgtgtgcgccgcgggagggccgaaggctgatttggaagggcgtccccggagaaccagtgtgggatttact

SEQ ID NO: 515265 - DNA, 120 bp, Artificial Sequence
  ENSG00000164778_2 (sequence is synthesized)
gtgaacagcatggaggagaatgaccccaagcctggcgaagcagcggcggcggtggagggacagcggcagccggaatccagccccggcggcggctcgggcggcggcggcggtagcagcccg

SEQ ID NO: 515266 - DNA, 120 bp, Artificial Sequence
  ENSG00000164778_3 (sequence is synthesized)
ggcgaagcggacaccgggcgccggcgggctctgatgctgcccgcggtcctgcaggcgcccggcaaccaccagcacccgcaccgcatcaccaacttcttcatcgacaacatcctgcggccc

SEQ ID NO: 515267 - DNA, 120 bp, Artificial Sequence
  ENSG00000164778_4 (sequence is synthesized)
caacatcctgcggcccgagttcggccggcgaaaggacgcggggacctgctgtgcgggcgcgggaggaggaaggggcggcggagccggcggcgaaggcggcgcgagcggtgcggagggagg

SEQ ID NO: 515268 - DNA, 120 bp, Artificial Sequence
  ENSG00000164778_5 (sequence is synthesized)
cggctcggagcagctcttgggctcgggctcccgagagccccggcagaacccgccatgtgcgcccggcgcgggcgggccgctcccagccgccggcagcgactctccgggtgacggggaagg

SEQ ID NO: 515269 - DNA, 120 bp, Artificial Sequence
  ENSG00000164778_6 (sequence is synthesized)
tccaagacgctctcgctgcacggtggcgccaagaaaggcggcgaccccggcggccccctggacgggtcgctcaaggcccgcggcttgggcggcggcgacctgtcggtgagctcggactcg

SEQ ID NO: 515270 - DNA, 120 bp, Artificial Sequence
  ENSG00000164778_7 (sequence is synthesized)
gacagctcgcaagccggcgccaacctgggcgcgcagcccatgctctggccggcgtgggtctactgtacgcgctactcggaccggccttcttcaggtcccaggtctcgaaaaccaaagaag

SEQ ID NO: 515271 - DNA, 120 bp, Artificial Sequence
  ENSG00000164778_8 (sequence is synthesized)
aagaacccgaacaaagaggacaagcggccgcgcacggcctttaccgccgagcagctgcagaggctcaaggccgagttccagaccaacaggtacctgacggagcagcggcgccagagcctg

SEQ ID NO: 515272 - DNA, 120 bp, Artificial Sequence
  ENSG00000164778_9 (sequence is synthesized)
gcgcaggagctgagcctcaacgagtcacagatcaagatttggttccagaacaagcgcgccaagatcaagaaggccacgggcaacaagaacacgctggccgtgcacctcatggcacagggc

SEQ ID NO: 515273 - DNA, 120 bp, Artificial Sequence
  ENSG00000164778_10 (sequence is synthesized)
ttgtacaaccactccaccacagccaaggagggcaagtcggacagcgagtagggcggggggcatggaggccaggtctcagtccgcgctaaacaatgcaataatttaaaatcataaagggcc

SEQ ID NO: 515274 - DNA, 120 bp, Artificial Sequence
  ENSG00000164778_11 (sequence is synthesized)
agtgtataaagattataccagcattaatagtgaaaatattgtgtattagctaaggttctgaaatattctatgtatatatcatttacaggtggtataaaatccaaaatatctgactataaa

SEQ ID NO: 515275 - DNA, 120 bp, Artificial Sequence
  ENSG00000164778_12 (sequence is synthesized)
atatttttttgagttttttgtgtttatgagattatgctaattttatgggtttttttcttttttgcgaagggggctgcttagggtttcacctttttttaatcccctaagctccattatatg

SEQ ID NO: 515276 - DNA, 120 bp, Artificial Sequence
  ENSG00000164778_13 (sequence is synthesized)
acattggacacttttttattattccaaaagaagaaaaaattaaaacaacttgctgaagtccaaagattttttattgctgcatttcacacaactgtgaaccgaataaatagctcctatttg

SEQ ID NO: 515277 - DNA, 120 bp, Artificial Sequence
  ENSG00000164778_14 (sequence is synthesized)
ggtgaggacagcaggaggggcccacacctcaagcctggaccagccacctcaaggccttggggagcttaggggacctggtgggagagaggggacttccagggtccttgggccagttctggg

SEQ ID NO: 515278 - DNA, 120 bp, Artificial Sequence
  ENSG00000164778_15 (sequence is synthesized)
atttggccctgggaagcagcccagcgtaccccaggcctgctctgggaagtcggctccatgctcaccagcagccgcccaggcccgcagcctcacccggctccctctcctcaccctcctgca

SEQ ID NO: 515279 - DNA, 120 bp, Artificial Sequence
  ENSG00000164778_16 (sequence is synthesized)
cctaactccctcctccttctcctttttcctcctcttcctccttcctccttcctcctgctcctcctttcttcttctttttcttctcctcctcctccttccttcctcctcctccttctcttt

SEQ ID NO: 515280 - DNA, 120 bp, Artificial Sequence
  ENSG00000164778_17 (sequence is synthesized)
cctcctcctcctcaccaagggcccaaccgtgtgcatacatcgtctgcgtctgtggtctgtgtcgctgtccccagtcccaccgcagtcctgccgcaggcctaaccctcctgccctgggcac

SEQ ID NO: 515281 - DNA, 120 bp, Artificial Sequence
  ENSG00000164778_18 (sequence is synthesized)
tgcctccatgcagaagcgcttcgaggttctggggctaaaggcctggggtgtgtggcctaaagcccaagagcggtggggcgaccctccttttggcttggccccaggaatttcctgtgactc

SEQ ID NO: 515282 - DNA, 120 bp, Artificial Sequence
  ENSG00000164778_19 (sequence is synthesized)
caccagccatcatgggtgccagccagggtcccagaaatgaggccatggctcactgtttctgggcgggcagaaggctctgtagagggagatggcatcatctatcttcctttcctttttctt

SEQ ID NO: 515283 - DNA, 120 bp, Artificial Sequence
  ENSG00000164778_20 (sequence is synthesized)
tctttttttcctttatttttttcttttcttggagtggctgcttctgctatagagaacattcttccaagataaatatgtgtgtttacacatatgtctgcatgcatgtgaacacacacacac

SEQ ID NO: 515284 - DNA, 120 bp, Artificial Sequence
  ENSG00000164778_21 (sequence is synthesized)
gtgaacacacacacacacacacacacaccaggcgtgtttgagtccacagttctgaaacatgtggctaccttgtctttcaaaagaactcagaatcctccaggatctagaagaaggaagaaa

SEQ ID NO: 515285 - DNA, 120 bp, Artificial Sequence
  ENSG00000164778_22 (sequence is synthesized)
gtgtgtaaataatcatttcttatcatcactttttgtcttttcttgttttttaaaatatacattttatttttgaaggtgtggtacagtgtaaattaaatatattcaatatatttcccacca

SEQ ID NO: 515286 - DNA, 120 bp, Artificial Sequence
  ENSG00000164778_23 (sequence is synthesized)
agtacctatatatgtatataaacaaacacattatctatatataacgccacactgtcttctgtttagtgtatggggaaagaccaatccaactgtccatctgtggctgggacagcccagggg

SEQ ID NO: 515287 - DNA, 120 bp, Artificial Sequence
  ENSG00000164778_24 (sequence is synthesized)
gtgtgcccacggctgacccaggggtgtgcacacggctgagctgggagtcccgctggtctccctgaggactgagggtgaacttcgctctttgccttaaacctctttatttcattgcagtaa

SEQ ID NO: 515288 - DNA, 120 bp, Artificial Sequence
  ENSG00000164778_25 (sequence is synthesized)
tagttttacgttgtacataatagtgtaaacctttttaaaaaggaaagtataaaaacaaaagttgtaatttaaaagtctgaataaccatctgctgcttaggaaactcaatgaaatgacatg

SEQ ID NO: 515289 - DNA, 120 bp, Artificial Sequence
  ENSG00000164778_26 (sequence is synthesized)
cctttttagcaggaagcaaagttggtttctgttttttgttttctttgttgttttagtttataaaacatgtgcattttacagttccagtatcaaatatttataatcttatgagaaatgaat

SEQ ID NO: 515290 - DNA, 120 bp, Artificial Sequence
  ENSG00000164778_27 (sequence is synthesized)
gaatgtttctatttacaactgtgcttatcaaaattgtgaacacccccacccccgcatttttgtgtgttgaaattcttgaaggttacattaaataaaacaaaatctctttattataaaata

SEQ ID NO: 515291 - DNA, 120 bp, Artificial Sequence
  ENSG00000164794_0 (sequence is synthesized)
ggtgacaacgtttgggaagggccagggcgaccggcagtgtgcacagggactgtgtcgggcttggacctcacctgatcctctctcttagcgcgacccttcctctgctccctgtctcctctt

SEQ ID NO: 515292 - DNA, 120 bp, Artificial Sequence
  ENSG00000164794_1 (sequence is synthesized)
tctgccacttgtgcgctgcttccgcgcactcccggctccctagcggcaggaggaggaaggcgcacagcgggtggagagggtgcgccaaggagaggtaaccccttcgggagcccggggaat

SEQ ID NO: 515293 - DNA, 120 bp, Artificial Sequence
  ENSG00000164794_2 (sequence is synthesized)
cccggccgccaccaggggccgtgccaccgccctcgcgggaccaaagcttccggcgtgtccccaactttgtggcgccctcaggccgcggcgactgggttagagatgccttccagcggcaga

SEQ ID NO: 515294 - DNA, 120 bp, Artificial Sequence
  ENSG00000164794_3 (sequence is synthesized)
gcgctgctggactcgccgctggacagcggctccctgacctccctggactctagtgtcttctgcagcgagggtgaaggggagcccttggcgctcggggactgcttcacggtcaacgtgggc

SEQ ID NO: 515295 - DNA, 120 bp, Artificial Sequence
  ENSG00000164794_4 (sequence is synthesized)
ggcagccgcttcgtgctctcgcagcaggcgctgtcctgcttcccgcacacgcgccttggcaagctggccgtggtggtggcttcctaccgccgccccggggccctggccgccgtgcccagc

SEQ ID NO: 515296 - DNA, 120 bp, Artificial Sequence
  ENSG00000164794_5 (sequence is synthesized)
cctctggagctttgcgacgatgccaaccccgtggacaacgagtacttcttcgaccgcagctcgcaggcgttccgatatgtcctgcactactaccgcaccggccgcctgcatgtcatggag

SEQ ID NO: 515297 - DNA, 120 bp, Artificial Sequence
  ENSG00000164794_6 (sequence is synthesized)
cagctgtgcgcgctctccttcctgcaggagatccagtactggggcatcgatgagctcagcatcgattcctgctgcagggacagatacttcagaaggaaagagctgagtgaaactttagac

SEQ ID NO: 515298 - DNA, 120 bp, Artificial Sequence
  ENSG00000164794_7 (sequence is synthesized)
ttcaagaaggacacagaagaccaggaaagtcaacatgagagtgaacaggacttctcccaaggaccttgtcccactgttcgccagaagctctggaatatcctggagaaacctggatcttcc

SEQ ID NO: 515299 - DNA, 120 bp, Artificial Sequence
  ENSG00000164794_8 (sequence is synthesized)
acagctgcccgtatctttggcgtcatctccattatcttcgtggtggtgtccatcattaacatggccctgatgtcagctgagttaagctggctggacctgcagctgctggaaatcctggag

SEQ ID NO: 515300 - DNA, 120 bp, Artificial Sequence
  ENSG00000164794_9 (sequence is synthesized)
tatgtgtgcattagctggttcaccggggagtttgtcctccgcttcctgtgtgtgcgggacaggtgtcgcttcctaagaaaggtgccaaacatcatagacctccttgccatcttgcccttc

SEQ ID NO: 515301 - DNA, 120 bp, Artificial Sequence
  ENSG00000164794_10 (sequence is synthesized)
tacatcactcttctggtagagagcctaagtgggagccagaccacgcaggagctggagaacgtggggcgcattgtccaggtgttgaggctgctcagggctctgcgcatgctaaagctgggc

SEQ ID NO: 515302 - DNA, 120 bp, Artificial Sequence
  ENSG00000164794_11 (sequence is synthesized)
agacattccacaggattacgctcccttgggatgacaatcacccagtgttacgaagaagtcggcctactgctcctatttctatccgtgggaatctctatattttcaactgtagaatacttt

SEQ ID NO: 515303 - DNA, 120 bp, Artificial Sequence
  ENSG00000164794_12 (sequence is synthesized)
atggtggtgggccaccacctctatgactactgtgggatatggggacattagaccagacaccaccacaggcaaaatcgtggccttcatgtgtatattatcgggaattcttgtcttggcctt

SEQ ID NO: 515304 - DNA, 120 bp, Artificial Sequence
  ENSG00000164794_13 (sequence is synthesized)
gcctattgctattattaacgatcgcttctctgcttgctacttcaccttgaaactcaaggaagcagctgttagacagcgtgaagccctaaagaagcttaccaagaatatagccactgactc

SEQ ID NO: 515305 - DNA, 120 bp, Artificial Sequence
  ENSG00000164794_14 (sequence is synthesized)
atatatcagtgttaacttgagagatgtctatgcccggagtatcatggagatgctgcgactgaaaggcagagaaagagcaagtactaggagcagcgggggagatgatttctggttttgaat

SEQ ID NO: 515306 - DNA, 120 bp, Artificial Sequence
  ENSG00000164794_15 (sequence is synthesized)
taattttcaatttatttacaaaagctatgtacaattaactaaaatgataaagcagtgatgtggatttctgtattctgatgatgagtctcttcagagtactgctcatcttaattaattttt

SEQ ID NO: 515307 - DNA, 120 bp, Artificial Sequence
  ENSG00000164794_16 (sequence is synthesized)
gctgatatattgcttcatctactagaatatttcacatcacctataacaactgcacagtgttctgacacatttgagtgtccaaaatagccaattaacacaaccaaatacaactgggccaat

SEQ ID NO: 515308 - DNA, 120 bp, Artificial Sequence
  ENSG00000164794_17 (sequence is synthesized)
ataaacatgtttgaattgtcaaatataaaataatgttattgcaatacatacaaaaaagttaaagattttatgtatcactaacattagaagttttttgcaccactaattttttaaaaatgg

SEQ ID NO: 515309 - DNA, 120 bp, Artificial Sequence
  ENSG00000164794_18 (sequence is synthesized)
aaggtaaactgcatagcccagagaaagataagtaaatatttaagaacatattgaacaactttgctatttaaagatattatccaagtacataaattactccgttctctatcagttaaagct

SEQ ID NO: 515310 - DNA, 120 bp, Artificial Sequence
  ENSG00000164794_19 (sequence is synthesized)
attgaatataatacttagctttacaagagaaaacccatatttgatgggcagagattatatccctatcttctttttcatgtaaaccactggtcacaaatgaactgatctctgtatcccatt

SEQ ID NO: 515311 - DNA, 120 bp, Artificial Sequence
  ENSG00000164794_20 (sequence is synthesized)
attactataagaggtgggaatcccaaaactgcttagattgcagtacatgagtctacacaaagacttcaacaattgcacatcttcattctcccaactgagtgtagtatgtggagcataaaa

SEQ ID NO: 515312 - DNA, 120 bp, Artificial Sequence
  ENSG00000164794_21 (sequence is synthesized)
cagcatatttcttagtatttcatgaatatcagatggtctttaaatgtctctttatggatgtattgttcacattatggctttaaaataatgaatatgtaaaagtgaggtagtgaacatcct

SEQ ID NO: 515313 - DNA, 120 bp, Artificial Sequence
  ENSG00000164794_22 (sequence is synthesized)
aaatttctacactggaattactaaataatcttatttcataaaatgggaaatatatgttaaatgacatcactggatgaacttgaagatcttttacttgttaacaaaaaaatactatggaca

SEQ ID NO: 515314 - DNA, 120 bp, Artificial Sequence
  ENSG00000164794_23 (sequence is synthesized)
gctttctgattgttggggtaaatagcaaatgttcaaactttgcaggcattttgacattcatcataacaacacaattcctagacattgtattatataattaaagccaaaacctctaaagct

SEQ ID NO: 515315 - DNA, 120 bp, Artificial Sequence
  ENSG00000164794_24 (sequence is synthesized)
aaggcagcaggcgctgggtagagctcagctggaacacagtttccctcctggaccggtcgagtcagacctcacgtgtagactaagaggatcaaaagaagagtacgttacctgcggcgccgg

SEQ ID NO: 515316 - DNA, 120 bp, Artificial Sequence
  ENSG00000164794_25 (sequence is synthesized)
ttgtgcgcagaccagatgtgccgggagctgcaggaggtcagaacctaagggagacggcggaagaaaatggagcgtcagtgatcatcagactagaatgagagtgaattgggagaaaatggt

SEQ ID NO: 515317 - DNA, 120 bp, Artificial Sequence
  ENSG00000164794_26 (sequence is synthesized)
gcggccccctcacccagagaaccctcccccacctgctcacacccccagcgaacaccccgggggaggcctatgaagcagcagtaaaagaaaagggaggaatataaattctcaagttggaag

SEQ ID NO: 515318 - DNA, 120 bp, Artificial Sequence
  ENSG00000164794_27 (sequence is synthesized)
ggacccggttaccacttcctttgctttctgaactttttgttttggtctcctgcgggcaggagtgagtctcgccatcccccttgcttgcttgcttgcttgcgttcagctaagagtcatctt

SEQ ID NO: 515319 - DNA, 120 bp, Artificial Sequence
  ENSG00000164794_28 (sequence is synthesized)
ctctcctcttcctcctcctccgccccacatctccctccttcctcccttccccaacccctccacccaccaagtagcgagtcattcaatctgtacacctcctgggctgggaatcgcaattgc

SEQ ID NO: 515320 - DNA, 120 bp, Artificial Sequence
  ENSG00000164794_29 (sequence is synthesized)
tcatgattcccattattttagtaaatgagattctacaacctaagaataacaaggaatgcatcactttaatacctacatttccaatataatagagcccccaaggggaagaaaattggttct

SEQ ID NO: 515321 - DNA, 120 bp, Artificial Sequence
  ENSG00000164794_30 (sequence is synthesized)
tgaggaaaaaaaaatcttatcacttcatttacaaaacacagataagcatattgagtatatctgtggtattaacatttcatgggggtgagatgttagggaaaaaagcctagaaggctcttt

SEQ ID NO: 515322 - DNA, 120 bp, Artificial Sequence
  ENSG00000164794_31 (sequence is synthesized)
gccaggggtgaatggtgataagaaataaacattgaggactgctttaatatatagctataaggtatttcataaactctatttaagacatcatattatgctatgcactaccaagaaagaaag

SEQ ID NO: 515323 - DNA, 120 bp, Artificial Sequence
  ENSG00000164794_32 (sequence is synthesized)
atgccagtcaattgtaagatgccattaactgtaaaatgcatccggatttcagatatgtaaaaatttaaaataagcaccttaaaatcaatgaaatatcgcatgtactacctcctgttttct

SEQ ID NO: 515324 - DNA, 120 bp, Artificial Sequence
  ENSG00000164794_33 (sequence is synthesized)
ggtatgcatggttaagctctgaaaacattttcactgatggcatgagttttagattgtgtgctaaagtactttaattcatttaacttgtttccacttctcctaaatattataaaaggttca

SEQ ID NO: 515325 - DNA, 120 bp, Artificial Sequence
  ENSG00000164794_34 (sequence is synthesized)
ggagatatgaatattagtaagataaatattttacttcttacacacatacatgggtgctagattgtggcacagggccactagtcatagtataaatcccttccacaatctgaagggaaagta

SEQ ID NO: 515326 - DNA, 120 bp, Artificial Sequence
  ENSG00000164794_35 (sequence is synthesized)
gaagttagacacagaaggtaaacttactccagcttttctagaactttccctaataagaatagttactctgatccaggactatgctctgtattcatcatgtattatgccattttatcctca

SEQ ID NO: 515327 - DNA, 120 bp, Artificial Sequence
  ENSG00000164794_36 (sequence is synthesized)
aaatatccctattatataattactattcttatactcttcaaaatacatattttatatatttattaactcaacaaatatttattaaggatctttggtgttctggggactagggagtctttc

SEQ ID NO: 515328 - DNA, 120 bp, Artificial Sequence
  ENSG00000164794_37 (sequence is synthesized)
ttaaacaagactaggtcctgttttcttgtagttaatattctgttcaaaggtgtgtgaggaaaagacagcgaaactgaaacattaaaaggtataaacttgcctaaattcacacaggctata

SEQ ID NO: 515329 - DNA, 120 bp, Artificial Sequence
  ENSG00000164794_38 (sequence is synthesized)
gatggcagagccagcgctgaataccaatctgcctgacccggaaaacgacactcctaaaagtcaaattgcagatttcattcttcctacacaagctctgcatagaaatttattttttaggca

SEQ ID NO: 515330 - DNA, 120 bp, Artificial Sequence
  ENSG00000164794_39 (sequence is synthesized)
ggcaagccaacttcttgtgcatggagaagttcaatatgccttaagtaaaatatcagcttattctcagaggtggaatggtgcttttaagaaaaggctgtggtgacaccttatagtcattat

SEQ ID NO: 515331 - DNA, 120 bp, Artificial Sequence
  ENSG00000164794_40 (sequence is synthesized)
aaatatattatctttagagtaaatagtagttggaaataaaaaaaattaaaaactatgtgtatacatatgtatatatgtttttatcatggaggatcctaaacatcttctctacaaatgtgc

SEQ ID NO: 515332 - DNA, 120 bp, Artificial Sequence
  ENSG00000164794_41 (sequence is synthesized)
aaatgtgctgttagctatataaatgttgtcaagatgtaggtcttcagaaagaagttttaaaatatcattgcttactcaattttgctgttaaataaaatatcattttatttattcaatgaa

SEQ ID NO: 515333 - DNA, 120 bp, Artificial Sequence
  ENSG00000164794_42 (sequence is synthesized)
tgtatatataagcaaaccaaatttcatttaggtaaaaaaatcaaggcaggaactctgccaattttataacccattattttaaaacagtaaacactttttaaacatctaagaattattgtt

SEQ ID NO: 515334 - DNA, 120 bp, Artificial Sequence
  ENSG00000164794_43 (sequence is synthesized)
ataaaacaatatttaattttttaaaatataaaataattgaattattgtctttctctaagctatttagagaacactactttctttgttttgttttggtttggttttttgagacggagtgtc

SEQ ID NO: 515335 - DNA, 72 bp, Artificial Sequence
  ENSG00000164794_44 (sequence is synthesized)
ctttgttttgttttggtttggttttttgagacggagtgtccgtctgtcgcccaggctggagtgaccattctc

SEQ ID NO: 515336 - DNA, 120 bp, Artificial Sequence
  ENSG00000164794_45 (sequence is synthesized)
gcagagacggggtttcaccgtgttagccactttctttgttaatttaactgttattttaagttcagggatacatgtgcgggtttgttatacaggtaatcttgtgtcatgagagtttttttg

SEQ ID NO: 515337 - DNA, 120 bp, Artificial Sequence
  ENSG00000164794_46 (sequence is synthesized)
tacatgtgcgggtttgttatacaggtaatcttgtgtcatgagagtttttttgcacggattatttcatcacccaggtattaaacctagcaccagttatttttcctgattctctccctcctc

SEQ ID NO: 515338 - DNA, 76 bp, Artificial Sequence
  ENSG00000164794_47 (sequence is synthesized)
tcctgattctctccctcctcctacccagcaccctctgataggccccaatgtgtgttgtttccctctatgtgttcat

SEQ ID NO: 515339 - DNA, 120 bp, Artificial Sequence
  ENSG00000164794_48 (sequence is synthesized)
tagcctccagctccatccatgtccctgcaaatgacatgatctcattctttcatatggctggatagtacttcatggtgtatacatacattttctttatccagtctacagttgatgggcatt

SEQ ID NO: 515340 - DNA, 89 bp, Artificial Sequence
  ENSG00000164794_49 (sequence is synthesized)
acatacattttctttatccagtctacagttgatgggcatttaggtttattccatgtctttgctactgtgaataatgctgcataaacaat

SEQ ID NO: 515341 - DNA, 120 bp, Artificial Sequence
  ENSG00000164794_50 (sequence is synthesized)
ttaggtctttgaggaattgccacactctcacatggctgaactaatttacactcccagtatcagtgtatatgcgttccaattgctccataacttcgccagcatctgcttttttttttttgc

SEQ ID NO: 515342 - DNA, 120 bp, Artificial Sequence
  ENSG00000164794_51 (sequence is synthesized)
ttctgactagtgtgagatggtatctcattatggttttgatttgcgtttctctaatgatcagtgatattgaggctttttttcatatcattgttggctgcatgtatgttttcttttgaaaag

SEQ ID NO: 515343 - DNA, 74 bp, Artificial Sequence
  ENSG00000164794_52 (sequence is synthesized)
gtttctctaatgatcagtgatattgaggctttttttcatatcattgttggctgcatgtatgttggatttttttt

SEQ ID NO: 515344 - DNA, 120 bp, Artificial Sequence
  ENSG00000164794_53 (sequence is synthesized)
ttagacttttgtagatgtatagtttgcaaatattttcccccaatctgtaggttgtctgttcactctgttgataggttcctttgctctgacaaagctctagagtttaattagatcccattt

SEQ ID NO: 515345 - DNA, 120 bp, Artificial Sequence
  ENSG00000164794_54 (sequence is synthesized)
gccaatttttgctttcgttgcaaccaccttttgtgtcttcatcatgaaatctttgcctgttagaaaacactactttcagacatttaaatgcatataggcaatgcttaagtacctaaaaaa

SEQ ID NO: 515346 - DNA, 120 bp, Artificial Sequence
  ENSG00000164794_55 (sequence is synthesized)
atgcttaagtacctaaaaaagcaattttaagaaattactgaggtatctctattaagagtgacatattcatattttattttatgtatatattatttctataacatacaagaaattgttgca

SEQ ID NO: 515347 - DNA, 120 bp, Artificial Sequence
  ENSG00000164794_56 (sequence is synthesized)
tagtatcaagtataatggattagatgcaaaaataactgaggtaggaatctcagttctgtgttttaatgtggaattcttatgcttattaaaatattttgattagctgttgcagaaaatata

SEQ ID NO: 515348 - DNA, 120 bp, Artificial Sequence
  ENSG00000164796_0 (sequence is synthesized)
actccgagctgtgaccgcgcaccaacaacagcaacaactccactgcgccgggctgaggagcaggaattaggagctcgcgaataatatgaaagggatccgcaaaggggaaagccgagcaaa

SEQ ID NO: 515349 - DNA, 120 bp, Artificial Sequence
  ENSG00000164796_1 (sequence is synthesized)
ggaatccaaaccctgggagcctggcaagcgaagatgcgctaaatgtggccgcctagacttcatcctgatgaagaaaatggggattaaaagtggatttacgttttggaacctcgtcttttt

SEQ ID NO: 515350 - DNA, 120 bp, Artificial Sequence
  ENSG00000164796_2 (sequence is synthesized)
attgacggtgtcttgtgtgaaaggatttatttatacatgtggtggaactttaaaaggacttaatggcactatagaaagccctggttttccatatggatatccaaatggtgcaaactgcac

SEQ ID NO: 515351 - DNA, 120 bp, Artificial Sequence
  ENSG00000164796_3 (sequence is synthesized)
atgggtaataatagcagaagaacgaaatagaatacaaattgtttttcagtcatttgctctagaagaagaatacgactacttatcattatatgatggacatcctcatcctacaaactttag

SEQ ID NO: 515352 - DNA, 120 bp, Artificial Sequence
  ENSG00000164796_4 (sequence is synthesized)
gacaaggttaacaggattccatctgccacctccagtgacaagtaccaaatctgtgttctcactacgtttgaccagtgattttgcagttagtgctcatggatttaaggtatattacgaaga

SEQ ID NO: 515353 - DNA, 120 bp, Artificial Sequence
  ENSG00000164796_5 (sequence is synthesized)
attgcagagtagctcttgtggaaatcctggtgttccacccaaaggtgtattatatggcacaagattcgacgtcggggacaagatccgctacagctgtgtaactggatacatccttgatgg

SEQ ID NO: 515354 - DNA, 120 bp, Artificial Sequence
  ENSG00000164796_6 (sequence is synthesized)
ccaccctcagctcacctgcatagccaattcagttaatacagcttcgtgggattttcctgttcctatctgtagagctgaagatgcttgtggaggaacaatgagaggatccagtggcatcat

SEQ ID NO: 515355 - DNA, 120 bp, Artificial Sequence
  ENSG00000164796_7 (sequence is synthesized)
atccagccctagttttcctaatgagtaccataacaatgctgattgcacttggaccattgtagcagagcctggggacacaatttcactcatatttactgattttcaaatggaagagaaata

SEQ ID NO: 515356 - DNA, 120 bp, Artificial Sequence
  ENSG00000164796_8 (sequence is synthesized)
tgattacttagaaatagaaggttctgagccacctaccatatggttatctggaatgaatataccaccaccaattatcagcaacaaaaactggctcagactgcattttgttacagacagcaa

SEQ ID NO: 515357 - DNA, 120 bp, Artificial Sequence
  ENSG00000164796_9 (sequence is synthesized)
tcatcgataccgtggatttagtgctccctatcaaggttcttctacattgacccacactacctccactggtgagttagaggagcataacaggactaccactggtgctattgctgttgctag

SEQ ID NO: 515358 - DNA, 120 bp, Artificial Sequence
  ENSG00000164796_10 (sequence is synthesized)
cacacctgcagatgttactgtatccagtgttacagctgtcaccatccatagactttccgaggaacagcgagtgcaagttacgagtctcagaaattcaggtctggaccccaacacgtccaa

SEQ ID NO: 515359 - DNA, 120 bp, Artificial Sequence
  ENSG00000164796_11 (sequence is synthesized)
ggacgggctctctcctcatccagcagatacacaaagtaccaggagaagaccaagacatgctgaacagatagaaagaactaaagagcttgcagttgttactcatagagtgaaaaaggccat

SEQ ID NO: 515360 - DNA, 120 bp, Artificial Sequence
  ENSG00000164796_12 (sequence is synthesized)
agattttaaatctagaggatttaaattgtttccagggaaagacaacagcaacaagttttctatcttaaatgagggaggtattaaaacagcttccaatttatgcccagatccaggagaacc

SEQ ID NO: 515361 - DNA, 120 bp, Artificial Sequence
  ENSG00000164796_13 (sequence is synthesized)
agaaaatgggaagagaatcggatcagattttagccttggatcaactgtgcagttctcttgtgatgaagattatgtcctacagggcgcaaagagcatcacctgtcaacggatagctgaagt

SEQ ID NO: 515362 - DNA, 120 bp, Artificial Sequence
  ENSG00000164796_14 (sequence is synthesized)
ttttgctgcttggagtgatcacaggcctgtgtgtaaagtgaaaacgtgtggctctaatcttcaaggaccaagtggtacctttacatctcccaactttccgttccagtatgacagcaatgc

SEQ ID NO: 515363 - DNA, 120 bp, Artificial Sequence
  ENSG00000164796_15 (sequence is synthesized)
acaatgtgtctgggtcatcacagcagtgaatacaaataaggttatccagataaattttgaagaatttgatctggagattggctatgataccttgacaattggcgatgggggcgaagttgg

SEQ ID NO: 515364 - DNA, 120 bp, Artificial Sequence
  ENSG00000164796_16 (sequence is synthesized)
agatcctaggacagtgctccaagtgctgactggaagctttgtaccagacttgatagtgagcatgagtagccaaatgtggctgcaccttcaaacggacgaaagtgttggatctgttggttt

SEQ ID NO: 515365 - DNA, 120 bp, Artificial Sequence
  ENSG00000164796_17 (sequence is synthesized)
caaggttaactacaaagaaattgagaaagaaagttgtggtgatcctggtacacccttatatggaattagagaaggcgatggattttctaatcgtgatgttttaaggtttgaatgccagtt

SEQ ID NO: 515366 - DNA, 120 bp, Artificial Sequence
  ENSG00000164796_18 (sequence is synthesized)
tgggtttgaattaattggagagaaatccattgtttgtcaagagaataaccaatggtctgcaaacatacccatctgtatctttccctgcctgtctaactttactgcaccaatgggaacagt

SEQ ID NO: 515367 - DNA, 120 bp, Artificial Sequence
  ENSG00000164796_19 (sequence is synthesized)
tctttctcctgattacccagaagggtatggaaataatttaaattgcatctggacgataatctctgatccagggagccggatacatctttctttcaatgactttgacctggaatcccagtt

SEQ ID NO: 515368 - DNA, 120 bp, Artificial Sequence
  ENSG00000164796_20 (sequence is synthesized)
tgatttccttgctgttaaagatggtgactctccagaatccccaattcttggaacctttactggggctgaggtgccttcccatcttactagtaatagtcacatactgcgattggaatttca

SEQ ID NO: 515369 - DNA, 120 bp, Artificial Sequence
  ENSG00000164796_21 (sequence is synthesized)
ggctgaccactcaatgtcaggacgtggctttaacatcacttacaacacatttggacataatgaatgccctgatcctggaataccaatcaatgcacggcggtttggggacaactttcaatt

SEQ ID NO: 515370 - DNA, 120 bp, Artificial Sequence
  ENSG00000164796_22 (sequence is synthesized)
aggaagttcaatttcagttatttgtgaagaaggatttattaaaacccagggaacagaaacaattacatgtattcttatggatggaaaagtaatgtggagtggactgattccaaaatgtgg

SEQ ID NO: 515371 - DNA, 120 bp, Artificial Sequence
  ENSG00000164796_23 (sequence is synthesized)
agccccatgtggtggccatttttcagctcccagtggagtgattctctcaccaggatggccaggatactacaaagactctttgaattgtgagtgggtgattgaagctgaacctggacactc

SEQ ID NO: 515372 - DNA, 120 bp, Artificial Sequence
  ENSG00000164796_24 (sequence is synthesized)
tatcaaaattacatttgaaagatttcagactgaactgaattatgatgttctggaagttcatgatgggccaaatcttctgtcacccttgcttggatcttacaatggcacccaagtgcccca

SEQ ID NO: 515373 - DNA, 120 bp, Artificial Sequence
  ENSG00000164796_25 (sequence is synthesized)
gtttctatttagtagcagtaattttatataccttctatttacaacagacaacagtcgttccaataatggtttcaagattcattatgaaagtgttacagtgaacacgtattcttgtttgga

SEQ ID NO: 515374 - DNA, 120 bp, Artificial Sequence
  ENSG00000164796_26 (sequence is synthesized)
ccctggcatacctgtacatggccgtcgctatggtcatgatttctccattggctctactgtttcatttagttgtgattcaggatacaggttgagtcatgaagagccccttctatgcgaaaa

SEQ ID NO: 515375 - DNA, 120 bp, Artificial Sequence
  ENSG00000164796_27 (sequence is synthesized)
aaaccactggtggagtcatccacttccaacctgtgatgcattatgtggaggagatgttagagggcctagtggaacaatcttatcacctggttacccggaattttatccaaattctctgaa

SEQ ID NO: 515376 - DNA, 120 bp, Artificial Sequence
  ENSG00000164796_28 (sequence is synthesized)
ttgtacatggactgttgatgtaacccatggaaaaggtgtgcagttcaacttccacacttttcatttggaagaccatcatgactacttactgatcacagagaatggcagttttacccaacc

SEQ ID NO: 515377 - DNA, 120 bp, Artificial Sequence
  ENSG00000164796_29 (sequence is synthesized)
actggcacgcctgactggttcagatcttcctccaacaatcaatgctggtctctatggaaatttcagggctcaattgcgtttcatttcagatttttcaatatcatatgaaggatttaacat

SEQ ID NO: 515378 - DNA, 120 bp, Artificial Sequence
  ENSG00000164796_30 (sequence is synthesized)
aacattctctgaatataaccttgaaccttgtgaagatcctggcattcctcaatatggtagtcgaatcgggttcaactttgggattggtgacactctgaccttctcatgctcttcgggtta

SEQ ID NO: 515379 - DNA, 120 bp, Artificial Sequence
  ENSG00000164796_31 (sequence is synthesized)
tcgactggaaggaacatcagagatcatctgtcttggtggtggccgacgagtgtggagtgcacctctgccaaggtgtgtggctgaatgtggtgcatctgcaacgaataatgaaggaatttt

SEQ ID NO: 515380 - DNA, 120 bp, Artificial Sequence
  ENSG00000164796_32 (sequence is synthesized)
gctgtctccaaattatccactcaactatgaaaacaaccatgaatgcatttatagtattcaggttcaagcaggaaagggaatcaatatttcagccagaacatttcatttagcacaaggaga

SEQ ID NO: 515381 - DNA, 120 bp, Artificial Sequence
  ENSG00000164796_33 (sequence is synthesized)
tgttcttaagatttatgatggaaaagataaaacgactcatctactaggtgcttttactggtgcatctatgcgcggactgacacttagtagtacttcaaatcaactctggctagaatttaa

SEQ ID NO: 515382 - DNA, 120 bp, Artificial Sequence
  ENSG00000164796_34 (sequence is synthesized)
ttccgatactgaagggacagatgaaggctttcaacttgtgtataccagttttgaactctcacactgtgaagatcctggcattccacaatttggatacaagatcagtgaccaaggccactt

SEQ ID NO: 515383 - DNA, 120 bp, Artificial Sequence
  ENSG00000164796_35 (sequence is synthesized)
tgctggtagcaccatcatttatggatgcaatccaggctacactctccacggaagtagccttctcaagtgcatgacaggggagagaagggcatgggactatcctctgccttcctgtattgc

SEQ ID NO: 515384 - DNA, 120 bp, Artificial Sequence
  ENSG00000164796_36 (sequence is synthesized)
tgaatgtggaggtcgttttaaaggagaatcatcaggaagaatcttatctcctggctatccttttccatatgacaataacctgcgttgcatgtggatgattgaggtagatcctggaaatat

SEQ ID NO: 515385 - DNA, 120 bp, Artificial Sequence
  ENSG00000164796_37 (sequence is synthesized)
tgtcagcttgcagtttcttgcttttgatacggaagcatcacatgatatactccgagtctgggacggtccaccagaaaatgatatgcttttaaaggaaattagtggatctcttattcctga

SEQ ID NO: 515386 - DNA, 120 bp, Artificial Sequence
  ENSG00000164796_38 (sequence is synthesized)
aggaattcatagcaccctcaatatagtaaccatccagtttgacacggatttttatattagcaaatctggatttgcaattcagttttcaagttctgttgccactgcgtgtcgtgacccagg

SEQ ID NO: 515387 - DNA, 120 bp, Artificial Sequence
  ENSG00000164796_39 (sequence is synthesized)
ggtccccatgaatgggactcgaaatggggatggaagagaacctggggacactgttgtttttcaatgtgacccaggatatgaacttcaaggagaggaaagaataacctgcattcaggtaga

SEQ ID NO: 515388 - DNA, 120 bp, Artificial Sequence
  ENSG00000164796_40 (sequence is synthesized)
aaatcggtacttctggcagcccagcccaccagtctgtatagcaccctgtggaggcaatttaacaggatcttcaggctttattctttcaccaaacttccctcatccatatccgcatagcag

SEQ ID NO: 515389 - DNA, 120 bp, Artificial Sequence
  ENSG00000164796_41 (sequence is synthesized)
agactgtgactggactatcaccgtcaatgcagactatgttatctccttggcgttcatcagttttagcatagaaccaaactatgacttcctctatatctatgatggaccagacagtaatag

SEQ ID NO: 515390 - DNA, 120 bp, Artificial Sequence
  ENSG00000164796_42 (sequence is synthesized)
cccactgattggaagttttcaagacagcaagttaccagagagaatagaaagcagctcaaatacaatgcatttggcttttcggagtgatggatctgttagttacactggatttcatctaga

SEQ ID NO: 515391 - DNA, 120 bp, Artificial Sequence
  ENSG00000164796_43 (sequence is synthesized)
atacaaagcaaaactgcgagagtcctgctttgatccaggcaatataatgaatggcaccagacttggaatggattataaattagggtcaacagtcacctattactgtgatgctggttatgt

SEQ ID NO: 515392 - DNA, 120 bp, Artificial Sequence
  ENSG00000164796_44 (sequence is synthesized)
tcttcaaggttattcaacactcacctgtatcatgggagatgatggaagacctggatggaatagagccttgccaagttgtcatgcgccctgtggaagtcgttcaacaggttcagaaggcac

SEQ ID NO: 515393 - DNA, 120 bp, Artificial Sequence
  ENSG00000164796_45 (sequence is synthesized)
tgttctatcaccaaactatccaaaaaattacagtgtgggacataattgtgtttattctatagcagttccaaaggagtttgtggtgtttggccagtttgtatttttccagacatcactcca

SEQ ID NO: 515394 - DNA, 120 bp, Artificial Sequence
  ENSG00000164796_46 (sequence is synthesized)
cgatgttgttgaggtgtatgatgggccaactcagcaatcttctctgttatcttccctctcaggatcccattcaggagaatcacttccactgagttcaggtaatcagatcacaattcgatt

SEQ ID NO: 515395 - DNA, 120 bp, Artificial Sequence
  ENSG00000164796_47 (sequence is synthesized)
tacttcagttggaccaataacagctaagggatttcactttgtttaccaagctgttcctagaacaagttctacacaatgcagttctgtgcctgaaccaagattcggaagaagaattggcaa

SEQ ID NO: 515396 - DNA, 120 bp, Artificial Sequence
  ENSG00000164796_48 (sequence is synthesized)
tgaatttgcagtcggttcatcggttctttttgattgtaatccaggatatattctccatggatccatagcaattaggtgtgaaacagtgcccaattctttggcccagtggaatgattcctt

SEQ ID NO: 515397 - DNA, 120 bp, Artificial Sequence
  ENSG00000164796_49 (sequence is synthesized)
acctacttgtattgtgccctgtggtggaattttaactaagcgcaaagggactattttgtcacctggataccctgagccttatgacaacaatctgaattgtgtgtggaagatcacagtgcc

SEQ ID NO: 515398 - DNA, 120 bp, Artificial Sequence
  ENSG00000164796_50 (sequence is synthesized)
agagggagctggcattcaagtgcaagttgttagctttgctacagaacataattgggattctctggacttttatgatgggggagacaacaatgctccaagacttggaagctattcaggaac

SEQ ID NO: 515399 - DNA, 120 bp, Artificial Sequence
  ENSG00000164796_51 (sequence is synthesized)
aacaataccccatcttttgaatagtacgtctaataatctgtatctaaattttcaatcagacatcagtgtttctgctgcaggatttcatcttgaatacacagcaattggtttggattcctg

SEQ ID NO: 515400 - DNA, 120 bp, Artificial Sequence
  ENSG00000164796_52 (sequence is synthesized)
tcctgaaccacaaactcctagcagtggaattaaaattggagacagatatatggttggagatgtagtatcctttcagtgtgatcaaggatattctcttcagggtcactctcacattacatg

SEQ ID NO: 515401 - DNA, 120 bp, Artificial Sequence
  ENSG00000164796_53 (sequence is synthesized)
tatgccaggacctgtaagaagatggaattatccaatcccaatttgtttagctcagtgtggtggtgctatgtcagacttcagtggtgtgatcctcagtcctgggtttcctggaaactatcc

SEQ ID NO: 515402 - DNA, 120 bp, Artificial Sequence
  ENSG00000164796_54 (sequence is synthesized)
attatttggaagtacgaagtggatcctcagaaactagtactgttattggccggcttagtggtcctcaaataccatcttccttattcagcaccacccatgaaaccagcttatattttcaca

SEQ ID NO: 515403 - DNA, 120 bp, Artificial Sequence
  ENSG00000164796_55 (sequence is synthesized)
gtgactattcacaaaacaaacaagggtttcatattgtataccaagcctatcagttgcaaagctgtcctgatccacgcccgtttcgaaatggttttgtaattggtaatgattttactgtgg

SEQ ID NO: 515404 - DNA, 120 bp, Artificial Sequence
  ENSG00000164796_56 (sequence is synthesized)
gtcaaaccatttcatttgaatgtttcccaggatacacattaattggaaattcagctctcacatgccttcacggagtcagtcgtaattggaatcatccacttccaaggtgtgaagctcttt

SEQ ID NO: 515405 - DNA, 120 bp, Artificial Sequence
  ENSG00000164796_57 (sequence is synthesized)
gtggtgggaatataactgcaatgaatggcaccatttattctcctgggtatcctgatgaatatccaaactttcaagattgtttttggcttgtaagagtaccccctgggaatggcatctaca

SEQ ID NO: 515406 - DNA, 120 bp, Artificial Sequence
  ENSG00000164796_58 (sequence is synthesized)
tcaattttactgtccttcaaacagaaccaatatatgatttcattactgtatgggatggaccagaccaaaattcacctcagatcggtcagttcagtggcaataccgctttggaatcagtct

SEQ ID NO: 515407 - DNA, 120 bp, Artificial Sequence
  ENSG00000164796_59 (sequence is synthesized)
acagtacttcaaatcagattctaatcaaattccacagtgatttcacaacaagtggcttttttgtgctcagttatcacgcctatcaactaagggtgtgccaacctccaccacctgtgccca

SEQ ID NO: 515408 - DNA, 120 bp, Artificial Sequence
  ENSG00000164796_60 (sequence is synthesized)
atgctgaaattttgacggaagatgatgaatttgaaataggtgatattattaggtatcagtgtcttccaggatttactttagttggtaatgcaattctgacgtgcagattaggagaacgac

SEQ ID NO: 515409 - DNA, 120 bp, Artificial Sequence
  ENSG00000164796_61 (sequence is synthesized)
tgcagatggatggagcacctccagtttgtcaagtgctctgtcctgccaatgaattacggctagattctactggagtcatattgagccctggatatcctgacagttacccaaatcttcaaa

SEQ ID NO: 515410 - DNA, 120 bp, Artificial Sequence
  ENSG00000164796_62 (sequence is synthesized)
tgtgtgcatggagcatttcagtggaaaagggttataatatcaccatgtttgtagaattcttccagacagaaaaggaatttgatgttcttcaggtgtatgatggaccaaatattcaaagtc

SEQ ID NO: 515411 - DNA, 120 bp, Artificial Sequence
  ENSG00000164796_63 (sequence is synthesized)
cagtgcttatttccctcagtggggattattcatctgcttttaatataacaagcaatggtcatgaagtatttcttcagtggtcagcagatcatggcaataacaaaaaaggcttccggataa

SEQ ID NO: 515412 - DNA, 120 bp, Artificial Sequence
  ENSG00000164796_64 (sequence is synthesized)
gatatatagctttctactgtagtacaccagaatccccacctcatggatatattatcagtcagacaggtgggcagcttaacagtgtggtccgttgggcctgtgatcgaggattccgacttg

SEQ ID NO: 515413 - DNA, 120 bp, Artificial Sequence
  ENSG00000164796_65 (sequence is synthesized)
ttggaaaaagcagtgctgtgtgcagaaagtcttcctatgggtatcatgcatgggatgcgccagtccctgcctgtcaagcaatttcctgtgggattcctaaagctccaacaaatggaggaa

SEQ ID NO: 515414 - DNA, 120 bp, Artificial Sequence
  ENSG00000164796_66 (sequence is synthesized)
tactaacaacagactatttggtaggaacgcgagttacctatttttgtaatgatggatatcgattgtcatccaaagaactcactacagctgtatgccaatcagatggaacatggagcaatc

SEQ ID NO: 515415 - DNA, 120 bp, Artificial Sequence
  ENSG00000164796_67 (sequence is synthesized)
ataacaagacccctcgctgtgttgttgttacatgtccaagcatcaattcctttatcttggaacatggaagatggcgaattgtgaatggctcccattatgaatacaaaaccaaagtagttt

SEQ ID NO: 515416 - DNA, 120 bp, Artificial Sequence
  ENSG00000164796_68 (sequence is synthesized)
tcagctgtgaccctggttatcatggactaggtcctgcctccatcgaatgtcttcctaatggtacttggagttggagaaatgaaagaccatattgccaaattatttcctgtggagaactac

SEQ ID NO: 515417 - DNA, 120 bp, Artificial Sequence
  ENSG00000164796_69 (sequence is synthesized)
ctacacctccaaatggaaataagattggaactcaaacttcatatggctcaacagctatctttacctgcgacttgggattcatgcttgtgggctctgctgtaagggaatgcctttcctcag

SEQ ID NO: 515418 - DNA, 120 bp, Artificial Sequence
  ENSG00000164796_70 (sequence is synthesized)
gtctttggagtgaatctgaaaccagatgcctagcgggtcattgtggaattccagaactgattgtgaatggtcaagtcattggagaaaattatggatatagagacacagttgtatatcaat

SEQ ID NO: 515419 - DNA, 120 bp, Artificial Sequence
  ENSG00000164796_71 (sequence is synthesized)
gtaatcctggttttcgattgattggttcttcagtgaggatatgtcaacaggatcacaattggtctggtcagctcccatcctgtgtgcctgttagctgtggtcaccctggtagtccaattt

SEQ ID NO: 515420 - DNA, 120 bp, Artificial Sequence
  ENSG00000164796_72 (sequence is synthesized)
atggaagaacaagtggaaatgggttcaactttaatgatgtggtaacattctcatgcaatattgggtatcttatgcaagggccaacaaaggcacagtgccaggccaacagacagtggagcc

SEQ ID NO: 515421 - DNA, 120 bp, Artificial Sequence
  ENSG00000164796_73 (sequence is synthesized)
atcctccacctatgtgcaaagtggtcaactgttctgatcctggaattccagccaattctaaaagagaaagtaaaatagaacatggaaattttacttacggcactgtggtattctatgact

SEQ ID NO: 515422 - DNA, 120 bp, Artificial Sequence
  ENSG00000164796_74 (sequence is synthesized)
gcaatcctggatattttttatttggatcttcagttttgatatgtcaaccaaatggacaatgggacaaacctttaccagaatgtatcatgattgactgtggacaccctggcgttcctccta

SEQ ID NO: 515423 - DNA, 120 bp, Artificial Sequence
  ENSG00000164796_75 (sequence is synthesized)
atgcagtcctgtctggcgagaagtatacttttgggtctactgttcactattcctgcacaggaaagcgttcccttttaggccagtcatcaagaacctgccaattgaatggccattggagtg

SEQ ID NO: 515424 - DNA, 120 bp, Artificial Sequence
  ENSG00000164796_76 (sequence is synthesized)
gatcacaacctcattgttcaggtgatgctactgggacatgtggcgatccaggtactcccggccatggctctagacaggaaagcaatttcagaactaaaagtactgtacgttatgcttgtg

SEQ ID NO: 515425 - DNA, 120 bp, Artificial Sequence
  ENSG00000164796_77 (sequence is synthesized)
atactggttacatccttcatggctcagaagaaagaacatgtttagctaatggcagttggaccggaaggcagccagagtgcaaagctgtgcagtgtggtaacccaggaaccacagccaatg

SEQ ID NO: 515426 - DNA, 120 bp, Artificial Sequence
  ENSG00000164796_78 (sequence is synthesized)
ggaaagtcttccgaattgatggcacaacattttctagttcagtcatttattcctgcatggagggatacatcctttctggaccttcagttagacagtgcacagccaatggaacatggtctg

SEQ ID NO: 515427 - DNA, 120 bp, Artificial Sequence
  ENSG00000164796_79 (sequence is synthesized)
gaactttacctaactgtacaataatcagttgtggagacccaggtataccagccaatggactgagatatggagatgattatgtggttggacaaaatgtttcttacatgtgccagccaggct

SEQ ID NO: 515428 - DNA, 120 bp, Artificial Sequence
  ENSG00000164796_80 (sequence is synthesized)
acacgatggaattgaatggctccagaatcaggacttgtacaattaatggcacatggagtggagtaatgccaacttgtagagctgttacctgcccaactcctccccagatctctaatggaa

SEQ ID NO: 515429 - DNA, 120 bp, Artificial Sequence
  ENSG00000164796_81 (sequence is synthesized)
ggctggaaggaacaaatttcgactggggctttagtattagctacatctgttctccaggctatgagctatccttccctgctgttttgacctgtgtagggaatggtacctggagtggtgaag

SEQ ID NO: 515430 - DNA, 120 bp, Artificial Sequence
  ENSG00000164796_82 (sequence is synthesized)
taccgcagtgcttaccaaagttttgtggtgaccctggtatacctgcccaaggaaaaagagaaggcaaaagctttatataccagtcagaggtttcattcagctgcaattttcctttcatat

SEQ ID NO: 515431 - DNA, 120 bp, Artificial Sequence
  ENSG00000164796_83 (sequence is synthesized)
tagtgggatcaagcaccagaatatgtcaagcagatggcacttggagtggttcatcacctcactgcatagagcctacccaaacctcttgtgaaaacccaggtgtgcctcggcatggatctc

SEQ ID NO: 515432 - DNA, 120 bp, Artificial Sequence
  ENSG00000164796_84 (sequence is synthesized)
agaacaatacattcggatttcaagtaggaagtgttgtacagttccattgcaaaaaaggacaccttctccaagggtctacaacacgcacctgcctccctgatcttacgtggagtgggattc

SEQ ID NO: 515433 - DNA, 120 bp, Artificial Sequence
  ENSG00000164796_85 (sequence is synthesized)
agcctgaatgcataccccacagctgtaaacagccagaaactcctgctcatgcaaatgtcgtagggatggaccttccatctcatgggtatacactgatttatacctgtcagcctggcttct

SEQ ID NO: 515434 - DNA, 120 bp, Artificial Sequence
  ENSG00000164796_86 (sequence is synthesized)
tcttagcaggtggaacagaacatagagtgtgtagatccgataacacctggactggaaaagttcccatttgtgaagctggttctaaaatattggtgaaagatcctagacctgcactgggaa

SEQ ID NO: 515435 - DNA, 120 bp, Artificial Sequence
  ENSG00000164796_87 (sequence is synthesized)
cacccagcccaaagctaagtgttcctgatgatgtatttgcccaaaattatatatggaaaggctcttacaatttcaaaggaaggaaacaacccatgaccttaacagttactagtttcaatg

SEQ ID NO: 515436 - DNA, 120 bp, Artificial Sequence
  ENSG00000164796_88 (sequence is synthesized)
cttccactgggagagttaacgcaacactgagcaatagcaacatggagctgctactttcaggggtatataaaagccaggaagctcgcctaatgttacgcatatatcttattaaagtacctg

SEQ ID NO: 515437 - DNA, 120 bp, Artificial Sequence
  ENSG00000164796_89 (sequence is synthesized)
ctcatgcttctgtgaagaaaatgaaggaagaaaattgggcaatggatggctttgtttctgctgagcctgatggagctacttatgtatttcaaggatttattcaaggcaaagattatggac

SEQ ID NO: 515438 - DNA, 120 bp, Artificial Sequence
  ENSG00000164796_90 (sequence is synthesized)
aatttggcctacaaagactgggactgaatatgtcagaaggttcaaattcttcaaatcaacctcatggtacaaatagtagttctgtagccattgctattcttgtgcctttttttgcactta

SEQ ID NO: 515439 - DNA, 120 bp, Artificial Sequence
  ENSG00000164796_91 (sequence is synthesized)
tatttgcaggatttggattttatctttataaacaaaggactgcacctaaaacacagtatacaggatgttcagttcatgaaaataacaatggccaagcagcttttgaaaatcccatgtatg

SEQ ID NO: 515440 - DNA, 120 bp, Artificial Sequence
  ENSG00000164796_92 (sequence is synthesized)
acaccaacgcaaagtcagtggaagggaaggcggtacgatttgatcccaacttgaacacggtttgcacaatggtataacgaggcaacctttgccttcttcagaagcttggaaatcgacaca

SEQ ID NO: 515441 - DNA, 120 bp, Artificial Sequence
  ENSG00000164796_93 (sequence is synthesized)
caaaacagtgcacatttagttcactgctaaacaaattaaagcacacttttcaggacttgctgggtcaccttttcctgaggaatgatacagaagagtgttttttcataaactggaccataa

SEQ ID NO: 515442 - DNA, 120 bp, Artificial Sequence
  ENSG00000164796_94 (sequence is synthesized)
ttcttcatgtttaccatggagagttttacagaaatttggctgcactctgagagtgcttactcacagtttatttgctttttttaaaaaggagattattctaaaatataaacttatttgcat

SEQ ID NO: 515443 - DNA, 120 bp, Artificial Sequence
  ENSG00000164796_95 (sequence is synthesized)
atattggaggagcatccactatcagtatttctgtgctttataaactatattagagggactgggtttaaaaaaaaagatatagggtagaaataagagctatacttacaagagtcaatagat

SEQ ID NO: 515444 - DNA, 120 bp, Artificial Sequence
  ENSG00000164796_96 (sequence is synthesized)
cactgacttctctttaactgtcctgagctacatcacgcccacaaatctgtctttcataccactctatctgccattcattcttgttaaatgaggcattgttttctttatttaagattgagt

SEQ ID NO: 515445 - DNA, 120 bp, Artificial Sequence
  ENSG00000164796_97 (sequence is synthesized)
tatgactttaaatgtttatgagctagtttatgcctcggaagacataaggtttcccattccaatttgaatctttctatttctttagcatcatattgctcttcttcttttagactggttgtc

SEQ ID NO: 515446 - DNA, 120 bp, Artificial Sequence
  ENSG00000164796_98 (sequence is synthesized)
atagtttctgcaaagggcaagttcattgtgctaccctcccaattcccccattatggagtaaccagtattattcagtgagctatggggtagtgtttcactccttgcttcaatatggttttt

SEQ ID NO: 515447 - DNA, 120 bp, Artificial Sequence
  ENSG00000164796_99 (sequence is synthesized)
tcctatttatttttattattttttaatcccaaatgtgatagtagcttcagtatgtttcctcacccaaaaaccatttggctggcagaaattatctagaaaaattattattttgcagttatc

SEQ ID NO: 515448 - DNA, 120 bp, Artificial Sequence
  ENSG00000164796_100 (sequence is synthesized)
tgagacaccaaacttaccatcctttattttacaatatttttgatcgaccaaataaaatgtcctaataatctactctatttatatctacatttccttccagctgagtcttcaaatttagca

SEQ ID NO: 515449 - DNA, 120 bp, Artificial Sequence
  ENSG00000164796_101 (sequence is synthesized)
ttattttgacacttttaattttcatttaacaatggattagaaaaatattttggtctagccactaaacataatgactgaaaaaaattattattataaatcaccaatataaatttattgcct

SEQ ID NO: 515450 - DNA, 120 bp, Artificial Sequence
  ENSG00000164796_102 (sequence is synthesized)
acaattgtggacttatcatatttttatatatttttaaatttctgtacctttattgttaaacaccaagtttcacatacaagaggtttctttcattgtcaaattaagatatgtatttgtaag

SEQ ID NO: 515451 - DNA, 120 bp, Artificial Sequence
  ENSG00000164796_103 (sequence is synthesized)
ttattggtggctcatttaaactgtatcatacagtaatgccagcatttttatttaataggtcatcgtcttccttttatagctgttttacttcattgaatacgatcatgtacccagtgttaa

SEQ ID NO: 515452 - DNA, 120 bp, Artificial Sequence
  ENSG00000164796_104 (sequence is synthesized)
ctctttgttgttgtccctttcaaatatggataactctgtgaacagtcttgactttttgtatcatgagacagagtgcctaagagaaacccttgcacctgggagcgctgcttggctctatct

SEQ ID NO: 515453 - DNA, 120 bp, Artificial Sequence
  ENSG00000164796_105 (sequence is synthesized)
ctacaacatttaatgaatttcttgtaaaccactttgagatacattgttttggaaattcatacaattttctcaacatggtactctactggcaggatgcagttttaaattttatgccatcag

SEQ ID NO: 515454 - DNA, 120 bp, Artificial Sequence
  ENSG00000164796_106 (sequence is synthesized)
ttatttattcttgtttattcaaatgactgcaataacaatgattcattcattaatgttaaggctaatacatttaagatcttgtttaaacaatgtttcttctgcaactggctactcctctta

SEQ ID NO: 515455 - DNA, 120 bp, Artificial Sequence
  ENSG00000164796_107 (sequence is synthesized)
tattaatgcatacacttttgtaaagaagtatatttttatgaaaagaaactttgtaaaagtatgatgtaaattttcagtgcaatgtaaacaaaataaaaatggataattgcttttgtaaaa

SEQ ID NO: 515456 - DNA, 120 bp, Artificial Sequence
  ENSG00000164796_108 (sequence is synthesized)
gtacacaactatgttttgtgatagaaaaatgtctttagcatttagaaattggaatttgtattgaaaaaaatggtcatgctgttgctgagacaataatgtgatcataactaaattacagta

SEQ ID NO: 515457 - DNA, 120 bp, Artificial Sequence
  ENSG00000164796_109 (sequence is synthesized)
ttaaagttagttgattttatagtataatattcagaataatgaatattatgatttctaaaaggtagtatgtagcagatgcaatatttttctttaataaagtgcttcagcaattggatatac

SEQ ID NO: 515458 - DNA, 120 bp, Artificial Sequence
  ENSG00000164796_110 (sequence is synthesized)
tacacccctcggccctttggaggaccggagagccggacgacgccgcagcccttgggggagtccagcgccagctggcgaaaagaagcttcatcttccagatcatccgggaaaggggcagag

SEQ ID NO: 515459 - DNA, 120 bp, Artificial Sequence
  ENSG00000164796_111 (sequence is synthesized)
gtggccggttgttgcgactcataaacaacctcttcagcacaacccggttgaatgtggagttggttcctttgctggaaacctgtacagcttgaccgacagacagcctcaggatttatttat

SEQ ID NO: 515460 - DNA, 120 bp, Artificial Sequence
  ENSG00000164796_112 (sequence is synthesized)
ggaaagttatgtgaagaggttgtcagagctgaaggatatttttgaagatcgagctatttacataaaaaatagatgaaattcaaaacttgtataaacaaataaaagttattcctattgtaa

SEQ ID NO: 515461 - DNA, 120 bp, Artificial Sequence
  ENSG00000164796_113 (sequence is synthesized)
tgaatgtgagattagcaccatttaacgtttttatttggatcactaacttttctgagaatggaaatattcggaagcatattgtgaactcttttcataaaaacaaggcataacattgcagaa

SEQ ID NO: 515462 - DNA, 120 bp, Artificial Sequence
  ENSG00000164796_114 (sequence is synthesized)
tgataaattccaggggaaagaaacatactgttttataattattcattattgttatgcaacttatatgccttgactttttccccttgtatacatactttattcatacatcctccattccag

SEQ ID NO: 515463 - DNA, 120 bp, Artificial Sequence
  ENSG00000164796_115 (sequence is synthesized)
ttactttgttttaagacaattattgaaagagaggaagactgagttagtatgaagtctgcagagaggtaatagagaataagaatgggcaagtacactgaagactgagtttcactcttagca

SEQ ID NO: 515464 - DNA, 120 bp, Artificial Sequence
  ENSG00000164796_116 (sequence is synthesized)
tccaaaatttgcactcacagcaacaaatttaagagaaaaatgtaacccaccacctggatattttttttcttcagtggtacagataacacaacagagatatcaaagatatgttttttattt

SEQ ID NO: 515465 - DNA, 120 bp, Artificial Sequence
  ENSG00000164796_117 (sequence is synthesized)
ttctttgtattttgtcaaaagtcgaggcactgagcattatatcatgctgcaaaaagaataacaagcttgttaatcaaaaaattgcatgttttagagtttttgattaagacttgtttttat

SEQ ID NO: 515466 - DNA, 120 bp, Artificial Sequence
  ENSG00000164796_118 (sequence is synthesized)
tgggatatgtgcttcgagtattcaaagtatacagggtacaataaaacaaataaccagagctttttatatacatgtaaaagggcactgcaatctgtagcgtgcagcctggaacattatggg

SEQ ID NO: 515467 - DNA, 120 bp, Artificial Sequence
  ENSG00000164796_119 (sequence is synthesized)
ttgcttctttttgacagggacacctatgagtcacctactttttcaaggctatactccaccttggcagccaacaagtccaaatatgtggtttgattttggtcaatacaaaacgacaaaagt

SEQ ID NO: 515468 - DNA, 120 bp, Artificial Sequence
  ENSG00000164796_120 (sequence is synthesized)
acaaaaattctttctttattaaggtagcttactaagtggaaaacatcgaaatcgagctaatttttaaatattatactgagttttcaattcagtatttatctgcacataagctaaaaaata

SEQ ID NO: 515469 - DNA, 120 bp, Artificial Sequence
  ENSG00000164796_121 (sequence is synthesized)
aattttttcattgggatagctttatcatgaataatatatctctttagtacaatattcaaattgattgtcaccatttttccaaactgtgtactctgctgtatactaaatctttgatataag

SEQ ID NO: 515470 - DNA, 120 bp, Artificial Sequence
  ENSG00000164796_122 (sequence is synthesized)
ctggagagaaaatatttcctgggtaaaagtagtttattttacaaaagatgcttaacatttgtgatgcaattataataaagttgtattcaccatctaattattatttatttgaaaatatat

SEQ ID NO: 515471 - DNA, 120 bp, Artificial Sequence
  ENSG00000164796_123 (sequence is synthesized)
catcccatgaacaaattagcttggtgtctctgatgtcatattgctagtacattaatactatgtctcacaaaggtgaatatatattgagtggtgatctctttatagtggctaaaggtattt

SEQ ID NO: 515472 - DNA, 120 bp, Artificial Sequence
  ENSG00000164796_124 (sequence is synthesized)
aaaatgattatctcaaggtttcattcattatggatataacttttgataaagtaaaacatactatataaggtatatttcagtgataatatgtccaattttaatatacaacactatgcaaaa

SEQ ID NO: 515473 - DNA, 120 bp, Artificial Sequence
  ENSG00000164796_125 (sequence is synthesized)
atgcaaaaacaccttaagtcagcattcatgaatagtagaataaattaatttctgataatgtgtgtagtttataaaatctaaatatctgaaaactacatactttcatgtcaaaaatggggt

SEQ ID NO: 515474 - DNA, 120 bp, Artificial Sequence
  ENSG00000164796_126 (sequence is synthesized)
catttatatttttgcctctataaatgaaagtgttttttgaagcttattgattaaacagatgtaaaaattaactagcaccctgactatttttaaggtagttcttctggttcttcagaattt

SEQ ID NO: 515475 - DNA, 120 bp, Artificial Sequence
  ENSG00000164796_127 (sequence is synthesized)
tctcttggcaaagaggttatgtaaaattagaagtatttttgaggtcttaccagaaacttattttagttgtaaatcaactataattcaactaaaaaattcaacattccaagaattgcacat

SEQ ID NO: 515476 - DNA, 120 bp, Artificial Sequence
  ENSG00000164796_128 (sequence is synthesized)
tttatttagtcctagatttatgccagtgtttgtatacttttctttaagtgccataagcttttttaaacttgtaatttaaaatagtctaagaaggtaacatgtaggaattaaagactcttt

SEQ ID NO: 515477 - DNA, 120 bp, Artificial Sequence
  ENSG00000164796_129 (sequence is synthesized)
acatacttggctatgtttgagttatgattctctgatggtgttactttctaatagttgataacatgttcttgccttcctaatgtacaagaagcagattatcagtgctaactttttacagtt

SEQ ID NO: 515478 - DNA, 120 bp, Artificial Sequence
  ENSG00000164796_130 (sequence is synthesized)
agattatcagtgctaactttttacagtttcatcagtcttccatattcctttgcatttatattttttcaattttaagtaaaaatttagtgttttagtgaaaccccgtctctactaaaaata

SEQ ID NO: 515479 - DNA, 120 bp, Artificial Sequence
  ENSG00000164796_131 (sequence is synthesized)
tccgtctcaaaaaaaaaagaaaaaagaaagaattagtgtttattttcctcaagttttggcaatgaaaaacataatgtagtggggaaaatggtggatctggagatgagatttattacatta

SEQ ID NO: 515480 - DNA, 120 bp, Artificial Sequence
  ENSG00000164796_132 (sequence is synthesized)
ggatgttaggtttgttgctcaccagctttttgagcaatctacgctacctctgtttaaactgagagatggtagtaaggccggttctagccatctcattatactgttctgcaggtattacga

SEQ ID NO: 515481 - DNA, 120 bp, Artificial Sequence
  ENSG00000164796_133 (sequence is synthesized)
gaaaatgtgtatgaacctgctgcatgtctacaaaatcctattagagcacatcgaactgcttccagtcagatgacacttaaaaatgcctgagttatttcacaaactttgttgtgcaaaaac

SEQ ID NO: 515482 - DNA, 120 bp, Artificial Sequence
  ENSG00000164796_134 (sequence is synthesized)
aaggttactaggttgattacagctaagattctatttttctttctttttttcctctatactcgtttaccgagtaaatctgatttctttttccttttacattgtaaactcatacataaactt

SEQ ID NO: 515483 - DNA, 120 bp, Artificial Sequence
  ENSG00000164796_135 (sequence is synthesized)
ttacattgtaactcatacaataatcatctattttataaatatacattatggtacgcacgtctgactgctgtttgatcatcattgccactgtcattaaaagctggtgtcttttgttaatgc

SEQ ID NO: 515484 - DNA, 120 bp, Artificial Sequence
  ENSG00000164796_136 (sequence is synthesized)
aaataatacctataagtggaagtacaattttttacactggcaatctgtgggatataattttcctaaatatataaaaatacttctttcaatattacctgttagtttcaaagtatcaattcc

SEQ ID NO: 515485 - DNA, 120 bp, Artificial Sequence
  ENSG00000164796_137 (sequence is synthesized)
ctgatagtaatgcttgtacatgtacctattctctctagattgccttgaaaatgagaaaacacatttttatttttcctctttcctgcttttctaaacaactgtggcctctgggaagttaaa

SEQ ID NO: 515486 - DNA, 120 bp, Artificial Sequence
  ENSG00000164796_138 (sequence is synthesized)
aaattgcgaagttaggaaaataaatttattgttctcattctttctttcctaatctgtaaattgggaataatagcacttaattcacagagattttatggggaatacaatataatgaaagct

SEQ ID NO: 515487 - DNA, 120 bp, Artificial Sequence
  ENSG00000164796_139 (sequence is synthesized)
cagtgactctaacccttaacatttattgaatgattcctctgcacctgtcactgtgctatgtattttgtgttcattatggtatttaacttctcctgtatccaaacaatgtaaaataattac

SEQ ID NO: 515488 - DNA, 120 bp, Artificial Sequence
  ENSG00000164796_140 (sequence is synthesized)
tattatcatcatcattttacaactgataaaatgaggcttgaattgattgcccgagtaaaatttttgaaagtggcaaaaggcagaactatcattacaattcagatttgtttagtttagatc

SEQ ID NO: 515489 - DNA, 120 bp, Artificial Sequence
  ENSG00000164796_141 (sequence is synthesized)
taaaaatctattttttcttagcagtattggatcaaatttagtaagagaaataataataaaaggtatattttcaaacaggtgtaatatatacaaatataaaccgaaaggtaagctacaaat

SEQ ID NO: 515490 - DNA, 120 bp, Artificial Sequence
  ENSG00000164796_142 (sequence is synthesized)
ccgaaaggtaagctacaaatttatttttcctatttattttatagactatattcatacatgtactctatttatacaagcaaaatgacaagactatattctaacatgtagtctatgttataa

SEQ ID NO: 515491 - DNA, 120 bp, Artificial Sequence
  ENSG00000164796_143 (sequence is synthesized)
agtctaatgttttgctcactgtaaacatttaacacatttattggtttttgtgcttcaagaagtactgtagttaatgttatagctgactttagttagcaagactggaaagaaaaaaattag

SEQ ID NO: 515492 - DNA, 120 bp, Artificial Sequence
  ENSG00000164796_144 (sequence is synthesized)
tatgtaacctacagcccgttccagactgtgtttatatacaaaatctgctgtttgattagaagtcgaaactgctgctggcagagtttgattcatatttgcgtctggctgtttgactcactg

SEQ ID NO: 515493 - DNA, 120 bp, Artificial Sequence
  ENSG00000164796_145 (sequence is synthesized)
ttttcttgggttttgtttctctcatattggatcatattctcacttaatgcatgtccttatggtgtgtttgctgttctctttcttccagaaattgatatttattttttttacttttcatga

SEQ ID NO: 515494 - DNA, 120 bp, Artificial Sequence
  ENSG00000164796_146 (sequence is synthesized)
gctccaatagattttttaaaaatggcttcttacacttgtcttgcaataatgtaggaaaaaaaatggtttgtgggtcttgtcattcttgcttgtataaataaacacactgggattcataat

SEQ ID NO: 515495 - DNA, 120 bp, Artificial Sequence
  ENSG00000164796_147 (sequence is synthesized)
cagaatttcatattttaaaaactgtactctaagcctccaatgattaatgatattacttgtttttctgtaagttattttttattaaaagagaattgatattggcaaagcaccgttagataa

SEQ ID NO: 515496 - DNA, 120 bp, Artificial Sequence
  ENSG00000164796_148 (sequence is synthesized)
tttctttcttaatcataattttatcttagaacaagtgctgatgcatttaaggcaacattgctggaagcataaaggttattctaagccttgtttattttacattaatattatattttccga

SEQ ID NO: 515497 - DNA, 120 bp, Artificial Sequence
  ENSG00000164796_149 (sequence is synthesized)
ataataaacttataccaacaagtaaaaaatcacctattatttaatgaggcagagacagatatatttacccaggatcattccatatatgatattgtatgtccttaataatctctctacatt

SEQ ID NO: 515498 - DNA, 120 bp, Artificial Sequence
  ENSG00000164796_150 (sequence is synthesized)
attatcattctattatatttttgttttttcttttataattaattcacgtattagcatccttatgaatatatattttctatattttagattggttcttggtagaaacaggatgtctaggtc

SEQ ID NO: 515499 - DNA, 120 bp, Artificial Sequence
  ENSG00000164796_151 (sequence is synthesized)
gatgtctaggtcagaagcaaataatattctttatattactaatatgctttccagaatcttatatcaatgaatattattacaactagaaaactatacttcattacctctcagtcttcccag

SEQ ID NO: 515500 - DNA, 120 bp, Artificial Sequence
  ENSG00000164796_152 (sequence is synthesized)
acttacatcttttattcttaatttgattatttacatatatctgatttttatagatatttaacatattctcttgtttgataaccatgctggttttctcctgtaatttattttttgtctatg

SEQ ID NO: 515501 - DNA, 120 bp, Artificial Sequence
  ENSG00000164796_153 (sequence is synthesized)
tatcaatatttttcttgatgatttacataattcatttattcttaaacatgtaaatatttcctttttgtgacaaaaatatttctcagcttcttggttgcttgttaaatcttagctgttttt

SEQ ID NO: 515502 - DNA, 120 bp, Artificial Sequence
  ENSG00000164796_154 (sequence is synthesized)
ttagctgttttttctgcacaaataagtgaagaattttaaaatttttatatgatatatattatccatttatttaaagattcatttcatttcttttaatgttacaaagtcaagagctagatg

SEQ ID NO: 515503 - DNA, 120 bp, Artificial Sequence
  ENSG00000164796_155 (sequence is synthesized)
tcatttttaaattccttttcctaatttttaacatgtacaaccttaatacatatgaaatattatggaatgataatcttttctcaaagtggaagagaatgattatttctaaataaccaacgt

SEQ ID NO: 515504 - DNA, 120 bp, Artificial Sequence
  ENSG00000164796_156 (sequence is synthesized)
agtagtatagttattttttaaaagacttgagtacaaaaacttttatttagtgtgactcctgacatgttactctggtctcctcattgctactttgatatggcctatcactttggatgtttg

SEQ ID NO: 515505 - DNA, 120 bp, Artificial Sequence
  ENSG00000164796_157 (sequence is synthesized)
gctgtaacagaaatcctgacttactgtagcttaaacaaaaaatttatttttcttatataacaagaagtttgttattatacagttcatcagtaaatcaaaagctttcccaaaagtccttag

SEQ ID NO: 515506 - DNA, 120 bp, Artificial Sequence
  ENSG00000164796_158 (sequence is synthesized)
aaggattcttctcctatatcattggccagaacagcctgacatcaccatcccttggtcaacagtattctagaaaaacagctttcattttcaacctcagttgtggaaaacagcatggagaag

SEQ ID NO: 515507 - DNA, 120 bp, Artificial Sequence
  ENSG00000164796_159 (sequence is synthesized)
actgagggccaggcaactgacaaaatctatcacaatatccaaagcttattttttggatattttgataggtaaataaataaatattatttctaaataaattgtttccaaagttgtgattta

SEQ ID NO: 515508 - DNA, 120 bp, Artificial Sequence
  ENSG00000164796_160 (sequence is synthesized)
aaaacagggagtaattatcacaaggtcatagtcatggtgtagtaatgactgcaacataaacttcactttcctgagttatataaacgtccatggattagaaatgttaaaaacaaatggata

SEQ ID NO: 515509 - DNA, 120 bp, Artificial Sequence
  ENSG00000164796_161 (sequence is synthesized)
ggtaaagataaaatcaaatgtaagtgtaagtgttaacataacacaaaatcttaaggcggaggcagataataaaaaagtaaatatcacatgttctcacttataagtgagagctaaacattg

SEQ ID NO: 515510 - DNA, 120 bp, Artificial Sequence
  ENSG00000164796_162 (sequence is synthesized)
aagatggcaacaatagacactggggactaatagtgtggggagggagcgaaggaagcataggctgaaaaactgtcatgtactatgcttacatctgggtgataggatcattcacgtcctagg

SEQ ID NO: 515511 - DNA, 120 bp, Artificial Sequence
  ENSG00000164796_163 (sequence is synthesized)
tcattcacgtcctagggcttggcatcatgcagtatacccatgtaatggacctgcacatatactctctgaatccaagataaaagttgaaattataataaaatcattaaaaaaaagaaaaaa

SEQ ID NO: 515512 - DNA, 120 bp, Artificial Sequence
  ENSG00000164808_0 (sequence is synthesized)
gctcaggcggcgctcccggagatgccccgcggcagccgcgctcggggctctaagagaaaaaggagttggaatacagaatgcccatcctttccaggagaaagaccactgcaggtcagaaga

SEQ ID NO: 515513 - DNA, 120 bp, Artificial Sequence
  ENSG00000164808_1 (sequence is synthesized)
gcaggtctcaggacagcaggggcagctgcctctctctctgaagcatggctcaggtgtggagaagggtttcagaacacttctgggaatccgtcattaacagctgaagagaagacgattaca

SEQ ID NO: 515514 - DNA, 120 bp, Artificial Sequence
  ENSG00000164808_2 (sequence is synthesized)
gaaaagcaccttgaattatgccctagacccaagcaagaaaccaccacatctaaaagcaccagtgggcttacagacataacatggagctccagtggaagtgatttgtcggatgaagataag

SEQ ID NO: 515515 - DNA, 120 bp, Artificial Sequence
  ENSG00000164808_3 (sequence is synthesized)
acactttctcagttacagagagatgaattacagtttatcgactgggagattgacagtgacagggcagaggctagtgactgtgatgaatttgaagatgacgagggtgctgtggaaatctca

SEQ ID NO: 515516 - DNA, 120 bp, Artificial Sequence
  ENSG00000164808_4 (sequence is synthesized)
gactgtgcttcttgtgcaagtaatcagtctttgacaagtgatgagaagctgtcggagcttcccaagccaagttctatagaaattttagagtattcatcagatagtgaaaaagaagatgat

SEQ ID NO: 515517 - DNA, 120 bp, Artificial Sequence
  ENSG00000164808_5 (sequence is synthesized)
ttggaaaatgtcctactcattgattcagaatcccctcacaaataccacgtgcagtttgcatcggatgcaagacagattatggagagactgatagatccaaggacaaaatcaacagagacc

SEQ ID NO: 515518 - DNA, 120 bp, Artificial Sequence
  ENSG00000164808_6 (sequence is synthesized)
attttgcatacacctcagaaacccacagctaagtttcccaggactccagaaaattcagcaaagaagaagcttttaagaggtggactagcagaaagactaaatggactgcagaatcgagag

SEQ ID NO: 515519 - DNA, 120 bp, Artificial Sequence
  ENSG00000164808_7 (sequence is synthesized)
agatctgctatttctttgtggagacatcaatgtatttcttaccaaaagacactttcaggtagaaaatctggtgtattaactgtgaaaattttagagctgcatgaggaatgtgccatgcaa

SEQ ID NO: 515520 - DNA, 120 bp, Artificial Sequence
  ENSG00000164808_8 (sequence is synthesized)
gttgccatgtgtgagcagttattggggtcaccagccaccagctcctcccaaagtgtggctcccaggcctggagctggcctgaaagttctcttcaccaaggagactgcaggctacctcagg

SEQ ID NO: 515521 - DNA, 120 bp, Artificial Sequence
  ENSG00000164808_9 (sequence is synthesized)
ggccgtccccaggacactgtccggatcttccctccctggcaaaaactgattattccaagtggaagttgccctgttattctgaatacttacttttgtgagaaagttgttgccaaagaagat

SEQ ID NO: 515522 - DNA, 120 bp, Artificial Sequence
  ENSG00000164808_10 (sequence is synthesized)
tcagaaaaaacttgtgaagtgtactgtccggacataccccttccaagaagaagcatctctttggcccagatgtttgtaattaagggtctaacaaataattcacctgaaatccaggttgtg

SEQ ID NO: 515523 - DNA, 120 bp, Artificial Sequence
  ENSG00000164808_11 (sequence is synthesized)
tgtagtggtgtagccactacagggacagcctggacccatgggcacaaagaagcaaaacagcgcatcccaaccagcactcccctgagggattctctcctggatgtggtggaaagccaggga

SEQ ID NO: 515524 - DNA, 120 bp, Artificial Sequence
  ENSG00000164808_12 (sequence is synthesized)
gctgcctcgtggccaggagctggagtccgagtggtggtgcaaagagtgtattctcttcccagcagagacagcaccaggggtcagcagggggccagctcaggacacacagacccagctgga

SEQ ID NO: 515525 - DNA, 120 bp, Artificial Sequence
  ENSG00000164808_13 (sequence is synthesized)
actcgagcctgccttctggtacaagatgcctgtggaatgttcggtgaagtgcacttggagttcaccatgtcgaaggcaagacagttggaagggaagtcttgcagcctggtgggaatgaag

SEQ ID NO: 515526 - DNA, 120 bp, Artificial Sequence
  ENSG00000164808_14 (sequence is synthesized)
gttctacagaaagtcaccagaggaaggacagcggggattttcagtttgattgacaccctgtggcccccagcgatacctctgaaaacacctggccgcgaccagccctgtgaagagataaaa

SEQ ID NO: 515527 - DNA, 120 bp, Artificial Sequence
  ENSG00000164808_15 (sequence is synthesized)
gttacatcctcacagctcatccaaatctgggacaaattgatataattgacgaagaccccatttataagctttaccagcctccagttacccgctgcttaagagacattctccagatgaatg

SEQ ID NO: 515528 - DNA, 120 bp, Artificial Sequence
  ENSG00000164808_16 (sequence is synthesized)
atcttggtacccgttgcagtttctatgccacggtgatttaccaaaaaccacagctgaagagtctgctgcttctggagcaaagggagatctggctgctagtgaccgatgtcactctgcaaa

SEQ ID NO: 515529 - DNA, 120 bp, Artificial Sequence
  ENSG00000164808_17 (sequence is synthesized)
cgaaggaggagagagaccccaggctccccaaaaccctgctggtctatgtggcccccttgtgtgtgctgggctctgaagtcctggaggcactcgctggggctgcccctcacagcctcttct

SEQ ID NO: 515530 - DNA, 120 bp, Artificial Sequence
  ENSG00000164808_18 (sequence is synthesized)
tcaaggacgctctccgtgaccagggtcggattgtttgtgctgaacgaactgtcctcttgcttcagaagccccttttgagtgtggtctctggtgcaagttcctgtgagctgcctggcccgg

SEQ ID NO: 515531 - DNA, 120 bp, Artificial Sequence
  ENSG00000164808_19 (sequence is synthesized)
tgatgctcgacagcctggactctgcaacacctgtcaactccatctgcagtgttcaaggcactgtggttggcgtggacgagagcactgctttctcatggcctgtgtgtgacatgtgtggca

SEQ ID NO: 515532 - DNA, 120 bp, Artificial Sequence
  ENSG00000164808_20 (sequence is synthesized)
acgggagattggaacagaggccggaagacagaggcgccttttcctgtggggactgctcccgggtggtcacatctcctgttctcaagaggcacctgcaggtcttcctggactgccgctcaa

SEQ ID NO: 515533 - DNA, 120 bp, Artificial Sequence
  ENSG00000164808_21 (sequence is synthesized)
gaccgcagtgcagagtgaaggtcaagctgttgcagcgcagcatttcctccctgctgaggtttgccgccggtgaagatgggagctacgaagtgaagagtgtcctcggaaaggaagtggggt

SEQ ID NO: 515534 - DNA, 120 bp, Artificial Sequence
  ENSG00000164808_22 (sequence is synthesized)
tgttaaattgttttgtccagtccgtaaccgcccacccgaccagctgcattggattggaggaaatcgagcttctgagtgcaggaggggcctctgcagaacactagcggttgccgcaggatc

SEQ ID NO: 515535 - DNA, 120 bp, Artificial Sequence
  ENSG00000164808_23 (sequence is synthesized)
tgtgaactttgcaatgtggctgcaagggtggtggtggtggtggtgatttggggtagttatttgttaactatggacacagtgaacgtagtttacgatcttgaaatgaaacttagatttttc

SEQ ID NO: 515536 - DNA, 120 bp, Artificial Sequence
  ENSG00000164808_24 (sequence is synthesized)
tggggaaatgttcagatacagttttgtgaactgtaaatcaaaatacctttttctacagtttatcttttattttctgcaaatttaggaacatatttactcgttttcacattgaatcttaag

SEQ ID NO: 515537 - DNA, 120 bp, Artificial Sequence
  ENSG00000164808_25 (sequence is synthesized)
tttaagctcttcatttggtatttaggcaatatatgagaaaaaaattttttttgttcatttgtaattttaacaagttgaacattttaccatgattgaacatgtttttattacagtatttaa

SEQ ID NO: 515538 - DNA, 120 bp, Artificial Sequence
  ENSG00000164808_26 (sequence is synthesized)
cattcccccaaagaataccctgcaaagtgtaaacctttgtcccatactgtgatattactgttctgctacaataaatgtcaaacctaagcactttgcagttcactacttttgggaaaatgt

SEQ ID NO: 515539 - DNA, 120 bp, Artificial Sequence
  ENSG00000164808_27 (sequence is synthesized)
tctagggaactgtatcacaggtgaaactgttacccataaagtgtagctctctgaactggtgtgatcgtgtctctgctgaatggtggtggggatagctggctccaccacacacacctgttt

SEQ ID NO: 515540 - DNA, 120 bp, Artificial Sequence
  ENSG00000164808_28 (sequence is synthesized)
taattaggctgggtaatgtgcacggagagcaaagatcacagactaaggagcagtcagtcggatatttgctttgctggcaaagatttaaaccaagaattaattatctttggacactataaa

SEQ ID NO: 515541 - DNA, 120 bp, Artificial Sequence
  ENSG00000164808_29 (sequence is synthesized)
gattttgttcccttccttatagcaatataatcatgacaggccatggttaactacatcagatacacgtagcagccgtgaccaagacatggtgccctaataccaagtgttcttgggttaaag

SEQ ID NO: 515542 - DNA, 120 bp, Artificial Sequence
  ENSG00000164808_30 (sequence is synthesized)
agtgcttgaaggtatctggtggtgttttcagccttcttcttggacgtgctggaccacagacactgctttggtgctgtttgtgttcatggtaggataagactttgattcaaccagtacttc

SEQ ID NO: 515543 - DNA, 120 bp, Artificial Sequence
  ENSG00000164808_31 (sequence is synthesized)
cttggacgctgccggcaccttcacggagcccatcacagacatggcccatgtaccagcctccagccttcactgaccctgtagcagccacctgggcagaaccagctccatggagatgctgtg

SEQ ID NO: 515544 - DNA, 120 bp, Artificial Sequence
  ENSG00000164808_32 (sequence is synthesized)
ctcactccagaattgcctgctggtggcaccccatactgctgcagactccacaaacaaaccaaaagctagaatattataaatgcgtatacttagatcagccagcccctttttccagggatc

SEQ ID NO: 515545 - DNA, 120 bp, Artificial Sequence
  ENSG00000164808_33 (sequence is synthesized)
aaactaaaatcctgcctcagctatcttttttaatttttattgagtcataattcacatgccacataatttaccctgtgtggattgacttgaatctcacatttgagtgcttttttagcttag

SEQ ID NO: 515546 - DNA, 120 bp, Artificial Sequence
  ENSG00000164808_34 (sequence is synthesized)
ctcatggggttcaggagtgtgcacacacaatgaacgtgctgctggacacagtcccataactgcaccttcacctgcatgactcgaggggtagcaaaggagactgccattatgggcacaatt

SEQ ID NO: 515547 - DNA, 120 bp, Artificial Sequence
  ENSG00000164808_35 (sequence is synthesized)
gtggatggtggttcaaacacctgcatgaacacatacagaaaggatatcttgaattcaacgtttttttaatcctgactcacccatttaggaagatgactacagtggatttctttttttttt

SEQ ID NO: 515548 - DNA, 120 bp, Artificial Sequence
  ENSG00000164808_36 (sequence is synthesized)
ccccccttggtttttctttactttctttaaattatattgaccagtcacagcagtatatagtggctttataatgaagaagagggaaatcttgatctctgtattaatccaaactgcctcctc

SEQ ID NO: 515549 - DNA, 120 bp, Artificial Sequence
  ENSG00000164808_37 (sequence is synthesized)
cttcaaatacagctgatttttagaggtcagatgaactgtgactgagtgtgatgggaaacgtggctctcccttcactgatgggtagctgacttgacctccccccatgctctctggcagtct

SEQ ID NO: 515550 - DNA, 120 bp, Artificial Sequence
  ENSG00000164808_38 (sequence is synthesized)
aacatttgctaatcatagttgtcatttttttttttgttttttttttcctgtccttcctcgagaacaaccacttttgactcttaggggattcttttgttctttactcacttatctctaaat

SEQ ID NO: 515551 - DNA, 120 bp, Artificial Sequence
  ENSG00000164808_39 (sequence is synthesized)
aacatgcttgtgctgtacttctcaacatggataaatattgatctcacttctctttcacttcccaccctcactgcacaccgaatgttttttatcctgctattcttccagtgcagatatatc

SEQ ID NO: 515552 - DNA, 120 bp, Artificial Sequence
  ENSG00000164808_40 (sequence is synthesized)
aaagtgctggaattgcacatgtcagccaccatacctgggcaaaaagatacaaatttaaatcagctgtcttccacgagtcctctcccagtggagtcacacagtatatgcttaattcttcca

SEQ ID NO: 515553 - DNA, 120 bp, Artificial Sequence
  ENSG00000164808_41 (sequence is synthesized)
gccagtgctactcgtgctactcgaagctaatgttcatcccttggacaggctgagtccaggcagctgcaggcctctctcagaaacttgattctgagagtaaagccccgttttctagctcag

SEQ ID NO: 515554 - DNA, 120 bp, Artificial Sequence
  ENSG00000164808_42 (sequence is synthesized)
ggtaagtgcagggggcccagcccagggggccgcacactcagtagcctgcatgagcaactcatccccagaggaagcccccactcccaaatgtgttctattacaacccatcccactaggaag

SEQ ID NO: 515555 - DNA, 120 bp, Artificial Sequence
  ENSG00000164808_43 (sequence is synthesized)
tggtgtagacactcgagagtgaaatgcagatatgtctgccattcagactgataggttcctttcctctgtggaaatgaggttattttagatcattgttgaggtagatgcaggaatctgtcc

SEQ ID NO: 515556 - DNA, 120 bp, Artificial Sequence
  ENSG00000164808_44 (sequence is synthesized)
ttttctcagcggctcccttgcgctcaggcctcaccctcatggctcagaaatgcacagaatcaaagtcctgcggaatggcagctgatggctgaaacaggtgaaggaaaccaagattttgag

SEQ ID NO: 515557 - DNA, 120 bp, Artificial Sequence
  ENSG00000164808_45 (sequence is synthesized)
actagagatgccgcggccccagctgcacacaaaaggaccctggtgtgggggacccttacaaaagaggacggaaacaacatagttttaaaccaataaaccttgacagcggggattttcagt

SEQ ID NO: 515558 - DNA, 120 bp, Artificial Sequence
  ENSG00000164808_46 (sequence is synthesized)
actttctcagttacagagaggttttggcaattatgattgaaggtgctataaacatacatttggaagtttccgtgtggagataaactttcaactcctttgagtagataccaagcagagcaa

SEQ ID NO: 515559 - DNA, 120 bp, Artificial Sequence
  ENSG00000164808_47 (sequence is synthesized)
ctattggattgtattgatatttttcaggtaaatatccttttggttgcaaataacaggaaccaaatgtagctggttttaaaagaagagaaaattcactagaacagtactgcaaatcttgag

SEQ ID NO: 515560 - DNA, 120 bp, Artificial Sequence
  ENSG00000164808_48 (sequence is synthesized)
tggttgcaaataacaggaaccaaatgtagctggttttaaaagaagagaaaattcactagaacagtactgcaaatcttgagtaacttaagatgaagttgaaggatgaactgaaccttgggg

SEQ ID NO: 515561 - DNA, 120 bp, Artificial Sequence
  ENSG00000164808_49 (sequence is synthesized)
tctcatgatcagcaccctcttcttctgttcaggatttcctttttacagcttcaaaccactggaatgtaaggcattatgagtttcttcctcagccttttttttttttttttttcgagacag

SEQ ID NO: 515562 - DNA, 120 bp, Artificial Sequence
  ENSG00000164808_50 (sequence is synthesized)
ttctccctgactctgctcatctggaccttttctgtgtgtctgccacccctgtgctgctgagtggattccacttccagtactttctcagtgacgggtccagaagggagtccagggtgacca

SEQ ID NO: 515563 - DNA, 120 bp, Artificial Sequence
  ENSG00000164808_51 (sequence is synthesized)
gcggatctggaaagaagctgatagaagatgggtgccagaggggcctgggtagagatgttagctgagagatacccagtatggattctgtcagttttctggagctacgaagtgaagagtgtc

SEQ ID NO: 515564 - DNA, 120 bp, Artificial Sequence
  ENSG00000164808_52 (sequence is synthesized)
cggcggcgcgctgaggaggcggtgcgctcaggcggcgctcccggagatgccccgcggcagccgcgctcggggctctaagaaaaaggagttggaatacagaatgcccatcctttccaggag

SEQ ID NO: 515565 - DNA, 120 bp, Artificial Sequence
  ENSG00000164808_53 (sequence is synthesized)
aggtggactagcagaaagactaaatggactgcagaatcgagagagatctgctatttctttgtggagacatcaatgtatttcttaccaaaagacactttcaggctttggtatcaggatgat

SEQ ID NO: 515566 - DNA, 120 bp, Artificial Sequence
  ENSG00000164815_0 (sequence is synthesized)
gggtccggtttccggcgggagcgtgggccgccagactcgggagaggctccgtcttgtgcaagggtcctgtgggctggctgcactggcctctgcggtggtgcctgccagaatgccccactt

SEQ ID NO: 515567 - DNA, 120 bp, Artificial Sequence
  ENSG00000164815_1 (sequence is synthesized)
ggaaaacgtggtgctttgtcgcgagtctcaagtgtccatcttgcagtccttgtttggagagagacatcatttcagctttccatccatttttatttatggacatactgctagtggaaagac

SEQ ID NO: 515568 - DNA, 120 bp, Artificial Sequence
  ENSG00000164815_2 (sequence is synthesized)
ctatgtaacacaaacgttgttgaaaactttagagctcccacatgtgtttgtgaattgtgttgaatgctttacattgaggctgcttttggaacaaattttaaacaaattgaatcatcttag

SEQ ID NO: 515569 - DNA, 120 bp, Artificial Sequence
  ENSG00000164815_3 (sequence is synthesized)
ttcttcagaggatggatgttctactgaaataacctgtgaaacatttaatgactttgttcgcttgtttaaacaagtaaccacagctgaaaatcttaaagatcagactgtatatattgttct

SEQ ID NO: 515570 - DNA, 120 bp, Artificial Sequence
  ENSG00000164815_4 (sequence is synthesized)
agataaagcagagtatctaagagatatggaagcaaatcttttgcctggatttcttagattacaagaattggctgacagaaatgtgactgttctctttctcagtgaaattgtttgggaaaa

SEQ ID NO: 515571 - DNA, 120 bp, Artificial Sequence
  ENSG00000164815_5 (sequence is synthesized)
gtttcgtccaaatactggatgctttgagccgtttgtcttatatttccctgattacagcataggcaaccttcaaaagatcctgtcccatgatcatcctccagagtattcagctgatttcta

SEQ ID NO: 515572 - DNA, 120 bp, Artificial Sequence
  ENSG00000164815_6 (sequence is synthesized)
tgctgcctacattaacattcttcttggagttttctacactgtttgtcgagatttgaaagagctcagacatctggcagtacttaattttcctaaatattgtgaacccgtggttaaaggaga

SEQ ID NO: 515573 - DNA, 120 bp, Artificial Sequence
  ENSG00000164815_7 (sequence is synthesized)
agcaagtgaacgtgatactcgcaaactgtggagaaatattgaacctcatttgaagaaagctatgcagactgtttatctcagggaaatatcaagttcccagtgggaaaagctacagaaaga

SEQ ID NO: 515574 - DNA, 120 bp, Artificial Sequence
  ENSG00000164815_8 (sequence is synthesized)
acagatccggggcaactgaaaggcctctcagcgcatactcatgtggaacttccatattactctaagttcattctaattgctgcataccttgcttcatacaatccagcaagaactgacaag

SEQ ID NO: 515575 - DNA, 120 bp, Artificial Sequence
  ENSG00000164815_9 (sequence is synthesized)
aggttttttcttaagcatcatggaaaaatcaagaaaaccaactttctaaaaaaacacgaaaagacaagcaatcatctccttgggccaaaaccatttccactagacagattattagcaata

SEQ ID NO: 515576 - DNA, 120 bp, Artificial Sequence
  ENSG00000164815_10 (sequence is synthesized)
ttatatagtatcgtggacagcagagttgctccaacagcaaatattttttcccagattacctctctagtgacccttcagctgttaaccctggttggccatgacgatcagcttgatggacca

SEQ ID NO: 515577 - DNA, 120 bp, Artificial Sequence
  ENSG00000164815_11 (sequence is synthesized)
aaatacaaatgcacagtgtctctagacttcatcagagctattgcaaggacggtgaactttgacataataaaatacttgtatgatttcttgtgaaaacaagcttcaaagccatatggacac

SEQ ID NO: 515578 - DNA, 120 bp, Artificial Sequence
  ENSG00000164815_12 (sequence is synthesized)
tgtgacaatgactaagccaagctgtgttcatccagctacttagctggccaaggagaggagttctttggctctattggatttgtccaaacaggtgctggcccagcatggaatctgatgaaa

SEQ ID NO: 515579 - DNA, 120 bp, Artificial Sequence
  ENSG00000164815_13 (sequence is synthesized)
atattctgattggtctgggtggatgtgagcagaagactatttaccagggaccctggagtatttggaagcaacgtgttaattataaacagcagggtttgagcacaatctgttctactctta

SEQ ID NO: 515580 - DNA, 120 bp, Artificial Sequence
  ENSG00000164815_14 (sequence is synthesized)
atgatgttatcttaacactgaaattgcctgaaacccatttacttaggactacattttgctctgtgaactatcccctgcgctttgaacgtgccagcagcccttgtttatatgcccattctt

SEQ ID NO: 515581 - DNA, 120 bp, Artificial Sequence
  ENSG00000164815_15 (sequence is synthesized)
ttcacttcctctccacaggagcctctgcagtcgcttgccaaagcagattttcctaaggccactgttttaaaagatcatagttgcaaaatataataaatacaagttctttttaaaatccaa

SEQ ID NO: 515582 - DNA, 120 bp, Artificial Sequence
  ENSG00000164815_16 (sequence is synthesized)
agacactattcataacagagatgttgtggacttttgttcttaaaggacagtaaaggagtgagagagaagtgagttagcaaatgctggtgaaactgtccccaactcccacatgtgtttgtg

SEQ ID NO: 515583 - DNA, 120 bp, Artificial Sequence
  ENSG00000164815_17 (sequence is synthesized)
tgaaagaagcagggtcttgccatgttgtccaggctggagtgcagtggctgttcacaggtgcagtcacagcacactacaggcttgatctcctgggctcaagcaatccccctgcctcagcct

SEQ ID NO: 515584 - DNA, 120 bp, Artificial Sequence
  ENSG00000164815_18 (sequence is synthesized)
agtagctgggattacaggcacatgccactgcgtataattacatttgacttgagcaaatgtgttaagtaaaatttcctgaactgcaatacagattttacttgaaaaataaatttctaattg

SEQ ID NO: 515585 - DNA, 120 bp, Artificial Sequence
  ENSG00000164815_19 (sequence is synthesized)
attgaatcctgagtgcctaactaaaatgctctcaatcagtgtttattatgtgaactgtgcttaactaaaatgccctccgtcagcgtttattatgtggattgccagacttatgggatgaat

SEQ ID NO: 515586 - DNA, 120 bp, Artificial Sequence
  ENSG00000164815_20 (sequence is synthesized)
aaaaatccatatctctggaagtttcatttttatagcaatgtatatgctgaactaaatcaatataataagctcttttaggaaatgtcattattttattttagaaattctttttttacatgc

SEQ ID NO: 515587 - DNA, 120 bp, Artificial Sequence
  ENSG00000164815_21 (sequence is synthesized)
aaaagtaattttatatccaatccaagtctaaacgaaattggcctaaaatatgttgaagtctaatatatatacaaggtgataagaagaataactatttaaaaacctgagatatacagatta

SEQ ID NO: 515588 - DNA, 120 bp, Artificial Sequence
  ENSG00000164815_22 (sequence is synthesized)
gttttacaactctgttaatattttgtaacagattttgttcaagttttatgtatgcggtgattgaggtctagaatctagatggatttgagtatggtcagaagctttcattgcaggtctttc

SEQ ID NO: 515589 - DNA, 120 bp, Artificial Sequence
  ENSG00000164815_23 (sequence is synthesized)
attaaccactgaccctgagctggtaatctttgtatagatggttctttttaattttttttttttaacaattagaatagctgtttatatttcatagacagtttggaaaatgttgatgtttaa

SEQ ID NO: 515590 - DNA, 120 bp, Artificial Sequence
  ENSG00000164815_24 (sequence is synthesized)
tttttctttgaccttttttgttttaattgtagggatgggaaaggaaagagacaagaatttctgttttcccttttagaaatcttcaattaattaagatcttatctccatttaacagaaaat

SEQ ID NO: 515591 - DNA, 120 bp, Artificial Sequence
  ENSG00000164815_25 (sequence is synthesized)
ggtatcagaggaagtattgagacagttaccggagatacttcttcagctaattatcaagatactaaagttaatactaaagagcattcagtcaggaaatagtgttataaaagagaatttact

SEQ ID NO: 515592 - DNA, 120 bp, Artificial Sequence
  ENSG00000164815_26 (sequence is synthesized)
tttcaagctataatgctattttgattaatgatttttctttaactgaagctctaatttaatgggaggaaataaaagtttgaataccagctttctattttctaaatattggattatatcatg

SEQ ID NO: 515593 - DNA, 120 bp, Artificial Sequence
  ENSG00000164815_27 (sequence is synthesized)
aaaatcaagcagtttctatttctttaaatgcttttattaaagcaatctaattatgtgacagttttatctcattatgtttatatttcatgagttttatggaataaaatgtaattttatgtt

SEQ ID NO: 515594 - DNA, 120 bp, Artificial Sequence
  ENSG00000164815_28 (sequence is synthesized)
aatcggtttgggatatgcactttggtggttatgttttgaaaacattgtgcttttgtttaagaaaactactactttggattcatcccaaatattaaatagaactaattttacttaaaaaaa

SEQ ID NO: 515595 - DNA, 120 bp, Artificial Sequence
  ENSG00000164816_0 (sequence is synthesized)
acatatccactcctgctctccctcctgcaggtgaccccagccatgaggaccatcgccatccttgctgccattctcctggtggccctgcaggcccaggctgagtcactccaggaaagagct

SEQ ID NO: 515596 - DNA, 120 bp, Artificial Sequence
  ENSG00000164816_1 (sequence is synthesized)
gttctcaggcaagagccacctgctattgccgaaccggccgttgtgctacccgtgagtccctctccggggtgtgtgaaatcagtggccgcctctacagactctgctgtcgctgagcttcct

SEQ ID NO: 515597 - DNA, 120 bp, Artificial Sequence
  ENSG00000164816_2 (sequence is synthesized)
agatagaaaccaaagcagtgcaagattcagttcaaggtcctgaaaaaagaaaaacattttactctgtgtaccttgtgtctttctaaatttctctctccaaaataaagttcaagcattaaa

SEQ ID NO: 515598 - DNA, 80 bp, Artificial Sequence
  ENSG00000164818_0 (sequence is synthesized)
agtgaccggcgacgcgggcaagatggcggcgctgggggtggcggaggccgtggcggccccacacccggctgagggggccg

SEQ ID NO: 515599 - DNA, 80 bp, Artificial Sequence
  ENSG00000164818_1 (sequence is synthesized)
cggcgcgccttggaggccctgcggcgcgcgctggaggagccaggccctgccgccgaccccaccgctttccagggcccctg

SEQ ID NO: 515600 - DNA, 120 bp, Artificial Sequence
  ENSG00000164818_2 (sequence is synthesized)
ctttccagggcccctgggcgcgcctactgctgccgcgcttgctgcgctgcctgagcgaccccgccgagggctgccgcgcgctggcagtgcacctgctggatctgggcctgcgccgcgccg

SEQ ID NO: 515601 - DNA, 80 bp, Artificial Sequence
  ENSG00000164818_3 (sequence is synthesized)
ccgtgcccgcgcgccgcccgcccgaggcctgtgaggagctgcgcctggcgcttgtgcagctgctgggcctggccgtggac

SEQ ID NO: 515602 - DNA, 120 bp, Artificial Sequence
  ENSG00000164818_4 (sequence is synthesized)
ctggccgtggacctgtgcggcgccgcgctcgcgccccacctggacgacgctctgcgcgcgctgcgctgctccctgctcgaccccttcgccgccgtgcgccgcgagagctgcagctgcgcc

SEQ ID NO: 515603 - DNA, 120 bp, Artificial Sequence
  ENSG00000164818_5 (sequence is synthesized)
ggcgcaggccacgcccgaccacttccacatgcagtcggagtctctgatcgggcccctgatgcagaccatctcccaccagcactggaaggtccgtgtggccgccattgaagccacaggcgc

SEQ ID NO: 515604 - DNA, 120 bp, Artificial Sequence
  ENSG00000164818_6 (sequence is synthesized)
agtgatccattttggcaacgggaagtccgtggacgacgtgctttcccattttgctcagcgactgtttgatgacgtcccgcaggtccggcgggcggtggcctccgtggtgggcggctggct

SEQ ID NO: 515605 - DNA, 120 bp, Artificial Sequence
  ENSG00000164818_7 (sequence is synthesized)
gctgtgtctgcgtgaccgttactccttcttccacaagctcatccctctgctgctcagtagcctcaacgacgaggtgcctgaggtcaggcagctggctgccagcctctgggaggacgttgg

SEQ ID NO: 515606 - DNA, 120 bp, Artificial Sequence
  ENSG00000164818_8 (sequence is synthesized)
cctgcagtggcagaaggagaatgaggaggacctgaaggacaagctggactttgcccctcccaccccaccccattaccctccacatgagcgccgccctgtgctgggctgccgggagctcgt

SEQ ID NO: 515607 - DNA, 120 bp, Artificial Sequence
  ENSG00000164818_9 (sequence is synthesized)
cttcaggaacctctccaagatcctccctgccctgtgccacgacatcaccgactgggtggtggggacccgagtgaagtcggcacagctgctcccagtgctgctgctgcatgccgaggacca

SEQ ID NO: 515608 - DNA, 120 bp, Artificial Sequence
  ENSG00000164818_10 (sequence is synthesized)
cgccacgcagcacctggaggtcgtcctccggaccctgttccaggcctgcaccgacgaggaggcagccgtggtccaaagttgtaccagatccgcagagctcgtcgggacgtttgtcagccc

SEQ ID NO: 515609 - DNA, 120 bp, Artificial Sequence
  ENSG00000164818_11 (sequence is synthesized)
tgaggtgtttctgaagctgatcttatcgacgctgaagaagacgccctctgcctccggcctcctggtgctggcctccgccatgcggggttgcccccgagaagccctccagccgcacctggc

SEQ ID NO: 515610 - DNA, 120 bp, Artificial Sequence
  ENSG00000164818_12 (sequence is synthesized)
agccatcgccacagagctggcacaggcccacatctgccaggcatctgaaaacgacctctacctggagcgcctgctgctgtgtgtgcaggctctggtgtctgtgtgtcatgaggactgtgg

SEQ ID NO: 515611 - DNA, 120 bp, Artificial Sequence
  ENSG00000164818_13 (sequence is synthesized)
cgtggccagcctgcagctcttggacgtgctgctgacaatagtggccctcgcaggtgctaccggcctgagggacaaggcacaggagacgatggactcactggccatggtggagggtgtcag

SEQ ID NO: 515612 - DNA, 120 bp, Artificial Sequence
  ENSG00000164818_14 (sequence is synthesized)
accgcgtcgcaccttgactggaccgcacactcgccggagctcctgcagttcagtgtcatcgtcgcacagtcaggccctgccctgggagaagccctgccacacgtcgtgcccacgctgagg

SEQ ID NO: 515613 - DNA, 120 bp, Artificial Sequence
  ENSG00000164818_15 (sequence is synthesized)
gcctgtctgcagccctcccaagacccgcagatgcgcctgaagctgttctccatcctgtccaccgtgctgctcagagccacggacaccatcaactcccaggggcagtttcccagctacctc

SEQ ID NO: 515614 - DNA, 120 bp, Artificial Sequence
  ENSG00000164818_16 (sequence is synthesized)
gagacggtgacaaaggacatcctggcccccaatctgcagtggcatgcggggaggacagccgcggccatccgcacggctgccgtgtcctgcctctgggcgctcaccagcagcgaggtcctg

SEQ ID NO: 515615 - DNA, 120 bp, Artificial Sequence
  ENSG00000164818_17 (sequence is synthesized)
tcggcagagcagatacgggacgtgcaggaaacactgatgccccaggtcctgaccaccctggaggaggattcgaagatgacgcgactgatctcatgccgtattatcaacacgttcttaaaa

SEQ ID NO: 515616 - DNA, 120 bp, Artificial Sequence
  ENSG00000164818_18 (sequence is synthesized)
acctcgggcggcatgacggatccagagaaactcatcaggatttatcctgaactcttaaaacgcctagatgacgtgtccaacgatgtgaggatggcagccgcctccaccttggtcacctgg

SEQ ID NO: 515617 - DNA, 120 bp, Artificial Sequence
  ENSG00000164818_19 (sequence is synthesized)
ctgcagtgtgtcaagggtgccaacgcaaaatcctactatcagagcagtgtccagtacctgtaccgagagttgctggttcaccttgacgatccagagagggccatccaggatgcaatttta

SEQ ID NO: 515618 - DNA, 120 bp, Artificial Sequence
  ENSG00000164818_20 (sequence is synthesized)
gaggtcctcaaagagggcagcgggctgttcccagatctcctggtgagggagacggaggccgtcatccacaagcaccgctcggccacctactgcgagcagctcctgcagcatgtgcaggcc

SEQ ID NO: 515619 - DNA, 120 bp, Artificial Sequence
  ENSG00000164818_21 (sequence is synthesized)
gtgccagccacacagtgaccacgctggtttcagccacggcacacccttgtccccacctgagccagagtttgtggcctttaaatctcataaacaaggcacctctgtgccagcagtgagact

SEQ ID NO: 515620 - DNA, 120 bp, Artificial Sequence
  ENSG00000164818_22 (sequence is synthesized)
gtgacagcaagaatgtactcctcaggacacctgcccactctttccctggaataacagcctctgagtggattctgcatgttatgtgatttgttctgttcatcgagagggctcccaaacatc

SEQ ID NO: 515621 - DNA, 120 bp, Artificial Sequence
  ENSG00000164818_23 (sequence is synthesized)
tgcagctgatttgaaattaaaagtaagtcgcagccgctcctcccgcagccacttcagcagcatcttagattttaagcctcacgtgcgcagctggttcatgaactattggctgcatcctgc

SEQ ID NO: 515622 - DNA, 120 bp, Artificial Sequence
  ENSG00000164818_24 (sequence is synthesized)
ttaggtgcccaccaagaaggtttttacctacttaacaaaaaagaaagaagccaaagtgattagaaagaaatgaaatctctttttgggttctgtctactgaaatttaatatctcagtgaac

SEQ ID NO: 515623 - DNA, 120 bp, Artificial Sequence
  ENSG00000164818_25 (sequence is synthesized)
agactaaaaggaatttagaatcctaacaacttatcagatttctcctgttttaaatatactgggactttaaaggttatatgtccggtcaccgtatgttttaagtcggtgttaatgctaaca

SEQ ID NO: 515624 - DNA, 120 bp, Artificial Sequence
  ENSG00000164818_26 (sequence is synthesized)
gtgttgaaaacaatatttcatgagatctaattgtggttgcccctataggtagcaggaaagtaaagttgcatttccctctcgcacattctacacccaagtgcctaaaagatctcattgtaa

SEQ ID NO: 515625 - DNA, 120 bp, Artificial Sequence
  ENSG00000164818_27 (sequence is synthesized)
gtgggtagtgttaccggaagccattgtgttcacacgggggaaatgccgtatatatttttcaacaaatattaacgtttatactttcatgtttgaaaatttaattaaaaatgtttgttttaa

SEQ ID NO: 515626 - DNA, 120 bp, Artificial Sequence
  ENSG00000164818_28 (sequence is synthesized)
gaagtgtccgtgcagcgagcaggagctcgcgctgggagggcagacaagtggtccagtggaagtgtccgtgctgcaagcaggagcgctagtgctgggagggcagacacgtggcccaggcgg

SEQ ID NO: 515627 - DNA, 120 bp, Artificial Sequence
  ENSG00000164818_29 (sequence is synthesized)
aagtgtccacgcctacctcgagcaggagcgctcatgctgggaaggcagatgggtggcccgggcagaagtgtccgtgctgcaagcaggagcgctcatgctgggaaggcagacacgtggccc

SEQ ID NO: 515628 - DNA, 120 bp, Artificial Sequence
  ENSG00000164818_30 (sequence is synthesized)
aggcgtcaggtttgaacattcttgacagcaagtggctcacccgtcagcgtgcttctttttcccatcccaggagttggacttgacctgtggacatttggctgttttctttttgtttttaag

SEQ ID NO: 515629 - DNA, 120 bp, Artificial Sequence
  ENSG00000164818_31 (sequence is synthesized)
ccagaaacactgtcttgtttccagtttaagatgtagagagggtgaaacagtcagaaactgggtcagaagcagcgtggttctcgtggcagggcggcacttggcccaagactcgtgctctgg

SEQ ID NO: 515630 - DNA, 120 bp, Artificial Sequence
  ENSG00000164818_32 (sequence is synthesized)
cgggaggctcaagtcaggcgtcccagcagcttcggtgcaacgcctcctgcccggctgcgtggggaggccctccaagacaccagctggtctcaccgcgaggcctgacttcgagccagagca

SEQ ID NO: 515631 - DNA, 120 bp, Artificial Sequence
  ENSG00000164818_33 (sequence is synthesized)
gcgagtacattgcgtctccgtgtggcaagggcaggtgcgggggtctcagtccactaccgagcagcctgctctgatgactggcggcgccagggagaaggctcacatcgcgaggtccccagc

SEQ ID NO: 515632 - DNA, 120 bp, Artificial Sequence
  ENSG00000164818_34 (sequence is synthesized)
catgcgattgttgggaattcactcactttttaaaacaggagctggcggaaaggctgcacgcgtttgggcatctgagcgcatttgggcatctgggccacggccccctgtttattttcacta

SEQ ID NO: 515633 - DNA, 120 bp, Artificial Sequence
  ENSG00000164818_35 (sequence is synthesized)
caaaaggttccttgagaggccccttgcctattagtgccagctctgggcttcccagggtgaagtgttggatgaatcatggcctccttggtggggaaggaaggatgtcctgagttgggagca

SEQ ID NO: 515634 - DNA, 120 bp, Artificial Sequence
  ENSG00000164818_36 (sequence is synthesized)
gcgtgagccgattctgcctggcttagtcgtgcatgaaaggaaccctaaactggtacaaaagtggacctgcaggccatccagggagtgaccatcgtaaaaacacaatagccagtgccactc

SEQ ID NO: 515635 - DNA, 120 bp, Artificial Sequence
  ENSG00000164818_37 (sequence is synthesized)
tgtgtacttccatagtcgaccgcgccagcaggaggcctcggaggatcctgtccgggcccatagatgtttgctagcgggacaagcttggaactcttaaaacgcctagatgacgtgtccaac

SEQ ID NO: 515636 - DNA, 80 bp, Artificial Sequence
  ENSG00000164818_38 (sequence is synthesized)
gctctgcgcgcgctgcgctgctccctgctcgaccccttcgccgccgtgcgccgcgagagctgcagctgcgccgccgccct

SEQ ID NO: 515637 - DNA, 120 bp, Artificial Sequence
  ENSG00000164818_39 (sequence is synthesized)
cggcccccagctggggcctgggccaggggtccccatctccctccccaacagctcactgagcaagggggttcccacctccttccccaacactgcactgcgcaaggggttccccatctccct

SEQ ID NO: 515638 - DNA, 120 bp, Artificial Sequence
  ENSG00000164818_40 (sequence is synthesized)
cccccacactgagtcaaaggtgggccgggggtccccacctccctcccccacgccgagtctaaggtgggccgggggtccccacctccctcccccacagcactctgggtgagggttccccac

SEQ ID NO: 515639 - DNA, 120 bp, Artificial Sequence
  ENSG00000164818_41 (sequence is synthesized)
accaagtctgaggtgggcgtgtgcagtgacccctgagcttaactggcctggaagcagctagtccatcctcactgggtaaacacaagctctcggcagggaatgcacagagaagcactaagt

SEQ ID NO: 515640 - DNA, 120 bp, Artificial Sequence
  ENSG00000164818_42 (sequence is synthesized)
caaagtcatctccgtgtggtcattaaaattccagtgaatgaaaaagttttagggaacattaactgttaatggcttatgtattagctgttctctgttttaaaagcctttgggcacttttca

SEQ ID NO: 515641 - DNA, 120 bp, Artificial Sequence
  ENSG00000164818_43 (sequence is synthesized)
aacctaacaaacaactgattgaatttctattgatggtcaaagtggtaaaaatacctctttgttatctaagacaacttttaggtggcattaagaccccgagggtctagggcctccaggtgt

SEQ ID NO: 515642 - DNA, 120 bp, Artificial Sequence
  ENSG00000164818_44 (sequence is synthesized)
acggctttgaagtaagggcaagaagcatgggtgccctctaggagcactgggagggacagtggaggaagaggccccgcccgggtgccactgctgaggcagctcttagggccctgccactta

SEQ ID NO: 515643 - DNA, 120 bp, Artificial Sequence
  ENSG00000164818_45 (sequence is synthesized)
ctttgctcagagcaaaaggtgccgtcagctgggtcctacccccgcctgtgcggctggatctgggctgcgtcagcaccgggacccgccccagcagcacatctgtcaaagcggaaagcagtt

SEQ ID NO: 515644 - DNA, 120 bp, Artificial Sequence
  ENSG00000164818_46 (sequence is synthesized)
cacacaccagagcctcatgtggaaagagtccaggcgctcagacttttctccttcatgaccctcatctctgctctcgggcctcagcccgcctgtcgtactgcaggaaattttgtttcctgc

SEQ ID NO: 515645 - DNA, 120 bp, Artificial Sequence
  ENSG00000164818_47 (sequence is synthesized)
gagccgtggcagctgtccagcttgcaggctgatatttgtgtagatgccatgcagataacacagcagggtccaggcccttccctctggaactcacactcggctgtattttgggaggaaccg

SEQ ID NO: 515646 - DNA, 120 bp, Artificial Sequence
  ENSG00000164818_48 (sequence is synthesized)
ctgggcaggttctgcccaggaacagttaactctgcagagcacagtttccacatctgggctgagttcccaaagaaagtgcgcctaacaacgtcttgtggaaggcggttggcgtcaagagaa

SEQ ID NO: 515647 - DNA, 120 bp, Artificial Sequence
  ENSG00000164818_49 (sequence is synthesized)
gtaaagtgttcagatggcagtgattttaatgaacttactagctattttaataggaaagatttttttttttatccgtttggtttttatttttagaatcatgaaatagcaagttggctctgc

SEQ ID NO: 515648 - DNA, 120 bp, Artificial Sequence
  ENSG00000164818_50 (sequence is synthesized)
tgaagtagaaatggtgggcggggagtcgccactgaccatcgtctgcgcagagcaccttcctgctgaccgcagctgtgagcgccggctgtacgcaggtccctgctgtgcgggtgcccaaga

SEQ ID NO: 515649 - DNA, 120 bp, Artificial Sequence
  ENSG00000164818_51 (sequence is synthesized)
gggctgagggctgcgtctgccatggtgtctccaccttggacaccatgaatcatgagaggttctcagggctgcctcccacaggctttctgtgtcttacctgggacactcgggactagttgt

SEQ ID NO: 515650 - DNA, 120 bp, Artificial Sequence
  ENSG00000164818_52 (sequence is synthesized)
gtttaggttttcttaaaattctgtagtaattgcattgtagagcatccctaatccgaacttcagaaatccaaaatgctccagtgagtatttcatttgagcatcatgtcagtgctcagatat

SEQ ID NO: 515651 - DNA, 120 bp, Artificial Sequence
  ENSG00000164818_53 (sequence is synthesized)
ggtcagaccctggagcactttgcattctgaagtgaaggatgctcagcctgcgtctgacagaagctccagagaagtggctgcgagttcagggcaagaggctcctggctttgaggctgcacc

SEQ ID NO: 515652 - DNA, 120 bp, Artificial Sequence
  ENSG00000164818_54 (sequence is synthesized)
gtttctggaagtcaagccccacagtggacctcgagtccctctgtgaataggaatgtgctcgggcagggaacccggagcaccagccgctgggcccctcgttccccggctctgcagcgtctt

SEQ ID NO: 515653 - DNA, 120 bp, Artificial Sequence
  ENSG00000164818_55 (sequence is synthesized)
cgggtcctgtgggtctggctgtgcccagccctgctgcccgtggactatagtgtcttggggtcctgcaggcctggctgtacccggccccagtgcatggtggcaagtgcctgtgatcccagc

SEQ ID NO: 515654 - DNA, 87 bp, Artificial Sequence
  ENSG00000164818_56 (sequence is synthesized)
tttcactccagcctgggcagcaagagcgagactttgtctcaaaaaaaaggaacgtgcctcattcagtggttcgatggtggttctgat

SEQ ID NO: 515655 - DNA, 120 bp, Artificial Sequence
  ENSG00000164818_57 (sequence is synthesized)
aggaacgtgcctcattcagtggttcgatggtggttctgatcaatgcccagaagttctgatggagcttctgtcagacacaggctgagtatccttcaccccaaaattaaaaaaaaaaaaaaa

SEQ ID NO: 515656 - DNA, 120 bp, Artificial Sequence
  ENSG00000164821_0 (sequence is synthesized)
atggctgctcttgctacataagacctggaacacaggactgctgtctgccctctctgctcgccctgcctagcttgaggatctgtcaccccagccatgaggattatcgccctcctcgctgct

SEQ ID NO: 515657 - DNA, 120 bp, Artificial Sequence
  ENSG00000164821_1 (sequence is synthesized)
attctcttggtagccctccaggtccgggcaggcccactccaggcaagaggtgatgaggctccaggccaggagcagcgtgggccagaagaccaggacatatctatttcctttgcatgggat

SEQ ID NO: 515658 - DNA, 120 bp, Artificial Sequence
  ENSG00000164821_2 (sequence is synthesized)
tggtgtgagtttcacatactgctgcacgcgtgtcgattaacgttctgctgtccaagagaatgtcatgctgggaacgccatcatcggtggtgttagcttcacatgcttctgcagctgagct

SEQ ID NO: 515659 - DNA, 120 bp, Artificial Sequence
  ENSG00000164821_3 (sequence is synthesized)
tgcagaatagagaaaaatgagctcataatttgctttgagagctacaggaaatggttgtttctcctatactttgtccttaacatctttcttgatcctaaatatatatctcgtaacaagatg

SEQ ID NO: 515660 - DNA, 120 bp, Artificial Sequence
  ENSG00000164822_0 (sequence is synthesized)
acacatctgctcctgctctctctcctccagcgaccctagccatgagaaccctcaccatcctcactgctgttctcctcgtggccctccaggccaaggctgagccactccaagctgaggatg

SEQ ID NO: 515661 - DNA, 120 bp, Artificial Sequence
  ENSG00000164822_1 (sequence is synthesized)
gagctttgggctcaacaagggctttcacttgccattgcagaaggtcctgttattcaacagaatattcctatgggacctgcactgtcatgggtattaaccacagattctgctgcctctgag

SEQ ID NO: 515662 - DNA, 120 bp, Artificial Sequence
  ENSG00000164822_2 (sequence is synthesized)
ggatgagaacagagagaaatatattcataatttactttatgacctagaaggaaactgtcgtgtgtcctatacattgccatcaactttgtttcctcatctcaaataaagtcctttcagcaa

SEQ ID NO: 515663 - DNA, 120 bp, Artificial Sequence
  ENSG00000164823_0 (sequence is synthesized)
ggtgtggtctggggcgggcctgatgagcacctggattttcacccggcgtgctggtaattcctacacttgtgggtgtttgagagacatgaagaggggaggatgacctcttcccggaagcgg

SEQ ID NO: 515664 - DNA, 120 bp, Artificial Sequence
  ENSG00000164823_1 (sequence is synthesized)
gacttccataaaagaagcgtggtgggcgggtcccgggcacctgtggtttggtgagtcctccaggtaactgtgatgcgggggtcagcgggagaggcacccggaagctcccggcgtctgcac

SEQ ID NO: 515665 - DNA, 120 bp, Artificial Sequence
  ENSG00000164823_2 (sequence is synthesized)
cccggcagcgcgaggaaatgcccaaagaaactatagtgacactgaaactgaaggagagatttttaattccttagtgcaatactttggtgacaacttggggcgaaaagttaaagcgatgcc

SEQ ID NO: 515666 - DNA, 120 bp, Artificial Sequence
  ENSG00000164823_3 (sequence is synthesized)
attagttgaagaaacttctttactggaagattcgtcagtgacttttcctgtggtaataataggaaatggaccctcaggaatatgcctttcttatatgttatcaggctacagaccgtattt

SEQ ID NO: 515667 - DNA, 120 bp, Artificial Sequence
  ENSG00000164823_4 (sequence is synthesized)
atcatcagaagcaatacacccaaatacaatcttaaatagtaaattagaagaagcaagacatctttccattgttgatcaggacttagaatacttgtctgagggccttgagggccgatcatc

SEQ ID NO: 515668 - DNA, 120 bp, Artificial Sequence
  ENSG00000164823_5 (sequence is synthesized)
caatccagttgcagtacttttcgatacacttcttcatccagatgctgactttgggtatgattatccatccgttttgcattggaaattagagcaacatcattatatccctcacgtagttct

SEQ ID NO: 515669 - DNA, 120 bp, Artificial Sequence
  ENSG00000164823_6 (sequence is synthesized)
tggtaaaggtccacctggtggggcttggcataatatggaaggctccatgttgacaatcagctttggaagttggatggaactacctggacttaaatttaaggactgggtatcaagtaaacg

SEQ ID NO: 515670 - DNA, 120 bp, Artificial Sequence
  ENSG00000164823_7 (sequence is synthesized)
aaggagcctaaaaggggatcgagttatgccagaggaaatagctcgctactataaacattatgtaaaagtcatgggtcttcagaagaatttcagagagaatacttacataacttccgtatc

SEQ ID NO: 515671 - DNA, 120 bp, Artificial Sequence
  ENSG00000164823_8 (sequence is synthesized)
aagactctacagagatcaagatgatgatgatattcaagacagagatatttcaacaaagcatttacagatagagaagtcaaactttatcaagagaaactgggaaattaggggttatcagcg

SEQ ID NO: 515672 - DNA, 120 bp, Artificial Sequence
  ENSG00000164823_9 (sequence is synthesized)
aatagctgatggttctcatgttcccttctgcctctttgctgagaatgtagcgctggcaactggaacgctggattctcctgcccatctggaaattgaaggggaagattttccttttgtgtt

SEQ ID NO: 515673 - DNA, 120 bp, Artificial Sequence
  ENSG00000164823_10 (sequence is synthesized)
tcattcaatgcctgaatttggagctgctataaacaaaggaaagttgcgtggcaaagtggatccagtgttaattgtaggttctgggcttactgccgctgacgcagtactgtgtgcttacaa

SEQ ID NO: 515674 - DNA, 120 bp, Artificial Sequence
  ENSG00000164823_11 (sequence is synthesized)
cagtaatatccctgtgattcatgtgtttcgcagacgagtaactgatccaagcttaattttcaaacagcttcccaaaaagctgtatcctgaatatcataaagtctatcatatgatgtgtac

SEQ ID NO: 515675 - DNA, 120 bp, Artificial Sequence
  ENSG00000164823_12 (sequence is synthesized)
tcagtcatattctgtagactcaaatcttttatctgattataccagctttcccgagcaccgtgtgctttcctttaagtcggacatgaaatgtgttctccaaagcgtttctggattgaagaa

SEQ ID NO: 515676 - DNA, 120 bp, Artificial Sequence
  ENSG00000164823_13 (sequence is synthesized)
aatatttaagctgtctgcagcagtagtattgataggttctcatcctaatctgtcttttctgaaggatcaagggtgttacctaggccataagtcaagccagccaatcacatgtaagggtaa

SEQ ID NO: 515677 - DNA, 120 bp, Artificial Sequence
  ENSG00000164823_14 (sequence is synthesized)
tcctgtggaaatagatacatatacctatgagtgtattaaagaagccaacctttttgcattgggtcctttggttggagacaattttgttcgatttttaaagggaggggcgctgggtgttac

SEQ ID NO: 515678 - DNA, 120 bp, Artificial Sequence
  ENSG00000164823_15 (sequence is synthesized)
acgctgtttagctacaagacagaagaaaaagcatttgtttgttgaaagaggaggaggagatgggatagcttaaagcaagtttacaagtaattaaaatggacagtttgccattaaagattt

SEQ ID NO: 515679 - DNA, 120 bp, Artificial Sequence
  ENSG00000164823_16 (sequence is synthesized)
ttaatagtggttttgcagtgtactggcttgaattttctggacttgagttaactgaaggagagcctcaaactatagtaacttcatttttaaaagttactagaatttggtatcctgatttat

SEQ ID NO: 515680 - DNA, 120 bp, Artificial Sequence
  ENSG00000164823_17 (sequence is synthesized)
tttcaaaggtgtcactgtcagacaaatagaaacactgccaacttggtgtaacttaagctttcatttaactaaaacattcttttcttgcaaaacttatttttcatgatcatttttggttat

SEQ ID NO: 515681 - DNA, 120 bp, Artificial Sequence
  ENSG00000164823_18 (sequence is synthesized)
ttattatacttgattccaaaatagtacagccttgaatctataaaactgtgcagtcattatgccagaaattatcttaaatatataatgggtcaccttgctgttcaaagggtggtgcaaggt

SEQ ID NO: 515682 - DNA, 120 bp, Artificial Sequence
  ENSG00000164823_19 (sequence is synthesized)
cctgcagcatcttacatctgtagcttgttagaaatgtaaactctcaggccccacaacttacttcctgcattttaacaagatccccaagggatatgtatgctcataaaaatttgagacact

SEQ ID NO: 515683 - DNA, 120 bp, Artificial Sequence
  ENSG00000164823_20 (sequence is synthesized)
ggtttaaatgaaaatggatataaggtatgtataactgggggtggggtgagggtaggaggcatttacaactcagattttatttattttgaaattatcaattgtataaatctaatttattac

SEQ ID NO: 515684 - DNA, 120 bp, Artificial Sequence
  ENSG00000164823_21 (sequence is synthesized)
caaatagggtcttttaaaaaatatttttatcgttgaaaccttgacaggtacttcatattcttctaataatttaaacagtccaataatgtggtatacactttgacatccaagaactcacca

SEQ ID NO: 515685 - DNA, 120 bp, Artificial Sequence
  ENSG00000164823_22 (sequence is synthesized)
agatgtttttcagagatttattctcgatttaactatcatagcatttaatgaatctgatttgtagttcaataaattgtgggttgaactacttatccctgtgtgaacattgaattactttct

SEQ ID NO: 515686 - DNA, 120 bp, Artificial Sequence
  ENSG00000164823_23 (sequence is synthesized)
gtcactgaaactgaggtatttgggtgtggtaagtacttcgaaaattgtaatactgtttgggcattgtctaaattattaaaggttaaaatagaaaataaagtcagaatttttcttttccat

SEQ ID NO: 515687 - DNA, 120 bp, Artificial Sequence
  ENSG00000164823_24 (sequence is synthesized)
tccaaaggtgtacttagagatctctattagtattcattcgagatgacatagcagctcatatcatggttgtttattggatttatctgttctaattatataagtgtgtttactgtctgtgtt

SEQ ID NO: 515688 - DNA, 120 bp, Artificial Sequence
  ENSG00000164823_25 (sequence is synthesized)
ttcacacaaactgctagaatttttaatgttaagacgaaaacatctgaagttctccatggcaaattgaatttttcagtcattttcttttctttttttggtacaattacttcatctggaatg

SEQ ID NO: 515689 - DNA, 120 bp, Artificial Sequence
  ENSG00000164823_26 (sequence is synthesized)
tcttcattgaactcgttattctatttttcttagaattaaaagtggattaatgtgggtttttctgttcattttattgcagtattaaatgcttaagcttattaggaccataattcactttaa

SEQ ID NO: 515690 - DNA, 120 bp, Artificial Sequence
  ENSG00000164823_27 (sequence is synthesized)
atataattgtatagaatatatttgcgtcgatcaaataattgcttcagatgaattcttagactcttgataatatcacacctaatttaacttgattttacaagctgtacaatccagttttag

SEQ ID NO: 515691 - DNA, 120 bp, Artificial Sequence
  ENSG00000164823_28 (sequence is synthesized)
ttttctattgtgataataacttttttcaaaccagtttcacatcttaatgaaataacattctctgactgcacttgcttcagtactctcttgcctgcctgtttttgacctctgcatgagttg

SEQ ID NO: 515692 - DNA, 120 bp, Artificial Sequence
  ENSG00000164823_29 (sequence is synthesized)
gattagatgtttttcttactgtcacttctaaatagaaaatgacagtgttataaaaaagggaaggataaaacctttgacatccccttgtgtctcaaaagtccacagttattcaaacaatgg

SEQ ID NO: 515693 - DNA, 120 bp, Artificial Sequence
  ENSG00000164823_30 (sequence is synthesized)
ctttttttgtgatgagagtatttgttaaaaaaaaaaaaagacttcaagaaaaataaaagttcagtggagctgcaaataaatctggtgaataatttcatctttggtaatctcccatttcct

SEQ ID NO: 515694 - DNA, 120 bp, Artificial Sequence
  ENSG00000164823_31 (sequence is synthesized)
gagttcttcctcaatccaagctgtcctgtgtagtatataacatttgggcattttctctgatatactatactctcatgttctataaatttctgtcccgtaattctaacactttacattttt

SEQ ID NO: 515695 - DNA, 120 bp, Artificial Sequence
  ENSG00000164823_32 (sequence is synthesized)
tctttgctatcagctatagctattcatggaagggaagaatcactaaatacttgtctagttatagcatgatgtgagcatctcctccttatccctcgatgcctggcttggtgtctggcaaac

SEQ ID NO: 515696 - DNA, 120 bp, Artificial Sequence
  ENSG00000164823_33 (sequence is synthesized)
agtccataattagcagatgttgaaagaccgtttacaaagcagaatttggggatttaaagtgcaatgatacaacaaaaagatttaattacagcttccagtgttttgactatgtgaaccata

SEQ ID NO: 515697 - DNA, 120 bp, Artificial Sequence
  ENSG00000164823_34 (sequence is synthesized)
tccaactacttttttgaaaatctagttctatgtaatatatttctgtggcatcaaattttagttgattgtattagtcaataggaagtggtggaaaatttctaaataaattcaactattaaa

SEQ ID NO: 515698 - DNA, 120 bp, Artificial Sequence
  ENSG00000164823_35 (sequence is synthesized)
ctccggcgcctggctccctgcaggcgaggagcggaagccgctatctggaggcggactccggcgccacagagccggggcagccgcggcaacggcgaggcgcgaggcaggggcgcccggcag

SEQ ID NO: 515699 - DNA, 120 bp, Artificial Sequence
  ENSG00000164823_36 (sequence is synthesized)
gcgggcagcctcgccgggggaggcggaggcggccacggcggccgcgctcgggcgcccctcgcgcagcgctccatgcccgtgtggtgctgccgctgctccctggccggtcatttcagaaac

SEQ ID NO: 515700 - DNA, 120 bp, Artificial Sequence
  ENSG00000164823_37 (sequence is synthesized)
tggtgtacgttgaaaaagagaatgtggaaaaatttcaaaatatttgtgattttgtcatggctgaagaatataaatgtacgtctttcaaataaaaatgtgtccttgaagcagtgattataa

SEQ ID NO: 515701 - DNA, 120 bp, Artificial Sequence
  ENSG00000164825_0 (sequence is synthesized)
aagcctctgtcagctcagcctccaaaggagccagcgtctccccagttcctgaaatcctgggtgttgcctgccagtcgccatgagaacttcctaccttctgctgtttactctctgcttact

SEQ ID NO: 515702 - DNA, 120 bp, Artificial Sequence
  ENSG00000164825_1 (sequence is synthesized)
ctcaggtggtaactttctcacaggccttggccacagatctgatcattacaattgcgtcagcagtggagggcaatgtctctattctgcctgcccgatctttaccaaaattcaaggcacctg

SEQ ID NO: 515703 - DNA, 120 bp, Artificial Sequence
  ENSG00000164825_2 (sequence is synthesized)
ttacagagggaaggccaagtgctgcaagtgagctgggagtgaccagaagaaatgacgcagaagtgaaatgaactttttataagcattcttttaataaaggaaaattgcttttgaagtata

SEQ ID NO: 515704 - DNA, 120 bp, Artificial Sequence
  ENSG00000164828_0 (sequence is synthesized)
agagcgtcttctcgggcctgggcggcgcagacgaggcctgaggcggcggcgcgaggcagttccagctattcttcagatgctctggattttgagacggagcacaaattggaccctgtattt

SEQ ID NO: 515705 - DNA, 120 bp, Artificial Sequence
  ENSG00000164828_1 (sequence is synthesized)
gattctccacggatgtcccgccgtagtttgcgcctggccacgacagcatgcaccctgggggatggtgaggctgtgggtgccgacagcggcaccagcagcgctgtctccctgaagaaccga

SEQ ID NO: 515706 - DNA, 120 bp, Artificial Sequence
  ENSG00000164828_2 (sequence is synthesized)
gcggccagaacaacaaaacagcgcagaagcacaaacaaatcagcttttagtatcaaccacgtgtcaaggcaggtcacgtcctctggcgtcagccacggcggcactgtcagcctgcaggat

SEQ ID NO: 515707 - DNA, 120 bp, Artificial Sequence
  ENSG00000164828_3 (sequence is synthesized)
gctgtgactcgacggcctcctgtattggacgagtcttggattcgtgaacagaccacagtggaccacttctggggtcttgatgatgatggtgatcttaaaggtggaaataaagctgccatt

SEQ ID NO: 515708 - DNA, 120 bp, Artificial Sequence
  ENSG00000164828_4 (sequence is synthesized)
cagggaaacggggatgtgggagccgccgccgccaccgcgcacaacggcttctcctgcagcaactgcagcatgctgtccgagcgcaaggacgtgctcacggcgcaccccgcggcccccggg

SEQ ID NO: 515709 - DNA, 120 bp, Artificial Sequence
  ENSG00000164828_5 (sequence is synthesized)
cccgtgtcgagagtttattctagggacaggaatcaaaaatggaaggcagcctctggagtgttctggtggctggggattggatggtaccagtttgttactttgatttcttggctgaatgtg

SEQ ID NO: 515710 - DNA, 120 bp, Artificial Sequence
  ENSG00000164828_6 (sequence is synthesized)
tttcttcttaccaggtgccttcgaaacatctgcaagtttttagtcttgctcatcccactcttccttttactagcaggtctctccttacggggccagggcaatttcttttcgttcttgccc

SEQ ID NO: 515711 - DNA, 120 bp, Artificial Sequence
  ENSG00000164828_7 (sequence is synthesized)
gtgttgaactgggcaagcatgcatagaacacagcgggtggatgacccccaggacgtgtttaaacccacgacttctcgcctgaagcagcctctgcagggtgacagtgaggcttttccgtgg

SEQ ID NO: 515712 - DNA, 120 bp, Artificial Sequence
  ENSG00000164828_8 (sequence is synthesized)
cattggatgagtggcgtggagcagcaggtggcctctctgtctggacagtgccaccaccatggtgagaatctccgagagctgaccactttgctacagaagctgcaggctcgggtggaccag

SEQ ID NO: 515713 - DNA, 120 bp, Artificial Sequence
  ENSG00000164828_9 (sequence is synthesized)
atggaaggcggcgctgccgggccgtcagcttcggtcagagacgctgtgggacagcccccgagggagactgactttatggcctttcaccaagaacatgaagtgcgtatgtcacacttggaa

SEQ ID NO: 515714 - DNA, 120 bp, Artificial Sequence
  ENSG00000164828_10 (sequence is synthesized)
gatattctgggaaaactgagagaaaaatctgaggccatccagaaggaactagaacagaccaagcaaaaaacaatcagtgcggttggtgagcagctcctgcccacagtcgagcacctccag

SEQ ID NO: 515715 - DNA, 120 bp, Artificial Sequence
  ENSG00000164828_11 (sequence is synthesized)
ctggagctggatcagctaaagtcagagctgtccagctggcgacacgtgaagaccggctgtgagacagtggatgccgtacaagaaagagtggacgtgcaagtcagagaaatggtgaaactc

SEQ ID NO: 515716 - DNA, 120 bp, Artificial Sequence
  ENSG00000164828_12 (sequence is synthesized)
ctgttttccgaagatcagcaaggcggttctctggaacagctgctgcagaggttctcatcacagtttgtgagcaaaggcgacttgcagacgatgctgcgagacctgcagctgcagatcctg

SEQ ID NO: 515717 - DNA, 120 bp, Artificial Sequence
  ENSG00000164828_13 (sequence is synthesized)
cggaacgtcacccaccacgtttccgtgaccaagcagctcccaacctcagaagccgtggtgtctgctgtgagcgaggcgggggcgtctggaataacagaggcgcaagcacgtgccatcgtg

SEQ ID NO: 515718 - DNA, 120 bp, Artificial Sequence
  ENSG00000164828_14 (sequence is synthesized)
aacagcgccttgaagctgtattcccaagataagaccgggatggtggactttgctctggaatctggtggtggcagcatcttgagtactcgctgttctgaaacttacgaaaccaaaacggcg

SEQ ID NO: 515719 - DNA, 120 bp, Artificial Sequence
  ENSG00000164828_15 (sequence is synthesized)
atttaaaggctcccaggggtacctggtggtgaggctctccatgatgatccacccagccgccttcactctggagcacatccctaagacgctgtcgccaacaggcaacatcagcagcgcccc

SEQ ID NO: 515720 - DNA, 120 bp, Artificial Sequence
  ENSG00000164828_16 (sequence is synthesized)
caaggacttcgccgtctatggattagaaaatgagtatcaggaagaagggcagcttctgggacagttcacgtatgatcaggatggggagtcgctccagatgttccaggccctgaaaagacc

SEQ ID NO: 515721 - DNA, 120 bp, Artificial Sequence
  ENSG00000164828_17 (sequence is synthesized)
cgacgacacagctttccaaatagtggaacttcggattttttctaactggggccatcctgagtatacctgtctgtatcggttcagagttcatggcgaacctgtcaagtgaagacactactc

SEQ ID NO: 515722 - DNA, 120 bp, Artificial Sequence
  ENSG00000164828_18 (sequence is synthesized)
attatttttgtacatttttgtatatactgggacagcgtgaaacactggaatccttcatggacgagggcatatacaatgatgggacagtgccacactccttcaataaacgtggctgctggc

SEQ ID NO: 515723 - DNA, 120 bp, Artificial Sequence
  ENSG00000164828_19 (sequence is synthesized)
cagaggacgtgagcgtgtgacgggcgccttggcgccacctgttgggtgctcactgcctctgcaggtgcagaggggtcagcagcaggagaagcgtgttgaacacgtggctctcagacactc

SEQ ID NO: 515724 - DNA, 120 bp, Artificial Sequence
  ENSG00000164828_20 (sequence is synthesized)
cttgtttttaacgggaagctctttgcatttgcatttcctcaacaaaggagcaaagcagaggaagctgagagtctggcgtgttcttgacgctttggtcttcagccttgcactggctcttct

SEQ ID NO: 515725 - DNA, 120 bp, Artificial Sequence
  ENSG00000164828_21 (sequence is synthesized)
aaaggacttttggagggcagataatttcatctgttaaatccaacacacatttctttcagggaaaaacaatgtcaccaaattttcagagttctaaactcctttccttcaagccggaatttt

SEQ ID NO: 515726 - DNA, 120 bp, Artificial Sequence
  ENSG00000164828_22 (sequence is synthesized)
ccttttttcagcaccagtaggtactaagtctccagatggggaaataactaaaatgtgtttttctgctttgttcgctcttacttctgaggaaggtttccagtcaggactcgctgtaccaat

SEQ ID NO: 515727 - DNA, 120 bp, Artificial Sequence
  ENSG00000164828_23 (sequence is synthesized)
atccatggaggaatatgggagcgtttcgctctccttgtaggctgaagtcagtctgacttgaaggggcctggtttggatctaagcaaacacccagatggggttctctggtctcagcaaggc

SEQ ID NO: 515728 - DNA, 120 bp, Artificial Sequence
  ENSG00000164828_24 (sequence is synthesized)
ttttcctgttgggagtcacagtaaacagaaacccaaaaatctcatcttgggtgttttcagggcttgttttgagttttgctgaatagggagcgcaagacgccctgagcctccctctcactg

SEQ ID NO: 515729 - DNA, 120 bp, Artificial Sequence
  ENSG00000164828_25 (sequence is synthesized)
gtggtgataagaggagccgtctggtgtgtcagggtcacgaacccgttacatttcaggacgatcctttttccttcagcagcatttcttactggctgtggctggaatctgccttttatcaca

SEQ ID NO: 515730 - DNA, 120 bp, Artificial Sequence
  ENSG00000164828_26 (sequence is synthesized)
gctgtcaccattctcacgtgattcttgtgagactctttttggttataattactatttaatatttagactattttactgagcagactttataaatgagatatctacaaggcacttaaagtg

SEQ ID NO: 515731 - DNA, 120 bp, Artificial Sequence
  ENSG00000164828_27 (sequence is synthesized)
ttacagatgttttaccttaagaattatttaagttgtgttgggttaagacagttttcagtgtaccgtaaatgttgtgttttcagaaaaagacaaaacgatggtgctgactggttttctgta

SEQ ID NO: 515732 - DNA, 120 bp, Artificial Sequence
  ENSG00000164828_28 (sequence is synthesized)
tattgcacaacagtcctcaaatacactgatgtatgaaactattcatacatcaagcagcatttttttcactctccttagaattggaactatgcagttaaggcagataaaatgtacagatgt

SEQ ID NO: 515733 - DNA, 120 bp, Artificial Sequence
  ENSG00000164828_29 (sequence is synthesized)
ttcatatattacaggttacatatataaatcaaaatttcctatataaaactgatttgggatttggggtggaaatattttgaatattaatttatttttaaagatgcaagataggactttgtg

SEQ ID NO: 515734 - DNA, 120 bp, Artificial Sequence
  ENSG00000164828_30 (sequence is synthesized)
caatgtatttttgtaaatgcttttcaaaatatctgtctttggtagtgcttctgctgctgccaccaaattgataagatgctattaagaggtttaaataaagagttttaatttttaaaaggg

SEQ ID NO: 515735 - DNA, 120 bp, Artificial Sequence
  ENSG00000164828_31 (sequence is synthesized)
tatggtttgaagtggtgaacatggatttttctcggcttcacatgtacagtcctccccagtgtgtgccggagaacacgggctacacgtatgcgctcagttccagctattcttcagatgctc

SEQ ID NO: 515736 - DNA, 120 bp, Artificial Sequence
  ENSG00000164828_32 (sequence is synthesized)
gcagattctgcgcaggatcggagctgtgggccaggctgtgtccaggacggcgtggtcggccctttggctggccgtggttgctccagggaaggcagcctctggagtgttctggtggctggg

SEQ ID NO: 515737 - DNA, 120 bp, Artificial Sequence
  ENSG00000164828_33 (sequence is synthesized)
agacgaggcctgaggcggcggcgcgaggcagggttgtggtctctccatgctgcccaggtcggactcctaggctcaagcgatcccctcgccccagcctgcctggaggcgcgcgcgtggtct

SEQ ID NO: 515738 - DNA, 120 bp, Artificial Sequence
  ENSG00000164828_34 (sequence is synthesized)
ccgcgccctgttgcgccttcaaagtgcccagaatggtgtctggtgcaaaataagcagcggcggggaacaccttgccactgtcaccgtcatggggaggatttctcccggctccccagggct

SEQ ID NO: 515739 - DNA, 120 bp, Artificial Sequence
  ENSG00000164828_35 (sequence is synthesized)
tttctgtaagtctcagtgtctgcactatttgtcttggagacttaaaattatcccttgaaagcataagaagtacaccccaaaccagctttgtccttcctgtcctcttctagtttacatttt

SEQ ID NO: 515740 - DNA, 120 bp, Artificial Sequence
  ENSG00000164828_36 (sequence is synthesized)
atgtggttagtaattttgtacctaaaagtatttgaaattctataaatttggacttgacgtgagcaaaagaaaatttctacgtaagcgaaactaataaaactacagtcactttcagatgca

SEQ ID NO: 515741 - DNA, 120 bp, Artificial Sequence
  ENSG00000164828_37 (sequence is synthesized)
gccagatacactgcatcatctttttcatcatttttagttcaactttttcaagtggttttaatgaagctcagttatgaatcagaaaattacaaattgaaaactcatgaatcaaaagattgt

SEQ ID NO: 515742 - DNA, 120 bp, Artificial Sequence
  ENSG00000164828_38 (sequence is synthesized)
gaatccgaaagctataagtcaaaaagccatgaatcaaaagctcatgccagttactatgggagaatgaatgtgagagaggttctcagagaggatggccacctcagtgtaaatggggaagcg

SEQ ID NO: 515743 - DNA, 120 bp, Artificial Sequence
  ENSG00000164828_39 (sequence is synthesized)
ctgtgcgacgactgtaagggcaagaggcacctcgacgcgcacacagccgcccactcgcagtcgccacggctgcccggtcgggcagggaccctctggcacatctgggcatgtgcaggttac

SEQ ID NO: 515744 - DNA, 120 bp, Artificial Sequence
  ENSG00000164828_40 (sequence is synthesized)
ttactaggtaagtcaaatctggctgagttgcctccgatggctaagcggtacacacatatgtgtaacttagtggaaaaaaatgagcgtgtaagtccatgttttgagaagcgtggtgtacct

SEQ ID NO: 515745 - DNA, 120 bp, Artificial Sequence
  ENSG00000164828_41 (sequence is synthesized)
gtaaagccgcaccctgtctcgagcttaaggatatgtgtgtgtatgtgcgtgtacagacacacaaacctgtcatataaagtggtagtttgctgcaaataaagactgaaaggaactctggaa

SEQ ID NO: 515746 - DNA, 120 bp, Artificial Sequence
  ENSG00000164828_42 (sequence is synthesized)
gaacggcccgtgtgacatggtggtcctcactgatgacgacgggctgttggagctgctgcttaagccctcatcacagaagctcatagccaccagatcgcatttgctttgattgttgactgt

SEQ ID NO: 515747 - DNA, 120 bp, Artificial Sequence
  ENSG00000164828_43 (sequence is synthesized)
cgtctccgtctcatctcgccctgtcaccatgctatttgtgtcttgtgtggtttgtgcttggaattcaagtgctttaaagtcttgctgtaaaaactgacaggaatagtattaactttggtt

SEQ ID NO: 515748 - DNA, 120 bp, Artificial Sequence
  ENSG00000164828_44 (sequence is synthesized)
cttgctgtaaaaactgacaggaatagtattaactttggtttaaaacagggtgaatctctctcgaaaagctcccttgtaaatattttttggaagcggagtctcactctgttgcccaggctg

SEQ ID NO: 515749 - DNA, 120 bp, Artificial Sequence
  ENSG00000164828_45 (sequence is synthesized)
ctgcctgcctcggcctcccaaagtgctgttggcatcttaaaaaaaaagttagtttcaaaaataattgtctcacctgctaatgaataaacataaagccattgatttttcttttaaattctc

SEQ ID NO: 515750 - DNA, 120 bp, Artificial Sequence
  ENSG00000164828_46 (sequence is synthesized)
cataaagccattgatttttcttttaaattctcataagccatatttctttgcatgtcaaccatgttgtaattacatagttgcaggaattcacaagcaggtgttaagtcactgtgaggagat

SEQ ID NO: 515751 - DNA, 71 bp, Artificial Sequence
  ENSG00000164828_47 (sequence is synthesized)
caggaattcacaagcaggtgttaagtcactgtgaggagatagccacccacagtgagaactggaacaaaact

SEQ ID NO: 515752 - DNA, 120 bp, Artificial Sequence
  ENSG00000164828_48 (sequence is synthesized)
aatatactcaacactttctaacctaaaaaatatcctgttttttggtgaggaaaaaagtgtaaatagtgccttaagcttttttgttattcaccctgcagtttcttttctgattctgagatg

SEQ ID NO: 515753 - DNA, 120 bp, Artificial Sequence
  ENSG00000164828_49 (sequence is synthesized)
tgtttgggatcccgctgtggtacttctcgcagtccccgcgcgtggtcatccaggtacatgtcccagagcaagcacacggaggcccgggagctcatgtactcgggagccctgctcttcttc

SEQ ID NO: 515754 - DNA, 120 bp, Artificial Sequence
  ENSG00000164828_50 (sequence is synthesized)
agccatggccagcaaaacagtgcagcagacttgtccatgctggtcctggagtccctggagaaggcggaagtggaggtggctgacgagctgctggaaaatctggctaaagtgttcagcctg

SEQ ID NO: 515755 - DNA, 120 bp, Artificial Sequence
  ENSG00000164828_51 (sequence is synthesized)
atggaccccaactctcctgagcgcgtgacctttgtgtccagagccctgaagtggtccagtgggggctccgggaagctgggccacccccggctgcaccagctgctggccctcaccctgtgg

SEQ ID NO: 515756 - DNA, 120 bp, Artificial Sequence
  ENSG00000164828_52 (sequence is synthesized)
cggcttccgcagcgaggtggacatgttcgtggcccaggccgtgctacagtttctctgtttaaaaaacaaaagtagcgcatcggtggtcttcacgacgtacacccagaagcacccgtccat

SEQ ID NO: 515757 - DNA, 120 bp, Artificial Sequence
  ENSG00000164828_53 (sequence is synthesized)
cgaggacgggcctccgtttgtggagccgctgcttaacttcatctggttcctgctgctggctgtggacggtgggaagctgacggtgttcactgtgctgtgtgagcagtaccagccatccct

SEQ ID NO: 515758 - DNA, 120 bp, Artificial Sequence
  ENSG00000164828_54 (sequence is synthesized)
ccggcgggaccccatgtacaacgagtacctcgaccgcataggacagctgttcttcggcgtcccgcccaagcagacgtcttcctacgggggcctgctcgggaaccttctgaccagcctcat

SEQ ID NO: 515759 - DNA, 120 bp, Artificial Sequence
  ENSG00000164828_55 (sequence is synthesized)
gggctcctcagagcaggaggatggggaggagagccccagcgacggcagccccatcgagctggactgaactggccaggccacgtggagacaccacggtcgacgacggctggagggacgttt

SEQ ID NO: 515760 - DNA, 120 bp, Artificial Sequence
  ENSG00000164828_56 (sequence is synthesized)
cagaggcgagtcctgggtggctcctcgccttgggggctcctggccctgaggctggcggtggccgcatgccggcgcgtgtctgtttctgtgcggcggctcagggtggcgcggctgctgctc

SEQ ID NO: 515761 - DNA, 120 bp, Artificial Sequence
  ENSG00000164828_57 (sequence is synthesized)
actgtgctgctgggacccaagagtggggcgtcgcccctgctggccgccgcgtcccccgagattgacccacaataaagcacaggccttaccgcggcgtcaccctctcccactcctttgttc

SEQ ID NO: 515762 - DNA, 120 bp, Artificial Sequence
  ENSG00000164828_58 (sequence is synthesized)
tgggtcctttcgggagggctgatgggcagcacaggaggcccgtcctcggggggctgcgcacatcacgctccttgccgggcgtccggcacagctgcggtcaccaaagcaggtgctggccct

SEQ ID NO: 515763 - DNA, 120 bp, Artificial Sequence
  ENSG00000164828_59 (sequence is synthesized)
cggacctgagagcccagccagggcccatgtggtctgcaaatgggagcggctgtttttgaacacggggtcattctgcagtcaggacgaaccggtccccgtcgcagacggagtgcacgtgcc

SEQ ID NO: 515764 - DNA, 120 bp, Artificial Sequence
  ENSG00000164828_60 (sequence is synthesized)
ctgcgccacatcctcacgctcggtggagggacgcgtgcggcgggacggtgcctacgggtacttgcagctgtgtcccatgtggcatcccagagctgcgccctgctggtctctgtgagcgcc

SEQ ID NO: 515765 - DNA, 120 bp, Artificial Sequence
  ENSG00000164828_61 (sequence is synthesized)
acgctgctgtgctggaaatgccgctttaaaaagggataccgtgggactctgcccgtctctttcataacgcaatatttatttgtattgggtgatgattgattctttcgacctaacattttg

SEQ ID NO: 515766 - DNA, 120 bp, Artificial Sequence
  ENSG00000164828_62 (sequence is synthesized)
ggttttaaccaaataaccggtccaggagtgagcagctccgttctgtcagatgctactccaaatgttaccagaacgatgacaaaaggggagacgctctattttttcacagttaaatgacag

SEQ ID NO: 515767 - DNA, 120 bp, Artificial Sequence
  ENSG00000164828_63 (sequence is synthesized)
ttgtagattgatacgcagttgtgcatgggaaggggaaacgcacagctttatttactgtaaagtggaatttcaggaaggcttgtgtgaaccgttgcgcataaataaaccctttctaccggg

SEQ ID NO: 515768 - DNA, 120 bp, Artificial Sequence
  ENSG00000164828_64 (sequence is synthesized)
cccttgatgttggtcggatgggggggcagtgctggttccctgtggtgttggtcggatgggggggcagtgctggttccctgtggtgttggtcggattggggggcagtgctggttccctgtg

SEQ ID NO: 515769 - DNA, 120 bp, Artificial Sequence
  ENSG00000164828_65 (sequence is synthesized)
gtgttggtcggatgggggggcagtgctggttctctgtggtgttggtcggatggggggacagtgctggttccctgtggtgttggtcggattggggggcagtgctggttccctgtggtgttg

SEQ ID NO: 515770 - DNA, 120 bp, Artificial Sequence
  ENSG00000164828_66 (sequence is synthesized)
gtcggattggggggcagtgctggttccctgtggtgttggtcggatgggggggcagtgctggttccctgtggtgttggtcggatcggggggcagtgctggttctctgtggtgttggtcgga

SEQ ID NO: 515771 - DNA, 120 bp, Artificial Sequence
  ENSG00000164828_67 (sequence is synthesized)
tgggggggcagtgctggttccctgtggtgttggtcggatgggggggcagtgctggttccctgtggtgttggtcggatggggggacagtgctggttccctgtggtgttggtcggatggggg

SEQ ID NO: 515772 - DNA, 120 bp, Artificial Sequence
  ENSG00000164828_68 (sequence is synthesized)
gacagtgctggttccctgtggtgttggtcggatggggggacagtgctggttccctgtggtggtgtcccttcttgctgtgcagggtggagggcatcttgccacgaccaaggaccattgacc

SEQ ID NO: 515773 - DNA, 120 bp, Artificial Sequence
  ENSG00000164828_69 (sequence is synthesized)
ttcaccttttctttgaagtatgttgtatgtctcacccatttttctttaaggttctggtcgttttaacttttatacaacatatgggttggagatagtggccctctgaggagtgaattacaa

SEQ ID NO: 515774 - DNA, 120 bp, Artificial Sequence
  ENSG00000164828_70 (sequence is synthesized)
atgcctttcccagcttatcttcggattttgctcatggcagtttctaccatgtaaaacttatttttatctcagtataatcagtctttcctcttcctgctgctaagtgggtaagagcatgct

SEQ ID NO: 515775 - DNA, 120 bp, Artificial Sequence
  ENSG00000164828_71 (sequence is synthesized)
gcggcctgggcgccctcagcgcgggctgcgccagggcctcctgggccaacggctgccgcccccgcccgtcccgcgccccgcagctaccccggcccgcgcagtttcttttctgattctgag

SEQ ID NO: 515776 - DNA, 120 bp, Artificial Sequence
  ENSG00000164828_72 (sequence is synthesized)
agagcaggcctgcgcacctcaggagcccaggcatggtgtataggtggagggtagcctacattggatccaggccaaggccctgtcctgtgccgggctcctctgcgttttcttttctgattc

SEQ ID NO: 515777 - DNA, 120 bp, Artificial Sequence
  ENSG00000164828_73 (sequence is synthesized)
aaattatttcccatttcaaaggaaacatcatagaacagcgttgaagctcagggttttgagaacacaacttttgtctgaggcggagttttctgcttttattcatattccgatccactgaac

SEQ ID NO: 515778 - DNA, 120 bp, Artificial Sequence
  ENSG00000164828_74 (sequence is synthesized)
caagacattggagtctgaagaggcgctgccctgccccttctgctttcagttttccaagtagaaagagcgactgaaacgaagtttgcgtttgatgacattacgggtcagcagcaagggaag

SEQ ID NO: 515779 - DNA, 120 bp, Artificial Sequence
  ENSG00000164828_75 (sequence is synthesized)
aaaggcataggaaaatggtttgccttaaaatgctgtttattcccagattaagagtttgtgttggtcaaatgtaatcattttgtatttgctagaaaagatctataaacttgctgttttttt

SEQ ID NO: 515780 - DNA, 120 bp, Artificial Sequence
  ENSG00000164828_76 (sequence is synthesized)
tgtgcagaggtgaggcagctgggagggcctgggcaggatgggggacccaggtccaggcttctgccctgctgcagttcccagtggcatcagtcacctcagaaggctgtgatccgaaggggc

SEQ ID NO: 515781 - DNA, 120 bp, Artificial Sequence
  ENSG00000164828_77 (sequence is synthesized)
agcgactcagggtagctcaggccattcccacagcaccagagagttggtaacgtaggtctcaaagacaccattttacatgaaggttctcctgaaggcatcagaagccttgtagataaaacc

SEQ ID NO: 515782 - DNA, 120 bp, Artificial Sequence
  ENSG00000164828_78 (sequence is synthesized)
gtaactgcttttctaatactgggggggtggattttgcacaaaattatctagagggggaaaacagattggtgaaccctgactttcattttttctaagtcaaaggttttcattgttactccc

SEQ ID NO: 515783 - DNA, 120 bp, Artificial Sequence
  ENSG00000164828_79 (sequence is synthesized)
aggcctctcagctggcactgcacatgtgaggtcttcagggacgttccacactgctgtgagccaggcacttcagttgggtgtcctgttgtaagaagtatttttaaatgtcagataagcaag

SEQ ID NO: 515784 - DNA, 120 bp, Artificial Sequence
  ENSG00000164828_80 (sequence is synthesized)
tctttggagctccttaagtgttctaggatagttcaaatgcacatttaaagtactctcatgattcagttagttttaattttaaaaacataatagtattcatcactgtacaaagtacagaaa

SEQ ID NO: 515785 - DNA, 120 bp, Artificial Sequence
  ENSG00000164828_81 (sequence is synthesized)
gtatagagaagaaaatgagaagcacccatagtcagccatgtaaggatcaaacctgatactccgggtttctgtggattcctccattcgtgtgccgtgcgccccagagctggcgtcttgctg

SEQ ID NO: 515786 - DNA, 120 bp, Artificial Sequence
  ENSG00000164828_82 (sequence is synthesized)
ttctcgggcctgggcggcgcagacgaggcctgaggcggcggcgcgaggcagtttcttttctgattctgagatgcttgtgagagcttcagccatctaggaacgcatacgctgctgcttgac

SEQ ID NO: 515787 - DNA, 120 bp, Artificial Sequence
  ENSG00000164828_83 (sequence is synthesized)
agatgggctttcctctccttccctcatgttctgctttcctccttaggccaggtgctgtgtgtgctgccgtctgtctgtattttcttcaaggataagctttcaccttcagtcagaagatgg

SEQ ID NO: 515788 - DNA, 120 bp, Artificial Sequence
  ENSG00000164828_84 (sequence is synthesized)
tatctgcatatatctggaggcattttaggaaataaactgtgaccagtgccataatgctgatttattaaccattgtaacctttacattttttaatgggttttgttcttatttgataagctg

SEQ ID NO: 515789 - DNA, 120 bp, Artificial Sequence
  ENSG00000164828_85 (sequence is synthesized)
tttacctaaccaagtaaaaatctcatttaggctctcatgctttgacccttggcgtaacgtgtctcgttctttatgacgtagcaatgttaactgactgtacttgctgcatgagcgcccttg

SEQ ID NO: 515790 - DNA, 120 bp, Artificial Sequence
  ENSG00000164828_86 (sequence is synthesized)
gtttctctggggttgggtctgggggaagtccggctgcctgaatgcccggtgcagagaatgcatggatctggggcttcctctcctgcattctgtcctgtgtgttcatcagcatgatacgtt

SEQ ID NO: 515791 - DNA, 120 bp, Artificial Sequence
  ENSG00000164828_87 (sequence is synthesized)
tcttcatgtgcttctagcttggccttcacagaaatggtccatttaggagcttggttttcctaaaaacatttccttagaatgtttggtgttttctcttgtagggaaggcagcctctggagt

SEQ ID NO: 515792 - DNA, 120 bp, Artificial Sequence
  ENSG00000164828_88 (sequence is synthesized)
tattaaaaaatagaactgagcttttcaaatggtcatgtcagtgcaatattgccagcacttacaagagttatttggcttttcatattttttgaggagactcttgacccaccgatgcaggct

SEQ ID NO: 515793 - DNA, 120 bp, Artificial Sequence
  ENSG00000164828_89 (sequence is synthesized)
ttcgtgaacagaccacagtggaccacttctggggatgtttgaacaaagacaatccaaaaacttcagtgtgtttccaagaaagctctaagcagtgaagcagccagggttagagagttctta

SEQ ID NO: 515794 - DNA, 120 bp, Artificial Sequence
  ENSG00000164830_0 (sequence is synthesized)
gcctcttgtgaggcgcgcggagccgcctcccctgggtcaggtctgatgggccggtgggcgcgctagtggtggccgccaccgccgaaaccgtcgacctcctgggccccagttccgcgtcca

SEQ ID NO: 515795 - DNA, 120 bp, Artificial Sequence
  ENSG00000164830_1 (sequence is synthesized)
gccccgcggcagcatggactacctgacgacgttcaccgagaagagtgggcgccttctgcggggcacggccaaccgcctgttggggttcgggggcggcggcgaagcccggcaggtgcgctt

SEQ ID NO: 515796 - DNA, 120 bp, Artificial Sequence
  ENSG00000164830_2 (sequence is synthesized)
cgaagattacctgagggagccagcccagggggacctcgggtgcgggtccccgccccaccggcccccggcgccgtccagcccggagggacctgacactggccaaaagaagaccctagacaa

SEQ ID NO: 515797 - DNA, 120 bp, Artificial Sequence
  ENSG00000164830_3 (sequence is synthesized)
gaaagatggaagacgaatgtcttttcagaaacctaaagggactattgagtatactgttgaatcaagggattctttgaatagcatagccctgaagtttgatacaacacctaacgaacttgt

SEQ ID NO: 515798 - DNA, 120 bp, Artificial Sequence
  ENSG00000164830_4 (sequence is synthesized)
tcaattaaataagttattctcccgagcagttgttactggacaggttctgtatgttcctgatcctgaatatgtctccagtgttgagagctctccatctctaagccccgtaagtcctctgtc

SEQ ID NO: 515799 - DNA, 120 bp, Artificial Sequence
  ENSG00000164830_5 (sequence is synthesized)
accaacatcatctgaggctgaatttgataagaccactaatcctgatgtccatccaacagaagcaactccctcatctactttcactggtattcgacctgcacgagttgtatcttcaacttc

SEQ ID NO: 515800 - DNA, 120 bp, Artificial Sequence
  ENSG00000164830_6 (sequence is synthesized)
tgaggaggaggaagcatttactgagaaatttcttaaaattaattgcaaatatattaccagtggcaagggcacagtcagtggtgtgctgctagttacaccaaataatataatgtttgatcc

SEQ ID NO: 515801 - DNA, 120 bp, Artificial Sequence
  ENSG00000164830_7 (sequence is synthesized)
acataaaaatgaccctttggttcaagagaatggctgtgaggaatatggcatcatgtgtccaatggaagaggtgatgtcagctgcaatgtacaaagaaattttggatagcaaaataaagga

SEQ ID NO: 515802 - DNA, 120 bp, Artificial Sequence
  ENSG00000164830_8 (sequence is synthesized)
atctttacccatagatatagatcagctatcaggaagggacttctgccattcaaagaaaatgacaggaagtaacactgaggaaatagactcaagaatccgagatgcaggtaatgatagtgc

SEQ ID NO: 515803 - DNA, 120 bp, Artificial Sequence
  ENSG00000164830_9 (sequence is synthesized)
cagcactgctcctaggagcactgaggagtctctttctgaagatgtgttcacagaatcagaactttcccctatacgagaggagcttgtatcttcagatgaactgcgacaagataaatcttc

SEQ ID NO: 515804 - DNA, 120 bp, Artificial Sequence
  ENSG00000164830_10 (sequence is synthesized)
tggtgcgtcatcagaatctgtgcaaactgtcaatcaggctgaagtagaaagtctgacagtcaaatcagaatctactggtactcctggtcacttaagatctgatactgaacattctacaaa

SEQ ID NO: 515805 - DNA, 120 bp, Artificial Sequence
  ENSG00000164830_11 (sequence is synthesized)
tgaagttgggactttatgtcataaaactgatttaaataatcttgaaatggccattaaggaagatcagattgcagataactttcaaggaatatcaggtcctaaagaagacagcacaagtat

SEQ ID NO: 515806 - DNA, 120 bp, Artificial Sequence
  ENSG00000164830_12 (sequence is synthesized)
aaaaggtaattcagaccaggattcttttcttcatgagaattcgttacaccaagaagagagtcaaaaagaaaatatgccttgtggggaaacagcagaatttaaacaaaagcaaagtgttaa

SEQ ID NO: 515807 - DNA, 120 bp, Artificial Sequence
  ENSG00000164830_13 (sequence is synthesized)
caaaggaaaacaaggaaaggagcaaaatcaggactcacagacagaggcagaagagctacgcaaactttggaaaacccatactatgcaacaaactaaacagcaaagggaaaatattcaaca

SEQ ID NO: 515808 - DNA, 120 bp, Artificial Sequence
  ENSG00000164830_14 (sequence is synthesized)
agtgtcacaaaaagaagctaagcataaaattacatctgctgatggacacatagaaagttctgcacttttaaaagaaaagcaaaggcatcgattacataagttcttgtgtctcagagttgg

SEQ ID NO: 515809 - DNA, 120 bp, Artificial Sequence
  ENSG00000164830_15 (sequence is synthesized)
aaaaccaatgaggaaaacgtttgtatctcaagcaagtgctacaatgcaacagtatgcacagagagataagaaacatgaatattggtttgctgtgccacaagaaaggacagatcacttgta

SEQ ID NO: 515810 - DNA, 120 bp, Artificial Sequence
  ENSG00000164830_16 (sequence is synthesized)
tgccttcttcattcagtggagtccagaaatatatgcagaagatactggcgaatataccagagaacctggatttatagtagtaaaaaagattgaggagtctgaaacaattgaggattctag

SEQ ID NO: 515811 - DNA, 120 bp, Artificial Sequence
  ENSG00000164830_17 (sequence is synthesized)
taatcaagcagcagccagagaatgggagattactacaagggaagacataaattcaaagcaggttgctacagtgaaagcagacctggagtctgaatcttttcgaccaaacctaagtgatcc

SEQ ID NO: 515812 - DNA, 120 bp, Artificial Sequence
  ENSG00000164830_18 (sequence is synthesized)
atggtactggaaaacatggcacaagcttgaaaactctttatcgaacaatgacaggtttagacaccccagtgctgatggtgattaaagacagtgatggacaggtttttggtgcgttagcat

SEQ ID NO: 515813 - DNA, 120 bp, Artificial Sequence
  ENSG00000164830_19 (sequence is synthesized)
ctgagccactgaaagtgagtgatggcttttatggtactggagagacctttgtttttacattctgtccggagtttgaggtctttaagtggacaggagataatatgttttttatcaaaggag

SEQ ID NO: 515814 - DNA, 120 bp, Artificial Sequence
  ENSG00000164830_20 (sequence is synthesized)
acatggattcactagctttcggtggtggaggaggagaatttgcgctttggcttgatggagatctctaccatggaagaagccattcttgtaaaacgtttgggaatcgtacactttctaaga

SEQ ID NO: 515815 - DNA, 120 bp, Artificial Sequence
  ENSG00000164830_21 (sequence is synthesized)
aggaagatttctttatccaagatattgaaatctgggcttttgaataaataaaatgctctctgtcttagcaggagaatggcccaaacctgacatggacaagcattgtttggaaagttcaag

SEQ ID NO: 515816 - DNA, 120 bp, Artificial Sequence
  ENSG00000164830_22 (sequence is synthesized)
aagcaatacagtgtaacatgtcacttgtgctttaaaattagtctgtatcaccatttattacagttataattttggagtttatttttcaaatcatgttcttgtcccagagttctttaggtt

SEQ ID NO: 515817 - DNA, 120 bp, Artificial Sequence
  ENSG00000164830_23 (sequence is synthesized)
aacactagggactgcgtccatgtactagtataacagcttgggtttgttagaatttgggcaacattttgattataatgacaacttcattttcacatgttactcagttccctaataggatgg

SEQ ID NO: 515818 - DNA, 120 bp, Artificial Sequence
  ENSG00000164830_24 (sequence is synthesized)
tgctcttttgttgaacctgtattgatttttttttttttaactatattgattcgtttactagaacagtctaattggggcattgaggaaatgaagactggatacttctgtatctgtgaagtt

SEQ ID NO: 515819 - DNA, 120 bp, Artificial Sequence
  ENSG00000164830_25 (sequence is synthesized)
ggcacaggtaacatttggacatgttcatcttattcttaggaaggaaaaaatcacttgccaaaataatacatacttcatagaccactgagttctagtttttattcacactacaacattctc

SEQ ID NO: 515820 - DNA, 120 bp, Artificial Sequence
  ENSG00000164830_26 (sequence is synthesized)
tttaacgatgttgcaggtattctcaatttccttttaagaaaaatgaaatgtgaggagaattctggttgtaatagatgacagtacatatgatctgcaggtttgggcatatgctttcatcat

SEQ ID NO: 515821 - DNA, 120 bp, Artificial Sequence
  ENSG00000164830_27 (sequence is synthesized)
taaattatctgataaagttacaagtcacaaaggagaatgagaacttaatgattctattggatttaatatattagcaagaaaacatactatttacatatgtgtagcttagtaaggcattaa

SEQ ID NO: 515822 - DNA, 120 bp, Artificial Sequence
  ENSG00000164830_28 (sequence is synthesized)
cataagtacaaaaactatgaaacagatgcatatttcctcaacatactgtgtcaggtatactgttttataatttggttgttttagccttattgcacaccaactcccaaaatataggttact

SEQ ID NO: 515823 - DNA, 120 bp, Artificial Sequence
  ENSG00000164830_29 (sequence is synthesized)
cttgttcaaaaggaaaaaaaaaattgtgattttctttgagtggtatatgttattaattaccattagcatttgctcttataaagggcaatgattatagtagacaatattgtaactcagtag

SEQ ID NO: 515824 - DNA, 120 bp, Artificial Sequence
  ENSG00000164830_30 (sequence is synthesized)
acttgttgaatatgcaaacttactgtcaagtgacctcaaaaaaaaaatgaaaagatagaatacactagtagttcttatcctcttttgtaggaaaccaataatagccattgtggcaataat

SEQ ID NO: 515825 - DNA, 120 bp, Artificial Sequence
  ENSG00000164830_31 (sequence is synthesized)
tcatcagttgattttaaagcttcatgttatgcaaaaaagaatcctgctgttatacatgtgacagtgactttgtgctgaaatttcagctattccagataaacattgtatatcttgtaaatt

SEQ ID NO: 515826 - DNA, 120 bp, Artificial Sequence
  ENSG00000164830_32 (sequence is synthesized)
aatgtttaaaggtgtagttttgttcttacagaaagtgttgattgccaggttgcttatagcactttaagttattctaaaaatgaaattataagccaaatatttggcttaagtagatttagt

SEQ ID NO: 515827 - DNA, 120 bp, Artificial Sequence
  ENSG00000164830_33 (sequence is synthesized)
tgtatagcacttacatatttagttcttttgaaagtttagataattatttaaagaaagcataatgctaatggaaaagaaaatctgatgttctattataatatgctattgctgaatatgaat

SEQ ID NO: 515828 - DNA, 120 bp, Artificial Sequence
  ENSG00000164830_34 (sequence is synthesized)
agaaatacagggcatcatttccttgtctcattataagttagtaacaatatatagattaaatgtttacaatatagggaattgtaaataaatatatcagtttttttccccttcggtcttcca

SEQ ID NO: 515829 - DNA, 120 bp, Artificial Sequence
  ENSG00000164830_35 (sequence is synthesized)
cagcagtattattgtctttgtggagttgactaatgataatttaaaaatcctgtaatggatttctactaaaataaggtcatagtggcatataccaaataaaatcaaatacagaaatacaaa

SEQ ID NO: 515830 - DNA, 120 bp, Artificial Sequence
  ENSG00000164830_36 (sequence is synthesized)
aaatctttgtctctagcaaactgttttgtcactgtagtaaggctctagtgctggaaatttatctttgacagaggaagaatgcttttgaaaacagttcttacgtgattttatgtaacttaa

SEQ ID NO: 515831 - DNA, 120 bp, Artificial Sequence
  ENSG00000164830_37 (sequence is synthesized)
tttgccctggaaaggaaatgtctcgtctctggtatgggaaaaaagggagaagacatcaaccaattaatcataaatacactctggtagtgtcagtggctgagtatcaccgcaggatcgatg

SEQ ID NO: 515832 - DNA, 120 bp, Artificial Sequence
  ENSG00000164830_38 (sequence is synthesized)
aacgagacatctagtacggggctcacaggtaacagaactctgatcagatccgccccggctcccacacagctataaggttgcctgcctgcctgcacagaaatgacgaaggacaaaaacagc

SEQ ID NO: 515833 - DNA, 120 bp, Artificial Sequence
  ENSG00000164830_39 (sequence is synthesized)
ccagggctgaagaaaaagtcccagtcggtggatattaatgctccagggttcaaccctttggctggtgcaggaaagcaaacaccacaagccagtaagcccccggcacccaagacccccatc

SEQ ID NO: 515834 - DNA, 120 bp, Artificial Sequence
  ENSG00000164830_40 (sequence is synthesized)
gtcctctcaaactgtgagtaactaagtggtttgtgcatcattccagaagcaaagctaaaatttttagcggtgttgtcgacttgacctgctaatttcctgttctggaatcgagagaagact

SEQ ID NO: 515835 - DNA, 120 bp, Artificial Sequence
  ENSG00000164830_41 (sequence is synthesized)
gtgtcacaaaaagaagctaagcataaaattacatctgctgatggacacatagaaagtaagtgttatagagtaaatgaagttagttcatccaattgtatggtgtctccgtctttcctcact

SEQ ID NO: 515836 - DNA, 120 bp, Artificial Sequence
  ENSG00000164830_42 (sequence is synthesized)
gactcaaaagccgctgtaccttagggcaacctgaaggataagtgagtgacccttgaccggtgattctctggggacaagtatatacagtctccagtgtctactgtcttttcttatcccaca

SEQ ID NO: 515837 - DNA, 120 bp, Artificial Sequence
  ENSG00000164830_43 (sequence is synthesized)
ggtggattgtacacataatgagcatcattgctacccaccatgtttaaacattcttggctcactacatcgtatcattaaacaatttatttcttgagaaattgcacaaaagctgtataatac

SEQ ID NO: 515838 - DNA, 120 bp, Artificial Sequence
  ENSG00000164830_44 (sequence is synthesized)
ctttgatcactccattttctcttaaaaagtttttggtgtgttaccattaaaaatgtcttttttcatatataacattttaattgccaaagttgtaatcccatcttttataaaatgtacagt

SEQ ID NO: 515839 - DNA, 120 bp, Artificial Sequence
  ENSG00000164830_45 (sequence is synthesized)
taaacctaaaagtgtacttacagaattcttccacgtatcgagaagtttcatcatcatcatctaattattttcttttaaaaacctgccctcaggacaaataaaaacactattttatctgtc

SEQ ID NO: 515840 - DNA, 120 bp, Artificial Sequence
  ENSG00000164830_46 (sequence is synthesized)
attcttgtggctaccactgtcttacccagcactaaaagcttcttaaaattagtcagaggaagacaagtgggaaggtgtagacttctcacttcaatagtctgctaaagatggaggaaaaat

SEQ ID NO: 515841 - DNA, 120 bp, Artificial Sequence
  ENSG00000164830_47 (sequence is synthesized)
atggtgctattcaaagacagtctagacttaaagatttagaattttggatggaaataatccggtgaaatagcaagaacatttgaaagagaacttgacaaaccactgctgcagaaagctgaa

SEQ ID NO: 515842 - DNA, 120 bp, Artificial Sequence
  ENSG00000164830_48 (sequence is synthesized)
tttctgaccccgcatcggttccaggaagaatacacctatgtgacaagctaagttctgcctcattttgcatttagaagccacaagaaaaacttttcgaaaacttttgtccgtcttttgctc

SEQ ID NO: 515843 - DNA, 120 bp, Artificial Sequence
  ENSG00000164830_49 (sequence is synthesized)
atgcttttgaaaacagttcttacgtgattttatgtaacttaatttgccctggaaaggaaatgtctcgtctctggtagtgtcagtggctgagtatcaccgcaggatcgatgctctaaatac

SEQ ID NO: 515844 - DNA, 120 bp, Artificial Sequence
  ENSG00000164830_50 (sequence is synthesized)
aatgattgaagctgtttatctgtgtgcaaaagcctgtaagtgtgtttgtgtgggcctgggcacgtgtatatgcctgtgattcacacatttcttttcacaaaagatttgaggtcactcagg

SEQ ID NO: 515845 - DNA, 120 bp, Artificial Sequence
  ENSG00000164830_51 (sequence is synthesized)
atgtcattcatcctgggtaaaagccacctcagattacaagcagttaataggtcagatgctacataatgctctcttcaacttagatttcttaaaatcttacaagttgaaggaggtgagagc

SEQ ID NO: 515846 - DNA, 120 bp, Artificial Sequence
  ENSG00000164830_52 (sequence is synthesized)
ctgggacttttaatttgcactggggcaaaatcgttcctttgtgctgaaaacatgtggctgacaagatgccactgggaaagccaagcttttttagaagagtttgctgtataattcataaag

SEQ ID NO: 515847 - DNA, 120 bp, Artificial Sequence
  ENSG00000164830_53 (sequence is synthesized)
gcctatattatataggcaccattacattccagctggcattagtattctacataatgaacaacaagctatcaagtaaatactaacactttgttttctaaagcttaccaagcatcttccacc

SEQ ID NO: 515848 - DNA, 82 bp, Artificial Sequence
  ENSG00000164830_54 (sequence is synthesized)
cattaaactaccactgatattcttcacagaattaggaaaaactattttaaagttcatgtggaacccaaaaagagcccaaata

SEQ ID NO: 515849 - DNA, 120 bp, Artificial Sequence
  ENSG00000164841_0 (sequence is synthesized)
ggagccgagcggcgtgcagaggctacaagtgccgtagctggtgattgggggactttctccgggaaccgtgccgggagagcgcgcggtgctggagccgcaccgggtggccgaagcagaaga

SEQ ID NO: 515850 - DNA, 120 bp, Artificial Sequence
  ENSG00000164841_1 (sequence is synthesized)
ctttccggaagctgctgggggatgtctgactagctctcatggagctccactaccttgctaagaagagcaaccaggcagacctctgtgatgccagggactggagttcaagagggctgcctg

SEQ ID NO: 515851 - DNA, 120 bp, Artificial Sequence
  ENSG00000164841_2 (sequence is synthesized)
gtgaccaggcagatacagcagccacaagagctgctctctgctgtcagaaacagtgtgcatccaccccaagagcaaccgagatggaagggtctaaacttagttcttctccagcatccccct

SEQ ID NO: 515852 - DNA, 120 bp, Artificial Sequence
  ENSG00000164841_3 (sequence is synthesized)
cctcctctctgcaaaacagtactcttcagccagatgcctttccaccaggacttctccactcagggaacaaccaaataacagcggaacggaaagtctgtaactgctgcagccaggaattag

SEQ ID NO: 515853 - DNA, 120 bp, Artificial Sequence
  ENSG00000164841_4 (sequence is synthesized)
aaacttcttttacctatgtggacaaaaacatcaacttggagcagcggaaccggagctcgccatcagcaaaagggcataatcaccctggggagcttggctgggaaaatccaaatgagtggt

SEQ ID NO: 515854 - DNA, 120 bp, Artificial Sequence
  ENSG00000164841_5 (sequence is synthesized)
cccaagaggctgccatatctttgatatctgaagaggaggatgatacaagttcagaagccacgtcttcagggaagtctatagactatggtttcatcagcgccatcttgttcttggtcactg

SEQ ID NO: 515855 - DNA, 120 bp, Artificial Sequence
  ENSG00000164841_6 (sequence is synthesized)
ggatcctgctcgtgatcatctcttacatcgtcccacgggaagtgactgtggaccccaacactgtggcagcccgggagatggagcgcctggagaaggagagtgcgaggctgggggctcacc

SEQ ID NO: 515856 - DNA, 120 bp, Artificial Sequence
  ENSG00000164841_7 (sequence is synthesized)
tggaccgctgtgtgattgcggggctctgcctcctcacgctggggggcgtcatcctgtcctgcttgttaatgatgtccatgtggaagggggagctctatcgtcgaaacagatttgcctctt

SEQ ID NO: 515857 - DNA, 120 bp, Artificial Sequence
  ENSG00000164841_8 (sequence is synthesized)
ccaaagagtctgcaaaactctatggttctttcaacttcaggatgaaaaccagcacgaatgaaaacactctggaactgtccttggtagaggaagatgcgcttgctgtacagagttaattct

SEQ ID NO: 515858 - DNA, 120 bp, Artificial Sequence
  ENSG00000164841_9 (sequence is synthesized)
ggttgtgaatatcttgagagtctgccttggcattttataatatgaaaaaagttaatttataaaaattcacagtgcaatttatttgcctggcaagaaaagtttatttcacaaaccaacagc

SEQ ID NO: 515859 - DNA, 120 bp, Artificial Sequence
  ENSG00000164841_10 (sequence is synthesized)
cagtaagtgtttttgttctctatgtgtcttctatttagaagaaaagccatgtaagatgtataagaaaccacaaccagccacacctatccttctgaagagctgaaggctaattaatctgta

SEQ ID NO: 515860 - DNA, 120 bp, Artificial Sequence
  ENSG00000164841_11 (sequence is synthesized)
atggccaagaacttctacttcgatagaaaaatatttctaatgacccagtctacaaattatttcttttacacaaatatatgatgttattctttggacactaggtggtcctacacacagtag

SEQ ID NO: 515861 - DNA, 120 bp, Artificial Sequence
  ENSG00000164841_12 (sequence is synthesized)
gatcaattgctaatctactttgtgaaaaagaactaagcactaatcaataataaggcttacatctaattctcaaaggtgcttatccattttcttgctaaattatccttcttgtaatttggc

SEQ ID NO: 515862 - DNA, 120 bp, Artificial Sequence
  ENSG00000164841_13 (sequence is synthesized)
taaacactaaaacatggaatttttagtttgaatattttgaagtttgaggatgttgggctttccttattgtaaaaaatgttatgtttgaaattattcctgttttcaaaaatggtaattaag

SEQ ID NO: 515863 - DNA, 120 bp, Artificial Sequence
  ENSG00000164841_14 (sequence is synthesized)
tcattaggataaactttctaataaaaaaaaattatgtaaatcattgtaagaccaatgtgaatttaaaccacagtgttggtgccagatattagccagggtcacaggctcttttttaaaatg

SEQ ID NO: 515864 - DNA, 120 bp, Artificial Sequence
  ENSG00000164841_15 (sequence is synthesized)
aagtcaaattagttactgatataagttttatattttgtgattttgccatcatactggttatctgtgctcttgaagtctgctggttctcacaccagcagcaagaggcaaggcatgagacat

SEQ ID NO: 515865 - DNA, 120 bp, Artificial Sequence
  ENSG00000164841_16 (sequence is synthesized)
tttaaatatatttccagacatctaaacatctagacaggcctgagtcatgattggctctggtgtgcttccaggtaacatcttgttattgctgtttggggaaaaccaccaatagaattgcag

SEQ ID NO: 515866 - DNA, 120 bp, Artificial Sequence
  ENSG00000164841_17 (sequence is synthesized)
ctagacttttggggactgtgcctcgcaggctgtatcacttgctgtaggccaagcaacgagcacttccctcatggtagcaacagtccttaagcccaaagccaaaaaaaaataaaatggaaa

SEQ ID NO: 515867 - DNA, 120 bp, Artificial Sequence
  ENSG00000164841_18 (sequence is synthesized)
gagagattcaatacactgatttaatggggactgtagtcatcgtcagaactcacctcccactcacagtggtctagatgtcattcagcaactgtgaactcttgcctcatgcagcacaaactc

SEQ ID NO: 515868 - DNA, 120 bp, Artificial Sequence
  ENSG00000164841_19 (sequence is synthesized)
ttctctaagagcagcatgatgagcaaggtgctcactttgcaagacacacactgggtgttcacagtgacagaccgcctcattatggtgacggttcagaaaagggatgggaaatgcagcctc

SEQ ID NO: 515869 - DNA, 120 bp, Artificial Sequence
  ENSG00000164841_20 (sequence is synthesized)
agaaataccttacattttgcaactctgcctggaggtttttccaacctgtgctctaagagttgttgtaacttccatgattgtgttaccaggatcagggggtcattcttaaaaagaggacag

SEQ ID NO: 515870 - DNA, 120 bp, Artificial Sequence
  ENSG00000164841_21 (sequence is synthesized)
gagctgggaattggtatgagacagcaggaatgaggaagtaagaaagtgatttctttgcagatttttaaaggctatttcaaatgtctgaagtttgtggtgttgtggacaactgtggaatac

SEQ ID NO: 515871 - DNA, 120 bp, Artificial Sequence
  ENSG00000164841_22 (sequence is synthesized)
atgggtgactttggcaaaatgtgtgaatcaggatatttatgtggatgagctctcatgggtgtcagattgatttgatgagtgaggtatgctgcatatgacttaagggttgaactgaaatac

SEQ ID NO: 515872 - DNA, 120 bp, Artificial Sequence
  ENSG00000164841_23 (sequence is synthesized)
aaaaagggaggctcagaagatagtaaaaagagaggatgggcatatgaaagaattattaagtaaaaatgagaaattatatggccatcagaggaagctagatgtagttaattgccttatgtt

SEQ ID NO: 515873 - DNA, 120 bp, Artificial Sequence
  ENSG00000164841_24 (sequence is synthesized)
atagagcaatactgattactgaaaagaaagaattgagatgacataaacatgatttttgctttctgttgctgtatttttgtgctttttgaacaaactttgttttactgtgactctcatttc

SEQ ID NO: 515874 - DNA, 120 bp, Artificial Sequence
  ENSG00000164841_25 (sequence is synthesized)
atgatttttgttgaggctgccttaccagtggtataagttttatattctgaaggtttctaagtccagctctagcctgcttaaggatccactttggatgatgttgaaacaagaaggaaacga

SEQ ID NO: 515875 - DNA, 120 bp, Artificial Sequence
  ENSG00000164841_26 (sequence is synthesized)
gcattaaaaaaaagaaggcattaaagaaaaaactaatgtttattcatagaagctaaatgagatcaactgagtttttatttattggtgaaacaggattaattagccaaatggcagactaaa

SEQ ID NO: 515876 - DNA, 120 bp, Artificial Sequence
  ENSG00000164841_27 (sequence is synthesized)
ctgaattaatgtggaatcaattttcagtttatgaaggaagaggagtttgggaatcaagtgttaggaggtcttttcacttgataataaagcttttcatgtggaagcatttaatgaatcttg

SEQ ID NO: 515877 - DNA, 120 bp, Artificial Sequence
  ENSG00000164841_28 (sequence is synthesized)
cagggctaccaaataatatagatttgatctagaggtaacattttgaaaaatgccattttggaaaaaaaatattcaacgggggagaaaaagacctaacacatcaaaatacatttcctttct

SEQ ID NO: 515878 - DNA, 120 bp, Artificial Sequence
  ENSG00000164841_29 (sequence is synthesized)
tttccctagaatgctataatttcctttaaaatttaaaatcgaaatgtggtaagtaaatgcacacttcaacattatttaaatctgctaacatatagagcacctctcttttaaggttctact

SEQ ID NO: 515879 - DNA, 120 bp, Artificial Sequence
  ENSG00000164841_30 (sequence is synthesized)
tatctgagggcaaaccattacacattacatgattttgaaaatcatctgaatgacttcttttgggctgtggtgacattattcagatacttgccttaatcgacttttccctgggtatttggt

SEQ ID NO: 515880 - DNA, 120 bp, Artificial Sequence
  ENSG00000164841_31 (sequence is synthesized)
ttatgtagcccttatccatcctgcctgaattcaatatgaagattacttgaatttaaaatgatggtaacacaggcaaagaaaagccatgtgctttatttcctgtttttcccaatctgacaa

SEQ ID NO: 515881 - DNA, 120 bp, Artificial Sequence
  ENSG00000164841_32 (sequence is synthesized)
agagtgtttttggctctagaggtactttggcaagaccaggtgatgcattctatagacattgggcatacaatacctatagttttggtcttgcatccttcatggagatttgtgaccttccgt

SEQ ID NO: 515882 - DNA, 120 bp, Artificial Sequence
  ENSG00000164841_33 (sequence is synthesized)
ctgtctcttcaatatggtgctggttgttacctgtgaaagtttttattgctagtcctagagaagaaaaacatatttcagtggttctaggtctttagcttatttacatggttttagaaatct

SEQ ID NO: 515883 - DNA, 120 bp, Artificial Sequence
  ENSG00000164841_34 (sequence is synthesized)
aaactcaagagtcatcttcctagtctcaatgagaagacagctcgtctttcagcagtgtggcccaatggggtgagttacagaaagaaagctgtctttctcctttattactgggatctacac

SEQ ID NO: 515884 - DNA, 120 bp, Artificial Sequence
  ENSG00000164841_35 (sequence is synthesized)
gctgctggtggatgatttaaggctcctaatatctttataagccagttctttttagggcaccttaaactgttagtggtagagtttgcaaagagttttctttgcagcgctgtgtgtccttcc

SEQ ID NO: 515885 - DNA, 120 bp, Artificial Sequence
  ENSG00000164841_36 (sequence is synthesized)
cacccattgggagctcttaaagcagatcacataataagatgtactggcccctcatataaagaacagcttttcgtcatgctccccactgtgtaggtgatttatagtttacaggaagacaag

SEQ ID NO: 515886 - DNA, 120 bp, Artificial Sequence
  ENSG00000164841_37 (sequence is synthesized)
actgcttggaaccatgaagttcttggaggccatggttgcttttacccacatgactgctataacccttgattctgttctatcaagttacttgccttgatatcatcacatgctttgctgtct

SEQ ID NO: 515887 - DNA, 120 bp, Artificial Sequence
  ENSG00000164841_38 (sequence is synthesized)
gcttaaaatatgagttcatccccctcatacttatttgttttagggacccaattggaccagtgctggcacatgcccttcaaggtacaatttctgaaaagagactgcgctgccaaacttatg

SEQ ID NO: 515888 - DNA, 120 bp, Artificial Sequence
  ENSG00000164841_39 (sequence is synthesized)
tgtgcctttacctcagtccccccagtataaggggtgacttaatcttgataaatgagtgactgagcaccatgctagttaaatattgagaattaaaagcctgaacccaatggctctattttt

SEQ ID NO: 515889 - DNA, 120 bp, Artificial Sequence
  ENSG00000164841_40 (sequence is synthesized)
ttttaccaccttctgacaagcaaaaattctaggcaggagcatgtgaacattttggtcttcatctttcacgtgtgcaatgataggtgtatgcaaaattttacttggattaattgtcaagtt

SEQ ID NO: 515890 - DNA, 120 bp, Artificial Sequence
  ENSG00000164841_41 (sequence is synthesized)
aaaaaagtgttctatatgtatatctcttaggagaaggtttttcaacctgaaggtcagatttcattgcagcaattaatgccatcaaaaaaacgtggtctgacaaaaaagattcacaacctt

SEQ ID NO: 515891 - DNA, 120 bp, Artificial Sequence
  ENSG00000164841_42 (sequence is synthesized)
tgccagtggttcacctattacagcaagatgtaatactatcaatacttactgttctctgtaatgggtttaacctttcccagaattggacataaagaatgactacgatgagaagattataat

SEQ ID NO: 515892 - DNA, 120 bp, Artificial Sequence
  ENSG00000164841_43 (sequence is synthesized)
gaagtcttactggcttttcctagtctaaaaagagtacttaagaaagagaattaacatatcatttccttttggctgatttttagctatatctgtttttggttcataatattctatattatc

SEQ ID NO: 515893 - DNA, 120 bp, Artificial Sequence
  ENSG00000164841_44 (sequence is synthesized)
atctcacaaattttataagtcttgggaaataatttgcctgcctagtgaattgacactgtaaaaagcaagacgttattttaaacacataaaactaatttcaagaatctgtggcttacactc

SEQ ID NO: 515894 - DNA, 120 bp, Artificial Sequence
  ENSG00000164841_45 (sequence is synthesized)
aagagtgtactcgtggtttatgtttgtgtgcagatttatgtgcactcaagtctatgtgcatttggactatattttatagttatacagctttaatatccaaagttattgttagaataattt

SEQ ID NO: 515895 - DNA, 120 bp, Artificial Sequence
  ENSG00000164841_46 (sequence is synthesized)
tattataggaatttggcatgccttactattgacattaagaagaagagaagtctttcacaagtcatgaatgaagaatttggaatcagcctcagaatgagatgccataattattataaacct

SEQ ID NO: 515896 - DNA, 120 bp, Artificial Sequence
  ENSG00000164841_47 (sequence is synthesized)
gttttggttgttcagcctcccacaaatatttattaatttgttttttaacctctcaatttcaggctcatgagagtgtgagatatttggaaattattttaccgtgaattgttattttatttc

SEQ ID NO: 515897 - DNA, 120 bp, Artificial Sequence
  ENSG00000164841_48 (sequence is synthesized)
aggggactatggggagtatattcctttgtttcaaatttgggtaactctcctgtgtttcaggaacagctctccctattttttcactgccatcttcaggcttcctagccaggctccaaacaa

SEQ ID NO: 515898 - DNA, 120 bp, Artificial Sequence
  ENSG00000164841_49 (sequence is synthesized)
atgtcatataagaaagaaagattaattattacatattgtgtattgagagtttgtaccctgtggttctcatcgtgctgttaattttacttttcttgccaaacaaaaataatttgacattga

SEQ ID NO: 515899 - DNA, 120 bp, Artificial Sequence
  ENSG00000164841_50 (sequence is synthesized)
ttatgtgctttttgatattttcaagggcaattattaaggttatgagctctttcttagggcacttgatgccttatatgttaatagcaagtgtgtcatatcattttaaaataaaactattca

SEQ ID NO: 515900 - DNA, 120 bp, Artificial Sequence
  ENSG00000164841_51 (sequence is synthesized)
aaggctttattgtgtttattaagcttaatttaaattggaatctgtaatgctgatttggtcttttaaaattatatttgaaattatttgtccaaaaaaattaaaatgaatatttacccctaa

SEQ ID NO: 515901 - DNA, 120 bp, Artificial Sequence
  ENSG00000164841_52 (sequence is synthesized)
gacatggtctggctatgttgcctaggctgatcatgaactcctgggctcaagctattctccaaacctggcctcccaaagtcctgggattccagcagagaagattcaagaagattccagaag

SEQ ID NO: 515902 - DNA, 120 bp, Artificial Sequence
  ENSG00000164841_53 (sequence is synthesized)
tggtcaagacattgatgttaaacataatgtttcagtgaaggatgtttgattccaagacctctggaaaagattctttatctacagtttctaagatggcagatttgcagaacttaaaagaat

SEQ ID NO: 515903 - DNA, 120 bp, Artificial Sequence
  ENSG00000164841_54 (sequence is synthesized)
actgtaagattgggattgatgccacctgaaagtgaagagccaaactgaaaacgtcataagtgtcttaagaagttcgactttaaactaaattcaaggccatttatggacagaataccatgg

SEQ ID NO: 515904 - DNA, 120 bp, Artificial Sequence
  ENSG00000164841_55 (sequence is synthesized)
tgggtggtgtcatcactatatgtgatacagcaagagcttctacaatataattagtgattattgcattcaatttaatcaaagaatagtttaccataacaccaacaggccatcattttatag

SEQ ID NO: 515905 - DNA, 120 bp, Artificial Sequence
  ENSG00000164841_56 (sequence is synthesized)
ttagtctatatgtttgtttattggctggttggtctaaagtggttggtttattcattttagacattctaatttttgactcctcgatgtatatattgtgcattttacgccaatgcactttca

SEQ ID NO: 515906 - DNA, 120 bp, Artificial Sequence
  ENSG00000164841_57 (sequence is synthesized)
aatgaaactgttgaatttcctctgcagattagttagattatatttttcaaaggggacctcaacaatgatacacattctgcatgctctcctgtcatgtgaccttgtccaattctgaacatc

SEQ ID NO: 515907 - DNA, 120 bp, Artificial Sequence
  ENSG00000164841_58 (sequence is synthesized)
aaaagctggagtgtatttcttcacttccttgaatctgggaggccctgtgattattttgaccaataaagcacagggttgaagtgtgatcacatgcaagaaatgtgattaccccaagattac

SEQ ID NO: 515908 - DNA, 120 bp, Artificial Sequence
  ENSG00000164841_59 (sequence is synthesized)
tgcactgtgagaagcccaagccaagtggaaaggctctggacggtgagttgccatgcaggcagaggcaggccaaggaaaaccatagcacctgacagtgaatgaaagtcatcttggagtata

SEQ ID NO: 515909 - DNA, 120 bp, Artificial Sequence
  ENSG00000164841_60 (sequence is synthesized)
tcctccagtcccactgcctcagctgacaccatagggataaaagacaaaccacccagtcaagctattcctgagttccttacctccaaaaccatgagtacaataaaatggatgatttaagca

SEQ ID NO: 515910 - DNA, 120 bp, Artificial Sequence
  ENSG00000164849_0 (sequence is synthesized)
aagtgcttgcatcctggggccctcacacgcacgcgcaggcggccaggcgcgctgctgataagagcctgcgggtttgcagagaagcgcagcagcgcgcaggtcctcaccagagctctggtg

SEQ ID NO: 515911 - DNA, 120 bp, Artificial Sequence
  ENSG00000164849_1 (sequence is synthesized)
gccacctctgtcccgccatgctgctcaccgacagtggccagggcccacagcaccaagaggcttgggccacaaagtaaagggtcgcggagcctcgccggccgccatgtggagctgcagctg

SEQ ID NO: 515912 - DNA, 120 bp, Artificial Sequence
  ENSG00000164849_2 (sequence is synthesized)
gttcaacggcacagggctggtggaggagctgcctgcctgccaggacctgcagctggggctgtcactgttgtcgctgctgggcctggtggtgggcgtgccagtgggcctgtgctacaacgc

SEQ ID NO: 515913 - DNA, 120 bp, Artificial Sequence
  ENSG00000164849_3 (sequence is synthesized)
cctgctggtgctggccaacctacacagcaaggccagcatgaccatgccggacgtgtactttgtcaacatggcagtggcaggcctggtgctcagcgccctggcccctgtgcacctgctcgg

SEQ ID NO: 515914 - DNA, 120 bp, Artificial Sequence
  ENSG00000164849_4 (sequence is synthesized)
ccccccgagctcccggtgggcgctgtggagtgtgggcggcgaagtccacgtggcactgcagatccccttcaatgtgtcctcactggtggccatgtactccaccgccctgctgagcctcga

SEQ ID NO: 515915 - DNA, 120 bp, Artificial Sequence
  ENSG00000164849_5 (sequence is synthesized)
ccactacatcgagcgtgcactgccgcggacctacatggccagcgtgtacaacacgcggcacgtgtgcggcttcgtgtggggtggcgcgctgctgaccagcttctcctcgctgctcttcta

SEQ ID NO: 515916 - DNA, 120 bp, Artificial Sequence
  ENSG00000164849_6 (sequence is synthesized)
catctgcagccatgtgtccacccgcgcgctagagtgcgccaagatgcagaacgcagaagctgccgacgccacgctggtgttcatcggctacgtggtgccagcactggccaccctctacgc

SEQ ID NO: 515917 - DNA, 120 bp, Artificial Sequence
  ENSG00000164849_7 (sequence is synthesized)
gctggtgctactctcccgcgtccgcagggaggacacgcccctggaccgggacacgggccggctggagccctcggcacacaggctgctggtggccaccgtgtgcacgcagtttgggctctg

SEQ ID NO: 515918 - DNA, 120 bp, Artificial Sequence
  ENSG00000164849_8 (sequence is synthesized)
gggaagcccgtggacgcacactacctggggctactgcactttgtgaaggatttctccaaactcctggccttctccagcagctttgtgacaccacttctctaccgctacatgaaccagagc

SEQ ID NO: 515919 - DNA, 120 bp, Artificial Sequence
  ENSG00000164849_9 (sequence is synthesized)
ttccccagcaagctccaacggctgatgaaaaagctgccctgcggggaccggcactgctccccggaccacatgggggtgcagcaggtgctggcgtaggcggcccagccctcctggggagac

SEQ ID NO: 515920 - DNA, 120 bp, Artificial Sequence
  ENSG00000164849_10 (sequence is synthesized)
gtgactctggtggacgcagagcacttagttaccctggacgctccccacatccttccagaaggagacgagctgctggaagagaagcaggaggggtgtttttcttgaagtttcctttttccc

SEQ ID NO: 515921 - DNA, 120 bp, Artificial Sequence
  ENSG00000164849_11 (sequence is synthesized)
acaaatgccactcttgggccaaggctgtggtccccgtggctggcatctggcttgagtctccccgaggcctgtgcgtctcccaaacacgcagctcaaggtccacatccgcaaaagcctcct

SEQ ID NO: 515922 - DNA, 120 bp, Artificial Sequence
  ENSG00000164849_12 (sequence is synthesized)
cgccttcagcctcctcagcattcagtttgtcaatgaagtgatgaaagcttagagccagtatttatactttgtggttaaaatacttgattcccccttgtttgttttacaaaaacagatgtt

SEQ ID NO: 515923 - DNA, 120 bp, Artificial Sequence
  ENSG00000164849_13 (sequence is synthesized)
tcctagaaaaatgacaaatagtaaaatgaacaaaaccctacgaaagaatggcaacagccagggtggccgggccctgccagtgggcggcgtgtgctagcaaggcctgccgggtgtgccgca

SEQ ID NO: 515924 - DNA, 120 bp, Artificial Sequence
  ENSG00000164849_14 (sequence is synthesized)
gtcaccacagggttctgagaacatttcacagaagtgcctgagacgcggagacatggctggtgttaaatggagctattcaatagcagtgacgcgctctcctcagccaccaaatgtccctga

SEQ ID NO: 515925 - DNA, 120 bp, Artificial Sequence
  ENSG00000164849_15 (sequence is synthesized)
caccctccccagcccccacagataacatcagctgaggtttttttcagtatgaacctgtcctaaatcaattcctcaaagtgtgcacaaaactaaagaatataaataaacaaaagaaaggtg

SEQ ID NO: 515926 - DNA, 80 bp, Artificial Sequence
  ENSG00000164849_16 (sequence is synthesized)
ggtcacgtgtgtacacagggcccgggcggcgtgcgcgccgtgagccccgccgcctccgccagcccgagctgcccgcccgg

SEQ ID NO: 515927 - DNA, 120 bp, Artificial Sequence
  ENSG00000164849_17 (sequence is synthesized)
tggccgaggaggtgctggtcaagatgtgttagtgaggagctagacaagatgagcacgtgagaagcaggggccagggagcctggacccaggacctgggggtgctgtggcagcgctgtggcg

SEQ ID NO: 515928 - DNA, 120 bp, Artificial Sequence
  ENSG00000164849_18 (sequence is synthesized)
gcactgtggctgggcacacccagcagcggcctagctctgcatgcctgtcaccacctgaccctcactgcggctgctgggcggcattcaccaggattgcacaatgacccacacctcccgtcc

SEQ ID NO: 515929 - DNA, 120 bp, Artificial Sequence
  ENSG00000164849_19 (sequence is synthesized)
tgcccaccagcctctggatgggaattcccacatctacccacccgcccatctgccagctgcctgcatgcctagccacagggccgtgtctcctgctgtggggcgcacactgctattggcact

SEQ ID NO: 515930 - DNA, 120 bp, Artificial Sequence
  ENSG00000164849_20 (sequence is synthesized)
cagcccgagctgcccgcccggcggcgactgcgccggccgccgcccagcaagccgcctttgatctcttccctgcccatgaagatgtacttgagtcctccattccactttaaatagccagct

SEQ ID NO: 515931 - DNA, 120 bp, Artificial Sequence
  ENSG00000164849_21 (sequence is synthesized)
cctgtccacacggaacagcacgacatcttttatcttttgctacctgcagcacctagcagaggccagcattcaataacagagggccaagaggcttgctttaaaggcctctgcaaacttgta

SEQ ID NO: 515932 - DNA, 120 bp, Artificial Sequence
  ENSG00000164849_22 (sequence is synthesized)
gatagtctaccgtcctaactggggcaccgttgagagtgaacggaggcactgttaataattagacgaagtgcacactcacagtacccatgacctgctgtgcagctccttcaagaactactg

SEQ ID NO: 515933 - DNA, 120 bp, Artificial Sequence
  ENSG00000164849_23 (sequence is synthesized)
taaggcctggctccccaaccagaacccctgttgtcttcctcaatgaagaaggcctctgaagacaagtgacttaagaacatagtttatatgtattgaatactgttgtgccttttcacagag

SEQ ID NO: 515934 - DNA, 120 bp, Artificial Sequence
  ENSG00000164849_24 (sequence is synthesized)
ccagtggcgggtgaggacccactcccgcagccggcctcctcactgctcttgcctccgggcatgggaacgatgccgtctgctcgtctgcctgagacgctttctactccactccgagagtag

SEQ ID NO: 515935 - DNA, 120 bp, Artificial Sequence
  ENSG00000164850_0 (sequence is synthesized)
ggaaaacgacacctagaagtaggagtgagattcgctgaagttcccttctgaggaagacccacccctccgcctggagagccggggctggcggtgcctgaggaccccttcggcctggacagc

SEQ ID NO: 515936 - DNA, 120 bp, Artificial Sequence
  ENSG00000164850_1 (sequence is synthesized)
ccacgcgggcttggggggcctcgctctgccctcatggggcggccatcggttcccgaagcggcgagtgaaaattcaaatggccagtagggggcgcactcggaagtggccgccccgcatgag

SEQ ID NO: 515937 - DNA, 120 bp, Artificial Sequence
  ENSG00000164850_2 (sequence is synthesized)
gcagttcagcggccccgagagtccggggagggaggtttattctccgcctgcacgagactgtgaaatccgcaaccatgagcaggagaggcggccctggtggggaagaggccaccaacatct

SEQ ID NO: 515938 - DNA, 120 bp, Artificial Sequence
  ENSG00000164850_3 (sequence is synthesized)
ggacggcaggtacccagagagtgagcagctccacgcgggactgtgcacggtggccgacacccgcagggacgcccgccggacgagcacgcggagggccctcgcctccacggatgcaccatg

SEQ ID NO: 515939 - DNA, 120 bp, Artificial Sequence
  ENSG00000164850_4 (sequence is synthesized)
ccggtgtgaggagcatctgttcttcccactctctgcagttaacaaacccaacccaaaccaccacaggtgctcctcctggggagtttcctgtctgacaaatgccaggctcacttcaaggag

SEQ ID NO: 515940 - DNA, 120 bp, Artificial Sequence
  ENSG00000164850_5 (sequence is synthesized)
aatcacgcttctttctaaagatggattcaccatttaaaacagagctctgggagcctttcggcaaatcttgaaagctgcacggtgcagagacatggatgtgacttcccaagcccggggcgt

SEQ ID NO: 515941 - DNA, 120 bp, Artificial Sequence
  ENSG00000164850_6 (sequence is synthesized)
gggcctggagatgtacccaggcaccgcgcagcctgcggcccccaacaccacctcccccgagctcaacctgtcccacccgctcctgggcaccgccctggccaatgggacaggtgagctctc

SEQ ID NO: 515942 - DNA, 120 bp, Artificial Sequence
  ENSG00000164850_7 (sequence is synthesized)
ggagcaccagcagtacgtgatcggcctgttcctctcgtgcctctacaccatcttcctcttccccatcggctttgtgggcaacatcctgatcctggtggtgaacatcagcttccgcgagaa

SEQ ID NO: 515943 - DNA, 120 bp, Artificial Sequence
  ENSG00000164850_8 (sequence is synthesized)
gatgaccatccccgacctgtacttcatcaacctggcggtggcggacctcatcctggtggccgactccctcattgaggtgttcaacctgcacgagcggtactacgacatcgccgtcctgtg

SEQ ID NO: 515944 - DNA, 120 bp, Artificial Sequence
  ENSG00000164850_9 (sequence is synthesized)
caccttcatgtcgctcttcctgcaggtcaacatgtacagcagcgtcttcttcctcacctggatgagcttcgaccgctacatcgccctggccagggccatgcgctgcagcctgttccgcac

SEQ ID NO: 515945 - DNA, 120 bp, Artificial Sequence
  ENSG00000164850_10 (sequence is synthesized)
caagcaccacgcccggctgagctgtggcctcatctggatggcatccgtgtcagccacgctggtgcccttcaccgccgtgcacctgcagcacaccgacgaggcctgcttctgtttcgcgga

SEQ ID NO: 515946 - DNA, 120 bp, Artificial Sequence
  ENSG00000164850_11 (sequence is synthesized)
gctcgaggtcacgctgggcttcatcgtgcccttcgccatcatcggcctgtgctactccctcattgtccgggtgctggtcagggcgcaccggcaccgtgggctgcggccccggcggcagaa

SEQ ID NO: 515947 - DNA, 120 bp, Artificial Sequence
  ENSG00000164850_12 (sequence is synthesized)
ggcgctccgcatgatcctcgcggtggtgctggtcttcttcgtctgctggctgccggagaacgtcttcatcagcgtgcacctcctgcagcggacgcagcctggggccgctccctgcaagca

SEQ ID NO: 515948 - DNA, 120 bp, Artificial Sequence
  ENSG00000164850_13 (sequence is synthesized)
gtctttccgccatgcccaccccctcacgggccacattgtcaacctcgccgccttctccaacagctgcctaaaccccctcatctacagctttctcggggagaccttcagggacaagctgag

SEQ ID NO: 515949 - DNA, 120 bp, Artificial Sequence
  ENSG00000164850_14 (sequence is synthesized)
gctgtacattgagcagaaaacaaatttgccggccctgaaccgcttctgtcacgctgccctgaaggccgtcattccagacagcaccgagcagtcggatgtgaggttcagcagtgccgtgta

SEQ ID NO: 515950 - DNA, 120 bp, Artificial Sequence
  ENSG00000164850_15 (sequence is synthesized)
gacagccttggccgcataggcccagccagggtgtgactcgggagctgcacacacctgggtggacacaaggcacggccacgtcatgtctctaaactgcggtcagatgtggcttctggctcc

SEQ ID NO: 515951 - DNA, 120 bp, Artificial Sequence
  ENSG00000164850_16 (sequence is synthesized)
tcggggcctcgcgagggtcacgcttgcctggtcaccctggggctgcttaggaaacctcacgactggtcaccttgcactcctcacacagaattgctacaatcccaaagcgctcgccccgca

SEQ ID NO: 515952 - DNA, 120 bp, Artificial Sequence
  ENSG00000164850_17 (sequence is synthesized)
gggtccaaaggccagcggtgaccagcctgtcacccagctcctccccgccaaccctgcctgccgctgcacctgcctgccgctgcaggaaacatttctgacaccgtcgaccaggaaagccac

SEQ ID NO: 515953 - DNA, 120 bp, Artificial Sequence
  ENSG00000164850_18 (sequence is synthesized)
acggagaggccactgtgggtgaagcgcctcagttacacaggaaccctaaagcaaatctgccaccgtgggggaactgacgctggagatgcaaggtgctggtgggtctgagctggacgtcgc

SEQ ID NO: 515954 - DNA, 120 bp, Artificial Sequence
  ENSG00000164850_19 (sequence is synthesized)
ggtgtgtcctctgtgcccacggtctgagctagctagcgcaccgccgagttaaagaggagaaggaaaacatgctgctctggtgcacgcctgagcgtcctccatcttccaggatggcagcaa

SEQ ID NO: 515955 - DNA, 120 bp, Artificial Sequence
  ENSG00000164850_20 (sequence is synthesized)
tggcgctgtgcggcctcaccaggcccacgaggagcagcagcgctcggcccggagcagcaggaaggcccctctgtggagcgcccgccgtctgctccggggtggttcagtcactgcttgttg

SEQ ID NO: 515956 - DNA, 120 bp, Artificial Sequence
  ENSG00000164850_21 (sequence is synthesized)
acatcaacatggcaattgcactcatgtggactgggaccgtgcgagctgccgtgtgggttagtcgggtgccaggacaatgaaatactccagcacctgtggctgacgaatttgtttctacag

SEQ ID NO: 515957 - DNA, 120 bp, Artificial Sequence
  ENSG00000164850_22 (sequence is synthesized)
aaataacagctggggacaactgcggtgatgatgtaaaaaccttcccataaaatgtaagaaaagctgatgaggctggtgacgttcagcctttgtcaataaacctgtcatgtgcggatcctt

SEQ ID NO: 515958 - DNA, 120 bp, Artificial Sequence
  ENSG00000164850_23 (sequence is synthesized)
actggctcagagggaggacgcacccgccagccagccgggaaccttccctcgcgggctcccagggcgggtctcttcctctctctagccctgctcaggcattcggcaggtccagcagaggta

SEQ ID NO: 515959 - DNA, 80 bp, Artificial Sequence
  ENSG00000164853_0 (sequence is synthesized)
aaagcgccggagtgcgggcgaagcatgtgtggggctccgggtccctgtctccgccgccgccgcccgcgcctcccgccgct

SEQ ID NO: 515960 - DNA, 120 bp, Artificial Sequence
  ENSG00000164853_1 (sequence is synthesized)
ccccgccggccccccgcgcgagatgatggacggccgcctcctggaacacccgcatgcccagttcgggggctcgctgggcggcgtggtgggcttcccctacccgctgggccaccaccacgt

SEQ ID NO: 515961 - DNA, 120 bp, Artificial Sequence
  ENSG00000164853_2 (sequence is synthesized)
acgtgtacgagctggccgggcaccagctgcagtcggccgccgccgccgcctcggtgcccttctccatcgacggcctgctcgggggctcgtgcgccgccgccgcctcggtggtcaacccca

SEQ ID NO: 515962 - DNA, 120 bp, Artificial Sequence
  ENSG00000164853_3 (sequence is synthesized)
cgccgctgctgccagccgcctgcggggtcggcggggacggccagcccttcaagctgtcagactcgggggacccggacaaggagagcccgggctgcaagcggcggcgcacccgcaccaact

SEQ ID NO: 515963 - DNA, 120 bp, Artificial Sequence
  ENSG00000164853_4 (sequence is synthesized)
tcaccggctggcagctggaggagctggagaaggcgttcaacgagagccactatcccgacgtgttcatgcgcgaggcgctggcgctgcgcctagacctggtcgagtcccgagttcaggtct

SEQ ID NO: 515964 - DNA, 120 bp, Artificial Sequence
  ENSG00000164853_5 (sequence is synthesized)
ggttccaaaaccgccgggccaagtggaggaagaaggagaacacgaaaaagggcccggggcggccggcgcacaactcgcacccgaccacgtgcagcggcgagcccatggacccggaggaga

SEQ ID NO: 515965 - DNA, 120 bp, Artificial Sequence
  ENSG00000164853_6 (sequence is synthesized)
tcgcgcgcaaggagctggagaagatggagaagaagaagcgcaagcacgagaagaagctgctgaagagccagggccgccacttgcactcgcccggcggcctgtccctgcacagcgcgccca

SEQ ID NO: 515966 - DNA, 80 bp, Artificial Sequence
  ENSG00000164853_7 (sequence is synthesized)
gtccctgcacagcgcgcccagctccgacagcgacagcggcggcggcggcctgtctccggagccgcccgagccgccgccgc

SEQ ID NO: 515967 - DNA, 120 bp, Artificial Sequence
  ENSG00000164853_8 (sequence is synthesized)
gcgaccccgccttctacccgagccaaagaagcggcgccggcccacagccgcgcccaggtcgccctgcggacaaggacgcggcctcgtgcgggccaggggccgctgtggcggcggtggagc

SEQ ID NO: 515968 - DNA, 120 bp, Artificial Sequence
  ENSG00000164853_9 (sequence is synthesized)
aaggccagcccattcagcgtggagagcctcctgtccgactcgccgccgcgccggaaagccgcttccaacgccgccgccgccgccgccgcggggctggacttcgcgcccgggctgccgtgc

SEQ ID NO: 515969 - DNA, 120 bp, Artificial Sequence
  ENSG00000164853_10 (sequence is synthesized)
cgcggaccctgatcggcaagggccacttcctcctctaccccatcacgcagccgctcggcttcctggtgccgcaggccgcgctcaagggcggcgcgggcctggagccggcgcccaaggacg

SEQ ID NO: 515970 - DNA, 80 bp, Artificial Sequence
  ENSG00000164853_11 (sequence is synthesized)
ggccagtttcggggccttctcggggcccggcggcgccccggactcggccttcgcgcgtcgcagccccgacgccgtcgcct

SEQ ID NO: 515971 - DNA, 80 bp, Artificial Sequence
  ENSG00000164853_12 (sequence is synthesized)
gcctttccgggacctcgcctcggcagcggctaccgagggcggcggcggggactgcgcggacgcggggaccgccggccccg

SEQ ID NO: 515972 - DNA, 80 bp, Artificial Sequence
  ENSG00000164853_13 (sequence is synthesized)
gaggagccggccacctgcggggttcccgagcctggcgcggcggccggacccagcccgccggagggcgaggagctggacat

SEQ ID NO: 515973 - DNA, 120 bp, Artificial Sequence
  ENSG00000164853_14 (sequence is synthesized)
acatggactgaggccgcggcggccgggagaggcgcgtagccggcccgcggccgctcgctcaggctccgactcacgcaacgaatcaggtgatcggctctagaaacactgctttcccttctt

SEQ ID NO: 515974 - DNA, 120 bp, Artificial Sequence
  ENSG00000164853_15 (sequence is synthesized)
tttgttttctttcttttattattttttttaagagtaaacgaaagtgctgtatgaattcggacccaggcagcaaccacaggactgggggtgagaccctcctcctcccaagagagcaaaaag

SEQ ID NO: 515975 - DNA, 120 bp, Artificial Sequence
  ENSG00000164853_16 (sequence is synthesized)
aaaggacccatggcccccaaaaaaccccacaacgagaatcctcagccttgtaaaatgcaaaaatgtctaagaatatttatatatgtaccatttttgataaataaagctggtcaaacgcaa

SEQ ID NO: 515976 - DNA, 120 bp, Artificial Sequence
  ENSG00000164855_0 (sequence is synthesized)
agttggggccacgtggccatgagaatgaccagctaggcttccctggaggccaggcctccctggactgggccaggtgcttcctgccagcaaagatgagtaatgtctcagggatcctggaga

SEQ ID NO: 515977 - DNA, 120 bp, Artificial Sequence
  ENSG00000164855_1 (sequence is synthesized)
cagccggcgtccccctggtgtcagcgaactggccgcagcccagccccccaccggctgtgccagctgggccgcagatggaccacatggggaacagctcccagggggccccctggctcttcc

SEQ ID NO: 515978 - DNA, 120 bp, Artificial Sequence
  ENSG00000164855_2 (sequence is synthesized)
tcacctccgcactggcccgaggcgtctcggggatcttcgtgtggactgccctggtgctcacctgccaccagatctatctgcacctgcgctcctacaccgtgccacaggagcaacgttaca

SEQ ID NO: 515979 - DNA, 120 bp, Artificial Sequence
  ENSG00000164855_3 (sequence is synthesized)
tcatccgcctgctcctcatcgtgcccatctacgccttcgactcctggctcagcctcctcctcctcggagaccaccagtactacgtctacttcgactctgtgcgggactgctacgaagcct

SEQ ID NO: 515980 - DNA, 120 bp, Artificial Sequence
  ENSG00000164855_4 (sequence is synthesized)
ttgtcatttacagcttcctgagcctgtgtttccagtacctgggaggcgagggcgccatcatggctgagattcgtggaaagcccatcaagtccagctgcttgtacggcacctgctgcctcc

SEQ ID NO: 515981 - DNA, 120 bp, Artificial Sequence
  ENSG00000164855_5 (sequence is synthesized)
ggggcatgacctactccatcgggttcctgcgcttctgtaagcaggccactctgcagttctgcctggtgaagcccgtcatggccgtcaccaccatcatcctccaggcatttggcaaatacc

SEQ ID NO: 515982 - DNA, 120 bp, Artificial Sequence
  ENSG00000164855_6 (sequence is synthesized)
acgacggggacttcaatgtccgcagcggctacctctatgtgaccctcatctacaacgcctccgtcagcctcgccctctacgccctgttcctcttctacttcaccaccagggagctcctgc

SEQ ID NO: 515983 - DNA, 120 bp, Artificial Sequence
  ENSG00000164855_7 (sequence is synthesized)
ggcccttccagcccgtcctcaagttcctcaccatcaaagccgtcatcttcctgtcgttctggcaagggctgctgctggccatcctggagcggtgcggggtcatcccggaggtggagacca

SEQ ID NO: 515984 - DNA, 120 bp, Artificial Sequence
  ENSG00000164855_8 (sequence is synthesized)
gcggcgggaacaagctgggggctggcacgctggccgccggctaccagaacttcatcatctgcgtggagatgctgttcgcctccgtggccctgcgttatgccttcccctgccaggtgtacg

SEQ ID NO: 515985 - DNA, 120 bp, Artificial Sequence
  ENSG00000164855_9 (sequence is synthesized)
cagagaagaaggagaattcaccagcccccccggcacccatgcagagcatctccagcggcatcagggagacagtgagcccccaggacatcgtgcaggacgccatccacaacttctcccccg

SEQ ID NO: 515986 - DNA, 120 bp, Artificial Sequence
  ENSG00000164855_10 (sequence is synthesized)
cctaccagcactacacgcagcaggccacgcacgaggcgcccaggcccggcacccaccccagcggcggctccggcgggagcaggaagagccggagcctggagaagcggatgctgatcccct

SEQ ID NO: 515987 - DNA, 120 bp, Artificial Sequence
  ENSG00000164855_11 (sequence is synthesized)
cggaggacctgtaggggggcctgggctgccagtgctgtagggacccaggctgcccaggcctctggggaagaacagggtccccccacccaccaactcctgccaaaggtggggcctctcctg

SEQ ID NO: 515988 - DNA, 120 bp, Artificial Sequence
  ENSG00000164855_12 (sequence is synthesized)
agagcccacctgtgaggccctcggagcccacttcccatcctccctccagccagggggtcagggcacctgatggccctggcaggcacccaggtgggcccgccaccgcaggagagggcacct

SEQ ID NO: 515989 - DNA, 120 bp, Artificial Sequence
  ENSG00000164855_13 (sequence is synthesized)
gagccaatcggaagagcctggggaccccctgggatcacccagccatcagccccaggagccactgtggggcggagagtgagtgtggctgcggggccttggctgcacggaccccatgggagc

SEQ ID NO: 515990 - DNA, 120 bp, Artificial Sequence
  ENSG00000164855_14 (sequence is synthesized)
tgtgagtgggtcagactccctggttcaggagacagacagcggacggatcccaggctgggcagctggagggaggggcgccggggcgctgggcagccgggctctgacacagtcagcagctcc

SEQ ID NO: 515991 - DNA, 120 bp, Artificial Sequence
  ENSG00000164855_15 (sequence is synthesized)
gggcgccgcaggccggcggggtccacacaggctggccggggctgggcctccttggagcctgctacggccctcgtgggcacgtggagaagggcccacgtgtctccacacgccagccacagg

SEQ ID NO: 515992 - DNA, 120 bp, Artificial Sequence
  ENSG00000164855_16 (sequence is synthesized)
ggagccctggccaggcgcccagccaggggagcgtgtgcctgggatgggtcacagaaccagcgggcacctgtgaggctggccagcaccgtggggctgtgggaatcgctcttatttatattt

SEQ ID NO: 515993 - DNA, 120 bp, Artificial Sequence
  ENSG00000164855_17 (sequence is synthesized)
aaacaccttggattttctaccgggtcttggcttctgttcccgcagggcatgagcctgaggagcaggacgcggtgggggtcacaggaggctgctgctcagagtctgcatgcgggaaagggg

SEQ ID NO: 515994 - DNA, 120 bp, Artificial Sequence
  ENSG00000164855_18 (sequence is synthesized)
tcccacctgtctggggtgggcagcctcgtggtccagggcagtgcagggcagagcctgggctgtgcgatcacagccactgcctttctcctgggagcctccacttcctccaaaacgggcctt

SEQ ID NO: 515995 - DNA, 120 bp, Artificial Sequence
  ENSG00000164855_19 (sequence is synthesized)
gtgccagccccacccgcggcgagcggacaaggccacgaaggcagggccctgagtacctgggcgggggggacactcccagggggcacagagggggctcccacctgggcacctgcctcctgc

SEQ ID NO: 515996 - DNA, 120 bp, Artificial Sequence
  ENSG00000164855_20 (sequence is synthesized)
ccttctcttcttcctccacgtgccaggtggggccctgggtttgaggagcctcggacgcgtgccctgcccgcaggaagctggaggcgtgcaagtggcctcggaaatcgcggccgcaagaac

SEQ ID NO: 515997 - DNA, 120 bp, Artificial Sequence
  ENSG00000164855_21 (sequence is synthesized)
agtagccgcccagggactaagggggcttctgggaggacacacggctggcccagggcgaggggtgtcactgcagggcgccccccaggcccagggcccgtcaggggacagtacggtgacccg

SEQ ID NO: 515998 - DNA, 120 bp, Artificial Sequence
  ENSG00000164855_22 (sequence is synthesized)
gcctgcaggtggcagtcagttctgtgtgtctggggcccgcagcacaggttgggtgggggctggggcaggggcagcagaagtgggcaaggcctggggggctcaggcactgggcgtggagag

SEQ ID NO: 515999 - DNA, 120 bp, Artificial Sequence
  ENSG00000164855_23 (sequence is synthesized)
cagacaggaagctccagtgggcaccaccccgggaccgcggctcccacccgtgctgccccccacccatggccacggtcaccaggaacagcgggacctggggtctccgagggactcagcagg

SEQ ID NO: 516000 - DNA, 120 bp, Artificial Sequence
  ENSG00000164855_24 (sequence is synthesized)
gcgggcacagaccagtggagtccgggctagagagggccagctcccagcctcttgcttcctgggctgaggacatggggatccaaggccagtgggtctgcagggcccagcccggctgcctga

SEQ ID NO: 516001 - DNA, 120 bp, Artificial Sequence
  ENSG00000164855_25 (sequence is synthesized)
tattggatccccacaggaatagacccaccaggcggcccccgtgtctcactctgtcagcaggtccccagggacctgctgccgaggggcagtttctggaggctgggggcactggctgggctc

SEQ ID NO: 516002 - DNA, 120 bp, Artificial Sequence
  ENSG00000164855_26 (sequence is synthesized)
taggcctgctctgcccttgccgtggggaaggccaccccgataggggtcaagttgctcaaatctgcgtttggagggtgtgtggccgagggctccctttctggagacccagacaccgcctgg

SEQ ID NO: 516003 - DNA, 120 bp, Artificial Sequence
  ENSG00000164855_27 (sequence is synthesized)
gctccgggcggcagaggctgaggtgtcaggggctgagcccctatgtcagcaacacctcaggcctgcactttaggacaggggagaagtcagtttccgccaaatgccccctcagaccagccg

SEQ ID NO: 516004 - DNA, 120 bp, Artificial Sequence
  ENSG00000164855_28 (sequence is synthesized)
aggactgtgccaggaaactgacatgctcaacgctcaagccagctgggacagcgaccgagcccagagagacggagcaagttgcctgaggtcacagagcagggacttggacaccaggcagcc

SEQ ID NO: 516005 - DNA, 120 bp, Artificial Sequence
  ENSG00000164855_29 (sequence is synthesized)
ggctccacagaggccctctctcctccctgcctcctgaccctcagacgcctccgccccacgggtgaggctgcttctgcttctttccaacacgactcgaaggaaagccctgagggccgagcc

SEQ ID NO: 516006 - DNA, 120 bp, Artificial Sequence
  ENSG00000164855_30 (sequence is synthesized)
cgctctgcgtggacggaaggcagcgtggggcggtccaggccggggctcaacctgcctcgagggggagcgtgggcgcatgtgagcgggagggacggagactagcgtggttccagtgtcgtc

SEQ ID NO: 516007 - DNA, 120 bp, Artificial Sequence
  ENSG00000164855_31 (sequence is synthesized)
atcgctgctaaaaaaggggtttcccggtgacaggccccgacagaggagcaggccatgaggcaggcaggagccgcgtatctgggcccagcgcacccgccaagctctctagcctctcctggc

SEQ ID NO: 516008 - DNA, 120 bp, Artificial Sequence
  ENSG00000164855_32 (sequence is synthesized)
ctcagtatccttctctgggagatggtccagctgaaaatccccagcatccacaagaaacggtggaagccctgggggccctggcctggcccgggtgcaggctgcatggccgggcggggcggt

SEQ ID NO: 516009 - DNA, 120 bp, Artificial Sequence
  ENSG00000164855_33 (sequence is synthesized)
gtctcctttcacagcttccccgtctgtccgcagcctccaggagccccacacagggctggggctctgtgcccccaactcacacccgtcggctcccccaggaggagcaggctgggcccagag

SEQ ID NO: 516010 - DNA, 120 bp, Artificial Sequence
  ENSG00000164855_34 (sequence is synthesized)
ccgcagggtgggctgcagggaggtctgacttagctggggaaagtgccatccctgccattgctagtgacaagctcgggctgctgtggccccagcacagattcaacactcactgcgctatgt

SEQ ID NO: 516011 - DNA, 120 bp, Artificial Sequence
  ENSG00000164855_35 (sequence is synthesized)
gccagctgttgcacactcacctccacacccaactcacaggaagcaaggctgggaaggagggaactggccccaggccacacagatgctgcgagttgggattatgatcgggtgcagtggctc

SEQ ID NO: 516012 - DNA, 63 bp, Artificial Sequence
  ENSG00000164855_36 (sequence is synthesized)
gtgatcacgcccctgcactccagcttgggtgacaaagcaagatactgtctcaaaaaactcgag

SEQ ID NO: 516013 - DNA, 120 bp, Artificial Sequence
  ENSG00000164855_37 (sequence is synthesized)
cttgggtgacaaagcaagatactgtctcaaaaaactcgagttgggatttcaccctgcgtggtccagcactgaacagcgttcacacctcggtcagctcagccccaaaaacggggaaggccg

SEQ ID NO: 516014 - DNA, 120 bp, Artificial Sequence
  ENSG00000164855_38 (sequence is synthesized)
ggcggggtggggacggcatgcgggcaggcccgtggcttttcggaggagtccacgggcttccggccactgtgcaggggcgctttgctctctgctcccagacagaccctgtcttgctcacag

SEQ ID NO: 516015 - DNA, 120 bp, Artificial Sequence
  ENSG00000164855_39 (sequence is synthesized)
cttcctgcaggctcctctgagagtccagcaaagctgggcgagatgtctcccagggaaggggaacactgacagccgtgctgctctctgctccttccactggaagggagaggctgcatggac

SEQ ID NO: 516016 - DNA, 120 bp, Artificial Sequence
  ENSG00000164855_40 (sequence is synthesized)
agggggctccgggtggggcagatggggacactcaggactgcggcctgaccctcagagactgagcccaggacgtggtcacctgaccagcacctcccccgtggctgtcccagcctcacggtc

SEQ ID NO: 516017 - DNA, 120 bp, Artificial Sequence
  ENSG00000164855_41 (sequence is synthesized)
acggcccagcagtccgggaaagccacttacacgtagtgcccggatcctgaccccggtgagggacaggcagggtcccctgggattggggggggggtgtggttcttggcccaagaaagcccc

SEQ ID NO: 516018 - DNA, 120 bp, Artificial Sequence
  ENSG00000164855_42 (sequence is synthesized)
agctgaaagcaccagctacgcaacgaaagggtctgaaaccagaaaattctttattgcaaaggtacaaaagcagtcacagcagcaggacgcacggcaataaattaggtggtggccgcaggg

SEQ ID NO: 516019 - DNA, 120 bp, Artificial Sequence
  ENSG00000164855_43 (sequence is synthesized)
acggggcagggcggcggcggccagacacgggcccacatgtgatctgttttcaataatttatatcatgataaaaagcagcacaaaaaataaataatgaaatggaactgccaagtagcacag

SEQ ID NO: 516020 - DNA, 120 bp, Artificial Sequence
  ENSG00000164855_44 (sequence is synthesized)
aagccagggtgaggcggtgtggcggcgtggcggcatagggggccggggtccccacgccctggaaacgcaaagacctggatctctttgggaagccggaggcacggagacagaaaacaaacc

SEQ ID NO: 516021 - DNA, 120 bp, Artificial Sequence
  ENSG00000164855_45 (sequence is synthesized)
cacgtgacaaagagtccctcgtctttttcttaaataaaaaaatccatatattaaatcatgacaatgaaatttcaacaatctgaaaagaaaagcagaacacaccgtgcttccccggcccag

SEQ ID NO: 516022 - DNA, 120 bp, Artificial Sequence
  ENSG00000164855_46 (sequence is synthesized)
ctctgggcggtgacagcggctccgtccaccctggggaccagggagtcccttctccagcaaagcactgcaggccaagggcaggtagaagcccacggcccacaagacgtggacaccaagaac

SEQ ID NO: 516023 - DNA, 120 bp, Artificial Sequence
  ENSG00000164855_47 (sequence is synthesized)
cccaagacgggacagaaccggccacccgctgcggcctgtcctgcggggcccagctgcctggtacagtccgtggggagatgaagggggacggcgggcagcccgggcctccgctttgctccc

SEQ ID NO: 516024 - DNA, 120 bp, Artificial Sequence
  ENSG00000164855_48 (sequence is synthesized)
aactcccacctgtgcccgtgcccccggctctgctctgatagatttacagtatcaaactggaaaagaaagattgttacgaaaaatctgtagataaactgtgaatataattttatatctcta

SEQ ID NO: 516025 - DNA, 120 bp, Artificial Sequence
  ENSG00000164855_49 (sequence is synthesized)
agcaaaggtagagctgggccctgtgaccgcagaccagagggagaggaggaggctggactgggctgcgagtgtgggagagggtggactcagggccccagcaggttagtgggagatggaaca

SEQ ID NO: 516026 - DNA, 120 bp, Artificial Sequence
  ENSG00000164855_50 (sequence is synthesized)
ggggacacctggcatgaggtgggcactgggtcccccggggcccgggagtggggcccaacgaggcggacttggcgtccagctgggctcaagtaaggtgggagctgcgggggcacctggcat

SEQ ID NO: 516027 - DNA, 120 bp, Artificial Sequence
  ENSG00000164855_51 (sequence is synthesized)
gaggtgggcactgggtcccctggggcccagcggtggggcccaacaaggcaggcctggcgtccggctgggctaggggccccgcccaagacaggtacccacttcttctccacaaggacctcg

SEQ ID NO: 516028 - DNA, 120 bp, Artificial Sequence
  ENSG00000164855_52 (sequence is synthesized)
gtgcctgccaaggccgggggcctggacctcccctcacaggacacggctggggtgagtctagcgtctgtgccagcatctgcgccgaggaccccagggcttctggccaggcagtgatggccc

SEQ ID NO: 516029 - DNA, 120 bp, Artificial Sequence
  ENSG00000164855_53 (sequence is synthesized)
aaggaggacccctgcgaaggtccacacagctcaccccttggacccctgcgaaggtccaaggtgctcaccaacaccacacagatgctcacacacggggacacatgtgctgtcacctgtgcg

SEQ ID NO: 516030 - DNA, 120 bp, Artificial Sequence
  ENSG00000164855_54 (sequence is synthesized)
cacacatcacacacgtgcatcacatgttcacacatgcacacagcacatgcgcaaaccgtgcacacaccaccacacatgtatgtacactcacatgcacgcaatatgtgcacacacacagcg

SEQ ID NO: 516031 - DNA, 120 bp, Artificial Sequence
  ENSG00000164855_55 (sequence is synthesized)
caccccacctgtgtgcacacgacatacatgcacacacacctatgtgcacacactcacacgggaacgacacctgtgtgtccaccacacagaggatcttcaggcagtggccaggtggacggg

SEQ ID NO: 516032 - DNA, 120 bp, Artificial Sequence
  ENSG00000164855_56 (sequence is synthesized)
gttgggaggtggcgttccgacagaggcagcctggatgctgcctgagcagtggacaggatcctgggacgaggaggagcagggccggtagggagaacggccacgtccctgccctacccctgc

SEQ ID NO: 516033 - DNA, 120 bp, Artificial Sequence
  ENSG00000164855_57 (sequence is synthesized)
ggcccatgctcccaagctcagggtggggaccaggctgagggtgcagcggcggtggctctagggtggggacagtggcggggtcatgggaccgccctgaccacagcccccgtctgtcctagt

SEQ ID NO: 516034 - DNA, 120 bp, Artificial Sequence
  ENSG00000164855_58 (sequence is synthesized)
aatcatctctcagggacccaggctgcccgccgctgtgaggaggcggcagcagaggccaggaggccgggggccgagcttcaggcccaccccgccttggcccccccctcaggcccagagacc

SEQ ID NO: 516035 - DNA, 120 bp, Artificial Sequence
  ENSG00000164867_0 (sequence is synthesized)
tttactgaaactaggggcaaggagacgaagagaacatgaaagttaaactttaagatgaagaacaaagctgaacatactgatgcattggatctttggagaggatctcagaactcattgtac

SEQ ID NO: 516036 - DNA, 120 bp, Artificial Sequence
  ENSG00000164867_1 (sequence is synthesized)
ttggatctttggagaggatctcagaactcattgtacttaatttacaggctaaaaccttagaagaggaatttattatatcctacacaagactccagggaagcacatggccttggactgaag

SEQ ID NO: 516037 - DNA, 120 bp, Artificial Sequence
  ENSG00000164867_2 (sequence is synthesized)
gctggcatctggaagctgtcagccaccagcaccttctgcagcaggaaaaggccagggctctgctggagcaggcagcagagtggacgcacagtaacatgggcaacttgaagagcgtggccc

SEQ ID NO: 516038 - DNA, 120 bp, Artificial Sequence
  ENSG00000164867_3 (sequence is synthesized)
caccctgcggcctggggctggggctgggccttgggctgtgcggcaagcagggcccagccaccccggcccctgagcccagccgggccccagcatccctactcccaccagcgccagaacaca

SEQ ID NO: 516039 - DNA, 120 bp, Artificial Sequence
  ENSG00000164867_4 (sequence is synthesized)
cgccagaacacagccccccgagctccccgctaacccagcccccagaggggcccaagttccctcgtgtgaagaactgggaggtggggagcatcacctatgacaccctcagcgcccaggcgc

SEQ ID NO: 516040 - DNA, 120 bp, Artificial Sequence
  ENSG00000164867_5 (sequence is synthesized)
agcaggatgggccctgcaccccaagacgctgcctgggctccctggtatttccacggaaactacagggccggccctcccccggccccccggcccctgagcagctgctgagtcaggcccggg

SEQ ID NO: 516041 - DNA, 120 bp, Artificial Sequence
  ENSG00000164867_6 (sequence is synthesized)
acttcatcaaccagtactacagctccattaagaggagcggctcccaggcccacgaacagcggcttcaagaggtggaagccgaggtggcagccacaggcacctaccagcttagggagagcg

SEQ ID NO: 516042 - DNA, 120 bp, Artificial Sequence
  ENSG00000164867_7 (sequence is synthesized)
agctggtgttcggggctaagcaggcctggcgcaacgctccccgctgcgtgggccggatccagtgggggaagctgcaggtgttcgatgcccgggactgcaggtctgcacaggaaatgttca

SEQ ID NO: 516043 - DNA, 120 bp, Artificial Sequence
  ENSG00000164867_8 (sequence is synthesized)
cctacatctgcaaccacatcaagtatgccaccaaccggggcaaccttcgctcggccatcacagtgttcccgcagcgctgccctggccgaggagacttccgaatctggaacagccagctgg

SEQ ID NO: 516044 - DNA, 120 bp, Artificial Sequence
  ENSG00000164867_9 (sequence is synthesized)
tgcgctacgcgggctaccggcagcaggatggctctgtgcggggggacccagccaacgtggagatcaccgagctctgcattcagcacggctggaccccaggaaacggtcgcttcgacgtgc

SEQ ID NO: 516045 - DNA, 120 bp, Artificial Sequence
  ENSG00000164867_10 (sequence is synthesized)
tgcccctgctgctgcaggccccagatgatcccccagaactcttccttctgccccccgagctggtccttgaggtgcccctggagcaccccacgctggagtggtttgcagccctgggcctgc

SEQ ID NO: 516046 - DNA, 120 bp, Artificial Sequence
  ENSG00000164867_11 (sequence is synthesized)
gctggtacgccctcccggcagtgtccaacatgctgctggaaattgggggcctggagttccccgcagcccccttcagtggctggtacatgagcactgagatcggcacgaggaacctgtgtg

SEQ ID NO: 516047 - DNA, 120 bp, Artificial Sequence
  ENSG00000164867_12 (sequence is synthesized)
accctcaccgctacaacatcctggaggatgtggctgtctgcatggacctggatacccggaccacctcgtccctgtggaaagacaaggcagcagtggaaatcaacgtggccgtgctgcaca

SEQ ID NO: 516048 - DNA, 120 bp, Artificial Sequence
  ENSG00000164867_13 (sequence is synthesized)
gttaccagctagccaaagtcaccatcgtggaccaccacgccgccacggcctctttcatgaagcacctggagaatgagcagaaggccagggggggctgccctgcagactgggcctggatcg

SEQ ID NO: 516049 - DNA, 120 bp, Artificial Sequence
  ENSG00000164867_14 (sequence is synthesized)
tgccccccatctcgggcagcctcactcctgttttccatcaggagatggtcaactatttcctgtccccggccttccgctaccagccagacccctggaaggggagtgccgccaagggcaccg

SEQ ID NO: 516050 - DNA, 120 bp, Artificial Sequence
  ENSG00000164867_15 (sequence is synthesized)
gcatcaccaggaagaagacctttaaagaagtggccaacgccgtgaagatctccgcctcgctcatgggcacggtgatggcgaagcgagtgaaggcgacaatcctgtatggctccgagaccg

SEQ ID NO: 516051 - DNA, 120 bp, Artificial Sequence
  ENSG00000164867_16 (sequence is synthesized)
gccgggcccagagctacgcacagcagctggggagactcttccggaaggcttttgatccccgggtcctgtgtatggatgagtatgacgtggtgtccctcgaacacgagacgctggtgctgg

SEQ ID NO: 516052 - DNA, 120 bp, Artificial Sequence
  ENSG00000164867_17 (sequence is synthesized)
tggtaaccagcacatttgggaatggggatcccccggagaatggagagagctttgcagctgccctgatggagatgtccggcccctacaacagctcccctcggccggaacagcacaagagtt

SEQ ID NO: 516053 - DNA, 120 bp, Artificial Sequence
  ENSG00000164867_18 (sequence is synthesized)
ctcttggcggcggaagaggaaggagtccagtaacacagacagtgcaggggccctgggcaccctcaggttctgtgtgttcgggctcggctcccgggcatacccccacttctgcgcctttgc

SEQ ID NO: 516054 - DNA, 120 bp, Artificial Sequence
  ENSG00000164867_19 (sequence is synthesized)
tcgtgccgtggacacacggctggaggaactgggcggggagcggctgctgcagctgggccagggcgacgagctgtgcggccaggaggaggccttccgaggctgggcccaggctgccttcca

SEQ ID NO: 516055 - DNA, 120 bp, Artificial Sequence
  ENSG00000164867_20 (sequence is synthesized)
ggccgcctgtgagaccttctgtgtgggagaggatgccaaggccgccgcccgagacatcttcagccccaaacggagctggaagcgccagaggtaccggctgagcgcccaggccgagggcct

SEQ ID NO: 516056 - DNA, 120 bp, Artificial Sequence
  ENSG00000164867_21 (sequence is synthesized)
gcagttgctgccaggtctgatccacgtgcacaggcggaagatgttccaggctacaatccgctcagtggaaaacctgcaaagcagcaagtccacgagggccaccatcctggtgcgcctgga

SEQ ID NO: 516057 - DNA, 120 bp, Artificial Sequence
  ENSG00000164867_22 (sequence is synthesized)
caccggaggccaggaggggctgcagtaccagccgggggaccacataggtgtctgcccgcccaaccggcccggccttgtggaggcgctgctgagccgcgtggaggacccgccggcgcccac

SEQ ID NO: 516058 - DNA, 120 bp, Artificial Sequence
  ENSG00000164867_23 (sequence is synthesized)
tgagcccgtggcagtagagcagctggagaagggcagccctggtggccctccccccggctgggtgcgggacccccggctgcccccgtgcacgctgcgccaggctctcaccttcttcctgga

SEQ ID NO: 516059 - DNA, 120 bp, Artificial Sequence
  ENSG00000164867_24 (sequence is synthesized)
catcacctccccacccagccctcagctcttgcggctgctcagcaccttggcagaagagcccagggaacagcaggagctggaggccctcagccaggatccccgacgctacgaggagtggaa

SEQ ID NO: 516060 - DNA, 120 bp, Artificial Sequence
  ENSG00000164867_25 (sequence is synthesized)
gtggttccgctgccccacgctgctggaggtgctggagcagttcccgtcggtggcgctgcctgccccactgctcctcacccagctgcctctgctccagccccggtactactcagtcagctc

SEQ ID NO: 516061 - DNA, 120 bp, Artificial Sequence
  ENSG00000164867_26 (sequence is synthesized)
ggcacccagcacccacccaggagagatccacctcactgtagctgtgctggcatacaggactcaggatgggctgggccccctgcactatggagtctgctccacgtggctaagccagctcaa

SEQ ID NO: 516062 - DNA, 120 bp, Artificial Sequence
  ENSG00000164867_27 (sequence is synthesized)
gcccggagaccctgtgccctgcttcatccggggggctccctccttccggctgccacccgatcccagcttgccctgcatcctggtgggtccaggcactggcattgcccccttccggggatt

SEQ ID NO: 516063 - DNA, 120 bp, Artificial Sequence
  ENSG00000164867_28 (sequence is synthesized)
ctggcaggagcggctgcatgacattgagagcaaagggctgcagcccactcccatgactttggtgttcggctgccgatgctcccaacttgaccatctctaccgcgacgaggtgcagaacgc

SEQ ID NO: 516064 - DNA, 120 bp, Artificial Sequence
  ENSG00000164867_29 (sequence is synthesized)
ccagcagcgcggggtgtttggccgagtcctcaccgccttctcccgggaacctgacaaccccaagacctacgtgcaggacatcctgaggacggagctggctgcggaggtgcaccgcgtgct

SEQ ID NO: 516065 - DNA, 120 bp, Artificial Sequence
  ENSG00000164867_30 (sequence is synthesized)
gtgcctcgagcggggccacatgtttgtctgcggcgatgttaccatggcaaccaacgtcctgcagaccgtgcagcgcatcctggcgacggagggcgacatggagctggacgaggccggcga

SEQ ID NO: 516066 - DNA, 120 bp, Artificial Sequence
  ENSG00000164867_31 (sequence is synthesized)
cgtcatcggcgtgctgcgggatcagcaacgctaccacgaagacattttcgggctcacgctgcgcacccaggaggtgacaagccgcatacgcacccagagcttttccttgcaggagcgtca

SEQ ID NO: 516067 - DNA, 120 bp, Artificial Sequence
  ENSG00000164867_32 (sequence is synthesized)
gttgcggggcgcagtgccctgggcgttcgaccctcccggctcagacaccaacagcccctgagagccgcctggctttcccttccagttccgggagagcggctgcccgactcaggtccgccc

SEQ ID NO: 516068 - DNA, 120 bp, Artificial Sequence
  ENSG00000164867_33 (sequence is synthesized)
gaccaggatcagccccgctcctcccctcttgaggtggtgccttctcacatctgtccagaggctgcaaggattcagcattattcctccaggaaggagcaaaacgcctcttttccctctcta

SEQ ID NO: 516069 - DNA, 120 bp, Artificial Sequence
  ENSG00000164867_34 (sequence is synthesized)
ggcctgttgcctcgggcctgggtccgccttaatctggaaggcccctcccagcagcggtaccccagggcctactgccacccgcttcctgtttcttagtcgaatgttagattcctcttgcct

SEQ ID NO: 516070 - DNA, 120 bp, Artificial Sequence
  ENSG00000164867_35 (sequence is synthesized)
ctctcaggagtatcttacctgtaaagtctaatctctaaatcaagtatttattattgaagatttaccataagggactgtgccagatgttaggagaactactaaagtgcctaccccagctca

SEQ ID NO: 516071 - DNA, 120 bp, Artificial Sequence
  ENSG00000164867_36 (sequence is synthesized)
ctcaacctcctagactcaagcaatcctcccacttcaacctcccaagtagttgggactacaggcgcatgccatgatgcctagctaatttttgtattttttatagagatggggtttcgccat

SEQ ID NO: 516072 - DNA, 120 bp, Artificial Sequence
  ENSG00000164867_37 (sequence is synthesized)
tgcctcggcctcccaaagtgctgcgattatagacgtgagccactgcacctggccctcagtatcttaagcaagttggaatctcgtgaaaccctttttgctgccttagtgtccgtttcagcc

SEQ ID NO: 516073 - DNA, 120 bp, Artificial Sequence
  ENSG00000164867_38 (sequence is synthesized)
gaaaccctttttgctgccttagtgtccgtttcagccctcattctgacctaccttttcaagaaaaatagcaccagcaattgacttttttttagcataaaggtgtatagacacccatataac

SEQ ID NO: 516074 - DNA, 120 bp, Artificial Sequence
  ENSG00000164867_39 (sequence is synthesized)
ctacagccttcacaaggcatagcacattttcaccaccctggaaagttccctcatcagttcctcacgtgaatcccttcccagtctgtctccctgccagaagtgtctgtcaccacagaatag

SEQ ID NO: 516075 - DNA, 120 bp, Artificial Sequence
  ENSG00000164867_40 (sequence is synthesized)
tttcgcctgctctagaacggcacctagatggaagcacgcagtgttgcggcgtctcctgctgaggctgtttttgaggcgcactcgtgttgctgcgtgactcagtatttcactcattctgct

SEQ ID NO: 516076 - DNA, 120 bp, Artificial Sequence
  ENSG00000164867_41 (sequence is synthesized)
gctgagtgccgttcattgtgtgaatatccccagtttgtttacccattctcttgttggtgacacttgggctgtttccaggtcggggctattatgaataaacctgttatgaacattcttgta

SEQ ID NO: 516077 - DNA, 120 bp, Artificial Sequence
  ENSG00000164867_42 (sequence is synthesized)
agggtgaaggattttaagagacccttccttcatgctgtgtccagaagtcttgcccgctctcgcagccaggaaccaaaagtcctggtaggactgagaacagttcctaggctgccatcagct

SEQ ID NO: 516078 - DNA, 120 bp, Artificial Sequence
  ENSG00000164867_43 (sequence is synthesized)
gggcctggtgattcaaatccacccaggtggctaaactacaaataaaccgtacccatctactgaacataaactaaataccactattaaggatacttaaaataaacacacttagtgaaccca

SEQ ID NO: 516079 - DNA, 120 bp, Artificial Sequence
  ENSG00000164867_44 (sequence is synthesized)
tacgttgcccaggctggccttgaactcctagcctcaagagatcctcctgccgcaggctcctttttcaaaagaagaaattgagcgctgtttagatgccaacatagattaaataacttcact

SEQ ID NO: 516080 - DNA, 120 bp, Artificial Sequence
  ENSG00000164867_45 (sequence is synthesized)
tgaagatagggagagaggggaggactcgcgctctccagcggggcacaccaaccacggccctcccgtggcctcccacgaccactcagccacccctgcacactctggcccacccttgtgccc

SEQ ID NO: 516081 - DNA, 120 bp, Artificial Sequence
  ENSG00000164867_46 (sequence is synthesized)
caggagagatccacctcactgtagctgtgctggcatacaggactcagggtgaggcaacaagcaggagcaggcctggccacagcagggttgggaccggcccctctctggcccctcaccggc

SEQ ID NO: 516082 - DNA, 120 bp, Artificial Sequence
  ENSG00000164871_0 (sequence is synthesized)
agcagtgggatagtagcgtgtccacattgtcctttgagaatgagaagtcatcctggagcacagctcttcccacgctccgggcccacacacccagcctcactccatcaaaggagccccgct

SEQ ID NO: 516083 - DNA, 120 bp, Artificial Sequence
  ENSG00000164871_1 (sequence is synthesized)
gcctgcccacccaccctgggtgctttctggcttgcagtgctcttggcagacatgaggcaacgattgctcccgtccgtcaccagccttctccttgtggccctgctgtttccaggatcgtct

SEQ ID NO: 516084 - DNA, 120 bp, Artificial Sequence
  ENSG00000164871_2 (sequence is synthesized)
caagccagacatgtgaaccactcagccactgaggctctcggagaactcagggaaagagcccctgggcaaggcacaaacgggtttcagctgctacgccacgcagtgaaacgggacctctta

SEQ ID NO: 516085 - DNA, 120 bp, Artificial Sequence
  ENSG00000164871_3 (sequence is synthesized)
ctgtaattatatggaaacacaagtaggctactgctctaaaaagaaagacgcctgctgtttacattaaaactgatgttgctgatatagaaacaaagctctgccacttacctgttctccggg

SEQ ID NO: 516086 - DNA, 120 bp, Artificial Sequence
  ENSG00000164871_4 (sequence is synthesized)
gccacgttgtccaatcaggtgcaggttttttgcggaagtgtctgagcagcagggagcggagatattgccacttgtgccagacagttcaaatattttattgtggcaagataaatgacaaaa

SEQ ID NO: 516087 - DNA, 120 bp, Artificial Sequence
  ENSG00000164871_5 (sequence is synthesized)
atgctacctgtgatcttacagaagatgacttagcttgacatgaacagaattttcaaaatcacacaatttgtgctagtaaatgtggatatcataaacttttattagaaagaattaaaataa

SEQ ID NO: 516088 - DNA, 120 bp, Artificial Sequence
  ENSG00000164871_6 (sequence is synthesized)
atctgcagactttttttctgccattctggtgagaaaaagcgtgacatttgctctgatccctggaataggtgttgcgtatcaaatacagatgaagaaggaaaagagaaaccagagatggat

SEQ ID NO: 516089 - DNA, 120 bp, Artificial Sequence
  ENSG00000164871_7 (sequence is synthesized)
ggcagatctgggatctaaaatataagctcccggaaggcagggatgttgaagtatcccaagggcttaaaggaatgtgtggcttatagtaggtgttcaataaatatttgttgaatgaattta

SEQ ID NO: 516090 - DNA, 120 bp, Artificial Sequence
  ENSG00000164871_8 (sequence is synthesized)
ctgcctcctgtcttctggagttgtgacctcagggtggcccaggtggatcggcttcagaggccaggaggcagctctctgcagccgaagagcaggagcctcacccagggtctgtggctctga

SEQ ID NO: 516091 - DNA, 120 bp, Artificial Sequence
  ENSG00000164871_9 (sequence is synthesized)
ctaagcctggactgcctctcggctgtgctccatggactggctccccagggatccatgtgagagaccggagtatgatcctcagtgcgaggacaaataaaagtagtgattatgtccacccca

SEQ ID NO: 516092 - DNA, 120 bp, Artificial Sequence
  ENSG00000164871_10 (sequence is synthesized)
catatttgtgctccttcacgggagggcagggaggttcaacggaccttaaaacatgaaggtcttttttctgtttgctgttctcttttgtttggtccaaacaaactcagtgcacatctctca

SEQ ID NO: 516093 - DNA, 120 bp, Artificial Sequence
  ENSG00000164871_11 (sequence is synthesized)
catatttgtgctccttcacgggagggcagggaggttcaacggaccttaaaacatgaaggtcttttttctgtttgctgttctcttttgtttggtccaaacaaactcaggggatgttccacc

SEQ ID NO: 516094 - DNA, 120 bp, Artificial Sequence
  ENSG00000164871_12 (sequence is synthesized)
ctgttgctcaggctggagtgcagtggcactgttaccgcttattgcagcctctacctcctgggctcaagtgctcctcccaccttagcctcccaaatacctgggaccaccggcatgcaccat

SEQ ID NO: 516095 - DNA, 120 bp, Artificial Sequence
  ENSG00000164871_13 (sequence is synthesized)
ccattgcacactgctagtttttttaggtgttgagccaccacttccagccccaagcttgcagctctgactacactttctccgggaagctgacactcaggcccgaatgtggctggctgccgc

SEQ ID NO: 516096 - DNA, 120 bp, Artificial Sequence
  ENSG00000164871_14 (sequence is synthesized)
gaattagaaataccatctgccatatgcagcaagggatctgcagactttttttctgccattctgggacaggccagcagcacagacaacgctgtggataaggagagtagagacttcctcttc

SEQ ID NO: 516097 - DNA, 120 bp, Artificial Sequence
  ENSG00000164877_0 (sequence is synthesized)
agtccggctcagctggggctgggcgccgtgggtctggcggttccgtagcggtcccagcgtctgtcccgccggccgggcggtcgcggcacagccgcgggaaggtgtcggagggcggttccg

SEQ ID NO: 516098 - DNA, 120 bp, Artificial Sequence
  ENSG00000164877_1 (sequence is synthesized)
ccgcgcggcgggcgcgccgcccacatggcggccatcagggcgctgcaacagtggtgccggcagcagtgcgagggctaccgcgacgtgaatatctgcaacatgaccacgtcgttccgcgac

SEQ ID NO: 516099 - DNA, 120 bp, Artificial Sequence
  ENSG00000164877_2 (sequence is synthesized)
ggcctggctttctgcgccatcctgcaccgccaccggcccgacctcataaacttcagtgctctcaagaaggaaaatatttatgaaaacaataaactggccttccgcgtggccgaggagcac

SEQ ID NO: 516100 - DNA, 120 bp, Artificial Sequence
  ENSG00000164877_3 (sequence is synthesized)
ttgggcatcccagccttgctggatgccgaggacatggtggccttgaaggtgcctgaccggctgagcatcttgacctacgtgtcccagtattacaactacttccacggccgctcccccatt

SEQ ID NO: 516101 - DNA, 120 bp, Artificial Sequence
  ENSG00000164877_4 (sequence is synthesized)
gggggcatggcaggcgtgaagagggcctcggaggactctgaggaggagccgtcagggaagaaggctccagtccaggcggccaagctgccctcgcccgccccagcccggaagcctccacta

SEQ ID NO: 516102 - DNA, 120 bp, Artificial Sequence
  ENSG00000164877_5 (sequence is synthesized)
tctccagcccagacaaaccctgtggtccagaggaggaatgagggtgcagggggcccgccccccaagactgaccaggcattggcgggcagcttggtcagcagcacctgcggggtctgcggc

SEQ ID NO: 516103 - DNA, 120 bp, Artificial Sequence
  ENSG00000164877_6 (sequence is synthesized)
aagcacgtgcacctggtacagcggcacctggccgacgggaggctttaccaccggagctgcttcaggtgtaagcagtgctcctgcacgctgcactcgggggcctacaaggccacaggagag

SEQ ID NO: 516104 - DNA, 120 bp, Artificial Sequence
  ENSG00000164877_7 (sequence is synthesized)
ccgggcaccttcgtctgcaccagccacctccccgcagccgcctctgcaagccccaagttgacgggtctggtcccccgacagccaggggccatgggtgtggattccaggacctcctgttcc

SEQ ID NO: 516105 - DNA, 120 bp, Artificial Sequence
  ENSG00000164877_8 (sequence is synthesized)
ccacagaaggcccaggaggcaaacaaggccagaccgtcggcctgggagcctgctgcgggcaactcgcctgccagggcttccgttccagctgcacccaaccctgcagccaccagcgccacg

SEQ ID NO: 516106 - DNA, 120 bp, Artificial Sequence
  ENSG00000164877_9 (sequence is synthesized)
tccgtccacgtgaggagcccagccaggccctctgagagccgcctggcccccactcccacggaggggaaagtccgccctcgtgtgaccaatagctccccgatgggctggtcgtcagctgcc

SEQ ID NO: 516107 - DNA, 120 bp, Artificial Sequence
  ENSG00000164877_10 (sequence is synthesized)
ccgtgcacagcagcggctgcctcccatcccgccgtgcccccgagtgccccagaccctcgcccggccacaccccagggtgggggagccccccgagtggcagctcctcaaaccacactcagt

SEQ ID NO: 516108 - DNA, 120 bp, Artificial Sequence
  ENSG00000164877_11 (sequence is synthesized)
tcaagctccacatctgcagccacggtggaccccccagcctggaccccgtccgcctccaggacccagcaggcccggaataagtttttccaaacatcagcagtgccccccggcaccagcctt

SEQ ID NO: 516109 - DNA, 120 bp, Artificial Sequence
  ENSG00000164877_12 (sequence is synthesized)
gaggctggcgctccggcgcctggcaggccctccccagccactgccgctgttcccagttctcagcccaaaactgaagcaccacaagcaagtcccttagccaagccgttacagtcctcgtct

SEQ ID NO: 516110 - DNA, 120 bp, Artificial Sequence
  ENSG00000164877_13 (sequence is synthesized)
ccccgggtgcttggcctcccttcgaggatggaaccgccagccccgctgagcacgagcagtacctctcaggcatccgcgttgcccccggcaggcaggaggaacttggcggaatcctcaggg

SEQ ID NO: 516111 - DNA, 120 bp, Artificial Sequence
  ENSG00000164877_14 (sequence is synthesized)
gtcggcagggtgggtgctggctccaggccgaagccagaggccccgatggcaaagggtaaaagcaccaccttaacgcaggacatgagcaccagcctccaggaaggccaggaggacgggccg

SEQ ID NO: 516112 - DNA, 120 bp, Artificial Sequence
  ENSG00000164877_15 (sequence is synthesized)
gcaggatggagagcgaatctgaagcccgtggacaggagaagcccagctgagaggactctgaagcccaaggaaccacgggccctggcagagccgagggcgggggaggcccccaggaaggtc

SEQ ID NO: 516113 - DNA, 120 bp, Artificial Sequence
  ENSG00000164877_16 (sequence is synthesized)
tcaggcagctttgctgggagtgtccacatcaccctgacccccgtgaggcctgacaggaccccacgcccagccagcccaggacccagcctcccagccaggtccccctccccaccccgccgc

SEQ ID NO: 516114 - DNA, 120 bp, Artificial Sequence
  ENSG00000164877_17 (sequence is synthesized)
aggagactggccgtccctgccagcctcgacgtttgtgacaactggcttcggccggagccccctggccaggaagcccgagtgcagagctggaaggaggaggagaagaaacctcaccttcag

SEQ ID NO: 516115 - DNA, 120 bp, Artificial Sequence
  ENSG00000164877_18 (sequence is synthesized)
ggcaaaccagggagacccttgtccccggccaatgtccctgctctgcctggcgagacggtgacctccccagtcaggctgcaccccgactacctctccccggaggagatacagaggcagctg

SEQ ID NO: 516116 - DNA, 120 bp, Artificial Sequence
  ENSG00000164877_19 (sequence is synthesized)
caggacatcgagaggcggctggacgccctggagctccgcggcgtggagctggagaagcgactgcgggcggccgagggagatgacgctgaggatagcctcatggtggactggttctggctc

SEQ ID NO: 516117 - DNA, 120 bp, Artificial Sequence
  ENSG00000164877_20 (sequence is synthesized)
attcacgagaagcagcttctgctgagacaggagtcagagctgatgtacaagtccaaggcccagcgtctggaggagcagcagctggacatcgagggcgagctgcgccggctcatggccaag

SEQ ID NO: 516118 - DNA, 120 bp, Artificial Sequence
  ENSG00000164877_21 (sequence is synthesized)
cccgaggctctgaagtcactgcaggagcggcggcgggagcaggagctgctggagcagtacgtgagcaccgtgaacgaccgcagtgacatcgtggactcgctggacgaggaccggctccgg

SEQ ID NO: 516119 - DNA, 120 bp, Artificial Sequence
  ENSG00000164877_22 (sequence is synthesized)
gaacaagaggaggatcagatgctgcgggacatgattgagaagctgggcctccagaggaagaagtccaagttccgcttgtccaagatctggtcaccaaaaagcaaaagcagcccctcccag

SEQ ID NO: 516120 - DNA, 120 bp, Artificial Sequence
  ENSG00000164877_23 (sequence is synthesized)
tagtagccagtagggccgtgggctcggcccggacctggcatccggacttggactcggggccatgggcttggcccggacccggaacccggacttgtactcggggccgtgggctcggcccgg

SEQ ID NO: 516121 - DNA, 120 bp, Artificial Sequence
  ENSG00000164877_24 (sequence is synthesized)
acccggcattcggacttggactcgggaagggcctcctgtccctacaaggggcatgtggacagcagggacctgcgctaccgtctgtggtctcaataaagaaaccgaccacatggccccgga

SEQ ID NO: 516122 - DNA, 120 bp, Artificial Sequence
  ENSG00000164877_25 (sequence is synthesized)
tgtcagggtacaggaggtgaagctggggccgtctgatgtcgtactacggtcccagcagcatcaccgtggccggagcagggccgggagccctggcctctgcccacctgtggtcctgtgcca

SEQ ID NO: 516123 - DNA, 120 bp, Artificial Sequence
  ENSG00000164877_26 (sequence is synthesized)
cctcattccttcacagccccccatcctggcctcggtttctctgtttgggcaagatgacctctgaggccctccagcccctcccttcgtggactctgagctgctttggacatcatgttttta

SEQ ID NO: 516124 - DNA, 120 bp, Artificial Sequence
  ENSG00000164877_27 (sequence is synthesized)
atctgtgtgatgcatgtgtgtgcaaccgtgttcatgtatgtggtgcatgtacccatgtgtggatctgtttcatgaatgtgatgcatgtgtgtccacgtgtgcacccgtgttcgtgtgtga

SEQ ID NO: 516125 - DNA, 120 bp, Artificial Sequence
  ENSG00000164877_28 (sequence is synthesized)
tgcgtgtgtgtgcacacacatctctgtgtgtattcctagcactcatagctgccctggatccatatccagctctcgtgccacttcctgtgtgaccttgagcagccagcagccccgtgggtt

SEQ ID NO: 516126 - DNA, 120 bp, Artificial Sequence
  ENSG00000164877_29 (sequence is synthesized)
agccccctggggagacatggccaggttgggcaggacgtgggtgtagggcttgtgatgccaaccctgtgccagtcgggaggcccagggcatggggatggccgggctacccagcgagctgtt

SEQ ID NO: 516127 - DNA, 120 bp, Artificial Sequence
  ENSG00000164877_30 (sequence is synthesized)
cagagacaccgctgctgtttggggtgtacgtgaagggagccttcctctgaggaggcaatgcctgctggggctttggaggatgcattcacaggacctagaatggagggaaagcctggagga

SEQ ID NO: 516128 - DNA, 120 bp, Artificial Sequence
  ENSG00000164877_31 (sequence is synthesized)
aggacccagccccgtgccccaggcccgccctcatgaatagagaccctagctgtttcagagtaccttgttacagactcatggtgatgatggaatgtctgcttctggcagcttgagggactg

SEQ ID NO: 516129 - DNA, 120 bp, Artificial Sequence
  ENSG00000164877_32 (sequence is synthesized)
gggtggctggggtgttgctgacctggaggagggcagggtgcagggtggggctgggcctggaggccactcaggtgtctgtggggctgggtcagggcagtccagtgggcgtgtggggcatta

SEQ ID NO: 516130 - DNA, 120 bp, Artificial Sequence
  ENSG00000164877_33 (sequence is synthesized)
gggaggcagggctggggccagctgtgctgtgctgaggtcaggctccttccaagctgtgtcctggtcacgttgggcctggtggcccaggtcccagaggctcaccctgctccttctccaggg

SEQ ID NO: 516131 - DNA, 120 bp, Artificial Sequence
  ENSG00000164877_34 (sequence is synthesized)
ggccccagccagggatgccgcggagcccaggatgtctgggggccggctctgtgaggccacctgactgtcctggtggtgagaccttccctggagccaggcgagcccacgtttgagtttcaa

SEQ ID NO: 516132 - DNA, 120 bp, Artificial Sequence
  ENSG00000164877_35 (sequence is synthesized)
atctcccacctcctggctgtgtgtcctcagccaaggtacttaaccttgctgtgcttgggtttcatcctctgcaaagtgaggatgcttgtagcacccacctcacgcagctgttgtgaggat

SEQ ID NO: 516133 - DNA, 120 bp, Artificial Sequence
  ENSG00000164877_36 (sequence is synthesized)
taaacgaatcaattcgcacaaggcatttagtgtagcagcagtcagggcgagccataggcatttgtctcgtgatgcagggtgccctggctgagggcacaggcccaggccgtctgcctctgc

SEQ ID NO: 516134 - DNA, 120 bp, Artificial Sequence
  ENSG00000164877_37 (sequence is synthesized)
cctttccttgctgtgctgcagggacagcgacgccctgagcctcagtgtccatatctctgcagcgagtggtgtttctgcgagatgatggggaaggatcccagcacacgggctctgacgtgg

SEQ ID NO: 516135 - DNA, 120 bp, Artificial Sequence
  ENSG00000164877_38 (sequence is synthesized)
ccgttccttccttcattcacttattcactcattcattctgctccggatccccccaagaccccaccttcttcctccaaaagaggagcctggcgcttgggtggtggggacattgtgtcctgt

SEQ ID NO: 516136 - DNA, 120 bp, Artificial Sequence
  ENSG00000164877_39 (sequence is synthesized)
gaggggcatggcagtggtggggggggctcctgctgacgagccatccccacagaggctctgaagtcactgcaggagcggcggcgggagcaggagctgctggagcagtacgtgagcaccgtg

SEQ ID NO: 516137 - DNA, 120 bp, Artificial Sequence
  ENSG00000164877_40 (sequence is synthesized)
aacgaccgcagtgacatcgtggactcgctggacgaggaccggctccggtgtttccccccgggccggcctgccgtgacgatcacagccctgccgtctcaggtcacggttttggattctgcg

SEQ ID NO: 516138 - DNA, 120 bp, Artificial Sequence
  ENSG00000164877_41 (sequence is synthesized)
ctaacgaggtctcccaggtgggctggaaacactgatgaagacggatagaaaaaacaccagcccaccggattattaataaagataatcacacacaccccttcgtcggcagccggcctgaca

SEQ ID NO: 516139 - DNA, 120 bp, Artificial Sequence
  ENSG00000164877_42 (sequence is synthesized)
ctttataaagcacgttaggatataatccaattgaaactgcaatatcgagaacatctcatcttatcacaaattgaaattatatcacattcctcttttcttaaattaaaaagctaaaacctt

SEQ ID NO: 516140 - DNA, 120 bp, Artificial Sequence
  ENSG00000164877_43 (sequence is synthesized)
agaagcccagctgagaggttagggatgggtggggctggcccagggcctggtacaccataggtgcttaataaatgcagtgagtatgtaatcgaccgattgacacgcctatccagggataga

SEQ ID NO: 516141 - DNA, 120 bp, Artificial Sequence
  ENSG00000164877_44 (sequence is synthesized)
cgcacctccctgtgagtagcagaggccaggtcacccctgcctgagggacatgggggccgctgtccctggtttgggggcagcgttgcgtgtctcacctgggcatggcagcacccgtgtggg

SEQ ID NO: 516142 - DNA, 120 bp, Artificial Sequence
  ENSG00000164877_45 (sequence is synthesized)
ccccatgtgtgggtcccgtggggcccggagctcacgcctggaatctgcttcgcaccacggcaggtagcgatggacacgtgtgtttgcaggagggtcccagcaggtgtagtcagtgggctg

SEQ ID NO: 516143 - DNA, 120 bp, Artificial Sequence
  ENSG00000164877_46 (sequence is synthesized)
ggaggtggcatttgctcagaaggccacctgctccctccggctggtctgcatatggcctgggagcccctccaggtgggccaggccctggggctggtggttcgggttccgacctcatgcctt

SEQ ID NO: 516144 - DNA, 120 bp, Artificial Sequence
  ENSG00000164877_47 (sequence is synthesized)
agtcctgttttatggcctcacgtgttttcgggaacagggagcgagctttcttctaggcaactggctgtcacccaccaggggttagccccctgggtgatcatggccaggctgggcaggacg

SEQ ID NO: 516145 - DNA, 120 bp, Artificial Sequence
  ENSG00000164877_48 (sequence is synthesized)
tgggcttagggcttgtgaggccaaccctgtgccagctgggaggcccagggcactgggatggccaggctacgcagtgagctgtcagctgtgccaggacagaccccaggctcctggcggccc

SEQ ID NO: 516146 - DNA, 120 bp, Artificial Sequence
  ENSG00000164877_49 (sequence is synthesized)
tgctttgatgcacggctctgtctcccaacctgggggcagccgagtccccccgcctcgccccactgcaggaaactggctgtccctgccacctgggtgtgtgtagaaaaaagctagaggttc

SEQ ID NO: 516147 - DNA, 120 bp, Artificial Sequence
  ENSG00000164877_50 (sequence is synthesized)
ccatggctttatcgagctgggctcagggaacaagctgggctgcaaagggtttttccagatccttctctttggctgagttctcattgttaaagccacgcgctggatcctgcaggacccagg

SEQ ID NO: 516148 - DNA, 120 bp, Artificial Sequence
  ENSG00000164877_51 (sequence is synthesized)
agccaagaaagcctgcagacgggcagccgtggctcaggtgttccccttgcacaggtggacagaggatcagggtccacggggctcaccctgccacgtccccacccattcggcagaagggga

SEQ ID NO: 516149 - DNA, 120 bp, Artificial Sequence
  ENSG00000164877_52 (sequence is synthesized)
agttgaggcccagaggcagggagagcttcccccagggacacacagcacaggagagccagctgggagcccctcccctgactccctgcccggtgctcctgatgccccccggccggctggctg

SEQ ID NO: 516150 - DNA, 120 bp, Artificial Sequence
  ENSG00000164877_53 (sequence is synthesized)
tgggggtgtctgagggtggagtggctatgggaagatggcagggggaggcacagccacccttgcagacaccccattcccagcactccttcctcacacccagaccccttgcctcccacccag

SEQ ID NO: 516151 - DNA, 120 bp, Artificial Sequence
  ENSG00000164877_54 (sequence is synthesized)
cgggcacagggcctgccctgcctgctggagaaacagaaaagtcccttttccctgactccagctggggctctgagtggggagggaaggagtggggaccgacccggggctgtgccagaaaaa

SEQ ID NO: 516152 - DNA, 120 bp, Artificial Sequence
  ENSG00000164877_55 (sequence is synthesized)
gtgccctcagggttacctctccccagccctgggcccccaggtcccccccgggcaccaaggcctgtgctgggcactgggacctctggagggactagaccctttcagagccaggcctgggac

SEQ ID NO: 516153 - DNA, 120 bp, Artificial Sequence
  ENSG00000164877_56 (sequence is synthesized)
actctcccctggccgcactctgcagtgtgtgcggtttcatcatcagccccgcccgccttcctctccgtctcatctctgtcctccgtgacacctgctcgcagcctcctggggtcctggtgc

SEQ ID NO: 516154 - DNA, 120 bp, Artificial Sequence
  ENSG00000164877_57 (sequence is synthesized)
gctctctgtgtggtggctgcaaatgtcctcagggctatgctgtttgccggcacccagcccaccccatccgcacgtcctgcaggtgcctgcagcccagccctgcagcgtcccgctcagctc

SEQ ID NO: 516155 - DNA, 120 bp, Artificial Sequence
  ENSG00000164877_58 (sequence is synthesized)
ggtctggcagttacatcctgtggctagcagtggcctggcttggccgtggtctgtggggcctcctgttctcccgtggtgttttgcgcttcctgcctgtcgctttgacaacgtcgcgctgtt

SEQ ID NO: 516156 - DNA, 120 bp, Artificial Sequence
  ENSG00000164877_59 (sequence is synthesized)
gctgtggcaccctgtgtcaccacataccggagatggtgccctatgccccgtcccccctgtggtgtcccggtgacggtgccctatgccccgtcccctccgctggtgtcccagtatgccctg

SEQ ID NO: 516157 - DNA, 120 bp, Artificial Sequence
  ENSG00000164877_60 (sequence is synthesized)
tccccctggtggtgtccaggtgagagcgccctgtgctccgtcccccccggtggtggtctggtgacgatgccctatgacctgagggctctggtgcctcctaggctgggagctcttcctggg

SEQ ID NO: 516158 - DNA, 120 bp, Artificial Sequence
  ENSG00000164877_61 (sequence is synthesized)
atgattgagaagctgggtgactgggccggggatgctgagggctgggctggctggctgggtgggccggggatgctgagtgctgggctggctggctgggtggaccgggcctccagctggggg

SEQ ID NO: 516159 - DNA, 120 bp, Artificial Sequence
  ENSG00000164877_62 (sequence is synthesized)
tggggggggggcgggtatcgggtccccccctcagccttggtgacaggacaggcaggttcaccctgagggtgagagctccctcccgcccctaagagagccaggggcagctggtgaccgtgt

SEQ ID NO: 516160 - DNA, 120 bp, Artificial Sequence
  ENSG00000164877_63 (sequence is synthesized)
ggtcatggtggggaccagccctccggggcacccagtcggggcaggttctcacgtgggagggcacagggcttcctgcaggctcggaggcccagggcggattgtggccagtggaagggaagg

SEQ ID NO: 516161 - DNA, 120 bp, Artificial Sequence
  ENSG00000164877_64 (sequence is synthesized)
atgtttctggcagggggacttgtgtgggccacggctgtgcggctgcggcgttgagcacggcctcactgtccacctgtcccctaggcctccagaggaagaagtccaagttccgcttgtcca

SEQ ID NO: 516162 - DNA, 120 bp, Artificial Sequence
  ENSG00000164877_65 (sequence is synthesized)
ggtctcaggcagctttgctgggagtgtccacatcaccctgacccccgtgaggcctgacaggaccccacgcccagccagcccaggacccagcctcccagccaggggcagctggtgaccgtg

SEQ ID NO: 516163 - DNA, 120 bp, Artificial Sequence
  ENSG00000164877_66 (sequence is synthesized)
ttgggtgggggccccgggactggacctgtagtgccacctcctggggtgtgcggagaggcgctccggtcagccagagaagctggtagtcctgggcaggcttgtgtgtacatgtgtgcatgt

SEQ ID NO: 516164 - DNA, 120 bp, Artificial Sequence
  ENSG00000164877_67 (sequence is synthesized)
gtgtgatgcatgtgtgcatgtgttcatgtatgtgatgcctgtatccatgcgtgatgcatgtgtgcgcatgtgtacatctgtgttcatgtgtgtgatgcatgtgcacgtgatgcatgtcca

SEQ ID NO: 516165 - DNA, 120 bp, Artificial Sequence
  ENSG00000164877_68 (sequence is synthesized)
tgtgtctgttcatgtatgtgatgtgtgatgcatgtgtattcatgtgtacatcagtgttcatgcgtgtgatgcatgtgtacatgtgtgatgcgtgtccatgtgtctgtgttcgtgtatgtg

SEQ ID NO: 516166 - DNA, 120 bp, Artificial Sequence
  ENSG00000164879_0 (sequence is synthesized)
ccacgcaggggaagagaaagcaggagccgtccagcacggaggaaggcgaccatggccaaggagtggggctacgccagtcacaacggtcctgaccactggcatgaacttttcccaaatgcc

SEQ ID NO: 516167 - DNA, 120 bp, Artificial Sequence
  ENSG00000164879_1 (sequence is synthesized)
aagggggaaaaccagtcgcccgttgagctgcatactaaagacatcaggcatgacccttctctgcagccatggtctgtgtcttatgatggtggctctgccaagaccatcctgaataatggg

SEQ ID NO: 516168 - DNA, 120 bp, Artificial Sequence
  ENSG00000164879_2 (sequence is synthesized)
aagacctgccgagttgtatttgatgatacttatgataggtcaatgctgagagggggtcctctccctggaccctaccgacttcgccagtttcatcttcactggggctcttcggatgatcat

SEQ ID NO: 516169 - DNA, 120 bp, Artificial Sequence
  ENSG00000164879_3 (sequence is synthesized)
ggctctgagcacaccgtggatggagtcaagtatgcagcggagcttcatttggttcactggaacccgaagtataacacttttaaagaagccctgaagcagcgcgatgggatcgctgtgatt

SEQ ID NO: 516170 - DNA, 120 bp, Artificial Sequence
  ENSG00000164879_4 (sequence is synthesized)
ggcatttttctgaagataggacatgagaatggcgagttccagattttccttgatgcattggacaagattaagacaaagggcaaggaggcgcccttcacaaagtttgacccatcctgcctg

SEQ ID NO: 516171 - DNA, 120 bp, Artificial Sequence
  ENSG00000164879_5 (sequence is synthesized)
ttcccggcatgccgggactactggacctaccagggctcattcaccacgccgccctgcgaggaatgcattgtgtggctgctgctgaaggagcccatgaccgtgagctctgaccagatggcc

SEQ ID NO: 516172 - DNA, 120 bp, Artificial Sequence
  ENSG00000164879_6 (sequence is synthesized)
aagctgcggagcctcctctccagtgctgagaacgagcccccagtgcctcttgtgagcaactggcgacctccacagcctatcaataacagggtggtgagagcttccttcaaatgaggctgc

SEQ ID NO: 516173 - DNA, 120 bp, Artificial Sequence
  ENSG00000164879_7 (sequence is synthesized)
agcttggttccttgcctccttctggtgctccttactccaagtctatttcatttttccacactgagcaatgaatgtgagagatgtggtcaccaagatctaagttacttgttgaaagaaagt

SEQ ID NO: 516174 - DNA, 120 bp, Artificial Sequence
  ENSG00000164879_8 (sequence is synthesized)
tactttcgacaagatctaatatgaaagcatagatttcacatttgatctctgtaataatcatctttcctataaaagtagcatttttggtaaagtttcaaagaagaagaaacagagatggaa

SEQ ID NO: 516175 - DNA, 120 bp, Artificial Sequence
  ENSG00000164879_9 (sequence is synthesized)
gagtaaagatatttttaaaatggctagctattgggcaccagtttttctgttatctaaaatttcacacaacttcattgtttttatttttatattatgagttgtccatcttaaagaaatatg

SEQ ID NO: 516176 - DNA, 120 bp, Artificial Sequence
  ENSG00000164879_10 (sequence is synthesized)
agtaattctacatgtagtagaggtgtatgaagatcatataacaattaaacataagccagaaattaaaatgactatagacagcaagaattgagctaataatatgttttaactcttaacacc

SEQ ID NO: 516177 - DNA, 120 bp, Artificial Sequence
  ENSG00000164879_11 (sequence is synthesized)
agcaagaagtcagtcatttattgaagttttagctactaagattacttggttttgattaccagtgaaaagaaaacacaatacaatcaggagttttcaaatttttgattcagtatttgaatt

SEQ ID NO: 516178 - DNA, 120 bp, Artificial Sequence
  ENSG00000164879_12 (sequence is synthesized)
tcttcttcataaatgtagttgaatttatcctagtatttttctttacctgaaggagggccatttatttttaatttcactacatttttctttgcatgattattaaaataaaaactgcctctg

SEQ ID NO: 516179 - DNA, 120 bp, Artificial Sequence
  ENSG00000164879_13 (sequence is synthesized)
ttgtgtttctcactggaggctggaatgaatgatcactagaacacaaaagagtgaatgatgacacttgaagtcaaagcagttgtactgatcaccagaaccaataaagacataaatggaaaa

SEQ ID NO: 516180 - DNA, 120 bp, Artificial Sequence
  ENSG00000164879_14 (sequence is synthesized)
agaggcatcacagcatctcccatgacaagaaaggaatgtggatacggagagacttggcaaccaccggcaggcacagcagcaccagctaaattgcagctcaccaacaggcagcagttacat

SEQ ID NO: 516181 - DNA, 120 bp, Artificial Sequence
  ENSG00000164879_15 (sequence is synthesized)
ccctagttgtgctggtgtgggtctggagccaatgagtaagccaagagcagaccctcacaccctgcaccctgccccacaaggagctacccaagagtccacaatcatggccacaccttcctg

SEQ ID NO: 516182 - DNA, 120 bp, Artificial Sequence
  ENSG00000164879_16 (sequence is synthesized)
aagaggaactgccataatccattctcggtctcatacagtgaaaactgcaaaattaaaaataagaaccacagcaacaaagcatcatccactgcttttgtttcaagtctatagttatgaaaa

SEQ ID NO: 516183 - DNA, 120 bp, Artificial Sequence
  ENSG00000164879_17 (sequence is synthesized)
gagctgtactagttttagctgaactgaagctgctgaacattctaggctagacaggtaaaagggtataggtgagttggcatcaaacatgaagatttccaaggttatgttaagaaactgggg

SEQ ID NO: 516184 - DNA, 120 bp, Artificial Sequence
  ENSG00000164880_0 (sequence is synthesized)
gagatcggtttccgattccggggtggccgggtggcggcggcggcgctccggtcgcgatgggccagaggtgacgccgcagccgccgggagccgcgagggacggggcaggatgaaccgggcc

SEQ ID NO: 516185 - DNA, 120 bp, Artificial Sequence
  ENSG00000164880_1 (sequence is synthesized)
aagcccaccacggtgcgccggcccagcgccgcggccaaaccctcagggcaccctcccccaggagacttcattgctctgggctcaaagggtcaggccaatgaatcgaaaacggcgtccacc

SEQ ID NO: 516186 - DNA, 120 bp, Artificial Sequence
  ENSG00000164880_2 (sequence is synthesized)
ctgctgaagccagccccttccggcctgccttctgagcgcaagcgggatgcggcggccgcgttgtccagtgcctcggccctcaccggtctcaccaaacgccccaaactctcctccacaccc

SEQ ID NO: 516187 - DNA, 120 bp, Artificial Sequence
  ENSG00000164880_3 (sequence is synthesized)
cctctgagtgccctggggcgcctggctgaggctgcagtggcagaaaaacgagccatttctccgtcgattaaagagccatctgtggtgccaattgaagtgctgcccacggtgctgctggat

SEQ ID NO: 516188 - DNA, 120 bp, Artificial Sequence
  ENSG00000164880_4 (sequence is synthesized)
gagatcgaggcggccgagctggagggcaacgatgacaggatcgagggcgtgctgtgcggggccgtgaagcagctgaaggtcacccgcgccaagcctgacagcaccctctacctgagcctc

SEQ ID NO: 516189 - DNA, 120 bp, Artificial Sequence
  ENSG00000164880_5 (sequence is synthesized)
atgtacctggccaagatcaagcccaacatcttcgccactgagggcgtcattgaggctctgtgtagcctcctgcggcgggacgcctccatcaacttcaaggccaaggggaacagcctggtg

SEQ ID NO: 516190 - DNA, 120 bp, Artificial Sequence
  ENSG00000164880_6 (sequence is synthesized)
tctgtgctggcctgtaacctcctcatggccgcctacgaggaggacgagaactggcccgagatctttgtcaaggtgtacatcgaggactccctgggggagcggatctgggtggacagccct

SEQ ID NO: 516191 - DNA, 120 bp, Artificial Sequence
  ENSG00000164880_7 (sequence is synthesized)
cactgtaagacgtttgtggacaacatccagacggccttcaacaccagaatgccccccaggagcgtgctgctgcagggggaggcgggccgcgttgcgggcgacctgggtgcagggagcagc

SEQ ID NO: 516192 - DNA, 120 bp, Artificial Sequence
  ENSG00000164880_8 (sequence is synthesized)
ccacacccctccctcacggaggaggaggacagccagacggagttgctgatcgcggaggagaagctgagccccgagcaggagggccagctcatgcccaggtacgaagagctcgcggagagc

SEQ ID NO: 516193 - DNA, 120 bp, Artificial Sequence
  ENSG00000164880_9 (sequence is synthesized)
gtggaggagtatgtcctggacatgctgcgggaccagctgaaccggcgccagcccatcgacaacgtctccaggaacctcctgcggctcctcacctccacctgcggctataaggaggtgcgg

SEQ ID NO: 516194 - DNA, 120 bp, Artificial Sequence
  ENSG00000164880_10 (sequence is synthesized)
ctgctggcggtgcagaagctggagatgtggctgcagaaccccaagctgacccggccggcccaggacctgctgatgtccgtctgcatgaactgcaacacgcacggttccgaagacatggac

SEQ ID NO: 516195 - DNA, 120 bp, Artificial Sequence
  ENSG00000164880_11 (sequence is synthesized)
gtcatctcacacctgatcaagatccgcctcaagcccaaggtcctcctcaaccacttcatgctgtgcatcagggagctgctgagcgcgcacaaggacaacctgggcaccaccatcaagttg

SEQ ID NO: 516196 - DNA, 120 bp, Artificial Sequence
  ENSG00000164880_12 (sequence is synthesized)
gtgatcttcaatgagctctccagcgcccggaacccgaacaacatgcaggtcctctataccgcactgcagcacagctcagagctggcgcccaagttcctggccatggtgttccaggacctg

SEQ ID NO: 516197 - DNA, 120 bp, Artificial Sequence
  ENSG00000164880_13 (sequence is synthesized)
ctgaccaacaaggacgactacctgcgggcctcgcgggccctgctgcgggagatcatcaagcagaccaagcacgagatcaacttccaggccttctgcctggggctcatgcaggagcgcaag

SEQ ID NO: 516198 - DNA, 120 bp, Artificial Sequence
  ENSG00000164880_14 (sequence is synthesized)
gagccgcagtacctggagatggagttcaaggagcgcttcgtggtgcacatcaccgacgtcctggccgtgtccatgatgctgggcatcacagcgcaggtgaaggaggccggcatcgcctgg

SEQ ID NO: 516199 - DNA, 120 bp, Artificial Sequence
  ENSG00000164880_15 (sequence is synthesized)
gacaaaggagaaaagaggaacctggaagtgctccgctcattccagaaccagattgccgccatccagcgggatgccgtctggtggctccacactgtggtcccctccatcagcaagctcgcc

SEQ ID NO: 516200 - DNA, 120 bp, Artificial Sequence
  ENSG00000164880_16 (sequence is synthesized)
cctaaggactacgtgcactgcctgcacaaggtgctgttcacagagcagccggagacctactacaagtgggacaactggccacccgagagtgaccgcaacttcttcctgcgtctgtgctcc

SEQ ID NO: 516201 - DNA, 120 bp, Artificial Sequence
  ENSG00000164880_17 (sequence is synthesized)
gaggtgcccattttggaggacacgctgatgcgcatcctggtcatcgggctgtcccgggagctcccgctcgggcctgcggacgccatggagcttgctgaccacctggtgaagcgggcggct

SEQ ID NO: 516202 - DNA, 120 bp, Artificial Sequence
  ENSG00000164880_18 (sequence is synthesized)
gccgtgcaggcggatgatgtggaggtgctgaaggtggggaggacccagctgatcgacgccgttctgaatctgtgcacctaccatcaccctgaaaacatccagctcccaccggggtaccag

SEQ ID NO: 516203 - DNA, 120 bp, Artificial Sequence
  ENSG00000164880_19 (sequence is synthesized)
cctccgaacctcgccatctctaccctctactggaaggcctggcccctcctgctggtcgtcgccgcattcaacccagagaacatcggcctggctgcgtgggaggagtacccgaccctgaag

SEQ ID NO: 516204 - DNA, 120 bp, Artificial Sequence
  ENSG00000164880_20 (sequence is synthesized)
atgctcatggagatggtgatgaccaacaactactcctacccaccgtgcaccctgacggatgaggagacccggacggagatgctgaaccgtgagctgcagaccgcccagcgggagaagcag

SEQ ID NO: 516205 - DNA, 120 bp, Artificial Sequence
  ENSG00000164880_21 (sequence is synthesized)
gagatcctggccttcgaggggcacctggcggccgcgtccaccaagcagaccatcactgagagcagcagcctcctcctgtcgcagctcaccagcctggacccccaggggcccccccggagg

SEQ ID NO: 516206 - DNA, 120 bp, Artificial Sequence
  ENSG00000164880_22 (sequence is synthesized)
cctccccctcacatcctggatcaagtgaaaagcctcaaccagtccctccgcctcgggcacctcttgtgccgcagccgaaaccctgactttctcctccacatcatccagcggcaggcctcc

SEQ ID NO: 516207 - DNA, 120 bp, Artificial Sequence
  ENSG00000164880_23 (sequence is synthesized)
tcgcagtccatgccctggctggcggacctggtacagtccagcgagggctccctggacgtgctgcccgtgcagtgtctgtgcgagttcctgctgcacgatgctgtggacgatgctgcttcc

SEQ ID NO: 516208 - DNA, 120 bp, Artificial Sequence
  ENSG00000164880_24 (sequence is synthesized)
ggggaggaggacgacgagggcgagagcaaggagcagaaggccaagaagcggcagaggcaacagaagcagcggcagctgctgggccgcctgcaggacctgctactgggcccgaaggctgat

SEQ ID NO: 516209 - DNA, 120 bp, Artificial Sequence
  ENSG00000164880_25 (sequence is synthesized)
gagcagaccacgtgtgaggtgctggactacttcttgcggcgcctcggctcctcccaggtggcctcccgcgtgctggccatgaagggtttgtcgctggtgctttcggagggcagcctgcgg

SEQ ID NO: 516210 - DNA, 120 bp, Artificial Sequence
  ENSG00000164880_26 (sequence is synthesized)
gacggggaggagaaggagccccccatggaggaggatgtgggggacacagatgtgctgcagggctatcagtggctgctgcgggacctgcctcgcctgcctctgttcgacagcgtcaggagc

SEQ ID NO: 516211 - DNA, 120 bp, Artificial Sequence
  ENSG00000164880_27 (sequence is synthesized)
accacagccctggccctgcagcaggcaatccacatggagactgatccccagaccatcagcgcctacctgatctacttgtcccagcacacgcctgtggaggagcaggcccagcacagcgac

SEQ ID NO: 516212 - DNA, 120 bp, Artificial Sequence
  ENSG00000164880_28 (sequence is synthesized)
ctggccctggacgtggcccggctggtcgtggagcgctccaccatcatgtcccacctcttctcgaagctctccccgagtgccgcgtcggacgccgtgctgagcgctctgttgtccatcttc

SEQ ID NO: 516213 - DNA, 120 bp, Artificial Sequence
  ENSG00000164880_29 (sequence is synthesized)
cggcagagcaaggagggcgaggaggtctacagctggtcggagtctcaggaccaggtcttcctacgctggagcagcggggagacagccaccatgcacatcctcgtggtccatgccatggtg

SEQ ID NO: 516214 - DNA, 120 bp, Artificial Sequence
  ENSG00000164880_30 (sequence is synthesized)
atcctgctgacgctgggcccgcctcgagccgacgacagcgagttccaggcgctgctggacatctggtttccggaggagaagccactgcccaccgccttcctggtggacacatcggaggag

SEQ ID NO: 516215 - DNA, 120 bp, Artificial Sequence
  ENSG00000164880_31 (sequence is synthesized)
gcgctgctgcttcctgactggctgaagctgcgcatgatccgttctgaggtgctccgcctggtggacgccgccctgcaggacctggagccgcagcagctgctgctgttcgtgcagtcgttt

SEQ ID NO: 516216 - DNA, 120 bp, Artificial Sequence
  ENSG00000164880_32 (sequence is synthesized)
ggcatccccgtgtccagcatgagcaaactcctccagttcctggaccaggcagtggcccacgacccccagactctggagcagaacatcatggacaagaattacatggcccacctggtggag

SEQ ID NO: 516217 - DNA, 120 bp, Artificial Sequence
  ENSG00000164880_33 (sequence is synthesized)
gtccagcatgagcgcggcgcctccggaggccagactttccactccttgctcacagcctccctgccgccccgccgagacagcacagaggcacccaaaccaaagagcagcccagagcagccc

SEQ ID NO: 516218 - DNA, 120 bp, Artificial Sequence
  ENSG00000164880_34 (sequence is synthesized)
ataggccagggccggattcgggtggggacccagctccgggtgctgggccctgaggacgacctggctggcatgttcctccagattttcccgctcagcccggaccctcggtggcagagctcc

SEQ ID NO: 516219 - DNA, 120 bp, Artificial Sequence
  ENSG00000164880_35 (sequence is synthesized)
ctccagtccccgccccgtggccctcgccctgcagcaggccctgggccaggagctggcccgcgtcgtccagggcagccccgaggtgccgggcatcacggtgcgtgtcctgcaggccctcgc

SEQ ID NO: 516220 - DNA, 120 bp, Artificial Sequence
  ENSG00000164880_36 (sequence is synthesized)
ctgctcagctccccacacggcggtgccctggtgatgtccatgcaccgtagccacttcctggcctgcccgctgctgcgccagctctgccagtaccagcgctgtgtgccacaggacaccggc

SEQ ID NO: 516221 - DNA, 120 bp, Artificial Sequence
  ENSG00000164880_37 (sequence is synthesized)
ttctcctcgctcttcctgaaggtgctcctgcagatgctgcagtggctggacagccctggcgtggagggcgggcccctgcgggcacagctcaggatgcttgccagccaggcctcagccggg

SEQ ID NO: 516222 - DNA, 120 bp, Artificial Sequence
  ENSG00000164880_38 (sequence is synthesized)
cgcaggctcagtgatgtgcgaggggggctcctgcgcctggccgaggccctggccttccgtcaggacctggaggtggtcagctccaccgtccgtgccgtcatcgccaccctgaggtctggg

SEQ ID NO: 516223 - DNA, 120 bp, Artificial Sequence
  ENSG00000164880_39 (sequence is synthesized)
gagcagtgcagcgtggagccggacctgatcagcaaagtcctccaggggctgatcgaggtgaggtccccccacctggaggagctgctgactgcattcttctctgccactgcggatgctgcc

SEQ ID NO: 516224 - DNA, 120 bp, Artificial Sequence
  ENSG00000164880_40 (sequence is synthesized)
tccccgtttccagcctgtaagcccgttgtggtggtgagctccctgctgctgcaggaggaggagcccctggctggggggaagccgggtgcggacggtggcagcctggaggccgtgcggctg

SEQ ID NO: 516225 - DNA, 120 bp, Artificial Sequence
  ENSG00000164880_41 (sequence is synthesized)
gggccctcgtcaggcctcctagtggactggctggaaatgctggaccccgaggtggtcagcagctgccccgacctgcagctcaggctgctcttctcccggaggaagggcaaaggtcaggcc

SEQ ID NO: 516226 - DNA, 120 bp, Artificial Sequence
  ENSG00000164880_42 (sequence is synthesized)
caggtgccctcgttccgtccctacctcctgaccctcttcacgcatcagtccagctggcccacactgcaccagtgcatccgagtcctgctgggcaagagccgggaacagaggttcgacccc

SEQ ID NO: 516227 - DNA, 120 bp, Artificial Sequence
  ENSG00000164880_43 (sequence is synthesized)
tctgcctctctggacttcctctgggcctgcatccatgttcctcgcatctggcaggggcgggaccagcgcaccccgcagaagcggcgggaggagctggtgctgcgggtccagggcccggag

SEQ ID NO: 516228 - DNA, 120 bp, Artificial Sequence
  ENSG00000164880_44 (sequence is synthesized)
ctcatcagcctggtggagctgatcctggccgaggcggagacgcggagccaggacggggacacagccgcctgcagcctcatccaggcccggctgcccctgctgctcagctgctgctgtggg

SEQ ID NO: 516229 - DNA, 120 bp, Artificial Sequence
  ENSG00000164880_45 (sequence is synthesized)
gacgatgagagtgtcaggaaggtgacggagcacctgtcaggctgcatccagcagtggggagacagcgtgctgggcaggcgctgccgagaccttctcctgcagctctacctacagcggccg

SEQ ID NO: 516230 - DNA, 120 bp, Artificial Sequence
  ENSG00000164880_46 (sequence is synthesized)
gagctgcgggtgcccgtgcctgaggtcctactgcacagcgaaggggctgccagcagcagcgtctgcaagctggacggactcatccaccgcttcatcacgctccttgcggacaccagcgac

SEQ ID NO: 516231 - DNA, 120 bp, Artificial Sequence
  ENSG00000164880_47 (sequence is synthesized)
tcccgggcgttggagaaccgaggggcggatgccagcatggcctgccggaagctggcggtggcgcacccgctgctgctgctcaggcacctgcccatgatcgcggcgctcctgcacggccgc

SEQ ID NO: 516232 - DNA, 120 bp, Artificial Sequence
  ENSG00000164880_48 (sequence is synthesized)
acccacctcaacttccaggagttccggcagcagaaccacctgagctgcttcctgcacgtgctgggcctgctggagctgctgcagccgcacgtgttccgcagcgagcaccagggggcgctg

SEQ ID NO: 516233 - DNA, 120 bp, Artificial Sequence
  ENSG00000164880_49 (sequence is synthesized)
tgggactgccttctgtccttcatccgcctgctgctgaattacaggaagtcctcccgccatctggctgccttcatcaacaagtttgtgcagttcatccataagtacattacctacaatgcc

SEQ ID NO: 516234 - DNA, 120 bp, Artificial Sequence
  ENSG00000164880_50 (sequence is synthesized)
ccagcagccatctccttcctgcagaagcacgccgacccgctccacgacctgtccttcgacaacagtgacctggtgatgctgaaatccctccttgcagggctcagcctgcccagcagggac

SEQ ID NO: 516235 - DNA, 120 bp, Artificial Sequence
  ENSG00000164880_51 (sequence is synthesized)
gacaggaccgaccgaggcctggacgaagagggcgaggaggagagctcagccggctccttgcccctggtcagcgtctccctgttcacccctctgaccgcggccgagatggccccctacatg

SEQ ID NO: 516236 - DNA, 120 bp, Artificial Sequence
  ENSG00000164880_52 (sequence is synthesized)
aaacggctttcccggggccaaacggtggaggatctgctggaggttctgagtgacatagacgagatgtcccggcggagacccgagatcctgagcttcttctcgaccaacctgcagcggctg

SEQ ID NO: 516237 - DNA, 120 bp, Artificial Sequence
  ENSG00000164880_53 (sequence is synthesized)
atgagctcggccgaggagtgttgccgcaacctcgccttcagcctggccctgcgctccatgcagaacagccccagcattgcagccgctttcctgcccacgttcatgtactgcctgggcagc

SEQ ID NO: 516238 - DNA, 120 bp, Artificial Sequence
  ENSG00000164880_54 (sequence is synthesized)
caggactttgaggtggtgcagacggccctccggaacctgcctgagtacgctctcctgtgccaagagcacgcggctgtgctgctccaccgggccttcctggtgggcatgtacggccagatg

SEQ ID NO: 516239 - DNA, 120 bp, Artificial Sequence
  ENSG00000164880_55 (sequence is synthesized)
gaccccagcgcgcagatctccgaggccctgaggatcctgcatatggaggccgtgatgtgagcctgtggcagccgacccccctccaagccccggcccgtcccgtccccggggatcctcgag

SEQ ID NO: 516240 - DNA, 120 bp, Artificial Sequence
  ENSG00000164880_56 (sequence is synthesized)
gcaaagcccaggaagcgtgggcgttgctggtctgtccgaggaggtgagggcgccgagccctgaggccaggcaggcccaggagcaatactccgagccctggggtggctccgggccggccgc

SEQ ID NO: 516241 - DNA, 120 bp, Artificial Sequence
  ENSG00000164880_57 (sequence is synthesized)
tggcatcaggggccgtccagcaagccctcattcaccttctgggccacagccctgccgcggagcggcggatccccccgggcatggcctgggctggttttgaatgaaacgacctgaactgtc

SEQ ID NO: 516242 - DNA, 120 bp, Artificial Sequence
  ENSG00000164880_58 (sequence is synthesized)
cagcctcccccggacccccgccttccagttgcttccagggcgtccacgggcacgccacccttcacgcagtctcagatgcaccgtctgcccctgcttctgtccagacagccgcacactgtc

SEQ ID NO: 516243 - DNA, 120 bp, Artificial Sequence
  ENSG00000164880_59 (sequence is synthesized)
gtggtgggattacaggtgctagccactgcacctggccgtttgtggatatttaaaaacacagtcctaaaaaactgttgggacagagaagaatcagaatgaaaatgagaaaacctccgatcc

SEQ ID NO: 516244 - DNA, 120 bp, Artificial Sequence
  ENSG00000164880_60 (sequence is synthesized)
ctttccagtgctttctgtcctgtggtgctcggggccttgccccctctgggtggctggggtggggtgggcagaggtctgcctgggcccttcagttctggtctggccctctctctgtgtcag

SEQ ID NO: 516245 - DNA, 120 bp, Artificial Sequence
  ENSG00000164880_61 (sequence is synthesized)
ccatcacgcctggtcccgtccacccacccctgtcactggggccccgtccgcctggtgagccctgctccacctcttccagcgtgctgggcaggcgctgccgagaccttctcctgcagctct

SEQ ID NO: 516246 - DNA, 120 bp, Artificial Sequence
  ENSG00000164880_62 (sequence is synthesized)
gggcagcttcgtgccaggtgggccacagccctgaccacacccagcggcttccgcatccttgccttgcttctgggcgggaagccccccagcccttcaaccctgtgtcctggcttctctcct

SEQ ID NO: 516247 - DNA, 120 bp, Artificial Sequence
  ENSG00000164880_63 (sequence is synthesized)
aaagaggaggctgcagtccgtcccgcgtgtctctgagcacttggtggacgtgtgggagatccccacgtggtgggacctcccagcctgtagagccctgagctggagggcctggtacagcct

SEQ ID NO: 516248 - DNA, 120 bp, Artificial Sequence
  ENSG00000164880_64 (sequence is synthesized)
ggggtcagagtcctcactgccccagcctaaccgtgtaggcctgcggtgcctgggaggcggcaaactcgggatttcaccgtgtggaggtgcgacatgaggctgccaggcaagtgggtcctc

SEQ ID NO: 516249 - DNA, 120 bp, Artificial Sequence
  ENSG00000164880_65 (sequence is synthesized)
tccccggggcccaggcgagtgaccctgaggacgctctggccagcgcagtgtctggaacccagcgcctacccagccgtgccctctgcggccgcagccttcccctttactcctggctgacac

SEQ ID NO: 516250 - DNA, 120 bp, Artificial Sequence
  ENSG00000164880_66 (sequence is synthesized)
catgaactgctcccacgttcaccccgttgtgtctgtcagtgggggaagggggcggaaccctcatgctggggttcgggtggacgtgggtgggtggtgacccctgttgggaggcagacacag

SEQ ID NO: 516251 - DNA, 120 bp, Artificial Sequence
  ENSG00000164880_67 (sequence is synthesized)
tcacaggcgtcgcccttgggaagggcagccggagaagctggccctgtgtgggcctgggcctgtggggtttcccagtggctttgcggagccagagagctggatgggacctggtccagccaa

SEQ ID NO: 516252 - DNA, 120 bp, Artificial Sequence
  ENSG00000164880_68 (sequence is synthesized)
gcaaagccccgagggcaggggctggatggggacacgcacatgtccccttggccacgacaaaatggcagtgatgctgcttgccttcctgcagcatctgtgaggatcaaatgcgtgcaccta

SEQ ID NO: 516253 - DNA, 120 bp, Artificial Sequence
  ENSG00000164880_69 (sequence is synthesized)
cgcaaagcatccgcacatagcaagtgctcacctagcacaggagccccgtgctcctcccaagtctcagtttccttctcgggagaggaggtgcctctagccttggcaccagcggtgcttggg

SEQ ID NO: 516254 - DNA, 120 bp, Artificial Sequence
  ENSG00000164880_70 (sequence is synthesized)
gctgctgactcaggggtcccgggccccttgcctgctccttgtgggcctgggcagcctccggctgtggcagaggagaagactggccgggtagcctcaggggatcctgcagaccatatgtcc

SEQ ID NO: 516255 - DNA, 120 bp, Artificial Sequence
  ENSG00000164880_71 (sequence is synthesized)
tggccacagcaggctgtgctggaccctgggaggagacctagggcagcctgtgctggccccgtccgagagggtcttactgtcaggctcaggggtctagagtgagaaacaggtcctcgatgg

SEQ ID NO: 516256 - DNA, 120 bp, Artificial Sequence
  ENSG00000164885_0 (sequence is synthesized)
gccagagtcttaaaaccgagggcccgcaggggtccccgcggccgccgcgatgcagaaatacgagaaactggaaaagattggggaaggcacctacggaactgtgttcaaggccaaaaaccg

SEQ ID NO: 516257 - DNA, 120 bp, Artificial Sequence
  ENSG00000164885_1 (sequence is synthesized)
ggagactcatgagatcgtggctctgaaacgggtgaggctggatgacgatgatgagggtgtgccgagttccgccctccgggagatctgcctactcaaggagctgaagcacaagaacatcgt

SEQ ID NO: 516258 - DNA, 120 bp, Artificial Sequence
  ENSG00000164885_2 (sequence is synthesized)
caggcttcatgacgtcctgcacagcgacaagaagctgactttggtttttgaattctgtgaccaggacctgaagaagtattttgacagttgcaatggtgacctcgatcctgagattgtaaa

SEQ ID NO: 516259 - DNA, 120 bp, Artificial Sequence
  ENSG00000164885_3 (sequence is synthesized)
gtcattcctcttccagctactaaaagggctgggattctgtcatagccgcaatgtgctacacagggacctgaagccccagaacctgctaataaacaggaatggggagctgaaattggctga

SEQ ID NO: 516260 - DNA, 120 bp, Artificial Sequence
  ENSG00000164885_4 (sequence is synthesized)
ctcagctgaggtggtcacactgtggtaccgcccaccggatgtcctctttggggccaagctgtactccacgtccatcgacatgtggtcagccggctgcatctttgcagagctggccaatgc

SEQ ID NO: 516261 - DNA, 120 bp, Artificial Sequence
  ENSG00000164885_5 (sequence is synthesized)
tgggcggcctctttttcccggcaatgatgtcgatgaccagttgaagaggatcttccgactgctggggacgcccaccgaggagcagtggccctctatgaccaagctgccagactataagcc

SEQ ID NO: 516262 - DNA, 120 bp, Artificial Sequence
  ENSG00000164885_6 (sequence is synthesized)
ctatccgatgtacccggccacaacatccctggtgaacgtcgtgcccaaactcaatgccacagggagggatctgctgcagaaccttctgaagtgtaaccctgtccagcgtatctcagcaga

SEQ ID NO: 516263 - DNA, 120 bp, Artificial Sequence
  ENSG00000164885_7 (sequence is synthesized)
agaggccctgcagcacccctacttctccgacttctgtccgccctaggccccgggacccccggcctccaggctggggcctggcctatttaagccccctcttgagaggggtgagacagtggg

SEQ ID NO: 516264 - DNA, 120 bp, Artificial Sequence
  ENSG00000164885_8 (sequence is synthesized)
ggtgcctggtgcgctgtgctccagcagtgctgggcccagccggggtggggtgcctgagcccgaatttctcactccctttgtggactttatttaatttcataaattggctcctttcccaca

SEQ ID NO: 516265 - DNA, 120 bp, Artificial Sequence
  ENSG00000164885_9 (sequence is synthesized)
ttatttacactcgagagatgagaaaatgaggttcaaggagatacactcattcattcaacacatacttactgaatgcttcactgtgtgccaggtgcttttctaggcccaagaccaaatgcc

SEQ ID NO: 516266 - DNA, 120 bp, Artificial Sequence
  ENSG00000164885_10 (sequence is synthesized)
ttggtccaggttccaggggagccagtcctgaatgatactacagcacgatatttatgttgatgttcacggcgtgcatactcagatgcggccaggaagggaagatcagcatgggctgggatc

SEQ ID NO: 516267 - DNA, 120 bp, Artificial Sequence
  ENSG00000164885_11 (sequence is synthesized)
taggccggatctaggatccacctgccaaggcccattaggctgtatggtccaggaaggtggggaccagagccagcttctttactttggtccctctaatgcctagcacagtataaagcaggt

SEQ ID NO: 516268 - DNA, 120 bp, Artificial Sequence
  ENSG00000164885_12 (sequence is synthesized)
tggcgaatgaatggtgtcactctgaaccaggtgctgaaaggtgggtggggtggagcgaagcacagggtgaggagaggagccgacccgttgctgggcacagttgcatgttcagggcgtctg

SEQ ID NO: 516269 - DNA, 120 bp, Artificial Sequence
  ENSG00000164885_13 (sequence is synthesized)
ggctcccttaccgtcagcaatgcctacaggctccgatctcagcagcggctgcagccctggccccctagctcagcactccgtgcagacaccagtcttccccgtgttagcatttcccgcagg

SEQ ID NO: 516270 - DNA, 120 bp, Artificial Sequence
  ENSG00000164885_14 (sequence is synthesized)
gctctcactccaaccttagcgttcccagtagacccgacctcccaaccgcgacacttcctgaaatttctcaccccagcctcagcagcacttggacaacctcaccccgacccccagcctcgt

SEQ ID NO: 516271 - DNA, 120 bp, Artificial Sequence
  ENSG00000164885_15 (sequence is synthesized)
ttcttgctgcagacctccaacctcaatatttctgcagcccctcagtcctctcccagacccctcctcactatttccagacccttccggagcaccgccttcattttagacatccttgccctg

SEQ ID NO: 516272 - DNA, 120 bp, Artificial Sequence
  ENSG00000164885_16 (sequence is synthesized)
ttgccctaggcttcatgacgtcctgcacagcgacaagaagctgactttggtttttgaattctgtgaccaggtgaaaggcggggtttggaggacagtagccttgggaaggtataggggccc

SEQ ID NO: 516273 - DNA, 120 bp, Artificial Sequence
  ENSG00000164885_17 (sequence is synthesized)
agattgaggttaaactctgtcccattcccccactcatatcccttttcaggacctgaagaagtattttgacagttgcaatggtgacctcgatcctgagattgtaaaggtgaggagagtggt

SEQ ID NO: 516274 - DNA, 120 bp, Artificial Sequence
  ENSG00000164889_0 (sequence is synthesized)
cctgcccgcggcgcgggggaaagttgagttgggagaagttgggagcggcgggggcgcgccccggggtgggcacggggcagtcgtcgggagcgcgcgagtgcgccggaggacggggagaga

SEQ ID NO: 516275 - DNA, 120 bp, Artificial Sequence
  ENSG00000164889_1 (sequence is synthesized)
ggaggacggggagagaccccgagacccccggggcacgaagtccagagcgagcgggttatgcctccgcctcgttgccctgaaagccgcagcgacagcgaaaagggctaagattcggccatg

SEQ ID NO: 516276 - DNA, 120 bp, Artificial Sequence
  ENSG00000164889_2 (sequence is synthesized)
agcagcgcccctcggcgccccgccaagggcgcagattctttctgtacgccagagccagagagcttgggccctgggacgcctgggttccccgagcaggaggaagacgaacttcaccgcacc

SEQ ID NO: 516277 - DNA, 120 bp, Artificial Sequence
  ENSG00000164889_3 (sequence is synthesized)
ctgggcgtggagcggtttgaggagatcctacaggaggccgggtctcgtggaggggaggagccaggccgcagctatggggaggaagactttgagtaccaccgccagtcctcccaccacatc

SEQ ID NO: 516278 - DNA, 120 bp, Artificial Sequence
  ENSG00000164889_4 (sequence is synthesized)
catcacccactgtccacccacctgcctccggatgcacgccgccgcaagacaccccagggcccaggacggaagcctcgaaggcgcccgggagcctccccgactggagaaaccccgaccatt

SEQ ID NO: 516279 - DNA, 120 bp, Artificial Sequence
  ENSG00000164889_5 (sequence is synthesized)
gaggagggggaggaagatgaggatgaggccagcgaggctgagggggcccgggctctcactcagccgtcccctgtctccacaccctcctcggtgcagttctttctccaagaggatgacagt

SEQ ID NO: 516280 - DNA, 120 bp, Artificial Sequence
  ENSG00000164889_6 (sequence is synthesized)
gctgaccggaaggcagagaggaccagtccatcttcccctgcaccactgccccaccaggaggcgactcctcgggcctccaaaggggcccaggctggaacccaggtggaggaggcggaggcg

SEQ ID NO: 516281 - DNA, 120 bp, Artificial Sequence
  ENSG00000164889_7 (sequence is synthesized)
gaggcggtggcggtggccagtggcactgcagggggtgacgacgggggtgcctcggggcgccccctgcccaaagcccagcctgggcaccgcagctacaaccttcaggagaggaggcgcatc

SEQ ID NO: 516282 - DNA, 120 bp, Artificial Sequence
  ENSG00000164889_8 (sequence is synthesized)
gggagcatgactggggctgagcaggcactgctgccccgggtccccacggatgagattgaggcccagacgctggccacggccgacctagacctcatgaagagtcaccggtttgaggacgtt

SEQ ID NO: 516283 - DNA, 120 bp, Artificial Sequence
  ENSG00000164889_9 (sequence is synthesized)
cctggggtgcggcggcacttggtgcggaagaatgccaaaggttccacacagagtggccgagaagggcgggagcctggccccacacctcgggcccgaccccgggccccccacaagccccat

SEQ ID NO: 516284 - DNA, 120 bp, Artificial Sequence
  ENSG00000164889_10 (sequence is synthesized)
gaggtgtttgtggagctgaatgagttgctcctggacaaaaaccaggagccccagtggcgggagacagctcgctggatcaaatttgaagaggacgtggaggaggagactgagcgctggggg

SEQ ID NO: 516285 - DNA, 120 bp, Artificial Sequence
  ENSG00000164889_11 (sequence is synthesized)
aagccccacgtggcctccctctccttccgcagtctcctggagctccgcaggaccctggcccatggggctgtgctcttggatctggaccagcagaccctgcccggagtggcccaccaggtg

SEQ ID NO: 516286 - DNA, 120 bp, Artificial Sequence
  ENSG00000164889_12 (sequence is synthesized)
gtggagcagatggtcatctctgaccagatcaaggccgaggacagggccaacgtgctgcgggctctgctgttgaaacacagccacccaagtgatgagaaggacttctccttcccccgcaac

SEQ ID NO: 516287 - DNA, 120 bp, Artificial Sequence
  ENSG00000164889_13 (sequence is synthesized)
atctcagctggctccctgggctccctgctggggcatcaccatggtcagggggctgagagtgacccccacgtcaccgagcctctcatgggaggtgttcctgagacccggctggaggtggag

SEQ ID NO: 516288 - DNA, 120 bp, Artificial Sequence
  ENSG00000164889_14 (sequence is synthesized)
cgagagcgtgagctgccgcctccagcaccaccagctggcatcacccgctccaagtccaagcacgagctgaaactgctggagaagattcctgagaatgccgaggccacggtggtccttgtg

SEQ ID NO: 516289 - DNA, 120 bp, Artificial Sequence
  ENSG00000164889_15 (sequence is synthesized)
ggctgcgtggagttcctctcccgccccaccatggcctttgtgcggctccgggaggctgtggagttggacgcagtgttggaggtgccggtgcctgtgcgtttcctcttcctgctgctgggc

SEQ ID NO: 516290 - DNA, 120 bp, Artificial Sequence
  ENSG00000164889_16 (sequence is synthesized)
ccgagtagtgccaacatggactaccacgagatcggccgctccatctccaccctcatgtcagacaagcaattccacgaggcagcctacctggctgacgagcgggaggacctgctgacggcc

SEQ ID NO: 516291 - DNA, 120 bp, Artificial Sequence
  ENSG00000164889_17 (sequence is synthesized)
tcagaagtgcagggcgaggagctgctgcgctctgtggcccacttccagcgccagatgctcaagaagcgagaggagcagggccggctgctacctacaggggctgggctggagcccaaatct

SEQ ID NO: 516292 - DNA, 120 bp, Artificial Sequence
  ENSG00000164889_18 (sequence is synthesized)
gcccaagataaggcgctcctgcagatggtagaggcggcaggggcagctgaagatgatccccttcggcggacggggcggccctttggggggctgatccgagatgtgcggcgccgctatccc

SEQ ID NO: 516293 - DNA, 120 bp, Artificial Sequence
  ENSG00000164889_19 (sequence is synthesized)
cactacctgagtgacttccgagatgcacttgaccctcagtgcctggccgcagtcatcttcatctactttgccgccctgtctcctgccatcacctttggggggctgctgggagagaagacg

SEQ ID NO: 516294 - DNA, 120 bp, Artificial Sequence
  ENSG00000164889_20 (sequence is synthesized)
caggacctgataggggtgtcggagctgattatgtccacagcgctccagggcgtggtcttctgcctgctgggtgcccagcccctgttggtgatcggcttctcagggcccctgctggtcttt

SEQ ID NO: 516295 - DNA, 120 bp, Artificial Sequence
  ENSG00000164889_21 (sequence is synthesized)
gaggaggccttcttctcgttctgtagcagcaaccacctggagtacctggtgggccgtgtgtggatcggcttctggctggtgttcctggccctgctcatggtggccctggaggggagcttc

SEQ ID NO: 516296 - DNA, 120 bp, Artificial Sequence
  ENSG00000164889_22 (sequence is synthesized)
ctggtccgcttcgtctcccgcttcacccaggagatcttcgccttcttgatctcactcatcttcatctatgagaccttctacaagctggtgaagatcttccaggagcaccccctgcatggc

SEQ ID NO: 516297 - DNA, 120 bp, Artificial Sequence
  ENSG00000164889_23 (sequence is synthesized)
tgctcagcctccaacagctcagaggtggacggcggtgagaacatgacatgggccggggcaagacccacgctggggccgggcaacaggagcttggctgggcagtctgggcaggggaagccc

SEQ ID NO: 516298 - DNA, 120 bp, Artificial Sequence
  ENSG00000164889_24 (sequence is synthesized)
cggggccagcccaacacggccctgctgtcgctggtgctcatggccggcaccttcttcatcgccttcttcctgcgcaaattcaagaacagccggttctttcctggccggatccggcgggtg

SEQ ID NO: 516299 - DNA, 120 bp, Artificial Sequence
  ENSG00000164889_25 (sequence is synthesized)
attggggactttggggtgcccatcgccatcctcatcatggtgcttgtggattacagtattgaggacacctatacccagaagctgagcgttcccagtggattctcggtgactgccccagaa

SEQ ID NO: 516300 - DNA, 120 bp, Artificial Sequence
  ENSG00000164889_26 (sequence is synthesized)
aagaggggctgggtcatcaaccccctgggagagaagagccccttccctgtgtggatgatggttgccagcctgctgcccgccatcctggtcttcattctcatcttcatggagacacagatc

SEQ ID NO: 516301 - DNA, 120 bp, Artificial Sequence
  ENSG00000164889_27 (sequence is synthesized)
accacgctcatcatctccaagaaggagcgcatgctgcagaagggctccggcttccacctggacctgctgctcatcgtggccatgggcggcatctgtgccctctttggcctgccctggttg

SEQ ID NO: 516302 - DNA, 120 bp, Artificial Sequence
  ENSG00000164889_28 (sequence is synthesized)
gctgctgccactgtccgctctgtcactcacgccaacgcgctcactgtcatgagcaaggctgtggcacctggggacaagcccaagattcaggaagtcaaggagcagcgggtgacggggctg

SEQ ID NO: 516303 - DNA, 120 bp, Artificial Sequence
  ENSG00000164889_29 (sequence is synthesized)
ctggttgccctgcttgtgggcctctccatagttatcggggatctgctccggcagatccccctggccgtgctctttggaattttcctgtacatgggagtcacctcccttaacgggatccag

SEQ ID NO: 516304 - DNA, 120 bp, Artificial Sequence
  ENSG00000164889_30 (sequence is synthesized)
ttctatgagcggctgcatctgctgctcatgccgcccaaacaccacccagatgtcacttacgtcaagaaggtccggaccctccgtatgcacctgttcacggccctgcagctgctctgcctg

SEQ ID NO: 516305 - DNA, 120 bp, Artificial Sequence
  ENSG00000164889_31 (sequence is synthesized)
gccctgctctgggccgtcatgtccacagctgcctccctggccttccccttcatcctcatcctcacagtgccgctccgcatggtggtgctcacccgtatcttcaccgaccgagagatgaaa

SEQ ID NO: 516306 - DNA, 120 bp, Artificial Sequence
  ENSG00000164889_32 (sequence is synthesized)
tgtctggatgctaacgaggcagagccggtgtttgatgagcgggagggtgtggacgagtacaatgagatgcccatgcctgtgtagccgccaccgagggacagccgagggaccgatggacga

SEQ ID NO: 516307 - DNA, 120 bp, Artificial Sequence
  ENSG00000164889_33 (sequence is synthesized)
ggggacaggctggtgggatggggttccccctcccatgcccctccctcctttttatttaagtgaataatttaaagtcttctcctcccccactgcccctgcagtaaagtgctttggccccca

SEQ ID NO: 516308 - DNA, 120 bp, Artificial Sequence
  ENSG00000164889_34 (sequence is synthesized)
cccagccctcttgaaaagggccgctccgggactacgcgttccagaatgcagcggaaatgggggcggagcgctctcggttaggggtttggggtttggcggcctagatcccgggcactggcg

SEQ ID NO: 516309 - DNA, 120 bp, Artificial Sequence
  ENSG00000164889_35 (sequence is synthesized)
gcccagcgctgacctggttggtggcattgtgttcccaacggcctcttgacgacctcagcacgggtttccacctctccccaagccacctagtgaccccagaattgactggggaatgcctgt

SEQ ID NO: 516310 - DNA, 120 bp, Artificial Sequence
  ENSG00000164889_36 (sequence is synthesized)
gagcgatgatgacctcacagggaacagctgaccgcagggctgggagaacagctgtgccccttcgaggctggattttagtggagggacacacgccaaagaccccctctctgctgagccccg

SEQ ID NO: 516311 - DNA, 120 bp, Artificial Sequence
  ENSG00000164889_37 (sequence is synthesized)
tttgttgtctcggagcccacccgactctagccgctgaactctgacatgctgaggaaaactgggtggagccctgggggtccccctcagaccccagtctccggaacagggcccactggagtc

SEQ ID NO: 516312 - DNA, 120 bp, Artificial Sequence
  ENSG00000164889_38 (sequence is synthesized)
agccagggtgtggcaggcaggttggttaaccccctccacagacaagaccacagaccgatgctcaacttgcagcagcctctgcctcaccccttaaaggagctgattatagattcccttacg

SEQ ID NO: 516313 - DNA, 120 bp, Artificial Sequence
  ENSG00000164889_39 (sequence is synthesized)
ctgcctctctaattgtctcatgattgcattcttgagggctatggaccgagggaaaaggatcccaaacagcactcctcagcaccggaaccagagttgctgctaaacacgtgttaattaact

SEQ ID NO: 516314 - DNA, 120 bp, Artificial Sequence
  ENSG00000164889_40 (sequence is synthesized)
cgtttctatctgaatgcttttgcatacacaagggaaaagaagcaaaaagtgtattccttatctggaagactttgtgatttcgttgggcaaaaaagaactacacacaaaggtcttgaatga

SEQ ID NO: 516315 - DNA, 120 bp, Artificial Sequence
  ENSG00000164889_41 (sequence is synthesized)
taagtgatggctctgcctagggttcggttcagtgtggaggttccattcaagaggaaggaggccagcacagcgaatctctgtccctctctggaagtggagagcctctaacaagttaccctc

SEQ ID NO: 516316 - DNA, 120 bp, Artificial Sequence
  ENSG00000164889_42 (sequence is synthesized)
gctattggtcacactggcccagaggggcacgtgactgggaaggggcacaggctggtcccctccccctccttctcaggttcacccctgccggccatggacttcctcctgcggcctcagcca

SEQ ID NO: 516317 - DNA, 120 bp, Artificial Sequence
  ENSG00000164889_43 (sequence is synthesized)
ccggccatggacttcctcctgcggcctcaggtgcgaggggtctgcgaccctctctccccatggcggcaagctccctgcgcctctccccgtcccctcgtcccacggggctgcttctggtgg

SEQ ID NO: 516318 - DNA, 120 bp, Artificial Sequence
  ENSG00000164889_44 (sequence is synthesized)
gagtggggctgggcgcttaggggagccaggagatggacaggagccttcctcacagaggggagaagccagccccctggcccgctcaccttctcttatccggtgttctgccagtcccagctg

SEQ ID NO: 516319 - DNA, 120 bp, Artificial Sequence
  ENSG00000164889_45 (sequence is synthesized)
ctccagtccccacctcgcccctaagacccgcccttcaccccagccctccccgcgctcttccttgttctggctgctggcaccgctatggagggggctgcatacccccgcccttggagatcc

SEQ ID NO: 516320 - DNA, 120 bp, Artificial Sequence
  ENSG00000164889_46 (sequence is synthesized)
cgatgcccttcaggtccagaagctcttgagcaaatatttggcggcgcctggagctgagaccgtgggtgggtggggggctggaccaaggctgcctggccaggcggctgccgcttagctggg

SEQ ID NO: 516321 - DNA, 120 bp, Artificial Sequence
  ENSG00000164889_47 (sequence is synthesized)
ctgagctcttacaagcgccgcattccctgccggctgtgccggccggccgctgctccgcgcccgcaggatgactcagccagagccagagagcttgggccctgggacgcctgggttccccga

SEQ ID NO: 516322 - DNA, 120 bp, Artificial Sequence
  ENSG00000164889_48 (sequence is synthesized)
tttggggtgcccatcgccatcctcatcatggtgcttgtggattacagtattgaggacacctatacccaggtaaggtgctgcccacagcaggcaagtgctgctgcctctgccaccccgggt

SEQ ID NO: 516323 - DNA, 120 bp, Artificial Sequence
  ENSG00000164889_49 (sequence is synthesized)
ctaggtgttcccctccagcctccaaacccagcctgtccttaagcttaagcctgtccttaagatgccatcccctttccatggcatgccctccacattcaccttaacccttgtccctacact

SEQ ID NO: 516324 - DNA, 120 bp, Artificial Sequence
  ENSG00000164889_50 (sequence is synthesized)
attatcactccctccctcatctttgttgctttctctccgggcctgggccttgactcctttctccctcatttttcttgcggcctttcccacctcctctctcctcctccctctactcagcct

SEQ ID NO: 516325 - DNA, 120 bp, Artificial Sequence
  ENSG00000164889_51 (sequence is synthesized)
ctcggcccttttcggcccccctcgcctcagtcctctcctgtctccttgttcttctcttttcttcctataaataactctcctctgtgctgtggctgccgctaagggccactctgaggccct

SEQ ID NO: 516326 - DNA, 120 bp, Artificial Sequence
  ENSG00000164889_52 (sequence is synthesized)
ggaggatccccagcagcgcagcctgcgcgtggtggctcctgccctcccagggctctcgatggtgatcaggcctctcccccatccaggttatgcctccgcctcgttgccctgaaagccgca

SEQ ID NO: 516327 - DNA, 120 bp, Artificial Sequence
  ENSG00000164889_53 (sequence is synthesized)
aagccaggaaatgcctcctgagagaggtgaaggcagcgtctcagtatgcaagggaagggattcagggtgaaggttatgcctccgcctcgttgccctgaaagccgcagcgacagcgaaaag

SEQ ID NO: 516328 - DNA, 120 bp, Artificial Sequence
  ENSG00000164889_54 (sequence is synthesized)
taggccagtcttgatccccatgactgcctcccacccactggccttgcccaccctcagctccaggccctcagccctcttctttgtgctctcccccatccccatgctgctttggcagcaatt

SEQ ID NO: 516329 - DNA, 120 bp, Artificial Sequence
  ENSG00000164889_55 (sequence is synthesized)
agaccacccctcccctccggcccccccgcatagtccttcagtcccgtccggggcgcccagactgggggttgcccggggcccccatccccaatctccgggttgagaggcgaagccaggaaa

SEQ ID NO: 516330 - DNA, 120 bp, Artificial Sequence
  ENSG00000164889_56 (sequence is synthesized)
cttctgtgccttcctctctctcagtgagtgagtggagttgagctcctgccctccacccagccagcctgcttccctcctgccggtccccaaggacctgggggagggaagcctcctgccggc

SEQ ID NO: 516331 - DNA, 120 bp, Artificial Sequence
  ENSG00000164889_57 (sequence is synthesized)
ctgtactggggagggggcaccccctccctgcaggggcatcttgggctctctccagagttcttccattcgtctgcttcctgtctcggcagcccggccccggctccacggggtgtctcaccc

SEQ ID NO: 516332 - DNA, 120 bp, Artificial Sequence
  ENSG00000164893_0 (sequence is synthesized)
agaattattttatttcaggaatccatcaacatcctttgcagctacataggcaggaaaatctagaaattgtaatttatatagaattttaaaactcttcaattacaatggatagaggggaga

SEQ ID NO: 516333 - DNA, 120 bp, Artificial Sequence
  ENSG00000164893_1 (sequence is synthesized)
aaatacagctcaagagagtgtttggatattggtggggcacaagttttttgcttattaatatcattggtgcaggaatttttgtgtcccccaaaggtgtgttggcatactcttgcatgaacg

SEQ ID NO: 516334 - DNA, 120 bp, Artificial Sequence
  ENSG00000164893_2 (sequence is synthesized)
tgggagtctccctgtgcgtttgggctggctgtgccatactggccatgacatcaactctttgctctgcagagataagtataagcttcccatgcagtggagctcaatactattttctcaaga

SEQ ID NO: 516335 - DNA, 120 bp, Artificial Sequence
  ENSG00000164893_3 (sequence is synthesized)
gatactttggctccacggttgcttttttgaatctctggacatccttgtttctggggtcaggggtagttgctggccaagctctgctccttgctgagtacagcatccagcctttttttccca

SEQ ID NO: 516336 - DNA, 120 bp, Artificial Sequence
  ENSG00000164893_4 (sequence is synthesized)
gctgctctgtcccaaagctgcctaagaaatgtctggcattggccatgttgtggattgtaggaattctgacttctcgtggtgtgaaagaagtgacttggcttcagatagctagctcagtgc

SEQ ID NO: 516337 - DNA, 120 bp, Artificial Sequence
  ENSG00000164893_5 (sequence is synthesized)
tgaaagtgtccatacttagcttcatttccctaactggagtagtgttcctgataagagggaaaaaggagaatgtagaacgatttcagaatgcttttgatgctgaacttccagatatctctc

SEQ ID NO: 516338 - DNA, 120 bp, Artificial Sequence
  ENSG00000164893_6 (sequence is synthesized)
accttatacaagccatcttccaaggatattttgcatattcaggcggggcatgctttacacttatagcaggggagctgaagaagcccagaacaacaattcccaaatgcatatttactgcgt

SEQ ID NO: 516339 - DNA, 120 bp, Artificial Sequence
  ENSG00000164893_7 (sequence is synthesized)
aattctctcttcagatgctgtagctatcacatgggctgatcgagcttttccctcattagcatggattatgccttttgctatttctacctcattatttagcaaccttctgatttctatatt

SEQ ID NO: 516340 - DNA, 120 bp, Artificial Sequence
  ENSG00000164893_8 (sequence is synthesized)
taaatcatcgagaccaatatatcttgcaagccaagagggccagctgcctttgctatttaatacacttaatagtcactcttctccatttacagctgtgctactacttgtcactttgggatc

SEQ ID NO: 516341 - DNA, 120 bp, Artificial Sequence
  ENSG00000164893_9 (sequence is synthesized)
ccttgcaattatcttaacaagtctaattgatttgataaactatatttttttcacgggttcattatggtctatattattaatgataggaatactaaggcggagataccaggaacccaatct

SEQ ID NO: 516342 - DNA, 120 bp, Artificial Sequence
  ENSG00000164893_10 (sequence is synthesized)
atctataccttataaggtgtttttgtcatttccattagcaacaatagtcatcgacgtgggcttggttgtgataccattggtaaagtctccaaatgtgcattatgtctacgtgcttctgtt

SEQ ID NO: 516343 - DNA, 120 bp, Artificial Sequence
  ENSG00000164893_11 (sequence is synthesized)
agttctcagcggattactattttacatacctttaatacattttaaaataagattggcttggtttgagaagatgacttgctatttacaattactatttaatatttgcctccctgatgtgtc

SEQ ID NO: 516344 - DNA, 120 bp, Artificial Sequence
  ENSG00000164893_12 (sequence is synthesized)
tgaggaatagatgtcggaagtgcaaactcttaaaaaattggccttctaaaaaacatatatcagattccaaatcaaggttaaacatatgatagaacattcatggtgaaattcctatggtaa

SEQ ID NO: 516345 - DNA, 120 bp, Artificial Sequence
  ENSG00000164893_13 (sequence is synthesized)
atatttttttctcaaatgaaataagtaatgtatacaaaagtgcctaagacagtacctggcttcagagtcactaagaaattgctaaaagctctgcttcgcatggtaaaaaacttaagtcct

SEQ ID NO: 516346 - DNA, 120 bp, Artificial Sequence
  ENSG00000164893_14 (sequence is synthesized)
ggtttgcgtagcttgatagagtgattatacaacttccattctctcactttttttttctgtatcccaccccttttctactgaatttgtggggatcctataataaaagtgaatgactaaaaa

SEQ ID NO: 516347 - DNA, 120 bp, Artificial Sequence
  ENSG00000164893_15 (sequence is synthesized)
aattcttatagggggtctgatgggtcagacctcagtggagccagtctggtaccttgaagaggatttcattttactaaatgtcaagagtttgattgtttttgttgatcataatttgacaag

SEQ ID NO: 516348 - DNA, 120 bp, Artificial Sequence
  ENSG00000164893_16 (sequence is synthesized)
caacatggggcctcagagaagactaagaaccctgaaggagttgtctgaacctcgagctaaggatcagcaggagctcattgaaagcctccttgactttgagtttctcctctggtagaattg

SEQ ID NO: 516349 - DNA, 120 bp, Artificial Sequence
  ENSG00000164896_0 (sequence is synthesized)
atctaggggctgctgggaagatggcggactcggtggctagccgatgaggaggccgcggggggaacccggcccccgggccccgagaccgactgagggagcgacctgcgcagggcccgggga

SEQ ID NO: 516350 - DNA, 120 bp, Artificial Sequence
  ENSG00000164896_1 (sequence is synthesized)
gtcatggtctccatcacccaactccatgcttcgagtcctgctctctgctcagacctcccctgctcggctgtctggcctgctgctgatccctccagtacagccctgctgtttggggcccag

SEQ ID NO: 516351 - DNA, 120 bp, Artificial Sequence
  ENSG00000164896_2 (sequence is synthesized)
caaatggggggaccggcctgttggaggaggccccagtgcaggtcctgtgcaaggactgcagcggcttctggaacaggcgaagagccctggggagctgctgcgctggctgggccagaaccc

SEQ ID NO: 516352 - DNA, 120 bp, Artificial Sequence
  ENSG00000164896_3 (sequence is synthesized)
cagcaaggtgcgcgcccaccactactcggtggcgcttcgtcgtctgggccagctcttggggtctcggccacggccccctcctgtggagcaggtcacactgcaggacttgagtcagctcat

SEQ ID NO: 516353 - DNA, 120 bp, Artificial Sequence
  ENSG00000164896_4 (sequence is synthesized)
catccgaaactgcccctcctttgacattcacaccatccacgtgtgtctgcaccttgcagtcttacttggctttccatctgatggtcccctggtgtgtgccctggaacaggagcgaaggct

SEQ ID NO: 516354 - DNA, 120 bp, Artificial Sequence
  ENSG00000164896_5 (sequence is synthesized)
ccgcctccctccgaagccacctccccctttgcagccccttctccgaggtgggcaagggttggaagctgctctaagctgcccccgttttctgcggtatccacggcagcatctgatcagcag

SEQ ID NO: 516355 - DNA, 120 bp, Artificial Sequence
  ENSG00000164896_6 (sequence is synthesized)
cctggcagaggcaaggccagaggaactgactccccacgtgatggtgctcctggcccagcacctggcccggcaccggttgcgggagccccagcttctggaagccattgcccacttcctggt

SEQ ID NO: 516356 - DNA, 120 bp, Artificial Sequence
  ENSG00000164896_7 (sequence is synthesized)
ggctcgggaagcaggggtggcacccctggctacagtcaacatcttgatgtcactgtgccaactgcggtgcctgcccttcagagccctgcactttgttttttcccctggcttcatcaacta

SEQ ID NO: 516357 - DNA, 120 bp, Artificial Sequence
  ENSG00000164896_8 (sequence is synthesized)
catcagtggcacccctcatgctctgattgtgcgtcgctacctctccctgctggacacggccgtggagctggagctcccaggataccggggtccccgccttccccgaaggcagcaagtgcc

SEQ ID NO: 516358 - DNA, 120 bp, Artificial Sequence
  ENSG00000164896_9 (sequence is synthesized)
catctttccccagcctctcatcaccgaccgtgcccgctgcaagtacagtcacaaggacatagtagctgaggggttgcgccagctgctgggggaggagaaataccgccaggacctgactgt

SEQ ID NO: 516359 - DNA, 120 bp, Artificial Sequence
  ENSG00000164896_10 (sequence is synthesized)
gcctccaggctactgcacagacttcctgctgtgcgccagcagctctggtgctgtgcttcccgtgaggacccaggaccccttcctgccatacccaccaaggtcctgcccacagggccaggc

SEQ ID NO: 516360 - DNA, 120 bp, Artificial Sequence
  ENSG00000164896_11 (sequence is synthesized)
tgcctctagcgccactactcgagaccctgcccagagggtggtgctggtgttgcgggaacgctggcatttctgccgggacggccgggtgctgctgggctcgagggccctgagggagcggca

SEQ ID NO: 516361 - DNA, 120 bp, Artificial Sequence
  ENSG00000164896_12 (sequence is synthesized)
cctaggcctgatgggctaccagctcctgccgctacccttcgaggaactggagtcccagagaggcctgccccagctcaagagctacctgaggcagaagctccaggccctgggcctgcgctg

SEQ ID NO: 516362 - DNA, 120 bp, Artificial Sequence
  ENSG00000164896_13 (sequence is synthesized)
ggggcctgaagggggctgaggggttgatgtggggttcaggatggcccccccatggggggtggatgatttgcactttggttccctgtgttttgatttctcattaaagttcctttccttccc

SEQ ID NO: 516363 - DNA, 120 bp, Artificial Sequence
  ENSG00000164896_14 (sequence is synthesized)
tcatttcacgggtgaggagacttagagagacgaagccacttgtccaaggtcacgccgctggtgagtgggagcgcccagcatggaacccagcaccgtccagccgcggagcccgcgttccac

SEQ ID NO: 516364 - DNA, 120 bp, Artificial Sequence
  ENSG00000164896_15 (sequence is synthesized)
cctctgtgccgccgccgcctcctgtgggagagggaggtggtcgggagagtgcacgccggtgccgcctgggctccagactgggcgcgaccactaacccggttaatgacctcgggcttaact

SEQ ID NO: 516365 - DNA, 120 bp, Artificial Sequence
  ENSG00000164896_16 (sequence is synthesized)
taaccccttcgctgctctgggcctgcgtttctccaccggtgaaatgaggtaatgccagccctgcctactcttcatgggcgtgtaaggagcatcagagatggtgcatgtggaattgctttg

SEQ ID NO: 516366 - DNA, 120 bp, Artificial Sequence
  ENSG00000164896_17 (sequence is synthesized)
caagtagtgctgcgctgagcgcactgaggattatgattgctgtttcaaaggcgtggaaggaggcagaggggcggggtggggaagaggcccagagcagtcacaaaggcttgctctgaccac

SEQ ID NO: 516367 - DNA, 120 bp, Artificial Sequence
  ENSG00000164896_18 (sequence is synthesized)
accatccacgtgtgtctgcaccttgcagtcttacttggtgaggaggggcttgaggtgggcgcctggggggctaggtgttaatgaagaatagggagaacagtagaggaccacggacagaga

SEQ ID NO: 516368 - DNA, 120 bp, Artificial Sequence
  ENSG00000164896_19 (sequence is synthesized)
cccagcctctcaggcgtttgcccaggaacgcttgctcctgctcccgtcctatgtctgcggcagacatcatgagtcgaacgcactccttccggcctcgctagggtgccaccccagattcct

SEQ ID NO: 516369 - DNA, 120 bp, Artificial Sequence
  ENSG00000164896_20 (sequence is synthesized)
gctaatagagtgccctaggaagccaccataatttgtcacaattggtatgagatgaaagcctatttgccatctttgtatgtactccctacaaaccgtttcgatacctcatagccacatgat

SEQ ID NO: 516370 - DNA, 120 bp, Artificial Sequence
  ENSG00000164896_21 (sequence is synthesized)
actttacatgtctctagtgtttgcacttaaactctagcacaccttcccgctcaggaaacgggagaggagaaaggtggagaattcaccaagtaaccccatgataagaacagcagcacagct

SEQ ID NO: 516371 - DNA, 120 bp, Artificial Sequence
  ENSG00000164896_22 (sequence is synthesized)
ggatggggcagcctggggcaaggggaggggccagcctgggaccagcagagtggaaaagccagagggaccatgaagcgccaaagctaaggagctctcggccaccataaaactgggccctga

SEQ ID NO: 516372 - DNA, 120 bp, Artificial Sequence
  ENSG00000164896_23 (sequence is synthesized)
agcagcagagggctttgcccagggtggtggcactagactgggacagattaggatgaggtgccgggcccttcctgctactggtgtcctttctcctcagtcacaaggacatagtagctgagg

SEQ ID NO: 516373 - DNA, 120 bp, Artificial Sequence
  ENSG00000164896_24 (sequence is synthesized)
cgcctgcggggagggctgcgggagggcagcgggagctggtgttagcggcagcggccacggtctcctggcgtccctgggccggggtgggtgttggggcccccgacttcgccgactccgcgc

SEQ ID NO: 516374 - DNA, 120 bp, Artificial Sequence
  ENSG00000164897_0 (sequence is synthesized)
ctccgcgcctcccgcccggaagtgcccgaggggccgcgatggagctgggggagccgggcgctcggtagcgcggcgggcaaggcaggcgccatgaccctgattgaaggggtgggtgatgag

SEQ ID NO: 516375 - DNA, 120 bp, Artificial Sequence
  ENSG00000164897_1 (sequence is synthesized)
gtgaccgtccttttctcggtgcttgcctgccttctggtgctggcccttgcctgggtctcaacgcacaccgctgagggcggggacccactgccccagccgtcagggaccccaacgccatcc

SEQ ID NO: 516376 - DNA, 120 bp, Artificial Sequence
  ENSG00000164897_2 (sequence is synthesized)
cagcccagcgcagccatggcagctaccgacagcatgagaggggaggccccaggggcagagacccccagcctgagacacagaggtcaagctgcacagccagagcccagcacggggttcaca

SEQ ID NO: 516377 - DNA, 120 bp, Artificial Sequence
  ENSG00000164897_3 (sequence is synthesized)
gcaacaccgccagccccggactccccgcaggagcccctcgtgctacggctgaaattcctcaatgattcagagcaggtggccagggcctggccccacgacaccattggctccttgaaaagg

SEQ ID NO: 516378 - DNA, 120 bp, Artificial Sequence
  ENSG00000164897_4 (sequence is synthesized)
acccagtttcccggccgggaacagcaggtgcgactcatctaccaagggcagctgctaggcgacgacacccagaccctgggcagccttcacctccctcccaactgcgttctccactgccac

SEQ ID NO: 516379 - DNA, 120 bp, Artificial Sequence
  ENSG00000164897_5 (sequence is synthesized)
gctgctcctgctgttgctgctgctctggtactgccagatccagtaccggcccttctttcccctgaccgccactctgggcctggccggcttcaccctgctcctcagtctcctggcctttgc

SEQ ID NO: 516380 - DNA, 120 bp, Artificial Sequence
  ENSG00000164897_6 (sequence is synthesized)
gcctttgccatgtaccgcccgtagtgcctccgcgggcgcttggcagcgtcgccggcccctccggaccttgctccccgcgccgcggcgggagctgctgcctgcccaggcccgcctctccgg

SEQ ID NO: 516381 - DNA, 120 bp, Artificial Sequence
  ENSG00000164897_7 (sequence is synthesized)
cagaggactcccgggactggcggaggccccgccctgcgaccgccggggctcggggccacctcccggggctgctgaccctcagcccgcactgggagtgggctcctcggggtcgggcatctg

SEQ ID NO: 516382 - DNA, 120 bp, Artificial Sequence
  ENSG00000164897_8 (sequence is synthesized)
ctgggagtgggctcctcggggtcgggcatctgctgtcgctgcctcggccccgggcagagccgggccgccccgggggcccgtcttagtgttctgccggaggacccagccgcctccaatccc

SEQ ID NO: 516383 - DNA, 120 bp, Artificial Sequence
  ENSG00000164897_9 (sequence is synthesized)
tgacagctccttgggctgagttggggacgccaggtcggtgggaggctggtgaaggggagcggggaggggcagaggagttccccggaacccgtgcagattaaagtaactgtgaagttttca

SEQ ID NO: 516384 - DNA, 120 bp, Artificial Sequence
  ENSG00000164897_10 (sequence is synthesized)
gtgccgcgggtggggtttaggtgaaccgtaacgcggggggcgggggtgggggcacagaggctctacccccacctcttagaaactttagcagcggagtagatgagcctggggtgaagtcgg

SEQ ID NO: 516385 - DNA, 120 bp, Artificial Sequence
  ENSG00000164897_11 (sequence is synthesized)
tgaaggagtagacacactggggtgaagtgggcaggagaatagatacgcttgggggtgaagtttggttggggtgaagtttaggagaggcgttgcttaggcccttaccttgggatagggttt

SEQ ID NO: 516386 - DNA, 120 bp, Artificial Sequence
  ENSG00000164897_12 (sequence is synthesized)
gggtgagttgggagctggttgaagacctcgagctcagatgacagaaagttaggacttgggattcggcgatgggaaggggcacccggagctcggtagcgcggcgggcaaggcaggcgccat

SEQ ID NO: 516387 - DNA, 120 bp, Artificial Sequence
  ENSG00000164897_13 (sequence is synthesized)
cggcgatgggaaggggcacccggaggcaagtttggggcgactgggaggcagagaagccggtaccctggggtgggtgaggggacggaggctgaggacggtgggagcgtcgcggtggggtga

SEQ ID NO: 516388 - DNA, 120 bp, Artificial Sequence
  ENSG00000164897_14 (sequence is synthesized)
gggcaggaccctgtggaggttccagggctcctggccagggggcccgggcctcacgggctctttgtgcctctccagctcggtagcgcggcgggcaaggcaggcgccatgaccctgattgaa

SEQ ID NO: 516389 - DNA, 120 bp, Artificial Sequence
  ENSG00000164897_15 (sequence is synthesized)
ccgcccagggccccggtcgggccgggatcgccgtgccctcctgcggcttcggggggcgggaagctcggtagcgcggcgggcaaggcaggcgccatgaccctgattgaaggggtgggtgat

SEQ ID NO: 516390 - DNA, 120 bp, Artificial Sequence
  ENSG00000164897_16 (sequence is synthesized)
gtgaagtcggtgaaggagtagacacactggggtgaagtgggcaggagaatagatacgcttggggctcggtagcgcggcgggcaaggcaggcgccatgaccctgattgaaggggtgggtga

SEQ ID NO: 516391 - DNA, 120 bp, Artificial Sequence
  ENSG00000164898_0 (sequence is synthesized)
agggtcgtaggacgccgttgggcaccacgctcggagaaggacaggacaatggcggccttagggtccccgtcgcacacttttcgaggacttctgcgggagttgcgctacctgagcgcggcc

SEQ ID NO: 516392 - DNA, 120 bp, Artificial Sequence
  ENSG00000164898_1 (sequence is synthesized)
accggccgaccctatcgcgacaccgcggcctatcggtaccttgtgaaggctttccgtgcacatcgggtcaccagtgaaaagttgtgcagagcccaacatgagcttcatttccaagctgcc

SEQ ID NO: 516393 - DNA, 120 bp, Artificial Sequence
  ENSG00000164898_2 (sequence is synthesized)
acctatctctgcctcctgcgtagcatccggaaacatgtggccctacatcaggaatttcatggcaagggtgagcgctcggtggaggagtctgctggcttggtgggtctcaagttgccccat

SEQ ID NO: 516394 - DNA, 120 bp, Artificial Sequence
  ENSG00000164898_3 (sequence is synthesized)
cagcctggagggaagggctgggagccatgaacatggagaatatccttggatgctgcattcataggagaattgaataatttctatcaatatgtatttatcattaaattttttttaagttta

SEQ ID NO: 516395 - DNA, 120 bp, Artificial Sequence
  ENSG00000164898_4 (sequence is synthesized)
tcatctttactctcagtgaatttactgaactttttgcactagactgatgttgtttttctacttaaaaaaatttttttatattttattttaaaagtagtacaagccttagccaggcacggt

SEQ ID NO: 516396 - DNA, 65 bp, Artificial Sequence
  ENSG00000164898_5 (sequence is synthesized)
cgccatggcactagtataagccttttgtttaaggaattcaaatgttataaacataaaataaaaga

SEQ ID NO: 516397 - DNA, 120 bp, Artificial Sequence
  ENSG00000164898_6 (sequence is synthesized)
gtccggagcatcggtgcagtttcgagggtaaagcctttggcgcggtgatgtggacttttgttctctaactacaactcccagcatacgtcacccctcacgtgggcgctaggtcaccagtga

SEQ ID NO: 516398 - DNA, 120 bp, Artificial Sequence
  ENSG00000164898_7 (sequence is synthesized)
aggcaagcgcgtacgcagaagcgtgcgcgcgcccgttcaacgtccggagcatcggtgcagtttcgagggtaaagcctttggcgcggtgatgtggacttttgttctctaactacaactccc

SEQ ID NO: 516399 - DNA, 120 bp, Artificial Sequence
  ENSG00000164900_0 (sequence is synthesized)
ggaggcggtagcgcccctgggggcaacggcgggggcggcggcgggggcccgggcactgccttctccatcgactccctaatcgggccgccgccgccgcgctccggccacttgctgtacacc

SEQ ID NO: 516400 - DNA, 120 bp, Artificial Sequence
  ENSG00000164900_1 (sequence is synthesized)
ttgctgtacaccggctaccccatgttcatgccctaccggccgctcgtgctgccgcaggcgctggcccctgcgccgctgcccgctggcctcccgcccctcgccccgctagcctctttcgcc

SEQ ID NO: 516401 - DNA, 120 bp, Artificial Sequence
  ENSG00000164900_2 (sequence is synthesized)
ggccgccttaccaacaccttctgcgcggggctgggtcaggctgtgccctcgatggtggcgctgaccaccgcgctgcccagcttcgcggagccgcccgacgctttctacgggccccaggag

SEQ ID NO: 516402 - DNA, 120 bp, Artificial Sequence
  ENSG00000164900_3 (sequence is synthesized)
ctcgccgccgccgctgccgccgccgccgccactgccgcccgaaacaaccccgagccaggcggccgacgcccagagggtgggctggaagctgatgagctgctgccggcccgggagaaagtg

SEQ ID NO: 516403 - DNA, 120 bp, Artificial Sequence
  ENSG00000164900_4 (sequence is synthesized)
ccacctccgcctccgcacttctcagagacttttccaagtctgcccgcagaggggaaggtgtacagctcagatgaggagaagctggaggcatcagcaggagacccagcaggcagcgaacag

SEQ ID NO: 516404 - DNA, 120 bp, Artificial Sequence
  ENSG00000164900_5 (sequence is synthesized)
gaggaagagggctcaggcggtgacagcgaggatgacggtttcctggacagttctgcagggggcccaggggctcttctgggacctaaaccgaagctaaagggaagcctggggactggagct

SEQ ID NO: 516405 - DNA, 120 bp, Artificial Sequence
  ENSG00000164900_6 (sequence is synthesized)
gaggagggggcaccggtgacagcaggggtcacagctcctggggggaaaagccgacggcgccgcacagcatttaccagcgagcagcttttggaattggagaaggaatttcattgcaagaaa

SEQ ID NO: 516406 - DNA, 120 bp, Artificial Sequence
  ENSG00000164900_7 (sequence is synthesized)
tacctgagcttgacagagcgctctcagatcgcccacgccctcaagctcagtgaggtgcaggtcaagatctggtttcagaatcgacgggccaagtggaagcgcatcaaagctggcaatgtg

SEQ ID NO: 516407 - DNA, 120 bp, Artificial Sequence
  ENSG00000164900_8 (sequence is synthesized)
agcagccgttctggggagcccgtaagaaaccccaagattgttgtccccatacctgtgcatgtcaacaggtttgctgtgcggagccagcaccaacaaatggagcagggggcccggccctga

SEQ ID NO: 516408 - DNA, 120 bp, Artificial Sequence
  ENSG00000164900_9 (sequence is synthesized)
gcgcggaccagagcccgaagccgggttaggcgttgagaggcggctgaggagaagcggagaggaagtgagggggcccggattcccaccctggcctcacggaccttgggctgaccggtctgt

SEQ ID NO: 516409 - DNA, 120 bp, Artificial Sequence
  ENSG00000164900_10 (sequence is synthesized)
ccagctgacatcaagcttaggggcctcaggattctgaacttgagcagaaaacagctgtttgtgctgctcaggcatccttggctggggaaaggggaaggtgggaaagagatggtttcattt

SEQ ID NO: 516410 - DNA, 120 bp, Artificial Sequence
  ENSG00000164900_11 (sequence is synthesized)
taaggtcaagggtaaggattgaaaggggatcaggaggcctaagtaactgggagaaaaaatctggccacactcaaggtgctgcatggctgggagccatggaaatgaggttcagggactgca

SEQ ID NO: 516411 - DNA, 120 bp, Artificial Sequence
  ENSG00000164902_0 (sequence is synthesized)
agcgcaccgcgggaagatggcgttggaggtcggcgatatggaagatgggcagctttccgactcggattccgacatgacggtcgcacccagcgacaggccgctgcaattgccaaaagtgct

SEQ ID NO: 516412 - DNA, 120 bp, Artificial Sequence
  ENSG00000164902_1 (sequence is synthesized)
aggtggcgacagtgctatgagggccttccagaacacggcaactgcatgtgcaccagtatcacattatcgagctgttgaaagtgtggattcaagtgaagaaagtttttctgattcagatga

SEQ ID NO: 516413 - DNA, 120 bp, Artificial Sequence
  ENSG00000164902_2 (sequence is synthesized)
tgatagctgtctttggaaacgcaaacgacagaaatgttttaaccctcctcccaaaccagagccttttcagtttggccagagcagtcagaaaccacctgttgctggaggaaagaagattaa

SEQ ID NO: 516414 - DNA, 120 bp, Artificial Sequence
  ENSG00000164902_3 (sequence is synthesized)
caacatatggggtgctgtgctgcaggaacagaatcaagatgcagtggccactgaacttggtatcttgggaatggagggcactattgacagaagcagacaatccgagacctacaattattt

SEQ ID NO: 516415 - DNA, 120 bp, Artificial Sequence
  ENSG00000164902_4 (sequence is synthesized)
gcttgccaagaaacttaggaaggaatctcaagagcatacaaaagatctagacaaggaactagatgaatatatgcatggtggcaaaaaaatgggatcaaaggaagaggaaaatgggcaagg

SEQ ID NO: 516416 - DNA, 120 bp, Artificial Sequence
  ENSG00000164902_5 (sequence is synthesized)
tcatctcaaaaggaaacgacctgtcaaagacaggctagggaacagaccagaaatgaactataaaggtcgatacgagatcacagcggaagattctcaagagaaagtggctgatgaaatttc

SEQ ID NO: 516417 - DNA, 120 bp, Artificial Sequence
  ENSG00000164902_6 (sequence is synthesized)
attcaggttacaggaaccaaagaaagacctgatagcccgagtagtgaggattattggtaacaaaaaggcaattgaacttctgatggaaaccgctgaagttgaacaaaatggtggtctctt

SEQ ID NO: 516418 - DNA, 120 bp, Artificial Sequence
  ENSG00000164902_7 (sequence is synthesized)
tataatgaatggtagtcgaagaagaacaccaggtggagtttttctgaatctcttgaaaaacactcctagtatcagcgaggaacaaattaaggacattttctacattgaaaaccaaaagga

SEQ ID NO: 516419 - DNA, 120 bp, Artificial Sequence
  ENSG00000164902_8 (sequence is synthesized)
atatgaaaataaaaaagctgctaggaagaggagaacacaagtgttggggaaaaagatgaaacaagctattaaaagtctaaattttcaagaagatgatgatacatcacgagaaacttttgc

SEQ ID NO: 516420 - DNA, 120 bp, Artificial Sequence
  ENSG00000164902_9 (sequence is synthesized)
aagtgacacgaatgaggccttggcctctcttgatgagtcacaggaaggacatgcagaagccaagttggaggcagaggaagccattgaagttgatcattctcatgatttggacatctttta

SEQ ID NO: 516421 - DNA, 120 bp, Artificial Sequence
  ENSG00000164902_10 (sequence is synthesized)
agtacattttcaacagtttgaggactaagcctttctaaaataacattgtaataaaccatttttactgagattgcaacgttttgcactgataaacatgagaatctggaggaaagacaattg

SEQ ID NO: 516422 - DNA, 120 bp, Artificial Sequence
  ENSG00000164902_11 (sequence is synthesized)
ttttcttgtttaaaatatgtgtggaaaggaatgcaattgatagaacatttaaagatatatctgacaaaatacttaagagtatatagcacaggatttaatttctcaatctgttgcatgtgc

SEQ ID NO: 516423 - DNA, 120 bp, Artificial Sequence
  ENSG00000164902_12 (sequence is synthesized)
taattatgagtattactagttgataatcagttttgtctaggtcataacataccatttgtaagtttgtttgctttttcaggtttatctttgcagtgaattatgctttgctttaaaacattc

SEQ ID NO: 516424 - DNA, 120 bp, Artificial Sequence
  ENSG00000164902_13 (sequence is synthesized)
cgctaaaatcataatgggacatataaattattaagctgttagaaatgcattcaaatttgttttttctgtgttctaagaactcaggcaattttaaggataaaaactaacattggccaggca

SEQ ID NO: 516425 - DNA, 120 bp, Artificial Sequence
  ENSG00000164902_14 (sequence is synthesized)
agactctgtctcaaaaaaaaaaaaaaatacaattaagaggtgtatactgatgattcttcccactcatttgtttgtccagaagtaaataaatgtcggaagttttccaagtaactatttgtt

SEQ ID NO: 516426 - DNA, 89 bp, Artificial Sequence
  ENSG00000164902_15 (sequence is synthesized)
tgtttgtccagaagtaaataaatgtcggaagttttccaagtaactatttgttttttggggggttttttagttagagtcttgatctgtca

SEQ ID NO: 516427 - DNA, 120 bp, Artificial Sequence
  ENSG00000164902_16 (sequence is synthesized)
agtgctgggatcacaggcatgagccaccgaacccagccttattctgcttaaatttaacgtgttttttgacttcttaattaacttggtcatatactaaatgtgatctcctgtggattacca

SEQ ID NO: 516428 - DNA, 120 bp, Artificial Sequence
  ENSG00000164902_17 (sequence is synthesized)
aatgtgatctcctgtggattaccacatgcattaaaaaatttttcaagctgggcctagtggcgcacacctgcaatcccaacactttgggaggccaagagaggaagattgcttgagcccagg

SEQ ID NO: 516429 - DNA, 120 bp, Artificial Sequence
  ENSG00000164902_18 (sequence is synthesized)
agtttgagaccaatctaggcaatgtagtgagaccctgtctctaatttaaaaaagaaaaagaaaaaaacattcccagtggcagcctgcctaagactgtcttaccttatgttaaggaagtca

SEQ ID NO: 516430 - DNA, 120 bp, Artificial Sequence
  ENSG00000164902_19 (sequence is synthesized)
ggtatttaaaatgttacatatgccggcgcagtggctcatgtgtgtaatcccagcactctgggaggctgagacaggtagatcatttgaggtcaggagttcaaaaccaacctggtctacatg

SEQ ID NO: 516431 - DNA, 120 bp, Artificial Sequence
  ENSG00000164902_20 (sequence is synthesized)
agagcaagactttgtctcaaaaataataatagtaaaatgttacatgtgcatgaagttttaaattactcatttttattaatgaagaaaataaggtagtttagacattccaagagttaacta

SEQ ID NO: 516432 - DNA, 120 bp, Artificial Sequence
  ENSG00000164902_21 (sequence is synthesized)
tagtttacaaaaatatattaagcaaaaatatgcttgatatattaagcagaaatgttgtatattaagcaaaaatgtaaaattcagcaattataaactgttccttacagacagtgtacttga

SEQ ID NO: 516433 - DNA, 120 bp, Artificial Sequence
  ENSG00000164902_22 (sequence is synthesized)
agtcttttggtagttctgagaatgtggtcattgaagttggatctaagaggaaagtggttatcggttgctttttatttataaaggatgcaaaaataaaattagatttttggcagtccttaa

SEQ ID NO: 516434 - DNA, 120 bp, Artificial Sequence
  ENSG00000164902_23 (sequence is synthesized)
ctgacccgccgctgtgcagcgcagcgcaccgcgggaagatggcgttggaggtcggcgatatggaagatgggcagctttccgactcggattccgacatgacggtcgcacccagcgacaggc

SEQ ID NO: 516435 - DNA, 120 bp, Artificial Sequence
  ENSG00000164904_0 (sequence is synthesized)
atcccgagtcccgggctcagtatgtggcgccttcctcgcgcgctgtgtgtgcacgctgcaaagaccagcaagctctctggaccttggagcaggcctgccgccttcatgtccactctcctc

SEQ ID NO: 516436 - DNA, 120 bp, Artificial Sequence
  ENSG00000164904_1 (sequence is synthesized)
atcaatcagccccagtatgcgtggctgaaagagctggggctccgcgaggaaaacgagggcgtgtataatggaagctggggaggccggggagaggttattacgacctattgccctgctaac

SEQ ID NO: 516437 - DNA, 120 bp, Artificial Sequence
  ENSG00000164904_2 (sequence is synthesized)
aacgagccaatagcaagagtccgacaggccagtgtggcagactatgaagaaactgtaaagaaagcaagagaagcatggaaaatctgggcagatattcctgctccaaaacgaggagaaata

SEQ ID NO: 516438 - DNA, 120 bp, Artificial Sequence
  ENSG00000164904_3 (sequence is synthesized)
gtaagacagattggcgatgccttgcgggagaagatccaagtactaggaagcttggtgtctttggagatggggaaaatcttagtggaaggtgtgggtgaagttcaggagtatgtggatatc

SEQ ID NO: 516439 - DNA, 120 bp, Artificial Sequence
  ENSG00000164904_4 (sequence is synthesized)
tgtgactatgctgttggtttatcaaggatgattggaggacctatcttgccttctgaaagatctggccatgcactgattgagcagtggaatcccgtaggcctggttggaatcatcacggca

SEQ ID NO: 516440 - DNA, 120 bp, Artificial Sequence
  ENSG00000164904_5 (sequence is synthesized)
ttcaatttccctgtggcagtgtatggttggaacaacgccatcgccatgatctgtggaaatgtctgcctctggaaaggagctccaaccacttccctcattagtgtggctgtcacaaagata

SEQ ID NO: 516441 - DNA, 120 bp, Artificial Sequence
  ENSG00000164904_6 (sequence is synthesized)
atagccaaggttctggaggacaacaagctgcctggtgcaatttgttccttgacttgtggtggagcagatattggcacagcaatggccaaagatgaacgagtgaacctgctgtccttcact

SEQ ID NO: 516442 - DNA, 120 bp, Artificial Sequence
  ENSG00000164904_7 (sequence is synthesized)
gggagcactcaggtgggaaaacaggtgggcctgatggtgcaggagaggtttgggagaagtctgttggaacttggaggaaacaatgccattattgcctttgaagatgcagacctcagctta

SEQ ID NO: 516443 - DNA, 120 bp, Artificial Sequence
  ENSG00000164904_8 (sequence is synthesized)
gttgttccatcagctctcttcgctgctgtgggaacagctggccagaggtgtaccactgcgaggcgactgtttatacatgaaagcatccatgatgaggttgtaaacagacttaaaaaggcc

SEQ ID NO: 516444 - DNA, 120 bp, Artificial Sequence
  ENSG00000164904_9 (sequence is synthesized)
tatgcacagatccgagttgggaacccatgggaccctaatgttctctatgggccactccacaccaagcaggcagtgagcatgtttcttggagcagtggaagaagcaaagaaagaaggtggc

SEQ ID NO: 516445 - DNA, 120 bp, Artificial Sequence
  ENSG00000164904_10 (sequence is synthesized)
acagtggtctatgggggcaaggttatggatcgccctggaaattatgtagaaccgacaattgtgacaggtcttggccacgatgcgtccattgcacacacagagacttttgctccgattctc

SEQ ID NO: 516446 - DNA, 120 bp, Artificial Sequence
  ENSG00000164904_11 (sequence is synthesized)
tatgtctttaaattcaagaatgaagaagaggtctttgcatggaataatgaagtaaaacagggactttcaagtagcatctttaccaaagatctgggcagaatctttcgctggcttggacct

SEQ ID NO: 516447 - DNA, 120 bp, Artificial Sequence
  ENSG00000164904_12 (sequence is synthesized)
aaaggatcagactgtggcattgtaaatgtcaacattccaacaagtggggctgagattggaggtgcctttggaggagaaaagcacactggtggtggcagggagtctggcagtgatgcctgg

SEQ ID NO: 516448 - DNA, 120 bp, Artificial Sequence
  ENSG00000164904_13 (sequence is synthesized)
aaacagtacatgagaaggtctacttgtactatcaactacagtaaagaccttcctctggcccaaggaatcaagtttcagtaaaggtgttttagatgaacatcccttaatttgaggtgttcc

SEQ ID NO: 516449 - DNA, 120 bp, Artificial Sequence
  ENSG00000164904_14 (sequence is synthesized)
agcagctgtttttggagaagacaaagaaaattaaagttttccctgaataaatgcattattatgactgtgacagtgactaatccccctatgaccccaaagccctgattaaatcaagagatt

SEQ ID NO: 516450 - DNA, 120 bp, Artificial Sequence
  ENSG00000164904_15 (sequence is synthesized)
ccttttttaaaaatcaaaataaaattgttacaacatagccatagttactaaaagatgagttaggtggatttttattatgtcaactagttgtacatggctttttaaaagttaatgattatt

SEQ ID NO: 516451 - DNA, 120 bp, Artificial Sequence
  ENSG00000164904_16 (sequence is synthesized)
ttgtaattagaaaaaaatagtacgtaccagggtaggaatttgggaaaatacagaaccgaggagaaaacagaagtctttgcagtagatacagggtgtctcctgaccaagtgaaggattcag

SEQ ID NO: 516452 - DNA, 120 bp, Artificial Sequence
  ENSG00000164904_17 (sequence is synthesized)
gggcggggggtgaatattgcttgacattacccacctatggcatgtgttggatgtcgtgtgattgaaagggggatgcattcccctgtatgcttggaccacagttcagtattcatgtggaat

SEQ ID NO: 516453 - DNA, 120 bp, Artificial Sequence
  ENSG00000164904_18 (sequence is synthesized)
aacttgcagtgcttaaaatgacaacaggcattcatcacagttatggctcttgcttatgaaggctgtgtcaacttggaagagatttctggggtagacagattttgttcctgtgctggagtc

SEQ ID NO: 516454 - DNA, 120 bp, Artificial Sequence
  ENSG00000164904_19 (sequence is synthesized)
cactttgagaggccgaggcgggtggatcagtagaggctaggagtttgagaccagcctggccgatatcgtgaaaccccgtctttaccaaaaaatacaaaaattagcccagtgtggtggcag

SEQ ID NO: 516455 - DNA, 120 bp, Artificial Sequence
  ENSG00000164904_20 (sequence is synthesized)
gtgagatcctgtctacaaaaaaaaaaaaaaaaaaaagtgcatctggatttttttatacaaccttagaccaccttctttagctttaggcgtctgcggttgcccttggatctgttctcaatc

SEQ ID NO: 516456 - DNA, 120 bp, Artificial Sequence
  ENSG00000164904_21 (sequence is synthesized)
ctcagtgtgtgtggcagcatgtggtcatagagagctgggcaaagttcactttctctttgctgacagtctcaccttttctcactgggaagctgcacaggagcctttgggctggttcagccc

SEQ ID NO: 516457 - DNA, 120 bp, Artificial Sequence
  ENSG00000164904_22 (sequence is synthesized)
agaggcccctgttctcctgccttcctggcattctctgctccccttctgcatggcacccctctactcctgccaggttagaatggagcagaggcctttgaacaagatgacatttgtagacaa

SEQ ID NO: 516458 - DNA, 120 bp, Artificial Sequence
  ENSG00000164904_23 (sequence is synthesized)
cctgatccatcaggatgtggagagatctggacaaatggcaaataatttggggttgaattatggcccagagaagtaagcaaatgaaaaactaaacaattataaatgtatctgggaagcaaa

SEQ ID NO: 516459 - DNA, 120 bp, Artificial Sequence
  ENSG00000164904_24 (sequence is synthesized)
ggtattcataatatgtcccatggccagctgcgagcagtatttaactagacatgctgttgtcaatattgaacatgaatcaagccaaatactgatatagctattgagagaaggttggcagga

SEQ ID NO: 516460 - DNA, 120 bp, Artificial Sequence
  ENSG00000164904_25 (sequence is synthesized)
agaaatcatgggtgagggtatgtgggagtgataatcttagctatagattttaggtaaaactgattctgaaagctttctttgaaacaaatttataatttttcttctacatgtttctagcac

SEQ ID NO: 516461 - DNA, 120 bp, Artificial Sequence
  ENSG00000164904_26 (sequence is synthesized)
aaggactcaattttttttggttataatgttcattaaaacatatgccttcaatttgttcctctttgttcttttttgctgatttagcagatataaatcacttgttagtatttttaactatcc

SEQ ID NO: 516462 - DNA, 120 bp, Artificial Sequence
  ENSG00000164904_27 (sequence is synthesized)
aagttaaaatgtacatttgtaagtgttattactggtcttatatttgaaggtgcaaggggtcttgtgctgctcattactggttatcttgagcatttcataactgctgcctcctcctaaatc

SEQ ID NO: 516463 - DNA, 120 bp, Artificial Sequence
  ENSG00000164904_28 (sequence is synthesized)
ctgtgttccaaccgctactgctggcaatgcccagcctccattgtggatgcggggaattgtgttcagcatgcttgcttctgccacggcactaaagcctaacttgcttaggatcttgctgta

SEQ ID NO: 516464 - DNA, 120 bp, Artificial Sequence
  ENSG00000164904_29 (sequence is synthesized)
cttggagagagcatccattcgctgagcctagcagccaggctcttgtgactccctgggaagtgggtgaagacctggctcctggctgcagcagtgaggaggcaggccctccaggtgaagact

SEQ ID NO: 516465 - DNA, 120 bp, Artificial Sequence
  ENSG00000164904_30 (sequence is synthesized)
tctcacaatggagggaaggcagttttctcaaaggaaattgagtgctattatgtactctgcttcctactttctctttcagggtgggaatctgttaagcctcctctctctcttgctctgcaa

SEQ ID NO: 516466 - DNA, 120 bp, Artificial Sequence
  ENSG00000164904_31 (sequence is synthesized)
taagcctcctctctctcttgctctgcaaccacagaacacttctttttttttggtgtctcagttttgcccacactggagtgcagtggtgcaatagtggctcactgcagcctccaactcctg

SEQ ID NO: 516467 - DNA, 120 bp, Artificial Sequence
  ENSG00000164904_32 (sequence is synthesized)
gctgggactacaggtgcatgccactgtgcccagctgattattatttttttttgtaaagattgggtcatactacattgctcatgctcgtcttgaacttgtggcctcaagcgatcctcctgc

SEQ ID NO: 516468 - DNA, 120 bp, Artificial Sequence
  ENSG00000164904_33 (sequence is synthesized)
cctcctgcctcagcctcttgagttgttgggattacaggagtgtgccaccatgcccagctctgtggaaaattctctgtggcattctgtctcctgaaaatgctgaagggaccaagagggctc

SEQ ID NO: 516469 - DNA, 120 bp, Artificial Sequence
  ENSG00000164904_34 (sequence is synthesized)
tgtgtccttcctcttctcttccctggcactttcagaccattttcttgttgccttcattctaacaaaggttgcagattggaaagctgatttggaatgctttttaagtgttttcagtttcaa

SEQ ID NO: 516470 - DNA, 120 bp, Artificial Sequence
  ENSG00000164904_35 (sequence is synthesized)
tatttttatgaaattcctatggtctccaacaaacttttttttttttttttttttctacacctggagcttatcctgcagaagcttcctgccaatgattgttttggaggaaattaaaagaaa

SEQ ID NO: 516471 - DNA, 120 bp, Artificial Sequence
  ENSG00000164904_36 (sequence is synthesized)
accaaacgaaacctctcctatccaaggggaagaactttatccccatattgattgaatataggattctagatttaaaatgttgtaggcagttagagtttgctctttttttttttctattgg

SEQ ID NO: 516472 - DNA, 120 bp, Artificial Sequence
  ENSG00000164904_37 (sequence is synthesized)
aaaggtccacaaatgttttattgacatttttgtctttaatccatttggatttggggtacatgttacgatttgtctacgttaatttcccttttaaaaataaaaataattcctcaactccaa

SEQ ID NO: 516473 - DNA, 120 bp, Artificial Sequence
  ENSG00000164904_38 (sequence is synthesized)
attaaaaccttatggtcttgggatctatggtcttgtgagaaatgtggcacactgagcggtgcaactgatcttaatttagagcttaactctggctcttcagctgtgacgtgcaccgcaggt

SEQ ID NO: 516474 - DNA, 120 bp, Artificial Sequence
  ENSG00000164904_39 (sequence is synthesized)
aacgttcttcagtgtagttttaagttatcttccttcctgaattctttgggagtttgcaagcttggacgtgccgaaatcttgccatgttgtacgttgggctgtgaactcctttgaggactg

SEQ ID NO: 516475 - DNA, 120 bp, Artificial Sequence
  ENSG00000164904_40 (sequence is synthesized)
cctgatggtgcaggagaggtttgagcaatggaaatgagaagatactctgctgttgtcacatatgctcctgatatcacaaatgaataaaagttattcacatggaagctgattttaaagtgc

SEQ ID NO: 516476 - DNA, 89 bp, Artificial Sequence
  ENSG00000164904_41 (sequence is synthesized)
tgaataaaagttattcacatggaagctgattttaaagtgcacttaaggaaatcgatgatcaaaagatcagtaataaatgtatgtctaat

SEQ ID NO: 516477 - DNA, 120 bp, Artificial Sequence
  ENSG00000164904_42 (sequence is synthesized)
ctgttggtttatcaaggatgattggaggacctatcttgccttctgaaagtaagcaatgaaattagttaagctgagttttgtactctgatatacagagctccaaaaaaaataaaatactct

SEQ ID NO: 516478 - DNA, 120 bp, Artificial Sequence
  ENSG00000164904_43 (sequence is synthesized)
aactgctgtagtctaaaatcagtttttcagtattgaaagcctttgagctttggtttagattttttatttatttttgtttgtttttaatttcctgttcattgctctcaccatgcctccctt

SEQ ID NO: 516479 - DNA, 120 bp, Artificial Sequence
  ENSG00000164904_44 (sequence is synthesized)
cttgtctagtttgttcacgctctcttgctttcctgtgttcattgagcaagatgcctggcatatagtgtgaaattagttaacatttgtgaagaagcaaataaatggatgaatttgtggagg

SEQ ID NO: 516480 - DNA, 84 bp, Artificial Sequence
  ENSG00000164904_45 (sequence is synthesized)
gacctcaagcagtctgcctgcctgttgcgccaggcctgcttttagattaaaaccgagagtcctcttgatttcttcttttttgca

SEQ ID NO: 516481 - DNA, 120 bp, Artificial Sequence
  ENSG00000164904_46 (sequence is synthesized)
gattaaaaccgagagtcctcttgatttcttcttttttgcaggctcccgatccttcctggtctgctctctgcctcctgccccgcttgccttctcaccagcctttctgtgtctattttccct

SEQ ID NO: 516482 - DNA, 120 bp, Artificial Sequence
  ENSG00000164904_47 (sequence is synthesized)
cttgctcccagagctccaccttctccaacatcctttcagtgttccaggcatgccaggctctatcctactgtgctgtctgctggaaacattcttcacccagagtggggatggctctgctaa

SEQ ID NO: 516483 - DNA, 120 bp, Artificial Sequence
  ENSG00000164904_48 (sequence is synthesized)
catgcctcctcctcatagaggcctacctacatcttccttcttctttgttgctgggtcactgtcagtgctctagtccccagcagccgtaacataggacagcatcattctcttcccccttga

SEQ ID NO: 516484 - DNA, 120 bp, Artificial Sequence
  ENSG00000164904_49 (sequence is synthesized)
attatacaccaactactgagactgtgatgtttccttagagaatggtcacactgtaatgagtaaactgaccctatattttgagtgcagtgctttgagtaattgatagccattcctttaaac

SEQ ID NO: 516485 - DNA, 120 bp, Artificial Sequence
  ENSG00000164904_50 (sequence is synthesized)
tagagattggcaaacagacttggctctgcctgtttctgtaaaaaaaagtttctcggcacatacccactcatttgcatgtcatttatggctgcttttgcactacaattacggagttgagta

SEQ ID NO: 516486 - DNA, 120 bp, Artificial Sequence
  ENSG00000164904_51 (sequence is synthesized)
acttatgttctcaattgagagcatataggaagggattggtctgttcattgagaaagctgttctaataataaaacgatgccataaagggcaaaatgatgagccagccttccttttctctct

SEQ ID NO: 516487 - DNA, 120 bp, Artificial Sequence
  ENSG00000164904_52 (sequence is synthesized)
tttgcttgtccttctgtaggctgataggacagtggaacagccaacacacacaactttgggcatgacgaaagagcatggtgacttgatagcatcctggtcatttcacatccatgaagaagg

SEQ ID NO: 516488 - DNA, 120 bp, Artificial Sequence
  ENSG00000164904_53 (sequence is synthesized)
aattggttcgtcaccaggagcttctcatgttttctggagaggcatgaaggagatccttctctagagacatctcgctggaaagcttattcctttttctgtgtctacatctcctgttagatg

SEQ ID NO: 516489 - DNA, 120 bp, Artificial Sequence
  ENSG00000164904_54 (sequence is synthesized)
gcccctctgctgtggctctgtagattctactaacatgactccttttttttattctttagtctgcaagtggagatggaattctgttgctattttctgagtttgtctccttacctctaggga

SEQ ID NO: 516490 - DNA, 120 bp, Artificial Sequence
  ENSG00000164904_55 (sequence is synthesized)
cctagctaggtaacaggtaaaaatcaactgtcttgtggaaacgccactgctagaatgagtgaacttcaactgtttttaggctttttgtttctcaaaattaaaactgcaggaaaggaccaa

SEQ ID NO: 516491 - DNA, 64 bp, Artificial Sequence
  ENSG00000164904_56 (sequence is synthesized)
gcatggaaaatctgggcagatagtcgcccaggctagtgtacagtggcatgctcacagctcacgg

SEQ ID NO: 516492 - DNA, 73 bp, Artificial Sequence
  ENSG00000164904_57 (sequence is synthesized)
ctctgttgcctaggctggtctcagactcctgggctcacgcaatttacccacctcaacctcccaaagtgctggg

SEQ ID NO: 516493 - DNA, 120 bp, Artificial Sequence
  ENSG00000164904_58 (sequence is synthesized)
accatgcctgtaataggccatttcccctgttattaacattttgcattagtatgtcatattttgttacaactgatgagccaatgttcatgtgttattataaactaaagtacacaatttaca

SEQ ID NO: 516494 - DNA, 120 bp, Artificial Sequence
  ENSG00000164904_59 (sequence is synthesized)
tgagggttcactctttgcatatcctgttttgaatgctagtgcaacttaacatgttgtcttttgactagaaacgtctattgtatgtgtctatttatctagggtaaatacaaacatttgaaa

SEQ ID NO: 516495 - DNA, 120 bp, Artificial Sequence
  ENSG00000164904_60 (sequence is synthesized)
aaacatttgaaaaaaaaagaatttatgtgaattcagggtcttgtcttttcctgaactggtttttattctgagactgagtcttgctcttgcctaggctggagtgcactggcatgatcttgg

SEQ ID NO: 516496 - DNA, 85 bp, Artificial Sequence
  ENSG00000164904_61 (sequence is synthesized)
ttggctcactgcaacctctgcctcctagactcaagtgattctcctgcctcatcttcctgagtagccgttttttttttgtattttt

SEQ ID NO: 516497 - DNA, 89 bp, Artificial Sequence
  ENSG00000164904_62 (sequence is synthesized)
acaggcatgagccaccacacctggaatgaactggtttttaaatctatctttgccctagggagtgccagctgacattatgatctttctta

SEQ ID NO: 516498 - DNA, 120 bp, Artificial Sequence
  ENSG00000164904_63 (sequence is synthesized)
ttgccctagggagtgccagctgacattatgatctttcttaaatattgggctgtactttttttgttgctattttcacattcaggatctcatttggcagtcaactcttacccaccatgccag

SEQ ID NO: 516499 - DNA, 120 bp, Artificial Sequence
  ENSG00000164904_64 (sequence is synthesized)
cctctgcacctaacatcctttctcatacttctggtgctttttagacctcccaacaaatagaatgggggtgctacgtgggaacaggttgctttcctgggtaatagtagagtcagctgggga

SEQ ID NO: 516500 - DNA, 120 bp, Artificial Sequence
  ENSG00000164904_65 (sequence is synthesized)
tcctacttgtttgattttgagttaagcaattgagttcaaggtttagggaagaggcagagtttttcctaattgtgctctggggctcctccctggggcagggacttagagaggctcggtaag

SEQ ID NO: 516501 - DNA, 120 bp, Artificial Sequence
  ENSG00000164904_66 (sequence is synthesized)
caaagcttgacccccttctcgtcacagaagctttcccatctcgatcctccctcacgtgaggcttctctgcttggccctcatccatttggctgaccttgactgtgttaggacaaaccactg

SEQ ID NO: 516502 - DNA, 78 bp, Artificial Sequence
  ENSG00000164904_67 (sequence is synthesized)
tccatttggctgaccttgactgtgttaggacaaaccactgtttcatgtagttcatttgagttaattctagaatttttc

SEQ ID NO: 516503 - DNA, 77 bp, Artificial Sequence
  ENSG00000164904_68 (sequence is synthesized)
caatggtgccatctcggctcactgcaagccctgcctccccggttcaagcgattctcctaattttttaaatattttta

SEQ ID NO: 516504 - DNA, 76 bp, Artificial Sequence
  ENSG00000164904_69 (sequence is synthesized)
actggccaattctagaatttttcaaagggaacatttttctttaaggaaaatggaaacaaagtgaaacatatggaaa

SEQ ID NO: 516505 - DNA, 120 bp, Artificial Sequence
  ENSG00000164904_70 (sequence is synthesized)
ttctttaaggaaaatggaaacaaagtgaaacatatggaaaggtagtttatagaaattgatttctttctaaggaatagacttgctgctttcttccatgagccagtttcagcacagaatgta

SEQ ID NO: 516506 - DNA, 120 bp, Artificial Sequence
  ENSG00000164904_71 (sequence is synthesized)
gcccatttctgccgtctgcatccccatgtgtcctcattttccctcccatctctggtgagaaagagtaggagtctctctgttcttgaagacagggaactgtttttttttttctttcttttt

SEQ ID NO: 516507 - DNA, 120 bp, Artificial Sequence
  ENSG00000164904_72 (sequence is synthesized)
cccaaagtgctgggaatacaggcgtggaaccacagcccccggccataattttccaaaaccactttctcttgcttttcagcctttgcatatgctctgtacccctctaaccccatgcttttc

SEQ ID NO: 516508 - DNA, 120 bp, Artificial Sequence
  ENSG00000164904_73 (sequence is synthesized)
ctccactttgcctacctcttcacaacacctggcatgctttaggtcttagccctaaacttctaaacttgtaaaaagcctacttcaggttgctccagttgtgaaatctagctcccctttcat

SEQ ID NO: 516509 - DNA, 120 bp, Artificial Sequence
  ENSG00000164904_74 (sequence is synthesized)
ggcatttgccacattagattgtaattgcctgtttcttgcctttatcacccccatggactgtcagctctatagagggcaagaattgtaactgcctcatttgcagtagaatatccagggatt

SEQ ID NO: 516510 - DNA, 120 bp, Artificial Sequence
  ENSG00000164904_75 (sequence is synthesized)
agcacagtatctggcacatagaacatatgcaataattatttgttgaaagactgactgaataaaatgtgtccagaatgggaggtaaaaggccatgtatactggccattctgagttgaaatt

SEQ ID NO: 516511 - DNA, 120 bp, Artificial Sequence
  ENSG00000164904_76 (sequence is synthesized)
aaccaacttaactaagcttataaatgtgctgactaaattcaattgaaacatcattaaacccacaccatgtgctaggaaatgtataggttatgtgctgattgatataatgctacaggtttt

SEQ ID NO: 516512 - DNA, 120 bp, Artificial Sequence
  ENSG00000164904_77 (sequence is synthesized)
tgtttcctgtttccaaaagtgtgcatatgttgtgaaaatgacagacattgcaaacatataaattgtggatgaaaatctgttataatttcattccccacaaaaaaccattgtgaacagctt

SEQ ID NO: 516513 - DNA, 120 bp, Artificial Sequence
  ENSG00000164904_78 (sequence is synthesized)
attttcagcatttctccattgcccagggcttaacaccgcgcctgatacccattactgctcaaaacaatgttttatagaatacaatggaaaggtaaggttattatcgcccagatttttttt

SEQ ID NO: 516514 - DNA, 120 bp, Artificial Sequence
  ENSG00000164904_79 (sequence is synthesized)
taaaagaaagttttttataggaggatgttatgtaacagttaacaaactttgttggacgttgtatattatataatgaacctgccttggtagagggaacacgtcttttggtaatcagtggct

SEQ ID NO: 516515 - DNA, 120 bp, Artificial Sequence
  ENSG00000164904_80 (sequence is synthesized)
gtaggagatacagataattttaattgctcctcagacctcggtgtttcatcctgatttccgtgtggtatctgatcattaggctcttggaggcctttttagctgtgccttgattttcccttt

SEQ ID NO: 516516 - DNA, 120 bp, Artificial Sequence
  ENSG00000164904_81 (sequence is synthesized)
cattgttgacctgagacctctccagttggtgtggacacgggactttccaacagttttcctgccttggccatttcatctctgagcagagggtgggcagagtaaggaagagaagaaataact

SEQ ID NO: 516517 - DNA, 120 bp, Artificial Sequence
  ENSG00000164904_82 (sequence is synthesized)
aaaactagtcagtttggtctgttattaatggaaaaagagacaaaataactgcttatgttaaggcttttgtttatatgcctaatattgagatgtcagaggcgagttttgcagaaaggtagt

SEQ ID NO: 516518 - DNA, 120 bp, Artificial Sequence
  ENSG00000164904_83 (sequence is synthesized)
ttctaatgtttaagtcagaaatgaaagacaacctctgtagagtggtttatatgtaacagaagttaacctaagctttttgagtttgggtattatatcattttttcctctcttgtttttctt

SEQ ID NO: 516519 - DNA, 120 bp, Artificial Sequence
  ENSG00000164904_84 (sequence is synthesized)
tgatggtgcaggagaggtttggtaagtgttggctttctaatgaggattttaattctctcaaatatggaggtgaaatctaaaagttgagtttttgttttcccctcaaccttttccatggag

SEQ ID NO: 516520 - DNA, 120 bp, Artificial Sequence
  ENSG00000164904_85 (sequence is synthesized)
gcagtggtcatgtttatttgaatgtctaagtaaaagaaaagggtacagttattagcagtagaatattagggaagtcctaaatttaaataccaaaatttatgaaaatcccagcactttggg

SEQ ID NO: 516521 - DNA, 120 bp, Artificial Sequence
  ENSG00000164904_86 (sequence is synthesized)
gtccactctcctcatcaatcagccccagtatgcgtggctgaaagagctggggctccgcgaggaaaacgagggcgtgtataatggaagctggggaggccggggagaggatctggccatgca

SEQ ID NO: 516522 - DNA, 120 bp, Artificial Sequence
  ENSG00000164904_87 (sequence is synthesized)
ttttgaaaacggcattttcaatatgtgaggagaaatccaggtctgaatgtttgaggacagaaggacagagtctggtataagagggttcttaatgttagaagtccatttaggaacaatgac

SEQ ID NO: 516523 - DNA, 120 bp, Artificial Sequence
  ENSG00000164904_88 (sequence is synthesized)
ttagaaattgaaaagtgggctgaaaaagcaagagagtagtatatttgagggatgggagagaaagttgaaaaaaggagagtcaagtggttggaatttattccttgtttttaaaaaaatgcc

SEQ ID NO: 516524 - DNA, 120 bp, Artificial Sequence
  ENSG00000164904_89 (sequence is synthesized)
ttaaattattgcctcagtaattgctttttcctttctaggataatagccaaggttctggaggacaacaagctgcctggtgcaatttgttccttgacttgtggtggagcagatattgggtag

SEQ ID NO: 516525 - DNA, 120 bp, Artificial Sequence
  ENSG00000164904_90 (sequence is synthesized)
gttactaggctgagagcatcctctgttgaaggaccccaggttgaccaactagaatcatcgttactagaataatgaactcacttataactaaggagttgagaatggtttttgaaatcatta

SEQ ID NO: 516526 - DNA, 120 bp, Artificial Sequence
  ENSG00000164904_91 (sequence is synthesized)
ttattatggactttgttgggttcttattttattaatgcctaactcctattggaggatgaataagaattgtctttttaattgcccagaggtactatttgttaaggtgtttatatcctgaaa

SEQ ID NO: 516527 - DNA, 120 bp, Artificial Sequence
  ENSG00000164904_92 (sequence is synthesized)
taacaaactgctgtaatggggggcagcctgtgacttcctgacacttggtttatcaaggtgtttacttacaaagaaagctatgaaattgtagtctggggtctcactgcctgccaagaacct

SEQ ID NO: 516528 - DNA, 120 bp, Artificial Sequence
  ENSG00000164904_93 (sequence is synthesized)
agcctattgtctgagtttctcagctgactgaaaaagggaaccctgggaacacagcctctttttagtaaaattgtttttttcttttttaattgccatataattcacaattcgtgtaccata

SEQ ID NO: 516529 - DNA, 120 bp, Artificial Sequence
  ENSG00000164904_94 (sequence is synthesized)
aaatcatgaaatgctctcttttaaagtgtacaatatagtggtttttaaaatattcagagtattgtatatctatcaccactatcttattccagaacattttgatcagccaagaaattaatc

SEQ ID NO: 516530 - DNA, 120 bp, Artificial Sequence
  ENSG00000164904_95 (sequence is synthesized)
ccatacccactggcagtctcttcccattccccctgccctcatgccctgacagccactaaagaattttctgtctctatggatttgcctatttgagacattttgtataaatgtaatcatata

SEQ ID NO: 516531 - DNA, 120 bp, Artificial Sequence
  ENSG00000164904_96 (sequence is synthesized)
acatgtggccttttgtgtcttgctgcttttacttggcatgatattaagatgacatggactatacttgtgctgaactgggatgaaagctgaggttcttaccagcttagactttgattaggt

SEQ ID NO: 516532 - DNA, 120 bp, Artificial Sequence
  ENSG00000164904_97 (sequence is synthesized)
gagtttttcaggagtcaagtcttacaacccatactggtgtggctaaagtgttagtttccttgccttccaacacttttaaatactattgtacttactgggcaatctcaaaaaggagcaata

SEQ ID NO: 516533 - DNA, 120 bp, Artificial Sequence
  ENSG00000164904_98 (sequence is synthesized)
agttactctgtttttcattactctgtttttcatattaatgagaaaattttagaaatacaactcccacatgtataatgcagagtgaaatattatctaagtgtcatttaaaacatgagttgg

SEQ ID NO: 516534 - DNA, 120 bp, Artificial Sequence
  ENSG00000164904_99 (sequence is synthesized)
cctttgactgtattcttgcattctaggtatttagtccttgtgctggccttgcaatagctcagataattatggtagtatatacaggagcatgttaagcagcagccactttgagtattagtg

SEQ ID NO: 516535 - DNA, 120 bp, Artificial Sequence
  ENSG00000164904_100 (sequence is synthesized)
ccctgcttggttcacactggaccctttgtagcactgaattaggaagaaagaggttcaaatcagtagtgtctgatttgcattccttagaagcaactggaaatcctagcatagcctttataa

SEQ ID NO: 516536 - DNA, 120 bp, Artificial Sequence
  ENSG00000164904_101 (sequence is synthesized)
gtaggcttccatgaggaatactttaggatagcggtccccaacctttctggcaccagggactgggactggtttagtggaagacaatttttccatggaccacggcagggggatggttttagg

SEQ ID NO: 516537 - DNA, 120 bp, Artificial Sequence
  ENSG00000164904_102 (sequence is synthesized)
cattagttagattctcataaggagcatgcaatctagatcccttgcatgcacagctcacaatagagttcacactcctctgaagatctaatgctgctgctgatctgacaggaggtggcactc

SEQ ID NO: 516538 - DNA, 120 bp, Artificial Sequence
  ENSG00000164904_103 (sequence is synthesized)
gctgctgatctgacaggaggtggcactcaggcagtaatgctcgccaggttgcctgctgcctacctcctgctgtgcagcctggctcctaataggccacagactggtactggtcagcatcct

SEQ ID NO: 516539 - DNA, 120 bp, Artificial Sequence
  ENSG00000164904_104 (sequence is synthesized)
agcatcctggggcttggggacccctgctttaggatatttccctacaggcttttaagtttgaattcttttattttttatttattttatttttatctttttgagacagggtctcactctgtc

SEQ ID NO: 516540 - DNA, 84 bp, Artificial Sequence
  ENSG00000164904_105 (sequence is synthesized)
cctcccagtgcatgcctccacacctggctaattttagtattttttatagagatggggtttcatcgtgttgcctaggctggtcct

SEQ ID NO: 516541 - DNA, 120 bp, Artificial Sequence
  ENSG00000164904_106 (sequence is synthesized)
tatagagatggggtttcatcgtgttgcctaggctggtcctgcccaagttttaatccttaaaggaattacacagcagttaaaagtttgtaaaactggaatgctcagcaaggaaatgctaag

SEQ ID NO: 516542 - DNA, 120 bp, Artificial Sequence
  ENSG00000164904_107 (sequence is synthesized)
atcatattgtccagtcactcactcagtataggaaagactttcttccctaacaacttcctctaggtgatttctattcaaatgctcacagcaggttagcctcttctgcctaatggttctacc

SEQ ID NO: 516543 - DNA, 120 bp, Artificial Sequence
  ENSG00000164904_108 (sequence is synthesized)
tgtgaaaaacttttttccttctcatgaagaccttcccttgctcccctgggacagactttcttgtagcttcaagggactgctttttcaagggcacttcagtgctgggtaccattagatgtt

SEQ ID NO: 516544 - DNA, 120 bp, Artificial Sequence
  ENSG00000164904_109 (sequence is synthesized)
gtaattgctgggtttctctgcttgggtggccgaccgtgtctgttcccttgcagcacagcaatggccaaagatgaacgagtgaacctgctgtccttcactgggagcactcaggtgggaaaa

SEQ ID NO: 516545 - DNA, 120 bp, Artificial Sequence
  ENSG00000164904_110 (sequence is synthesized)
gaaaaggctgaccaagagactgaaacactccttatattctgaaataaccttatgtgatctaacatatctgaaaaagcttacattctgtattcaaagttatcgcatagagtcctgcgtcat

SEQ ID NO: 516546 - DNA, 120 bp, Artificial Sequence
  ENSG00000164904_111 (sequence is synthesized)
ctcctcagaggcagcatcaggttagagcagaggcccttaacttgaaatgtgtgaacccctgaaatggtggcatttgttttctggggagaagtttccagacccaaaaaagattaagaatcc

SEQ ID NO: 516547 - DNA, 120 bp, Artificial Sequence
  ENSG00000164904_112 (sequence is synthesized)
ctgcttcaaagccagaaaattttatatgaaatattctggtttttatttgcaaagtaggcatataaatgttaaacatactctttttcactagatggaatacaaagttgtttcttttcactg

SEQ ID NO: 516548 - DNA, 78 bp, Artificial Sequence
  ENSG00000164904_113 (sequence is synthesized)
cctgggcaacatgccaagaccctgtctttgccaaaaaaaaaaaagtacaaaaatgagctgggcaatgggggaattgct

SEQ ID NO: 516549 - DNA, 86 bp, Artificial Sequence
  ENSG00000164904_114 (sequence is synthesized)
gttgaggctgcagtaagccatgatcatgctagtacaccccagcctgggcaacagagtcagaccctgtctgctgcatgatatttcac

SEQ ID NO: 516550 - DNA, 120 bp, Artificial Sequence
  ENSG00000164904_115 (sequence is synthesized)
atgatatttcactgtattgttataccacatttactaattcatcagatgatgcacatttgggttgctgccaccttttggctattgtgaattatgctactatgaatattggtgtacaaatat

SEQ ID NO: 516551 - DNA, 120 bp, Artificial Sequence
  ENSG00000164904_116 (sequence is synthesized)
ctatagagtccctgccttactatgtttggttatatactcagaagtggaattgctcggtcatgtggtaattctcttatttatttatttacttacttgagacagtctcattctgttggccag

SEQ ID NO: 516552 - DNA, 120 bp, Artificial Sequence
  ENSG00000164904_117 (sequence is synthesized)
gagtgcagtggtgtgatcatggctcactgttgtctcaaattcctgggcttcacgagtagctgggaccacaggcagacactatcatgcccagctagtttgttttaatttttgtagagacag

SEQ ID NO: 516553 - DNA, 120 bp, Artificial Sequence
  ENSG00000164904_118 (sequence is synthesized)
acagggtcttgccatgttgcccaggctctgttatttaattttttggggcaattgccatactgttttctacagtggctatcccattttactttatttttcttgagtaatgtcagataagac

SEQ ID NO: 516554 - DNA, 120 bp, Artificial Sequence
  ENSG00000164904_119 (sequence is synthesized)
tgggcacgctcagggtggtttggtttggctgtagactttcctgttaatttcaaaccaaaattatatgaccaacataaggaattcctgtaaaccctttaatcagagtcactaattgcttac

SEQ ID NO: 516555 - DNA, 120 bp, Artificial Sequence
  ENSG00000164904_120 (sequence is synthesized)
aaaccctttaatcagagtcactaattgcttacattttgccccatttgatttctcattttctctctctccagcaacatctgtgcgcgcgtgcacgcacacgtacacacacacacacacaca

SEQ ID NO: 516556 - DNA, 120 bp, Artificial Sequence
  ENSG00000164904_121 (sequence is synthesized)
tgaactgtttggagtaagtcaaagatgtgtcccctttattactaaatattttggtgtgtttcctaagaatgtggacattttcttgtataaccacagtagttactaaaatcaggacatttg

SEQ ID NO: 516557 - DNA, 120 bp, Artificial Sequence
  ENSG00000164904_122 (sequence is synthesized)
taggctatataaaaaataattggacaggctatataatttaataattgggattaggctgtgtagcagtgtgcagtaaatatggaagtaggcattaatttttatatataatttttttctttt

SEQ ID NO: 516558 - DNA, 120 bp, Artificial Sequence
  ENSG00000164904_123 (sequence is synthesized)
caaggatgattggaggacctatcttgccttctgaaagatcttgctgtgttgttcaggctggtctcaaacttctctcctcaagtgatcctccccttcagcctcccgagtagctgggattat

SEQ ID NO: 516559 - DNA, 86 bp, Artificial Sequence
  ENSG00000164904_124 (sequence is synthesized)
ttcctaggcccttgtgtatctttttagagcacgtacagccaaatatgtagcaaactatacatttttttttttttgagatggagtct

SEQ ID NO: 516560 - DNA, 120 bp, Artificial Sequence
  ENSG00000164904_125 (sequence is synthesized)
atacttttatattcaataatatatcttggaaattgtttttttgttttctttttttgagacaggattttactgtcttgcccaggccagaatgtagtggcatgatcacagttcactgcagcc

SEQ ID NO: 516561 - DNA, 120 bp, Artificial Sequence
  ENSG00000164904_126 (sequence is synthesized)
cccgggatcaggtgatcctcctacctcagctaggactgtaggtgcatgccaccatacctggctatttttttttttttgtagaggtggggttttgcagtgttgcccagctggtctcgaact

SEQ ID NO: 516562 - DNA, 120 bp, Artificial Sequence
  ENSG00000164904_127 (sequence is synthesized)
ccggggctcaggtgatctgcctgtctcaacctcccaaagtgttaggattgcaggcgtgagccactgtgtcaggctggaaattgttttcgtattattctattaaggggcttccttcatctg

SEQ ID NO: 516563 - DNA, 120 bp, Artificial Sequence
  ENSG00000164904_128 (sequence is synthesized)
tgtttgcagctatctattttgttataaagagactataatttatttagtcagcttccaaatgatgtatatgtagggctgttttcagtgttttgctattacaagctgttctgtaagaaccaa

SEQ ID NO: 516564 - DNA, 120 bp, Artificial Sequence
  ENSG00000164904_129 (sequence is synthesized)
gtgccgccttgttaaaatgtgagctccttgggggctgtgatactgtactagggctcctgctgttttggaaacacctctgccatatttctagggtagtgccttttttgtacttgccattca

SEQ ID NO: 516565 - DNA, 120 bp, Artificial Sequence
  ENSG00000164904_130 (sequence is synthesized)
taaacttgagctgtgaacactattcttcactgaaattacttgaatttataattaaatagaaaatgaatagaagatctatgccagaaatatttgtttgctcctcctctatccccctgccag

SEQ ID NO: 516566 - DNA, 120 bp, Artificial Sequence
  ENSG00000164904_131 (sequence is synthesized)
atttgtctgggagtatctcagcaataggtcagcattcctggtttaaagaacaacagcagatcgcacctggtggctcatgcttgtgatcccaccacttcaggaggctgaggcgggtggatc

SEQ ID NO: 516567 - DNA, 120 bp, Artificial Sequence
  ENSG00000164904_132 (sequence is synthesized)
tcagccgcaggctcctccggaagaccaggggcagacggggcggtggcggggtcgtgcccagtgggaggggtcgggtctgcccaatgggttctcccgggcggggggcggggctctatttca

SEQ ID NO: 516568 - DNA, 66 bp, Artificial Sequence
  ENSG00000164904_133 (sequence is synthesized)
gccagtgtggcagactatgaagaaactgtaaagaaagcaagagaagcatggaaaatctgggcagat

SEQ ID NO: 516569 - DNA, 80 bp, Artificial Sequence
  ENSG00000164916_0 (sequence is synthesized)
ggagccgcgcgaacatggccgaagtcggcgaggacagcggcgcccgcgccctgctcgcgctgcgctcggcgccctgcagc

SEQ ID NO: 516570 - DNA, 80 bp, Artificial Sequence
  ENSG00000164916_1 (sequence is synthesized)
ccgccgccaccgccgctgcctccgggcgcgatcgcgggcgcgggctcctccgggggctcctccggggtatccggggactc

SEQ ID NO: 516571 - DNA, 120 bp, Artificial Sequence
  ENSG00000164916_2 (sequence is synthesized)
cctggtggccgcggcggccgcctcggtacggcagagcccggggccggcgctggcgcggctggagggccgcgagttcgagttcctcatgcgccagcccagcgtcaccatcggccgcaactc

SEQ ID NO: 516572 - DNA, 120 bp, Artificial Sequence
  ENSG00000164916_3 (sequence is synthesized)
tcctcatgcgccagcccagcgtcaccatcggccgcaactcgtcgcagggctcggtggacttgagcatgggcctgtccagcttcatctcgcggcgccacctgcagctcagcttccaggagc

SEQ ID NO: 516573 - DNA, 120 bp, Artificial Sequence
  ENSG00000164916_4 (sequence is synthesized)
cgcacttctacctgcgctgcctcggcaagaacggcgtcttcgtggacggggccttccagagacgcggcgcgcccgccctgcagctgcccaagcagtgtaccttccggtttcccagcacgg

SEQ ID NO: 516574 - DNA, 120 bp, Artificial Sequence
  ENSG00000164916_5 (sequence is synthesized)
ccatcaagatccagttcacgtcgctctatcacaaagaagaggccccagcctccccgctgcggccactgtacccccagatctcccctctgaagatccacatcccggagccggacctccgga

SEQ ID NO: 516575 - DNA, 120 bp, Artificial Sequence
  ENSG00000164916_6 (sequence is synthesized)
gcatggtcagccccgtcccctccccgacgggcaccatcagtgtccccaactcctgcccagccagtccacgcggtgccggctcctccagttaccgctttgtgcagaacgtgacctcggacc

SEQ ID NO: 516576 - DNA, 120 bp, Artificial Sequence
  ENSG00000164916_7 (sequence is synthesized)
tgcagctggcagcagagtttgcagcaaaggccgcgtcggagcagcaggcagacacgtctggaggagacagccccaaggatgagtcaaagccgccgttctcctacgcgcagctgatcgtgc

SEQ ID NO: 516577 - DNA, 120 bp, Artificial Sequence
  ENSG00000164916_8 (sequence is synthesized)
aggccatctcctccgcccaggaccggcagctgaccctgagcgggatctacgcccacatcaccaagcattacccctactaccggacggccgacaaaggctggcagaattctatccggcaca

SEQ ID NO: 516578 - DNA, 120 bp, Artificial Sequence
  ENSG00000164916_9 (sequence is synthesized)
acctctctttgaaccgttactttatcaaagtcccacgttcccaggaggagcctgggaaggggtccttttggcgaatagaccctgcctctgaagccaagctcgtggaacaggcattccgga

SEQ ID NO: 516579 - DNA, 120 bp, Artificial Sequence
  ENSG00000164916_10 (sequence is synthesized)
aacggaggcagaggggtgtctcctgcttccgcacccccttcgggcctctgtcctcaaggagcgctccagcttcgcccacacaccccgggctgatgtcccctcgctccggcggcctgcaga

SEQ ID NO: 516580 - DNA, 120 bp, Artificial Sequence
  ENSG00000164916_11 (sequence is synthesized)
ccccagagtgcctgtctcgggagggctcccccattccacacgaccctgagtttgggtccaagttagcttctgtcccagagtaccggtattcccaaagcgcacccggctcccccgtcagcg

SEQ ID NO: 516581 - DNA, 120 bp, Artificial Sequence
  ENSG00000164916_12 (sequence is synthesized)
cccagccagtgatcatggccgtgcctccccgaccgtccagcctcgtggccaagcccgtggcctacatgcccgcctccatcgtaacctcacagcagcccgcgggccacgccatccacgtcg

SEQ ID NO: 516582 - DNA, 120 bp, Artificial Sequence
  ENSG00000164916_13 (sequence is synthesized)
tgcagcaggcccccaccgtcaccatggtcagggtggtcaccacatctgccaactcggccaacggatacatcctcaccagccagggcgcggcggggggctcccatgatgcggcgggcgcag

SEQ ID NO: 516583 - DNA, 120 bp, Artificial Sequence
  ENSG00000164916_14 (sequence is synthesized)
ccgtgctggacctgggcagcgaggccagaggcctggaggagaaacccaccattgcgtttgccacaatccccgcggctggtggagtcatccagacggtggccagccagatggcccccgggg

SEQ ID NO: 516584 - DNA, 120 bp, Artificial Sequence
  ENSG00000164916_15 (sequence is synthesized)
tccccggacacacggtcaccatcctgcagcccgccacacccgtgaccctcgggcagcaccaccttccagtccgggccgtgacccagaacggaaagcatgcggttcccacgaacagtttag

SEQ ID NO: 516585 - DNA, 120 bp, Artificial Sequence
  ENSG00000164916_16 (sequence is synthesized)
ccggcaacgcttacgccctcaccagccctttgcagctccttgcgacccaagcgagttcatccgcgccggtggtggtcacccgggtgtgcgaggtggggcccaaggagccagcagcagccg

SEQ ID NO: 516586 - DNA, 120 bp, Artificial Sequence
  ENSG00000164916_17 (sequence is synthesized)
tcgcggccacggccaccaccaccccagccactgccaccaccgcctctgcctccgcctcttccactggagagcccgaggtcaaaaggtcccgggtggaggagcccagtggtgctgtaacca

SEQ ID NO: 516587 - DNA, 120 bp, Artificial Sequence
  ENSG00000164916_18 (sequence is synthesized)
caccggctggagtgatcgcagctgccggcccccaggggccaggcaccggggagtgaggtcacctgcaacgcgggggagtgggactcacccagcggcgaccccgaagctggacccggcagc

SEQ ID NO: 516588 - DNA, 120 bp, Artificial Sequence
  ENSG00000164916_19 (sequence is synthesized)
tcaggcggccgcacccacagacggaggagaacagcccgcggcggcctgtgggcatcggcggcacctggacacacccagccctttccatttgatcgcctgccttcccgtggtttaagacaa

SEQ ID NO: 516589 - DNA, 120 bp, Artificial Sequence
  ENSG00000164916_20 (sequence is synthesized)
aaacacataaacaagttcagacaactgattgtatgattctgggaattctttgctttcctttccttctccctcggcaccacctcctctccccaggcctccctgtcgggcatggggaggagg

SEQ ID NO: 516590 - DNA, 120 bp, Artificial Sequence
  ENSG00000164916_21 (sequence is synthesized)
ttggagctcagcatcttgaggaatgtgtcaagacagcccctccgctccgcgctgcacggccagccgcctttgtccgggaggacagacagaaacgcagcaaggcacacaccaaggctgccg

SEQ ID NO: 516591 - DNA, 120 bp, Artificial Sequence
  ENSG00000164916_22 (sequence is synthesized)
gggaggcccgggcaccggacagatgcctgttgggaagccaggagctgccgagccacggaccacctaacagcctctccgcccggaacgtgacatagagagtgttggcattaactcgggggg

SEQ ID NO: 516592 - DNA, 120 bp, Artificial Sequence
  ENSG00000164916_23 (sequence is synthesized)
tgtccgatttcacttcagaccccaagtttttctttgtttgtttaaacatggaattcagacttcattgtacacctgagacagacacaaaagggatcatgtatttttgaggattttacctgt

SEQ ID NO: 516593 - DNA, 120 bp, Artificial Sequence
  ENSG00000164916_24 (sequence is synthesized)
tgacgtctgatgaccggccgtaggtccagggttcccgctgggtttaatcccctcgaagagtaaacctgccgctctgtctgataacttcaagtaagagcagcggcttcctgggttggcgtt

SEQ ID NO: 516594 - DNA, 120 bp, Artificial Sequence
  ENSG00000164916_25 (sequence is synthesized)
cgcggtggaaggttcctaggatgaaaggtgagcctggatccgccggccgcagacatcgcgctgctggggacgattggggccgctgctctgcagaccagaccttcccgaattatccgtggc

SEQ ID NO: 516595 - DNA, 120 bp, Artificial Sequence
  ENSG00000164916_26 (sequence is synthesized)
tccgatgtcccggtgctgacggccacatggggacctaacagtgccaaacgccatctgctccagctgctttttcacccagttgcagagtcctcaccactcccacattgatctgctgttttc

SEQ ID NO: 516596 - DNA, 120 bp, Artificial Sequence
  ENSG00000164916_27 (sequence is synthesized)
aattggaaccatttctcctgcctgaaactccagggcccctccctgggctgtccgtgagcaggagaccccaccccagcagcagtggtgagcaggcctgtgcctccacgcccagcccccgcc

SEQ ID NO: 516597 - DNA, 120 bp, Artificial Sequence
  ENSG00000164916_28 (sequence is synthesized)
aacgcgactggttttgtttgccacacggtgagaaccggaggacgggatgctccagccagttgggtggttctggggtccctgaggaagccccctcctgcacttccattaagacagccagtg

SEQ ID NO: 516598 - DNA, 120 bp, Artificial Sequence
  ENSG00000164916_29 (sequence is synthesized)
gttcctggatctttgtcaccaagcagcgttgagccagagctgtctaatgctgagcccagctcaggaaggagagaggagtccttcagtgtgtcttggagatgcgaagtgcgtcctcgtaaa

SEQ ID NO: 516599 - DNA, 120 bp, Artificial Sequence
  ENSG00000164916_30 (sequence is synthesized)
ggtcagctgtcagttttgctggccgctccggcgctggctctcctgtccgggaccacaacgagaaacagcgacagattcgacgcagagctccggaagtgcctgaggagcagtggttcttgg

SEQ ID NO: 516600 - DNA, 120 bp, Artificial Sequence
  ENSG00000164916_31 (sequence is synthesized)
aaatcgcccgtcctccgcatcacagcctctcaccagcaaagcagcctctgcccaggccctggcgggagagctgcagagggacccaggtgcctggagggcatttgagggaggtggctggac

SEQ ID NO: 516601 - DNA, 120 bp, Artificial Sequence
  ENSG00000164916_32 (sequence is synthesized)
aggtgtctccctgaagaagaagggagaacacttttcaaagtgattccgaggcagtgcgggaggacacacgtgctgtgcagtggagtggggtcgcccgtggcccccatcagagtccccgtc

SEQ ID NO: 516602 - DNA, 120 bp, Artificial Sequence
  ENSG00000164916_33 (sequence is synthesized)
ccccaggacaagtgcagaacctctgtgggccccctccttccacctagatagagaaaaccccttgttcggtttccttcccgtgtcccgttgtttttctaagccccccgaattgagtcgttt

SEQ ID NO: 516603 - DNA, 120 bp, Artificial Sequence
  ENSG00000164916_34 (sequence is synthesized)
ctatggcactaacctttccatgggaaataagctctttgtggaagtccgtacctgttgccctgggtgaggtttcagagaaacgggggcaggatgaacacagccggctgtcctgggtgcagt

SEQ ID NO: 516604 - DNA, 120 bp, Artificial Sequence
  ENSG00000164916_35 (sequence is synthesized)
tacgtccgtggagggtgagagattgcgccccgttccacacttgtgtcgcctgctgttgtctgtgggccttttctttccgtggtgcctggtgtgtgcgtgcatggcgtgagagaacggggg

SEQ ID NO: 516605 - DNA, 120 bp, Artificial Sequence
  ENSG00000164916_36 (sequence is synthesized)
gtgggggttggaggtggctccccgacaccggtgcctgtgtggcctgagccggcgccctcccgggagcgcccgtcacggggggcctctgtgattacctgctgctgctctctcccgcgtggt

SEQ ID NO: 516606 - DNA, 120 bp, Artificial Sequence
  ENSG00000164916_37 (sequence is synthesized)
gactatatgtcctcagggctgcctgtggccaccctgatgggagacctctgtttgcttctgggccactgcaggttggcctcctcaatacaagctgatgtctgcagggagcgccgcgtgctg

SEQ ID NO: 516607 - DNA, 120 bp, Artificial Sequence
  ENSG00000164916_38 (sequence is synthesized)
ggattgcaccacgtgttggtcacaaatcgaggtcgccttttggcctggtctgctcaggctggccctgacccacgtggtttcctggcttctgagacgcagcgcattcttcctgttagcggt

SEQ ID NO: 516608 - DNA, 120 bp, Artificial Sequence
  ENSG00000164916_39 (sequence is synthesized)
agcgttctctgatttcactgcttcattgccaagggcgtggaaagggggtggtggatggagccgggaggtggcgagcacaggaccccggggctgcattctgccgtgtggggttctgcactg

SEQ ID NO: 516609 - DNA, 120 bp, Artificial Sequence
  ENSG00000164916_40 (sequence is synthesized)
tctagcttctgcggggactgcaaagagggatgaagggacgtggtcctaggggtcggctcagactcggagcagggcagggagaggagggcaaggagaggaggcctgggtcctggatccact

SEQ ID NO: 516610 - DNA, 120 bp, Artificial Sequence
  ENSG00000164916_41 (sequence is synthesized)
gctctgggctcataaccatgagattttgaaagagtttttggtcatctgagcaggtaccatgcctggctcatgccggaacttgtcttggaaccggtagccagaggcccaggaagggacagg

SEQ ID NO: 516611 - DNA, 120 bp, Artificial Sequence
  ENSG00000164916_42 (sequence is synthesized)
gcccaaaagggttgcatgtcccggccacaaagccctccctgtgtgccctgagccagcccagcaagcgcctcccagccaggcgctttcgcagaagcaagagcacaggccagggggaccggg

SEQ ID NO: 516612 - DNA, 120 bp, Artificial Sequence
  ENSG00000164916_43 (sequence is synthesized)
agagcctcagcccccagcctgggcggcctgtgaccctgagccgtgtggagccaggacccaagaaccttctctaggttctcaagggtgagctgacccgggcaatgtgcaggaatgtgggga

SEQ ID NO: 516613 - DNA, 120 bp, Artificial Sequence
  ENSG00000164916_44 (sequence is synthesized)
gcaaaagtagctgattccagccccgttctggggtcactggggaggcagaggctgagggcctgttctctggtcaccagggactgggggcacggtccacagcggatgagaacagcaggtcac

SEQ ID NO: 516614 - DNA, 120 bp, Artificial Sequence
  ENSG00000164916_45 (sequence is synthesized)
agtagtggctttgggaagggcccctcctgctttgccctgttcggaaaggggctccctcagagcccctgggcccagtaacccgcttctgtctcctgactcctgctggataaattgccaggt

SEQ ID NO: 516615 - DNA, 120 bp, Artificial Sequence
  ENSG00000164916_46 (sequence is synthesized)
gaggtaagtcccaaaaagaacgtcttaagtagagcaaaggcatccaccgaggccatttggtggcccctgggaagtggggaagcagggcctgagcgtccccaggctgctagggcagcagct

SEQ ID NO: 516616 - DNA, 120 bp, Artificial Sequence
  ENSG00000164916_47 (sequence is synthesized)
ggctcagggcacactctctcgtgccagcttctgccaccagcccagtgtccacggagccgcggggccagaggagctcagggagacctggctgtctagggcatggtacccagtatcccggtg

SEQ ID NO: 516617 - DNA, 120 bp, Artificial Sequence
  ENSG00000164916_48 (sequence is synthesized)
tgtgcccatcctcagccacttgtgtctttctttccatgtgggagttctcccggtgacacctgccctccgttgagggtggaatctgtcactcatgcctttgagggacccagatggaccatc

SEQ ID NO: 516618 - DNA, 120 bp, Artificial Sequence
  ENSG00000164916_49 (sequence is synthesized)
cctcttctgcttgctttctacattcctaaaaacctcaacgttaatccctcaccagtcgggccgagtgtggcctcatggttctgccgcggcccagtcttctcccactggcttcacgctaga

SEQ ID NO: 516619 - DNA, 120 bp, Artificial Sequence
  ENSG00000164916_50 (sequence is synthesized)
gggcgccatgcgctctgggtgaaatgagacgctggtgtggggtccccatgtagagaccctcaggtccctatccagagaccctccaggcagtgctgggaagacactggtggcggggaccat

SEQ ID NO: 516620 - DNA, 120 bp, Artificial Sequence
  ENSG00000164916_51 (sequence is synthesized)
gaccaggcgggtggagccatgtgtgtctcacacctgccgcccctcactttccttcccgaggtctggtaggtcctctttgggatttgctgtttatttgtatctcccttttctttgatttaa

SEQ ID NO: 516621 - DNA, 120 bp, Artificial Sequence
  ENSG00000164916_52 (sequence is synthesized)
gaacaatgccaagtgaaaaagctgggaatgaatttctgagttgctgagtgttccctgctcctaggtaccacgctctgtgcttctcaggcagggaggagatggattcggtggagttgggcc

SEQ ID NO: 516622 - DNA, 120 bp, Artificial Sequence
  ENSG00000164916_53 (sequence is synthesized)
aggacgggggcttcaccctgccccctccagactgccgaagcccccaagaagttttgagcccagctgggcctcgcctccccggctcctgggtccattttctgtactggtttgagatcacag

SEQ ID NO: 516623 - DNA, 120 bp, Artificial Sequence
  ENSG00000164916_54 (sequence is synthesized)
gcatcattcagcgaatgctcttgtgtcctctgcataaagagggccctccctggagcacccccggggagctgggactctccagaaagccccgggtgagggctccgtcttgagagagagaga

SEQ ID NO: 516624 - DNA, 120 bp, Artificial Sequence
  ENSG00000164916_55 (sequence is synthesized)
aatcccttctttgggcgattcagtgagttcaggaggaggaggaagcttttccttggctttgaaatcagtgtttttatggagacaaagaacagacctcagtgggaaaaatgaaaacgtaat

SEQ ID NO: 516625 - DNA, 120 bp, Artificial Sequence
  ENSG00000164916_56 (sequence is synthesized)
ggaacacggggaggtgtcggagaagaaaggattttccccttcgctttcagagccggcgggagtgcaggtctgttttgcttcagaagcctcacattctgctttgcccttgagtgacttcat

SEQ ID NO: 516626 - DNA, 120 bp, Artificial Sequence
  ENSG00000164916_57 (sequence is synthesized)
gcgggatgaggaactgttgacccctctagagaggacaccccaagtccatcctgggctcctcctcacccctctgagaaagcccccctaaaaaaaggcttcagagtcaccggcatgccgcct

SEQ ID NO: 516627 - DNA, 120 bp, Artificial Sequence
  ENSG00000164916_58 (sequence is synthesized)
cacgttgcaggacggaatcgcgcgctcctcacgctggagtaagttacgaaacatgatcgtcaggctctttgcaaacgcagagccccagaacgctggatggaggcctcctcggccctgcgg

SEQ ID NO: 516628 - DNA, 120 bp, Artificial Sequence
  ENSG00000164916_59 (sequence is synthesized)
gcggcctggctgcggtaggtctgctgcaaggagccaccacggggactgcgccacactcctgatgaaaacgtgtttacccacagcctcgcctcgagcctccttgacaataccgctgcttca

SEQ ID NO: 516629 - DNA, 120 bp, Artificial Sequence
  ENSG00000164916_60 (sequence is synthesized)
aagcaatattatttaatgagaatactttacattgctcacatgtgctgctatgaagacaggattagtctgtagacgggactcagctccagaggttcctgggtaatgtattgtggctcttgg

SEQ ID NO: 516630 - DNA, 120 bp, Artificial Sequence
  ENSG00000164916_61 (sequence is synthesized)
aaatgagggtagaatttgaaatataacaaatggtctctcgcccggttctgtcccttatttttagattgttttcctgcatcttacaatttccttttcttttcaaagttcctttctccaggc

SEQ ID NO: 516631 - DNA, 120 bp, Artificial Sequence
  ENSG00000164916_62 (sequence is synthesized)
ctgtttttcagtgctcaggacacggttttcatcacatacttactgtttttttggttgggttttgatacgaaaagctgctacgtttggtgaccagagggagggtttggaatctgtgctttg

SEQ ID NO: 516632 - DNA, 120 bp, Artificial Sequence
  ENSG00000164916_63 (sequence is synthesized)
caggggatctcggtgggtaccgcggcccctcgcagggtggcgagtggggtccgtgcctcgagaagggggcccttacccacaccgtgcggcttgaattctgtcggagttgaatctgtggaa

SEQ ID NO: 516633 - DNA, 120 bp, Artificial Sequence
  ENSG00000164916_64 (sequence is synthesized)
aggattgtcccattagagctgctgcgtcctttcctctgtcctccctgtcacccaaaccccgaagtcacagctgcttagaagaatgggattttggggatacaaccacacacatttccctct

SEQ ID NO: 516634 - DNA, 71 bp, Artificial Sequence
  ENSG00000164916_65 (sequence is synthesized)
gaatgggattttggggatacaaccacacacatttccctctggactgaaattttaaaaacagacccatttca

SEQ ID NO: 516635 - DNA, 120 bp, Artificial Sequence
  ENSG00000164916_66 (sequence is synthesized)
ttagggaaaatagtttcagtcttgggttgtcttgtgagcccacgggcatgggaccctgtctctgctgggcttttccggccccgtcccagctcctcctcaggcagaggctgcagccctcag

SEQ ID NO: 516636 - DNA, 120 bp, Artificial Sequence
  ENSG00000164916_67 (sequence is synthesized)
ctctgctgctggatggaacatttcaaccccctccgggaaggtgggcagggtggagggcccagggctaggcctgccatgcaccatgagcaggggtgctacctgggtgtgtgaagttgggct

SEQ ID NO: 516637 - DNA, 120 bp, Artificial Sequence
  ENSG00000164916_68 (sequence is synthesized)
ggcttttcctggaggtgggtgagaaggctctccgggcaaatcagaaggccacgagagagagaggagcggggagagtggtgaggaggattcgtctctgactgatgaacctcgccgtgcctg

SEQ ID NO: 516638 - DNA, 120 bp, Artificial Sequence
  ENSG00000164916_69 (sequence is synthesized)
tctgtcacatccaagtctgtgccagctgctgggaggtcagactcctgccctgagaaacagcccagtccttggagaatgaaaccctgagggtcagtgagtggaggccttccctcggggcca

SEQ ID NO: 516639 - DNA, 120 bp, Artificial Sequence
  ENSG00000164916_70 (sequence is synthesized)
gccattcccgggaggcctgagtgtgacctggaagctctgtgggtcaccaagactggcattttccttgtatttttgtgcagggctgaagtgagcgttcctcctctgaattggtgaggcttt

SEQ ID NO: 516640 - DNA, 120 bp, Artificial Sequence
  ENSG00000164916_71 (sequence is synthesized)
ggaaattttttgtttcttctactcatcctaatggctggttttggctgcccggagtatcagagaatatcactaagagggcagtcagtttatttttaggcatctttctttctgtccagggag

SEQ ID NO: 516641 - DNA, 120 bp, Artificial Sequence
  ENSG00000164916_72 (sequence is synthesized)
aaacccctcggaagaatcttagtcactctttgcacctgccctgtcattctcgccatggggaaaatgcgttgaaaagaaaaataccggggccagggagaagccgtgaatgtatttatttgc

SEQ ID NO: 516642 - DNA, 120 bp, Artificial Sequence
  ENSG00000164916_73 (sequence is synthesized)
tttggtgaagctgctgaacactggctgcggagggccccccgcccccatcccgcttcaggccccagtgacccagttgcgtcttaagttccatcgtccagatttcaggccaccagaggctgc

SEQ ID NO: 516643 - DNA, 80 bp, Artificial Sequence
  ENSG00000164916_74 (sequence is synthesized)
ttaagttccatcgtccagatttcaggccaccagaggctgccaaaggtgactgaagcggtctccaagtcactctgtcacca

SEQ ID NO: 516644 - DNA, 120 bp, Artificial Sequence
  ENSG00000164916_75 (sequence is synthesized)
tttgttttttgttgttttgttttgttttagcgtgatactacaatggaaagactcctagttggttattctttatctcggattcttttttctggaattgtttgctcatttgagtggttggtg

SEQ ID NO: 516645 - DNA, 120 bp, Artificial Sequence
  ENSG00000164916_76 (sequence is synthesized)
ggttggtggtttgccctgtgtcagacacggtgaaaagagtgcaggaaagctggggccaggggaagcgaagtggcttcaatccgggctgacagccaagaagagttttcctcccttcggtga

SEQ ID NO: 516646 - DNA, 120 bp, Artificial Sequence
  ENSG00000164916_77 (sequence is synthesized)
cagggcctgcccctccgagtctagaggtaaaagcagcttctagaactggcccctaagtctccaaatgtgttggctaagctgaaatgagagactctgaattagagtttttgtttgtttgtt

SEQ ID NO: 516647 - DNA, 120 bp, Artificial Sequence
  ENSG00000164916_78 (sequence is synthesized)
tgttctctgcatgaagttcacaggcctgtatggatgttaaattgtgtctatagcctctaaatctccaggttaactggtccagattttttttttttaatcagtaacaatgggaatttaaaa

SEQ ID NO: 516648 - DNA, 120 bp, Artificial Sequence
  ENSG00000164916_79 (sequence is synthesized)
acagagggagactctgtctcaaaaataataatcaaatcaagtattttaagtttggctcttctttttttcaagaaaggctttttggatacctagaataccttcatgtatgtggcttgattt

SEQ ID NO: 516649 - DNA, 120 bp, Artificial Sequence
  ENSG00000164916_80 (sequence is synthesized)
gaataccttcatgtatgtggcttgatttctgtttcaggaaaaggggggcgggaggagagacaacagccgtgttccagagtctgtcctgagatgtcgctgagtccagacacttgggctgca

SEQ ID NO: 516650 - DNA, 120 bp, Artificial Sequence
  ENSG00000164916_81 (sequence is synthesized)
cgtgccctgcagatgacaaaggccggcagctcagcacacgtgcaggaggggttaaagccaatattgagtttttgttcttgttgttttaatctgaacgattattctcctgtaaaaataatt

SEQ ID NO: 516651 - DNA, 88 bp, Artificial Sequence
  ENSG00000164916_82 (sequence is synthesized)
acagtggcgcctgtctaaagtatttttcacaacatgtttgataatcagtgctttaaaaagcagcagtgtcctatgaagtggaaatgtc

SEQ ID NO: 516652 - DNA, 120 bp, Artificial Sequence
  ENSG00000164916_83 (sequence is synthesized)
tgctttaaaaagcagcagtgtcctatgaagtggaaatgtcagttctagagcattggatgtgaagttctggtcatgtcaccttgcgtgtctcaccctggaggagtgaaggtgggcgcccgg

SEQ ID NO: 516653 - DNA, 120 bp, Artificial Sequence
  ENSG00000164916_84 (sequence is synthesized)
cgggggggtgtggctgcaccccagcaccgggagggggcacgcacgacaccagaggaagggacagccccacccatgtcaacagcaggcaacctgtgttttcatttcaagtgggatacagta

SEQ ID NO: 516654 - DNA, 120 bp, Artificial Sequence
  ENSG00000164916_85 (sequence is synthesized)
tttttttaataaggagccatacttttttttaagagtttgagatctgaatgtgatttctaattgtatcagacgttaatgttttaaagctataacaaagtttaaaatttctactttttgttt

SEQ ID NO: 516655 - DNA, 120 bp, Artificial Sequence
  ENSG00000164916_86 (sequence is synthesized)
ttcatttattttaactgttcttttatctattaaattgttgtatgtggatggggaagttttgtttctcctcttagcatttgtttctataaccagaaataaaattctatattaaagaaatga

SEQ ID NO: 516656 - DNA, 120 bp, Artificial Sequence
  ENSG00000164916_87 (sequence is synthesized)
acagcccagggcctgcgggcgtgtgctcgaggtggtctcagcccacagggaatggagccgcagctggcggtagagccgtcggccctttctcgttttcgtgcccaaatcatccccgttggt

SEQ ID NO: 516657 - DNA, 120 bp, Artificial Sequence
  ENSG00000164916_88 (sequence is synthesized)
catttgctggtgacaggggtggcgccgtcaccgagggcccctcccgccacgctccttgttcatctgccgctggcagcccggcgtcaaagccttcatacagcccttgagcaggatggcgtt

SEQ ID NO: 516658 - DNA, 120 bp, Artificial Sequence
  ENSG00000164916_89 (sequence is synthesized)
ctccttataactttgtcttagttcatttttgtccaatagctgttttcaaattgatttctggaagaggtgagaaatttcagaattaaattataataaaaccgaagttttccttcccatgag

SEQ ID NO: 516659 - DNA, 120 bp, Artificial Sequence
  ENSG00000164916_90 (sequence is synthesized)
ttcttagaagtggaaatgtgtgtagcaataggaacggttcctaaggccaagaataaatggattgcggttgtgggtcttttggtagcactaagctttctgttgcagtgtgtgagaggaccc

SEQ ID NO: 516660 - DNA, 120 bp, Artificial Sequence
  ENSG00000164916_91 (sequence is synthesized)
ggggagagcccaatcttcgaagggacagatgaggggtatgacctggggagcccacaaccgcctttgcttttcgcagatgctgggaacgcagctctgctgccggcggggtggacagaccct

SEQ ID NO: 516661 - DNA, 120 bp, Artificial Sequence
  ENSG00000164916_92 (sequence is synthesized)
cccccagccattgctgcccacctgctgcgtcagggcctcccctgcccagctcagtcttggccaagcccagtctggaggagcatgcaccgcctgtgagcggtctgggcagcgcttcccagg

SEQ ID NO: 516662 - DNA, 120 bp, Artificial Sequence
  ENSG00000164916_93 (sequence is synthesized)
ttgcccatcagatgagcccgtcccaggtgtcgaggaggagatctcctgagcggcagtctcggaaatccttccccgtggaaggacacgttaacctctcgtgcttcccatttcaaaattctg

SEQ ID NO: 516663 - DNA, 120 bp, Artificial Sequence
  ENSG00000164916_94 (sequence is synthesized)
tttccaacacgatttgatgaaagattgaaatatctgaaaattcatttcgagcacagggtctggcattgtgattctcaggtgaactgggcgtatggttgaggtaggacttcaaaaaagtgt

SEQ ID NO: 516664 - DNA, 120 bp, Artificial Sequence
  ENSG00000164916_95 (sequence is synthesized)
tcgaacgtcatttgcagcatttaaactgagctccaaatgacgttcaaacacccctctcgggtagagttttcatggtggaacggttgcgcccaccaaacagaagcttatgtttttggcaca

SEQ ID NO: 516665 - DNA, 120 bp, Artificial Sequence
  ENSG00000164916_96 (sequence is synthesized)
gaaggcctgggccattttcatggacacctggctggacctcggtggaagtgaactccgtaggttgttgcgttcactgcagcacctcacatgataccgtcccctctcatggaacggagcctc

SEQ ID NO: 516666 - DNA, 120 bp, Artificial Sequence
  ENSG00000164916_97 (sequence is synthesized)
ccccatgcagcccccactcaaatggagttttaaaggctgggttcaggttacgggggcgtttctcaccgtctgaatgcggaggacagagacgagctccagggagcgtgggcgggtgacggc

SEQ ID NO: 516667 - DNA, 120 bp, Artificial Sequence
  ENSG00000164916_98 (sequence is synthesized)
gcgtgatgtctcggaaacgtcctcgcatccctcagcgcgggcgctgactgccgcggcccttgcctgtcttccaggagcgctccagcttcgcccacacaccccgggctgatgtcccctcgc

SEQ ID NO: 516668 - DNA, 120 bp, Artificial Sequence
  ENSG00000164916_99 (sequence is synthesized)
ccattggcctgggcctggggcttgaggaggatgattctctgcttctgcctctcgctgccttgtccctttaaatcagcatgagctgggcaggtggctcatgcttataatcccagtgctttg

SEQ ID NO: 516669 - DNA, 88 bp, Artificial Sequence
  ENSG00000164916_100 (sequence is synthesized)
agctgggcaggtggctcatgcttataatcccagtgctttgggaggccaaagcgggtggattacttgaggtccggagttcgaggtcagg

SEQ ID NO: 516670 - DNA, 69 bp, Artificial Sequence
  ENSG00000164916_101 (sequence is synthesized)
ccaggcatgatgatgcgcctggaggcagaggttgcagtgagctagactgcgccactgcactccagcctg

SEQ ID NO: 516671 - DNA, 120 bp, Artificial Sequence
  ENSG00000164919_0 (sequence is synthesized)
agcacggttcgtttttcctttagtcaggaaggacgttggtgttgagcatacgtatcaaggacagtaactaccatggctcccgaagttttgccaaaacctcggatgcgtggccttctggcc

SEQ ID NO: 516672 - DNA, 120 bp, Artificial Sequence
  ENSG00000164919_1 (sequence is synthesized)
tggctgatcaaagaaagaaggcatacgcagatttctacagaaactacgatgtcatgaaagattttgaggagatgaggaaggctggtatctttcagagtgtaaagtaatcttggaatataa

SEQ ID NO: 516673 - DNA, 120 bp, Artificial Sequence
  ENSG00000164919_2 (sequence is synthesized)
agaatttcttcaggttgaattacctagaagtttgtcactgacttgtgttcctgaactatgacacatgaatatgtgggctaagaaatagttcctcttgataaataaacaattaacaaatac

SEQ ID NO: 516674 - DNA, 120 bp, Artificial Sequence
  ENSG00000164919_3 (sequence is synthesized)
tgcagcctcaacctcccaggctcaagggatcttcctgcctcagcctcccaagaagctggcactataggcatgtgccaccacacctggctaacttctttatttttagtagagacagggttt

SEQ ID NO: 516675 - DNA, 85 bp, Artificial Sequence
  ENSG00000164919_4 (sequence is synthesized)
accacacctggctaacttccctgggctgtgcttgaattcctgggctcaggcgatccgtccaccttggcctcccaaagtgttggga

SEQ ID NO: 516676 - DNA, 89 bp, Artificial Sequence
  ENSG00000164919_5 (sequence is synthesized)
ttacaggcgtgagccactgtgcctggcataattttggtattttttgatagtagccatcctaataggtatgaggtggtatatttgtgttc

SEQ ID NO: 516677 - DNA, 120 bp, Artificial Sequence
  ENSG00000164919_6 (sequence is synthesized)
ttgcatccctaccccgacactgcgggttgtcacaacggcaccctcccgctttctctctgcctcggatttagtcgtgactgtgtgtctccgccgtggtgcagcttcaggcctctcccgcat

SEQ ID NO: 516678 - DNA, 120 bp, Artificial Sequence
  ENSG00000164919_7 (sequence is synthesized)
cacttactagcataagaattggtttgggatttaactgtttatgaagctaacttgatttccgtgttttgttaaaatttcattgttctagcacatctttaactgtgatagtttgtccgtttc

SEQ ID NO: 516679 - DNA, 120 bp, Artificial Sequence
  ENSG00000164919_8 (sequence is synthesized)
attgcagttacttggtcttgggctatggattaaaaagtgttcttcatgagcctgtaagactactgtactgtgggctctaagaagagatagaatcctaataaaatctatccttggccttca

SEQ ID NO: 516680 - DNA, 120 bp, Artificial Sequence
  ENSG00000164919_9 (sequence is synthesized)
gtccctcacaatgtttagacttaagattttttgactttacgatggtgtggaagtgatacacatttggtagaaaccatactttgaattttgatctttgtccacatgagcaataagtggcac

SEQ ID NO: 516681 - DNA, 120 bp, Artificial Sequence
  ENSG00000164919_10 (sequence is synthesized)
aatacttttgtgatgtgggggagcaccaatgaccacatcccccagtcagaaacataatcacaagggtaaacagctgatgctgtactctgtagtgttgtgtgagatactcagtgttttatt

SEQ ID NO: 516682 - DNA, 120 bp, Artificial Sequence
  ENSG00000164919_11 (sequence is synthesized)
ataagctaggctttgtgttagatgattttcttcagctgtaggctaacataagtgttctgagcacatttaaggtagggaaggctaagctatgatgtaagttaggtgtattaaatgcatttt

SEQ ID NO: 516683 - DNA, 120 bp, Artificial Sequence
  ENSG00000164919_12 (sequence is synthesized)
gcaggaggggaaggatgggcttcctgcaacctcccttgccccacggcttcccatcctacccccggccgcgttagctgaaggccagcagggacgcaaaagtttttaggccccttaggtctt

SEQ ID NO: 516684 - DNA, 120 bp, Artificial Sequence
  ENSG00000164919_13 (sequence is synthesized)
aacatatctgctttaactttgaaattttcaaaatttacagtgagcatgcattttataatcagaagatgttaataggctaatttaaatttgttagatttttaccatttttaagattatgtt

SEQ ID NO: 516685 - DNA, 120 bp, Artificial Sequence
  ENSG00000164919_14 (sequence is synthesized)
taaaaacctgtatgagagaacatatttggagacaggaacaaaaatatggcttggaacagaaacagtatgtggctataagggttaatggcaggggggtgggggcggtggtgggcatagaat

SEQ ID NO: 516686 - DNA, 120 bp, Artificial Sequence
  ENSG00000164919_15 (sequence is synthesized)
agtaaggtgtggtatgcccaaaatggaaaagaggctattcagagtggtcagggagcttagaggagcgtaaaggagagtgaaacttggagtccaggtagcctgaactgtgctttttctgtg

SEQ ID NO: 516687 - DNA, 120 bp, Artificial Sequence
  ENSG00000164919_16 (sequence is synthesized)
gctgagggtgagtgatcaaggtgtgaagtctactagtaggaatagacctcagttgatcctcaaagatggtgagtattgagagagtgtttatctctaacttagcctttgtgtttctcttca

SEQ ID NO: 516688 - DNA, 120 bp, Artificial Sequence
  ENSG00000164919_17 (sequence is synthesized)
cagaatttcttcaggttgaattacctagaagtttgtcactgacttgtgttcctgaactatgacacatgaatatgtgggctaagaaatagttcctcttgataaataaacaattaacaaata

SEQ ID NO: 516689 - DNA, 120 bp, Artificial Sequence
  ENSG00000164920_0 (sequence is synthesized)
agcctggggagggacgcgggcggggacggagctcggcgtgcttgctgctggagggtgatggccctgcaaggctgtgggctccgacctcaccgggagtcgacagcgagaggttcgccgaag

SEQ ID NO: 516690 - DNA, 120 bp, Artificial Sequence
  ENSG00000164920_1 (sequence is synthesized)
agcgaggttctgggcgagcgctgaacgccggccccaagcaccccgggtctttacacagtccgcgtccacagactctgacgaagacgtggatctgctctcgctttagctgctcgcggtcct

SEQ ID NO: 516691 - DNA, 120 bp, Artificial Sequence
  ENSG00000164920_2 (sequence is synthesized)
ccagatcatgtccgcgactcctgcgactccgcgcggaaaaaaaagtttgccaggcgtggactcaatgacctttccaagctgtgcgcctcgctgcctggaccgggtctgagcgcggctgcc

SEQ ID NO: 516692 - DNA, 120 bp, Artificial Sequence
  ENSG00000164920_3 (sequence is synthesized)
caggttgacctttctgcgggagggctttctctacgtgctgttgtctcactgggtttttgtcggagccccacgccctccggcctctgattcctggaagaaagggttggtcccctcagcacc

SEQ ID NO: 516693 - DNA, 120 bp, Artificial Sequence
  ENSG00000164920_4 (sequence is synthesized)
cccagcatcccggaaaatggggagcaaggctctgccagcgcccatcccgctccacccgtcgctgcagctcaccaattactccttcctgcaggccgtgaacaccttcccggccacggtgga

SEQ ID NO: 516694 - DNA, 120 bp, Artificial Sequence
  ENSG00000164920_5 (sequence is synthesized)
ccacctgcagggcctgtacggtctcagcgcggtacagaccatgcacatgaaccactggacgctggggtatcccaatgtgcacgagatcacccgctccaccatcacggagatggcggcggc

SEQ ID NO: 516695 - DNA, 120 bp, Artificial Sequence
  ENSG00000164920_6 (sequence is synthesized)
gcagggcctcgtggacgcgcgcttccccttcccggccctgccttttaccacccacctattccaccccaagcagggggccattgcccacgtcctcccagccctgcacaaggaccggccccg

SEQ ID NO: 516696 - DNA, 120 bp, Artificial Sequence
  ENSG00000164920_7 (sequence is synthesized)
aggatccgcctaagatgggagacctgagcaagctgagcccaggactgggtagccccatctcgggcctcagtaaattgactccggacagaaagccctctcgaggaaggttgccctccaaaa

SEQ ID NO: 516697 - DNA, 120 bp, Artificial Sequence
  ENSG00000164920_8 (sequence is synthesized)
cgaaaaaagagtttatctgcaagttttgcggcagacactttaccaaatcctacaatttgctcatccatgagaggacccacacggacgagaggccgtacacgtgtgacatctgccacaagg

SEQ ID NO: 516698 - DNA, 120 bp, Artificial Sequence
  ENSG00000164920_9 (sequence is synthesized)
ccttccggaggcaagatcacctgcgggatcacagatacatccattccaaagaaaaacccttcaaatgtcaggagtgtgggaaaggattttgtcagtctagaactctagcagttcacaaaa

SEQ ID NO: 516699 - DNA, 120 bp, Artificial Sequence
  ENSG00000164920_10 (sequence is synthesized)
ctttacacatgcaggaatctccacacaaatgtcccacatgtggaagaacctttaatcagagaagtaatctgaaaactcaccttctcacccatacagacatcaagccctacagctgcgagc

SEQ ID NO: 516700 - DNA, 120 bp, Artificial Sequence
  ENSG00000164920_11 (sequence is synthesized)
agtgcggcaaagtgttcaggcgaaactgtgatctgcggcggcacagcctgactcacaccccgcggcaggacttctagagaagcccaggatctgtcccgtgccgccgctgctcccctcccc

SEQ ID NO: 516701 - DNA, 120 bp, Artificial Sequence
  ENSG00000164920_12 (sequence is synthesized)
agacacctctccacgtctcctacccagggggtcgcatccctagcccttcactgaccccagctcttcccttgctgcagccgcacctgcagctccagggagttaactcttcttctgggggac

SEQ ID NO: 516702 - DNA, 120 bp, Artificial Sequence
  ENSG00000164920_13 (sequence is synthesized)
tgagaactgtagaaagccacacactactacatcccttcacaaagagtatatgctagtttcttgtagatattcacagctcattttagagctctgtacataatgttgtgggtctttgttttg

SEQ ID NO: 516703 - DNA, 120 bp, Artificial Sequence
  ENSG00000164920_14 (sequence is synthesized)
ttgttttgtttgctttgggatcttgttggatgcacttagatatggaaaatggaagccaaattttatctttaaagactgtattttcaaaataaaactttttcttgtttgtttcaaaactcc

SEQ ID NO: 516704 - DNA, 120 bp, Artificial Sequence
  ENSG00000164920_15 (sequence is synthesized)
cctctggcccaggaggatgaagcgcgccggcttcgctcttgcacgccggcttgccatccgggtaagcgcgggaaaggcggccacagggcgcggcggcagcgcagcgcgtgggatctcacg

SEQ ID NO: 516705 - DNA, 120 bp, Artificial Sequence
  ENSG00000164920_16 (sequence is synthesized)
caggagctccgaggcgcagcggcgacagaggttcgccccggcctgctagcattggcattgcggttgactgagcttcgcctaacaggcttggggagggtgggctgggctgggctgggctgg

SEQ ID NO: 516706 - DNA, 120 bp, Artificial Sequence
  ENSG00000164920_17 (sequence is synthesized)
gctgggtgctgcccggctgtccgcctttcgttttcctgggaccgaggagtcttccgctccgtatctgcctagagtctgaatccgactttctttcctttgggcacgcgctcgccagtggag

SEQ ID NO: 516707 - DNA, 120 bp, Artificial Sequence
  ENSG00000164920_18 (sequence is synthesized)
ttccttggtgacagccagtcaagtaaattttacaaaatttctccacatgcctggaaattcctgtgaagaagactgatgaaagaaaagtagcctcagctccaccaacatatttatgacttt

SEQ ID NO: 516708 - DNA, 120 bp, Artificial Sequence
  ENSG00000164920_19 (sequence is synthesized)
tcattggtttaagtttctttccttgcaagattaaaagtaaccagtggtctgaaacgggacggtggagaaatgacagcagatgatgatcgctgttatttcctgaaagggagtgtgggaact

SEQ ID NO: 516709 - DNA, 120 bp, Artificial Sequence
  ENSG00000164920_20 (sequence is synthesized)
gtggctggttcgtgttatcattactgctttgcaaaaggtgttcaatggcagactctttctcttaaaaggctctatttagattagttctctaggtggggaaaagcaacacttgatttcttt

SEQ ID NO: 516710 - DNA, 120 bp, Artificial Sequence
  ENSG00000164920_21 (sequence is synthesized)
aatacataaaattaatcttgtttaacataaagcatttttatatttttctcaaaaaacggccactttgattatcataaatcctaattttagaatttttttcatccaatctgtcctgcattt

SEQ ID NO: 516711 - DNA, 120 bp, Artificial Sequence
  ENSG00000164924_0 (sequence is synthesized)
gcccactcccaccgccagctggaaccctggggactacgacgtccctcaaaccttgcttctaggagataaaaagaacatccagtcatggataaaaatgagctggttcagaaggccaaactg

SEQ ID NO: 516712 - DNA, 120 bp, Artificial Sequence
  ENSG00000164924_1 (sequence is synthesized)
gccgagcaggctgagcgatatgatgacatggcagcctgcatgaagtctgtaactgagcaaggagctgaattatccaatgaggagaggaatcttctctcagttgcttataaaaatgttgta

SEQ ID NO: 516713 - DNA, 120 bp, Artificial Sequence
  ENSG00000164924_2 (sequence is synthesized)
ggagcccgtaggtcatcttggagggtcgtctcaagtattgaacaaaagacggaaggtgctgagaaaaaacagcagatggctcgagaatacagagagaaaattgagacggagctaagagat

SEQ ID NO: 516714 - DNA, 120 bp, Artificial Sequence
  ENSG00000164924_3 (sequence is synthesized)
atctgcaatgatgtactgtctcttttggaaaagttcttgatccccaatgcttcacaagcagagagcaaagtcttctatttgaaaatgaaaggagattactaccgttacttggctgaggtt

SEQ ID NO: 516715 - DNA, 120 bp, Artificial Sequence
  ENSG00000164924_4 (sequence is synthesized)
gccgctggtgatgacaagaaagggattgtcgatcagtcacaacaagcataccaagaagcttttgaaatcagcaaaaaggaaatgcaaccaacacatcctatcagactgggtctggccctt

SEQ ID NO: 516716 - DNA, 120 bp, Artificial Sequence
  ENSG00000164924_5 (sequence is synthesized)
aacttctctgtgttctattatgagattctgaactccccagagaaagcctgctctcttgcaaagacagcttttgatgaagccattgctgaacttgatacattaagtgaagagtcatacaaa

SEQ ID NO: 516717 - DNA, 120 bp, Artificial Sequence
  ENSG00000164924_6 (sequence is synthesized)
gacagcacgctaataatgcaattactgagagacaacttgacattgtggacatcggatacccaaggagacgaagctgaagcaggagaaggaggggaaaattaaccggccttccaacttttg

SEQ ID NO: 516718 - DNA, 120 bp, Artificial Sequence
  ENSG00000164924_7 (sequence is synthesized)
tctgcctcattctaaaatttacacagtagaccatttgtcatccatgctgtcccacaaatagttttttgtttacgatttatgacaggtttatgttacttctatttgaatttctatatttcc

SEQ ID NO: 516719 - DNA, 120 bp, Artificial Sequence
  ENSG00000164924_8 (sequence is synthesized)
catgtggtttttatgtttaatattaggggagtagagccagttaacatttagggagttatctgttttcatcttgaggtggccaatatggggatgtggaatttttatacaagttataagtgt

SEQ ID NO: 516720 - DNA, 120 bp, Artificial Sequence
  ENSG00000164924_9 (sequence is synthesized)
ttggcatagtacttttggtacattgtggcttcaaaagggccagtgtaaaactgcttccatgtctaagcaaagaaaactgcctacatactggtttgtcctggcggggaataaaagggatca

SEQ ID NO: 516721 - DNA, 120 bp, Artificial Sequence
  ENSG00000164924_10 (sequence is synthesized)
ttggttccagtcacaggtgtagtaattgtgggtactttaaggtttggagcacttacaaggctgtggtagaatcataccccatggataccacatattaaaccatgtatatctgtggaatac

SEQ ID NO: 516722 - DNA, 120 bp, Artificial Sequence
  ENSG00000164924_11 (sequence is synthesized)
tggataagggcagaaacggttcacattccattatttgtaaagttacctgctgttagctttcattatttttgctacactcattttatttgtatttaaatgttttaggcaacctaagaacaa

SEQ ID NO: 516723 - DNA, 120 bp, Artificial Sequence
  ENSG00000164924_12 (sequence is synthesized)
atgtaaaagtaaagatgcaggaaaaatgaattgcttggtattcattacttcatgtatatcaagcacagcagtaaaacaaaaacccatgtatttaacttttttttaggatttttgcttttg

SEQ ID NO: 516724 - DNA, 120 bp, Artificial Sequence
  ENSG00000164924_13 (sequence is synthesized)
tgatttttttttttttgatacttgcctaacatgcatgtgctgtaaaaatagttaacagggaaataacttgagatgatggctagctttgtttaatgtcttatgaaattttcatgaacaatc

SEQ ID NO: 516725 - DNA, 120 bp, Artificial Sequence
  ENSG00000164924_14 (sequence is synthesized)
caagcataattgttaagaacacgtgtattaaattcatgtaagtggaataaaagttttatgaatggacttttcaactactttctctacagcttttcatgtaaattagtcttggttctgaaa

SEQ ID NO: 516726 - DNA, 120 bp, Artificial Sequence
  ENSG00000164924_15 (sequence is synthesized)
cttctctaaaggaaattgtacattttttgaaatttattccttattccctcttggcagctaatgggctcttaccaagtttaaacacaaaatttatcataacaaaaatactactaatataac

SEQ ID NO: 516727 - DNA, 120 bp, Artificial Sequence
  ENSG00000164924_16 (sequence is synthesized)
tactgtttccatgtcccatgatcccctctcttcctccccaccctgaaaaaaatgagttcctattttttctgggagagggggggattgattagaaaaaaatgtagtgtgttccatttaaaa

SEQ ID NO: 516728 - DNA, 120 bp, Artificial Sequence
  ENSG00000164924_17 (sequence is synthesized)
ttttggcatatggcattttctaacttaggaagccacaatgttcttggcccatcatgacattgggtagcattaactgtaagttttgtgcttccaaatcactttttggtttttaagaatttc

SEQ ID NO: 516729 - DNA, 120 bp, Artificial Sequence
  ENSG00000164924_18 (sequence is synthesized)
ttgatactcttatagcctgccttcaattttgatcctttattctttctatttgtcaggtgcacaagattaccttcctgttttagccttctgtcttgtcaccaaccattcttacttggtggc

SEQ ID NO: 516730 - DNA, 120 bp, Artificial Sequence
  ENSG00000164924_19 (sequence is synthesized)
catgtacttggaaaaaggccgcatgatctttctggctccactcagtgtctaaggcaccctgcttcctttgcttgcatcccacagactatttccctcatcctatttactgcagcaaatctc

SEQ ID NO: 516731 - DNA, 120 bp, Artificial Sequence
  ENSG00000164924_20 (sequence is synthesized)
tccttagttgatgagactgtgtttatctccctttaaaaccctacctatcctgaatggtctgtcattgtctgcctttaaaatccttcctctttcttcctcctctattctctaaataatgat

SEQ ID NO: 516732 - DNA, 120 bp, Artificial Sequence
  ENSG00000164924_21 (sequence is synthesized)
ggggctaagttatacccaaagctcactttacaaaatatttcctcagtactttgcagaaaacaccaaacaaaaatgccattttaaaaaaggtgtattttttcttttagaatgtaagctcct

SEQ ID NO: 516733 - DNA, 120 bp, Artificial Sequence
  ENSG00000164924_22 (sequence is synthesized)
caagagcagggacaatgttttctgtatgttctattgtgcctagtacactgtaaatgctcaataaatattgatgatgggaggcagtgagtcttgatgataagggtgagaaactgaaatccc

SEQ ID NO: 516734 - DNA, 120 bp, Artificial Sequence
  ENSG00000164924_23 (sequence is synthesized)
atgacaaaggaggagagtcggggacttgagccgtggctccgacttgggcggagcctggaggggggtggttgcgatacgcggaccggagaatttgcactttaaagtccgggtctgcccgtt

SEQ ID NO: 516735 - DNA, 120 bp, Artificial Sequence
  ENSG00000164924_24 (sequence is synthesized)
gcatggccggggcgccgccggccgcgatccatccccacccttgtctctgcgggcttccaccccctccctcgccgcccttctcgcttccgcccgagataatgactcggcggcggcggcggc

SEQ ID NO: 516736 - DNA, 80 bp, Artificial Sequence
  ENSG00000164924_25 (sequence is synthesized)
cccctcccctctccctcggccgccccctcctttccctccccctcgcgcagcctccgcgctgggcgctgcggcggcgggac

SEQ ID NO: 516737 - DNA, 120 bp, Artificial Sequence
  ENSG00000164924_26 (sequence is synthesized)
ggggaggggccgggggcctcggggacccaagcgcgagggaaaggcctggccgagagcgggccggagcccaggcctggcgcggcggcgcccgccagaacatccagtcatggataaaaatga

SEQ ID NO: 516738 - DNA, 120 bp, Artificial Sequence
  ENSG00000164924_27 (sequence is synthesized)
cgcagtcaccgagcgcagatcccgcgctctcgattggaacgcctccccatcactcagccacactcaggggctggacgcctcactcccgtttccgagccataaaaggtctaggaccgcttc

SEQ ID NO: 516739 - DNA, 120 bp, Artificial Sequence
  ENSG00000164924_28 (sequence is synthesized)
ccccgagccagcagcgtttgacgtcatcgtgcgtgtggtgcccctgctgccggggctggtgattggaggaaaccccgtgtctgcggagcggctgtagcctgtgagcagcgagatccaggg

SEQ ID NO: 516740 - DNA, 120 bp, Artificial Sequence
  ENSG00000164924_29 (sequence is synthesized)
acagagtctcagcctcgccgctgctgccgccgccgccgcccagagactgctgagcccgtccgtccgccgccaccacccactccggacacagaacatccagtcatggataaaaatgagctg

SEQ ID NO: 516741 - DNA, 120 bp, Artificial Sequence
  ENSG00000164924_30 (sequence is synthesized)
aacactgttttgttgcttgttttattatgacctcagattaaattgggaaatattggcccttttgaataattgtcccaaatattacattcaaataaaagtgcaatggagaccttggggtct

SEQ ID NO: 516742 - DNA, 120 bp, Artificial Sequence
  ENSG00000164924_31 (sequence is synthesized)
ttatttccaggagaaaagataccttctgcatctagggcaacaatccttttccctcgcagctctttcttttacctcacttactgatttctcctgacccccaagccaaggaggtaaaataat

SEQ ID NO: 516743 - DNA, 120 bp, Artificial Sequence
  ENSG00000164924_32 (sequence is synthesized)
tatatatatatatatatatatataaagtaattatattttatagctagactgaagaggtgggaatttttttgttgttttttttttttttggagacaagagtcttgctctgtcacccaggct

SEQ ID NO: 516744 - DNA, 120 bp, Artificial Sequence
  ENSG00000164924_33 (sequence is synthesized)
aggcataagccaccgcgcccagtagagatgtgatattattcaagtaaataaaacctgaaacttggcacatttgcctatttaatgtgcatcagtcatctgaactaggttgatcctggaata

SEQ ID NO: 516745 - DNA, 120 bp, Artificial Sequence
  ENSG00000164924_34 (sequence is synthesized)
atgaaaacacttcactagtattaactaatgttttctacatagtagttcccaatagattaaggaaaatttccaacctgagattctttgttttggaatttgaataatgtgtttgtaactatt

SEQ ID NO: 516746 - DNA, 120 bp, Artificial Sequence
  ENSG00000164924_35 (sequence is synthesized)
ccttgattgtcccaaatccaggctttacgtctgcttttgtcaatgtaacatcctagtgccaggaaattggaaaatccaatgactttttgtgtgtaaagtactggaatttttttgttcgtt

SEQ ID NO: 516747 - DNA, 87 bp, Artificial Sequence
  ENSG00000164924_36 (sequence is synthesized)
gactttttgtgtgtaaagtactggaatttttttgttcgtttgtttttaagacggagtgtcaactctcgcccaggctgggtctcctcc

SEQ ID NO: 516748 - DNA, 120 bp, Artificial Sequence
  ENSG00000164924_37 (sequence is synthesized)
tacaggcgtgagccactgtgcccaccctggtatgttttttttaaattggccacttaagagttgtccttcagaaagtggagcagcagtgtgattagtaaaaacgatgggctttcctgcagc

SEQ ID NO: 516749 - DNA, 120 bp, Artificial Sequence
  ENSG00000164924_38 (sequence is synthesized)
acgatgggctttcctgcagctctggcttatggtctttgtttttccagttaacagctgttacttcatgctgttatagggggtggggggagaaagagaaagaatatgtctagtggcttaatt

SEQ ID NO: 516750 - DNA, 120 bp, Artificial Sequence
  ENSG00000164924_39 (sequence is synthesized)
ttggggctcaatttgtttattatgtttttcctgcaaaagagtcaccagtcttgtcatggctcaatgcatattttaaaatgagtcaaagccaatttggaagctgctatcttaggttatttg

SEQ ID NO: 516751 - DNA, 120 bp, Artificial Sequence
  ENSG00000164924_40 (sequence is synthesized)
tagtcaggcttcaaatggagagtgaaactttgactttgaaaactggtgctctatgctcaatgatggtcttacacattcctctagggaaaggtcaagaaataaatttggcttgattgtatt

SEQ ID NO: 516752 - DNA, 120 bp, Artificial Sequence
  ENSG00000164924_41 (sequence is synthesized)
ctctcatttaccatataggaaatactatggtagaactgaaaatatgtacaatagtaaagtggtggctgagactgggcacttggaaaatagacttggattcttttctaagtgtgaaactaa

SEQ ID NO: 516753 - DNA, 120 bp, Artificial Sequence
  ENSG00000164924_42 (sequence is synthesized)
ttaaatacttttatgtgactggtagtagtcacagtctccttgattgattctagttccttttcaaagtggagagacctgaatatagattgtaacaggatgtccaaccttgccagacaagca

SEQ ID NO: 516754 - DNA, 120 bp, Artificial Sequence
  ENSG00000164924_43 (sequence is synthesized)
ggcatatatgtctctgggatgcagaagcagttacaagttaatatatttaagcataatgttagccaatcctaggtgataccagagatgtgaatatttgatcatatttgagttcattccttg

SEQ ID NO: 516755 - DNA, 120 bp, Artificial Sequence
  ENSG00000164924_44 (sequence is synthesized)
aaagtccaaacctaactggtcttaattgattacttcttagtattccgaattttagaatttaaaaccctatgaattttcagtttgtgcttacattttctaacattggatgtttgctttggc

SEQ ID NO: 516756 - DNA, 120 bp, Artificial Sequence
  ENSG00000164924_45 (sequence is synthesized)
gagcgggccggagcccaggcctggcgcggcggcgcccgccaggtagaccggggcgaggctgcgcgccggcgggaggggagtccactgcgggaacatccagtcatggataaaaatgagctg

SEQ ID NO: 516757 - DNA, 120 bp, Artificial Sequence
  ENSG00000164924_46 (sequence is synthesized)
caacttgacagtaagtacataacagcatcattagtgatgaatgtggttgaagaggttatgttttactctagggaatttttttttttattaaatacatcttttaaaattttttctcaacac

SEQ ID NO: 516758 - DNA, 120 bp, Artificial Sequence
  ENSG00000164924_47 (sequence is synthesized)
atttcataggctctcataaatatatctcagctactattaaagtcctatgaaggaaaattacagaaactgaaatattagactgagaactaaaaaatacacacattgatgagttacctgtct

SEQ ID NO: 516759 - DNA, 120 bp, Artificial Sequence
  ENSG00000164924_48 (sequence is synthesized)
tgttaaaatttgttagtatcaaaagtgtgctgagactctacatgttttagttcctttaagaatgattttcttgcccatcaagttgcctccatattggtaaagataatggtagggaattaa

SEQ ID NO: 516760 - DNA, 120 bp, Artificial Sequence
  ENSG00000164924_49 (sequence is synthesized)
aaaggtcgtgattgtccttgggatactgcagatgtataaaaagaaacagtgtcactatcacaccaggaacatcaacataattccctaataatgtttgaatatctaaataatacttgaatt

SEQ ID NO: 516761 - DNA, 120 bp, Artificial Sequence
  ENSG00000164924_50 (sequence is synthesized)
ccaattatctctctttttttaagttatttgaattgggattcaaattcagtccacaatgcagttgatttgtatgtctcgtttgtttcttaggtcttctcattcttctccttcagataaata

SEQ ID NO: 516762 - DNA, 120 bp, Artificial Sequence
  ENSG00000164924_51 (sequence is synthesized)
ctagatttgaaattttgaggcttaggtgaaaaaattatcaagcatttgctgtgtgtcaggtaaagaggtaggaattgcagatcataatctaggtattactgtttttttgttagacttcta

SEQ ID NO: 516763 - DNA, 120 bp, Artificial Sequence
  ENSG00000164924_52 (sequence is synthesized)
gggccatttctcttggggactatgtaatctcattttatacatttctcttccaactttattctagtccactgccattttctataaaccagttctatatgctagtgctgaaaatcttgaaga

SEQ ID NO: 516764 - DNA, 120 bp, Artificial Sequence
  ENSG00000164924_53 (sequence is synthesized)
gttttttgaatagtattgtatacttgtttattaaacctaaaattactttattagcacaatttggagctatctataaacttttctgatacttgagtcaagataacaagccacagtaaagaa

SEQ ID NO: 516765 - DNA, 120 bp, Artificial Sequence
  ENSG00000164924_54 (sequence is synthesized)
tgaaagaatcttatatatcaaacataagaagcactttgttaactaactttagtattaaggatttttcttttctagtttgaagtgatgacatttttaaagtgatgacctgagacctagata

SEQ ID NO: 516766 - DNA, 120 bp, Artificial Sequence
  ENSG00000164924_55 (sequence is synthesized)
ctgtgttttgttcacatcactttttgagaggccctgatctactgtctgcttccaactgaattttgctatcagtatagcatgaagagcgcatattgcaataagaaaaccagggttggccgg

SEQ ID NO: 516767 - DNA, 120 bp, Artificial Sequence
  ENSG00000164924_56 (sequence is synthesized)
cttccccttcttccgggctcccgtcccggctcatcacccggcctgtggcccactcccaccgccagctggaaccctggggactacgacgtccctcaaaccttgcttctaggagataaaaag

SEQ ID NO: 516768 - DNA, 120 bp, Artificial Sequence
  ENSG00000164924_57 (sequence is synthesized)
ccagcaggtgcactcgggacaagcgtagaggagctggaagccgagcggggtgggaggagtggcggctgcgggcgaggacgcgcgcgcctccgctcgccctccagcgcgggcgggcaggac

SEQ ID NO: 516769 - DNA, 120 bp, Artificial Sequence
  ENSG00000164924_58 (sequence is synthesized)
agcagtctttattatttgagcactgaaatgtaatgtactatttttaaatcgtaggcttttgatgaagccattgctgaacttgatacattaagtgaagagtcatacaaagacagcacgcta

SEQ ID NO: 516770 - DNA, 120 bp, Artificial Sequence
  ENSG00000164924_59 (sequence is synthesized)
gcacggagggtggggcgggccgggcctcggggaggggtggggggatgtgaaaggtcccggatgttgctgaacgggagccccttccagagggagtgactggggcaagcgcagacgggctga

SEQ ID NO: 516771 - DNA, 120 bp, Artificial Sequence
  ENSG00000164924_60 (sequence is synthesized)
agcccgcagtcggctcccgtgcttgatggactagaactggagggtccctgcgctcggtttggggacgcatatcctgctttgggggcggaacatccagtcatggataaaaatgagctggtt

SEQ ID NO: 516772 - DNA, 120 bp, Artificial Sequence
  ENSG00000164924_61 (sequence is synthesized)
cctcccgagtagctgggattacagtcgtgtgccaccacatccaatttttttttttttcccagtagagacggggtgtcacccaggctggtaatctttattttaaattgtacttgctcctaa

SEQ ID NO: 516773 - DNA, 120 bp, Artificial Sequence
  ENSG00000164924_62 (sequence is synthesized)
ctaagaatttaggtgttaagagcatagcatgtagaaggaaaaaataaagctgctgtaacctcatcctgccttcttggagatgagaatctgagacccaggaagatttcagagttttgtcaa

SEQ ID NO: 516774 - DNA, 80 bp, Artificial Sequence
  ENSG00000164929_0 (sequence is synthesized)
ggactaggggcggcgggcaccgcaggagctccgcgcggctgcagcgcgggcgggagcggggacgcgatgtcgccgccgcc

SEQ ID NO: 516775 - DNA, 120 bp, Artificial Sequence
  ENSG00000164929_1 (sequence is synthesized)
gccgccagagccgacagccgagcagccgctgggcgctcccgcggcgcaggaggatgggctgcggcgggagccgggcggatgccatcgagccccgctactacgagagctggacccgggaga

SEQ ID NO: 516776 - DNA, 120 bp, Artificial Sequence
  ENSG00000164929_2 (sequence is synthesized)
cagaatccacctggctcacctacaccgactcggacgcgccgcccagcgccgccgccccggacagcggccccgaagcgggcggcctgcactcgggcatgctggaagatggactgccctcca

SEQ ID NO: 516777 - DNA, 120 bp, Artificial Sequence
  ENSG00000164929_3 (sequence is synthesized)
atggtgtgccccgatctacagccccaggtggaatacccaacccagagaagaagacgaactgtgagacccagtgcccaaatccccagagcctcagctcaggccctctgacccagaaacaga

SEQ ID NO: 516778 - DNA, 120 bp, Artificial Sequence
  ENSG00000164929_4 (sequence is synthesized)
atggccttcagaccacagaggctaaaagagatgctaagagaatgcctgcaaaagaagtcaccattaatgtaacagatagcatccaacagatggacagaagtcgaagaatcacaaagaact

SEQ ID NO: 516779 - DNA, 120 bp, Artificial Sequence
  ENSG00000164929_5 (sequence is synthesized)
gtgtcaactagcagagagtccaagcagaagggcagatggacttcttcagtgtccttcacggcactggatcccatcaaagaaccttgaagaagtggctgccccttgctggacctgaattct

SEQ ID NO: 516780 - DNA, 120 bp, Artificial Sequence
  ENSG00000164929_6 (sequence is synthesized)
actgagtccctggcaagactgtcttacctggcagcaaactgctgcctgatttgttgggaccttctgagccttctacttatcatgtaaatgtattggcacagtgcttacatatgttaataa

SEQ ID NO: 516781 - DNA, 120 bp, Artificial Sequence
  ENSG00000164929_7 (sequence is synthesized)
actgcaaatgtgcagttcagtttgtctctttgcaactcctgtaatacggtctggtgtaaaagtagtgagttaaagctacaggtcagtttatgaaacagaaaagtaggaatgcattttctg

SEQ ID NO: 516782 - DNA, 120 bp, Artificial Sequence
  ENSG00000164929_8 (sequence is synthesized)
ggtgaaagagtcacaccttagtgctataactctcctgcccatgatagtgtattctgtttcaggcaagcttattctttccttctttcattttaaatattgtcattacaaatcttaccaggt

SEQ ID NO: 516783 - DNA, 120 bp, Artificial Sequence
  ENSG00000164929_9 (sequence is synthesized)
tcacttaaaagctggctttcatccaactctaaacccacatattgaaaaaatcaaggtacaggaaaactccttgttatccttgtttccttagcttggtatgagacagatcggatccagttt

SEQ ID NO: 516784 - DNA, 120 bp, Artificial Sequence
  ENSG00000164929_10 (sequence is synthesized)
cccatgcaccaacccactgcccatggcatgtctttgggaggtgtctgtgaagcagtcatacctgctcctcatctgcctggaaagtcctcctattccagtgtccatgttggcctccagtcc

SEQ ID NO: 516785 - DNA, 120 bp, Artificial Sequence
  ENSG00000164929_11 (sequence is synthesized)
gctagacattgcaattttgcatagctttccagttccctttgcttgtcttcttgactgtcttccctctctatcggggtcacttgcaattgttaatcaaagattgaacactgcgtaggagag

SEQ ID NO: 516786 - DNA, 120 bp, Artificial Sequence
  ENSG00000164929_12 (sequence is synthesized)
ggagatgatccagagacatgtggcagcaggcatggcttccccttggcctctctgtacactgccccaggactgtcattttggcatctgcaaaggaatcactttagaaagccagcacctggt

SEQ ID NO: 516787 - DNA, 120 bp, Artificial Sequence
  ENSG00000164929_13 (sequence is synthesized)
tgatgtgtattcatactgacattagattgatgtgcactgcattagaaatgaggtagctgacacagaaaaaggatgttttgataggaataattttctagtatgtcttgaaacatgttcatc

SEQ ID NO: 516788 - DNA, 120 bp, Artificial Sequence
  ENSG00000164929_14 (sequence is synthesized)
tggaagtattttcctccaaagtaatgtagcatgatttttcaaggattgttaacatgcctgggattgggaaagataggactaaagttgtgccaaactatatcaataaattccatgtttagc

SEQ ID NO: 516789 - DNA, 120 bp, Artificial Sequence
  ENSG00000164929_15 (sequence is synthesized)
agaaataggcagcctattggtgttatgtttatgtaacatagtccagagaactgacatgcaggtcaaaagtcagatacgcaacctccttatctgctaactctgttattcttcaaacacaag

SEQ ID NO: 516790 - DNA, 120 bp, Artificial Sequence
  ENSG00000164929_16 (sequence is synthesized)
tgggtagtgtcatttttccttccttccttccattggcagattgtatatttattcacaaaacattaaatgtccatcctgtgccaggtactatgcagatgttgagggatttggggtctggtt

SEQ ID NO: 516791 - DNA, 120 bp, Artificial Sequence
  ENSG00000164929_17 (sequence is synthesized)
agtcgtgactatctatcctgaatctaacagtgacttcataactaggagactgaattagacccttaaggtatagtgtgtgttgcaaatcactctgcaatggaaacttttatattcagggta

SEQ ID NO: 516792 - DNA, 120 bp, Artificial Sequence
  ENSG00000164929_18 (sequence is synthesized)
ggtttgtgtcttaaactaggtgttctaatcaatgtacaagactttaccatacacgcaactatagtttttctaaaccttcatcattttgtgattctttgagaaagggcttttaggaacttt

SEQ ID NO: 516793 - DNA, 120 bp, Artificial Sequence
  ENSG00000164929_19 (sequence is synthesized)
atgttctaaaaaatgtttttaacaataataagataaaagaaaaacctgtgattcatatgtccccactggcattactcagcaggagcccccagctgccaaaggttggcagtgatcctgcaa

SEQ ID NO: 516794 - DNA, 120 bp, Artificial Sequence
  ENSG00000164929_20 (sequence is synthesized)
gttcaagggctctttctccctggggatgtgctttgtggcttctctttacagctttgtttctgcatcagttcactgctgcatgttgtttggaatttatcaccttaagaaagtgtctctgtt

SEQ ID NO: 516795 - DNA, 120 bp, Artificial Sequence
  ENSG00000164929_21 (sequence is synthesized)
ttatatagaaacactttctcacttacaggggagaaggaaatgcagggcacatgatctggccctccccagaacaatctggatttcacggagacagcaaccagaagttaaaccatgtgacta

SEQ ID NO: 516796 - DNA, 120 bp, Artificial Sequence
  ENSG00000164929_22 (sequence is synthesized)
aaaatgcatctggctactttttcatgtatgtatgagacagaaactaatccttactatcctattaggataccacttttcattgcaaagtttgtgtcaataaagtcattaattttaaacata

SEQ ID NO: 516797 - DNA, 120 bp, Artificial Sequence
  ENSG00000164929_23 (sequence is synthesized)
gcaatatgtgtgcaggcatcgttagaacctttagatatggtctcacttaatctttacaatcgccccatgaaggtggcagtattatctccatttaatagatgaggaagtctagactggggg

SEQ ID NO: 516798 - DNA, 120 bp, Artificial Sequence
  ENSG00000164929_24 (sequence is synthesized)
gttaagaaaccaaagttgtaatttttgtttggccaccagtgaaaaatgaaaactctagaccaaatgatggatttttaaactgtgtttctagcagcgcttaggcttagcaaagatgccggg

SEQ ID NO: 516799 - DNA, 120 bp, Artificial Sequence
  ENSG00000164929_25 (sequence is synthesized)
ttttctgtggccactgtcaccatgttgatggtgaggactgtgctggttagaggaaccagtcttaggccaggcagctggccagtctcaggggttggcagggtggggagtgggcagaggaag

SEQ ID NO: 516800 - DNA, 120 bp, Artificial Sequence
  ENSG00000164929_26 (sequence is synthesized)
gaaagagaagaccagagtggttggaaacaagcctcgcattttactcaggccctccaaccaggtggacattggaagggcccccaagggtggctctcatagcagaatgtggtgacagcatca

SEQ ID NO: 516801 - DNA, 120 bp, Artificial Sequence
  ENSG00000164929_27 (sequence is synthesized)
acacagggaactttcaagctaccctaaaagtatcagggtcctcttggcaaaggaaaaatggggagaacagatactgggcaggctgccagcagagtggtcacttctttcatcctatagctg

SEQ ID NO: 516802 - DNA, 120 bp, Artificial Sequence
  ENSG00000164930_0 (sequence is synthesized)
agtcccggacgcaaccccggagccgtctcaggtccctggggggaacggtgggttagacggggacgggaagggacagcggccttcgaccgccccccgagtaattgacccaggactcatttt

SEQ ID NO: 516803 - DNA, 120 bp, Artificial Sequence
  ENSG00000164930_1 (sequence is synthesized)
caggaaagcctgaaaatgagtaaaatagtgaaatgaggaatttgaacattttatctttggatggggatcttctgaggatgcaaagagtgattcatccaagccatgtggtaaaatcaggaa

SEQ ID NO: 516804 - DNA, 120 bp, Artificial Sequence
  ENSG00000164930_2 (sequence is synthesized)
tttgaagaaaatggaaatgtttacatttttgttgacgtgtatttttctacccctcctaagagggcacagtctcttcacctgtgaaccaattactgttcccagatgtatgaaaatggccta

SEQ ID NO: 516805 - DNA, 120 bp, Artificial Sequence
  ENSG00000164930_3 (sequence is synthesized)
caacatgacgtttttccctaatctgatgggtcattatgaccagagtattgccgcggtggaaatggagcattttcttcctctcgcaaatctggaatgttcaccaaacattgaaactttcct

SEQ ID NO: 516806 - DNA, 120 bp, Artificial Sequence
  ENSG00000164930_4 (sequence is synthesized)
ctgcaaagcatttgtaccaacctgcatagaacaaattcatgtggttccaccttgtcgtaaactttgtgagaaagtatattctgattgcaaaaaattaattgacacttttgggatccgatg

SEQ ID NO: 516807 - DNA, 120 bp, Artificial Sequence
  ENSG00000164930_5 (sequence is synthesized)
gcctgaggagcttgaatgtgacagattacaatactgtgatgagactgttcctgtaacttttgatccacacacagaatttcttggtcctcagaagaaaacagaacaagtccaaagagacat

SEQ ID NO: 516808 - DNA, 120 bp, Artificial Sequence
  ENSG00000164930_6 (sequence is synthesized)
tggattttggtgtccaaggcatcttaagacttctgggggacaaggatataagtttctgggaattgaccagtgtgcgcctccatgccccaacatgtattttaaaagtgatgagctagagtt

SEQ ID NO: 516809 - DNA, 120 bp, Artificial Sequence
  ENSG00000164930_7 (sequence is synthesized)
tgcaaaaagttttattggaacagtttcaatattttgtctttgtgcaactctgttcacattccttacttttttaattgatgttagaagattcagatacccagagagaccaattatatatta

SEQ ID NO: 516810 - DNA, 120 bp, Artificial Sequence
  ENSG00000164930_8 (sequence is synthesized)
ctctgtctgttacagcattgtatctcttatgtacttcattggatttttgctaggcgatagcacagcctgcaataaggcagatgagaagctagaacttggtgacactgttgtcctaggctc

SEQ ID NO: 516811 - DNA, 120 bp, Artificial Sequence
  ENSG00000164930_9 (sequence is synthesized)
tcaaaataaggcttgcaccgttttgttcatgcttttgtattttttcacaatggctggcactgtgtggtgggtgattcttaccattacttggttcttagctgcaggaagaaaatggagttg

SEQ ID NO: 516812 - DNA, 120 bp, Artificial Sequence
  ENSG00000164930_10 (sequence is synthesized)
tgaagccatcgagcaaaaagcagtgtggtttcatgctgttgcatggggaacaccaggtttcctgactgttatgcttcttgctatgaacaaagttgaaggagacaacattagtggagtttg

SEQ ID NO: 516813 - DNA, 120 bp, Artificial Sequence
  ENSG00000164930_11 (sequence is synthesized)
ctttgttggcctttatgacctggatgcttctcgctactttgtactcttgccactgtgcctttgtgtgtttgttgggctctctcttcttttagctggcattatttccttaaatcatgttcg

SEQ ID NO: 516814 - DNA, 120 bp, Artificial Sequence
  ENSG00000164930_12 (sequence is synthesized)
acaagtcatacaacatgatggccggaaccaagaaaaactaaagaaatttatgattcgaattggagtcttcagcggcttgtatcttgtgccattagtgacacttctcggatgttacgtcta

SEQ ID NO: 516815 - DNA, 120 bp, Artificial Sequence
  ENSG00000164930_13 (sequence is synthesized)
tgagcaagtgaacaggattacctgggagataacttgggtctctgatcattgtcgtcagtaccatatcccatgtccttatcaggcaaaagcaaaagctcgaccagaattggctttatttat

SEQ ID NO: 516816 - DNA, 120 bp, Artificial Sequence
  ENSG00000164930_14 (sequence is synthesized)
gataaaatacctgatgacattaattgttggcatctctgctgtcttctgggttggaagcaaaaagacatgcacagaatgggctgggttttttaaacgaaatcgcaagagagatccaatcag

SEQ ID NO: 516817 - DNA, 120 bp, Artificial Sequence
  ENSG00000164930_15 (sequence is synthesized)
gaagagtactacaggaatcatgtgagtttttcttaaagcacaattctaaagttaaacacaaaaagaagcactataaaccaagttcacacaagctgaaggtcatttccaaatccatgggaa

SEQ ID NO: 516818 - DNA, 120 bp, Artificial Sequence
  ENSG00000164930_16 (sequence is synthesized)
ccagcacaggagctacagcaaatcatggcacttctgcagtagcaattactagccatgattacctaggacaagaaactttgacagaaatccaaacctcaccagaaacatcaatgagagagg

SEQ ID NO: 516819 - DNA, 120 bp, Artificial Sequence
  ENSG00000164930_17 (sequence is synthesized)
tgaaagcggacggagctagcacccccaggttaagagaacaggactgtggtgaacctgcctcgccagcagcatccatctccagactctctggggaacaggtcgacgggaagggccaggcag

SEQ ID NO: 516820 - DNA, 120 bp, Artificial Sequence
  ENSG00000164930_18 (sequence is synthesized)
gcagtgtatctgaaagtgcgcggagtgaaggaaggattagtccaaagagtgatattactgacactggcctggcacagagcaacaatttgcaggtccccagttcttcagaaccaagcagcc

SEQ ID NO: 516821 - DNA, 120 bp, Artificial Sequence
  ENSG00000164930_19 (sequence is synthesized)
tcaaaggttccacatctctgcttgttcacccggtttcaggagtgagaaaagagcagggaggtggttgtcattcagatacttgaagaacattttctctcgttactcagaagcaaatttgtg

SEQ ID NO: 516822 - DNA, 120 bp, Artificial Sequence
  ENSG00000164930_20 (sequence is synthesized)
ttacactggaagtgacctatgcactgttttgtaagaatcactgttacattcttcttttgcacttaaagttgcattgcctactgttatactggaaaaaatagagttcaagaataatatgac

SEQ ID NO: 516823 - DNA, 120 bp, Artificial Sequence
  ENSG00000164930_21 (sequence is synthesized)
tcatttcacacaaaggttaatgacaacaatatacctgaaaacagaaaatgtgcaggttaataatatttttttaatagtgtgggaggacagagttagaggaatcttccttttctatttatg

SEQ ID NO: 516824 - DNA, 120 bp, Artificial Sequence
  ENSG00000164930_22 (sequence is synthesized)
aagattctactcttggtaagagtattttaagatgtactatgctattttacttttttgatataaaatcaagatatttctttgctgaagtatttaaatcttatccttgtatctttttataca

SEQ ID NO: 516825 - DNA, 120 bp, Artificial Sequence
  ENSG00000164930_23 (sequence is synthesized)
tatttgaaaataagcttatatgtatttgaacttttttgaaatcctattcaagtatttttatcatgctattgtgatattttagcactttggtagcttttacactgaatttctaagaaaatt

SEQ ID NO: 516826 - DNA, 120 bp, Artificial Sequence
  ENSG00000164930_24 (sequence is synthesized)
gtaaaatagtcttcttttatactgtaaaaaaagatataccaaaaagtcttataataggaatttaactttaaaaacccacttattgataccttaccatctaaaatgtgtgatttttatagt

SEQ ID NO: 516827 - DNA, 120 bp, Artificial Sequence
  ENSG00000164930_25 (sequence is synthesized)
ctcgttttaggaatttcacagatctaaattatgtaactgaaataaggtgcttactcaaagagtgtccactattgattgtattatgctgctcactgatccttctgcatatttaaaataaaa

SEQ ID NO: 516828 - DNA, 120 bp, Artificial Sequence
  ENSG00000164930_26 (sequence is synthesized)
tgtcctaaagggttagtagacaaaatgttagtcttttgtatattaggccaagtgcaattgacttcccttttttaatgtttcatgaccacccattgattgtattataaccacttacagttg

SEQ ID NO: 516829 - DNA, 120 bp, Artificial Sequence
  ENSG00000164930_27 (sequence is synthesized)
cttatattttttgttttaacttttgttttttaacatttagaatattacattttgtattatacagtacctttctcagacattttgtagaattcatttcggcagctcactaggattttgctg

SEQ ID NO: 516830 - DNA, 120 bp, Artificial Sequence
  ENSG00000164930_28 (sequence is synthesized)
aacattaaaaagtgtgatagcgatattagtgccaatcaaatggaaaaaaggtagttttaataaacaagacacaacgtttttatacaacatactttaaaatattaaggagttttcttaatt

SEQ ID NO: 516831 - DNA, 120 bp, Artificial Sequence
  ENSG00000164930_29 (sequence is synthesized)
ttgtttcctattaagtattattctttgggcaagattttctgatgcttttgattttctctcaatttagcatttgcttttggtttttttctctatttagcattctgttaaggcacaaaaact

SEQ ID NO: 516832 - DNA, 120 bp, Artificial Sequence
  ENSG00000164930_30 (sequence is synthesized)
atgtactgtatgggaaatgttgtaaatattaccttttccacattttaaacagacaactttgaatacaaaaactttgttttgtgtgatcttttcattaataaaattatctttgtataagaa

SEQ ID NO: 516833 - DNA, 120 bp, Artificial Sequence
  ENSG00000164930_31 (sequence is synthesized)
cctttcgaactcaagtcacttgggcaattggctttacaaagcaaattggctccgtttaaggattcttgactcctgaaatccgcaaggaagtgggttcttttagagccagcgccaagagct

SEQ ID NO: 516834 - DNA, 120 bp, Artificial Sequence
  ENSG00000164930_32 (sequence is synthesized)
attgattataagagtagcaggtagctcatagaatcgccaggtgggctagaattcaagctcaggctgtaaggaaacatgctacagctaagatgctggcacagcattttcttcctctcgcaa

SEQ ID NO: 516835 - DNA, 120 bp, Artificial Sequence
  ENSG00000164932_0 (sequence is synthesized)
gaaaggcgcattgatgcagcctgcggcggcctcggagcgcggcggagccagacgctgaccacgttcctctcctcggtctcctccgcctccagctccgcgctgcccggcagccgggagcca

SEQ ID NO: 516836 - DNA, 120 bp, Artificial Sequence
  ENSG00000164932_1 (sequence is synthesized)
tgcgaccccagggccccgccgcctccccgcagcggctccgcggcctcctgctgctcctgctgctgcagctgcccgcgccgtcgagcgcctctgagatccccaaggggaagcaaaaggcgc

SEQ ID NO: 516837 - DNA, 120 bp, Artificial Sequence
  ENSG00000164932_2 (sequence is synthesized)
agctccggcagagggaggtggtggacctgtataatggaatgtgcttacaagggccagcaggagtgcctggtcgagacgggagccctggggccaatggcattccgggtacacctgggatcc

SEQ ID NO: 516838 - DNA, 120 bp, Artificial Sequence
  ENSG00000164932_3 (sequence is synthesized)
caggtcgggatggattcaaaggagaaaagggggaatgtctgagggaaagctttgaggagtcctggacacccaactacaagcagtgttcatggagttcattgaattatggcatagatcttg

SEQ ID NO: 516839 - DNA, 120 bp, Artificial Sequence
  ENSG00000164932_4 (sequence is synthesized)
ggaaaattgcggagtgtacatttacaaagatgcgttcaaatagtgctctaagagttttgttcagtggctcacttcggctaaaatgcagaaatgcatgctgtcagcgttggtatttcacat

SEQ ID NO: 516840 - DNA, 120 bp, Artificial Sequence
  ENSG00000164932_5 (sequence is synthesized)
tataatttatttggaccaaggaagccctgaaatgaattcaacaattaatattcatcgcacttcttctgtggaaggactttgtgaaggaattggtgctggattagtggatgttgctatctg

SEQ ID NO: 516841 - DNA, 120 bp, Artificial Sequence
  ENSG00000164932_6 (sequence is synthesized)
ggttggtacttgttcagattacccaaaaggagatgcttctactggatggaattcagtttctcgcatcattattgaagaactaccaaaataaatgctttaattttcatttgctacctcttt

SEQ ID NO: 516842 - DNA, 120 bp, Artificial Sequence
  ENSG00000164932_7 (sequence is synthesized)
ttttattatgccttggaatggttcacttaaatgacattttaaataagtttatgtatacatctgaatgaaaagcaaagctaaatatgtttacagaccaaagtgtgatttcacactgttttt

SEQ ID NO: 516843 - DNA, 120 bp, Artificial Sequence
  ENSG00000164932_8 (sequence is synthesized)
aaatctagcattattcattttgcttcaatcaaaagtggtttcaatattttttttagttggttagaatactttcttcatagtcacattctctcaacctataatttggaatattgttgtggt

SEQ ID NO: 516844 - DNA, 120 bp, Artificial Sequence
  ENSG00000164932_9 (sequence is synthesized)
ggaatattgttgtggtcttttgttttttctcttagtatagcatttttaaaaaaatataaaagctaccaatctttgtacaatttgtaaatgttaagaattttttttatatctgttaaataa

SEQ ID NO: 516845 - DNA, 120 bp, Artificial Sequence
  ENSG00000164932_10 (sequence is synthesized)
tttgcatagaccaatgagaaaataagcaaacaagaaacctgggccttatcattgcatcatatagataaagactaaaaaccctgcctatcctttactccctcatactgtttgctgttgctc

SEQ ID NO: 516846 - DNA, 120 bp, Artificial Sequence
  ENSG00000164932_11 (sequence is synthesized)
agaaggtttaaggccggaaagggaaatgaaggggcccggcgctaaccctctaaggacctgttttgcttctgtttaaaccaaatgggcagtctgtcattacacacaccctgggtcttcata

SEQ ID NO: 516847 - DNA, 120 bp, Artificial Sequence
  ENSG00000164932_12 (sequence is synthesized)
tgtggccgccaggtaggagcatcacagtcaagctacgggagaaaacagtttccaggaaactggaaatgaacggcccgagtgctttccaggggctcatctgtgggaagtataatggaatgt

SEQ ID NO: 516848 - DNA, 120 bp, Artificial Sequence
  ENSG00000164933_0 (sequence is synthesized)
agtactagagtctccggcttcgctcacgcgccttgggcataagagtcctctcgttggtcccggaggtggggttgcgctcacaaggggcgaccgtcgccacggtggcggccactgcatcgc

SEQ ID NO: 516849 - DNA, 120 bp, Artificial Sequence
  ENSG00000164933_1 (sequence is synthesized)
gtcccacctccgcggccctgggcgccgtggtgtcgacgggccccgagcctatgacgggccagggccagtcggcgtccgggtcgtcggcgtggagcacggtattccgccacgtccggtatg

SEQ ID NO: 516850 - DNA, 120 bp, Artificial Sequence
  ENSG00000164933_2 (sequence is synthesized)
agaacctgatagcgggcgtgagcggcggcgtcttatccaaccttgcgctgcatccgctcgacctcgtgaagatccgcttcgccgtgagtgatggattggaactgagaccgaaatataatg

SEQ ID NO: 516851 - DNA, 120 bp, Artificial Sequence
  ENSG00000164933_3 (sequence is synthesized)
gaattttacattgcttgactaccatttggaaacttgatggactacggggactttatcaaggagtaaccccaaatatatggggtgcaggtttatcctggggactctactttttcttttaca

SEQ ID NO: 516852 - DNA, 120 bp, Artificial Sequence
  ENSG00000164933_4 (sequence is synthesized)
atgccatcaagtcatataaaacagaaggaagagctgaacgtttagaggcaacagaataccttgtctcagctgctgaagctggagccatgaccctctgcattacaaacccattatgggtaa

SEQ ID NO: 516853 - DNA, 120 bp, Artificial Sequence
  ENSG00000164933_5 (sequence is synthesized)
caaaaactcgccttatgttacagtatgatgctgttgttaactccccacaccgacaatataaaggaatgtttgatacacttgtgaaaatatataagtatgaaggtgtgcgtggattatata

SEQ ID NO: 516854 - DNA, 120 bp, Artificial Sequence
  ENSG00000164933_6 (sequence is synthesized)
agggatttgttcctgggctgtttggaacatcgcatggtgcccttcagtttatggcatatgaattgctgaagttgaagtacaaccagcatatcaatagattaccagaagcccagttgagca

SEQ ID NO: 516855 - DNA, 120 bp, Artificial Sequence
  ENSG00000164933_7 (sequence is synthesized)
cagtagaatatatatctgttgcagcactatccaaaatatttgctgtcgcagcaacatacccatatcaagtcgtaagagctcgtcttcaggatcaacacatgttttacagtggtgtaatag

SEQ ID NO: 516856 - DNA, 120 bp, Artificial Sequence
  ENSG00000164933_8 (sequence is synthesized)
atgtaatcacaaagacatggaggaaagaaggcgtcggtggattttacaagggaattgctcctaatttgattagagtgactccagcctgctgtattacctttgtggtatatgaaaacgtct

SEQ ID NO: 516857 - DNA, 120 bp, Artificial Sequence
  ENSG00000164933_9 (sequence is synthesized)
cacattttttacttgaccttagagaaaagagaaagtaagctcaaagaggacaattccagtatatctgcccaaggcagcaacaagctcttttgtgtttaaggcataaaagaagaattctgc

SEQ ID NO: 516858 - DNA, 120 bp, Artificial Sequence
  ENSG00000164933_10 (sequence is synthesized)
atagaaacatggctcatattcgaaattgctctatagtcattagaagccagagaactgctaagtctcctgcaatgtttttcttgctttttgccttccccatatatatggaacttggctacc

SEQ ID NO: 516859 - DNA, 120 bp, Artificial Sequence
  ENSG00000164933_11 (sequence is synthesized)
tctgcctgaaatggctgccatcaacacaatgttaaaactgacacgaaggatagagtttcacagatttctacgttttattggtggaagctgatttgcaacatttgctaaatggattagatg

SEQ ID NO: 516860 - DNA, 120 bp, Artificial Sequence
  ENSG00000164933_12 (sequence is synthesized)
ttttgtgagcttacttgcctggattgctttaaaattaacctttgtgcaataccaagaaaatagctctttaaaagaatgtctttgtatgtctcaaggtaaattaaggatttactgaataag

SEQ ID NO: 516861 - DNA, 61 bp, Artificial Sequence
  ENSG00000164933_13 (sequence is synthesized)
tttgtatgtctcaaggtaaattaaggatttactgaataaggtgttgaccaaatccagacca

SEQ ID NO: 516862 - DNA, 120 bp, Artificial Sequence
  ENSG00000164933_14 (sequence is synthesized)
tttagtgagaaaaaatgcactgtaaatatgctttagttttaattcagttgggatgcactacctagcgaaaattgagaaactatatacttctcagagaaatatctgacatctattgtcatt

SEQ ID NO: 516863 - DNA, 120 bp, Artificial Sequence
  ENSG00000164933_15 (sequence is synthesized)
ccattgctattttttttccccagagacttccataatttaaaataaaatcctagatccagttcttgttttttggcataaatacttaatctattttaaatttataaaatctgagcttctagg

SEQ ID NO: 516864 - DNA, 120 bp, Artificial Sequence
  ENSG00000164933_16 (sequence is synthesized)
atccagctgtgtcaacctttatttagcatatataactataaatcacttattacagatgctaaatagatcaccttttacagatgctgaaatgtttgggatatgtttgttgacaaggtaaat

SEQ ID NO: 516865 - DNA, 120 bp, Artificial Sequence
  ENSG00000164933_17 (sequence is synthesized)
ggaaatgagaaactttatacttcagttttcagatatatggatctagatcccaaataaatgattaatcttcattggtttctcaaattcaggttgaaatacaaattaatagcctttattgat

SEQ ID NO: 516866 - DNA, 120 bp, Artificial Sequence
  ENSG00000164933_18 (sequence is synthesized)
tttacttttatgagtcattgtagacatctataaatataaaagggcctgtacccaaaggatgccagaatactagtatttttatttatcgtaaacatccacgagtgctgttgcactaccatc

SEQ ID NO: 516867 - DNA, 120 bp, Artificial Sequence
  ENSG00000164933_19 (sequence is synthesized)
tatttgttgtaaataaaagtgttgttttcaaagccatctttaaatagttctttaaaaataggtcttttttttatattttggaaaaggcattgtttttaaagtaaagataaaatggtaagt

SEQ ID NO: 516868 - DNA, 120 bp, Artificial Sequence
  ENSG00000164933_20 (sequence is synthesized)
aattgtatttactgtaatatcttataacatgcagatgaatgctttataagttaaatatgatgtattttttcatacttctggattatactataattcatatgaaatcttgatattagtccc

SEQ ID NO: 516869 - DNA, 120 bp, Artificial Sequence
  ENSG00000164933_21 (sequence is synthesized)
tccccacacggaaaaagtgaactgcagttgatatttggtgtttaagatagcaccattgtttaaataccgcctatgtactcccaaatgaataaaacataattcttgtcctctgagagcata

SEQ ID NO: 516870 - DNA, 120 bp, Artificial Sequence
  ENSG00000164933_22 (sequence is synthesized)
attttaaaaatttttttcctagtgtcagatctgttttctgattttataactcctttttattttccccttttctgccttctattcccatctattgcttatccccataaagaaatttttagg

SEQ ID NO: 516871 - DNA, 120 bp, Artificial Sequence
  ENSG00000164933_23 (sequence is synthesized)
catacataggttaaaatcaaaattagacacattgaatttcagtttgtttttcaagaattgagtaatagcttttaaaatcattttaaggctgatatgattttactgacctataagcaagaa

SEQ ID NO: 516872 - DNA, 120 bp, Artificial Sequence
  ENSG00000164933_24 (sequence is synthesized)
ttttataaatatattatttttatgttttttcgtcactttctgccttattctttcagaatacctatgctcagttcattgatttaccattacctttagtttcttaactttccagaatttagt

SEQ ID NO: 516873 - DNA, 120 bp, Artificial Sequence
  ENSG00000164933_25 (sequence is synthesized)
aagtagaagagaatactacccatgtctttatattacaagtttttaaccccatattttaaaaatgtgatttgtgcaaaattaaatgaatttgcttaaagtgctgtaatgagagagaagaga

SEQ ID NO: 516874 - DNA, 120 bp, Artificial Sequence
  ENSG00000164934_0 (sequence is synthesized)
gtggcggtgggcggaactcctagcggacacctcgtggagtccggccggaagagcaaccgagatgaaggtgaagatgctgagccggaatccggacaattatgtccgcgaaaccaagttgga

SEQ ID NO: 516875 - DNA, 120 bp, Artificial Sequence
  ENSG00000164934_1 (sequence is synthesized)
cttacagagagttccaagaaactatgatcctgctttacatccttttgaggtcccacgagaatatataagagctttaaatgctaccaaactggaacgagtatttgcaaaaccattccttgc

SEQ ID NO: 516876 - DNA, 120 bp, Artificial Sequence
  ENSG00000164934_2 (sequence is synthesized)
ttcgctggatggtcaccgtgatggagtcaattgcttggcaaagcatccagagaagctggctactgtcctttctggggcgtgtgatggagaggttagaatttggaatctaactcagcggaa

SEQ ID NO: 516877 - DNA, 120 bp, Artificial Sequence
  ENSG00000164934_3 (sequence is synthesized)
ttgtatccgtacaatacaagcacatgaaggctttgtacgaggaatatgtactcgcttttgtgggacttcttttttcactgttggtgatgacaaaactgtgaagcagtggaaaatggatgg

SEQ ID NO: 516878 - DNA, 120 bp, Artificial Sequence
  ENSG00000164934_4 (sequence is synthesized)
gccaggctatggagacgaggaagagccattacatacaatattaggaaagacagtgtatactgggattgatcatcactggaaagaagctgtttttgccacatgtggacagcaagtagacat

SEQ ID NO: 516879 - DNA, 120 bp, Artificial Sequence
  ENSG00000164934_5 (sequence is synthesized)
ttgggatgaacaaagaactaatcctatatgttcaatgacctggggatttgacagtataagtagtgttaaatttaacccaattgagacatttctcttgggaagttgtgcatctgacaggaa

SEQ ID NO: 516880 - DNA, 120 bp, Artificial Sequence
  ENSG00000164934_6 (sequence is synthesized)
tatagtactgtacgatatgaggcaagctactcctttgaaaaaggttatcttagatatgagaacaaatacaatctgttggaaccctatggaagctttcatttttacagcagcaaatgaaga

SEQ ID NO: 516881 - DNA, 120 bp, Artificial Sequence
  ENSG00000164934_7 (sequence is synthesized)
ttataacttatatacttttgatatgcgtgcactggacactcctgtaatggtccatatggatcatgtatctgcagtgcttgatgtggattactctcccactgggaaggagtttgtgtctgc

SEQ ID NO: 516882 - DNA, 120 bp, Artificial Sequence
  ENSG00000164934_8 (sequence is synthesized)
gggaggtatatcatacaaagagaatgcaacatgttatctgtgtaaaatggacttctgacagcaagtatattatgtgtggatctgatgaaatgaacattcgcctgtggaaagctaatgctt

SEQ ID NO: 516883 - DNA, 120 bp, Artificial Sequence
  ENSG00000164934_9 (sequence is synthesized)
ctgaaaaattgggtgtgcttacatcacgagaaaaagcagccaaggattataaccagaaattgaaggagaaatttcagcattatcctcatataaaacgtatagctcgtcatcgacatctac

SEQ ID NO: 516884 - DNA, 120 bp, Artificial Sequence
  ENSG00000164934_10 (sequence is synthesized)
caaaatctatctatagccagattcaggaacagcgcatcatgaaagaagctcgtcgacgaaaggaagtgaatcgtattaaacacagcaagcctggatctgtgccacttgtgtcagagaaga

SEQ ID NO: 516885 - DNA, 120 bp, Artificial Sequence
  ENSG00000164934_11 (sequence is synthesized)
agaaacacgtagtggcagttgtaaaataattggtattcctaacaatcctgatgtataattatttgttacttttgatttgagaactctacaaataaaagtgctgggactagattaattgca

SEQ ID NO: 516886 - DNA, 120 bp, Artificial Sequence
  ENSG00000164934_12 (sequence is synthesized)
aacattttagttatatgtgtagagctttattgttactccttttagctaccctgaaaaatgatccttaaaggtggcctagttggtaagactgttttatccttaatctgcattcttctttca

SEQ ID NO: 516887 - DNA, 120 bp, Artificial Sequence
  ENSG00000164934_13 (sequence is synthesized)
ttgtagaatacagtatttgcaactcattttttcttgtttttattacagatatacttactttctctttgatctattattgtagacactatacattcaaattgacatttaagaccaaacatc

SEQ ID NO: 516888 - DNA, 120 bp, Artificial Sequence
  ENSG00000164934_14 (sequence is synthesized)
tcttatgttatctttaatattactttgaataatgattgcaatgatgtttcttcctgtgattccacataacatttagaataatgatgtcaattttttacaactgaatttatttctagtgct

SEQ ID NO: 516889 - DNA, 120 bp, Artificial Sequence
  ENSG00000164934_15 (sequence is synthesized)
ttacttatatttggctttttgactcttttaaaacaatcagcctgcatttatataacttttataaataataatataatttgggtcaagttaagatattaaaagttcctttcagcattgaaa

SEQ ID NO: 516890 - DNA, 120 bp, Artificial Sequence
  ENSG00000164934_16 (sequence is synthesized)
agtatgttttacttattatggcttaataatttcagttctgtttagaaaacttttgaatgtatgatagaaacttctgaattttaatggtgttttggcattttgtcagttttcccgattgta

SEQ ID NO: 516891 - DNA, 120 bp, Artificial Sequence
  ENSG00000164934_17 (sequence is synthesized)
aatgagttctgatacctttgctcaaatcccaacatgtttcccagcagtttagtcccagatactagagttaagcattgttagaggagtggtgtgtgcatttgcccattggggtaaaatcca

SEQ ID NO: 516892 - DNA, 120 bp, Artificial Sequence
  ENSG00000164934_18 (sequence is synthesized)
agtaaatatagtcttgttttaactttagttttactcatgccttcaacttcatgttccatagattatgtcattgtacatttaggaaaatgttaatttttctacctgccttggaggtcagaa

SEQ ID NO: 516893 - DNA, 120 bp, Artificial Sequence
  ENSG00000164934_19 (sequence is synthesized)
ttggacatcattttgtctatttgtaattggtaaggtaccaatgcttcataaaaacatttgtgattattgttgaactgcatggtaattagttatagttatatttttctttgctcagaagtc

SEQ ID NO: 516894 - DNA, 120 bp, Artificial Sequence
  ENSG00000164934_20 (sequence is synthesized)
tgaattgtgattcccagttcctccaggcctaagggaagagttggagattggccactacatgtcgtctgtttaggtctgaatttaggaatggaggctgtcctgaaggctaagctagccctt

SEQ ID NO: 516895 - DNA, 120 bp, Artificial Sequence
  ENSG00000164934_21 (sequence is synthesized)
ggactccagatctttctctgaactttttcttaatgcataacaatagatgaactgattgtccagaagactcagtagggatatgtttttcctgttgaaagaaaaggcaatcatagcatatat

SEQ ID NO: 516896 - DNA, 120 bp, Artificial Sequence
  ENSG00000164934_22 (sequence is synthesized)
aagccaattttagcagttattgcgaggctaccattttaggtagtatgagagaaaaatcctaatatgcaagtgttatgctcttaaagacccaacctgataaaagataggaagtaaggttga

SEQ ID NO: 516897 - DNA, 120 bp, Artificial Sequence
  ENSG00000164934_23 (sequence is synthesized)
gtcaaaatagtaaggtataaaaatagtttgtatgatatactggaaaatgagatgctgcagtgcgatgtgagcttggccttgaggaattactgagaagtcagaggacactcttcctgcaac

SEQ ID NO: 516898 - DNA, 120 bp, Artificial Sequence
  ENSG00000164934_24 (sequence is synthesized)
taccacatgctcacacacacactttctagagacgctacaggtctagaataggttggcaaactagtctgtgagccacatgtggcccactgcctgtttttgtaaatagagctctgctagaag

SEQ ID NO: 516899 - DNA, 120 bp, Artificial Sequence
  ENSG00000164934_25 (sequence is synthesized)
acagccatgttctcttgcgtacatattgtctgtagctgctttcgtgctatgatggcagagttaagtaattgccacagagaccatatggcccacaaaacctaaaatacttactctctggcc

SEQ ID NO: 516900 - DNA, 120 bp, Artificial Sequence
  ENSG00000164934_26 (sequence is synthesized)
ctttacagaaaaagttttctgattcctggtctggagtgtctgtctctattatatctttctcactccatcctccatcttccttccttatgtttcccttggttgtagaagagagaagtggca

SEQ ID NO: 516901 - DNA, 120 bp, Artificial Sequence
  ENSG00000164934_27 (sequence is synthesized)
tggaaaggcagctacctttgcagagcaggaccaagtgtaaaagttgataacatatgtgaacattttttaaaagtgctatccaaattcaagatggtgacggtattacgtactaaaaaaaaa

SEQ ID NO: 516902 - DNA, 120 bp, Artificial Sequence
  ENSG00000164934_28 (sequence is synthesized)
aaaagacggaggagatccagttcgggctgacagtgagaggatgcagcccggtgtctgggcgggctcttaccggcgaagcggatcttcacgaggtcgagcggatgcagcgcaaggttggat

SEQ ID NO: 516903 - DNA, 120 bp, Artificial Sequence
  ENSG00000164934_29 (sequence is synthesized)
aagacgccgccgctcacgcccgctatcaggttctcataccggacgtggcggaataccgtgctccacgccgacgacccggacgccgactggccctggcccgtcataggctcggggcccgtc

SEQ ID NO: 516904 - DNA, 120 bp, Artificial Sequence
  ENSG00000164934_30 (sequence is synthesized)
gacaccacggcgcccagggccgcggaggtgggacgcgatgcagtggccgccaccgtggcgacggtcgccccttgtgagcgcaaccccacctccgggaccaacgagaggactcttatgccc

SEQ ID NO: 516905 - DNA, 120 bp, Artificial Sequence
  ENSG00000164934_31 (sequence is synthesized)
aaggcgcgtgagcgaagccggagactctagtactgagggggcaagaacggggcacagacactacgtcacgccggcggaaagcgcgatggaggggaggtcccagcctctcccgagtctccg

SEQ ID NO: 516906 - DNA, 120 bp, Artificial Sequence
  ENSG00000164934_32 (sequence is synthesized)
ccctgcctcgcccacaaatgctccagcccacggacgcggaagcgactgcacagctaaagaaccgccccttgctaacgtttgccggcaaaactacggagcggcgcaggatccagttgagcc

SEQ ID NO: 516907 - DNA, 120 bp, Artificial Sequence
  ENSG00000164934_33 (sequence is synthesized)
tttagaggaacaaaaaaatcttttgcttctctgctttggtgaacatctgtgtcagaagagccgatcaccaattctaaaatcgtaattattagggatgacctagtgaccatgtttttcaaa

SEQ ID NO: 516908 - DNA, 120 bp, Artificial Sequence
  ENSG00000164934_34 (sequence is synthesized)
cttgcctgtatagcagctgtatttgttcagctgtttttttttttaattgctattaaccttatgaacttagtggtaaaagtaaatggtgtgtgtgtctcttatcctgttttaaacttaatg

SEQ ID NO: 516909 - DNA, 120 bp, Artificial Sequence
  ENSG00000164934_35 (sequence is synthesized)
gaaagggcatgttgctgtgaacaaatggagtgtatttgtatttgtctcctctaatcattaataattaattttctcttaaaatattgaagcctagaattctggtaaagccaaaagtttatg

SEQ ID NO: 516910 - DNA, 120 bp, Artificial Sequence
  ENSG00000164934_36 (sequence is synthesized)
ctgatcattgggacgttttacagtgtgaaaggtggcatttggtctaggtagattgttttgctttgttcagatcaaagtctttctttttagaaatggaacctggtcagaccctgaggcgac

SEQ ID NO: 516911 - DNA, 120 bp, Artificial Sequence
  ENSG00000164934_37 (sequence is synthesized)
gttgagggacctcactagggaagtctcagaaaagcagccattaagatagcaggctttcagaaagaactgagaggaaatcatgatcataacattagctttatgatgtgttatttgaattgc

SEQ ID NO: 516912 - DNA, 120 bp, Artificial Sequence
  ENSG00000164934_38 (sequence is synthesized)
gtacagacagtaggaggagttagctggccatgcaactatttagtaaatagctcttcttgctgcccacatacttgcaataggaagtaattgtaggcagaagccaatagttgtgagtgtcag

SEQ ID NO: 516913 - DNA, 120 bp, Artificial Sequence
  ENSG00000164934_39 (sequence is synthesized)
gaaccatgagtgaggaggaatgatgctacagagagagggtttcagggatccactggatgatagagggcttatttttacttaatgccaaggggttatgtgagtaccatgcacatttataat

SEQ ID NO: 516914 - DNA, 120 bp, Artificial Sequence
  ENSG00000164934_40 (sequence is synthesized)
tgacttacaaataaaataattagaaaaatcttcaaacagttggacaaaagacaggcctaatttatagagagttaacaacacgaagaaacatttactaataaaacaataaatttatatagc

SEQ ID NO: 516915 - DNA, 120 bp, Artificial Sequence
  ENSG00000164934_41 (sequence is synthesized)
taggaaatactgtcatacagatattttaaatgacacttttaaatgacactacccagtgctgcccagttgcattaaaatggacatatcccacattgtagtgtatactggtacagctctttg

SEQ ID NO: 516916 - DNA, 120 bp, Artificial Sequence
  ENSG00000164934_42 (sequence is synthesized)
gaaaaataattagccctaaatatcaaaagccataaaattgttcataccttttgattcagtaatgtcatttgtgaaattttatcctaaggaaataattcaaaagaagaactacgtgggggg

SEQ ID NO: 516917 - DNA, 120 bp, Artificial Sequence
  ENSG00000164934_43 (sequence is synthesized)
gaaatgtttattgaagtattacttataatagtaaaaaacaggaaacaagtcttaagttgaagagtaggtaagtaaaatatgttttattacaaattagaacacagtaatatctgtacatta

SEQ ID NO: 516918 - DNA, 74 bp, Artificial Sequence
  ENSG00000164934_44 (sequence is synthesized)
aaccctgtctcttctaaaaatacaaaatattagcccggtgtggtggcgcacccctgtaatcccagctcctccac

SEQ ID NO: 516919 - DNA, 78 bp, Artificial Sequence
  ENSG00000164934_45 (sequence is synthesized)
atacaagcatgaggattttacagtgaaaatacttggtttaagttgctgagattatggatgatttattgtaccctctta

SEQ ID NO: 516920 - DNA, 120 bp, Artificial Sequence
  ENSG00000164934_46 (sequence is synthesized)
taagttgctgagattatggatgatttattgtaccctcttaaaatggactttgttttttaacataaatattaagggcaattaaatcatttgtttactgaatggatgtggtttgctgccagg

SEQ ID NO: 516921 - DNA, 88 bp, Artificial Sequence
  ENSG00000164934_47 (sequence is synthesized)
gggattacaggtgtgtgccaccacgcccaactaacttttgtagcaggctggtctaattaattaagctttttaaacaatttaaccaaaa

SEQ ID NO: 516922 - DNA, 120 bp, Artificial Sequence
  ENSG00000164934_48 (sequence is synthesized)
tggtctaattaattaagctttttaaacaatttaaccaaaacaaaattctggcattagattcagcatatcaggaggtactctttgaagaccattgcatttctttctttttcagtaaaatga

SEQ ID NO: 516923 - DNA, 120 bp, Artificial Sequence
  ENSG00000164934_49 (sequence is synthesized)
aggggaaaaaaagtgtgttgacctgaattgatttgatatggggaagaggccttttaagatcaagtcctttctttttgttacaaagttaccttggttgaacatcatattttatttgcattt

SEQ ID NO: 516924 - DNA, 120 bp, Artificial Sequence
  ENSG00000164934_50 (sequence is synthesized)
tatgcttttagttattctgtgaacttttctgtacatctggttttgcttagtttgttcatatttatttctcttactagatagtaagttctctgagagcagaaatttgtttactaccccagc

SEQ ID NO: 516925 - DNA, 120 bp, Artificial Sequence
  ENSG00000164934_51 (sequence is synthesized)
acttaacacggaaccttattagttgggttcaataaaaatacattgacaagaatttgagtttttattttatactcctataggactcagaaatagtatcctgatacttaataggcagtggtt

SEQ ID NO: 516926 - DNA, 120 bp, Artificial Sequence
  ENSG00000164934_52 (sequence is synthesized)
ttagatattacattatgaaaatttacttttaggtatttttgggtattttgattaaattgacatagctgtgataaaaaaagcaataaatggacaaggttgtattgataattatttgcttca

SEQ ID NO: 516927 - DNA, 120 bp, Artificial Sequence
  ENSG00000164934_53 (sequence is synthesized)
ttctgatctattattgtagacactgtacattcaaattgacatttaagaccttcagaatgcctttgttaattcagatgtttgataatattgagtcttactggttttttgtgttttccttga

SEQ ID NO: 516928 - DNA, 120 bp, Artificial Sequence
  ENSG00000164934_54 (sequence is synthesized)
ggtagggacagaagatgcaggaactagaggctcagaacttagagctcgtatctcttgttagagaaatagtcatccagcaactcaaaggctgcaagtccctgggagatcttgtaatatcaa

SEQ ID NO: 516929 - DNA, 120 bp, Artificial Sequence
  ENSG00000164934_55 (sequence is synthesized)
agacacaatggaacatttaataaatacagaaagcttcatactttaaaaaagattccatgaaaaaatagcaggtgttatcattggctggttacctccaggataggggattatggttgattt

SEQ ID NO: 516930 - DNA, 120 bp, Artificial Sequence
  ENSG00000164934_56 (sequence is synthesized)
tgttttgttcttgatgtttttctaaatgtcccatattttctataagaaacagagtgtttatattagaaataaatattaagtttaagaaggaaagggtaagtgtgaattattttctactta

SEQ ID NO: 516931 - DNA, 120 bp, Artificial Sequence
  ENSG00000164934_57 (sequence is synthesized)
gtcctgataggaaaatcaaaggcaattctgttttaggtttaatgattgataagtattgcattgtgcctaggtccatcattaaatgttcctctaaatcgtatcatccttaacattcgttaa

SEQ ID NO: 516932 - DNA, 120 bp, Artificial Sequence
  ENSG00000164934_58 (sequence is synthesized)
acaaagggtagttcttatggaattggatacttattttttctttgctgtttcactatgtttaactcacctctttacccacccccaaaatttgagtgagtgatttaggtgcttttctatgtt

SEQ ID NO: 516933 - DNA, 120 bp, Artificial Sequence
  ENSG00000164934_59 (sequence is synthesized)
ggtccaactcagtgatccacgtggccctactccttcagcactgctgctttctactgggtggcatctatctacatggcgagtgtgttgcctaaaaggaaattcagtgcttgcagagctagt

SEQ ID NO: 516934 - DNA, 120 bp, Artificial Sequence
  ENSG00000164934_60 (sequence is synthesized)
gttactaatataaccttgtaaagtgcagaattacattggcaattttggttgcatatcataaaagattaggttagggggaaaagggtgctttctagcttttttatactgaagcaaaacaac

SEQ ID NO: 516935 - DNA, 120 bp, Artificial Sequence
  ENSG00000164934_61 (sequence is synthesized)
cttctgctctcatctcaccaaaaacaaagttaactgccattcaagggagtagtttatgtgctattatttaatagtatgttagtgatgtgtttgaagacttctacagaaggccttttcttt

SEQ ID NO: 516936 - DNA, 120 bp, Artificial Sequence
  ENSG00000164934_62 (sequence is synthesized)
acaggtgtgagccaccatgccccgcccagaaggccatttctttttctttttcccaaaaaagggaagcagtgactatctgagaatgggagaacttccattacctgtttttgagaatatgtt

SEQ ID NO: 516937 - DNA, 120 bp, Artificial Sequence
  ENSG00000164934_63 (sequence is synthesized)
cctgtttttgagaatatgtttaaaggacaaacgatgaaaatgagttaccaaaataagaaaacacttgctcatattaaaaaattattgtaaaaaatgttttaaaaaataatttctgatgta

SEQ ID NO: 516938 - DNA, 120 bp, Artificial Sequence
  ENSG00000164934_64 (sequence is synthesized)
gctggaattaagagattttgtgtattttccaagttaaagaattaatctatagtagagctcttttcttaagtaaaaagtgttctgatatactttattataacatgacatctatcattttgg

SEQ ID NO: 516939 - DNA, 120 bp, Artificial Sequence
  ENSG00000164934_65 (sequence is synthesized)
atatagagcagagctactaccaccaccaccatttcccgtgaaatattcttctctttgaaatacttgaagtcatgcatgaaattctaagagctctttatttttcaattagaatatacaaat

SEQ ID NO: 516940 - DNA, 120 bp, Artificial Sequence
  ENSG00000164934_66 (sequence is synthesized)
ggctctttttttctgtctttgggtagatgttgcagtagaatcacttttagaaattttattaactgtggaaggtttttaaacttagtaaaggaccctattaggtaaatatgataagaagca

SEQ ID NO: 516941 - DNA, 120 bp, Artificial Sequence
  ENSG00000164934_67 (sequence is synthesized)
attaaataagtaaagttgatttcttggtactagcttccttttacctattgtcatcgtgaaaatatttttttaaataggtgtttttctagtgaaagaaaatgctttgatttttctgagaaa

SEQ ID NO: 516942 - DNA, 120 bp, Artificial Sequence
  ENSG00000164934_68 (sequence is synthesized)
tttttagttactgtaggttttactttattggatttcaatttacttctcaagactaaatttcgttaggaatactgtttagtattttcttctttaaacctaagaaattataaatgcagtagt

SEQ ID NO: 516943 - DNA, 120 bp, Artificial Sequence
  ENSG00000164935_0 (sequence is synthesized)
gcatttctgcattcgaagaagaatctgagagaaacctgacgcagggagcatgggtatctggacctcaggcactgatatcttcctaagtctttgggagatttacgtgtctccaagaagccc

SEQ ID NO: 516944 - DNA, 120 bp, Artificial Sequence
  ENSG00000164935_1 (sequence is synthesized)
cggatggatggactttatccagcatttgggagtttgctgtttggttgctcttatttcagtgggcctcctgtctgtggccgcctgctggtttctgccatcaatcatagcggccgctgcctc

SEQ ID NO: 516945 - DNA, 120 bp, Artificial Sequence
  ENSG00000164935_2 (sequence is synthesized)
ctggattatcacgtgtgttctgctgtgttgctccaagcatgcacgatgttttattcttcttgtctttctctcttgtggcctgcgtgaaggcaggaatgctttgattgcagctggcacagg

SEQ ID NO: 516946 - DNA, 120 bp, Artificial Sequence
  ENSG00000164935_3 (sequence is synthesized)
gatcgtcatcttgggacacgtagaaaatatttttcacaactttaaaggtctcctagatggtatgacttgcaacctaagggcaaagagcttttccatacattttccacttttgaaaaaata

SEQ ID NO: 516947 - DNA, 120 bp, Artificial Sequence
  ENSG00000164935_4 (sequence is synthesized)
tattgaggcaattcagtggatttatggccttgccactccactaagtgtatttgatgaccttgtttcttggaaccagaccctggcagtctctcttttcagtcccagccatgtcctggaggc

SEQ ID NO: 516948 - DNA, 120 bp, Artificial Sequence
  ENSG00000164935_5 (sequence is synthesized)
acagctaaatgacagcaaaggggaagtcctgagcgtcttgtaccagatggcaacaaccacagaggtgttgtcctccctgggtcagaagctacttgcctttgcagggctttcgctcgtcct

SEQ ID NO: 516949 - DNA, 120 bp, Artificial Sequence
  ENSG00000164935_6 (sequence is synthesized)
gcttggcactggcctcttcatgaagcgatttttgggcccttgtggttggaagtatgaaaacatctacatcaccagacaatttgttcagtttgatgaaagggagagacatcaacagaggcc

SEQ ID NO: 516950 - DNA, 120 bp, Artificial Sequence
  ENSG00000164935_7 (sequence is synthesized)
ctgtgtgctcccgctgaataaggaggaaaggaggaagtatgtcatcatcccgactttctggccgactcctaaagaaaggaaaaacctggggctgtttttcctccccatacttatccatct

SEQ ID NO: 516951 - DNA, 120 bp, Artificial Sequence
  ENSG00000164935_8 (sequence is synthesized)
tctgctgtatcggctcattttctcagtgagcaagcagtttcaaagcttgccagggtttgaggttcacttgaaactgcacggagagaaacaaggaactcaagatattatccatgattcttc

SEQ ID NO: 516952 - DNA, 120 bp, Artificial Sequence
  ENSG00000164935_9 (sequence is synthesized)
ctttaatatatctgtgtttgaacccaactgtatcccaaaaccaaaattccttctatctgagacctgggttcctctcagtgttattcttttgatattagtgatgctgggactgttgtcctc

SEQ ID NO: 516953 - DNA, 120 bp, Artificial Sequence
  ENSG00000164935_10 (sequence is synthesized)
tatccttatgcaacttaaaatcctggtgtcagcatctttctaccccagcgtggagaggaagcgcatccaatatctgcatgcaaagctgcttaaaaaaagatcaaagcagccgctgggaga

SEQ ID NO: 516954 - DNA, 120 bp, Artificial Sequence
  ENSG00000164935_11 (sequence is synthesized)
agtcaaaagacggctgagtctctatcttacaaagattcatttctggcttccagtcctgaaaatgattaggaagaagcaaatggacatggcaagtgcagacaagtcatgagagaccccgac

SEQ ID NO: 516955 - DNA, 120 bp, Artificial Sequence
  ENSG00000164935_12 (sequence is synthesized)
tactcctcagccacatcgcaccaacaattctcttcaggtctaggatggcagtcactattcatgccggataatagagaactatgtgacgcagtcctctcaggagtctgagtttacagagcc

SEQ ID NO: 516956 - DNA, 120 bp, Artificial Sequence
  ENSG00000164935_13 (sequence is synthesized)
aacttgcagcacctggttatgcctcctttcatctcaaagccaaagagctgccaggtaaatggttatgtggtctatgttccaaacaaaccacatgatcttgcctgtgtcacaatgtaacaa

SEQ ID NO: 516957 - DNA, 120 bp, Artificial Sequence
  ENSG00000164935_14 (sequence is synthesized)
gactctagctgggtcccctggtgatgagtttcagcatagaataatgttcaaggaaaagaaaacgaaaacagtttaaatctctaccacagcctcacaagcaaatgctaaggggaacataca

SEQ ID NO: 516958 - DNA, 120 bp, Artificial Sequence
  ENSG00000164935_15 (sequence is synthesized)
tgtaaaaagccagcaaactatcttcaaactcttccgtccttaatgtcttccatggctattgcccccacaatggtctcttttctccctgctcccttattaaagaactctttctgaaaccca

SEQ ID NO: 516959 - DNA, 120 bp, Artificial Sequence
  ENSG00000164935_16 (sequence is synthesized)
tcatttcaacagctctcttcatcttcaggactaagtcagccccttacacaaaggactcatgagggacatgcagtctgtgtgcccagcctgagcccaagggtctattctgatccttttttt

SEQ ID NO: 516960 - DNA, 120 bp, Artificial Sequence
  ENSG00000164935_17 (sequence is synthesized)
ttttttaagataaaggtttttgcaggtataataggggtctccaacaaaaagtaaagaataattttgtagaaagattttgagactttcctaactctccgaaactacacaagctggtccttt

SEQ ID NO: 516961 - DNA, 120 bp, Artificial Sequence
  ENSG00000164935_18 (sequence is synthesized)
gcatttctgcattcgaagaagaatctgagagaaacctgctgctttcacagaggaaggcatttgctggctttcccaaggcaagaacaatgaaaacaaagtcatgaggagttctctctacct

SEQ ID NO: 516962 - DNA, 120 bp, Artificial Sequence
  ENSG00000164935_19 (sequence is synthesized)
aaaagagaaaagagggagagaggccgtccaagctttcacaactcactctcttgtgtttgaaaatatctgatttcattattttctataattaatttctagaacatctattctgaggaaaat

SEQ ID NO: 516963 - DNA, 120 bp, Artificial Sequence
  ENSG00000164935_20 (sequence is synthesized)
gctagaaagaaatatgctattcatttgtatcagcattactctttgttgatattaaatggctcagtcactttatgggggaaataaagaggttgattcatggtgatgtgaccctctcgacac

SEQ ID NO: 516964 - DNA, 120 bp, Artificial Sequence
  ENSG00000164938_0 (sequence is synthesized)
gttgcgagcgctgcacaacaacaaaaggacttggactggccggcctgggcgcagcgacccgagggctggagccggccccgcgcctgccgtctgggtacctgaacgaggtgcagcgcagcc

SEQ ID NO: 516965 - DNA, 120 bp, Artificial Sequence
  ENSG00000164938_1 (sequence is synthesized)
cggccccaccgcagctacctcagcagtcccgccccgcccgcgtccttccccgccgagccggcggccgctcccttccccgcgcagccccgcacggcccgggcccacgtacaatgactcttc

SEQ ID NO: 516966 - DNA, 120 bp, Artificial Sequence
  ENSG00000164938_2 (sequence is synthesized)
ttgcttttcacctaagttgaataagcaccctgtgcactttaatctcctgtcggtaccattgggccaactaaagacaaggttttgaaatctcagctataaaagacatccagccaaactctc

SEQ ID NO: 516967 - DNA, 120 bp, Artificial Sequence
  ENSG00000164938_3 (sequence is synthesized)
agtcttgccttaacaatgttccagaggctgaataaaatgtttgtgggtgaagtcagttcttcctccaaccaagaaccagaattcaatgagaaagaagatgatgaatggattcttgttgac

SEQ ID NO: 516968 - DNA, 120 bp, Artificial Sequence
  ENSG00000164938_4 (sequence is synthesized)
ttcatagatacttgcactggtttctcagcagaagaagaagaagaagaggaggacatcagtgaagagtcacctactgagcacccttcagtcttttcctgtttaccggcatctcttgagtgc

SEQ ID NO: 516969 - DNA, 120 bp, Artificial Sequence
  ENSG00000164938_5 (sequence is synthesized)
ttggctgatacaagtgattcctgctttctccagtttgagtcatgtccaatggaggagagctggtttatcaccccacccccatgttttactgcaggtggattaaccactatcaaggtggaa

SEQ ID NO: 516970 - DNA, 120 bp, Artificial Sequence
  ENSG00000164938_6 (sequence is synthesized)
acaagtcctatggaaaaccttctcattgaacatcccagcatgtctgtctatgctgtgcataactcctgccctggtctcagtgaggccacccgtgggactgatgaattacatagcccaagt

SEQ ID NO: 516971 - DNA, 120 bp, Artificial Sequence
  ENSG00000164938_7 (sequence is synthesized)
agtcccagagtggaagctcaaaatgaaatggggcagcatattcattgttatgttgcagctcttgctgctcatacaacttttctggaacaacccaagagctttcgcccttcccagtggata

SEQ ID NO: 516972 - DNA, 120 bp, Artificial Sequence
  ENSG00000164938_8 (sequence is synthesized)
aaagaacacagtgaaagacagcctcttaacagaaatagccttcgtcgccaaaatcttaccagggattgccaccctcggcaagtcaagcacaatggctgggttgttcatcagccctgcccg

SEQ ID NO: 516973 - DNA, 120 bp, Artificial Sequence
  ENSG00000164938_9 (sequence is synthesized)
cgtcagtacaattactaatagtttcaagttttgttggttggtttctcttggtttgtgcttacatgtatggatgtgtgtatatgtacagtgaaaatgttgtctctttacaaccaattgata

SEQ ID NO: 516974 - DNA, 120 bp, Artificial Sequence
  ENSG00000164938_10 (sequence is synthesized)
accaatcacatagttttatcagtgtatttagacactatcttgaaaatcagatttatatgctgtgtatcacataatgccttgcctttaacatttactttttttgtacactttttcagatta

SEQ ID NO: 516975 - DNA, 120 bp, Artificial Sequence
  ENSG00000164938_11 (sequence is synthesized)
tttctggaaacatatcaatataattacagtgtttgggggtgtctttaaatatattaggttatacattagtcagcattttaaagacatttcttcccaagtacgagaataggcatctttcat

SEQ ID NO: 516976 - DNA, 120 bp, Artificial Sequence
  ENSG00000164938_12 (sequence is synthesized)
tttcattttattttgtattacttaatcttttaagcaagcaaaaatttattctcagggtcagctgtacactttattgaccagtacttgataatctctctgtatatgatgaatacattttta

SEQ ID NO: 516977 - DNA, 120 bp, Artificial Sequence
  ENSG00000164938_13 (sequence is synthesized)
cacactaacattagcattaacaggtgatagttgccatggatataatggaattatggctggactttcttttgaaagaaaacttgatgtattctgtgtgtatggtttttccccagattagtc

SEQ ID NO: 516978 - DNA, 120 bp, Artificial Sequence
  ENSG00000164938_14 (sequence is synthesized)
atacagttcatttggaattcaggtacattaagctttagtgaagagtgcatgcagtaattccaatgtgactgcatgacgtggtacagacattacaggtgttgtagacagaggcacttgtct

SEQ ID NO: 516979 - DNA, 120 bp, Artificial Sequence
  ENSG00000164938_15 (sequence is synthesized)
cgtgcagagggattaaattagacctgtgagattatatttggaaaaattcatgtctgtaactaacccattagtgcagtatttaatttgttactattccttcccgccaattctgtccactcc

SEQ ID NO: 516980 - DNA, 120 bp, Artificial Sequence
  ENSG00000164938_16 (sequence is synthesized)
tcacctcgcatcagctataaatttggaagtacttgtccaggcactcaagtgacttcatatttctctctgcccatgggaaaagagataggctttatatttccacagagtgaaaaatcctct

SEQ ID NO: 516981 - DNA, 120 bp, Artificial Sequence
  ENSG00000164938_17 (sequence is synthesized)
gtcatggagcctgtcctgccaagtggcaagagtgtggggactgtctggtgatgatgtctttcatggcatctgagtgaagagtgacaggttggctcaacttttttctttttttttttttaa

SEQ ID NO: 516982 - DNA, 120 bp, Artificial Sequence
  ENSG00000164938_18 (sequence is synthesized)
ttgccttgtattgtaagtattcttccctgcagtccaagtgacttttcattttttgttttaacttcaggcaaaatctttaaccactctggcctctgtttcccccaccaacggggagcagtg

SEQ ID NO: 516983 - DNA, 120 bp, Artificial Sequence
  ENSG00000164938_19 (sequence is synthesized)
acatttacctccctcacagagtcactgtgaggattctatactgatttgaagtggagctgttcagaactgaaccttgtaggaaattccaagggcctttctactgaatctggtgatggggtg

SEQ ID NO: 516984 - DNA, 120 bp, Artificial Sequence
  ENSG00000164938_20 (sequence is synthesized)
gggccgtggcactttctctgccacagctgttcttcacagtgttggtgctaatgaggccagggtgcagggttcgattcacacgtaggccagttaacttagagaaaatctatttccttacct

SEQ ID NO: 516985 - DNA, 120 bp, Artificial Sequence
  ENSG00000164938_21 (sequence is synthesized)
ctagccagtcacttcctttttccgcagttgtgatgggttttgctgagccatccactctgactgatttcctctgaagtaaacatatttacaatccaaagcaattctactgacagaagtgtt

SEQ ID NO: 516986 - DNA, 120 bp, Artificial Sequence
  ENSG00000164938_22 (sequence is synthesized)
gccttcataatcaaacagcttgtttttccatctcctctgcaaccctaattaaatgagtacaggtctacaaaatgttttcaaggagaaaagcagcatatccttaagtgaagtattatattt

SEQ ID NO: 516987 - DNA, 120 bp, Artificial Sequence
  ENSG00000164938_23 (sequence is synthesized)
gtttggagtggaagacgtcaaatgtgtagtgagatggaggttttacattgttcttctactggctgtgatgaagtgccagaatgtctctttagaacaagagttagattccccctttctcct

SEQ ID NO: 516988 - DNA, 120 bp, Artificial Sequence
  ENSG00000164938_24 (sequence is synthesized)
tattgccccttccgttttgacttcccctttatttatttgttgtctaattaggggccaagtctgtaaagttttgtcaaagtgagttagaagttgttttctcttactatttgtgtttaccag

SEQ ID NO: 516989 - DNA, 120 bp, Artificial Sequence
  ENSG00000164938_25 (sequence is synthesized)
agttgggagataagatagtttccatgaaggtgtgtatgttttatacgatgtttgttatagggccatgcattggtaacttgaaaatagaccagcttaatgtcttcaggatgtaaaactctg

SEQ ID NO: 516990 - DNA, 120 bp, Artificial Sequence
  ENSG00000164938_26 (sequence is synthesized)
aatacacggcgtctctttttcatacattgcatgtaagttgttagtacctcacaagctacagaagttcagccatgagattttgtttggcaacatgaacagatttgtgtataactgcaatgg

SEQ ID NO: 516991 - DNA, 120 bp, Artificial Sequence
  ENSG00000164938_27 (sequence is synthesized)
cctttttttccagatttccttattgactttttgtttgccttacctggggctagttttttatgctttgtacctagaaaacaaaaaattacattcgttgggctttttttcaaggttgggatt

SEQ ID NO: 516992 - DNA, 120 bp, Artificial Sequence
  ENSG00000164938_28 (sequence is synthesized)
accacaccacctggaatatcatactgtggtttctgcctaaaattggcacatgtaagtattgaagaaaatggttatataattcagttgaaactcttggttattagatgttaggcatctcct

SEQ ID NO: 516993 - DNA, 120 bp, Artificial Sequence
  ENSG00000164938_29 (sequence is synthesized)
gtatgtaagacacaaggccaaccacaacacagaacgatgttgacctgttaagtattctctgaaacatggccaaaatgcattttatgagcttttttttttgctattgtaaatattagtggt

SEQ ID NO: 516994 - DNA, 120 bp, Artificial Sequence
  ENSG00000164938_30 (sequence is synthesized)
ttacaatgcgctttagacatatttctttaaaatgcaagcagtgagaaataagacctctctgaattagtagctctaaactgttaacatagaatgttacttggaaaaagtctggaatatgtg

SEQ ID NO: 516995 - DNA, 120 bp, Artificial Sequence
  ENSG00000164938_31 (sequence is synthesized)
gtgtacacaagcagtgcttcgtgaatgagtttcttagcttttatagtgcgccatgtttctcaaagtttgtttttgttgacaaaacattttataatatatatcttatgtttattttttttc

SEQ ID NO: 516996 - DNA, 120 bp, Artificial Sequence
  ENSG00000164938_32 (sequence is synthesized)
tcaactaattgtgtactgcactgtaaggtgaaaattagccatccattatttatcttctgtggcaatgcatttatatggttgattgggtggggaattttttgcagaaagatgcaaagtgat

SEQ ID NO: 516997 - DNA, 120 bp, Artificial Sequence
  ENSG00000164938_33 (sequence is synthesized)
tgggttttcgacttcctatcgcagggagcttttaagaaatattaatttcctatacatttttccaatccccatgcaaactgttcctgtttacataccttctctgttgtatcagtactttga

SEQ ID NO: 516998 - DNA, 120 bp, Artificial Sequence
  ENSG00000164938_34 (sequence is synthesized)
gtgagaagacagtttatttaaaacttgagcaggctgttcagcattgtttctgcttctgaaatctgtatagtacactggtttgtaatcattatgtcttcattgaaatccttgctacttctc

SEQ ID NO: 516999 - DNA, 120 bp, Artificial Sequence
  ENSG00000164938_35 (sequence is synthesized)
ttcctcctcaatgaaatacattatatattatctttatgtactcttaagaaaaacgagcaaggaagagtatcttcattattctcattttctctgagttggaaacaaaaacatgaaggactc

SEQ ID NO: 517000 - DNA, 120 bp, Artificial Sequence
  ENSG00000164938_36 (sequence is synthesized)
caactagaagacagatatttacatttaaatagattagtgggaaaactttaagagtttccacatattagttttcattttttgagtcaagagactgctccttgtactgggagacactagtag

SEQ ID NO: 517001 - DNA, 120 bp, Artificial Sequence
  ENSG00000164938_37 (sequence is synthesized)
tatatgtttgtaatgttactttaaaattatctttttattttataaggcccataaatactggttaaactctgttaaaagtgggccttctatcttggatggtttcactgccatcagccatgc

SEQ ID NO: 517002 - DNA, 120 bp, Artificial Sequence
  ENSG00000164938_38 (sequence is synthesized)
tgatatattagaaatggcatccctatctacttactttaatgcttaaaattatacataaaatgctttatttagaaaacctacatgatacagtggtgtcagccttgccatgtatcagtttca

SEQ ID NO: 517003 - DNA, 120 bp, Artificial Sequence
  ENSG00000164938_39 (sequence is synthesized)
cttgaaatttgagaccaattaaatttcaactgtttagggtggagaaagaggtactggaaaacatgcagatgaggatatcttttatgtgcaacagtatcctttgcatgggaggagagttac

SEQ ID NO: 517004 - DNA, 120 bp, Artificial Sequence
  ENSG00000164938_40 (sequence is synthesized)
tcttgaaaggcaggcagcttaagtggacaatgttttgtatatagttgagaattttacgacacttttaaaaattgtgtaattgttaaatgtccagttttgctctgttttgcctgaagtttt

SEQ ID NO: 517005 - DNA, 120 bp, Artificial Sequence
  ENSG00000164938_41 (sequence is synthesized)
agtatttgttttctaggtggacctctgaaaaccaaaccagtacctggggaggttagatgtgtgtttcaggcttggagtgtatgagtggttttgcttgtattttcctccagagattttgaa

SEQ ID NO: 517006 - DNA, 120 bp, Artificial Sequence
  ENSG00000164938_42 (sequence is synthesized)
ctttaataattgcgtgtgttttttttttttttaagtggctttgtttttttttctcaagtaaaattgtgaacatatttcctttataggggcagggcatgagttagggagactgaagagtat

SEQ ID NO: 517007 - DNA, 120 bp, Artificial Sequence
  ENSG00000164938_43 (sequence is synthesized)
tgtagactgtacatgtgccttcttaatgtgtttctcgacacattttttttcagtaacttgaaaattcaaaagggacatttggttaggttactgtacatcaatctatgcataaatggcagc

SEQ ID NO: 517008 - DNA, 120 bp, Artificial Sequence
  ENSG00000164938_44 (sequence is synthesized)
ttgttttcttgagccacggtctaaattttgtttttatagaaattttttatactgattggttcatagatggtcagttttgtacacagactgaacaatacagcactttgccaaaaatgagtg

SEQ ID NO: 517009 - DNA, 120 bp, Artificial Sequence
  ENSG00000164938_45 (sequence is synthesized)
tagcattgtttaaacattgtgtgttaacacctgttctttgtaattgggttgtggtgcattttgcactacctggagttacagttttcaatctgtcagtaaataaagtgtcctttaacttca

SEQ ID NO: 517010 - DNA, 120 bp, Artificial Sequence
  ENSG00000164941_0 (sequence is synthesized)
gccattttggattgtgtgagtttccgggacgttcggagggtggcctctctcccaccgggttccgcataccccaggcaccggcccgcatccaagtgtcaggttggagccgggaagcggccc

SEQ ID NO: 517011 - DNA, 120 bp, Artificial Sequence
  ENSG00000164941_1 (sequence is synthesized)
tggtggtagcggcggcgggggcaggatgagcgcggaggcggcggaccgggaggcggccacctccagccggccctgcaccccgccgcagacctgctggtttgagtttctgctggaggagtc

SEQ ID NO: 517012 - DNA, 120 bp, Artificial Sequence
  ENSG00000164941_2 (sequence is synthesized)
actgttggagaaacatctgcgcaagccctgcccggatcctgcaccagttcaacttatagttcagtttttggaacaggcttccaaaccttcagttaatgaacaaaaccaagttcaacctcc

SEQ ID NO: 517013 - DNA, 120 bp, Artificial Sequence
  ENSG00000164941_3 (sequence is synthesized)
gcctgataacaagagaaatcgtattttaaaactacttgctcttaaagttgctgcacatttgaagtgggacttagacatattagagaaaagtttgtctgttccagtattgaatatgctact

SEQ ID NO: 517014 - DNA, 120 bp, Artificial Sequence
  ENSG00000164941_4 (sequence is synthesized)
aaatgaactactctgcatcagtaaagttcctcctgggacaaagcatgtagacatggatctggccactttacctccgaccactgccatggctgtacttctctataatagatgggcaattag

SEQ ID NO: 517015 - DNA, 120 bp, Artificial Sequence
  ENSG00000164941_5 (sequence is synthesized)
gacaattgttcaaagtagttttccagtcaaacaggcaaaacccggaccccctcagttaagtgttatgaatcaaatgcaacaggaaaaagagctaacagaaaacattttgaaagtgctcaa

SEQ ID NO: 517016 - DNA, 120 bp, Artificial Sequence
  ENSG00000164941_6 (sequence is synthesized)
agaacaagctgctgattctattttggtactagaagcagccctaaaattaaacaaggatctttatgtccatacgatgagaactctagatttattggccatggaaccaggcatggtaaatgg

SEQ ID NO: 517017 - DNA, 120 bp, Artificial Sequence
  ENSG00000164941_7 (sequence is synthesized)
agaaactgagagttctactgctggattgaaagtcaaaaccgaagaaatgcagtgccaggtgtgctatgatttgggcgcagcatacttccagcaaggctccacaaattcagctgtctatga

SEQ ID NO: 517018 - DNA, 120 bp, Artificial Sequence
  ENSG00000164941_8 (sequence is synthesized)
aaatgccagggaaaaattttttagaaccaaagaactaattgcagagataggttcattatctcttcattgtaccatagatgagaagcggttagctggctattgtcaagcatgtgatgttct

SEQ ID NO: 517019 - DNA, 120 bp, Artificial Sequence
  ENSG00000164941_9 (sequence is synthesized)
tgtaccttcttctgatagtacatctcaacagttgactccatatagtcaagtccatatttgtttgagatctggcaactatcaggaggtaatacagattttcattgaagacaacttaacctt

SEQ ID NO: 517020 - DNA, 120 bp, Artificial Sequence
  ENSG00000164941_10 (sequence is synthesized)
gagtttacctgtccagttccgacagtcagtcctaagagaactctttaagaaagctcaacagggaaatgaagctctagatgaaatctgttttaaagtttgtgcctgtaatacagtccgtga

SEQ ID NO: 517021 - DNA, 120 bp, Artificial Sequence
  ENSG00000164941_11 (sequence is synthesized)
tatactggaaggcagaacaattagtgttcaatttaaccagctatttcttagaccaaataaagagaaaatagactttcttcttgaggtatgttcaagatcagtaaatttagaaaaagcttc

SEQ ID NO: 517022 - DNA, 120 bp, Artificial Sequence
  ENSG00000164941_12 (sequence is synthesized)
agagtctttgaaaggaaacatggctgcttttctaaagaatgtgtgtctggggttggaagatctgcagtatgttttcatgatttcttcacatgagcttttcattacattgttgaaagatga

SEQ ID NO: 517023 - DNA, 120 bp, Artificial Sequence
  ENSG00000164941_13 (sequence is synthesized)
agaacgaaagctacttgttgatcagatgaggaagagatcccctagagtaaatctgtgcattaaacctgtaacttcattttatgatatcccagcttcagcaagtgtcaacattggtcagtt

SEQ ID NO: 517024 - DNA, 120 bp, Artificial Sequence
  ENSG00000164941_14 (sequence is synthesized)
agagcatcaacttatattgtcagtggatccttggaggattagacaaattttaattgaattacatggtatgacttcagagcgccagttctggacagtgtctaataagtgggaagtaccttc

SEQ ID NO: 517025 - DNA, 120 bp, Artificial Sequence
  ENSG00000164941_15 (sequence is synthesized)
tgtctatagtggtgttatcctgggaattaaagacaatttaacaagagatttggtttatattcttatggccaaaggtttgcactgcagtactgttaaggacttttcccatgctaaacagct

SEQ ID NO: 517026 - DNA, 120 bp, Artificial Sequence
  ENSG00000164941_16 (sequence is synthesized)
ctttgctgcttgtttggagttggtaacagagttctcaccgaagcttcgtcaggtcatgctgaatgagatgttgcttttggatattcatacacacgaagctgggacagggcaggcaggaga

SEQ ID NO: 517027 - DNA, 120 bp, Artificial Sequence
  ENSG00000164941_17 (sequence is synthesized)
gagaccgccatccgaccttataagtagagtacgaggctatctggaaatgaggcttcctgatattcctcttcgtcaagttatagctgaggaatgtgttgcctttatgttaaactggagaga

SEQ ID NO: 517028 - DNA, 120 bp, Artificial Sequence
  ENSG00000164941_18 (sequence is synthesized)
aaatgaataccttacactccaagttcctgcatttttgcttcagagtaatccatatgtaaagcttggacagcttttagcagctacatgcaaagaacttccaggccctaaagaaagtagacg

SEQ ID NO: 517029 - DNA, 120 bp, Artificial Sequence
  ENSG00000164941_19 (sequence is synthesized)
ttaataaaacagagggaatctacgttaggtatcatgtatcggagtgaactgctttcttttatcaaaaaattacgagaaccactcgttttgactattattttatcactctttgtgaaactt

SEQ ID NO: 517030 - DNA, 120 bp, Artificial Sequence
  ENSG00000164941_20 (sequence is synthesized)
cacaatgttcgggaggacattgtgaatgatattacagctgaacacatttctatttggccatcttccattcccaacctccagtctgtggactttgaagctgtggcaatcacagtgaaagag

SEQ ID NO: 517031 - DNA, 120 bp, Artificial Sequence
  ENSG00000164941_21 (sequence is synthesized)
ctagttcgatatacactcagtataaatccaaataaccattcttggttaattatccaggcagatatttactttgcaacgaatcagtattcagcagctcttcactattacctccaggcagga

SEQ ID NO: 517032 - DNA, 120 bp, Artificial Sequence
  ENSG00000164941_22 (sequence is synthesized)
gctgtgtgttctgacttctttaacaaggctgtgccccctgatgtttatacagaccaggtaataaaacgaatgataaaatgttgttctttgctgaattgccacacacaggtggccatttta

SEQ ID NO: 517033 - DNA, 120 bp, Artificial Sequence
  ENSG00000164941_23 (sequence is synthesized)
tgtcagttcctcagagaaattgactacaaaacagcgtttaaatctctgcaagaacaaaacagtcatgatgctatggactcctactacgactacatatgggatgttaccattttggaatac

SEQ ID NO: 517034 - DNA, 120 bp, Artificial Sequence
  ENSG00000164941_24 (sequence is synthesized)
ttgacttatcttcatcataaaagaggagaaacagataaaagacaaattgcaatcaaagccatcggccagacagagttgaatgcaagcaatccagaagaagtgttacagctggcagcgcag

SEQ ID NO: 517035 - DNA, 120 bp, Artificial Sequence
  ENSG00000164941_25 (sequence is synthesized)
agaaggaaaaaaaagtttctccaagcaatggcaaaactttacttttaagcagttaaatttttttaacttttattttttaaacaatgggctaaaaataaacagtattaaaaggttaagttt

SEQ ID NO: 517036 - DNA, 120 bp, Artificial Sequence
  ENSG00000164941_26 (sequence is synthesized)
atataatacatatgtacacaattagtggtgttttcttttcagacaaaatactgaaacaaatattagtttaaaaacaaactatacagaagacttcataccgtaacaataaatgtatagttt

SEQ ID NO: 517037 - DNA, 120 bp, Artificial Sequence
  ENSG00000164941_27 (sequence is synthesized)
cttcaaagggagaagagattcacatatctgataacaaaataaactagcaatctagttttctaatctactttatgaggctggattttttttttagaaaagctaatttaaaatatttagaaa

SEQ ID NO: 517038 - DNA, 120 bp, Artificial Sequence
  ENSG00000164941_28 (sequence is synthesized)
tagctagcctatgtacagcaagttttcatgtctttttttaataaatagatttctaggagtcagtatatatttaatactcttcttccttaagaaaatagaagtttaggtcaagtgttaagc

SEQ ID NO: 517039 - DNA, 120 bp, Artificial Sequence
  ENSG00000164941_29 (sequence is synthesized)
tttatcactttgacactgtccttatctcacaatggaggaatttagaaaggaccttaacagtttcacaaacataaataaagccttagtcacactaaattaaaaaaaaaaattccttaggga

SEQ ID NO: 517040 - DNA, 120 bp, Artificial Sequence
  ENSG00000164941_30 (sequence is synthesized)
tatcttagagtagtaaagtgacttcctcatataaatagtttgaaagggtacttaagtttttcacccaaattgtgatatacaaaaaggttattaccaagcaacctacatgtcaagaaagcc

SEQ ID NO: 517041 - DNA, 120 bp, Artificial Sequence
  ENSG00000164941_31 (sequence is synthesized)
ccagttaggaaggagccacagcatttatcttgtttataatttctttggtactcccactgtttagagcacaggttgaacaccatgttcatctaagccttattagttaaaaaatgtgttatg

SEQ ID NO: 517042 - DNA, 120 bp, Artificial Sequence
  ENSG00000164941_32 (sequence is synthesized)
gcaaggcaaataaactagtttaaaaaacattaaatttcaccatttgtagaaattcaagttttataatagcttgctatagcagctatagataaattagtcaccttattacaaaactaaacc

SEQ ID NO: 517043 - DNA, 120 bp, Artificial Sequence
  ENSG00000164941_33 (sequence is synthesized)
tttgtaaacaagtttaaatttaattttcaagaaccaaattgcactagtcaagagtgtaggaattttgagaatctaacaactagattcaaagtactgtatcacttagtataccctttaagg

SEQ ID NO: 517044 - DNA, 120 bp, Artificial Sequence
  ENSG00000164941_34 (sequence is synthesized)
tagcacttatccagtccaaaactccagtgacaaaattcctagtttatcaagataaacacagtaacactggattaaaggaaaaacattgctatggtatagactgtggttggcttctatcca

SEQ ID NO: 517045 - DNA, 120 bp, Artificial Sequence
  ENSG00000164941_35 (sequence is synthesized)
gtaaccttgggaatgaagacatctttgtaaacaagtcctgctgtttctttaacagctaacataggaaataattaaatgtattctttagtgccaattgtaagttttaaaatcagaatggca

SEQ ID NO: 517046 - DNA, 120 bp, Artificial Sequence
  ENSG00000164941_36 (sequence is synthesized)
gtgtaacttgtgaattggctagggcaatcaatcacagcactactttctgtaaaactttagtagttcagtgataccagttctacccaatcttggtgaattccaacttgtttgcttagttat

SEQ ID NO: 517047 - DNA, 120 bp, Artificial Sequence
  ENSG00000164941_37 (sequence is synthesized)
cttctttagtgttttcctggtggtttttcagtgctcttcggtggtgtcataatgcctccattgcacactggtgacaactgtcccccttttctgaaggtgtttatgtaatttacttcctcc

SEQ ID NO: 517048 - DNA, 120 bp, Artificial Sequence
  ENSG00000164941_38 (sequence is synthesized)
ttgatctgtcacccaagctggagtgctgaggaaccactcgttttgactattattttatcactctttgtgaaacttcacaatgttcgggaggacattgtgaatgatattacagctgaacac

SEQ ID NO: 517049 - DNA, 120 bp, Artificial Sequence
  ENSG00000164941_39 (sequence is synthesized)
gctcaccgtatgctgccatccgtccaggaagcgagtgggaagctggtgttctcggcaggacggcgggagcatctgaggagaggacccaggtgcgaggaaatctcagaaatgggaacgggg

SEQ ID NO: 517050 - DNA, 120 bp, Artificial Sequence
  ENSG00000164941_40 (sequence is synthesized)
aaattgaaagcacaggagataaactttgcttgggtcacaactagaacccttcgcttcgcctttacgaaaatattgaggcccgttgcaaccctagatgaggttgtctcattttctcgctgg

SEQ ID NO: 517051 - DNA, 120 bp, Artificial Sequence
  ENSG00000164941_41 (sequence is synthesized)
gaatccataactatgagcggattcaatgtgatctataaggcttaatataagagtaattcaagattaccttgtaaaaccaagctttcattacatgaaaccattttcaaatctttgttaatg

SEQ ID NO: 517052 - DNA, 120 bp, Artificial Sequence
  ENSG00000164941_42 (sequence is synthesized)
taggtggccattttatgtcagttcctcagagaaattgactacaaaacagcgtttaaatctctgcaagaacaaaacaggtatgaataatattttaaaaataatgaggtcaacatttttctg

SEQ ID NO: 517053 - DNA, 120 bp, Artificial Sequence
  ENSG00000164941_43 (sequence is synthesized)
actacatatgggatgttaccattttggaatacttgacttatcttcatcataaaagaggagaaacagataaaagacaaattgcagtaagttaccttatgcctttcttcagtggtacagttt

SEQ ID NO: 517054 - DNA, 120 bp, Artificial Sequence
  ENSG00000164941_44 (sequence is synthesized)
ccagaatattaaacaattgttaagatgtgaaccaacaaaaaatagattttgtgtacctagttactgccagaattttattatcagtgtttactttataaaagatccttttttgataatttt

SEQ ID NO: 517055 - DNA, 120 bp, Artificial Sequence
  ENSG00000164941_45 (sequence is synthesized)
tcaaaaggcaagggtcttttagaatgcttgatgtctgtgaggttgacaggagcaatattaaataaatatacatacactgtttaaggattctgtgttttctttctcataggaaccactcgt

SEQ ID NO: 517056 - DNA, 120 bp, Artificial Sequence
  ENSG00000164941_46 (sequence is synthesized)
cacaaacgaggaaatgatggcagagttagtttaataaaacagagggaatctacgttaggtatcatgtatcggagtgaactgctttcttttatcaaaaaattacgagtaagttttattaaa

SEQ ID NO: 517057 - DNA, 120 bp, Artificial Sequence
  ENSG00000164941_47 (sequence is synthesized)
ttttgtagaatatgactaaaaattattgggtacttcaaatactgactaaattattatttgttttttaatttttttttaagggacagggtcttgatctgtcacccaagctggagtgctgag

SEQ ID NO: 517058 - DNA, 120 bp, Artificial Sequence
  ENSG00000164941_48 (sequence is synthesized)
ccatatgtaaaggaaccactcgttttgactattattttatcactctttgtgaaacttcacaatgttcgggaggacattgtgaatgatattacagctgaacacatttctatttggccatct

SEQ ID NO: 517059 - DNA, 120 bp, Artificial Sequence
  ENSG00000164941_49 (sequence is synthesized)
tttgtgaaacttcacaatgttcgggaggacattgtgaatgatattacagctgaacacatttctatttggccatcttccattcccaagtaagtagtggtatagcttttattttattaattg

SEQ ID NO: 517060 - DNA, 120 bp, Artificial Sequence
  ENSG00000164941_50 (sequence is synthesized)
agttatgtatttggaaaccattctgactagtatagatacccttagataattttattaaagggccagaaatctaagattctacagtctttgtgtttctctattatgataatgataattatc

SEQ ID NO: 517061 - DNA, 120 bp, Artificial Sequence
  ENSG00000164941_51 (sequence is synthesized)
cttcataataggggctagatgtgtgaagcctggctttaatttttgcttagtaggatcaatgtcatatttacttattggacgtaacctaggtttcactctttgaacattattttaagggat

SEQ ID NO: 517062 - DNA, 120 bp, Artificial Sequence
  ENSG00000164941_52 (sequence is synthesized)
aaaaagttacttgagagtcatgtgaggagttgagcgtggagatagcaccataagccaaacatttatgctaattttatgtaaattatgtgctatggtccacgccccgcccccacatgcgat

SEQ ID NO: 517063 - DNA, 120 bp, Artificial Sequence
  ENSG00000164941_53 (sequence is synthesized)
cccaggctggagtgcagtggtgaggtctcagctcactgcaacctacgcctgcaaggttcaagcgattctcatgcctcagcctgccaagtatctgggattacagcctccagtctgtggact

SEQ ID NO: 517064 - DNA, 120 bp, Artificial Sequence
  ENSG00000164941_54 (sequence is synthesized)
tacctgtatatgttcttcctgggtccccttttggctgaacttacccatttccttgtaatgtgatcgtaagtcccaggttcatggctctagaacacattgctctgtgtattttcattgtcc

SEQ ID NO: 517065 - DNA, 120 bp, Artificial Sequence
  ENSG00000164941_55 (sequence is synthesized)
ttatttctagcacctattgctgtcttgattcccccaaaacacctcaaattcaacttgtccaaactgatttgtgtctgtctttaccataaagtaataaactcctaatacactcctaataaa

SEQ ID NO: 517066 - DNA, 120 bp, Artificial Sequence
  ENSG00000164941_56 (sequence is synthesized)
cagagttagtttaataaaacagagggaatctacgttaggtatcatgtatcggtatgtattggagtgaactgctttcttttatcaaaaaattacgagaaccactcgttttgactattattt

SEQ ID NO: 517067 - DNA, 120 bp, Artificial Sequence
  ENSG00000164941_57 (sequence is synthesized)
tatcactctttgtgaaacttcacaatgttcgggtaagtatttcataatttcatttagaaaaatttaaaagaaatttctttgtaaatcacacctttttttttctttttaaaggaggacatt

SEQ ID NO: 517068 - DNA, 120 bp, Artificial Sequence
  ENSG00000164941_58 (sequence is synthesized)
gttaaataggtaactgcaaggaggtgatatgaatgccatgaccgggatgcacagctctatggccacatacaacagggtgcctacctgtccaaggaggtagtgaagaccgcagagaaaagt

SEQ ID NO: 517069 - DNA, 120 bp, Artificial Sequence
  ENSG00000164941_59 (sequence is synthesized)
gaacaacgattggtccgaaggcgcggcggtggcgcggggaggcggatccaggaccgcagctccggctggcccgcgccgccattttggattgtatcctgcaccagttcaacttatagttca

SEQ ID NO: 517070 - DNA, 120 bp, Artificial Sequence
  ENSG00000164941_60 (sequence is synthesized)
taaaggtagttaatgtttaaataaaaggattgttaggatggtattattatacttgtttctttaactttatactactttgggaacttgtctaatttctgtgatacaaatgattggacaaat

SEQ ID NO: 517071 - DNA, 120 bp, Artificial Sequence
  ENSG00000164941_61 (sequence is synthesized)
gcttgttgatttgtagttaaaggatagagtttttgataattcatgcacttgaccttgttctaatatttctttctaatgccctgtaattcatgagcatgtagtcacagattatttagttaa

SEQ ID NO: 517072 - DNA, 120 bp, Artificial Sequence
  ENSG00000164941_62 (sequence is synthesized)
cagataacacattggtgtaatcctaagtaatgagagattcgctttctttgctttggttgctctaatcacactctagaactgatggagtccgtcagggatgcacttctccttgtttccatt

SEQ ID NO: 517073 - DNA, 120 bp, Artificial Sequence
  ENSG00000164941_63 (sequence is synthesized)
tgaacactttattcttctttagaattttatccttctaagtttgctatgtctgaatctccaataggtttgctattagtaattattcccctagtgaaagaatttattcagtaaattggcact

SEQ ID NO: 517074 - DNA, 120 bp, Artificial Sequence
  ENSG00000164941_64 (sequence is synthesized)
aagttattttgttgtcttaattatatcctttgcaacctaaaatgcttctgagtacagaaaatatcaaaactaataagaaactggaggttttttctaagattatatctttcatgtgttaat

SEQ ID NO: 517075 - DNA, 120 bp, Artificial Sequence
  ENSG00000164941_65 (sequence is synthesized)
agattatatctttcatgtgttaatattatacacactctgagtaagtagtgggtttttctcactttctggttttacagttaaaaaaaaaacaaagtaggctgggcgtggtggctcacgcct

SEQ ID NO: 517076 - DNA, 120 bp, Artificial Sequence
  ENSG00000164944_0 (sequence is synthesized)
ctgttccccgcccgcggcaaacatggcggtggactcggcgatggagctgttatttttagatacttttaaacacccgagcgctgagcaaagttctcatatagatgtggttcgttttccatg

SEQ ID NO: 517077 - DNA, 120 bp, Artificial Sequence
  ENSG00000164944_1 (sequence is synthesized)
tgtggtttatatcaatgaagtccgagtcatacccccaggagtaagagcccatagcagtctgccagacaatagagcatatggagagacatctccccatacatttcaattagacttattctt

SEQ ID NO: 517078 - DNA, 120 bp, Artificial Sequence
  ENSG00000164944_2 (sequence is synthesized)
caacaatgtaagcaaaccaagtgcccctgttttcgataggttgggaagcctggaatatgatgagaatacttccatcatctttagacctaactcaaaggtgaatactgatggtctggtgct

SEQ ID NO: 517079 - DNA, 120 bp, Artificial Sequence
  ENSG00000164944_3 (sequence is synthesized)
aagaggctggtataactgtctgacactggcaatatatggatcagtggatagagtgataagtcatgacagagactctccaccaccaccacctccaccgccaccacctccccagccacaacc

SEQ ID NO: 517080 - DNA, 120 bp, Artificial Sequence
  ENSG00000164944_4 (sequence is synthesized)
aagtttgaaaaggaatccaaaacatgctgatggggagaaagaagatcagtttaatggaagccctccaagaccacagccaaggggaccaagaactcctccaggaccccctccacctgatga

SEQ ID NO: 517081 - DNA, 120 bp, Artificial Sequence
  ENSG00000164944_5 (sequence is synthesized)
tgatgaagatgatcctgtgcctctgccagtgtctggtgacaaggaagaggatgctcctcatagagaagattactttgagcccatttctcctgatcggaattctgttccccaggaagggca

SEQ ID NO: 517082 - DNA, 120 bp, Artificial Sequence
  ENSG00000164944_6 (sequence is synthesized)
atattctgatgaaggagaagtagaagaggaacaacaagaagaaggagaagaagatgaagatgatgtggatgtagaggaagaagaggatgaggatgaggatgatcgacgaacagtagacag

SEQ ID NO: 517083 - DNA, 120 bp, Artificial Sequence
  ENSG00000164944_7 (sequence is synthesized)
tattcctgaggaggaagaggaagatgaagaggaagaaggtgaagaggatgaagaaggtgaaggggatgatggttatgaacaaatttccagtgatgaagatggaattgctgacttggaacg

SEQ ID NO: 517084 - DNA, 120 bp, Artificial Sequence
  ENSG00000164944_8 (sequence is synthesized)
tgaaacatttaagtatccaaactttgatgttgaatacactgctgaagacttagcttcagttcctcctatgacatatgatccatatgacagggagcttgtaccactcttatacttcagttg

SEQ ID NO: 517085 - DNA, 120 bp, Artificial Sequence
  ENSG00000164944_9 (sequence is synthesized)
tccatacaagactacttttgaaattgaaatcagtagaatgaaggatcaaggtccagataaagaaaattcaggggcaatcgaagcctcagtgaagttaacagaactcttagatttgtatag

SEQ ID NO: 517086 - DNA, 120 bp, Artificial Sequence
  ENSG00000164944_10 (sequence is synthesized)
agaagatagaggtgcaaaatgggtaacagctttagaagaaattccaagtttaataataaaagggttaagctatttgcaattgaaaaacacaaaacaagactcccttggccagttggtaga

SEQ ID NO: 517087 - DNA, 120 bp, Artificial Sequence
  ENSG00000164944_11 (sequence is synthesized)
ctggaccatgcaagctttaaatttacaagtagcgcttcgccaacctatcgccttaaatgttcgacagctcaaagctgggaccaaattagtgtcctcactagcagaatgtggggctcaagg

SEQ ID NO: 517088 - DNA, 120 bp, Artificial Sequence
  ENSG00000164944_12 (sequence is synthesized)
agttacaggactgctacaagcaggagtgatcagtggattatttgaacttctgtttgctgatcacgtatcatcttctcttaagttaaatgcttttaaagctttggacagtgtcattagtat

SEQ ID NO: 517089 - DNA, 120 bp, Artificial Sequence
  ENSG00000164944_13 (sequence is synthesized)
gacagaaggaatggaagcttttttaagaggtaggcagaatgaaaaaagtggttatcaaaagcttctggaactcatacttttagatcagactgtgagggttgttactgctggttcagctat

SEQ ID NO: 517090 - DNA, 120 bp, Artificial Sequence
  ENSG00000164944_14 (sequence is synthesized)
tctccaaaaatgccatttctatgaagtcttgtcagagattaaaagacttggtgaccatttagcagagaagacttcatctcttcctaaccacagtgaacctgatcacgacacagatgctgg

SEQ ID NO: 517091 - DNA, 120 bp, Artificial Sequence
  ENSG00000164944_15 (sequence is synthesized)
acttgagagaacaaacccagaatatgaaaatgaggtggaagcttctatggatatggatcttttggaatcctcaaatataagtgaaggggaaatagaaaggcttattaacctcctagaaga

SEQ ID NO: 517092 - DNA, 120 bp, Artificial Sequence
  ENSG00000164944_16 (sequence is synthesized)
agtttttcatttaatggaaactgcccctcatacaatgatccaacaacctgttaagtctttcccaacgatggcacgaattactggacctccagagagggatgatccataccctgttctctt

SEQ ID NO: 517093 - DNA, 120 bp, Artificial Sequence
  ENSG00000164944_17 (sequence is synthesized)
tagatatcttcacagtcatcacttcttggagttggttaccttgcttctgtcaattccagtaacaagtgctcaccctggtgtgctgcaagccacaaaagatgttttgaagtttcttgcaca

SEQ ID NO: 517094 - DNA, 120 bp, Artificial Sequence
  ENSG00000164944_18 (sequence is synthesized)
gtcacagaagggtcttcttttttttatgtcggaatatgaagcaacaaatttattgatccgagctctgtgtcacttttatgatcaagatgaggaggaaggtctccaatctgatggtgttat

SEQ ID NO: 517095 - DNA, 120 bp, Artificial Sequence
  ENSG00000164944_19 (sequence is synthesized)
tgatgatgcatttgccttgtggctacaggactcaacacagacattgcaatgtattacagaactgttcagccattttcagcgttgtacagccagtgaagaaacagaccattcagatctctt

SEQ ID NO: 517096 - DNA, 120 bp, Artificial Sequence
  ENSG00000164944_20 (sequence is synthesized)
gggaaccctgcacaatctttatttgattacttttaatcctgtgggaagatcagctgttggccatgtttttagtctggagaaaaatctccaaagtcttattactctaatggagtactattc

SEQ ID NO: 517097 - DNA, 120 bp, Artificial Sequence
  ENSG00000164944_21 (sequence is synthesized)
caaagaagccttgggtgattccaaatctaagaagtcagtagcttataattacgcatgcatacttattttggtggtggttcagtcttccagtgatgttcaaatgctagaacaacatgcagc

SEQ ID NO: 517098 - DNA, 120 bp, Artificial Sequence
  ENSG00000164944_22 (sequence is synthesized)
atctctcttgaagctttgtaaagcagatgaaaataatgctaaattgcaagaacttggcaagtggcttgaacctctgaaaaaccttagatttgaaattaactgcatcccaaacttaattga

SEQ ID NO: 517099 - DNA, 120 bp, Artificial Sequence
  ENSG00000164944_23 (sequence is synthesized)
gtatgttaagcagaatatcgataacttgatgaccccagaaggagttggccttaccactgccttacgtgttctctgtaatgttgcatgcccaccacctcctgttgaaggtcaacagaaaga

SEQ ID NO: 517100 - DNA, 120 bp, Artificial Sequence
  ENSG00000164944_24 (sequence is synthesized)
tctgaaatggaatcttgccgttattcagcttttttctgctgaaggaatggacacgtttattcgagttctgcaaaaattgaacagtattctgactcagccttggaggctccatgtcaacat

SEQ ID NO: 517101 - DNA, 120 bp, Artificial Sequence
  ENSG00000164944_25 (sequence is synthesized)
ggggactacccttcacagagttactactatttcaatggctcgctgcacactcactcttcttaaaactatgttaacggaactcctgagaggtggatcctttgagtttaaggacatgcgtgt

SEQ ID NO: 517102 - DNA, 120 bp, Artificial Sequence
  ENSG00000164944_26 (sequence is synthesized)
caaggagttaatgaaaaactcacaatctcagaagagactctggccaataatacttggtctttaatgttaaaagaagttctttcttcaatcttgaaggttcctgaaggatttttttctgga

SEQ ID NO: 517103 - DNA, 120 bp, Artificial Sequence
  ENSG00000164944_27 (sequence is synthesized)
ctcatactcctttcagagctgctgcctcttccattgcccatgcaaacaactcaggttattgagccacatgatatatcagtggcactcaacacccgaaaattgtggagcatgcaccttcat

SEQ ID NO: 517104 - DNA, 120 bp, Artificial Sequence
  ENSG00000164944_28 (sequence is synthesized)
gttcaagcaaagttgctccaagaaatagttcgctctttctctggcacaacctgccagcccattcaacatatgttacggcgtatttgtgttcaattgtgtgaccttgcctcaccaactgca

SEQ ID NO: 517105 - DNA, 120 bp, Artificial Sequence
  ENSG00000164944_29 (sequence is synthesized)
cttctgattatgagaactgtgttggatttgattgtagaagacttgcaaagcacttcagaagataaagaaaaacagtatactagccaaaccaccaggttgcttgctcttcttgatgctctg

SEQ ID NO: 517106 - DNA, 120 bp, Artificial Sequence
  ENSG00000164944_30 (sequence is synthesized)
gcttcacacaaagcttgtaaattagctattttgcatctaattaatggaactattaaaggtgatgaaagatatgcagagatattccaggatcttttagctttggtgcggtctcctggagac

SEQ ID NO: 517107 - DNA, 120 bp, Artificial Sequence
  ENSG00000164944_31 (sequence is synthesized)
agtgttattcgccaacagtgtgttgaatatgtcacatccattttgcagtctctctgtgatcaggacattgcacttatcttaccaagctcttctgaaggttctatttctgaactggagcag

SEQ ID NO: 517108 - DNA, 120 bp, Artificial Sequence
  ENSG00000164944_32 (sequence is synthesized)
ctctccaattctctaccaaataaagaattgatgacctcaatctgtgactgtctgttggctacgctagctaactctgagagcagttacaactgtttactgacatgtgtcagaacaatgatg

SEQ ID NO: 517109 - DNA, 120 bp, Artificial Sequence
  ENSG00000164944_33 (sequence is synthesized)
tttcttgcagagcatgattatggattatttcatttaaaaagttctttaaggaaaaacagtagtgctctgcatagtttactgaaacgagtggtcagcacatttagtaaggacacaggagag

SEQ ID NO: 517110 - DNA, 120 bp, Artificial Sequence
  ENSG00000164944_34 (sequence is synthesized)
cttgcatcttcatttttagaatttatgagacaaattcttaactctgacacaattggatgctgtggagatgataatggtctcatggaagtagagggagctcatacatcacggacgatgagt

SEQ ID NO: 517111 - DNA, 120 bp, Artificial Sequence
  ENSG00000164944_35 (sequence is synthesized)
attaatgctgcagagttaaaacagcttctacaaagcaaagaagaaagtccagaaaatttgttccttgaactagagaagcttgttttggaacattcaaaagatgatgacaatctggattct

SEQ ID NO: 517112 - DNA, 120 bp, Artificial Sequence
  ENSG00000164944_36 (sequence is synthesized)
ttgttggacagtgtagttggacttaagcagatgctggagtcatcaggtgaccctttacctctcagtgaccaggatgtagaaccagtactttcagctccagaatctcttcagaatctgttt

SEQ ID NO: 517113 - DNA, 120 bp, Artificial Sequence
  ENSG00000164944_37 (sequence is synthesized)
aacaataggactgcctatgtgcttgctgatgtcatggatgatcagttgaaatctatgtggttcactccatttcaggctgaagagatagatacagatctggatttggtaaaggttgactta

SEQ ID NO: 517114 - DNA, 120 bp, Artificial Sequence
  ENSG00000164944_38 (sequence is synthesized)
attgaactctctgaaaaatgctgtagtgactttgatttgcactcagaattagagcgctcatttttgtcagaaccatcatctccaggaagaaccaagactactaaaggattcaaacttggg

SEQ ID NO: 517115 - DNA, 120 bp, Artificial Sequence
  ENSG00000164944_39 (sequence is synthesized)
aagcacaagcatgagacctttataacgtcaagtggaaaatctgaatacattgaacctgccaaaagagctcatgttgtgccaccaccaagaggaaggggcaggggaggatttggacagggt

SEQ ID NO: 517116 - DNA, 120 bp, Artificial Sequence
  ENSG00000164944_40 (sequence is synthesized)
atacgacctcatgatatttttcgtcagagaaaacagaacacaagtagaccaccatctatgcatgtggatgactttgttgctgctgaaagtaaagaagtggttcctcaagatggaatacct

SEQ ID NO: 517117 - DNA, 120 bp, Artificial Sequence
  ENSG00000164944_41 (sequence is synthesized)
ccaccaaaacggccactcaaagtatcacagaagatttcttcccgtggtgggttttcaggcaatagaggaggacggggtgctttccacagtcagaataggtttttcacaccacctgcttca

SEQ ID NO: 517118 - DNA, 120 bp, Artificial Sequence
  ENSG00000164944_42 (sequence is synthesized)
aaaggaaactacagtcgtcgggaaggaacaagaggctccagttggagtgctcagaatactcctcgaggaaattacaatgaaagtcgtggaggccagagcaattttaacagaggccctctt

SEQ ID NO: 517119 - DNA, 120 bp, Artificial Sequence
  ENSG00000164944_43 (sequence is synthesized)
ccaccattacgaccccttagttctacaggttaccgcccaagtcctcgggaccgtgcttctagaggtcgtgggggacttggaccttcctgggctagtgcaaatagcggcagtggaggctca

SEQ ID NO: 517120 - DNA, 120 bp, Artificial Sequence
  ENSG00000164944_44 (sequence is synthesized)
agaggaaagtttgttagtggaggcagtggtagaggtcgtcatgtacgctcctttacacgataaaaatccttttgggaacatcttaactgtatatgaacatttcacgaggacaataaaaat

SEQ ID NO: 517121 - DNA, 120 bp, Artificial Sequence
  ENSG00000164944_45 (sequence is synthesized)
aagacattgaaggaccaatttagacttagcagttatctggagacatctgagagaatatttttatctgaagaaagcagaatttgtttgatacctaacaagatttcaataaaaatccaaact

SEQ ID NO: 517122 - DNA, 120 bp, Artificial Sequence
  ENSG00000164944_46 (sequence is synthesized)
ttgtatgtacgtttgtatatattttcccttttttgtatgactatttatttagaaaatttctaggtgaaaaactaaatgatgttttgtatttttcttgcctatagcacagatattctcaaa

SEQ ID NO: 517123 - DNA, 120 bp, Artificial Sequence
  ENSG00000164944_47 (sequence is synthesized)
ctttctcagctcatgacactatttagtgcctcagtacttttttcacagcatacctggtccaaaagaaatatctaatacttgtgtttattaagcagttagatccaacagcttaataagaat

SEQ ID NO: 517124 - DNA, 120 bp, Artificial Sequence
  ENSG00000164944_48 (sequence is synthesized)
gtacatcatcaccactagtaactgtggacactgcatgtctcaaaccttggaatcagtatcattttcttttcctctctgcttcttgcacagtactttttatcaaactgctgaaaacccagt

SEQ ID NO: 517125 - DNA, 120 bp, Artificial Sequence
  ENSG00000164944_49 (sequence is synthesized)
tttgtaaagatatgttgttatagaaaggaatataatgctatttaatgttgaaaatgtaaactacctcaaagtagtagtttatgtgatgtccaacaggtgttgctatgtttttctcaaaaa

SEQ ID NO: 517126 - DNA, 120 bp, Artificial Sequence
  ENSG00000164944_50 (sequence is synthesized)
ttttaaaatattgtgtggcacccatgttaatttgctaaggtgccctgctacacagtttgggaaccatggctgtaccaaaagaaacaaaatactcctctcctttgtattagaaatctgaac

SEQ ID NO: 517127 - DNA, 120 bp, Artificial Sequence
  ENSG00000164944_51 (sequence is synthesized)
tttgcatttcagctttggacctactgacactattttattatacaaattatttaaagcctaaaataaggaatatcctaatactattattttgggaatcagaaacatctaataaagctggac

SEQ ID NO: 517128 - DNA, 120 bp, Artificial Sequence
  ENSG00000164944_52 (sequence is synthesized)
tttatacatagaaataaagcttacaactttgagaaagtagccatattttccccaagatacgtcttaacacactgagtctatataagtggcgtaaaatacagagttatcttaatcagaaaa

SEQ ID NO: 517129 - DNA, 120 bp, Artificial Sequence
  ENSG00000164944_53 (sequence is synthesized)
ggcagagaagatgtatgaaaagagtatatagaaagtagccattgtaaactcttaatacagggagtttcatacatttctttatgttatctttgttctagttgattcttttcagtgaatttg

SEQ ID NO: 517130 - DNA, 120 bp, Artificial Sequence
  ENSG00000164944_54 (sequence is synthesized)
tgcattacagttctttttatttacataatattgtatatagtacaacatatgccagagatcaaataatcttgataaattcatttaactctagggccttgttcatgttttaaatttacttaa

SEQ ID NO: 517131 - DNA, 120 bp, Artificial Sequence
  ENSG00000164944_55 (sequence is synthesized)
taaatataaaatattgtatgttcttaacttgaagctcatattttcaagtaattccttgtctggaattttctgttgatctcatgggtactaagaaacgaaatattctgttcattttcattt

SEQ ID NO: 517132 - DNA, 120 bp, Artificial Sequence
  ENSG00000164944_56 (sequence is synthesized)
tcatttttagaatttatgagacaaattcttaactctgacacaattgtaagtatgtgtgtgtttgtgtttgtgtatatatgtatgtatgtatttggtgtttcttaaatttgaaatctttgg

SEQ ID NO: 517133 - DNA, 120 bp, Artificial Sequence
  ENSG00000164944_57 (sequence is synthesized)
tatttggtgtttcttaaatttgaaatctttggccaagtacgatggctcacatctgtaatctcagcactctggtgggctgaggtgggaggatctcttggggccaggagtttgagaccagcc

SEQ ID NO: 517134 - DNA, 120 bp, Artificial Sequence
  ENSG00000164944_58 (sequence is synthesized)
aagagaaatactttgccgtaagttaaatcactttatatattaaatatccaacataaaaaagatcactttagttcattttattttattttattttattttagatagagtctcactctgtca

SEQ ID NO: 517135 - DNA, 120 bp, Artificial Sequence
  ENSG00000164944_59 (sequence is synthesized)
ggcatgagctaccgcacctggccaagtgctttcattttaaaataattcttagatgagtgtggtggcacgtgcctctaatcccatcactttgggaggctgtggtaggatcgcttgagccca

SEQ ID NO: 517136 - DNA, 120 bp, Artificial Sequence
  ENSG00000164944_60 (sequence is synthesized)
ggagtttgagatcaacctgtacaacacagcaaaactctgtctctagaaacaacaaaaattagccacacgtggtgtgcccaccagtagtcccatctatttgagaggctaagattggaggat

SEQ ID NO: 517137 - DNA, 120 bp, Artificial Sequence
  ENSG00000164944_61 (sequence is synthesized)
agcttgagtccaggagttggagactgaacttagctatgattgtgtcactgcagtctagtctaggtgacagagcaagacgctgtctcaaaaaagaaaaaaatttatgacattgagttacct

SEQ ID NO: 517138 - DNA, 120 bp, Artificial Sequence
  ENSG00000164944_62 (sequence is synthesized)
tgctagggcaactcagaataatgaagttttgttagtctctttgttatttacttatttttgttacttaatttactgattgttttggatgttgtgattttgggataactgtaaagtttatta

SEQ ID NO: 517139 - DNA, 120 bp, Artificial Sequence
  ENSG00000164944_63 (sequence is synthesized)
tgctttagtatttttggtctatcgtacaaatatgaattaaagattattttccccactctaaaatcttattgttaaaatttaattaagatttctctcattagtattttccaaagtcatggt

SEQ ID NO: 517140 - DNA, 120 bp, Artificial Sequence
  ENSG00000164944_64 (sequence is synthesized)
atattatgagcacaattccagaagccattaatatgcctgccttacttagtttggtggcatgtgcctctagtcccagctgctcaggaggcggagttggggaaatcacttgaacctatgagt

SEQ ID NO: 517141 - DNA, 62 bp, Artificial Sequence
  ENSG00000164944_65 (sequence is synthesized)
ccctgtttttttcctgagacgaggtctcactctaggctcaggtgatccttccacctcagcct

SEQ ID NO: 517142 - DNA, 76 bp, Artificial Sequence
  ENSG00000164944_66 (sequence is synthesized)
acaaagtgcgactccatccaggttaggcaaggtggctcacacttgtaatctcagcattttgggaggttgaggtggg

SEQ ID NO: 517143 - DNA, 120 bp, Artificial Sequence
  ENSG00000164944_67 (sequence is synthesized)
gaggtgggaggattgcttgagcccaggatttgagattagcctaggtaacatagtgagaccccatctatatgaaaaattttaaattacctgggcatggtggcacgtgcttgcagtcagtcc

SEQ ID NO: 517144 - DNA, 120 bp, Artificial Sequence
  ENSG00000164944_68 (sequence is synthesized)
atgaaaaattttaaattacctgggcatggtggcacgtgcttgcagtcagtcccaggtacttgggaggatgagatgcaaggatcacttgatcctggggaggtcaaggctgcagtgagctat

SEQ ID NO: 517145 - DNA, 120 bp, Artificial Sequence
  ENSG00000164944_69 (sequence is synthesized)
gcctaggtgacatagcgagaccctgtctcaacagcaacaaaaaaacaaggctaaagattttatacaatgtttaggtaggcatacggccctctaccataagtgtatgtgacaatatggatg

SEQ ID NO: 517146 - DNA, 120 bp, Artificial Sequence
  ENSG00000164944_70 (sequence is synthesized)
gttttcttatcatgaagcaagatttattttgctggaaggattttctggtattgaaatgttatcactccagaattcactttattatgtagcatactttttaaagcagaaaatattaacttt

SEQ ID NO: 517147 - DNA, 120 bp, Artificial Sequence
  ENSG00000164944_71 (sequence is synthesized)
tctatgtgacagaatatagtcttaaatatgatagttactattttctttagttgtttgtgttatcttcagaaagataatttcaggtttcatcagttctttgttatagcaagcattttatta

SEQ ID NO: 517148 - DNA, 120 bp, Artificial Sequence
  ENSG00000164944_72 (sequence is synthesized)
attcttgagcatcaatcagtgtgtcacgtcctacaactgccagtgttttgccattcggtattttgttgaaaagtcttggtgccagtaaaatatatgtttgcttatttaaatattttgtga

SEQ ID NO: 517149 - DNA, 120 bp, Artificial Sequence
  ENSG00000164944_73 (sequence is synthesized)
gtcttactcaaagaaaacatacttcacctttcatctaaatccttaaaactagccatttgtactgatgtaaaaatgaaaacattgaaggaaagattgcagcatatggcttagataatatga

SEQ ID NO: 517150 - DNA, 120 bp, Artificial Sequence
  ENSG00000164944_74 (sequence is synthesized)
ataagtgtggatgcatctttgtaaatttctctgttctcaaatttaacttatgtgtgacatttacagggatgctgtggagatgataatggtctcatggaagtagagggagctcatacatca

SEQ ID NO: 517151 - DNA, 120 bp, Artificial Sequence
  ENSG00000164944_75 (sequence is synthesized)
cgttcttaaggcctattttcctctcagtttgactagtacaagtatttcgtagtgaccttttttaaaatagtgaatctttagctgggtgtttgtaccatttcaaataactctttgaattaa

SEQ ID NO: 517152 - DNA, 120 bp, Artificial Sequence
  ENSG00000164944_76 (sequence is synthesized)
taatttgaagtgaagtcctccatcctgttatgaattttaaggagtacatgaagacggtactttttgaattgtctgttccttggaagcagggtaccctctgctgctattgtttagaaataa

SEQ ID NO: 517153 - DNA, 120 bp, Artificial Sequence
  ENSG00000164944_77 (sequence is synthesized)
aatgacaagtgttttggtgtttgttttattttaatgtgtttaatgttaataatttctggacagtgttccaaatttcttagtaataatacatatagccttttctacgaaagagtcagtagg

SEQ ID NO: 517154 - DNA, 120 bp, Artificial Sequence
  ENSG00000164944_78 (sequence is synthesized)
tcttccattgcccatgcaaacaactcaggtatcacttccatataacatgcatcttataaatgactgcagtaacactttttaaaaagccagtgattttgttaaaaaacaaaaaccctcatc

SEQ ID NO: 517155 - DNA, 120 bp, Artificial Sequence
  ENSG00000164944_79 (sequence is synthesized)
tcccttcctcccaaaaagacataaaataaccggatgagggggagataaaactgaaacaagttggtcattgaggaaatatgggggtaacattttaaataaatttttgttaaagtgagtttt

SEQ ID NO: 517156 - DNA, 120 bp, Artificial Sequence
  ENSG00000164944_80 (sequence is synthesized)
attttgctgttatgtatgtttgtacttacatttttctgttattttaaatcctttcccccacaccttaccatgtgttagaatttgccaataactagattgcttcaccaatggactctgctc

SEQ ID NO: 517157 - DNA, 120 bp, Artificial Sequence
  ENSG00000164944_81 (sequence is synthesized)
aactaactgctaacctgagaacaataagattttttagactcattgaattcaagcaaatgtttaactgtataatagaaaattaaatgttttaagcatgcagtaaaaatgttcttttcataa

SEQ ID NO: 517158 - DNA, 120 bp, Artificial Sequence
  ENSG00000164946_0 (sequence is synthesized)
ttagtacaaaactagtagtgagaaaggaagctgggaagagactgggaagaggcaaccgacctcattaacaaaagctcagttttgtccctgcggacccaaccagcagaaggcacggggcta

SEQ ID NO: 517159 - DNA, 120 bp, Artificial Sequence
  ENSG00000164946_1 (sequence is synthesized)
gcggtggctgtccgccagggaggtcgggctctgtgtaaacagtagaaggcatctttatcatgcccttctcacagggagtcctgaggcttggcgctcaggaagtttgcaaagctgcagcag

SEQ ID NO: 517160 - DNA, 120 bp, Artificial Sequence
  ENSG00000164946_2 (sequence is synthesized)
ctgccttggagaagaccagcaaagaaagtggagtgtgtatgtgaacttcaattctgtattttctgtgaggtgggttaatggatttttagtaaaaagaaatctcaaacacagctgacctga

SEQ ID NO: 517161 - DNA, 120 bp, Artificial Sequence
  ENSG00000164946_3 (sequence is synthesized)
aagactggaatttcagctctcttccttcccggggttctttttcctcccccttcctctcaaagccctttaaaccagattgctgtgtcagtgactcttatcctgcccgccagttccaagggt

SEQ ID NO: 517162 - DNA, 120 bp, Artificial Sequence
  ENSG00000164946_4 (sequence is synthesized)
ttctaactttttgtcttggaaaggaaaaccactacctgattagaaaagcacttgggaagcccattaatcttgccggcgttgtcaggagtgatcagcgagttttattaaaagccctgggat

SEQ ID NO: 517163 - DNA, 120 bp, Artificial Sequence
  ENSG00000164946_5 (sequence is synthesized)
tgcctgaaaggcccccttgtctgactttgaaatgaaaggggcatgttaagatctcggggcacattgtcaggacccctcaccctgccccttggactatgagctgaccctccaggaggaagc

SEQ ID NO: 517164 - DNA, 120 bp, Artificial Sequence
  ENSG00000164946_6 (sequence is synthesized)
acagaagccctcctttgttaaagggatttcgccggtggacagagaagagttgggccctgtcagcatgaactctctgagttggggggctgcgaatgccgtgctgctgctgctcctcctggc

SEQ ID NO: 517165 - DNA, 120 bp, Artificial Sequence
  ENSG00000164946_7 (sequence is synthesized)
ctgggccagccccaccttcatcagcatcaaccgcggggtgagggtgatgaagggccactctgccttcctgtcaggagatgacctgaagtttgccatccctaaagagaaagatgcctgcaa

SEQ ID NO: 517166 - DNA, 120 bp, Artificial Sequence
  ENSG00000164946_8 (sequence is synthesized)
agtggaagttgtgatgaatgagccaataacccagagggttgggaaactcactccacaggtctttgactgccatttccttcccaacgaagtcaagtatgttcacaatggttgtccaattct

SEQ ID NO: 517167 - DNA, 120 bp, Artificial Sequence
  ENSG00000164946_9 (sequence is synthesized)
tgatgaagacacagtgaagctcagactttacagatttactgaaagagataccttcatagaaacttttatcctgtgggtctatctcctggaaccagactgtaacatcatccatatgagtaa

SEQ ID NO: 517168 - DNA, 120 bp, Artificial Sequence
  ENSG00000164946_10 (sequence is synthesized)
caatgtgctggaggtgcctgaattcaatggcttgtcccaagcgattgataaaaatctgctcagattcgattatgataggatggctagcctggaatgtaccgtcagcctggacactgcgag

SEQ ID NO: 517169 - DNA, 120 bp, Artificial Sequence
  ENSG00000164946_11 (sequence is synthesized)
aactcggctgccagcccatggccagatggttctcggggagcctcgaccagaagaacctcgtggagatcagccacacagttttttcccagagtcccaactgagagcaaaactgaagtgtcc

SEQ ID NO: 517170 - DNA, 120 bp, Artificial Sequence
  ENSG00000164946_12 (sequence is synthesized)
aggtgggagctgtaccccaggattaaagaaaataggaagcctcaaagtgagctgtgaggagttcctgctgatgggccttcgttatcagcatctggatcccccttcacccaacattgatta

SEQ ID NO: 517171 - DNA, 120 bp, Artificial Sequence
  ENSG00000164946_13 (sequence is synthesized)
tatctccatccaactggacctcacagataccaggagcaaaattgtgtacaagtcagagagtgcgtggctgcctgtctatatcagagctggaattccgaatcagattccaaaggctgcatt

SEQ ID NO: 517172 - DNA, 120 bp, Artificial Sequence
  ENSG00000164946_14 (sequence is synthesized)
catggccgtgtttattctggaagtggatcagttcatcctgacctccttgactacatcagttctggactgtgaagaagatgagacccctaaacccttgctggtgttcaacattactaaagc

SEQ ID NO: 517173 - DNA, 120 bp, Artificial Sequence
  ENSG00000164946_15 (sequence is synthesized)
cccgctccagggctatgtgactcacctgttggatcacaccagaccaatctcctcattcacctggaaagatctcagtgacatgcagatcgcctatcagccaccaaacagcagccattctga

SEQ ID NO: 517174 - DNA, 120 bp, Artificial Sequence
  ENSG00000164946_16 (sequence is synthesized)
gaggagacatgatgaggtagaattggaggtatacgacttcttctttgaaaggagtgcacctatgacagtccacatctccatcagaacagcagatacaaatgccccccgtgtatcctggaa

SEQ ID NO: 517175 - DNA, 120 bp, Artificial Sequence
  ENSG00000164946_17 (sequence is synthesized)
tacaggtctgagtctccttgaggggcagtctcgagccatcacttgggaacagtttcaggttgtcgacaatgacgacattggtgctgtccggctagtcaccgttggtggcctgcagcatgg

SEQ ID NO: 517176 - DNA, 120 bp, Artificial Sequence
  ENSG00000164946_18 (sequence is synthesized)
atggctgactttaagaggggggaaagggtttctcttcaccgtggctgacctccaggctggagttgttcgctatcatcatgatgacagcgactccaccaaagacttcgtggtcttccggat

SEQ ID NO: 517177 - DNA, 120 bp, Artificial Sequence
  ENSG00000164946_19 (sequence is synthesized)
atttgatggccatcacagcatccgtcacaaattccccatcaacgtcttgcccaaagatgatagtcccccgttcctcataaccaatgttgtgattgaactggaggaggggcagaccatcct

SEQ ID NO: 517178 - DNA, 120 bp, Artificial Sequence
  ENSG00000164946_20 (sequence is synthesized)
gatccagggatccatgctgcgagcttcagatgtggacgccagtgatgactacatcttcttcaatatcacaaagcctccacaggctggggagatcatgaagaagccagggccaggactgat

SEQ ID NO: 517179 - DNA, 120 bp, Artificial Sequence
  ENSG00000164946_21 (sequence is synthesized)
aggctatcctgtccatggcttccttcagagggatttgtttaatggaatcatttattatcgtcattttggtggagaaatctttgaagattcttttcaatttgtcctgtgggacagccatga

SEQ ID NO: 517180 - DNA, 120 bp, Artificial Sequence
  ENSG00000164946_22 (sequence is synthesized)
acctccaaatctttcagtgccacaggtggcaacaatccatataactccagtggatgaccagcttccaaaagaggctcctggagtttctcggcatttggttgtcaaggaaactgaggtggc

SEQ ID NO: 517181 - DNA, 120 bp, Artificial Sequence
  ENSG00000164946_23 (sequence is synthesized)
ctatataactaagaaacagctacattttatagattcagaatcatatgacagggagctggtctacacaataactactcctccatttttctccttcagccacagacacttggatgctgggaa

SEQ ID NO: 517182 - DNA, 120 bp, Artificial Sequence
  ENSG00000164946_24 (sequence is synthesized)
attatttatggtggacagcataccaaaagtagttaagaatcctacggccctggagctgaggtcattcactcagcatgctgtgaactatatgaaagtggcctacatgccccccatgcaaga

SEQ ID NO: 517183 - DNA, 120 bp, Artificial Sequence
  ENSG00000164946_25 (sequence is synthesized)
cattggtccccattgcagagatgtccagttcacattttctgtcagtaaccaacatggcggtactttgcatgggatctgctttaacattacaatcctcccagtggacaatcaagttcctga

SEQ ID NO: 517184 - DNA, 120 bp, Artificial Sequence
  ENSG00000164946_26 (sequence is synthesized)
ggcgttcaccaaccctctgaaagtgactgagggaggtcaaagcatcatcagcacagagcacattctaatttctgatgcagataccaagctggacaatattgacctctccctgcgggaatt

SEQ ID NO: 517185 - DNA, 120 bp, Artificial Sequence
  ENSG00000164946_27 (sequence is synthesized)
gcctctgcacggaagggtggagctgaatggatttcctctaaattcagggggcacattttcttggggcgatctccataccttaaaagttaggtatcaacatgatggaactgaagttcttca

SEQ ID NO: 517186 - DNA, 120 bp, Artificial Sequence
  ENSG00000164946_28 (sequence is synthesized)
ggatgacctactcttggaggtcaccgatggcacaaattcagcagaatttgtactacatgttgaggtattccctgtcaacgatgagccaccagtcttaaaggctgacctcatgcctgtcat

SEQ ID NO: 517187 - DNA, 120 bp, Artificial Sequence
  ENSG00000164946_29 (sequence is synthesized)
gaattgctcagagggaggagaggtggtcatcacctctgaatacatttttgctactgatgtggacagcgataacttgaagttgatgtttgtgattgctcgcgaacctcagcatggggtggt

SEQ ID NO: 517188 - DNA, 120 bp, Artificial Sequence
  ENSG00000164946_30 (sequence is synthesized)
agagctggagtcacagtggatcagttctctcagagagatgttatctcagaggccgtgacatacaaacacacaggtggcgagattggcctgatgccttgttttgacaccattacattggtg

SEQ ID NO: 517189 - DNA, 120 bp, Artificial Sequence
  ENSG00000164946_31 (sequence is synthesized)
gtttcggatggagaggctggcccttttgtgaatggctgttgctacaatggacccaatccatctgttccacttcatgcgtcctttccagtgtatgatctcaacatcacggtatacccagta

SEQ ID NO: 517190 - DNA, 120 bp, Artificial Sequence
  ENSG00000164946_32 (sequence is synthesized)
gacaaccagccaccttccattgcaataggtcccgtgtttgttgtagatgagggctgctcaacagcccttactgttaaccatttgtccgccactgaccctgacactgcagcagatgacttg

SEQ ID NO: 517191 - DNA, 120 bp, Artificial Sequence
  ENSG00000164946_33 (sequence is synthesized)
gaatttgttttggtttctcctcctcagtttggctacctcgaaaatatactcccttctgtgggttttgaaaaaagcaatattggcataagtatagattcatttcagtggaaagacatgaac

SEQ ID NO: 517192 - DNA, 120 bp, Artificial Sequence
  ENSG00000164946_34 (sequence is synthesized)
gcttttcacattaactatgtgcagtccaggcatctgaggatagaaccaactgccgaccagttcacggtgtacgtcacagatgggaagcatcactccttggagataccattttctattata

SEQ ID NO: 517193 - DNA, 120 bp, Artificial Sequence
  ENSG00000164946_35 (sequence is synthesized)
atcaaccccacaaatgatgaagctcctgactttgtagtgcagaatattactgtgtgtgagggtcagatgaaagagctggactcttccatcatcagcgctgtggacctggacattccccag

SEQ ID NO: 517194 - DNA, 120 bp, Artificial Sequence
  ENSG00000164946_36 (sequence is synthesized)
gatgccctgctgttcagcatcactcaaaagccacgccatggcctcctcatcgatagggggtttagcaaagacttctctgagaataagcagccagccaaccctcaccagaaacatgcacct

SEQ ID NO: 517195 - DNA, 120 bp, Artificial Sequence
  ENSG00000164946_37 (sequence is synthesized)
gttcacagcttttccatggaactcctcaagactggaatgaggttgacgtacatgcatgatgactcagagagccttgctgatgattttacaatccaattgtcagatgggaaacataagata

SEQ ID NO: 517196 - DNA, 120 bp, Artificial Sequence
  ENSG00000164946_38 (sequence is synthesized)
cttaaaaccatttcagtagaggtcatcccagttaatgatgaaaaaccaatgctgagcaagaaggctgaaattgcaatgaatatgggtgaaactcgtattatttccagtgctattctttca

SEQ ID NO: 517197 - DNA, 120 bp, Artificial Sequence
  ENSG00000164946_39 (sequence is synthesized)
gccatagatgaagactcacccagggagaagatttactatgtatttgaaaggcttccccaaaatgggcaacttcagcttaagatagggagggactgggttcctctctcccctggcatgaaa

SEQ ID NO: 517198 - DNA, 120 bp, Artificial Sequence
  ENSG00000164946_40 (sequence is synthesized)
tgcactcaggaggaagtggatctgaacttgctgagatacacacacaccggggcaatggattcccagaatcaagatagcttcaccttctacctttgggatggcaacaacaggtcccctgct

SEQ ID NO: 517199 - DNA, 120 bp, Artificial Sequence
  ENSG00000164946_41 (sequence is synthesized)
cttgactgtcaaatcaccatcaaggacatggaaaaaggtgatattgtcatccttacaaaaccactcgtggtgtctaaaggtgatagaggtttcttaacaaccaccacgctcctggctgtg

SEQ ID NO: 517200 - DNA, 120 bp, Artificial Sequence
  ENSG00000164946_42 (sequence is synthesized)
gacggaacagacaagcctgaggaactgctctatgtcatcacctcccctccgcgatatggccagatcgaatatgttcactatcctggagttcccattacaaacttcagccaaatggatgta

SEQ ID NO: 517201 - DNA, 120 bp, Artificial Sequence
  ENSG00000164946_43 (sequence is synthesized)
gtggggcagacagtttgctatgtacacaagagcaaggtgactgtctccagtgacagattcagattcatcatcagcaatggactgcggaccgagcacggggtgtttgagatcacactggag

SEQ ID NO: 517202 - DNA, 120 bp, Artificial Sequence
  ENSG00000164946_44 (sequence is synthesized)
actgtggacagagccctgcctgtggtaaccaggaacaaggggttgagactggcccaaggggccgtgggcctgctttcccctgacctccttcagctgaccgaccctgatacacctgcggag

SEQ ID NO: 517203 - DNA, 120 bp, Artificial Sequence
  ENSG00000164946_45 (sequence is synthesized)
aacctcaccttcctcttggttcagctcccccagcatggccagctctacctgtgggggacagggctacttcaacacaatttcacccagcaggatgtggacagcaagaatgtggcctatcgg

SEQ ID NO: 517204 - DNA, 120 bp, Artificial Sequence
  ENSG00000164946_46 (sequence is synthesized)
cactcaggaggggactcccagactgactgctttactttcatggccacagatgggacaaaccaaggctttattgtgaatgggagagtgtgggaagaacctgttttattcaccattcaggta

SEQ ID NO: 517205 - DNA, 120 bp, Artificial Sequence
  ENSG00000164946_47 (sequence is synthesized)
gaccaattggacaaaacagctcctcgtatcacactcttgcattccccttctcaagtggggctcctgaaaaatggctgctacgggatttacatcacttcccgcgtgttgaaggcatcagac

SEQ ID NO: 517206 - DNA, 120 bp, Artificial Sequence
  ENSG00000164946_48 (sequence is synthesized)
cctgacactgaggacgatcagatcatctttaaaattctacaaggcccaaaacatggacatctggagaacacaacaacaggtgaatttatccatgagaaatttagccaaaaggacttaaac

SEQ ID NO: 517207 - DNA, 120 bp, Artificial Sequence
  ENSG00000164946_49 (sequence is synthesized)
agtaagactattctttacatcataaacccatctttggaagtaaattcagataccgtggaatttcaaatcatggaccccacagggaactcggccactcctcaaattttggaactgaagtgg

SEQ ID NO: 517208 - DNA, 120 bp, Artificial Sequence
  ENSG00000164946_50 (sequence is synthesized)
tctcatattgaatggtcacagaccgaatatgaagtctgtgagaatgtgggtttgttgcccttggaaattatcagaaggggatattccatggactcggcctttgtgggtataaaggtcaac

SEQ ID NO: 517209 - DNA, 120 bp, Artificial Sequence
  ENSG00000164946_51 (sequence is synthesized)
caagtgtcagctgcagttggaaaagatttcaccgtgattccatctaaactgattcagtttgacccaggaatgtcaactaagatgtggaatatagcaattacctatgacggattagaggaa

SEQ ID NO: 517210 - DNA, 120 bp, Artificial Sequence
  ENSG00000164946_52 (sequence is synthesized)
gatgatgaggtctttgaagtaattctgaactcccctgtgaatgcagttcttggcacaaagacaaaagctgcagtgaaaattttggactcaaaaggaggacaatgccatccttcatattcc

SEQ ID NO: 517211 - DNA, 120 bp, Artificial Sequence
  ENSG00000164946_53 (sequence is synthesized)
tccaaccaaagcaagcacagcacatgggagaagggcatttggcatctgctgcccccagggtcttcctcatccaccacttctggttcctttcatctggaaagaagacctcttccatcttcc

SEQ ID NO: 517212 - DNA, 120 bp, Artificial Sequence
  ENSG00000164946_54 (sequence is synthesized)
atgcagctagcagtcatcaggggagacaccctgcggggctttgattctacagatctttctcaaaggaagcttaggacccgtgggaatggcaaaacagttcgtccatcctctgtttataga

SEQ ID NO: 517213 - DNA, 120 bp, Artificial Sequence
  ENSG00000164946_55 (sequence is synthesized)
aatggaacagacatcatctataattatcatgggatagtttccttgaaactggaggatgacagtttcccaactcacaaaaggaaggccaaagtatccatcattagtcagccacaaaagaca

SEQ ID NO: 517214 - DNA, 120 bp, Artificial Sequence
  ENSG00000164946_56 (sequence is synthesized)
atcaaagtggcagaactgcctcaagcagataaggtggaatccacaactgactcacacttccccagacaggaccagttgccctcatttccaaagaactgcactctggaattaaagggactc

SEQ ID NO: 517215 - DNA, 120 bp, Artificial Sequence
  ENSG00000164946_57 (sequence is synthesized)
ttccattttgaagaaggcatccagaagctgtatcagtgcaatgggatcgcctggaaagcctggagtccccaaaccaaggatgtggaagacaaatcctgtccagccgggtggcaccagcac

SEQ ID NO: 517216 - DNA, 120 bp, Artificial Sequence
  ENSG00000164946_58 (sequence is synthesized)
tcaggctactgtcacatcttgatcacagagcagaaaggcacctggaatgcggctgcccaagcttgcagggaacaatacctgggcaaccttgtaactgtattctccaggcagcacatgcgg

SEQ ID NO: 517217 - DNA, 120 bp, Artificial Sequence
  ENSG00000164946_59 (sequence is synthesized)
tggctctgggacattggtgggagaaagtccttttggataggtttgaacgaccaagtgcatgctggccactgggagtggatcggtggtgaacctgttgccttcaccaatgggagaagaggg

SEQ ID NO: 517218 - DNA, 120 bp, Artificial Sequence
  ENSG00000164946_60 (sequence is synthesized)
ccctctcaacgctccaagcttggaaagagctgtgttttggttcaaagacaagggaaatggcaaacaaaagactgtaggagagccaaacctcataattatgtgtgttccagaaaactctaa

SEQ ID NO: 517219 - DNA, 120 bp, Artificial Sequence
  ENSG00000164946_61 (sequence is synthesized)
acacaaaaagccttacaaatggaagaactaaggtggtacttaaaaacagcaccttaggatctagttccatcctatcttttcccttaaatgccatgacaaaagttaaaacgggccctgtcc

SEQ ID NO: 517220 - DNA, 120 bp, Artificial Sequence
  ENSG00000164946_62 (sequence is synthesized)
cttctgaatgctgggcttctcatctaaatttaaataaaaacctttgaagatgggaatgtgttggaagaaaagaagggcagaaaaaaagtgtgttggaagagtctgtggagtcctgaggct

SEQ ID NO: 517221 - DNA, 120 bp, Artificial Sequence
  ENSG00000164946_63 (sequence is synthesized)
atgattgagtgggtatacctttgtgattctgtctagtgaaaatgggacatttttaatagtgccagaaagattgataaataaatattttttacaagataagatacaatttttgtatctcaa

SEQ ID NO: 517222 - DNA, 120 bp, Artificial Sequence
  ENSG00000164946_64 (sequence is synthesized)
taccttttaaaataaatgccagcagtattataaagtgtaaggtttgtttattccagaagaccctcacccttaccccattccaaatctcagggagcaccagtctcatagtccttggatttt

SEQ ID NO: 517223 - DNA, 120 bp, Artificial Sequence
  ENSG00000164946_65 (sequence is synthesized)
tttaaaaaaaatttttggtcccgttacctctaatgaatttattctgaaatatgtatcgtaggtgctcctaccactttagtctgagtgaagctaactctactagttcattaaaccaaagtt

SEQ ID NO: 517224 - DNA, 120 bp, Artificial Sequence
  ENSG00000164946_66 (sequence is synthesized)
gaaccgcaaagttgtccctttggagccctttaaatgtgaaatctaagattagaggctggggttgaaaaagagaattttctatgatgaaaaagaaagactttagatgaaagaatcttgtag

SEQ ID NO: 517225 - DNA, 120 bp, Artificial Sequence
  ENSG00000164946_67 (sequence is synthesized)
gtggaggctcatctacaaagctgtagttcaggtaagaattcggggggctggctgtactcagagttctactcatcactattcatgaaacagatctccctttccaatttgagtgttggcatt

SEQ ID NO: 517226 - DNA, 120 bp, Artificial Sequence
  ENSG00000164946_68 (sequence is synthesized)
gtaccatcccaaagctaatgattgggtttccccagccttacagagtcatgagaaatttcaagtaacataatctgttcctctgtgtttattgtactgacaagcatttctcagggacacttg

SEQ ID NO: 517227 - DNA, 120 bp, Artificial Sequence
  ENSG00000164946_69 (sequence is synthesized)
ggataaggagtatatatgaatgatggttgacacatggaagaaaaatactgcttcctcagaaatgtcctgatgaactgtgctgatgaacagagaaaaataataccgaaaacagagcccctg

SEQ ID NO: 517228 - DNA, 120 bp, Artificial Sequence
  ENSG00000164946_70 (sequence is synthesized)
aaagcctacattctcggaaaggattttgaggaattttgagccaccttaaatctttaatatttgcagaaatgccatgttaactagattctctaacggaaaggtaccttattaatttataat

SEQ ID NO: 517229 - DNA, 120 bp, Artificial Sequence
  ENSG00000164946_71 (sequence is synthesized)
ctcaggtgagtggaacatttttgtaacaatgaagtatgttgcagcgttaccagaactcccttctgaaatcaaggtttaacagttataggaaattagaatgtctgaaacatttatttaaag

SEQ ID NO: 517230 - DNA, 120 bp, Artificial Sequence
  ENSG00000164946_72 (sequence is synthesized)
tttttctcttttcataatcactgagaaatatggttgtgccaaatgtcacttgctctatgagcaccaatgtaacttcagaatcaaattggggttatcaagtaggctagagctctggtgctg

SEQ ID NO: 517231 - DNA, 120 bp, Artificial Sequence
  ENSG00000164946_73 (sequence is synthesized)
gttttattataaaaataccttgagtgttgtagacactaaaactgcttgaagaaagtcagttcagtttctgggatataaaaacatggcaagctttttttatttcagttcatttatcaaggt

SEQ ID NO: 517232 - DNA, 120 bp, Artificial Sequence
  ENSG00000164946_74 (sequence is synthesized)
tgtaattaatagaaacatttagaaagagatattggaatatgatccagacattctgtctattacttaaatctaaacataattatagtgtcagagggtccttacctgagatgtcgcaggtgg

SEQ ID NO: 517233 - DNA, 120 bp, Artificial Sequence
  ENSG00000164946_75 (sequence is synthesized)
gctccagattggcataatgtacaggttctctgtgagacacaagcagtttctggcatttaaccaaaagatgccacacctatcctcttaccagctcctttcaaattccttctggtccacagg

SEQ ID NO: 517234 - DNA, 120 bp, Artificial Sequence
  ENSG00000164946_76 (sequence is synthesized)
cttcttgcagtatggaaatgtgagatttgggctaaagaaaaaatagttgtttacctaaagggttaagtcctaggaaggaagtagaagtttgggaaatgagggattcaagggccactcctt

SEQ ID NO: 517235 - DNA, 120 bp, Artificial Sequence
  ENSG00000164946_77 (sequence is synthesized)
ccactggaactctaaaactatataaaccatctaaaactggaaatctagaactatgtcaactgtgtagaaccttgtcagcatggcagatttattatacatttctgcaatataaatgataaa

SEQ ID NO: 517236 - DNA, 120 bp, Artificial Sequence
  ENSG00000164946_78 (sequence is synthesized)
tgatactgaactaattgcaaatgttagcataaagagtgttttgatttttataacaattagaaatgctacaagaatatttaaaaatattcctgatcatgaaagcattaatcaaattagaaa

SEQ ID NO: 517237 - DNA, 120 bp, Artificial Sequence
  ENSG00000164946_79 (sequence is synthesized)
atccaagtcattttaagaagataaaaatagaaattcaggcaagtttgggtgatgggcggtattcatcacaaccttcattttattcttacaattgagctttgactcagggggaaaagaagt

SEQ ID NO: 517238 - DNA, 120 bp, Artificial Sequence
  ENSG00000164946_80 (sequence is synthesized)
aaatgattgtcaaggttccctctgccttgattgatagtttctgatgggagtgggaaggaaggaattggagtaatgggtagaatgggaatgagagattacgggagagagagatgagatggg

SEQ ID NO: 517239 - DNA, 120 bp, Artificial Sequence
  ENSG00000164946_81 (sequence is synthesized)
ttgaacagaagaggatgggaactgatggtagctaggaaggaaagcgtcaagaaggacctgaatgtacccagcttttctccccaaacttcaataccacctcaggaaaaggcccactgtgtc

SEQ ID NO: 517240 - DNA, 120 bp, Artificial Sequence
  ENSG00000164946_82 (sequence is synthesized)
caggggcgtcagtccagctcaatagtgtctagcttttcagaatcttctgattgtttggtctttaacaaaaacatagcatctatttgctaacaataaacttaagcaacatatgataatcat

SEQ ID NO: 517241 - DNA, 120 bp, Artificial Sequence
  ENSG00000164946_83 (sequence is synthesized)
ttcatctccttccaagaagtggtgaaaatgaaccaggtgacattaatttaacttctgtttttgtttatttttaatacaaccaaaaagatatgcacatattttaatttacattatggtact

SEQ ID NO: 517242 - DNA, 120 bp, Artificial Sequence
  ENSG00000164946_84 (sequence is synthesized)
gtataatttaaaccataaactggtgctgattaatttctgcaacaaagcagcatattaaatgtactacatctagtgttgtagcaaaattaataaacttgttttaagttctgagacactttc

SEQ ID NO: 517243 - DNA, 120 bp, Artificial Sequence
  ENSG00000164946_85 (sequence is synthesized)
ttcacctttccattgacttctgttgaggattgaagagactgattagatcatgagatctatgtgaggcataccttcaagaaagaggccaccatatagatggacagttgagaggtataagtc

SEQ ID NO: 517244 - DNA, 120 bp, Artificial Sequence
  ENSG00000164946_86 (sequence is synthesized)
ctgtctccagtgacagattcaggtgagccccatggaaacttttcaaaccccttctttggattaatacttacagaaaaggagatctgttaatgtgcttcactatagtaaccatttcacaaa

SEQ ID NO: 517245 - DNA, 120 bp, Artificial Sequence
  ENSG00000164946_87 (sequence is synthesized)
agtctgcagggaggaaagtcagaattagatattcaagatggccgcctctgatggagtccctggcactcactcaagcttgcatttggtagatggtgacacaagaatccatgctgaaggctg

SEQ ID NO: 517246 - DNA, 120 bp, Artificial Sequence
  ENSG00000164949_0 (sequence is synthesized)
aggcggcgggcaaggacggcgggcacagcgcagcactccccgctcgttggcccgggtatcccagcgcggacccacgcgatacgctgacgccccgacgccgatccggccgagccaagtaag

SEQ ID NO: 517247 - DNA, 120 bp, Artificial Sequence
  ENSG00000164949_1 (sequence is synthesized)
ggggacggcccgagacggagaagggagagagtgggagtttcccagcccgcagaactttcgaagttgagaaaagaacccctggaacgtgcgctcagcactgggattttctggactcaacga

SEQ ID NO: 517248 - DNA, 120 bp, Artificial Sequence
  ENSG00000164949_2 (sequence is synthesized)
tgactctgaataatgtcaccatgcgccagggcactgtgggcatgcagccacagcagcagcgctggagcatcccagctgatggcaggcatctgatggtccagaaagagccccaccagtaca

SEQ ID NO: 517249 - DNA, 120 bp, Artificial Sequence
  ENSG00000164949_3 (sequence is synthesized)
gccaccgcaaccgccattctgctacccctgaggaccactgccgccgaagctggtcctctgactccacagactcagtcatctcctctgagtcagggaacacctactaccgagtggtgctca

SEQ ID NO: 517250 - DNA, 120 bp, Artificial Sequence
  ENSG00000164949_4 (sequence is synthesized)
taggggagcagggggtgggcaagtccactctggccaacatctttgcaggtgtgcatgacagcatggacagcgactgcgaggtgctgggagaagatacatatgaacgaaccctgatggttg

SEQ ID NO: 517251 - DNA, 120 bp, Artificial Sequence
  ENSG00000164949_5 (sequence is synthesized)
atggggaaagtgcaacgattatactcctggatatgtgggaaaataagggggaaaatgaatggctccatgaccactgcatgcaggtcggggacgcatacctgattgtctactcaatcacag

SEQ ID NO: 517252 - DNA, 120 bp, Artificial Sequence
  ENSG00000164949_6 (sequence is synthesized)
accgagcgagcttcgagaaggcatctgagctgcgaatccagctccgcagggcccggcagacagaggacattcccataattttggttggcaacaaaagtgacttagtgcggtgccgagaag

SEQ ID NO: 517253 - DNA, 120 bp, Artificial Sequence
  ENSG00000164949_7 (sequence is synthesized)
tgtctgtatcagaagggagagcctgtgcagtggtgtttgactgcaagttcatcgagacctctgcagctgtccagcacaacgtgaaggagctgtttgagggcattgtgcgacaggtgcgcc

SEQ ID NO: 517254 - DNA, 120 bp, Artificial Sequence
  ENSG00000164949_8 (sequence is synthesized)
ttcggcgggacagcaaggagaagaatgaacggcggctggcctaccagaaaaggaaggagagcatgcccaggaaagccaggcgcttctggggcaagatcgtggccaaaaacaacaagaata

SEQ ID NO: 517255 - DNA, 120 bp, Artificial Sequence
  ENSG00000164949_9 (sequence is synthesized)
gccatgacctctctgtactctaggaacccagggtcacccagatgtccctttgatggccgttgttgaaggccattgggaccaataatctatattagattgaatacttaagttagatgtggt

SEQ ID NO: 517256 - DNA, 120 bp, Artificial Sequence
  ENSG00000164949_10 (sequence is synthesized)
ttcccccattgtagcagggagctagcgtattagccttgtgggcaacatgatgcatgggaaatgaaagatttttgtaaaaagtcagtatttatttccaggaaaagcctgaccttgctattt

SEQ ID NO: 517257 - DNA, 120 bp, Artificial Sequence
  ENSG00000164949_11 (sequence is synthesized)
gaacacccaagactctttagaggatgtgtttggtgttcacatgtgtttcttctattttggatagtagagaagtaaagcttacaaagaatgcctagaacaagaacttttcatcattaaaaa

SEQ ID NO: 517258 - DNA, 120 bp, Artificial Sequence
  ENSG00000164949_12 (sequence is synthesized)
tttttcccagtgttctgatatgtgactttgaggccaatgagtcataaacaaatataagaaagctgtcaatgagtttcttcaaaggagggaaaactttctacgaatctaagatccatggag

SEQ ID NO: 517259 - DNA, 120 bp, Artificial Sequence
  ENSG00000164949_13 (sequence is synthesized)
ctagaattgtagaactaggctcatcagaatcgtgactattattgctccatcaaactgtgaaaagaaatgatgtggaccttgctggaaacaaaggcttagcaaacaatttttgttcaatgc

SEQ ID NO: 517260 - DNA, 120 bp, Artificial Sequence
  ENSG00000164949_14 (sequence is synthesized)
ccaccaagacatatagaattgggaactgatacatgtgtcccttataggctcaaaaattatatcttacaatttcttatttagggggaaattatttgaatcagattctatttagtcaaacca

SEQ ID NO: 517261 - DNA, 120 bp, Artificial Sequence
  ENSG00000164949_15 (sequence is synthesized)
ccttttatgttttattatttttgaattcatggagccatcataaaaatatttttaaaatcagaattattgataccctgtagtgcaaaatgtcaatttttaatgtataatcagaagtctgaa

SEQ ID NO: 517262 - DNA, 120 bp, Artificial Sequence
  ENSG00000164949_16 (sequence is synthesized)
tttttataaaacatatagcataaaaacttccagtactttggttgacccttgtatgtcacagctctgctctatttattattattttgcaaaataaccattttaacatttgataaagcatat

SEQ ID NO: 517263 - DNA, 120 bp, Artificial Sequence
  ENSG00000164949_17 (sequence is synthesized)
tggttataaaccgcccggccgcggcggctgcaggcggcgggcaaggacggcgggcacagcgcagcactccccgctcgttggcccgggtatcccagcgcggacccacgcgatacgctgacg

SEQ ID NO: 517264 - DNA, 120 bp, Artificial Sequence
  ENSG00000164949_18 (sequence is synthesized)
agaaagagtgagggtgggtgacttatttacccacagagttgggagctgaagttaggcattttggacaattgatgggggagctgagtctctagaaaagcccaagcacaggctttcgggcaa

SEQ ID NO: 517265 - DNA, 120 bp, Artificial Sequence
  ENSG00000164949_19 (sequence is synthesized)
attccaattctaaatgggttggggaaggctgattagagagggcagagccagagggtcagcgccccacttgacttctgctgactctgacttgaacattcttcccggaactcagtatagaca

SEQ ID NO: 517266 - DNA, 120 bp, Artificial Sequence
  ENSG00000164951_0 (sequence is synthesized)
ggcggccccgcacggtaggggagcagagtgggcaggccgggggtgagggctcgcgctccgggagctgcacggggctgcgtggaaagagcgccgagcggtggcgtcgttgtcgccccctcc

SEQ ID NO: 517267 - DNA, 120 bp, Artificial Sequence
  ENSG00000164951_1 (sequence is synthesized)
tcgtcgggaagaatcgtttggtctcctgccgtgcccggaatcccagtcagaagttccagcctgccactgttctctgatgccatgccagcaccaactcaactgttttttcctctcatccgt

SEQ ID NO: 517268 - DNA, 120 bp, Artificial Sequence
  ENSG00000164951_2 (sequence is synthesized)
aactgtgaactgagcaggatctatggcactgcatgttactgccaccacaaacatctctgttgttcctcatcgtacattcctcagagtcgactgagatacacacctcatccagcatatgct

SEQ ID NO: 517269 - DNA, 120 bp, Artificial Sequence
  ENSG00000164951_3 (sequence is synthesized)
accttttgcaggccaaaggagaactggtggcagtacacccaaggaaggagatatgcttccacaccacagaaattttacctcacacctccacaagtcaatagcatccttaaagctaatgaa

SEQ ID NO: 517270 - DNA, 120 bp, Artificial Sequence
  ENSG00000164951_4 (sequence is synthesized)
tacagtttcaaagtgccagaatttgacggcaaaaatgtcagttctatccttggatttgacagcaatcagctgcctgcaaatgcacccattgaggaccggagaagtgcagcaacctgcttg

SEQ ID NO: 517271 - DNA, 120 bp, Artificial Sequence
  ENSG00000164951_5 (sequence is synthesized)
cagaccagagggatgcttttgggggtttttgatggccatgcaggttgtgcttgttcccaggcagtcagtgaaagactcttttattatattgctgtctctttgttaccccatgagactttg

SEQ ID NO: 517272 - DNA, 120 bp, Artificial Sequence
  ENSG00000164951_6 (sequence is synthesized)
ctagagattgaaaatgcagtggagagcggccgggcactgctacccattctccagtggcacaagcaccccaatgattactttagtaaggaggcatccaaattgtactttaacagcttgagg

SEQ ID NO: 517273 - DNA, 120 bp, Artificial Sequence
  ENSG00000164951_7 (sequence is synthesized)
acttactggcaagagcttatagacctcaacactggtgagtcgactgatattgatgttaaggaggctctaattaatgccttcaagaggcttgataatgacatctccttggaggcgcaagtt

SEQ ID NO: 517274 - DNA, 120 bp, Artificial Sequence
  ENSG00000164951_8 (sequence is synthesized)
ggtgatcctaattcttttctcaactacctggtgcttcgagtggcattttctggagccactgcttgtgtggcccatgtggatggtgttgaccttcatgtggccaatactggcgatagcaga

SEQ ID NO: 517275 - DNA, 120 bp, Artificial Sequence
  ENSG00000164951_9 (sequence is synthesized)
gccatgctgggtgtgcaggaagaggacggctcatggtcagcagtcacgctgtctaatgaccacaatgctcaaaatgaaagagaactagaacggctgaaattggaacatccaaagagtgag

SEQ ID NO: 517276 - DNA, 120 bp, Artificial Sequence
  ENSG00000164951_10 (sequence is synthesized)
gccaagagtgtcgtgaaacaggatcggctgcttggcttgctgatgccatttagggcatttggagatgtaaagttcaaatggagcattgaccttcaaaagagagtgatagaatctggccca

SEQ ID NO: 517277 - DNA, 120 bp, Artificial Sequence
  ENSG00000164951_11 (sequence is synthesized)
gaccagttgaatgacaatgaatataccaagtttattcctcctaattatcacacacctccttatctcactgctgagccagaggtaacttaccaccgattaaggccacaggataagtttctg

SEQ ID NO: 517278 - DNA, 120 bp, Artificial Sequence
  ENSG00000164951_12 (sequence is synthesized)
gtgttggctactgatgggttgtgggagactatgcataggcaggatgtggttaggattgtgggtgagtacctaactggcatgcatcaccaacagccaatagctgttggtggctacaaggtg

SEQ ID NO: 517279 - DNA, 120 bp, Artificial Sequence
  ENSG00000164951_13 (sequence is synthesized)
actctgggacagatgcatggccttttaacagaaaggagaaccaaaatgtcctcggtatttgaggatcagaacgcagcaacccatctcattcgccacgctgtgggcaacaacgagtttggg

SEQ ID NO: 517280 - DNA, 120 bp, Artificial Sequence
  ENSG00000164951_14 (sequence is synthesized)
actgttgatcatgagcgcctctctaaaatgcttagtcttcctgaagagcttgctcgaatgtacagagatgacattacaatcattgtagttcagttcaattctcatgttgtaggggcgtat

SEQ ID NO: 517281 - DNA, 120 bp, Artificial Sequence
  ENSG00000164951_15 (sequence is synthesized)
caaaaccaagaatagtgagtggctctttcactggcaattctcaaatgatatacatttaaagggcagattttttaaaaagatactactataataaacatttccagttggtcattctaagca

SEQ ID NO: 517282 - DNA, 120 bp, Artificial Sequence
  ENSG00000164951_16 (sequence is synthesized)
tttacccttttgatactctagctagtcaggtactccaaattgactttgcagcagggtggcagggtcaggagagtctggtcctgcctagctcagatttcatggcacctgcacttgaagcaa

SEQ ID NO: 517283 - DNA, 120 bp, Artificial Sequence
  ENSG00000164951_17 (sequence is synthesized)
tatcacaggtgtcttgaaacattagcttcttttaccaacctgagaaaattaggatgacctggcaaataagatcttgaataggccaaaagcaagtatcttgctgtgtgtagtctcttggtt

SEQ ID NO: 517284 - DNA, 120 bp, Artificial Sequence
  ENSG00000164951_18 (sequence is synthesized)
aaagtgaagaaacagtactgttcacacctttcttcactgagattccagtgtacatgagaacatatatttattgcatgattttctagatacacagtctatgcattattcatatacatttat

SEQ ID NO: 517285 - DNA, 120 bp, Artificial Sequence
  ENSG00000164951_19 (sequence is synthesized)
tttagcctaaagtggttttcaaatccagttcttcaagccataaatgaccaagatccaagcaatctgaatttgtttttgtgattatttgactggaatgcttcttaagtggaataactatac

SEQ ID NO: 517286 - DNA, 120 bp, Artificial Sequence
  ENSG00000164951_20 (sequence is synthesized)
tccgttatccacccgatttcctaatgtaattgaaagattttctattttgccacacacttggagacaataagggtttttagttttatctactcttctattgaagttaaagaaagaaaaaaa

SEQ ID NO: 517287 - DNA, 120 bp, Artificial Sequence
  ENSG00000164951_21 (sequence is synthesized)
gatttttttatttgtattaatgaaaagctttagtttaaaataaggagatccagaataaaaagaagagactgatctcttcaattattgtcatctgtagccaccagcacatcactcttatgt

SEQ ID NO: 517288 - DNA, 120 bp, Artificial Sequence
  ENSG00000164951_22 (sequence is synthesized)
aatccccaaaggcttggcatgccgtaagtgtgtggtgggtagactgctgccggggaatcgtacttcttatttagtaatgataagacttttcattatttttggaattttaaagatgacata

SEQ ID NO: 517289 - DNA, 120 bp, Artificial Sequence
  ENSG00000164951_23 (sequence is synthesized)
aataagtttaaatatcaatttggggagtaaggtttaatattgccatcgggtattgagacaggaggaagtttctgtttttctccatttagacataggtcaattaaaatatttgggtttaaa

SEQ ID NO: 517290 - DNA, 120 bp, Artificial Sequence
  ENSG00000164951_24 (sequence is synthesized)
atgactaaatgctttaaacatattgtagcttaagatatatgtgttaagatatatacatgagaaactttaaaaggtaactactgtgcatgcctgatgcttaatagaatacttagtggcatc

SEQ ID NO: 517291 - DNA, 120 bp, Artificial Sequence
  ENSG00000164951_25 (sequence is synthesized)
aaatgtttgcagcagtctccataattatattcagtcccttctaatactgtatcaatgtaaatgaaataaatatattcaaattggctttttgatatgcatcaagtggcattttgttcctgt

SEQ ID NO: 517292 - DNA, 120 bp, Artificial Sequence
  ENSG00000164951_26 (sequence is synthesized)
gtttaatagtgatctgtatacagctgtgcacatattgtcatcacttattctagcatcactgttaaggctgtgattatgtttgatattcacctggattttaatacaagccaatatcagctt

SEQ ID NO: 517293 - DNA, 120 bp, Artificial Sequence
  ENSG00000164951_27 (sequence is synthesized)
cccattgtgtaataacttgggtgtttaggagtcttttcacattttttggggatatgaactagatgttcaagaactccttctggactgtggatactgaatcagtgtactattggctgcaga

SEQ ID NO: 517294 - DNA, 120 bp, Artificial Sequence
  ENSG00000164951_28 (sequence is synthesized)
agtgtactattggctgcagaatttgtttcaattgaaaatagactcaggaagattgctgctcagaatatcatataatgtttattttttgaggtgtttttgtttttatttgtgtgttttttt

SEQ ID NO: 517295 - DNA, 120 bp, Artificial Sequence
  ENSG00000164951_29 (sequence is synthesized)
cttttttcctgggtagtatttgggagagggaaaggctgtactatatatttatttctaaatgttttgactgggcatttttcttttaatgaaatatgtggactgctctagcaaaccctattt

SEQ ID NO: 517296 - DNA, 120 bp, Artificial Sequence
  ENSG00000164951_30 (sequence is synthesized)
tcagctactatttgaatattcttgaacaccaccactgaagagtttcatatacaccaaataatgtctcatctctatagtacagggaatataaaattggtttcctgtggtcatgatcaagat

SEQ ID NO: 517297 - DNA, 120 bp, Artificial Sequence
  ENSG00000164951_31 (sequence is synthesized)
agtagtattattacacaagaaacttggtctgcagtctggaagcttgtctgctctatagaaatgaaaatgcagcatgaagttgacattgtggaaatgaaagtaattgggtattagaaatct

SEQ ID NO: 517298 - DNA, 120 bp, Artificial Sequence
  ENSG00000164951_32 (sequence is synthesized)
gaaagtactgtcatctaaaagcaattgtgattttattgtaattggttgtcactgttgtacggtgtctagaattaaagaatacatgtaaactttcatggtatttagcctttcttaaatttt

SEQ ID NO: 517299 - DNA, 120 bp, Artificial Sequence
  ENSG00000164951_33 (sequence is synthesized)
tttaaaatttaaactttctaacctatgtattcaacttctgtatttatatttaatcagtggttcatgttatataatacacccttaactagttaaatggaatgttggtatggtacagagtac

SEQ ID NO: 517300 - DNA, 120 bp, Artificial Sequence
  ENSG00000164951_34 (sequence is synthesized)
catattgctaagaaaactgtcttataaaagatgtatatgtgtgaagacatgaaagtttaatgtacagaatggttggagaaatgcctatggtgaattaaagcttcatatctgctttctgaa

SEQ ID NO: 517301 - DNA, 120 bp, Artificial Sequence
  ENSG00000164951_35 (sequence is synthesized)
attcaccgggctggagcgagacctcgcccctcctccgctcccgcctccccgccgccgcctcctctaatgagcatctctgccttgctttcaatgggccggtgctgctgtcgctgctgctgc

SEQ ID NO: 517302 - DNA, 120 bp, Artificial Sequence
  ENSG00000164951_36 (sequence is synthesized)
cctgccgtgcccggttcgtattccctactccctgccacgagccgccccgtccgggatcctccacccgtccaaagttgtgagggggcgccgggcgtgctcgcggatcggcggccgcgggcg

SEQ ID NO: 517303 - DNA, 120 bp, Artificial Sequence
  ENSG00000164951_37 (sequence is synthesized)
atagaacgctcattaattacagcacagttttcataaattccaacttccctaggaattttgtcttttgaaggcatgttggaagttggggcattaggatataatctcagtccatgtactaag

SEQ ID NO: 517304 - DNA, 120 bp, Artificial Sequence
  ENSG00000164951_38 (sequence is synthesized)
cctctgcataactgaaagatagagtcaataaaattcactctctcattttttgtttttaatctcaagaatttttgccttgaaggaaaaatgtagtggagaatttgatgtttgaacgttaga

SEQ ID NO: 517305 - DNA, 120 bp, Artificial Sequence
  ENSG00000164951_39 (sequence is synthesized)
agagtgagactcaaagatgtgagctgacttttccaagattatttgggagttggtggcagacctatgcccgttagcctggcaaattgccacagtggactagagaagcaagttttgcaagac

SEQ ID NO: 517306 - DNA, 120 bp, Artificial Sequence
  ENSG00000164951_40 (sequence is synthesized)
catctactgggctttccccagccaaatctgttgtacattctgcacagtttgtactgcacaaaggacgacaaagaaaagagaaaattgaagtttgagtataggagccaggagttcagtcgt

SEQ ID NO: 517307 - DNA, 120 bp, Artificial Sequence
  ENSG00000164951_41 (sequence is synthesized)
gagttgcttgttccaactgaggctttgagatgcaagagaaaatattccaagtatccagaaccaatttcaggacacctctcactccaaggggagagagaagagagtgagagcgaactgggg

SEQ ID NO: 517308 - DNA, 120 bp, Artificial Sequence
  ENSG00000164951_42 (sequence is synthesized)
aagtgaatctgtgataagaatttccctgaagggaaagcagggactcgaacaggtacttgaatatccacgttcatggcagcattattcacaatagtcaaaatatggaagcaacctaagtga

SEQ ID NO: 517309 - DNA, 120 bp, Artificial Sequence
  ENSG00000164951_43 (sequence is synthesized)
tggaatgtacgcacagtggaatattactcagccttaaaaaagaaaggcaattctaccacatgctgcaccatggatgaaccttgaacagattatgctgctaaagaagccactcacaaaggt

SEQ ID NO: 517310 - DNA, 120 bp, Artificial Sequence
  ENSG00000164953_0 (sequence is synthesized)
aagccgccgcagaggctgatggggggctggaggctgtgaggcttccagcgtcggtaccatggcgacgcgcggtggggctggggtggcaatggcggtttggtccctcttatccgcccgggc

SEQ ID NO: 517311 - DNA, 120 bp, Artificial Sequence
  ENSG00000164953_1 (sequence is synthesized)
cgtgaccgcgttccttctgttgttcctccctcgcttcttacaggcccagaccttctctttccctttccagcagccggagaagtgcgacaacaaccagtactttgatatctccgccctctc

SEQ ID NO: 517312 - DNA, 120 bp, Artificial Sequence
  ENSG00000164953_2 (sequence is synthesized)
gtgtgttccttgtggagctaaccagaggcaagatgcccgaggaacttcatgtgtatgtctaccaggatttcagatgatctctaataatggaggacctgctattatttgtaaaaagtgccc

SEQ ID NO: 517313 - DNA, 120 bp, Artificial Sequence
  ENSG00000164953_3 (sequence is synthesized)
agaaaacatgaaaggtgttacagaagatggctggaactgcatttcttgccctagtgacttaactgccgaaggaaaatgtcactgtcccattggccatattttagtggaaagagacattaa

SEQ ID NO: 517314 - DNA, 120 bp, Artificial Sequence
  ENSG00000164953_4 (sequence is synthesized)
tggaacattgttgtctcaagcaacttgtgagctctgtgatggaaatgaaaactcttttatggtagtaaatgctttaggagacaggtgcgtccgatgtgagccaacatttgttaataccag

SEQ ID NO: 517315 - DNA, 120 bp, Artificial Sequence
  ENSG00000164953_5 (sequence is synthesized)
caggtcctgtgcatgttcagaacctaacattttaacagggggattatgtttcagcagcacagggaattttcctctacgtagaatttcagctgcacgttatggagaagttggcatgtcttt

SEQ ID NO: 517316 - DNA, 120 bp, Artificial Sequence
  ENSG00000164953_6 (sequence is synthesized)
aacttcagaatggtttgcaaagtatttgcaatcatcagcagctgcatgttgggtatatgccaatctaacatcttgtcaagctcttggaaatatgtgtgtgatgaacatgaattcttacga

SEQ ID NO: 517317 - DNA, 120 bp, Artificial Sequence
  ENSG00000164953_7 (sequence is synthesized)
ctttgccacatttgatgcatgtggactatttcagtttatctttgaaaatactgctggactgagcactgttcattctatttcattttggagacagaatcttccttggctgttttatggaga

SEQ ID NO: 517318 - DNA, 120 bp, Artificial Sequence
  ENSG00000164953_8 (sequence is synthesized)
ccagttaggattagcacctcaagtgctcagttctacctctcttcctacaaatttcagttttaaaggagaaaaccagaatacaaaactgaagtttgttgctgcttcctatgatataagagg

SEQ ID NO: 517319 - DNA, 120 bp, Artificial Sequence
  ENSG00000164953_9 (sequence is synthesized)
aaattttctcaagtggcaaactttagaaggaggtgttttacagctttgtccagacacagagacaaggctaaatgctgcttattcatttggaacaacctaccaacaaaattgtgagattcc

SEQ ID NO: 517320 - DNA, 120 bp, Artificial Sequence
  ENSG00000164953_10 (sequence is synthesized)
tatctctaagatcttaattgactttcccactcctatattttatgatgtgtaccttgaatatactgatgaaaatcaacatcaatatattttggctgtgcctgtgttaaacctaaatcttca

SEQ ID NO: 517321 - DNA, 120 bp, Artificial Sequence
  ENSG00000164953_11 (sequence is synthesized)
acataataagatatttgtgaaccaagacagcaactctggaaagtggcttctaactcggcgcattttcttagtggatgcagtaagtggacgagaaaatgacttaggaactcagccaagagt

SEQ ID NO: 517322 - DNA, 120 bp, Artificial Sequence
  ENSG00000164953_12 (sequence is synthesized)
aattcgagttgctactcaaatatcactgagtgtccaccttgtacccaacacaataaatggaaacatctaccctcccttaatcaccattgcctacagtgacattgatatcaaagatgccaa

SEQ ID NO: 517323 - DNA, 120 bp, Artificial Sequence
  ENSG00000164953_13 (sequence is synthesized)
cagccagtctgtgaaggtttctttctcagtcacatatgaaatggatcatggagaagcacatgtccagacagatattgctttgggtgtattgggtgggctagctgttttagcatctctttt

SEQ ID NO: 517324 - DNA, 120 bp, Artificial Sequence
  ENSG00000164953_14 (sequence is synthesized)
gaagacagcaggatggaagaggcgcattgggagtcccatgattgatttacagacagttgtgaaattcttggtgtactatgctggtgatctggccaatgttttctttatcatcacagtggg

SEQ ID NO: 517325 - DNA, 120 bp, Artificial Sequence
  ENSG00000164953_15 (sequence is synthesized)
aacaggtctttactggcttattttcttcaaagcacagaagtctgtgtctgttttgctgccaatgccaattcaggaagaacgttttgtcacttatgttggatgtgcctttgctctgaaggc

SEQ ID NO: 517326 - DNA, 120 bp, Artificial Sequence
  ENSG00000164953_16 (sequence is synthesized)
actacaatttttgcataagctcatatcccagattacaatagatgtattctttattgattgggagcgacctaaaggaaaggttcttaaagctgttgaaggtgagggtggtgtacgaagtgc

SEQ ID NO: 517327 - DNA, 120 bp, Artificial Sequence
  ENSG00000164953_17 (sequence is synthesized)
cactgttcctgtaagcatatggagaacatattttgtagcaaatgaatggaatgaaattcagactgtgagaaaaattaattcactctttcaagtacttactgtcctcttctttttggaggt

SEQ ID NO: 517328 - DNA, 120 bp, Artificial Sequence
  ENSG00000164953_18 (sequence is synthesized)
tgtgggattcaagaacttagcattaatggactcatcttctagtctttctagaaacccacctagctacatagctccttatagctgcattttgagatatgcagtgtctgctgctctttggct

SEQ ID NO: 517329 - DNA, 120 bp, Artificial Sequence
  ENSG00000164953_19 (sequence is synthesized)
atgagtaatatatcagtgtttctgttatcccacaaatgttttggatattacattcatggtagatcagtacatgggcatgcagatactaatatggaagaaatgaatatgaaccttaaaaga

SEQ ID NO: 517330 - DNA, 120 bp, Artificial Sequence
  ENSG00000164953_20 (sequence is synthesized)
gaagcggaaaatttgtgtagccagagaggtttggtacccaacacagatggtcagacttttgagattgcaatttctaaccagatgagacaacattatgacagaattcatgagacactaata

SEQ ID NO: 517331 - DNA, 120 bp, Artificial Sequence
  ENSG00000164953_21 (sequence is synthesized)
aggaaaaatggtcctgctagactactgagttcatcagcaagtacttttgagcagagtataaaagcatatcatatgatgaataaatttcttggctccttcattgaccatgttcataaggaa

SEQ ID NO: 517332 - DNA, 120 bp, Artificial Sequence
  ENSG00000164953_22 (sequence is synthesized)
atggattactttataaaagataagttgcttcttgaaagaattcttggaatggaattcatggaaccaatggaaaaaagcatcttttacaatgatgaaggttattctttcagcagtgtcctg

SEQ ID NO: 517333 - DNA, 120 bp, Artificial Sequence
  ENSG00000164953_23 (sequence is synthesized)
tattatggaaatgaagctactcttcttatttttgatctgctgttcttctgtgttgtggatttggcttgccaaaattttattttagcatccttccttacatatctacaacaagagattttt

SEQ ID NO: 517334 - DNA, 120 bp, Artificial Sequence
  ENSG00000164953_24 (sequence is synthesized)
agatatatccgtaatacagtaggacaaaagaatttggcatccaaaacattggtggatcaaagatttttgatttaacttcctgaataaataacttaaagactcagtataatcatggccaaa

SEQ ID NO: 517335 - DNA, 120 bp, Artificial Sequence
  ENSG00000164953_25 (sequence is synthesized)
aaaaagtcatgatatcaggttagtttgccatattttttaaaacttataatgcagactattctgtttttgttttttatttgcagaaagatttatttttataacttgggaatatataacctg

SEQ ID NO: 517336 - DNA, 120 bp, Artificial Sequence
  ENSG00000164953_26 (sequence is synthesized)
atataatagaaaatactgttttcccattgtgtgtagtatttaatgcagtaaataataaattaatactgacagtgaggccaaaaaaaatctaaatgttgctttcagcataatactttttaa

SEQ ID NO: 517337 - DNA, 120 bp, Artificial Sequence
  ENSG00000164953_27 (sequence is synthesized)
tgctaattaaaacagtccccatcatttgtctctgtagattattttataaactgagagctgcctgaatcttctcacattgacaaagtaatttgattccaagtttaagactagttttcagtt

SEQ ID NO: 517338 - DNA, 120 bp, Artificial Sequence
  ENSG00000164953_28 (sequence is synthesized)
tgatattttcatgttttgtgtgcttatggttaaataaatgttgaaagatattttcaagtttacttagaaattttaaattgtattattgctgattcaatttgcatcattctaattgctcat

SEQ ID NO: 517339 - DNA, 120 bp, Artificial Sequence
  ENSG00000164953_29 (sequence is synthesized)
cctctttggcagtggattaattcactgttgggttaatatgcatctcatgaaatgatatcttttcattcctttgtatacctgtattaggtcagtatacgctttccatgaaatatatttgca

SEQ ID NO: 517340 - DNA, 120 bp, Artificial Sequence
  ENSG00000164953_30 (sequence is synthesized)
tttctaatatagtttacatttattaagttataacgtatgacatttttcccaatatcattttttatacattttaattacttaatgttttaagagttctcttccagagttttgcttttcaat

SEQ ID NO: 517341 - DNA, 82 bp, Artificial Sequence
  ENSG00000164953_31 (sequence is synthesized)
aatgttttaagagttctcttccagagttttgcttttcaattacgtttaaagactgtaaataacaaacagtaaggctgggcgc

SEQ ID NO: 517342 - DNA, 78 bp, Artificial Sequence
  ENSG00000164953_32 (sequence is synthesized)
aaaattagttggatgtggtagcttgaaaccaggaggtggaggctgtagtgagccagatagcaccactgcactccagcc

SEQ ID NO: 517343 - DNA, 120 bp, Artificial Sequence
  ENSG00000164953_33 (sequence is synthesized)
gaggctgtagtgagccagatagcaccactgcactccagccaggatgacagagcaagaccctgtctcagaaaaaacaaaaacaaaacactgtaaatgtatcatgtttctcactgctttcta

SEQ ID NO: 517344 - DNA, 120 bp, Artificial Sequence
  ENSG00000164953_34 (sequence is synthesized)
cactgctttctatgttaatgctgtgtaaatacttaaaatggaatactgtataaatattatttatattttctcagatgaaaatatatactaaaacatttggtatttctgttttctgtttca

SEQ ID NO: 517345 - DNA, 120 bp, Artificial Sequence
  ENSG00000164953_35 (sequence is synthesized)
tgatggagtaccatttaggaatataacattattggggcagaggtcccagccattgccaaagttgaatcttttacatttccctgaatcttgaggatgactgaaaaggaagtctttgaaact

SEQ ID NO: 517346 - DNA, 120 bp, Artificial Sequence
  ENSG00000164953_36 (sequence is synthesized)
gcagtttctgaaggatcacagtacaggaatgcctttataaaagctgcagagataaatacatgtacttatatggcatggatatttaaaaccactcactcagaagcatatgaaagaaattca

SEQ ID NO: 517347 - DNA, 120 bp, Artificial Sequence
  ENSG00000164953_37 (sequence is synthesized)
accatcattcaacatagaagaagttaattttagtgcaaaagtttttaagtattaaatttcacaataaaggatcaattggcttacttgctgataaattaaaacagaaaacatttaaaatca

SEQ ID NO: 517348 - DNA, 120 bp, Artificial Sequence
  ENSG00000164953_38 (sequence is synthesized)
gtgctctcagaaatcatgagaacttaccagagaggggaagagaagaatatttggtaaaacaatgcccattttattccagaaagtatttgagatgaacgtatggagtggttagtcattgac

SEQ ID NO: 517349 - DNA, 120 bp, Artificial Sequence
  ENSG00000164953_39 (sequence is synthesized)
tacatggctggaactggcagatgaggctaaaaagttaattttggcccatattgtgaaagaccttgtggatcaggaatttatattgcaatgaggagttgttcatttttaacaaggggagtg

SEQ ID NO: 517350 - DNA, 120 bp, Artificial Sequence
  ENSG00000164953_40 (sequence is synthesized)
acacaatccaatttacatcttagaaaactaactctggtggtagtgtggaggagagattagaggggaggattcccaactaagagaaaattaggaagcagttcaattttcttagatagtgaa

SEQ ID NO: 517351 - DNA, 120 bp, Artificial Sequence
  ENSG00000164953_41 (sequence is synthesized)
accagaggcaagatgcccgaggtgttacagaagatggctggaactgcatttcttgccctagtgacttaactgccgaaggaaaatgtcactgtcccattggccatattttaggctggtctt

SEQ ID NO: 517352 - DNA, 120 bp, Artificial Sequence
  ENSG00000164953_42 (sequence is synthesized)
agcctcccaaagtgctgggatacaggcttgagccaccgcacctgaccttggcatgtactttagaaggaatgtacaacataattgaagaaattttggaaagagacattaatggaacattgt

SEQ ID NO: 517353 - DNA, 83 bp, Artificial Sequence
  ENSG00000164953_43 (sequence is synthesized)
agatgccaacagccagtctgtgaaggtttctttctcagtcacatatgaaatggatcatggagaagcacatgtccagacagata

SEQ ID NO: 517354 - DNA, 120 bp, Artificial Sequence
  ENSG00000164953_44 (sequence is synthesized)
aatttggcatccaaaacattggtggatcaaagatttttgatttaacttcctgaataaataacttaaagactcagtataatcatggccaaaaaaaagtcatgatatcaggaatataacatt

SEQ ID NO: 517355 - DNA, 71 bp, Artificial Sequence
  ENSG00000164953_45 (sequence is synthesized)
tcgagagatacacatggccaggattagtttcttagaatgtgcttttaacattgagtaaactatgaatgctg

SEQ ID NO: 517356 - DNA, 120 bp, Artificial Sequence
  ENSG00000164953_46 (sequence is synthesized)
tttcttagaatgtgcttttaacattgagtaaactatgaatgctggaatttttatttttagtttaaaatatctgccccaaaatatatttttttcttgctaataaattaataatatgatatt

SEQ ID NO: 517357 - DNA, 120 bp, Artificial Sequence
  ENSG00000164953_47 (sequence is synthesized)
agttaaatatctttatttttcaaaatataatttaatgtttaatgtttccccacagactttaaaattactatgctaattttatttttactagagtaagttttgggagatcagcgaaatttc

SEQ ID NO: 517358 - DNA, 120 bp, Artificial Sequence
  ENSG00000164953_48 (sequence is synthesized)
atgcaaacttggagaaaacagaaatgtatttcttttaaaatctgaaatccaaaaaccacaaagctgtaaaaatttaagtttttgtttttactcgtagaataactcggttatgaagaaaat

SEQ ID NO: 517359 - DNA, 120 bp, Artificial Sequence
  ENSG00000164953_49 (sequence is synthesized)
tagatgaataaggcatatatagagcagtctgggatgtgtgcaatttgggatgtgtatattcttttgactgatgcaagtggagttgtcttagacctaccatgtcaacagtttatatgatta

SEQ ID NO: 517360 - DNA, 120 bp, Artificial Sequence
  ENSG00000164953_50 (sequence is synthesized)
atgttcataatgatatctaaggtgtaattatttcatgaaataccaattgcattaatagattaaataatgtctgtttctgttttgttagtaatttcattgtatcgtaatttaaaaaaaatt

SEQ ID NO: 517361 - DNA, 120 bp, Artificial Sequence
  ENSG00000164953_51 (sequence is synthesized)
atataattctcaacataaatatatttttcaatcatgttggataattaaaagtctgtgtaacagttgtgacatttacagtaatgtttcttctcattgtcatataaaaaatattaattctgg

SEQ ID NO: 517362 - DNA, 120 bp, Artificial Sequence
  ENSG00000164953_52 (sequence is synthesized)
aattctgggaatttaatgtgaagttatcaattgtcccaatttatagctatctgtattacttgtaagtctgattaccactttttatattaccatttattttatatctttataatagattat

SEQ ID NO: 517363 - DNA, 120 bp, Artificial Sequence
  ENSG00000164953_53 (sequence is synthesized)
accatttattttatatctttgcaaatattgatcctagctgaattacccatgataaaaagctgctaataaaaagtggtctcgcagcagatttctttttcagtgacattgtttaagttattg

SEQ ID NO: 517364 - DNA, 64 bp, Artificial Sequence
  ENSG00000164953_54 (sequence is synthesized)
gcagcagatttctttttcagtgacattgtttaagttattgtaatttttaaattgtcctcctggt

SEQ ID NO: 517365 - DNA, 89 bp, Artificial Sequence
  ENSG00000164953_55 (sequence is synthesized)
agtagtgataaatcttcattcttgtttttgtttttatttgaaaagggcactaatttaaatagttaagtgattacttaatatttttgcag

SEQ ID NO: 517366 - DNA, 120 bp, Artificial Sequence
  ENSG00000164953_56 (sequence is synthesized)
cagtcactgtgtccagcccttaatagtgtttataaaaattatttttgtacaaattaatgatacttaaaacatcagcaggcattgagaagaaaatacaaagttttgtctgagttttttaaa

SEQ ID NO: 517367 - DNA, 120 bp, Artificial Sequence
  ENSG00000164953_57 (sequence is synthesized)
actcttaatattgtaggattagatggttatttccttaacataacatgacaaaatatgtctcaactcaaaagccaacttgatacttaatagggaaaaagcgtaagcattcctgttaatgtc

SEQ ID NO: 517368 - DNA, 120 bp, Artificial Sequence
  ENSG00000164953_58 (sequence is synthesized)
aggacctggaaaaggatgcaaactatgcacttaagtaagagaaaaaaaatatttatcattggaaaagaaaaggtaggccgttgttaatcctagcactttggaaggctaaggcaggtgtat

SEQ ID NO: 517369 - DNA, 120 bp, Artificial Sequence
  ENSG00000164953_59 (sequence is synthesized)
aggtgtattgcttgagctcaagagtttgagaccagtctgggcaacatggtgaaaccgcatctctacaaataaaaaaaaaaattatttggttacggtggcatgcacctgtagtcccagcta

SEQ ID NO: 517370 - DNA, 76 bp, Artificial Sequence
  ENSG00000164953_60 (sequence is synthesized)
cctgtagtcccagctactcgagaggcaaaggtgggaagatcgcttgagcctggaaggtcaaggctaggtaagaccc

SEQ ID NO: 517371 - DNA, 120 bp, Artificial Sequence
  ENSG00000164961_0 (sequence is synthesized)
gcttcggtcatgtgaccgcctggggagtcaggggcggaagtcggggtctgacccgctccaggtccgggactgcggatagaagaggaccgccgccttgagggaggggtggaaactgggtgc

SEQ ID NO: 517372 - DNA, 120 bp, Artificial Sequence
  ENSG00000164961_1 (sequence is synthesized)
cggctccgcgcgcgacctccggccctgcgcgtgcgccgtggcgcggcccggctgacaggttctttaatggaggagccaatctctctgcacacctggtttcatctaataatatacagacac

SEQ ID NO: 517373 - DNA, 120 bp, Artificial Sequence
  ENSG00000164961_2 (sequence is synthesized)
cagctctgaggccagttaatcatccccagtgtccaggcacagagtagtcggtccgcctcacaatgttggactttctagccgagaacaacctctgtggccaagcaatcctaaggattgttt

SEQ ID NO: 517374 - DNA, 120 bp, Artificial Sequence
  ENSG00000164961_3 (sequence is synthesized)
cctgtggtaatgccatcattgctgaacttttgagactctctgagtttattcctgctgtgttcaggttaaaagacagagctgatcaacagaaatatggagatatcatatttgatttcagct

SEQ ID NO: 517375 - DNA, 120 bp, Artificial Sequence
  ENSG00000164961_4 (sequence is synthesized)
attttaagggtccagaattatgggaaagcaaactggatgctaagccagagctacaggatttagatgaagaatttcgtgaaaacaacatagaaattgtgaccagattttatttagcatttc

SEQ ID NO: 517376 - DNA, 120 bp, Artificial Sequence
  ENSG00000164961_5 (sequence is synthesized)
aaagtgtacataaatatattgtagacttaaacagatatctagatgatctcaatgaaggggtttatattcagcaaaccttagaaactgtgcttctcaatgaagatggaaaacaacttctat

SEQ ID NO: 517377 - DNA, 120 bp, Artificial Sequence
  ENSG00000164961_6 (sequence is synthesized)
gtgaagcactgtacttatatggagttatgctactggtcattgaccaaaagattgaaggagaagtcagagagaggatgctggtttcttactaccgatacagtgctgctcgatcttctgctg

SEQ ID NO: 517378 - DNA, 120 bp, Artificial Sequence
  ENSG00000164961_7 (sequence is synthesized)
attcaaatatggacgatatttgtaagctgcttcgaagtacaggttattctagccaaccaggtgccaaaagaccatccaactatcccgagagctatttccagagagtgcctatcaacgaat

SEQ ID NO: 517379 - DNA, 120 bp, Artificial Sequence
  ENSG00000164961_8 (sequence is synthesized)
ccttcatcagtatggtcattggtcgactgagatctgatgatatttacaaccaggtctcagcgtatcctttgccggagcatcgcagcacagccctggcaaaccaagctgccatgctgtacg

SEQ ID NO: 517380 - DNA, 120 bp, Artificial Sequence
  ENSG00000164961_9 (sequence is synthesized)
tgattctctactttgagccttccatccttcacacccatcaagcaaaaatgagagagatagtggataaatactttccagataattgggtaattagtatttacatggggatcacagttaatc

SEQ ID NO: 517381 - DNA, 120 bp, Artificial Sequence
  ENSG00000164961_10 (sequence is synthesized)
tagtagatgcttgggaaccttacaaagctgcaaaaactgctttaaataataccctggacctttcaaatgtcagagaacaggcaagcagatatgctactgtcagtgaaagagtgcatgctc

SEQ ID NO: 517382 - DNA, 120 bp, Artificial Sequence
  ENSG00000164961_11 (sequence is synthesized)
aagtgcagcaatttctaaaagaaggttatttaagggaggagatggttctggacaatatcccaaagcttctgaactgcctgagagactgcaatgttgccatccgatggctgatgcttcata

SEQ ID NO: 517383 - DNA, 120 bp, Artificial Sequence
  ENSG00000164961_12 (sequence is synthesized)
cagcagactcagcctgtgacccaaacaacaaacgccttcgtcaaatcaaggaccagattctaacagactctcggtacaatcccaggatcctcttccagctgctgttagatactgcacaat

SEQ ID NO: 517384 - DNA, 120 bp, Artificial Sequence
  ENSG00000164961_13 (sequence is synthesized)
ttgagtttatactcaaagagatgttcaagcaaatgctttcagaaaagcaaaccaaatgggagcattacaagaaagagggttcggagcggatgactgagcttgctgatgtcttttcaggag

SEQ ID NO: 517385 - DNA, 120 bp, Artificial Sequence
  ENSG00000164961_14 (sequence is synthesized)
tgaaacccctaaccagagtggagaaaaatgaaaaccttcaagcttggttcagagagatctcaaaacaaatattgtctttaaattatgatgattctactgctgcgggcagaaaaactgtac

SEQ ID NO: 517386 - DNA, 120 bp, Artificial Sequence
  ENSG00000164961_15 (sequence is synthesized)
aactgatacaagctttggaagaggttcaagaattccaccagttggaatccaatctgcaagtatgtcagtttcttgccgatactcgaaagtttcttcatcaaatgatcagaaccattaaca

SEQ ID NO: 517387 - DNA, 120 bp, Artificial Sequence
  ENSG00000164961_16 (sequence is synthesized)
ttaaagaggaggttctgatcacaatgcagatcgttggggacctttctttcgcttggcagttgattgacagtttcacatccatcatgcaagaaagcataagggtaaatccatccatggtta

SEQ ID NO: 517388 - DNA, 120 bp, Artificial Sequence
  ENSG00000164961_17 (sequence is synthesized)
attaatcaggcaaatagccccgacctgctcagcgtgtcacagtactattctggagagttggtatcctatgtgagaaaagttttgcagatcatcccagaaagcatgtttacatctcttcta

SEQ ID NO: 517389 - DNA, 120 bp, Artificial Sequence
  ENSG00000164961_18 (sequence is synthesized)
aagatcataaagcttcagacccacgacattattgaagtgcctacccgcctggacaaagacaagctgagggactatgctcagctaggcccacgatacgaggttgccaagcttactcatgct

SEQ ID NO: 517390 - DNA, 120 bp, Artificial Sequence
  ENSG00000164961_19 (sequence is synthesized)
atttccatttttactgaaggcatcttaatgatgaaaacgactttggttggcatcatcaaggtggatccaaagcagttgctggaagatggaataaggaaagagcttgtgaagcgcgttgcc

SEQ ID NO: 517391 - DNA, 120 bp, Artificial Sequence
  ENSG00000164961_20 (sequence is synthesized)
tttgccctgcataggggactgatattcaaccctcgagccaagccaagtgaattgatgcccaagctgaaagagttgggagcgaccatggatggattccatcgttcttttgaatacatacag

SEQ ID NO: 517392 - DNA, 120 bp, Artificial Sequence
  ENSG00000164961_21 (sequence is synthesized)
gactatgtcaacatttatggtctgaagatttggcaggaagaagtatctcgtatcataaattacaacgtggagcaagagtgtaataactttctaagaacgaagattcaagattggcaaagc

SEQ ID NO: 517393 - DNA, 120 bp, Artificial Sequence
  ENSG00000164961_22 (sequence is synthesized)
atgtaccagtccactcatattccaatacccaagtttacccctgtggatgagtctgtaacgtttattggtcgactctgcagagaaatcctgcggatcacagacccaaaaatgacatgtcac

SEQ ID NO: 517394 - DNA, 120 bp, Artificial Sequence
  ENSG00000164961_23 (sequence is synthesized)
atagaccagctgaacacttggtatgatatgaaaactcatcaggaagtgaccagcagccgcctcttctcagaaatccagaccaccttgggaacctttggtctaaatggcttagacaggctt

SEQ ID NO: 517395 - DNA, 120 bp, Artificial Sequence
  ENSG00000164961_24 (sequence is synthesized)
ctgtgctttatgattgtaaaagagttacagaatttcctcagtatgtttcagaaaattatcctgagagacagaactgttcaggacactttaaaaaccctcatgaatgctgtcagtccccta

SEQ ID NO: 517396 - DNA, 120 bp, Artificial Sequence
  ENSG00000164961_25 (sequence is synthesized)
aaaagtattgtcgcaaattcaaataaaatttatttttccgccattgccaaaacacagaagatttggactgcgtatctcgaggctataatgaaggttgggcagatgcagattctgagacaa

SEQ ID NO: 517397 - DNA, 120 bp, Artificial Sequence
  ENSG00000164961_26 (sequence is synthesized)
cagattgccaatgaattaaattattcttgtcggtttgattctaaacatctggcagctgctctggagaatctcaataaggctctcctagcagacattgaagcccactatcaggacccttca

SEQ ID NO: 517398 - DNA, 120 bp, Artificial Sequence
  ENSG00000164961_27 (sequence is synthesized)
cttccttaccccaaagaagataacacacttttatatgaaatcacagcctatctggaggcagctggcattcacaacccactgaataagatatacataacaacaaagcgcttaccctatttt

SEQ ID NO: 517399 - DNA, 120 bp, Artificial Sequence
  ENSG00000164961_28 (sequence is synthesized)
ccaattgtaaactttctatttttgatcgctcagttgccaaaacttcaatacaacaaaaatctgggaatggtctgccgaaaaccgaccgacccggttgattggccaccacttgtcctggga

SEQ ID NO: 517400 - DNA, 120 bp, Artificial Sequence
  ENSG00000164961_29 (sequence is synthesized)
ctgctcactctgctgaagcagttccattcccggtacaccgagcagttcctggcgctgattggccagtttatctgctccacggtggagcagtgtacaagccagaagatacctgaaattcct

SEQ ID NO: 517401 - DNA, 120 bp, Artificial Sequence
  ENSG00000164961_30 (sequence is synthesized)
gcagatgttgtgggtgcccttctgttcctggaggattatgttcggtacacaaagctacccaggagggttgctgaagcacatgtgcctaatttcatttttgatgagttcagaacagtgctg

SEQ ID NO: 517402 - DNA, 120 bp, Artificial Sequence
  ENSG00000164961_31 (sequence is synthesized)
taactgtttttcctacttcttcaatggaaggattgtccttagatcttcccaccatcacaaatgaatttgaagatgaaaagaaactcagttgctcatacaactgcattttttctgtctatt

SEQ ID NO: 517403 - DNA, 120 bp, Artificial Sequence
  ENSG00000164961_32 (sequence is synthesized)
atgggaaacatcagacgttctgagtaagatatatctcatggcattagttaatataactgatattgtttaaatcatggtattacatgcaatttatatcagataaaagcagaacacattttt

SEQ ID NO: 517404 - DNA, 120 bp, Artificial Sequence
  ENSG00000164961_33 (sequence is synthesized)
gtactgcctctcttaaatgctgaatgtaactgttatgtataaatccatttagttttatgttctaaagaactatttgtgcaactccagattttcagtaaaatagtattactagtacccaaa

SEQ ID NO: 517405 - DNA, 120 bp, Artificial Sequence
  ENSG00000164961_34 (sequence is synthesized)
tttttttctcatttacatttatctgtatctttaaaaattgctacaataatatatgttaattgagtaattcaaaagaaccagtaatgataattacaaaatttagtaaccgttttattggtt

SEQ ID NO: 517406 - DNA, 120 bp, Artificial Sequence
  ENSG00000164961_35 (sequence is synthesized)
ttgaatccttcagacccctggaatgccctaccaatcctgtggctaattcaaaatatggcccagaattgtcattccctccaaaatatcatctgccagcgagaatatgggccccaaacattt

SEQ ID NO: 517407 - DNA, 120 bp, Artificial Sequence
  ENSG00000164961_36 (sequence is synthesized)
tgaccttcacagcgttggtatttaatgaatgttgctgaaggcaagtacttcatatggtgttgcaacttgttcccttgcaggaatggtctgccgaaaaccgaccgacccggttgattggcc

SEQ ID NO: 517408 - DNA, 120 bp, Artificial Sequence
  ENSG00000164961_37 (sequence is synthesized)
tagacttaaacaggtattgatctatttaggaatagcttattctggtagtaaatagtggagagggaaaaggacacatagcaacgtgtaaatctctctgagttactacaaaatttcctaatt

SEQ ID NO: 517409 - DNA, 120 bp, Artificial Sequence
  ENSG00000164961_38 (sequence is synthesized)
tagtttatactgtatatagttgtcttttcctacctgtggcactggtcatcttaagaattttgaagttttactataatgtcctgctcttatgaggtgttgtaataaacttagtttaactaa

SEQ ID NO: 517410 - DNA, 120 bp, Artificial Sequence
  ENSG00000164967_0 (sequence is synthesized)
gcgcgccatcttggctccggatcgtgcgtgaggcggcttcggtgagagccggaaccgggcgggcagaggggcgctcgtagggttgggggacgcctgtggcttggctgcagcggccggcaa

SEQ ID NO: 517411 - DNA, 120 bp, Artificial Sequence
  ENSG00000164967_1 (sequence is synthesized)
gaccctggaagagaccgtggctatggaaacggccaaggctgtcttggaatgtcctgagcagccctccgagtcgagcctctgcccccgagtttctgagtgacctgggttgatatagattga

SEQ ID NO: 517412 - DNA, 120 bp, Artificial Sequence
  ENSG00000164967_2 (sequence is synthesized)
ccttgtgggcagcgagagtcacagacaagacagcaagcaggatggagcactaccggaaagctggctctgtagagctcccagcgccttccccaatgccccagctacctcctgatacccttg

SEQ ID NO: 517413 - DNA, 120 bp, Artificial Sequence
  ENSG00000164967_3 (sequence is synthesized)
agatgcgggtccgagatggcagcaaaattcgcaacctgctggggttggctctgggtcggttggagggcggcagtgctcggcatgtagtgttctcaggttctggcagggctgcaggaaagg

SEQ ID NO: 517414 - DNA, 120 bp, Artificial Sequence
  ENSG00000164967_4 (sequence is synthesized)
ctgagattgtcaagcggcgggtcccaggcctgcaccagctcaccaagctacgtttccttcagactgaggacagctgggtcccagcctcacctgacacagggctagaccccctcacagtgc

SEQ ID NO: 517415 - DNA, 120 bp, Artificial Sequence
  ENSG00000164967_5 (sequence is synthesized)
gccgccatgtgcctgcagtgtgggtgctgctcagccgggaccccctggaccccaatgagtgtggttaccaacccccaggagcaccccctggcctgggttccatgcccagctccagctgtg

SEQ ID NO: 517416 - DNA, 120 bp, Artificial Sequence
  ENSG00000164967_6 (sequence is synthesized)
gccctcgttcccgaagaagggctcgagacacccgatcgtgaagacctgctgagccagcctgttctccgggcctgaatgtctggggtgcttgtgccttttctgagaagcgttgtgactgct

SEQ ID NO: 517417 - DNA, 120 bp, Artificial Sequence
  ENSG00000164967_7 (sequence is synthesized)
caacatccccatcaaggtttgagtccacaaaagtggacctccctatcatgcttccccttccctctagcatgtgggaagggactgctgtgaagaatgacagatgtggggcctctgccaagt

SEQ ID NO: 517418 - DNA, 120 bp, Artificial Sequence
  ENSG00000164967_8 (sequence is synthesized)
tctgcattgctaaataagggcttcctctgccttctacctacagtgcatttgaactgccttctgaaagaggtccagggagggatttaggaaataaagtttctacctatttgatgagcctct

SEQ ID NO: 517419 - DNA, 120 bp, Artificial Sequence
  ENSG00000164970_0 (sequence is synthesized)
gagtcaccgcagtggctgagctgctgacaggaggcggcagcggagtaggaggcgaggcaagacctgcggctcggcccggccacagccgcggtagtgctaggcaagcccacggagtcacgc

SEQ ID NO: 517420 - DNA, 120 bp, Artificial Sequence
  ENSG00000164970_1 (sequence is synthesized)
agtcacgccggcctcagccagtctgcgaacctctcgcccccgcccacccctgcatccgcccggcccctgcccgcccgagtggtccggggaggcctagtctgcaccacccgccgggctcct

SEQ ID NO: 517421 - DNA, 120 bp, Artificial Sequence
  ENSG00000164970_2 (sequence is synthesized)
cgccccgcgcggtcctgtcggcgtccgcggccgcgcccggcccctggcccgctcgcccgccggcaccatgatggaggagatcgaccggttccaggtgcccaccgcgcactcggagatgca

SEQ ID NO: 517422 - DNA, 120 bp, Artificial Sequence
  ENSG00000164970_3 (sequence is synthesized)
gccgctggacccagccgccgcctccatctctgacggagactgtgacgcccgggaggagaagcagcgggagctggcccggaagggctccctgaagaatggcagcatgggtagccctgtcaa

SEQ ID NO: 517423 - DNA, 120 bp, Artificial Sequence
  ENSG00000164970_4 (sequence is synthesized)
ccagcaacccaagaagaacaatgtcatggcccgaacaaggctggtcgtccccaataaaggctactcctcacttgaccagagccctgatgagaagccactggtagcccttgacacggacag

SEQ ID NO: 517424 - DNA, 120 bp, Artificial Sequence
  ENSG00000164970_5 (sequence is synthesized)
cgatgatgactttgacatgtctagatactcctcctccggctactcctctgctgagcagatcaaccaagatttgaacatccagctgctgaaggacggctaccggttagatgagatccccga

SEQ ID NO: 517425 - DNA, 120 bp, Artificial Sequence
  ENSG00000164970_6 (sequence is synthesized)
cgacgaggacctagacctcatcccccccaagtccgtgaaccccacgtgcatgtgctgccaggccacgtcctccaccgcctgccacattcagtagcgggcggggccactgcggtcgccggg

SEQ ID NO: 517426 - DNA, 120 bp, Artificial Sequence
  ENSG00000164970_7 (sequence is synthesized)
gcggggccgccaagggccgggtaggacgggcagaggccgaccccttcccagctcgtctgcctgcccccggccccgcgcccctacagccgccaacctcgtataacagtcattgcttcctcc

SEQ ID NO: 517427 - DNA, 120 bp, Artificial Sequence
  ENSG00000164970_8 (sequence is synthesized)
tatggtaggacgtgtacctctgtgtgttcatggagctggagaaaccaaaactgggtctctctccacccgggagctgaggaggggtgggggccgtttgttcagttacctgggggaacctca

SEQ ID NO: 517428 - DNA, 120 bp, Artificial Sequence
  ENSG00000164970_9 (sequence is synthesized)
cccagcaccctgccccgcttcccagggctggccaagagagaagactggacggcagggaggtcaacattaacgagtggggggatcacaaagccaggggcttggccccaccccagcgaagcc

SEQ ID NO: 517429 - DNA, 120 bp, Artificial Sequence
  ENSG00000164970_10 (sequence is synthesized)
atgaactcccaagccccggcctcagcctaaccaggaaaggggctcggagggagaaaggcccagggcagtggggacgggtcccagcacctcggagcccccttcacacgccccctaccggcc

SEQ ID NO: 517430 - DNA, 120 bp, Artificial Sequence
  ENSG00000164970_11 (sequence is synthesized)
catgtttctatttgcatttccccctcctcagatgggaagcctggcaaagctgcccaaccgggtagtgcccctcacccatcggatcactgccttcttcctcctcttgccccattcacccgc

SEQ ID NO: 517431 - DNA, 120 bp, Artificial Sequence
  ENSG00000164970_12 (sequence is synthesized)
ttccttgcactctgggagtggggcagggtaaggtgggccttacagacaggctgaggtttgggtggtgtgatctgtcctaattggcccctcaccaatgcatctatctgtctgccaccagcc

SEQ ID NO: 517432 - DNA, 120 bp, Artificial Sequence
  ENSG00000164970_13 (sequence is synthesized)
caccccaccctgcccccaccctcacccacgcttctgctcattggtctcaatcccagcctggaagcagggagtaaggctggactccaatggcccattcccctcaccccagcccaagacgtg

SEQ ID NO: 517433 - DNA, 120 bp, Artificial Sequence
  ENSG00000164970_14 (sequence is synthesized)
tgtgtgtgtatctctgaggctgtcagggggtgggtgggtgtgtgtctctgttggacctgtctctcctcagtctattcctgtcatagatgtgggtgtccctggtagggaagtgcctgtgtg

SEQ ID NO: 517434 - DNA, 120 bp, Artificial Sequence
  ENSG00000164970_15 (sequence is synthesized)
gtctgtttacagtgcagaaggcggctcagcagtgcaatgggctgacagccttggaccgggagtcagaagcctgggttctggttgtagctctggcccctccctgtgatcttcaacaagcca

SEQ ID NO: 517435 - DNA, 120 bp, Artificial Sequence
  ENSG00000164970_16 (sequence is synthesized)
cttgctttctctcgtcttcagtttcctcaactagaaaatgaacagcagctgaaattatgttgaagatccttttatacctgaaagagtttcttcatagaaatttctgtggtggggaggggg

SEQ ID NO: 517436 - DNA, 120 bp, Artificial Sequence
  ENSG00000164970_17 (sequence is synthesized)
caatctctgtgtgtctcagtatacctaaaggttggggtggggcggagttgtgtgtctctgtagaaaggcgaaggggcagttcctatcaggactgtgtatgtctgagcacatgtggctctg

SEQ ID NO: 517437 - DNA, 120 bp, Artificial Sequence
  ENSG00000164970_18 (sequence is synthesized)
tttgggattacgtgtttgtctgtgaatgtgtgtgtgtgttggagggttgtctattgtgtgtggctgtatagggtgtctgtagatcaagatgtgtatacagctgcttctgctattgctggt

SEQ ID NO: 517438 - DNA, 120 bp, Artificial Sequence
  ENSG00000164970_19 (sequence is synthesized)
ttgggggaggggactggaaagctgagactgaaaatcaagagggaagaggtgaggaaggcccacccctggggctgggcagtgtagacctgccaccgtgtgaagaaaaatgaaagcacagat

SEQ ID NO: 517439 - DNA, 120 bp, Artificial Sequence
  ENSG00000164970_20 (sequence is synthesized)
agcctaagactgcacaggcctgtgcccacataccttatagcacaggcccaggtggatcatctcatgctaacaccccacatgtgctggtggatccactcccatggatccactcacatgctg

SEQ ID NO: 517440 - DNA, 120 bp, Artificial Sequence
  ENSG00000164970_21 (sequence is synthesized)
caggcatgcagtagactcacccacagcccactctctggacaccaatcctgggaggtgggagctggaatggggagcaatgagaggagggagtgagactgttggcttaggaagggtggtacc

SEQ ID NO: 517441 - DNA, 120 bp, Artificial Sequence
  ENSG00000164970_22 (sequence is synthesized)
tctccctgcatcatacccaggaactgccagctccaaaatattggggtacagctcaccaccccccactccgccaacccattcctacctcctctagtgcagggacccaagttagatgatgag

SEQ ID NO: 517442 - DNA, 120 bp, Artificial Sequence
  ENSG00000164970_23 (sequence is synthesized)
aaaatgccaaacaaagggaggcaaggacagagaaggtacctgcaggacccacaaggcccatactggcccccatctgaacccacctctcccacccagatcaacatccccccaacccctgtg

SEQ ID NO: 517443 - DNA, 120 bp, Artificial Sequence
  ENSG00000164970_24 (sequence is synthesized)
cccccatcatctggaccccagagccagccctcccactaccaccaccaccaccccggggctccttggctcacctttctagaacatgggtacctcctctttttgggggctcatttagactgc

SEQ ID NO: 517444 - DNA, 120 bp, Artificial Sequence
  ENSG00000164970_25 (sequence is synthesized)
tgcctttgctgctgacttgcagtgtgactcgggcccattgttcaatctctgtggccctgagacaccagggaaaatctccccccccacaggacatactagttccctggcaggcaagggctt

SEQ ID NO: 517445 - DNA, 120 bp, Artificial Sequence
  ENSG00000164970_26 (sequence is synthesized)
ccaactgaggcagtgcatgtgtggcagagagaggcaggaagctggcagtggcagcttctgtgtctagggaggggtgtggctccctccttccctgtctgggaggttggagggaagaatcta

SEQ ID NO: 517446 - DNA, 120 bp, Artificial Sequence
  ENSG00000164970_27 (sequence is synthesized)
ggccttagcttgccctcctgccacccttccccttgtagatactgccttaacactccctcctctctcagctgtggctgccacccagccaggtttctccgtgctcactaatttatttccagg

SEQ ID NO: 517447 - DNA, 120 bp, Artificial Sequence
  ENSG00000164970_28 (sequence is synthesized)
aaggtgtgtggaagacatgagccgtgtataatattttttttaacattttcattgcagtattgaccatcatccttggttgtgtatcgtgtaacacaaataatgatattaaaagcatcaaac

SEQ ID NO: 517448 - DNA, 120 bp, Artificial Sequence
  ENSG00000164970_29 (sequence is synthesized)
cgcctccatctctgacggagactgtgacgcccgggagggtgagtcagtagccatgaattacaaaccatccccgctccaagtgaagctggagaagcagcgggagctggcccggaagggctc

SEQ ID NO: 517449 - DNA, 120 bp, Artificial Sequence
  ENSG00000164970_30 (sequence is synthesized)
ggggtagctgggcagcccaaaggaacctgtatagcacaagtgggctgtacaggccacacctgctatattgtcagaattgggatattcttcagccagaatctctccaagggtgaattctcc

SEQ ID NO: 517450 - DNA, 120 bp, Artificial Sequence
  ENSG00000164972_0 (sequence is synthesized)
gggagcaggaaggctgttggggaaggaagctgagagatcctctgcaggaggggattatagcagctaagggcacctgccaggctggaggtgtggcctgtctaggggaagggtggtcactga

SEQ ID NO: 517451 - DNA, 120 bp, Artificial Sequence
  ENSG00000164972_1 (sequence is synthesized)
tgtccagcaggagcccttgacaggtagagcccaccacggcatctccaagaccacaccatgttcctgttctcccgtaagaccaggacccctatcagtacctacagtgactcctacagggct

SEQ ID NO: 517452 - DNA, 120 bp, Artificial Sequence
  ENSG00000164972_2 (sequence is synthesized)
cccacctccatcaaggaggtctataaggacccacccctgtgtgcctgggaagccaacaagtttctgactccgggtctgactcataccatggagcgacatgtggatcccgaagccctgcag

SEQ ID NO: 517453 - DNA, 120 bp, Artificial Sequence
  ENSG00000164972_3 (sequence is synthesized)
aagatggccaaatgtgctgtacaggactacacttatagggggtccatatcaggccacccctacttgcctgagaagtactggctttctcaagaggaagcagacaaatgcagcccaaactac

SEQ ID NO: 517454 - DNA, 120 bp, Artificial Sequence
  ENSG00000164972_4 (sequence is synthesized)
gctgctgcaacaagtataccacctaccttcctcggctgcctaaggaggccaggatggagacagcagttcgaggaatgcccttggaatgccctcctaggccggagcggctcaatgcctacg

SEQ ID NO: 517455 - DNA, 120 bp, Artificial Sequence
  ENSG00000164972_5 (sequence is synthesized)
agcgcgaagtgatggtgaacatgctgaactcactgtcgcggaaccagcagctgccgcggatcacgccccgatgcgggtgcgtggacccgctgcccggccgcctgcccttccatggttacg

SEQ ID NO: 517456 - DNA, 120 bp, Artificial Sequence
  ENSG00000164972_6 (sequence is synthesized)
aaagtgcttgctcgggccgccactactgtctgcgcgggatggactactacgccagcggggcgccctgcaccgaccgccgcctgcggccttggtgccgggagcaaccgactatgtgtacct

SEQ ID NO: 517457 - DNA, 120 bp, Artificial Sequence
  ENSG00000164972_7 (sequence is synthesized)
ccctacgagcaccggcccggaatgcagtgtgctgttacaactcccccgccgtcatactacccatatccgaaccttagatgggacacaagtcacttcaagaagtctggtggtccccagaga

SEQ ID NO: 517458 - DNA, 120 bp, Artificial Sequence
  ENSG00000164972_8 (sequence is synthesized)
aacaactatgttatccatcctgagtttgtgtctgagacctatcccgactatcgttgctggtagagcctgggcttgctgtgccaagggggcagagcaataaataaactcttcaaccccaaa

SEQ ID NO: 517459 - DNA, 120 bp, Artificial Sequence
  ENSG00000164972_9 (sequence is synthesized)
aacaagtataccacctaccttcctcggctgcctaaggtatctgttgcacccagcacagacgtctggggactgggacacgcataccccaccacctcccaaactacagtgactgatatttca

SEQ ID NO: 517460 - DNA, 120 bp, Artificial Sequence
  ENSG00000164972_10 (sequence is synthesized)
tgacagccgccaacacagagccctggagaggtggggagctgctgaagggcgggagaagttgcggcgtggcgataggtctgggtgttctgggaggacccctaaaagggagcagctctgcca

SEQ ID NO: 517461 - DNA, 120 bp, Artificial Sequence
  ENSG00000164975_0 (sequence is synthesized)
gcggtgccgcgccctggggcgggcctgcccatggcctgccgggaaatgtagtttctgatgccctgcccgcgccgcctcgccgctcgccggccgggcgccccaagcaactacaacttccat

SEQ ID NO: 517462 - DNA, 120 bp, Artificial Sequence
  ENSG00000164975_1 (sequence is synthesized)
cacgctctgcgaggccttgatctgcaggcttttgcaggggaaggagtggggcgaacatggctgaaggaagccgaggtggccctacgtgtagcggggtgggtggcaggcaggacccagtct

SEQ ID NO: 517463 - DNA, 120 bp, Artificial Sequence
  ENSG00000164975_2 (sequence is synthesized)
ccggcagtggcggctgcaactttccagagtatgagcttcccgagctaaatacgcgcgctttccatgtgggcgcctttggggagctgtggcggggccgtctgcgcggggccggggacttgt

SEQ ID NO: 517464 - DNA, 120 bp, Artificial Sequence
  ENSG00000164975_3 (sequence is synthesized)
cgctgagggagccgccggcatccgctctgcctgggagccaggcagctgactccgaccgggaggatgccgcggtggccagggatctggactgcagcctggaggcggcggctgagctgaggg

SEQ ID NO: 517465 - DNA, 120 bp, Artificial Sequence
  ENSG00000164975_4 (sequence is synthesized)
cggtgtgcggccttgataaactgaaatgccttgaggacggtgaggatccagaagtcattccggagaatactgacctggtgactttgggggttagaaaaaggttcttggaacatcgggaag

SEQ ID NO: 517466 - DNA, 120 bp, Artificial Sequence
  ENSG00000164975_5 (sequence is synthesized)
aaaccattacaatagatcgagcctgcagacaagaaacattcgtttatgagatggagtcacatgccataggaaaaaagcctgaaaattcagcagacatgattgaagaaggggagcttatcc

SEQ ID NO: 517467 - DNA, 120 bp, Artificial Sequence
  ENSG00000164975_6 (sequence is synthesized)
tatctgtgaatatcttgtaccctgttatatttcataagcacaaagaacacaaaccataccaaacaatgctggtgttgggcagtcaaaaactcacacaactgagggattcaattcgatgtg

SEQ ID NO: 517468 - DNA, 120 bp, Artificial Sequence
  ENSG00000164975_7 (sequence is synthesized)
tcagtgacctccagattggtggtgaattcagcaacactcctgaccaagcccctgagcacatcagcaaagacctatacaaatcagccttcttttattttgaaggaacattttataatgata

SEQ ID NO: 517469 - DNA, 120 bp, Artificial Sequence
  ENSG00000164975_8 (sequence is synthesized)
aaagatacccagaatgcagagatttgagcagaactatcattgagtggtcagagtcccatgatagaggctatggaaagtttcagactgctagaatggaagatttcaccttcaatgacttgt

SEQ ID NO: 517470 - DNA, 120 bp, Artificial Sequence
  ENSG00000164975_9 (sequence is synthesized)
gtattaaactgggttttccttacttatactgtcatcagggagactgtgaacatgtcattgtcattactgacataaggcttgtgcatcatgatgactgcttggataggacattgtatcccc

SEQ ID NO: 517471 - DNA, 120 bp, Artificial Sequence
  ENSG00000164975_10 (sequence is synthesized)
tccttatcaagaagcattggctatggaccagaaaatgttttgtttgtaaaatgtatacagccagatgggtgacgaacaatgacagttttgcaccagaggacccatgcttcttttgtgatg

SEQ ID NO: 517472 - DNA, 120 bp, Artificial Sequence
  ENSG00000164975_11 (sequence is synthesized)
tttgcttccgaatgctgcactatgattcagaaggcaacaaactgggggaattccttgcttatccttatgttgatcctggaacctttaattaagaatagctacactcacaaaaataccccc

SEQ ID NO: 517473 - DNA, 120 bp, Artificial Sequence
  ENSG00000164975_12 (sequence is synthesized)
tcatgaaataactgttctcttggatggttaccttatttctaagaaacgccactgaggaacaggatccactttgaacagtccgctaaagctatcaaaaaaaagtccaaatgacagattttc

SEQ ID NO: 517474 - DNA, 120 bp, Artificial Sequence
  ENSG00000164975_13 (sequence is synthesized)
agtccaaatgacagattttcttataatgatagtatttaaatgtttataacatagtttaattttatatttattccagatagtatttaatttagtgctttttacccattttgagttgagttg

SEQ ID NO: 517475 - DNA, 120 bp, Artificial Sequence
  ENSG00000164975_14 (sequence is synthesized)
ctttaaatcctttgtcagacacacatattctttctcccaatccatgccttccctattcattctctgtccagagttttttgctaaagatagaattattaatgatacatcaagtagtggaag

SEQ ID NO: 517476 - DNA, 120 bp, Artificial Sequence
  ENSG00000164975_15 (sequence is synthesized)
tgttttgaaaattctttgaagaatgtgagagctacaccttctaccatgaggcttccaaggtaaagatccttcaaataactgtaatggaaactagggagaatgaattatttacaaataaga

SEQ ID NO: 517477 - DNA, 120 bp, Artificial Sequence
  ENSG00000164975_16 (sequence is synthesized)
agaatgaattatttacaaataagacaaaattaatagctttgggattatttattttttgagacaaaatctcgctcttgttgcccaggctggaatacagtggcgcaatctcagctcactgca

SEQ ID NO: 517478 - DNA, 88 bp, Artificial Sequence
  ENSG00000164975_17 (sequence is synthesized)
ttttgctttgggggaatttaatcttagtgtgctgtttagtaatgttaggttttgttttggaggaaactaggcatacaagacatgttaa

SEQ ID NO: 517479 - DNA, 120 bp, Artificial Sequence
  ENSG00000164975_18 (sequence is synthesized)
gttttgttttggaggaaactaggcatacaagacatgttaataagactatgtgaataatgaatttaaaaagatcttgagtatatactcataactccagaaataacattaacttgaagcttt

SEQ ID NO: 517480 - DNA, 120 bp, Artificial Sequence
  ENSG00000164975_19 (sequence is synthesized)
atttcttgacaaaagctttatgaatgttatgagtttaaaatatgtcaatttaatactatgatttaaaaaacaatagcagatttcgtatgactgtggggacatggaaaaatcaagatccta

SEQ ID NO: 517481 - DNA, 120 bp, Artificial Sequence
  ENSG00000164975_20 (sequence is synthesized)
ttgattgctagctctggctcacttattctccggtaatgatactattggatatataccaaaattatataagcaaaaagaaaaaaaataagttttcctggcccaggtcttccattcttctgg

SEQ ID NO: 517482 - DNA, 120 bp, Artificial Sequence
  ENSG00000164975_21 (sequence is synthesized)
tccccttactatagtaattctagttactctcatcttattctgaggaaaaaaaaaaaaaccaaaactttttaaacttattttttgacatagggtcttactgtgtcacccaggctggagtac

SEQ ID NO: 517483 - DNA, 120 bp, Artificial Sequence
  ENSG00000164975_22 (sequence is synthesized)
ggctcaggtgatcctcccacctcagcctaccgagtagctgagacatggtggcacaggccaccatggcgggctaatttttttatttcttgtagatacagggtttcactatgttgcgcagaa

SEQ ID NO: 517484 - DNA, 120 bp, Artificial Sequence
  ENSG00000164975_23 (sequence is synthesized)
caagtgatccatccgccttggcctcccagagtgctgcgattacaggcatgaaccacagcgcccagcaaaataaactttctttattttcaggtctagaccatcagatagatttattcaaat

SEQ ID NO: 517485 - DNA, 120 bp, Artificial Sequence
  ENSG00000164975_24 (sequence is synthesized)
tcagatagatttattcaaatattttctgggaacctttatgggtagaacatttaatactgtttagaagacttttaggaatactatagatttcaaatgcatcatttaaaataaataaattcc

SEQ ID NO: 517486 - DNA, 120 bp, Artificial Sequence
  ENSG00000164975_25 (sequence is synthesized)
actttctctctcctaggttgtatttaaatttgactgaatatctggatggctaagaacagacatttatcttacacatggaaaactgacgaaacctataagcctatgtgtttgacagtgaag

SEQ ID NO: 517487 - DNA, 120 bp, Artificial Sequence
  ENSG00000164975_26 (sequence is synthesized)
tatgttttatggacttaaatgccacaaacagttaagtccattggcttggagatgacaagcacgagtttctggtatgtctagtgttctcattcactgattcagtcagtacacagataatca

SEQ ID NO: 517488 - DNA, 120 bp, Artificial Sequence
  ENSG00000164975_27 (sequence is synthesized)
gtatagagaacttaagaggctggcttatgttatacctaaatttttactttcttgtatacaacaatgctaaaattgagcagattgataactgccagcaaaccatagatttaagataaatga

SEQ ID NO: 517489 - DNA, 120 bp, Artificial Sequence
  ENSG00000164975_28 (sequence is synthesized)
atgatttacccaaccctaaaattccatgggtaaaaattttgattcctttattttcaatactgcgttccttataggtcttacatgcatatgcaaggatattttatcttattcattcatttc

SEQ ID NO: 517490 - DNA, 120 bp, Artificial Sequence
  ENSG00000164975_29 (sequence is synthesized)
atactctcaaaacaccaaacttcaaaaagttaattattgtcataatgcattattccatgtgtggtgtcaatacattttagcggacaaagaagaaacatgccagttaaaacatttctgcta

SEQ ID NO: 517491 - DNA, 120 bp, Artificial Sequence
  ENSG00000164975_30 (sequence is synthesized)
ctgggattctttattaattatttgagaatgttattttgctagttcttaaggttaagtttttcatcaaagactcaggtacctattattgttccctggtgaaactgaggagaaaagttaatc

SEQ ID NO: 517492 - DNA, 120 bp, Artificial Sequence
  ENSG00000164975_31 (sequence is synthesized)
aaccaggttactcccacagtttgcccgtgtgttatgtatcagttatacaggtatcccaccaagttcaagtcaaaagaaattcctaactttgtatatttctggagctataaaacccctgat

SEQ ID NO: 517493 - DNA, 120 bp, Artificial Sequence
  ENSG00000164975_32 (sequence is synthesized)
ttaagacagcttttctcttttttcgaggcagcttttctttatgcttatttcaatcaaatgtaacacgcctgtcaaattacatgtaacacattagctaatgaagataggcaactgaaaatg

SEQ ID NO: 517494 - DNA, 120 bp, Artificial Sequence
  ENSG00000164975_33 (sequence is synthesized)
ttgtcatgaacatgtcaacctgcttggtagttgaatttgacttttatataatagtggatacacatgcacagaagttactagagaagcaatagctatttctttaaacattcttcaggcatc

SEQ ID NO: 517495 - DNA, 120 bp, Artificial Sequence
  ENSG00000164975_34 (sequence is synthesized)
agtaccatttaaggacaattagacattctagttttactaggagaaaggtcagtcatctctaacattgtgttgcagaattacacgacacaaacataaacacatttctgcctattaaaccag

SEQ ID NO: 517496 - DNA, 120 bp, Artificial Sequence
  ENSG00000164975_35 (sequence is synthesized)
tttctttgtttctaaagagtttaatgatacaggtttgctatttccattagagcatcctttttctggccaatcggacaaaatagagttagcaaagccctcacagcaccctatgaaaaatct

SEQ ID NO: 517497 - DNA, 120 bp, Artificial Sequence
  ENSG00000164975_36 (sequence is synthesized)
ctgctcttatacaggattagatgcagacctcatcttgacctaacatctgtaaccaggtaagtgtatgagtaggaacacagacagcagtactgtatcagcaaaatctatcatattatttga

SEQ ID NO: 517498 - DNA, 120 bp, Artificial Sequence
  ENSG00000164975_37 (sequence is synthesized)
aatcactggatataatattaattataaagtgtatggttctctccagttgttcacataccaaatcccagtcagttctcagattcagatagatgtatctgcaatttctccaagcagctaaga

SEQ ID NO: 517499 - DNA, 73 bp, Artificial Sequence
  ENSG00000164975_38 (sequence is synthesized)
ttcagatagatgtatctgcaatttctccaagcagctaagaaaaccttcaatggtcagttctgcttggtcatgg

SEQ ID NO: 517500 - DNA, 83 bp, Artificial Sequence
  ENSG00000164975_39 (sequence is synthesized)
gtgccactgcgcccggctgatgtatgactcttttatccagtaatcaaaacacatacgtacatacacacacataccagcccaaa

SEQ ID NO: 517501 - DNA, 120 bp, Artificial Sequence
  ENSG00000164975_40 (sequence is synthesized)
tccagtaatcaaaacacatacgtacatacacacacataccagcccaaaagaggtgttaaaacatacatattacacgtactttttggaggggtggggtggggtggggtggggtggggtggg

SEQ ID NO: 517502 - DNA, 120 bp, Artificial Sequence
  ENSG00000164975_41 (sequence is synthesized)
atctcaaaattaccttttggtgccttgtcaagctgtggagttttgaccacacacacaaattgagccaatgaacaatttcaatgatcctgaaagttcttaagtcttatgaataattatcaa

SEQ ID NO: 517503 - DNA, 120 bp, Artificial Sequence
  ENSG00000164975_42 (sequence is synthesized)
gagttctgagaagttatctgtaaatcagcctatgacaccatttcttgagagttatgattaaagaaacagcaattatgcttgaagcgaacatacatcaactagttagagcaaggtcagcct

SEQ ID NO: 517504 - DNA, 120 bp, Artificial Sequence
  ENSG00000164975_43 (sequence is synthesized)
gtacaagctgacataaattatgagaatgatgctctatctctagaattggaatattctgtggcttctttgtaaaactatagatctggtgggtcatgggaagaaagggagggtgaacaaaag

SEQ ID NO: 517505 - DNA, 120 bp, Artificial Sequence
  ENSG00000164975_44 (sequence is synthesized)
ataaatattacctttattttttatcatcttgagcttactgtttagttaccccgtttcccaaaacagcacaacctctgtgaccagttaactaagaaattatttccttggcagcaaacccag

SEQ ID NO: 517506 - DNA, 120 bp, Artificial Sequence
  ENSG00000164975_45 (sequence is synthesized)
aattccatcacttactcttgtaaatagcaagaaagtaatttactagcagagtttgatagaaaaattctttaatgaaaacaagtttacacgttgaacttatggcttaactagaataaatct

SEQ ID NO: 517507 - DNA, 120 bp, Artificial Sequence
  ENSG00000164975_46 (sequence is synthesized)
gatgcagacctcatcttgacctaacatctgtaaccaggtatgtcaacctagttatctagtgtagaatccttcagagatatttcagtctctctctcttcactggatggcctgaagaaaagg

SEQ ID NO: 517508 - DNA, 120 bp, Artificial Sequence
  ENSG00000164975_47 (sequence is synthesized)
gggaaaggtacaactggaattaggattttctcctgatgaaggaaaaaaagacattaagtctgcattatatttttaaacccatgaaaagactgaaaccaaccaaacaaaagaaaaacttga

SEQ ID NO: 517509 - DNA, 120 bp, Artificial Sequence
  ENSG00000164975_48 (sequence is synthesized)
cttgttattagaacagtcattattatttttttcttcttcaaaactgttattttaccatgttgtatcttcttcccaaagtaatatgcagatgaagcaaaataactcagcaaagtgtcatgg

SEQ ID NO: 517510 - DNA, 120 bp, Artificial Sequence
  ENSG00000164975_49 (sequence is synthesized)
ccaagccctttccatcatttctagcataaaagtgaattctctttaaagaacatgagaatgttttatatctgtgataccaacatatttcaaaatcttaataaaaagagaggttgatacaca

SEQ ID NO: 517511 - DNA, 120 bp, Artificial Sequence
  ENSG00000164975_50 (sequence is synthesized)
aaccattacaatagatcgagcctgcagacaagaaacattcgtttatgagatggtaattaagagtctcatctttttcacccttttctcttaaaacagtaaaccgacattggctgagggtta

SEQ ID NO: 517512 - DNA, 120 bp, Artificial Sequence
  ENSG00000164975_51 (sequence is synthesized)
gtaatgacagtatggtagctttatactggatatgcttagttgaaaacaaactagagaaactcctttgagtctgggaactagtgagagaagaggacccttagaactcaagtgaccacatgt

SEQ ID NO: 517513 - DNA, 120 bp, Artificial Sequence
  ENSG00000164975_52 (sequence is synthesized)
acttaagacattttgttacctttttttttctttatttcagagtacaaaaccagagatagtttttttaaaaataagaggagtaaaagtaataaccattgcaacttggcttgggagcagcaa

SEQ ID NO: 517514 - DNA, 120 bp, Artificial Sequence
  ENSG00000164975_53 (sequence is synthesized)
aaatactgtcttctttccatgcaaataccaactctttccatccatttgcatcctctattgttcattattttggaaaatctttaagaaatactttactattagacggttaaaaatctgtta

SEQ ID NO: 517515 - DNA, 120 bp, Artificial Sequence
  ENSG00000164975_54 (sequence is synthesized)
atactttaaaaagtatctctattttgtattaaatagctgttattcagatatagtacttatccatttatatataacattgcaactttatttttaggtttgtctttttgccaaaatttgaag

SEQ ID NO: 517516 - DNA, 120 bp, Artificial Sequence
  ENSG00000164976_0 (sequence is synthesized)
agacagagccccgcgcggcgcggcggcagcttcactctggttcaagcgcaggggatcggcgggaagctctttcacccccgcttctgccgggctgtaactgcaatggagcaggttgagatg

SEQ ID NO: 517517 - DNA, 120 bp, Artificial Sequence
  ENSG00000164976_1 (sequence is synthesized)
aactcagtcagatggccccacggcccgctcctttcttagcagcccactaatgctccagaaccctcaggagaagagccaggcctacccccgccgccgccggcctggctgctacgcataccg

SEQ ID NO: 517518 - DNA, 120 bp, Artificial Sequence
  ENSG00000164976_2 (sequence is synthesized)
tcagaaccccgaggccatcgcagccgcagctatgtacaccttcctgcccgacaacttctcacctgccaagcccaagccttccaaagacctgaagccgctgctgggctccgcggttctggg

SEQ ID NO: 517519 - DNA, 120 bp, Artificial Sequence
  ENSG00000164976_3 (sequence is synthesized)
gctgctgcttgtgctggccgcggtggtggcctggtgctactacagcgtctccctacgcaaggcggagcgacttcgcgcggagctgctggacctgaaagctggcggcttctccatccgcaa

SEQ ID NO: 517520 - DNA, 120 bp, Artificial Sequence
  ENSG00000164976_4 (sequence is synthesized)
tcagaagggagagcaggtcttccgcctggccttccgctccggcgcgctggaccttgactcctgcagccgcgatggcgccctgctgggctgctcgctcacggccgacgggctgccgctgca

SEQ ID NO: 517521 - DNA, 120 bp, Artificial Sequence
  ENSG00000164976_5 (sequence is synthesized)
cttcttcatccagactgtgcggcccaaggacacggtcatgtgctaccgcgtgcgctgggaggaggcagcgccgggccgggccgtggagcacgccatgttcttgggcgacgcggcggccca

SEQ ID NO: 517522 - DNA, 120 bp, Artificial Sequence
  ENSG00000164976_6 (sequence is synthesized)
ctggtatggtggcgccgagatgaggacgcaacactggcccatccgcctggatggccagcaggagccccagccgttcgtcaccagcgatgtctactcctccgacgccgcgtttgggggcat

SEQ ID NO: 517523 - DNA, 120 bp, Artificial Sequence
  ENSG00000164976_7 (sequence is synthesized)
cctcgagcgctactggctatcttcgcgcgcggccgccatcaaagtcaatgactcagtgcccttccacctgggctggaacagcacggagcgctcgctgcggcttcaggcgcgctaccacga

SEQ ID NO: 517524 - DNA, 120 bp, Artificial Sequence
  ENSG00000164976_8 (sequence is synthesized)
cacgccctacaagccacccgccggccgcgccgcagcgccagagctgagctaccgagtgtgcgtgggctcagacgtcacctccatccacaagtacatggtgcgtcgctacttcaacaagcc

SEQ ID NO: 517525 - DNA, 120 bp, Artificial Sequence
  ENSG00000164976_9 (sequence is synthesized)
gtcaagggtgccagcacccgaggccttccgagaccccatttggtccacatgggcgctgtacgggcgcgccgtggaccaggacaaggtgctgcgttttgcccaacagatccgcctgcacca

SEQ ID NO: 517526 - DNA, 120 bp, Artificial Sequence
  ENSG00000164976_10 (sequence is synthesized)
cttcaacagcagccacctggaaatcgacgacatgtacacacctgcttatggcgacttcgacttcgatgaggtcaaattccccaacgccagcgacatgttccgccgcctgcgcgacgccgg

SEQ ID NO: 517527 - DNA, 120 bp, Artificial Sequence
  ENSG00000164976_11 (sequence is synthesized)
cttccgcgtcacgctctgggtgcacccttttgtcaactacaactcgtcgcgcttcggcgagggcgtggagcgcgagctgttcgtgcgcgaacccacgggccggttacctgcgctggtgcg

SEQ ID NO: 517528 - DNA, 120 bp, Artificial Sequence
  ENSG00000164976_12 (sequence is synthesized)
ctggtggaacggcatcggcgcggtgctagacttcacgcacccaaaggcccgcgactggttccagggacacctgcggcggctgcgctctcgctactccgtggcttccttcaagttcgacgc

SEQ ID NO: 517529 - DNA, 120 bp, Artificial Sequence
  ENSG00000164976_13 (sequence is synthesized)
gggcgaggtcagctacctgccgcgggacttcagcacctaccggccgctgccggaccccagcgtctggagccggcgctacactgagatggcgctgcccttcttctcgctggcggaggtgcg

SEQ ID NO: 517530 - DNA, 120 bp, Artificial Sequence
  ENSG00000164976_14 (sequence is synthesized)
cgtaggctaccagtcacagaacatctcctgcttcttccgcctggtggatcgcgactctgtgtggggctacgacctggggttgcgctcactcatccccgcggtgctcaccgtcagcatgct

SEQ ID NO: 517531 - DNA, 120 bp, Artificial Sequence
  ENSG00000164976_15 (sequence is synthesized)
gggctacccattcatcctacccgatatggtgggcggcaacgccgtgccccagcggacagccggcggcgatgtgcccgagcgcgagctctacattcgctggctggaagtggccgcctttat

SEQ ID NO: 517532 - DNA, 120 bp, Artificial Sequence
  ENSG00000164976_16 (sequence is synthesized)
gccggccatgcagttctctatcccgccctggcgctacgacgcggaagtggtggccatcgcgcagaagttcgccgccctgcgggcctcgcttgtggcaccgctgttgcttgagctggcggg

SEQ ID NO: 517533 - DNA, 120 bp, Artificial Sequence
  ENSG00000164976_17 (sequence is synthesized)
cgaggtcaccgacacgggtgaccctatcgtgcgccccctttggtggattgcgcccggcgacgagacagctcaccgtatcgactcgcagttccttattggggacacgctgcttgtggcccc

SEQ ID NO: 517534 - DNA, 120 bp, Artificial Sequence
  ENSG00000164976_18 (sequence is synthesized)
ggtgctggagccaggcaagcaggagcgcgacgtctatttgcccgccggcaagtggcgcagctacaagggtgagcttttcgacaagacgccggtgctgctcaccgattacccggtcgacct

SEQ ID NO: 517535 - DNA, 120 bp, Artificial Sequence
  ENSG00000164976_19 (sequence is synthesized)
ggatgagatcgcctactttacctgggcgtcctgacccagcccagggcccggtaaccgcaaagcccccagtcttcatgcagaccttgaaccctccgtcacacccgcaccatgtactcccag

SEQ ID NO: 517536 - DNA, 120 bp, Artificial Sequence
  ENSG00000164976_20 (sequence is synthesized)
gaacctcccacctctataccacccattaagtggctgctgacttaaatgtgctggaaccagctgctgaaggtggggcctagggagggggcactgaagcaatctcctgctccaacgcacaat

SEQ ID NO: 517537 - DNA, 120 bp, Artificial Sequence
  ENSG00000164976_21 (sequence is synthesized)
ccttactgtgccctttccacccccacactcacaccaatctgcagaaacctcttccctggggtggaagccagagagcttagaggaaaaaggtcagctctcttcctgttatacatggttata

SEQ ID NO: 517538 - DNA, 120 bp, Artificial Sequence
  ENSG00000164976_22 (sequence is synthesized)
catggttggggtttaaaagcacaaagagaaacctccccctcctggctttcgtggccatctttgtccatcttaggtggggacttgatcttatttaaggtctccaaatagcccccaccacac

SEQ ID NO: 517539 - DNA, 120 bp, Artificial Sequence
  ENSG00000164976_23 (sequence is synthesized)
ttagaacgtgtgttttcttagtgttagaagccaggccctgagtccccagcactcacctgaactgtggctgatttggtcccagtccagctggggaggtgtttggctgacaaggaggcaaga

SEQ ID NO: 517540 - DNA, 120 bp, Artificial Sequence
  ENSG00000164976_24 (sequence is synthesized)
gatcccctcccagggaacaggaggactgggcttagcacagagccatcatcatgttcccaatttgtgaagagactcctaacactgcactaacccatttgtgtacatacatgggctcagccc

SEQ ID NO: 517541 - DNA, 120 bp, Artificial Sequence
  ENSG00000164976_25 (sequence is synthesized)
tacatgggctcagccctgggccaaatgtgcctgatgggaacagacttgcagggccatgcaggccagacttcgtgccttaactgaagagtgtgcgtgtgtgtgtgtgagagagagagagag

SEQ ID NO: 517542 - DNA, 120 bp, Artificial Sequence
  ENSG00000164976_26 (sequence is synthesized)
ttgctgagccagcctcctcccaggcggtttccccaggactctcgtaggaaataaatagccctttcaagattcctcagctgcctcaccccctgcacatgtgcctggggtgtggcctagaag

SEQ ID NO: 517543 - DNA, 120 bp, Artificial Sequence
  ENSG00000164976_27 (sequence is synthesized)
ggagtgatgttcttactctggtggtctgtgcttctgaacacaggctacatgcacacactgacaactaccaataaacagacaggggaaggtctttcatctcagccattttctcttcccccc

SEQ ID NO: 517544 - DNA, 120 bp, Artificial Sequence
  ENSG00000164976_28 (sequence is synthesized)
ccaggttggagtgcagtggcacaatcagctcactgcaacccctcctcctaggttcaagcgattgagtagctgagattacaggcatgcatcactatgcctggctttttgtattttttagta

SEQ ID NO: 517545 - DNA, 120 bp, Artificial Sequence
  ENSG00000164976_29 (sequence is synthesized)
caggcatgagccaccacgccagccattttctctttctaagaagagcaacctcagccggagtgagttttttctgactttgcagctgagtctggagaaaagtggcatgccagagcgggtcgg

SEQ ID NO: 517546 - DNA, 120 bp, Artificial Sequence
  ENSG00000164976_30 (sequence is synthesized)
tgggaaacagggtgaactttagcttccatcaacagctctggtagcaaaaccagtcccctaccccctagagaatgcatccgtttccccacctgatatggtttggctgtgtccccacctaaa

SEQ ID NO: 517547 - DNA, 120 bp, Artificial Sequence
  ENSG00000164976_31 (sequence is synthesized)
actcatcttgaattgtagctcccataattgccatgtgttgtgggaaggacccagtgggagataattgaaatatgggggcagtttccgccatactgttctggtgatagtgaatagatctca

SEQ ID NO: 517548 - DNA, 120 bp, Artificial Sequence
  ENSG00000164976_32 (sequence is synthesized)
tgagagctgatgattttataagaggtttccccttttgcttagttctcattctctcttgcctgccgccatgtaagacgtgcctttctgtcatgcttgtgaggcctccccagccacgtggag

SEQ ID NO: 517549 - DNA, 89 bp, Artificial Sequence
  ENSG00000164976_33 (sequence is synthesized)
tttttctttataaattacccagtcttggttatgtctttatcagcactgtgaaaatgaacctgctgctgtaaatacccaaaaatgtggaa

SEQ ID NO: 517550 - DNA, 120 bp, Artificial Sequence
  ENSG00000164976_34 (sequence is synthesized)
gctttgaccaaaatgctgataatgattgggacatgaaatccaggctgagttggtctcagatagcgatgaggaacttgtttggtactggagtaaaggtgactcttgctatattttagcaaa

SEQ ID NO: 517551 - DNA, 79 bp, Artificial Sequence
  ENSG00000164976_35 (sequence is synthesized)
gtttggtactggagtaaaggtgactcttgctatattttagcaaagagactggctcgagggagatgatttagggtatctg

SEQ ID NO: 517552 - DNA, 90 bp, Artificial Sequence
  ENSG00000164976_36 (sequence is synthesized)
agcattcagttttaaaagggaaacagactataaaagtttggaaaatttgcagcctgatgatgataaattcaagccccctgcagaaatttg

SEQ ID NO: 517553 - DNA, 120 bp, Artificial Sequence
  ENSG00000164976_37 (sequence is synthesized)
agtaacaaggagccaaatgttaatcactaagacatggggaaaatgtctgcagggcatgtcagagacctttgcagcagtgcctcccatcacaggcctggaggcctaggagggaaaaaatgg

SEQ ID NO: 517554 - DNA, 120 bp, Artificial Sequence
  ENSG00000164976_38 (sequence is synthesized)
gcctaggagggaaaaaatggttttgtgggccaggcccaaggtccccttgctgtgtgcagcccagggacttggtaccatgcatcccagctgctctagtcatggctaaaaggggccaagata

SEQ ID NO: 517555 - DNA, 120 bp, Artificial Sequence
  ENSG00000164976_39 (sequence is synthesized)
cagctgctctagtcatggctaaaaggggccaagatacagctcaggccttggcttcagagggtgcaagccccaagtcttggcatcttccacgtagtgttgagcctgcaggtgcacagaagt

SEQ ID NO: 517556 - DNA, 120 bp, Artificial Sequence
  ENSG00000164976_40 (sequence is synthesized)
agagaatgtatggaaatgcatgtatgtccaggcagaagtttgctacaggagtgaggccctcatggagaacctctgttaaggcaatgtggaaggggaagcccccacacagagaccccactg

SEQ ID NO: 517557 - DNA, 120 bp, Artificial Sequence
  ENSG00000164976_41 (sequence is synthesized)
gaaggggaagcccccacacagagaccccactgggacactgcctagtagagctgtcagaagaaggccaccgtcctccagacatcagaatggtatatccactgacagcttgcaccatgcacc

SEQ ID NO: 517558 - DNA, 85 bp, Artificial Sequence
  ENSG00000164976_42 (sequence is synthesized)
cacctggaaaagccacagacactcaacgccagcctgtaaaagcaaccgagaagtaggctgtaccctgcaatgccatagctgcatc

SEQ ID NO: 517559 - DNA, 120 bp, Artificial Sequence
  ENSG00000164976_43 (sequence is synthesized)
accattttggagctttaagatttaactgccctgctggatttcagacttgcatggggcctttagccacttcgttttggccaacttctcccacttgaaatgggtgtatttagccaatgcctg

SEQ ID NO: 517560 - DNA, 75 bp, Artificial Sequence
  ENSG00000164976_44 (sequence is synthesized)
acttctcccacttgaaatgggtgtatttagccaatgcctgtacctccgttgtatctaggaagtaactaactagcc

SEQ ID NO: 517561 - DNA, 120 bp, Artificial Sequence
  ENSG00000164976_45 (sequence is synthesized)
actgttgggaaggcatgattgatttttaaatgagaggacatgagatttgggaggggccagggagagaatgatatggtttggctgtgtccccatccaaatatcaccttaaattgtagctcc

SEQ ID NO: 517562 - DNA, 90 bp, Artificial Sequence
  ENSG00000164976_46 (sequence is synthesized)
ggagagaatgatatggtttggctgtgtccccatccaaatatcaccttaaattgtagctcccataattgtggaggggcagtttctcccata

SEQ ID NO: 517563 - DNA, 79 bp, Artificial Sequence
  ENSG00000164976_47 (sequence is synthesized)
actcctctaccttctttattttctcagtgtggaaaatgcctgatgaaagctttggggccctcacagatgcacaactcaa

SEQ ID NO: 517564 - DNA, 120 bp, Artificial Sequence
  ENSG00000164976_48 (sequence is synthesized)
ctgatgaaagctttggggccctcacagatgcacaactcaagtgctgattctatcacttatctaccagctctgtgaccttgaacaagccgcttaaccttgctaagcctctgttttctcata

SEQ ID NO: 517565 - DNA, 120 bp, Artificial Sequence
  ENSG00000164976_49 (sequence is synthesized)
tgtcaaatggtgataataatgcctacctcccgaggttgttgtaagaattataagcacaaatgtatgtaaagtgcctggcacaaagtaggtgctcaataaatggtagctattataatacta

SEQ ID NO: 517566 - DNA, 120 bp, Artificial Sequence
  ENSG00000164978_0 (sequence is synthesized)
ctattgatgggcccaagcgtaaccaggctcttctgattggccggtgtacttcagtttccgtccaaggtccgcctcctacctccttctgcttcggtgcgtttgcttctgaggatctccagt

SEQ ID NO: 517567 - DNA, 120 bp, Artificial Sequence
  ENSG00000164978_1 (sequence is synthesized)
gtcacaacaaacacatgccagccctgttttacagggagccctggaggagttgggatagaggccacattgactgagggtagttgccagggtcctgcagttatacacaaagtccttaggata

SEQ ID NO: 517568 - DNA, 120 bp, Artificial Sequence
  ENSG00000164978_2 (sequence is synthesized)
agaccatggccttgagagcatgtggcttgatcatcttccgaagatgcctcattcccaaagtggacaacaatgcaattgagtttttactgctgcaggcatcagatggcattcatcactgga

SEQ ID NO: 517569 - DNA, 120 bp, Artificial Sequence
  ENSG00000164978_3 (sequence is synthesized)
ctcctcccaaaggccatgtggaaccaggagaggatgacttggaaacagccctgagggagacccaagaggaagcaggcatagaagcaggccagctgaccattattgaggggttcaaaaggg

SEQ ID NO: 517570 - DNA, 120 bp, Artificial Sequence
  ENSG00000164978_4 (sequence is synthesized)
aactcaattatgtggccaggaacaagcctaaaacagtcatttactggctggcggaggtgaaggactatgacgtggagatccgcctctcccatgagcaccaagcctaccgctggctggggc

SEQ ID NO: 517571 - DNA, 120 bp, Artificial Sequence
  ENSG00000164978_5 (sequence is synthesized)
tggaggaggcctgccagttggctcagttcaaggagatgaaggcagcgctccaagaaggacaccagtttctttgctccatagaggcctgagctgactggagcagagtcatttgcttcagca

SEQ ID NO: 517572 - DNA, 120 bp, Artificial Sequence
  ENSG00000164978_6 (sequence is synthesized)
ggatccttgtgggccttctaagatgaagccaccctcaggtccagggaaggttgtgctggtatttggctcatgacagccaagagcagatttgtgaaatcggctcaactcccaggtgagagc

SEQ ID NO: 517573 - DNA, 120 bp, Artificial Sequence
  ENSG00000164978_7 (sequence is synthesized)
aagcaaaaatcttggctgggtggaaaggaaggcaaaagagtaaaaattaaaaaggccaggcccagtaagtgtaccttgtactttataaataaacctcaagcagctcaaggttgtccttct

SEQ ID NO: 517574 - DNA, 120 bp, Artificial Sequence
  ENSG00000164978_8 (sequence is synthesized)
ctattgatgggcccaagcgtaaccaggctcttctgattggccggtgtacttcagtttccgtccaaggtccgcctcctacctccttctgcttcggttctacagtgatggggtgcttccttt

SEQ ID NO: 517575 - DNA, 120 bp, Artificial Sequence
  ENSG00000164978_9 (sequence is synthesized)
aaggtccgcctcctacctccttctgcttcggggagggcatgggatcagctacctgtttctgcctcaaccacggaccaataatatgagatctttgttcaccagttctacagtgatggggtg

SEQ ID NO: 517576 - DNA, 120 bp, Artificial Sequence
  ENSG00000164983_0 (sequence is synthesized)
gccgctaggggtagcggcggcggcggcggctgcggctcgggagcgcggctgctttgagggctcgggaaccttacagagtggggacgtggggaggctagagggtgagaaagctggcgggag

SEQ ID NO: 517577 - DNA, 120 bp, Artificial Sequence
  ENSG00000164983_1 (sequence is synthesized)
agtagggcggcgctggaggagggcggtgcgtggctgactcatcctctggaagatcagactgacagagacacacactagcccgccccgcccgcccgcgccgctcctcctcagccgggaggc

SEQ ID NO: 517578 - DNA, 120 bp, Artificial Sequence
  ENSG00000164983_2 (sequence is synthesized)
gcccgcccgcaccgaccgcccgccctctccgggcgctgtccgggcccggccgtctcagagaaagtttttcccatcggaggggcgggagccgccgcgggccttttggaaaggaagtgggga

SEQ ID NO: 517579 - DNA, 120 bp, Artificial Sequence
  ENSG00000164983_3 (sequence is synthesized)
cggaacaggaggcgagagccgcgcgggcccgcggagtgcatggtgcccggcgcctcggctgcctggcaggaggacctcggggcggggtcgagctgagcccagctccttctcgcctcagcc

SEQ ID NO: 517580 - DNA, 120 bp, Artificial Sequence
  ENSG00000164983_4 (sequence is synthesized)
cctcagccgcgccagaaaccgccttgccggacggccgcgggggtcccagctcctcagctcgccatgtcccggctgctgccgctgctgaggagccggaccgcgcgcagcctgaggccgggc

SEQ ID NO: 517581 - DNA, 80 bp, Artificial Sequence
  ENSG00000164983_5 (sequence is synthesized)
ggctgctggcgctcgcgccccccggcggcttgccgggcggccccaggcggctgggcacgcaccccaagaaggagcccatg

SEQ ID NO: 517582 - DNA, 120 bp, Artificial Sequence
  ENSG00000164983_6 (sequence is synthesized)
catggaggcgctgaacacggcgcagggcgcgcgcgacttcatctacagcctgcactccacggagaggagctgcctgctcaaagagctgcaccgcttcgagtctattgccattgcccaaga

SEQ ID NO: 517583 - DNA, 120 bp, Artificial Sequence
  ENSG00000164983_7 (sequence is synthesized)
aaaattggaagctccaccacccaccccaggacagctgagatatgtattcatccacaatgcgatacctttcatagggtttggctttttggataatgcaattatgattgttgctggaaccca

SEQ ID NO: 517584 - DNA, 120 bp, Artificial Sequence
  ENSG00000164983_8 (sequence is synthesized)
tattgaaatgtctattggaattattttgggaatttcaactatggcagctgctgctttgggaaatcttgtgtcagatctagctggacttggacttgcaggctacgttgaagcattggcttc

SEQ ID NO: 517585 - DNA, 120 bp, Artificial Sequence
  ENSG00000164983_9 (sequence is synthesized)
caggttaggcctgtcaattcctgatctcacaccaaagcaagttgacatgtggcaaacacgtcttagtacacatttgggcaaagctgttggggtgactattggctgcattctaggaatgtt

SEQ ID NO: 517586 - DNA, 120 bp, Artificial Sequence
  ENSG00000164983_10 (sequence is synthesized)
tcctttaattttctttggaggaggtgaagaagatgaaaaactggaaacgaaaagttaatcctcttagaatacctataaaaagatgtaaactaatgtacctcagtaattaaatatgctgtc

SEQ ID NO: 517587 - DNA, 120 bp, Artificial Sequence
  ENSG00000164983_11 (sequence is synthesized)
acaacatttaggaattaagacagtaacagtatagatatgggatcaaataatttagcatgtattatggaaaacactaacttattgtggcttgatcttcttaggacatcttttttaaaaagc

SEQ ID NO: 517588 - DNA, 120 bp, Artificial Sequence
  ENSG00000164983_12 (sequence is synthesized)
tgtttagtatcattttgtgtatattgttgaaatgctttttcatcaatagcagtcaacattttatcctttctttttatattcataatgttatttaagtgtcattgatgtactgtattgact

SEQ ID NO: 517589 - DNA, 120 bp, Artificial Sequence
  ENSG00000164983_13 (sequence is synthesized)
tggggtttgcttatttgttacttaacatgtgtacatgcatgaaagcatttttcgttgttccctgatagttacatttcaaccttgggatttttccaaattacttaagatgtttaatgtcag

SEQ ID NO: 517590 - DNA, 120 bp, Artificial Sequence
  ENSG00000164983_14 (sequence is synthesized)
ttaaagatttttttaccctctttttgggaacatcaattttgtactgttatgcagtaaacatttataataatataatttcagtcatttcttaactgtcacatctattgaaaatggatatag

SEQ ID NO: 517591 - DNA, 120 bp, Artificial Sequence
  ENSG00000164983_15 (sequence is synthesized)
atacaggttttaagtattttaagtatatattacttattttaattttctgactttactattttaagggccagagggttaatcacaaagagcaattatgtggtctccctgctacatgaaacc

SEQ ID NO: 517592 - DNA, 120 bp, Artificial Sequence
  ENSG00000164983_16 (sequence is synthesized)
gtgtatactaacaagcgtacaatttttagttgattttttttaaccttttagtttcccagttttgaataattacatggtggattctgacttttgaggggaagcaaatgattattttagagt

SEQ ID NO: 517593 - DNA, 120 bp, Artificial Sequence
  ENSG00000164983_17 (sequence is synthesized)
ctttgaaatggggattgtggaattagattgaactaagggatttaacatgatgcttggaaattaagagactaaagctttttttaaaaaaaggtggaaaataggaactgtcaagaaggttta

SEQ ID NO: 517594 - DNA, 120 bp, Artificial Sequence
  ENSG00000164983_18 (sequence is synthesized)
tggtataaatgatgaagttgaagtgatgtttgaaagattaatgagatacaatttatattatttggtaaggtttttttttttccctccaaagatgtcatcttctcatctgaatggaataag

SEQ ID NO: 517595 - DNA, 120 bp, Artificial Sequence
  ENSG00000164983_19 (sequence is synthesized)
tctgaataccccatattcatactcctaatctcattatatcttatttagtgaattttatttatgaataatttctgttgaagtgaaaactagatatttaatattttgcttttttgctacata

SEQ ID NO: 517596 - DNA, 120 bp, Artificial Sequence
  ENSG00000164983_20 (sequence is synthesized)
gtctactcaaaaattacatgaggagaaatcctttttccctttgtttttcttttttcttcttttgtggtatttaaagcatattttaggttgaagttacttatttctagtcttgtacttctg

SEQ ID NO: 517597 - DNA, 120 bp, Artificial Sequence
  ENSG00000164983_21 (sequence is synthesized)
gcttaagtataaccatgtaagaattataaattttagttttctgaacccttaaacttttttagcatgtggtctgttacacatgctaaaaaattagtcttacttgtaacagcgtaattaaac

SEQ ID NO: 517598 - DNA, 120 bp, Artificial Sequence
  ENSG00000164983_22 (sequence is synthesized)
acatcatggaggagagaaacttaaaattaaaatagtattttggcttttgaagttatttgtgttgctaaatagatgcagaggttttacagcagtttattttaaggttttatttatacataa

SEQ ID NO: 517599 - DNA, 120 bp, Artificial Sequence
  ENSG00000164983_23 (sequence is synthesized)
ttactttgaactcttcagagtagatattttttcacaaggcagtttgtcataaattctctcatgcgcttcagaatgcataagtgccatcctttaatcatagactttgaggagagaaagcat

SEQ ID NO: 517600 - DNA, 120 bp, Artificial Sequence
  ENSG00000164983_24 (sequence is synthesized)
aaaaatatagcatataatctaaaaataaatatataacatgcacaaataatgtgacattcttactgaatcaaatcatgattctagaacttgagatcttaaatagaatttcggtttgtatct

SEQ ID NO: 517601 - DNA, 120 bp, Artificial Sequence
  ENSG00000164983_25 (sequence is synthesized)
tccatataataaccacacacagataaccacacaaaaaatcctttgtaaaatttctgattgataggattagagtgcttaaatttttggggggggaagggtggggtaaagtgtaagtgcttt

SEQ ID NO: 517602 - DNA, 120 bp, Artificial Sequence
  ENSG00000164983_26 (sequence is synthesized)
cttttgtccctaacttgtgtattgatggcagtccactctgttttctaaaaatgtattttactgtggtgcttaacttcttattaattaaatcccgtatcagaaaccttgcctgtgacttta

SEQ ID NO: 517603 - DNA, 120 bp, Artificial Sequence
  ENSG00000164983_27 (sequence is synthesized)
gaaagggcttttgattattgttttttcttcttgctcttgaaagtaatctggtcccagggaattactggtttaactgaacatctccagaattatttaaggtgtcaaaatatataaccttca

SEQ ID NO: 517604 - DNA, 120 bp, Artificial Sequence
  ENSG00000164983_28 (sequence is synthesized)
cattgaaagataattttaatttatgggcataataaaaatttgaatcattcaggtaattttcaaaaaatggagaccatttgtctttaactgaaggtatatgtttaagatcatagtctaccc

SEQ ID NO: 517605 - DNA, 120 bp, Artificial Sequence
  ENSG00000164983_29 (sequence is synthesized)
tagtatggtgctttgccacaaagtgatttctgaagaatggttctttttaagataatgacttcatatgatcattgtttcatgttacttgccacaaataactttaatttaggttgaaactgg

SEQ ID NO: 517606 - DNA, 120 bp, Artificial Sequence
  ENSG00000164983_30 (sequence is synthesized)
aactgtttgtttctcatattagctacttctctattaggagcacaagaaccatagttaaatgcaacatgagctactttagtcctgtttgtttaaatttgtgttgtccatgtattatgattt

SEQ ID NO: 517607 - DNA, 120 bp, Artificial Sequence
  ENSG00000164983_31 (sequence is synthesized)
attaacttgttgatgcatgtaaattgggtgcattttgttgccatgtatgttaaatggtgaccaatgtttttacaaaggaattgaacaaaaaaagtatcttttaagaaatttggaatgtgg

SEQ ID NO: 517608 - DNA, 120 bp, Artificial Sequence
  ENSG00000164983_32 (sequence is synthesized)
ttttgattttgaaatttgatttcttactaatctcagagggccttggtatattctgttactaaagcaaacaggattaatgaatacggatttgttacaaggtggcagcaatgtcactgagat

SEQ ID NO: 517609 - DNA, 120 bp, Artificial Sequence
  ENSG00000164983_33 (sequence is synthesized)
agtgaatggaacaatttaccacctccctggaatctgcacctgagatacaacatcagcgtatgagtgaagagtgagcccatagaaaagctttagatagactcacataagtcacactgatgg

SEQ ID NO: 517610 - DNA, 120 bp, Artificial Sequence
  ENSG00000164983_34 (sequence is synthesized)
gtatttacagcagatatatccaagctgtttatgtaatagtctcatttactttattctttttctctagaacataaattttgaaggtaatggaagtttatcttttataccaaaagtttgtat

SEQ ID NO: 517611 - DNA, 120 bp, Artificial Sequence
  ENSG00000164983_35 (sequence is synthesized)
gagccattttgaagtaaatctttctaattttagaattatattttctcgccatcttaagacagtatattaaatataatataacctttttcttagtggctaagcattatctttatgtatatt

SEQ ID NO: 517612 - DNA, 120 bp, Artificial Sequence
  ENSG00000164983_36 (sequence is synthesized)
attattgtgtggtaatgcagtaccttgagaatctagtttttatagttttcatttttttttctgatcttgcttctggcaacttttatctctctaatctgctttttttctcagttgtctgga

SEQ ID NO: 517613 - DNA, 120 bp, Artificial Sequence
  ENSG00000164983_37 (sequence is synthesized)
aaattatttgggaaatactaaaaaattggctttggatcctgactgagatgatgatgatgatagtagtagtagtaataataatagttcccttttattaaacacttatttggtcctttatgc

SEQ ID NO: 517614 - DNA, 120 bp, Artificial Sequence
  ENSG00000164983_38 (sequence is synthesized)
actagtaatttacacacattattgcatttaatcaccttaatgacaacattaagttggggctattatcattatcatctctattttctcatagctaaattgaggcatgaagaggttagtttg

SEQ ID NO: 517615 - DNA, 120 bp, Artificial Sequence
  ENSG00000164983_39 (sequence is synthesized)
ccactacgaataagtggactggaatcctattttgtccaagtatgaagcctgtcttcttaactgctaggcagtagggacatcagttgcatgggctttgcaatgtctgctctctgcctaggt

SEQ ID NO: 517616 - DNA, 120 bp, Artificial Sequence
  ENSG00000164983_40 (sequence is synthesized)
tcctttttacctccagattcatggagtcattttcttatctataatttaagaatattgtgcttacaatccaagattcatttaagaaatcttgtgttctttattacatactatgtgctagga

SEQ ID NO: 517617 - DNA, 120 bp, Artificial Sequence
  ENSG00000164983_41 (sequence is synthesized)
tgttcaaggcactgagtgaacaaccagaacatctgtaccctcatgaagcttattcttttggggtgggtagtaataggggaagagaacacagaaaagcaaatatacttttttttgagatgg

SEQ ID NO: 517618 - DNA, 63 bp, Artificial Sequence
  ENSG00000164983_42 (sequence is synthesized)
caccatgttggccaggctggcctcagactcctgacctcaggtggcctgcaaatatacacttaa

SEQ ID NO: 517619 - DNA, 120 bp, Artificial Sequence
  ENSG00000164983_43 (sequence is synthesized)
gtgagcccctgcgcccacctgcaaatatacacttaaatattgtttatgtcagatggtggtaagttctatagagataaatgaaacaagataaagaggatagaaagtaccagtggtcataag

SEQ ID NO: 517620 - DNA, 120 bp, Artificial Sequence
  ENSG00000164983_44 (sequence is synthesized)
tgaagatggtcagtgaagacctgaaggaagcgaaggtacaaacagtacagatattctgtgaagagaaagtatcatgctaggtactagaaagttggtgttaagaaaatctcagatatgtga

SEQ ID NO: 517621 - DNA, 120 bp, Artificial Sequence
  ENSG00000164983_45 (sequence is synthesized)
aatatgtttcactttggaattcattgtaaaatgttttctttttgtttcatattactaataactgcattaagcctaaagagtaacagttaaatattaagattaatacttacttcttgcatg

SEQ ID NO: 517622 - DNA, 120 bp, Artificial Sequence
  ENSG00000164983_46 (sequence is synthesized)
tttactgacagcagtaggtgaaaatggcacagaagtgtggggaagcaaccctagaattcaaaaaagtctgtagatattcccatcagcaaatcatttacagttgactcttgaacaatggag

SEQ ID NO: 517623 - DNA, 120 bp, Artificial Sequence
  ENSG00000164983_47 (sequence is synthesized)
ggattagggacaccaaccccctgtgctgctgaaaatctgaatacaactttttactctctccaaactttacttatagcctcctattggctggaagcctttctgataaataagcagtagatt

SEQ ID NO: 517624 - DNA, 120 bp, Artificial Sequence
  ENSG00000164983_48 (sequence is synthesized)
aacacgtattttgtatgttatatgtatcatatattgtattaaaataaaggtagaagaaagaaaatgttattaaaatcatcaggaagagaaaatacatttactattcattaagtggatcat

SEQ ID NO: 517625 - DNA, 120 bp, Artificial Sequence
  ENSG00000164983_49 (sequence is synthesized)
gataaaagtcttcatcctccttgtcttcatgttgagtaggctgaggtggaggaggaagaggaaggattggtcttgctcttagtggtagcagaggtgcaaggggaagcaggaaaggcaggc

SEQ ID NO: 517626 - DNA, 120 bp, Artificial Sequence
  ENSG00000164983_50 (sequence is synthesized)
acactacgtgtaattatgaaaatgcattgtaacttctgtctgatgttttgctttttttcatttctcaaaatatttctatatatggtattaatccttcttccaccatttgctttagtttta

SEQ ID NO: 517627 - DNA, 120 bp, Artificial Sequence
  ENSG00000164983_51 (sequence is synthesized)
gtgcctgtgtgatagaagggttcatgttgtaaaatcagtcttgaataatcagaacacttctaccagattgtctaatgttgatttgttttctggcactgcttctaaatgtcttcctcctca

SEQ ID NO: 517628 - DNA, 120 bp, Artificial Sequence
  ENSG00000164983_52 (sequence is synthesized)
ttctgtggcactgattcagaggcactcatctccaaaagctaagcttttgaattgcttagcttttgattcactccaggattcagatcttgaaactttctaccctccaccatttatttattt

SEQ ID NO: 517629 - DNA, 120 bp, Artificial Sequence
  ENSG00000164983_53 (sequence is synthesized)
atttaatttgacatatctacaacctctttcatgattttcttgattggctctgttgtaaattctgcgaagtcacacacaacatctggttgttttcctcagcaggaatttattgttttgggc

SEQ ID NO: 517630 - DNA, 120 bp, Artificial Sequence
  ENSG00000164983_54 (sequence is synthesized)
ttgatggctttcatgtcttctgtagcaacaatggcatcatcagtggtggaatccttccagactttgatgatgttctctttgttagagttctcttgcatggcactgatggttctttgcata

SEQ ID NO: 517631 - DNA, 120 bp, Artificial Sequence
  ENSG00000164983_55 (sequence is synthesized)
gagtactgtgtgtaatgagcctataggtccttatgactccctgatctagaaactaaattagagacattgtgtttgggggcaaatagatcacttcgatgcctttagtattgaactcatgga

SEQ ID NO: 517632 - DNA, 120 bp, Artificial Sequence
  ENSG00000164983_56 (sequence is synthesized)
gttctgggtgggtggccaggggcattgtccagtatcaaaacaactttaaaaggcagtcctttactggcaaggtacttcctgacttcaaagacaaaacagcaatggagccaatccagaaaa

SEQ ID NO: 517633 - DNA, 120 bp, Artificial Sequence
  ENSG00000164983_57 (sequence is synthesized)
agggttcttgtcgtccaggccttcttgttatactgccagaagactggcagctggtgtttatcttttcccttcaagacttgggagttaacagctttatagataagtgcagtcttgatcata

SEQ ID NO: 517634 - DNA, 120 bp, Artificial Sequence
  ENSG00000164983_58 (sequence is synthesized)
aacccaacagcatttgcaaaaacccatagcattagcctgtccctttctgccttaaaccctggtgctcacttctcttctttactaataaatgttctttgtggcatattattatttttccat

SEQ ID NO: 517635 - DNA, 120 bp, Artificial Sequence
  ENSG00000164983_59 (sequence is synthesized)
aatagggcacttctgtctgccttaagaacctgttttggtagatatgctttctcctcaatgattttcttaatggcatctgggaactcatttgctgcctcttggtcatcaggagctgcctct

SEQ ID NO: 517636 - DNA, 120 bp, Artificial Sequence
  ENSG00000164983_60 (sequence is synthesized)
tctgttatcttaacatttttaaagccaaacttctttctaatattatcaagccatcctttgctggcattaaattctctagatttagatccttcaccttccttttgctttaaattgtcatat

SEQ ID NO: 517637 - DNA, 120 bp, Artificial Sequence
  ENSG00000164983_61 (sequence is synthesized)
aatgaccgccttttctccaatcatattagagcctataggtacgtctttcttgtagcaatactgcacccacataaaagttgcatttttaatacgagataaaaaggtatatcacaaaaagtg

SEQ ID NO: 517638 - DNA, 120 bp, Artificial Sequence
  ENSG00000164983_62 (sequence is synthesized)
taaggtttgctggtatagatgcagtaatggcttcataaattttcttaattttttttaacagtggtccttatgctggattcatttatcttgaaggatgggcaactacagctgcagaccagt

SEQ ID NO: 517639 - DNA, 120 bp, Artificial Sequence
  ENSG00000164983_63 (sequence is synthesized)
acacatcaagcaatttaactttttcttgtaatgtcatgactttgctccttgggagcacttccagcgtcactagcgggacttcatatgggtcccttggtattattgcaaggtttatggttg

SEQ ID NO: 517640 - DNA, 120 bp, Artificial Sequence
  ENSG00000164983_64 (sequence is synthesized)
tactaaacatgatgaaaaataactgagaaccatgagagatcactttttactacgatacacaatttactggagagatgaactgcccatgtggagatgataaacatcacatggcattttaag

SEQ ID NO: 517641 - DNA, 120 bp, Artificial Sequence
  ENSG00000164983_65 (sequence is synthesized)
tgaatacagcacttgagctcacagcaacagcaacaggaggtagctctgaaattatggtagtagtgcagtatgtactatagttaatcttatccagttgtaatttagtactgcatctttatg

SEQ ID NO: 517642 - DNA, 120 bp, Artificial Sequence
  ENSG00000164983_66 (sequence is synthesized)
agttgtaatttagtactgcatctttatgtttgtctcaactgcaaatggctccaatgtatagtctgtgtatgcgttaagttttgataaattttaactttttttttttttgagatggagtct

SEQ ID NO: 517643 - DNA, 120 bp, Artificial Sequence
  ENSG00000164983_67 (sequence is synthesized)
ccggccaattttaacttttcataatagatttgtatatatttatggtagtaaatgataaaatagactagtgtctacatatattatatgaattcatgacacacctttttcttagtttttcag

SEQ ID NO: 517644 - DNA, 120 bp, Artificial Sequence
  ENSG00000164983_68 (sequence is synthesized)
tctaagctacatggtgcatctgcaagttttttaaattgttgcaaatttccaaaaaaattttcaatatatttatcaaaatatgcatataagcggtcctatgcagttcaaacccgtgtttga

SEQ ID NO: 517645 - DNA, 120 bp, Artificial Sequence
  ENSG00000164983_69 (sequence is synthesized)
gaatcaactttatgacttccagtgtcattctccaccatttctgcagtttatcacattttgcttcaggcagatttggtaaatcttcaatgatagttctctaggccattgttttgtaacatg

SEQ ID NO: 517646 - DNA, 120 bp, Artificial Sequence
  ENSG00000164983_70 (sequence is synthesized)
atcaaatgcttaatgggaaatagaatatgtatatgtattctttgtctaccaactaccaaagaaacaaatactcctcagtttgacttgacttagtaaataaacttgtgttgggttaatgga

SEQ ID NO: 517647 - DNA, 120 bp, Artificial Sequence
  ENSG00000164985_0 (sequence is synthesized)
agcagcgcagctacggcggcggcagcggcggcgcggttgcgattccgagccgttgagacgcctctgcggcagctggtggcgcaggtggcttgcgtggacgcgggtagaggcgaccggcca

SEQ ID NO: 517648 - DNA, 80 bp, Artificial Sequence
  ENSG00000164985_1 (sequence is synthesized)
tagaggcgaccggccagcaaccgcagcgtcggcgcccgcggccccggcagcaggcgcgtcgggacgccccgaggcatcct

SEQ ID NO: 517649 - DNA, 120 bp, Artificial Sequence
  ENSG00000164985_2 (sequence is synthesized)
gccgcatctcctcgccgcctcccgggcttcggacccccggtctcgcccccgaaacatgactcgcgatttcaaacctggagacctcatcttcgccaagatgaaaggttatccccattggcc

SEQ ID NO: 517650 - DNA, 120 bp, Artificial Sequence
  ENSG00000164985_3 (sequence is synthesized)
agctcgagtagacgaagttcctgatggagctgtaaagccacccacaaacaaactacccattttcttttttggaactcatgagactgcttttttaggaccaaaggatatatttccttactc

SEQ ID NO: 517651 - DNA, 120 bp, Artificial Sequence
  ENSG00000164985_4 (sequence is synthesized)
agaaaataaggaaaagtatggcaaaccaaataaaagaaaaggttttaatgaaggtttatgggagatagataacaatccaaaagtgaaattttcaagtcaacaggcagcaactaaacaatc

SEQ ID NO: 517652 - DNA, 120 bp, Artificial Sequence
  ENSG00000164985_5 (sequence is synthesized)
aaatgcatcatctgatgttgaagttgaagaaaaggaaactagtgtttcaaaggaagataccgaccatgaagaaaaagccagcaatgaggatgtgactaaagcagttgacataactactcc

SEQ ID NO: 517653 - DNA, 120 bp, Artificial Sequence
  ENSG00000164985_6 (sequence is synthesized)
aaaagctgccagaagggggagaaagagaaaggcagaaaaacaagtagaaactgaggaggcaggagtagtgacaacagcaacagcatctgttaatctaaaagtgagtcctaaaagaggacg

SEQ ID NO: 517654 - DNA, 120 bp, Artificial Sequence
  ENSG00000164985_7 (sequence is synthesized)
acctgcagctacagaagtcaagattccaaaaccaagaggcagacccaaaatggtaaaacagccctgtccttcagagagtgacatcattactgaagaggacaaaagtaagaaaaaggggca

SEQ ID NO: 517655 - DNA, 120 bp, Artificial Sequence
  ENSG00000164985_8 (sequence is synthesized)
agaggaaaaacaacctaaaaagcagcctaagaaggatgaagagggccagaaggaagaagataagccaagaaaagagccggataaaaaagaggggaagaaagaagttgaatcaaaaaggaa

SEQ ID NO: 517656 - DNA, 120 bp, Artificial Sequence
  ENSG00000164985_9 (sequence is synthesized)
aaatttagctaaaacaggggttacttcaacctccgattctgaagaagaaggagatgatcaagaaggtgaaaagaagagaaaaggtgggaggaactttcagactgctcacagaaggaatat

SEQ ID NO: 517657 - DNA, 120 bp, Artificial Sequence
  ENSG00000164985_10 (sequence is synthesized)
gctgaaaggccaacatgagaaagaagcagcagatcgaaaacgcaagcaagaggaacaaatggaaactgagcagcagaataaagatgaaggaaagaagccagaagttaagaaagtggagaa

SEQ ID NO: 517658 - DNA, 120 bp, Artificial Sequence
  ENSG00000164985_11 (sequence is synthesized)
gaagcgagaaacatcaatggattctcgacttcaaaggatacatgctgagattaaaaattcactcaaaattgataatcttgatgtgaacagatgcattgaggccttggatgaacttgcttc

SEQ ID NO: 517659 - DNA, 120 bp, Artificial Sequence
  ENSG00000164985_12 (sequence is synthesized)
acttcaggtcacaatgcaacaagctcagaaacacacagagatgattactacactgaaaaaaatacggcgattcaaagttagtcaggtaatcatggaaaagtctacaatgttgtataacaa

SEQ ID NO: 517660 - DNA, 120 bp, Artificial Sequence
  ENSG00000164985_13 (sequence is synthesized)
caaagatcaagggaagaaagggccaaacaaaaagctagagaaggaacaaacagggtcaaagactctaaatggaggatctgatgctcaagatggtaatcagccacaacataacggggagag

SEQ ID NO: 517661 - DNA, 120 bp, Artificial Sequence
  ENSG00000164985_14 (sequence is synthesized)
caatgaagacagcaaagacaaccatgaagccagcacgaagaaaaagccatccagtgaagagagagagactgaaatatctctgaaggattctacactagataactaggttgacatacctgg

SEQ ID NO: 517662 - DNA, 120 bp, Artificial Sequence
  ENSG00000164985_15 (sequence is synthesized)
aatatagagaacacttgagaagtttgtaatggttttcatttgaaatagactgctgaaagttttaaatttttataagcataggtttgatgttgaaaacttgttttgagggagaaaatccct

SEQ ID NO: 517663 - DNA, 120 bp, Artificial Sequence
  ENSG00000164985_16 (sequence is synthesized)
ttgttttaaagtaaagtaaacattatcgctaagtgtacttgtgcagtattaacagctacattatacagtaaatgtgggataaaatccatttagaaaatgttaaactgcttttccagacat

SEQ ID NO: 517664 - DNA, 120 bp, Artificial Sequence
  ENSG00000164985_17 (sequence is synthesized)
ggttgtagcatattttcaattagtgtgtgtatgttaatgtgtaattgatagtagaacaaagttacatttttaaaactgctacttgtataaaccttgcctcttttcccaaatactgtgggt

SEQ ID NO: 517665 - DNA, 120 bp, Artificial Sequence
  ENSG00000164985_18 (sequence is synthesized)
tttgtgcatagtttttacaaaccttggatttaccagactgtcttttcactgtttgtgggttttgtagaagttacacatttttatggtagataaaatgttacttctatacaagtactcact

SEQ ID NO: 517666 - DNA, 120 bp, Artificial Sequence
  ENSG00000164985_19 (sequence is synthesized)
ccctttttatcaaaagttaattttaatctcacagtctacattgtgctacattatccagcttctttggaacaatgtgtgctctgtatggttttttttggtatgacaactaattaagcaact

SEQ ID NO: 517667 - DNA, 120 bp, Artificial Sequence
  ENSG00000164985_20 (sequence is synthesized)
gacatggaactgagaattctacaaactataaaacattaatttttgaaggtaatttagttttgtggctgggcattcagtgaagtcttaggacttctttgcagacaactgactgggtatata

SEQ ID NO: 517668 - DNA, 120 bp, Artificial Sequence
  ENSG00000164985_21 (sequence is synthesized)
taggaatgaatctggctttagggttaaatcatttaaggtccttttataggcaggcactagtaactaaaactgaaaactaagtaagtttatttttgaggaatgttgttaaaaatgtcttta

SEQ ID NO: 517669 - DNA, 120 bp, Artificial Sequence
  ENSG00000164985_22 (sequence is synthesized)
ggaagtcactaaaacttaattggaagaaaaaatcatgatgcttatacaataaatatgaataaatgttatataaggaaactcacctatttgaaatcatggctatattgtttttattttcta

SEQ ID NO: 517670 - DNA, 120 bp, Artificial Sequence
  ENSG00000164985_23 (sequence is synthesized)
gattccaaaaatacaaacactagttgttccagcattgtactttgataagtctgtacattgacgtgtatggactaaatccagggtaaaatcaatgttacaaaatttaagggtatgttaact

SEQ ID NO: 517671 - DNA, 120 bp, Artificial Sequence
  ENSG00000164985_24 (sequence is synthesized)
aaaggatagcatttctaagatattttgaatattagggtcatttggcacttctcagcaagtaggatacttctcatgttttgaaattatatgaatatggaaaaaaatggcttaagaccagcg

SEQ ID NO: 517672 - DNA, 120 bp, Artificial Sequence
  ENSG00000164985_25 (sequence is synthesized)
tctctgtatgacattgtgtggttgaccctctgagataactgttttcatctacagaattgcatttttgcttttaaagaggtcttataatggaactaggaatcaccgttttgagagaacctg

SEQ ID NO: 517673 - DNA, 120 bp, Artificial Sequence
  ENSG00000164985_26 (sequence is synthesized)
catatataccagtcattatctgtttggtccttatacagttttaacttacttagatttattctagttaagccataagttcaacgtgtaaacttgttttcattaaagaatttttctatcaaa

SEQ ID NO: 517674 - DNA, 120 bp, Artificial Sequence
  ENSG00000164985_27 (sequence is synthesized)
gggggagaaagagaaaggtaatttcactgacttaccaaccatggggatctgaaaagaatttttattttaattgggttgagggagagtagatacaatgaaaccttaaatttcagcttttat

SEQ ID NO: 517675 - DNA, 120 bp, Artificial Sequence
  ENSG00000164985_28 (sequence is synthesized)
atggaaactgagcaccaaacaacatgtaatctacagtaataaaaaatatatctcattttgggctcaaagcattaatccagttactgaaaagagaatacaagtggagcaaacaagagatga

SEQ ID NO: 517676 - DNA, 120 bp, Artificial Sequence
  ENSG00000164985_29 (sequence is synthesized)
agatcttgatacagactcattggactgaatttcccccttccccccattgatggaagaatgttccagattctaaattgaggacttcattattaatggcattactgtgttatgattaacaaa

SEQ ID NO: 517677 - DNA, 85 bp, Artificial Sequence
  ENSG00000164985_30 (sequence is synthesized)
aagcttaaaatgaagctttgtgtttgaaagtaataacaagctcagacgaagatggtggttgtacattattcatctagaaaatata

SEQ ID NO: 517678 - DNA, 120 bp, Artificial Sequence
  ENSG00000164985_31 (sequence is synthesized)
acgaagatggtggttgtacattattcatctagaaaatataaaaattcattttgttttgaagctagttattaaactggaatagcagttatatccctgagaatggggcccttctcttgacat

SEQ ID NO: 517679 - DNA, 120 bp, Artificial Sequence
  ENSG00000164985_32 (sequence is synthesized)
tcctttgttgtttaattctttagaatcttaataaatgtttttttaatcctgagagattaaacagtagtagacttgttaagaatgaaactgtaaccaaaattttaaaataaagtttttttt

SEQ ID NO: 517680 - DNA, 75 bp, Artificial Sequence
  ENSG00000164985_33 (sequence is synthesized)
agagccattgcgcgcagcctttaatttctaaatccatagaattgtattggaatatgaacctcatgagttaaattg

SEQ ID NO: 517681 - DNA, 120 bp, Artificial Sequence
  ENSG00000164985_34 (sequence is synthesized)
gcagatcgaaaacgcaagcaagaggaacaaatggaaactgagcattttgctctgtaaagcatttcagatgcagcttgtgtgaaatgcattatgcaaaataaagtttattgtattgtattc

SEQ ID NO: 517682 - DNA, 120 bp, Artificial Sequence
  ENSG00000164985_35 (sequence is synthesized)
taaaggcaaatcagagctaatttaacagggttattaggcagtagacattaattcaagggggaaatcgtaacgtaataggaaactttaaaatctttgaactttggaaagagtctttaagtc

SEQ ID NO: 517683 - DNA, 120 bp, Artificial Sequence
  ENSG00000164985_36 (sequence is synthesized)
tctatttttaaggtagcgtttacagatgctataggtttattttttactggaattgatatttccttaaccaaaaaggaaagtagaaattctctgagcaataagaatgattgatggatgaaa

SEQ ID NO: 517684 - DNA, 120 bp, Artificial Sequence
  ENSG00000164985_37 (sequence is synthesized)
atacataaggaaagttttaataagtgatctgatattcctatacagtaaaataagtgctttttataaggactagttggtacctaatttttggttttatgatatcagatatgcaaactgtgt

SEQ ID NO: 517685 - DNA, 120 bp, Artificial Sequence
  ENSG00000164985_38 (sequence is synthesized)
atattgtggagaaggtgagaagaggaagtctagctagttccctccatgtgtttatatggtccctgaagctctgctgcctctggtgggtatgtgggcagagaactgatgtgaagcaaattt

SEQ ID NO: 517686 - DNA, 120 bp, Artificial Sequence
  ENSG00000164985_39 (sequence is synthesized)
cgtatgttactgccaagtgcatgggatcactcaggaggctaccgttaatttcccgaagaatgttcctatgtacctataatttaatggccttagaaatactatataatctggttgattttg

SEQ ID NO: 517687 - DNA, 120 bp, Artificial Sequence
  ENSG00000164985_40 (sequence is synthesized)
gacttgaagtttggtgtctgtcataattttggtagtcttgtttacctgggatgaggagaaacaaaactattgctattctgattagaattatgtattcctaagagtggctgcaatggcaat

SEQ ID NO: 517688 - DNA, 120 bp, Artificial Sequence
  ENSG00000164985_41 (sequence is synthesized)
atttggtttaaagttgcttagctactgtataaactttcacacaatgtctttaatagctctattgagatggaatttacatacaaagaagttcacctgcttaaagtgattttcaatagattt

SEQ ID NO: 517689 - DNA, 120 bp, Artificial Sequence
  ENSG00000164985_42 (sequence is synthesized)
tagtatatttagtagattttagtatattgactatcataaccttttgatgatcactttcccctctccaaccgtaaacaaccactagtctactgtctgtatagacttaccagttctggacat

SEQ ID NO: 517690 - DNA, 120 bp, Artificial Sequence
  ENSG00000164985_43 (sequence is synthesized)
tttatttgaatggtgtcatacaatatttcataataagtttttaaaaaaatacaactttggatccagaattggtttggccttcatcataattagagttaggttcaagtgtattctatatat

SEQ ID NO: 517691 - DNA, 120 bp, Artificial Sequence
  ENSG00000164985_44 (sequence is synthesized)
aacaatataatttttaagaagtgataagtttctgattccatgggatactttaaagaaactcttcagtaaatttaatagaggacaaaagtatcttttaatggaaaatggtgcagtgtatat

SEQ ID NO: 517692 - DNA, 120 bp, Artificial Sequence
  ENSG00000164985_45 (sequence is synthesized)
gtgtatattagagtagggcttttcaaagtgtgttgtcaggtctagcaccattagcatctcttgcgaactttaattaaaatgtaagttcttggctgggtgtggtggctgacacctgtaatc

SEQ ID NO: 517693 - DNA, 90 bp, Artificial Sequence
  ENSG00000164985_46 (sequence is synthesized)
ccaacactttgggaggccaaggcgggagggtcacttgagttcaggagttggagaccagcctgcaacatggtgaaactgtttgtggtggca

SEQ ID NO: 517694 - DNA, 120 bp, Artificial Sequence
  ENSG00000164985_47 (sequence is synthesized)
ttcattttccagactttatgaagccttttgaagaagtgacttttcccatgtgttagaaaaatcttcaatatatgatgatgatcttatttcaggcttcattctcttctgagaggatgaaat

SEQ ID NO: 517695 - DNA, 120 bp, Artificial Sequence
  ENSG00000164985_48 (sequence is synthesized)
tgactgaggcagtcactctgtgaattatttttgaatttaaacgaagtgcagataggatttaattgatactggctttgcaagaagtgtactcatcctcaaccatttgtttgtataatataa

SEQ ID NO: 517696 - DNA, 120 bp, Artificial Sequence
  ENSG00000164985_49 (sequence is synthesized)
tacatatagatagaggggcgataatatactggtagacaaagaatgcaggaaatgcccttattcatcacaccaccaagcaggcctcaccctaaagaccagcaaaagtaacaaaagcacatt

SEQ ID NO: 517697 - DNA, 120 bp, Artificial Sequence
  ENSG00000164985_50 (sequence is synthesized)
tggaaacccaggaagccagtaaaagtaaatctaaaggctgacagggtgtacattattatgtatgtgcaatataaatcaaattcaaagctgttttctcttaaattttgatacttatagaga

SEQ ID NO: 517698 - DNA, 120 bp, Artificial Sequence
  ENSG00000164985_51 (sequence is synthesized)
ctggaatgagttaagactttgggggatggggactgttggaagggcatggttgtgttttgaaatgtgaggacatgagatttgagagagggggcaggggcagaatgatatggtttggctctg

SEQ ID NO: 517699 - DNA, 86 bp, Artificial Sequence
  ENSG00000164985_52 (sequence is synthesized)
gggcctcacaaatctcaccttgaattctaataatccccaggtgttaagggcggaaccaggtggaggtaattgaatgatggaggtgg

SEQ ID NO: 517700 - DNA, 120 bp, Artificial Sequence
  ENSG00000164989_0 (sequence is synthesized)
gaaagtctgggaaggtctgcgagagaagcggagtgttttcagctccggaagtggcagttgtaaacttcacctcccgggggctcttccccttctgtacccctttgctgtttgtccccctcc

SEQ ID NO: 517701 - DNA, 120 bp, Artificial Sequence
  ENSG00000164989_1 (sequence is synthesized)
tcccgggtcctggagtccgtcgtgttccaacagtttttgctcttattcccgtgggctgcctgggcctcctttcacccgtgagacttggagcggcccctggggtcttgggtgtgcagcacg

SEQ ID NO: 517702 - DNA, 120 bp, Artificial Sequence
  ENSG00000164989_2 (sequence is synthesized)
gatcacgcgagacccctgagacctcaaatcatctaacgtgaagccacagacatcttgggcaattttaatcatcaagaaagaaatatgtcattaagaaatagcagggtattttgaaagagt

SEQ ID NO: 517703 - DNA, 120 bp, Artificial Sequence
  ENSG00000164989_3 (sequence is synthesized)
tggaaaacatcatgaatttgaatacttcaagtaatactggtgatacccaaaggttgaagattgcctcattggatgtaaaacaaatacttaaaaatgaaacagagttggatattactgata

SEQ ID NO: 517704 - DNA, 120 bp, Artificial Sequence
  ENSG00000164989_4 (sequence is synthesized)
atctcaggaagaaactccattgggctaaaaaagaaaagttagaaataacaaccaaacacaatgcagagctggcaagctatgagagccagattgccaagctacggtccgaggttgaaaagg

SEQ ID NO: 517705 - DNA, 120 bp, Artificial Sequence
  ENSG00000164989_5 (sequence is synthesized)
gagaagcattgcgacaaagtctggaatatgacctagctgttgctagaaaggaagctggtcttggaagacgggctgctgaagaaagattagccgaggcacataggatccaagaaaaactct

SEQ ID NO: 517706 - DNA, 120 bp, Artificial Sequence
  ENSG00000164989_6 (sequence is synthesized)
gtgcacagaattcagaacttcaagcaaagacaaatgagactgagaaagcatttcagacttctcagcaaaaatggaaagaagaatgcagaagatttgaacatgatttggaggaaagagaca

SEQ ID NO: 517707 - DNA, 120 bp, Artificial Sequence
  ENSG00000164989_7 (sequence is synthesized)
atatgatccaaaattgcaatcgagaatatgatttacttatgaaagaaaaaagcagactagagaaaactctacaggaagcgttggaaaaacatcaacgggagaagaatgagatggagtctc

SEQ ID NO: 517708 - DNA, 120 bp, Artificial Sequence
  ENSG00000164989_8 (sequence is synthesized)
atatcagggagacagcattggaggagtttagattacaagaagaacaatgggaagcagaaagaagagaattacaatttatagtacaggagcaagatactgctgtgcaaaatatgcataaga

SEQ ID NO: 517709 - DNA, 120 bp, Artificial Sequence
  ENSG00000164989_9 (sequence is synthesized)
aagtagaaaaattagaaacagaacatatggactgctctgaccttttacggcgacaaacaagtgaacttgaatttagcactcaacgagaggaacgccttagaaaagaatttgaggcaacta

SEQ ID NO: 517710 - DNA, 120 bp, Artificial Sequence
  ENSG00000164989_10 (sequence is synthesized)
ctctaagagtgaggaaattagaagaaaacattgaagcagaaagagcagcgcatttggaatcaaaatttaattctgaaattattcagttacggattcgagaccttgaaggagctttgcaag

SEQ ID NO: 517711 - DNA, 120 bp, Artificial Sequence
  ENSG00000164989_11 (sequence is synthesized)
tagagaaggccagtcaagcagaagctgttgctgatttggaaattatcaagaatgaattcaaagaagttgaaagtgcatatgagcgagaaaagcataatgcacaagagagctttgcaaaac

SEQ ID NO: 517712 - DNA, 120 bp, Artificial Sequence
  ENSG00000164989_12 (sequence is synthesized)
taaatttattagaaaaagagtatttctccaaaaataagaaactaaatgaagacatcgaggaacagaagaaagtaattatagacctttcaaagagactccagtataatgaaaaaagttgca

SEQ ID NO: 517713 - DNA, 120 bp, Artificial Sequence
  ENSG00000164989_13 (sequence is synthesized)
gtgaattacaggaagaactagtaatggctaagaagcaccaggccttcctagtagagacatgtgaaaataacgtgaaagaattggaatcgatcttggacagctttactgtgtcgggccagt

SEQ ID NO: 517714 - DNA, 120 bp, Artificial Sequence
  ENSG00000164989_14 (sequence is synthesized)
ggacatcaggcatccacaaggacaaagataaacctcccagcttctctgttgtccttgagagattgaggcgtaccttgacagattaccagaacaagctggaagatgcatctaatgaggaaa

SEQ ID NO: 517715 - DNA, 120 bp, Artificial Sequence
  ENSG00000164989_15 (sequence is synthesized)
aggcatgtaatgaacttgattctacgaaacagaagatagactctcacactaaaaatataaaggaacttcaggataaactggctgatgttaataaagagttaagtcatttacacactaaat

SEQ ID NO: 517716 - DNA, 120 bp, Artificial Sequence
  ENSG00000164989_16 (sequence is synthesized)
gtgcagaccgagaggctttaataagcactttaaaagtggaactacaaaatgtgctgcactgttgggagaaagaaaaggctcaggcagcccagtctgaaagtgaactgcagaagctttccc

SEQ ID NO: 517717 - DNA, 120 bp, Artificial Sequence
  ENSG00000164989_17 (sequence is synthesized)
aggctttccataaggatgcagaggagaagctaaccttccttcacaccttatatcagcacttggtagcaggctgtgtgctcataaaacaaccagaaggcatgctggataaattctcttggt

SEQ ID NO: 517718 - DNA, 120 bp, Artificial Sequence
  ENSG00000164989_18 (sequence is synthesized)
ctgagctttgtgcagtcttacaggagaatgttgatgccctgattgcagacctcaacagggctaatgagaagataaggcatctagagtatatctgtaaaaacaagtctgacacgatgagag

SEQ ID NO: 517719 - DNA, 120 bp, Artificial Sequence
  ENSG00000164989_19 (sequence is synthesized)
agcttcagcagactcaggaagacacctttaccaaagtggcagaacagatcaaagcccaagagagctgctggcacagacaaaagaaggaactagagctgcagtattctgaactcttcctgg

SEQ ID NO: 517720 - DNA, 120 bp, Artificial Sequence
  ENSG00000164989_20 (sequence is synthesized)
aggtgcagaagagggcacagaaatttcaagaaattgctgaaaaaaacatggaaaaattgaaccatattgagaagtcacatgaacagttggttcttgaaaattcgcacttcaaaaaactgt

SEQ ID NO: 517721 - DNA, 120 bp, Artificial Sequence
  ENSG00000164989_21 (sequence is synthesized)
tatcacagactcaaagggaacagatgtccttgctggcagcctgtgcattaatggctggtgccttatatcccctctatagccgatcatgcgccttgtctacacagagagattttctccagg

SEQ ID NO: 517722 - DNA, 120 bp, Artificial Sequence
  ENSG00000164989_22 (sequence is synthesized)
agcaggtcaacacctttgagttgttcaaactggaaattagaactctagcccaggctttgtcaactgtagaggaaaagaagcaagaggaagccaagatgaaaaagaaaacattcaaaggat

SEQ ID NO: 517723 - DNA, 120 bp, Artificial Sequence
  ENSG00000164989_23 (sequence is synthesized)
tgatacgtatatttcggaaaggtgttattgctgttttggcagcaaacagactcaagattttgggccaatcatgtgcctctctttttacctggatggagagtttcaaagaaggcataggca

SEQ ID NO: 517724 - DNA, 120 bp, Artificial Sequence
  ENSG00000164989_24 (sequence is synthesized)
tgttagtgtgcacaggagagccccaagacaagcataaatttccaaaacatcaaaaggagcagttgcgttgtttacaagcgctcagttggctcaccagttctgaccttcttgctgcaataa

SEQ ID NO: 517725 - DNA, 120 bp, Artificial Sequence
  ENSG00000164989_25 (sequence is synthesized)
tcagttctatggctgaattacaagacgtcattggtaaagcagatccaaattccagaatttgtggacatttactcataggtgcagccaagaattcttttgcaaaactcatggataaaatta

SEQ ID NO: 517726 - DNA, 120 bp, Artificial Sequence
  ENSG00000164989_26 (sequence is synthesized)
gtctggtaatggaatgtatacctctgcacagtagcaggagtattacatatgtagaaaaagattccctggttcagaggctggcccatggacttcataaagtaaacacactggccctgaaat

SEQ ID NO: 517727 - DNA, 120 bp, Artificial Sequence
  ENSG00000164989_27 (sequence is synthesized)
aagactgcatgctgcagaagtggagcgccgctcactacgcttagaggtcacagaattcaaacgaagtgtgaatgaaatgaaaaaggagcttgacaaagcccagggtctgcaaatgcaatt

SEQ ID NO: 517728 - DNA, 120 bp, Artificial Sequence
  ENSG00000164989_28 (sequence is synthesized)
aaatgaatttaagcagtctaaattgatcacccatgagaagtttgaaagtgcatgtgaagaactaaataatgcattacttcgggaagagcaggcacaaatgctattgaatgaacaggcaca

SEQ ID NO: 517729 - DNA, 120 bp, Artificial Sequence
  ENSG00000164989_29 (sequence is synthesized)
acaactacaggaattgaattataaacttgaattgcactccagtgaggaagctgacaaaaaccaaactcttggagaagctgttaagagtctctccgaggcaaagatggagctgagaagaaa

SEQ ID NO: 517730 - DNA, 120 bp, Artificial Sequence
  ENSG00000164989_30 (sequence is synthesized)
agatcaatctctgcgtcagctcaatagacatcttacccagctggagcaggacaagcgtcgactggaggagaacatccatgatgcagagagtgccctccgcatggcagccaaagacaaaga

SEQ ID NO: 517731 - DNA, 120 bp, Artificial Sequence
  ENSG00000164989_31 (sequence is synthesized)
atgtgttgctaatcacatgagagcagtagaaaatacgcttcacaaggtcagagatcagatctcgctgtcatggtctgcggcaagtaggaatgacttcaccctacagctacccaaactgca

SEQ ID NO: 517732 - DNA, 120 bp, Artificial Sequence
  ENSG00000164989_32 (sequence is synthesized)
cctggagacctttgcaatggaggggctcaagggcgggccagaggtggtagcatgccaggctatgattaaaagtttcatggatgtctaccagcttgcaagcactagaatcatgacattaga

SEQ ID NO: 517733 - DNA, 120 bp, Artificial Sequence
  ENSG00000164989_33 (sequence is synthesized)
gaaggaaatgacatctcatcgaagtcacattgcagccttgaaatcagaacttcacacagcttgtttacgtgaaaatgcaagtttacaatcaataggatcacgagaccattcaaatctctc

SEQ ID NO: 517734 - DNA, 120 bp, Artificial Sequence
  ENSG00000164989_34 (sequence is synthesized)
cattccttcaagagctcctcttcctgctgacacaactggtattggggatttcttaccattgaaagctgaacttgatactacttacactttcttaaaggagacatttataaatactgtgcc

SEQ ID NO: 517735 - DNA, 120 bp, Artificial Sequence
  ENSG00000164989_35 (sequence is synthesized)
ccatgctctgacatcatctcactcctctccagtgactatgtctgctaatgccaacagaccaactcagattggattatgacttcatgaaattaaaaaatggaggaagagttaacagtacaa

SEQ ID NO: 517736 - DNA, 120 bp, Artificial Sequence
  ENSG00000164989_36 (sequence is synthesized)
ttaaaattgttttgaatgggaattttcttatcagttgacttttgtttcagcagaagtggcagtggatttaaaaaatttgtgcgctatcttgatgtattctggtagctctgtctccttgaa

SEQ ID NO: 517737 - DNA, 120 bp, Artificial Sequence
  ENSG00000164989_37 (sequence is synthesized)
taaggaaatagccaacttttttctctccaagttttatttgttatcacagttgctcatttttatgtaacatatttttaaatgttaaggaatgacacattttgggtaatttccctcagactt

SEQ ID NO: 517738 - DNA, 120 bp, Artificial Sequence
  ENSG00000164989_38 (sequence is synthesized)
aaaaaaatcaataagccattttagtctctatctatcaaagttgtttcatacttgtctattttaaagcaggactgcaatgctttaataggattgagagagctatttgaaatgtatgccaat

SEQ ID NO: 517739 - DNA, 120 bp, Artificial Sequence
  ENSG00000164989_39 (sequence is synthesized)
gattcctgtcatttcatggcagcccggccatggttcactgagccccctcttctctcttgtcagctcaactgaagacaagcatttagttgcaaactttaagcaggttgtgcaaaacagaaa

SEQ ID NO: 517740 - DNA, 120 bp, Artificial Sequence
  ENSG00000164989_40 (sequence is synthesized)
tgatgtgactgcttctcctcctgcacaataatgtcactcctggtcaatgtgagaaggtcaggttgctccttgtaaagctacatgataccacttgcccatttgaacaagttaagttaactg

SEQ ID NO: 517741 - DNA, 120 bp, Artificial Sequence
  ENSG00000164989_41 (sequence is synthesized)
ctgaatctggtccctgaaggcactgaaaactcattcttttagcaagtctgcatttgataagaaagtagagcaattgtgctggaggatttctgtggtatgtttaggcacttcataaggaca

SEQ ID NO: 517742 - DNA, 120 bp, Artificial Sequence
  ENSG00000164989_42 (sequence is synthesized)
gttcccacactaggatagcaggtaatatatttagtataagctgaaaaacttcaaggtaatggctgttttgaccttcaaaatagactccttttttgtttttgttgttggtaggacccaaga

SEQ ID NO: 517743 - DNA, 120 bp, Artificial Sequence
  ENSG00000164989_43 (sequence is synthesized)
gtgacacccatctttgatgctgacagaatttaaaacaaggccattgccctgcattttctgccttgtagcacacaaaagtaaaattgtatgtcaggccgagatgtcggggagctgacaaga

SEQ ID NO: 517744 - DNA, 120 bp, Artificial Sequence
  ENSG00000164989_44 (sequence is synthesized)
tgccccagtgacatttcagctagaaagagcaagtgtcttgcaaccaagtggtcaaatatcaaataataggtcaagcaggaaggagctgagttctaaccacaaagaggtttctggtaactt

SEQ ID NO: 517745 - DNA, 120 bp, Artificial Sequence
  ENSG00000164989_45 (sequence is synthesized)
acttgacaagcttttgggtgctttgtggcttgacaaagtgatgttctgttgggtatcgctagacagactgttctttatcgccttcagaagatcagacattgacattgattaaactcttta

SEQ ID NO: 517746 - DNA, 120 bp, Artificial Sequence
  ENSG00000164989_46 (sequence is synthesized)
acccttaaaggttaaatccttgcagtttgcatcatggtaagtgaagaacaaaagaatatttgtagtaagaatttgtttttgtattaatcatttaactccctagtgctattaacttctgat

SEQ ID NO: 517747 - DNA, 120 bp, Artificial Sequence
  ENSG00000164989_47 (sequence is synthesized)
gtgaactatagcttttgacaaagagtcttgatacataatctattttttatattatttttcattatggaatctttcattatggatacattagagtataacagtatgtattacagaagtttt

SEQ ID NO: 517748 - DNA, 120 bp, Artificial Sequence
  ENSG00000164989_48 (sequence is synthesized)
tttgtcttatctttacagtgacatttgattcaaattacccaactgctgagaatttttttattggccttggtaaataagattttatactaactatttattagtagccaaattagccaagtg

SEQ ID NO: 517749 - DNA, 120 bp, Artificial Sequence
  ENSG00000164989_49 (sequence is synthesized)
atttatgccatctgagggaacacagcagtattactgtcgtactgtgtaacacatcctattcttgtaatactgaaccactataattagctttatataaaactttagaaagcttatatggag

SEQ ID NO: 517750 - DNA, 120 bp, Artificial Sequence
  ENSG00000164989_50 (sequence is synthesized)
taaaattatatctttaaccaaatttctcttaattctttccttggaattatttttaatatgacctgtgtaacatgacctgtatgaaattcaacttgcaaatttattataacatggaagtgc

SEQ ID NO: 517751 - DNA, 120 bp, Artificial Sequence
  ENSG00000164989_51 (sequence is synthesized)
tatttattgtttttatacagatcatataatttctgcacatttcagaacacctttctctgctgttccaaacaatgattaggatattgttcatacagaaattgatagacaattttttagttc

SEQ ID NO: 517752 - DNA, 120 bp, Artificial Sequence
  ENSG00000164989_52 (sequence is synthesized)
atgtgatatcactgagcttacaattctcactagagaagaacaaggttactatatgtaacctctatgtctaagtgtttgtgtgtgtgtatgcttgtgttgaatctgttttcagatcctact

SEQ ID NO: 517753 - DNA, 120 bp, Artificial Sequence
  ENSG00000164989_53 (sequence is synthesized)
gattttagaggaacaagcagctttgtaaaatgtgccttggaaaggccttggtcttcttgccttgattttataatctgttaatgggataactccaaaaataaatgtgtatgtgtctccata

SEQ ID NO: 517754 - DNA, 120 bp, Artificial Sequence
  ENSG00000164989_54 (sequence is synthesized)
gagacccctgaggtaaccgcacggtgtgggggcttcgaggcggacgacttgggagggaggtgttgagagggttgtaggggcccctgagtgagtttggggcggccctggggctgttggcgt

SEQ ID NO: 517755 - DNA, 120 bp, Artificial Sequence
  ENSG00000164989_55 (sequence is synthesized)
ctttggggcacgcctccagctccctgggctgggtctccccgcccacctggaggaagatctccgtggagcatcctagccagagatcgctgaggctgtaccagagcgccggatggggaccag

SEQ ID NO: 517756 - DNA, 120 bp, Artificial Sequence
  ENSG00000164989_56 (sequence is synthesized)
aggggaggcagaggaccgggatttggagcttcttagggttactgctgcggagcgctttcgttcccgagaatcaacctcaaatcatctaacgtgaagccacagacatcttgggcaatttta

SEQ ID NO: 517757 - DNA, 120 bp, Artificial Sequence
  ENSG00000164989_57 (sequence is synthesized)
tggaggggctcaagggcgggccagaggtggtagcatgccaggttagagtctaaataacattgtttgctactgagacatatagaaaaataaattgcactaactggagagaatgaaagcctc

SEQ ID NO: 517758 - DNA, 120 bp, Artificial Sequence
  ENSG00000164989_58 (sequence is synthesized)
aaagtattgtgaataatttaaaggagatgcaaatagatgtttcttcatttttcttctatcatgtaacagtatactttacaaaatattgtttttttctttaaagcctagaactagcctatt

SEQ ID NO: 517759 - DNA, 120 bp, Artificial Sequence
  ENSG00000164989_59 (sequence is synthesized)
aaaataatccagaaaagtgtttttaccaaggaaaaatgtgttttatggcaaagtacagtattaaaagaaaatactttcctatcagcagaggacaataagacactaggctgttacctcttt

SEQ ID NO: 517760 - DNA, 120 bp, Artificial Sequence
  ENSG00000164989_60 (sequence is synthesized)
agcaagtctcaatttgttgcttttattgtttgaaaataagtaattttagaaaaaaaataaaataataaatcactttagttgtaaacatcaaaagagatacctgaaatatctcaatattaa

SEQ ID NO: 517761 - DNA, 120 bp, Artificial Sequence
  ENSG00000164989_61 (sequence is synthesized)
ttcttatgaagtaatttaatttcagcaaagcttaaacttatctgtgttttctattgaagagtattttaccctttaatatttagttttagtgaacattgtaagatgtgcaaattgggtcat

SEQ ID NO: 517762 - DNA, 120 bp, Artificial Sequence
  ENSG00000164989_62 (sequence is synthesized)
ttcatttataaaacttaaaatatcaaatcataagaactcaaataactttaaagtacactaataaacttatttttagaaacattcattttcggatgctgtaggtatccttctattttatgt

SEQ ID NO: 517763 - DNA, 120 bp, Artificial Sequence
  ENSG00000164989_63 (sequence is synthesized)
cactattgtattaatattattgtgatcaattttttccttaaggttatttttcttaatctgacaaaatgaaattcagtgtgtccttttaatgcccaaaaccttcattaaaaaaagaaaact

SEQ ID NO: 517764 - DNA, 120 bp, Artificial Sequence
  ENSG00000164989_64 (sequence is synthesized)
atcaacattatgtaaattataggaagcatgatatttcaaaagagactgtccttgttcaatagcactctattttttagtgtatttaaaaggagaaatatctcttaaaacttagtgtgtctt

SEQ ID NO: 517765 - DNA, 120 bp, Artificial Sequence
  ENSG00000164989_65 (sequence is synthesized)
tcacatgttgagatttaaaataatctttttcattttagtttatgaccctgtggaattttaattttatagaaaattaatgtcagtgtgtgtgtggagcaatgttaattttttatatgctcc

SEQ ID NO: 517766 - DNA, 120 bp, Artificial Sequence
  ENSG00000164989_66 (sequence is synthesized)
ctccatatcctaatttaatttgttattagtaccaaattaatgctctacaaggaaaaaaatactcattgcttctttcattagattgtccaatatgtctaaaatatatataattataaaagt

SEQ ID NO: 517767 - DNA, 120 bp, Artificial Sequence
  ENSG00000164989_67 (sequence is synthesized)
ataaaatatttttcttctctgttatagggtagattgctgtactgttatttaagatgagatttaaaatgtgtattttaaatttgattgtcagtatttatgaattcatcattactatgaata

SEQ ID NO: 517768 - DNA, 120 bp, Artificial Sequence
  ENSG00000164989_68 (sequence is synthesized)
cagtctgatttgagatttttctagtggttgtaaaataatcctttacttggctatttcaattcagaatctcacaaggcttagtatttgtcgtaatttacaagtaaagacttcctcaaaact

SEQ ID NO: 517769 - DNA, 120 bp, Artificial Sequence
  ENSG00000164989_69 (sequence is synthesized)
ttcattaaagaagatgagggaaaataaacacacatgtacacgcacaccagataaactgaatgcttccttctgctggggacacgctgtagatgaaaaggaagggaaaagagacttcatttc

SEQ ID NO: 517770 - DNA, 120 bp, Artificial Sequence
  ENSG00000164989_70 (sequence is synthesized)
catacccactaaccatgccaacagaaggctttgtgaagaaggaagtaaaagctatcggtaggagttagaaaaaaacatttctagttacaagaacagcagaaaaagacctgaacttcagag

SEQ ID NO: 517771 - DNA, 120 bp, Artificial Sequence
  ENSG00000164989_71 (sequence is synthesized)
tggaccacaaatgaatatgaattaataacacagatctcttttcaaaagccaacacaaaatgaggatgtgttttttgcaaaagcagttgttcttgccactgggcttatgcttgtcattctt

SEQ ID NO: 517772 - DNA, 120 bp, Artificial Sequence
  ENSG00000164989_72 (sequence is synthesized)
tccatcacacacctgcagtttttccatttgagtgtaattctgttggaccttgaaagactttttgatctttgggacgctcttatcaccaaatgtatctttctgcaggaagaagacagaaga

SEQ ID NO: 517773 - DNA, 120 bp, Artificial Sequence
  ENSG00000164989_73 (sequence is synthesized)
aaggggtggactatgagatgggagcctgggtcccaatttcagttcaaccattaccaaccaggtggctttaggcaagtctggtcatttcctttgcctcagtggctttctataaaatggaat

SEQ ID NO: 517774 - DNA, 120 bp, Artificial Sequence
  ENSG00000164989_74 (sequence is synthesized)
tctatagggatgatgaaagcgaaaacgttagccactatgcttgctagtgctcaagaaatgattccttcctgcctgcctgcctcagttttccatctgtaaacaaggattcaactagaacat

SEQ ID NO: 517775 - DNA, 120 bp, Artificial Sequence
  ENSG00000164989_75 (sequence is synthesized)
attctgatcagcactacgtttgcactttggagctatgattgagtaaaataaaagttacttgaacacaagtactgtgacatggcaaccaagatggctactgagtgacacacaggcagggag

SEQ ID NO: 517776 - DNA, 120 bp, Artificial Sequence
  ENSG00000164989_76 (sequence is synthesized)
cttacacaccgtggatacctggacgaagggaggattcaggtcccaggtgggatggtgccggatagtgtgacatttcatcatgtgcctccgaatggatggtattatcatgctaatgtctgc

SEQ ID NO: 517777 - DNA, 120 bp, Artificial Sequence
  ENSG00000164989_77 (sequence is synthesized)
agagaaggaagcacagattaggtgactgtggctactatgagggccaaggaggccctcccacccatcctgtgggatgcaccacctgcgctcactaggcctatggagaggggagtgactggg

SEQ ID NO: 517778 - DNA, 120 bp, Artificial Sequence
  ENSG00000164989_78 (sequence is synthesized)
gcacctgctcacccctgtaccatgcctgttcttcagcttcagctctggatcgcccagagagggactgctgcctgcatctgggttcctggacaaacatgcagtctaccagccagcgtgttc

SEQ ID NO: 517779 - DNA, 120 bp, Artificial Sequence
  ENSG00000164989_79 (sequence is synthesized)
tccaaaaagaggaaaatgagtgttctgctcccaagagatcacggagtccacctgagtcccaccagccgagtcatttgtctgctcctgtagcatttacctttatagtgcaaaacctcaggg

SEQ ID NO: 517780 - DNA, 120 bp, Artificial Sequence
  ENSG00000164989_80 (sequence is synthesized)
tgctggcatttcagccacatccaggaggttgatgcatggatctgtggcgaatgtcaccacctgtgacagcgctcttatttatgaactgaagaacactctccatcttggccctcttgccag

SEQ ID NO: 517781 - DNA, 120 bp, Artificial Sequence
  ENSG00000164989_81 (sequence is synthesized)
ctatgagaccttgtctttgcctatagctggctgcattggacatggattcctggcccaagttcattaaagaagatgagggaaaataaacacacatgtacacgcacaccagataaactgaat

SEQ ID NO: 517782 - DNA, 120 bp, Artificial Sequence
  ENSG00000164989_82 (sequence is synthesized)
agttctaatagtgttgtgattttgactttgtagcctcatgtttattttctctcttcctgattttttatttatatattctatttaatagtttttgctttttcaagttgtcaccagttcttt

SEQ ID NO: 517783 - DNA, 120 bp, Artificial Sequence
  ENSG00000164989_83 (sequence is synthesized)
gtagaataagaaaaaagtataactaactggaggaaagaatgcattcacagaaagccaaggaatgataacactaatgctaatacaatactactgctaataaaaataactgcctttattgaa

SEQ ID NO: 517784 - DNA, 120 bp, Artificial Sequence
  ENSG00000164989_84 (sequence is synthesized)
cagtggtgtgatcatagctcactgcagtctcaaatgccagggctcaagcaatcttcctgcctcagcctgctgagtacctaggaccacaggtgcgcaccaccatacccagctacttggaca

SEQ ID NO: 517785 - DNA, 120 bp, Artificial Sequence
  ENSG00000164989_85 (sequence is synthesized)
catacccagctacttggacaaaaaacagtgtttgatggactgcctaggtgaagacctggaaaaggaagggttatctacaaatgaactgatgaagttcttcaaattgatgccgcttatata

SEQ ID NO: 517786 - DNA, 120 bp, Artificial Sequence
  ENSG00000164989_86 (sequence is synthesized)
aactgaccccgatttgccctattctgcatgacaacttaagtgacagcagttagaagaaaatacagcaatgaatatgcaacttaaggattaaggaagatgcagtaaatcagtctaaagcta

SEQ ID NO: 517787 - DNA, 120 bp, Artificial Sequence
  ENSG00000164989_87 (sequence is synthesized)
agtacaatgataatttcttgtaataattccacagatgccttacatttgttaaacagactgttattactctcaaatactcaaatatatgttttcattatatacatgtatttgaattgaaga

SEQ ID NO: 517788 - DNA, 120 bp, Artificial Sequence
  ENSG00000164989_88 (sequence is synthesized)
agagaactaaaagttattccaacagagatcctaattcttttccctcttatttaaacttggaattatcaaaatcacagttttaaaaatattttatttaggatatccacatgcaaaagaatg

SEQ ID NO: 517789 - DNA, 120 bp, Artificial Sequence
  ENSG00000164989_89 (sequence is synthesized)
aaattggaccttggtcttacaacatgcacaataatcaactcaaaatggagtacacaatgttagaaagacctaatgccataaaacaaaggaaacaacaaaatggaaaggcaacttgtggaa

SEQ ID NO: 517790 - DNA, 120 bp, Artificial Sequence
  ENSG00000164989_90 (sequence is synthesized)
taggaaaaactatttataaactgtatatccagtaaggagtttaatatccaaaatatataaggaactcatacaacacaataacttttttaaaaaatgggcaaaggacctaaaaagacattt

SEQ ID NO: 517791 - DNA, 120 bp, Artificial Sequence
  ENSG00000164989_91 (sequence is synthesized)
ttccaaagaacacatgcaagtggccaataagtaaaaaggtgttcaacaccgctaaccattagggaaatgaaaatcaaaaccacaatgagatatcacatcacaactgttaggatggctatt

SEQ ID NO: 517792 - DNA, 120 bp, Artificial Sequence
  ENSG00000164989_92 (sequence is synthesized)
accagaaagtcaaaagacaacaagtgttggcaaggatgtagagaaaagcgaacctttgtgcactattggtggaaatgtaaattggtatagctattatggaaaacagtatggaatttcctc

SEQ ID NO: 517793 - DNA, 120 bp, Artificial Sequence
  ENSG00000164989_93 (sequence is synthesized)
tagaactaccatatgatccagcaatcctacttctgggtatacatcaaaaggaaatgaaaccgttgtcttgaagacatgtctacacttccatgttcattgtagcattattcacaatagcca

SEQ ID NO: 517794 - DNA, 120 bp, Artificial Sequence
  ENSG00000164989_94 (sequence is synthesized)
tacacttccatgttcattgtagcattattcacaatagccaagatatagaaacaacctaagtgtcctctgatgaatgaatggacagaggaaatgtttatacacacacacacacacacacac

SEQ ID NO: 517795 - DNA, 120 bp, Artificial Sequence
  ENSG00000164989_95 (sequence is synthesized)
cccagttggagaaaaaaagagttagatagcagctaacttggggaatgaacttcgacgtcagggaaaaaccatcaccaatatgaaatgtcagagatcagatctcgctgtcatggtctgcgg

SEQ ID NO: 517796 - DNA, 120 bp, Artificial Sequence
  ENSG00000164989_96 (sequence is synthesized)
aagacttgccaatactagccaatcaaatccttccttcaattttagaaaacaggaattgcatgtaaacaagtctgggccaactcttacaacctgctttctatatcctcctcctctgttctc

SEQ ID NO: 517797 - DNA, 120 bp, Artificial Sequence
  ENSG00000164989_97 (sequence is synthesized)
gtctccataaggtgaccctaggagactgtgcagcgtgactggccgcttgttttatcccagactcttttccagggtcttacttctgtcatccagactggagtgcagcagtgcgatctcagc

SEQ ID NO: 517798 - DNA, 120 bp, Artificial Sequence
  ENSG00000164989_98 (sequence is synthesized)
ctcccaggtttaagcgactctcctgcctcagcctccacaataactgggaccacaggctatgattaaaagtttcatggatgtctaccagcttgcaagcactagaatcatgacattagagaa

SEQ ID NO: 517799 - DNA, 120 bp, Artificial Sequence
  ENSG00000165006_0 (sequence is synthesized)
gggaagtaggacttcaacatggcggctgcggcactggcggtggctacggtgacggcctggcccggagcgggcagagttggaggtggtggcgttcgctctccctaggggctgtcgggagct

SEQ ID NO: 517800 - DNA, 120 bp, Artificial Sequence
  ENSG00000165006_1 (sequence is synthesized)
cagcggggaccgagcctgggaggccggccggtgccagcacctttcggcttctgagacggcggcagcagcggcattcaggttctaaatggcttctaagaagttgggtgcagattttcatgg

SEQ ID NO: 517801 - DNA, 120 bp, Artificial Sequence
  ENSG00000165006_2 (sequence is synthesized)
gactttcagttaccttgatgatgtcccatttaagacaggagacaaattcaaaacaccagctaaagttggtctacctattggcttctccttgcctgattgtttgcaggttgtcagagaagt

SEQ ID NO: 517802 - DNA, 120 bp, Artificial Sequence
  ENSG00000165006_3 (sequence is synthesized)
acagtatgacttctctttggaaaagaaaaccattgagtgggctgaagagattaagaaaatcgaagaagccgagcgggaagcagagtgcaaaattgcggaagcagaagctaaagtgaattc

SEQ ID NO: 517803 - DNA, 120 bp, Artificial Sequence
  ENSG00000165006_4 (sequence is synthesized)
taagagtggcccagagggcgatagcaaaatgagcttctccaagactcacagtacagccacaatgccacctcctattaaccccatcctcgccagcttgcagcacaacagcatcctcacacc

SEQ ID NO: 517804 - DNA, 120 bp, Artificial Sequence
  ENSG00000165006_5 (sequence is synthesized)
aactcgggtcagcagtagtgccacgaaacagaaagttctcagcccacctcacataaaggcggatttcaatcttgctgactttgagtgtgaagaagacccatttgataatctggagttaaa

SEQ ID NO: 517805 - DNA, 120 bp, Artificial Sequence
  ENSG00000165006_6 (sequence is synthesized)
aactattgatgagaaggaagagctgagaaatattctggtaggaaccactggacccattatggctcagttattggacaataacttgcccaggggaggctctgggtctgtgttacaggatga

SEQ ID NO: 517806 - DNA, 120 bp, Artificial Sequence
  ENSG00000165006_7 (sequence is synthesized)
ggaggtcctggcatccttggaacgggcaaccctagatttcaagcctcttcataaacccaatggctttataaccttaccacagttgggcaactgtgaaaagatgtcactgtcttccaaagt

SEQ ID NO: 517807 - DNA, 120 bp, Artificial Sequence
  ENSG00000165006_8 (sequence is synthesized)
gtccctcccccctatacctgcagtaagcaatatcaaatccctgtctttccccaaacttgactctgatgacagcaatcagaagacagccaagctggcgagcactttccatagcacatcctg

SEQ ID NO: 517808 - DNA, 120 bp, Artificial Sequence
  ENSG00000165006_9 (sequence is synthesized)
cctccgcaatggcacgttccagaattccctaaagccttccacccaaagcagtgccagtgagctcaatgggcatcacactcttgggctttcagctttgaacttggacagtggcacagagat

SEQ ID NO: 517809 - DNA, 120 bp, Artificial Sequence
  ENSG00000165006_10 (sequence is synthesized)
gccagccctgacatcctcccagatgccttccctctctgttttgtctgtgtgcacagaggaatcatcacctccaaatactggtcccacggtcacccctcctaatttctcagtgtcacaagt

SEQ ID NO: 517810 - DNA, 120 bp, Artificial Sequence
  ENSG00000165006_11 (sequence is synthesized)
agtgtgtggagacggtggtcaacatgggctactcgtacgagtgtgtcctcagagccatgaagaagaaaggagagaatattgagcagattctcgactatctctttgcacatggacagcttt

SEQ ID NO: 517811 - DNA, 120 bp, Artificial Sequence
  ENSG00000165006_12 (sequence is synthesized)
gtgagaagggcttcgaccctcttttagtggaagaggctctggaaatgcaccagtgttcagaagaaaagatgatggagtttcttcagttaatgagcaaatttaaggagatgggctttgagc

SEQ ID NO: 517812 - DNA, 120 bp, Artificial Sequence
  ENSG00000165006_13 (sequence is synthesized)
tgaaagacattaaggaagttttgctattacacaacaatgaccaggacaatgctttggaagacctcatggctcgggcaggagccagctgagaccaggccctgcctaggccctgccgcagaa

SEQ ID NO: 517813 - DNA, 120 bp, Artificial Sequence
  ENSG00000165006_14 (sequence is synthesized)
ccaccatccctgggaggccctgcagagcccacctgtggggaaagagaaggggcagcttccggattttcttttgggggttagaaggtcaggtgtggagactgctcgccagtctctgtgagc

SEQ ID NO: 517814 - DNA, 120 bp, Artificial Sequence
  ENSG00000165006_15 (sequence is synthesized)
ctaggccctgagctggggaggtggggaagattcgggcatgtgagtgcccccagaactgtcctggctccttccgtattaaacgcatttgcattttgagaagtgtccttcccacttcagccc

SEQ ID NO: 517815 - DNA, 120 bp, Artificial Sequence
  ENSG00000165006_16 (sequence is synthesized)
tccggagagactaccctagtctttctggggtgtttatgtcctcagctgaagcctggcctagttgctgagaggggctggggagatggggcgggagggccagactcagtgctgctgtggagc

SEQ ID NO: 517816 - DNA, 120 bp, Artificial Sequence
  ENSG00000165006_17 (sequence is synthesized)
taggtgcttcccccttcccctgagactggtggactgaactccagtcaagttgagttcaagtgaaagattcttccagggttttattttttcccctcctaacaaagtctcatagtgttaaca

SEQ ID NO: 517817 - DNA, 120 bp, Artificial Sequence
  ENSG00000165006_18 (sequence is synthesized)
ctggttctgcaatatctctgaggtgcaaagaatgcacttttccctatggggcccagagtttgccttttctgccaggcagtcaccatgcttccctaccccagcctgtttcttttggcttgg

SEQ ID NO: 517818 - DNA, 120 bp, Artificial Sequence
  ENSG00000165006_19 (sequence is synthesized)
tttggaccacagtcctctgctacccagggttttagagcccctgctctaggaaacagtttaagaaatcattggccccttcccagcacattgaatgggtaagcagacaggccatgatttagt

SEQ ID NO: 517819 - DNA, 120 bp, Artificial Sequence
  ENSG00000165006_20 (sequence is synthesized)
tggccagcactaactccacctctgttctccttgaacagcttcccctccagcccactgctttaggatgacacaatgaataacacctagtcatagaaatcagtctctctggtttgttttgta

SEQ ID NO: 517820 - DNA, 120 bp, Artificial Sequence
  ENSG00000165006_21 (sequence is synthesized)
ttatgttgtacatcattaaagatctaaatacaaaggatatacagtcttgaatctaaaataatttgctaactaactattttgattcttcagagagaactactaataaaaatctaaaaggta

SEQ ID NO: 517821 - DNA, 120 bp, Artificial Sequence
  ENSG00000165023_0 (sequence is synthesized)
acaccctgcgctgccctgtcctgcgcgagtggagctctgaagaagctctgagcggagttgtgttcttccccaggtgcgtcctggctgagagttggagctctccagcaacatgcctgagca

SEQ ID NO: 517822 - DNA, 120 bp, Artificial Sequence
  ENSG00000165023_1 (sequence is synthesized)
gagtaacgattaccgggtggccgtgtttggggctggcggtgttggcaagagctccctggtgttgaggtttgtgaaaggcacattccgggagagctacatcccgacggtggaagacaccta

SEQ ID NO: 517823 - DNA, 120 bp, Artificial Sequence
  ENSG00000165023_2 (sequence is synthesized)
ccggcaagtgatcagctgtgacaagagcatatgcacattgcagatcaccgacacgacggggagccaccagttcccggccatgcagcggctgtccatctccaaagggcacgccttcatcct

SEQ ID NO: 517824 - DNA, 120 bp, Artificial Sequence
  ENSG00000165023_3 (sequence is synthesized)
ggtgtactccattaccagccgacagtccttggaggagctcaagcccatctacgaacaaatctgcgagatcaaaggggacgtggagagcatccccatcatgctggtggggaacaagtgtga

SEQ ID NO: 517825 - DNA, 120 bp, Artificial Sequence
  ENSG00000165023_4 (sequence is synthesized)
tgagagccccagccgcgaggtgcagagcagcgaggcggaggccttggcccgcacatggaagtgtgccttcatggagacctcagccaagctcaaccataacgtgaaggagcttttccagga

SEQ ID NO: 517826 - DNA, 120 bp, Artificial Sequence
  ENSG00000165023_5 (sequence is synthesized)
gctgctcaacctggagaagcgcaggaccgtgagtctccagatcgacgggaaaaagagcaagcagcagaaaaggaaagagaagctcaaaggcaagtgcgtgatcatgtgaaggcccttcct

SEQ ID NO: 517827 - DNA, 120 bp, Artificial Sequence
  ENSG00000165023_6 (sequence is synthesized)
gcgggaggagcagctgtgtgtccccggcacctcactcccccaaaatgacacccaccgtcgtcagggtagcatgtataatgcccacgtgttaaacattgcatttaatcgagatgcgtccta

SEQ ID NO: 517828 - DNA, 120 bp, Artificial Sequence
  ENSG00000165023_7 (sequence is synthesized)
ttgtccttaagagggcgtttcacaccaccaacagtaagccacccactctggagtcacagaatctgccaggcggttcaagtgaaaaccaacacactcagcatccctgggaactgagaggtg

SEQ ID NO: 517829 - DNA, 120 bp, Artificial Sequence
  ENSG00000165023_8 (sequence is synthesized)
ccagcaattgctgaaggtggcgatgaacacccgaaggtgggagggaggactggtacccacaaagcaacatgtaccgagaggactaaatgtcatctacgtgcatgtgagagcgtgttaacc

SEQ ID NO: 517830 - DNA, 120 bp, Artificial Sequence
  ENSG00000165023_9 (sequence is synthesized)
tagagttacctgcaccaaccccagacagaagccaatcacatctttgggggaggggaggggcaggaagaggtgagaagatcagatggtccaaagtggaccacacttggtccattttacact

SEQ ID NO: 517831 - DNA, 120 bp, Artificial Sequence
  ENSG00000165023_10 (sequence is synthesized)
tttttaaaggggattaaaaaacacagcctctcccccaaagggtgtccgttcttaattcccacctggcctgttaggagccttgctaccctgaggggatgtgttcaccttacctagacctag

SEQ ID NO: 517832 - DNA, 120 bp, Artificial Sequence
  ENSG00000165023_11 (sequence is synthesized)
ttaggaagtatcattttaagctattagagtatttatcttcatgtgcagggataagtgcactaacagtgtgctgctctgtcggaagttcttcagtttttaagtgaggatatcgtgacagta

SEQ ID NO: 517833 - DNA, 120 bp, Artificial Sequence
  ENSG00000165023_12 (sequence is synthesized)
ttaaaacatcgcaataatgttcctgtgtgttatacatcgagggttttagaaatgtgattttcttcttttgacctgtgaggagtataacttctttcagccctcagattttaaatacaagca

SEQ ID NO: 517834 - DNA, 120 bp, Artificial Sequence
  ENSG00000165023_13 (sequence is synthesized)
aataaactcactatttttagacgtttttttcctccaaggtggttttcttctcttaaataactcgatctgtacccagctgggtagcagccagcaaaggccatcagacaaccagaagcacat

SEQ ID NO: 517835 - DNA, 120 bp, Artificial Sequence
  ENSG00000165023_14 (sequence is synthesized)
ccatttttgtagtgtcacaaacatgtatatgccacactttgcaccttaatgaaatactttgaaacagaagttattcactgtgtttttgatgatctatctgtattggaaatatgttcctgg

SEQ ID NO: 517836 - DNA, 120 bp, Artificial Sequence
  ENSG00000165023_15 (sequence is synthesized)
aaaatgcatttaaataatagtaaattctcttgcatgttccattatacgtgtcttctaagagctgttcaatacagtattcactctagaaacaattatctttttctcttaatgattttgtgt

SEQ ID NO: 517837 - DNA, 120 bp, Artificial Sequence
  ENSG00000165023_16 (sequence is synthesized)
gcatctttaatctttcaagccaaattacagctatttcaggtttcctgtgttagcttggggataggatggtggctggagacaggcaggcttctctgccctgggaagagcccactcagctta

SEQ ID NO: 517838 - DNA, 120 bp, Artificial Sequence
  ENSG00000165023_17 (sequence is synthesized)
ttggacttggcttcctgaaaactcccactgatagtgcctgttagatctcctgtttgtttcagttggcagaacatttactggccccaactgtggcatcatcctctcagcagtcttcctgtc

SEQ ID NO: 517839 - DNA, 120 bp, Artificial Sequence
  ENSG00000165023_18 (sequence is synthesized)
acccgcctggcaggcagaaggagctgcagtcccacgtgggcctgcctgggggggtgggggctgcatggctgttgggtggcagtgtcagcacagggagggcttaagttggggatgtttgac

SEQ ID NO: 517840 - DNA, 120 bp, Artificial Sequence
  ENSG00000165023_19 (sequence is synthesized)
caggccacctcctgcaactgctgtttctcctgtccctcctatgcagggcttgcagcagcagcagtgtggccatctccatcccccaaagcacacttgctctctcaatatgtcctagttttc

SEQ ID NO: 517841 - DNA, 120 bp, Artificial Sequence
  ENSG00000165023_20 (sequence is synthesized)
ttcagccttttctggttcagttcccttgtcctgatctcatcctctctggtctcccaataactcacccttgggatgtgtttagagcgtgggaggtgcctttgagaactgcttgactccatg

SEQ ID NO: 517842 - DNA, 120 bp, Artificial Sequence
  ENSG00000165023_21 (sequence is synthesized)
atctcctagaacaaaaccgccctgactttacagggggaacactcatgctgagctgagaaagcagagaagtggcgtgggagccagctgggggtgaagagcatttgggccagtcccgtggcc

SEQ ID NO: 517843 - DNA, 120 bp, Artificial Sequence
  ENSG00000165023_22 (sequence is synthesized)
cccttcagattcctcaagcaggattgttctgttctaaaaagctgttgcacagcattcgcaatgagatctttagttggcggattttctggaacatttgtttttcaacttgtcccgacattt

SEQ ID NO: 517844 - DNA, 120 bp, Artificial Sequence
  ENSG00000165023_23 (sequence is synthesized)
tttttctgtttctattctgagagagagatgatcaagttttaatttgggtataggttaaatggaagaagaaacagaacttcatggccaaagtagacctatagattttgattgggttctttg

SEQ ID NO: 517845 - DNA, 120 bp, Artificial Sequence
  ENSG00000165023_24 (sequence is synthesized)
ttaacagtagaatgcgatctttgccactgactgtagtattaataaggttttaatgtgagatattcctgcaaaccatcccatttctactgattgtaagtcagaatttcttttatccctttc

SEQ ID NO: 517846 - DNA, 120 bp, Artificial Sequence
  ENSG00000165023_25 (sequence is synthesized)
aaatcagtttctacatgtttaagtgttcagggcttcatcagcatgagaagtttgtaattactgaaagtctgatttcattcaggacacattttttccttcatattttttctgtgaatttat

SEQ ID NO: 517847 - DNA, 120 bp, Artificial Sequence
  ENSG00000165023_26 (sequence is synthesized)
aggctaggaaggctattgaagcctcaattatgggtcttcattttgagatcgttttctatgagctgaactgaggatatcaatggttatctcaaaatcgtcttttaggagatccccaattga

SEQ ID NO: 517848 - DNA, 120 bp, Artificial Sequence
  ENSG00000165023_27 (sequence is synthesized)
ctcagagtttgaggagttagtatcacagaattagatttttttaaagcatttgtacgtttccattcccaaatatgtagctgtggttcttgaaaacacatcctacattgcatatgggcatag

SEQ ID NO: 517849 - DNA, 120 bp, Artificial Sequence
  ENSG00000165023_28 (sequence is synthesized)
cagtttttgacccaggcagaataagttaatatttaattaaatattgctttgaagatggcgctctgggcatgagcatggggctccatgacttcccttctatccccatgagcccctcctcca

SEQ ID NO: 517850 - DNA, 120 bp, Artificial Sequence
  ENSG00000165023_29 (sequence is synthesized)
tccagcgacaagccatgggcatgcatacaatgcagcaagaccaacacaagagcaatattgaattgttcattctatctaaaattacatgtatataaaatatataatttatcttcctgcatt

SEQ ID NO: 517851 - DNA, 120 bp, Artificial Sequence
  ENSG00000165023_30 (sequence is synthesized)
aagtataaagtcataaattgtacatatctgtaagctagtatatttgtttcactgtttgtaatatttaagaaatgctcattctttgtagaacaaaaatgtattaaatattttaaaaattgc

SEQ ID NO: 517852 - DNA, 120 bp, Artificial Sequence
  ENSG00000165023_31 (sequence is synthesized)
ttgctctgtgatacttaatttttttccccaaaatttgtaatgtgttgcttctacataagttctctggaaatatctacaactaataggacacatgtaaatccttgaagacacatcctggaa

SEQ ID NO: 517853 - DNA, 120 bp, Artificial Sequence
  ENSG00000165023_32 (sequence is synthesized)
ttcataccccacaaggacagtgtgtatacaaagtatttgcagagcatgacttttatatgtgtgggatatcaatgtgtatatttatatttaaagtgtatttattgttacaagtctattctc

SEQ ID NO: 517854 - DNA, 120 bp, Artificial Sequence
  ENSG00000165023_33 (sequence is synthesized)
tattatattttatttactctgcggttataaaaatcacccttgcatacaagtttctagttgccagtgatgttctggaaataatgggagatattacaataaagctacagttatgacaccctg

SEQ ID NO: 517855 - DNA, 120 bp, Artificial Sequence
  ENSG00000165023_34 (sequence is synthesized)
agtgcgctgcgcctgcctccgggaggagccgcatccacacaccctgcgctgccctgtcctgcgcgagtggagctctgaagaagctctgagcggagttgtgttcttccccagagtctcgtg

SEQ ID NO: 517856 - DNA, 120 bp, Artificial Sequence
  ENSG00000165023_35 (sequence is synthesized)
gtgctgggattacagatgtgagtcaccgcgcccagacaagaaggatctcttttaattttcttggtgcgtcctggctgagagttggagctctccagcaacatgcctgagcagagtaacgat

SEQ ID NO: 517857 - DNA, 120 bp, Artificial Sequence
  ENSG00000165025_0 (sequence is synthesized)
tcctctcagatttgtgtgcttcttcccttcccacattctatactgcccagcgcctgggattccagatctgcgtttgaatccaggaaagggaggtggacacctgcgcaggtgtgtgccctc

SEQ ID NO: 517858 - DNA, 120 bp, Artificial Sequence
  ENSG00000165025_1 (sequence is synthesized)
cggcccctgaagcatggccagcagcggcatggctgacagcgccaaccacctgcccttctttttcggcaacatcacccgggaggaggcagaagattacctggtccaggggggcatgagtga

SEQ ID NO: 517859 - DNA, 120 bp, Artificial Sequence
  ENSG00000165025_2 (sequence is synthesized)
tgggctttatttgctgcgccagagccgcaactacctgggtggcttcgccctgtccgtggcccacgggaggaaggcacaccactacaccatcgagcgggagctgaatggcacctacgccat

SEQ ID NO: 517860 - DNA, 120 bp, Artificial Sequence
  ENSG00000165025_3 (sequence is synthesized)
cgccggtggcaggacccatgccagccccgccgacctctgccactaccactcccaggagtctgatggcctggtctgcctcctcaagaagcccttcaaccggccccaaggggtgcagcccaa

SEQ ID NO: 517861 - DNA, 120 bp, Artificial Sequence
  ENSG00000165025_4 (sequence is synthesized)
gactgggccctttgaggatttgaaggaaaacctcatcagggaatatgtgaagcagacatggaacctgcagggtcaggctctggagcaggccatcatcagtcagaagcctcagctggagaa

SEQ ID NO: 517862 - DNA, 120 bp, Artificial Sequence
  ENSG00000165025_5 (sequence is synthesized)
gctgatcgctaccacagcccatgaaaaaatgccttggttccatggaaaaatctctcgggaagaatctgagcaaattgtcctgataggatcaaagacaaatggaaagttcctgatccgagc

SEQ ID NO: 517863 - DNA, 120 bp, Artificial Sequence
  ENSG00000165025_6 (sequence is synthesized)
cagagacaacaacggctcctacgccctgtgcctgctgcacgaagggaaggtgctgcactatcgcatcgacaaagacaagacagggaagctctccatccccgagggaaagaagttcgacac

SEQ ID NO: 517864 - DNA, 120 bp, Artificial Sequence
  ENSG00000165025_7 (sequence is synthesized)
gctctggcagctagtcgagcattattcttataaagcagatggtttgttaagagttcttactgtcccatgtcaaaaaatcggcacacagggaaatgttaattttggaggccgtccacaact

SEQ ID NO: 517865 - DNA, 120 bp, Artificial Sequence
  ENSG00000165025_8 (sequence is synthesized)
tccaggttcccatcctgcgacttggtcagcgggtggaataatctcaagaatcaaatcatactccttcccaaagcctggccacagaaagtcctcccctgcccaagggaaccggcaagagag

SEQ ID NO: 517866 - DNA, 120 bp, Artificial Sequence
  ENSG00000165025_9 (sequence is synthesized)
tactgtgtcattcaatccgtatgagccagaacttgcaccctgggctgcagacaaaggcccccagagagaagccctacccatggacacagaggtgtacgagagcccctacgcggaccccga

SEQ ID NO: 517867 - DNA, 120 bp, Artificial Sequence
  ENSG00000165025_10 (sequence is synthesized)
ggagatcaggcccaaggaggtttacctggaccgaaagctgctgacgctggaagacaaagaactgggctctggtaattttggaactgtgaaaaagggctactaccaaatgaaaaaagttgt

SEQ ID NO: 517868 - DNA, 120 bp, Artificial Sequence
  ENSG00000165025_11 (sequence is synthesized)
gaaaaccgtggctgtgaaaatactgaaaaacgaggccaatgaccccgctcttaaagatgagttattagcagaagcaaatgtcatgcagcagctggacaacccgtacatcgtgcggatgat

SEQ ID NO: 517869 - DNA, 120 bp, Artificial Sequence
  ENSG00000165025_12 (sequence is synthesized)
cgggatatgcgaggccgagtcctggatgctggttatggagatggcagaacttggtcccctcaataagtatttgcagcagaacagacatgtcaaggataagaacatcatagaactggttca

SEQ ID NO: 517870 - DNA, 120 bp, Artificial Sequence
  ENSG00000165025_13 (sequence is synthesized)
tcaggtttccatgggcatgaagtacttggaggagagcaattttgtgcacagagatctggctgcaagaaatgtgttgctagttacccaacattacgccaagatcagtgatttcggactttc

SEQ ID NO: 517871 - DNA, 120 bp, Artificial Sequence
  ENSG00000165025_14 (sequence is synthesized)
caaagcactgcgtgctgatgaaaactactacaaggcccagacccatggaaagtggcctgtcaagtggtacgctccggaatgcatcaactactacaagttctccagcaaaagcgatgtctg

SEQ ID NO: 517872 - DNA, 120 bp, Artificial Sequence
  ENSG00000165025_15 (sequence is synthesized)
gagctttggagtgttgatgtgggaagcattctcctatgggcagaagccatatcgagggatgaaaggaagtgaagtcaccgctatgttagagaaaggagagcggatggggtgccctgcagg

SEQ ID NO: 517873 - DNA, 120 bp, Artificial Sequence
  ENSG00000165025_16 (sequence is synthesized)
gtgtccaagagagatgtacgatctcatgaatctgtgctggacatacgatgtggaaaacaggcccggattcgcagcagtggaactgcggctgcgcaattactactatgacgtggtgaacta

SEQ ID NO: 517874 - DNA, 120 bp, Artificial Sequence
  ENSG00000165025_17 (sequence is synthesized)
accgctcccgcacctgtcggtggctgcctttgatcacaggagcaatcacaggaaaatgtatccagaggaattgattgtcagccacctccctctgccagtcgggagagccaggcttggatg

SEQ ID NO: 517875 - DNA, 120 bp, Artificial Sequence
  ENSG00000165025_18 (sequence is synthesized)
gaacatgcccacaacttgtcacccaaagcctgtcccaggactcaccctccacaaagcaaaggcagtcccgggagaaaagacggatggcaggatccaaggggctagctggatttgtttgtt

SEQ ID NO: 517876 - DNA, 120 bp, Artificial Sequence
  ENSG00000165025_19 (sequence is synthesized)
ttcttgtctgtgtgattttcatacaggttatttttacgatctgtttccaaatccctttcatgtctttccacttctctgggtcccggggtgcatttgttactcatcgggcccagggacatt

SEQ ID NO: 517877 - DNA, 120 bp, Artificial Sequence
  ENSG00000165025_20 (sequence is synthesized)
ctcctgaagggaaggcaaaggcagaggaatttggctgcttctacggccatgagactgatccctggccactgaaaagctttcctgacaataaaaatgttttgaggctttaaaaagaaaatc

SEQ ID NO: 517878 - DNA, 120 bp, Artificial Sequence
  ENSG00000165025_21 (sequence is synthesized)
aagtttgaccagtgcagtttctaagcatgtagccagttaaggaaagaaagaaagaaaaaaaaaaaaggcctggatactgcttttgctgtctctgttatgagatggaagacttacatgttt

SEQ ID NO: 517879 - DNA, 120 bp, Artificial Sequence
  ENSG00000165025_22 (sequence is synthesized)
gtgataaaaggggaccatgagaatgaattggcttggcttactttccccctgaaatcctctctcctgcagactgtcttgaagacctggtgactggtaaataaagccctgcatggaggctgc

SEQ ID NO: 517880 - DNA, 120 bp, Artificial Sequence
  ENSG00000165025_23 (sequence is synthesized)
acagcaggggcaagaggcccatcccccagcatctcactgaggacagcttcaggctgccttcctctgaacgtggtccacaccttcctctcctccacagagagggtgccgccagaatcccct

SEQ ID NO: 517881 - DNA, 120 bp, Artificial Sequence
  ENSG00000165025_24 (sequence is synthesized)
gtcgctttctgtgtctgcaatggggggcagcacagggatcaaagccatctaaagagtttccaaagaaagtattaattcagaacaagccaaagaccctgagcctcaccacaaacaggcctt

SEQ ID NO: 517882 - DNA, 120 bp, Artificial Sequence
  ENSG00000165025_25 (sequence is synthesized)
ttggagtgtgaatttgagttgaagatacaagatcggagaatgattttctggtcttaactaatcctcatcttcatgtttgatctttaagaagtcatcacccattgatttcagttttgctgt

SEQ ID NO: 517883 - DNA, 79 bp, Artificial Sequence
  ENSG00000165025_26 (sequence is synthesized)
tctttaagaagtcatcacccattgatttcagttttgctgtacctcttgaaagttaaagagacatcaaggagtttgagac

SEQ ID NO: 517884 - DNA, 120 bp, Artificial Sequence
  ENSG00000165025_27 (sequence is synthesized)
gcactccagcttgggcatcacagcgagactctgtcaaaacaaacaaacaaaaaaacaacttaaagaggtaatttagccatcattcttatgccagcagatataaataaacttggacccatc

SEQ ID NO: 517885 - DNA, 120 bp, Artificial Sequence
  ENSG00000165025_28 (sequence is synthesized)
tggtcttcagctaaacctgagacattttaaagtgcatggacagccatggacagcaggccctcctctaacaggggatgcaaggcatggagaaagacaatcagtacccaagctcagccacag

SEQ ID NO: 517886 - DNA, 120 bp, Artificial Sequence
  ENSG00000165025_29 (sequence is synthesized)
aagacaggagtcactcatataacttgtgtttagaagtttttggtagccacgcacactttctgaaatcacactatctggtggtttaatcatatttttaaagacagaatccctgagtgctga

SEQ ID NO: 517887 - DNA, 120 bp, Artificial Sequence
  ENSG00000165025_30 (sequence is synthesized)
gcagattctcaaaacacatttagaatccctgaaattagaaagatcaatgacaaaatatctgtcagccaggccacaaacaggtgtaaaattatgaaaggagtggttggatgtgccaagttt

SEQ ID NO: 517888 - DNA, 120 bp, Artificial Sequence
  ENSG00000165025_31 (sequence is synthesized)
ggtaaagtggtgactgcatctgagaaagaggctgtgaggctgaactcttggtggcttccttctgtaacttccagagggagtcttcaacacaggccccgtgctcgtaggaatacggtagca

SEQ ID NO: 517889 - DNA, 120 bp, Artificial Sequence
  ENSG00000165025_32 (sequence is synthesized)
cctatgtaggaagtgcgtggagttttctgtcttctttctgtgtgatttttggcctttttatcagcacttctcccctcccaggagcctggggatgccaaacatccagaatgtgatgggaca

SEQ ID NO: 517890 - DNA, 120 bp, Artificial Sequence
  ENSG00000165025_33 (sequence is synthesized)
agatgggggcaggggcctcacctccctgcagaggtccggccaggtctccttgtccctggacaatctcctgagcctctctgcttggtggagcaggcacctgtgtgcagaattcccactgtg

SEQ ID NO: 517891 - DNA, 120 bp, Artificial Sequence
  ENSG00000165025_34 (sequence is synthesized)
gccagcacgaggaagtcttttctagtgaaaatgtgtcttgtggtcaggaataattatcctttcccctgtagccaccaaggagggcaaatagagaaaggtaacctaattgaaggattggtc

SEQ ID NO: 517892 - DNA, 120 bp, Artificial Sequence
  ENSG00000165025_35 (sequence is synthesized)
atgtgaaaagggctacatttgggaagctgggaaaggcctccaggcttctagagcagctagcttgggctggattctcatacccaggctgccccttggattgttctacccaagcttttccct

SEQ ID NO: 517893 - DNA, 120 bp, Artificial Sequence
  ENSG00000165025_36 (sequence is synthesized)
ggggtctgggctcactccataaggtaaggtgccttttaccttatggtccttctttagcaggtaacaaaggagcatcaggggcaggctgccctggtggcatcacactggctagtgaggccg

SEQ ID NO: 517894 - DNA, 120 bp, Artificial Sequence
  ENSG00000165025_37 (sequence is synthesized)
tgaatatcttgtcccccagcagggccgacagtttctatcacagaaaacagtgtgttcagtggtgaaaatcgttgcatgcatgttttcatctgagcgtgtccttctcccatactccctatc

SEQ ID NO: 517895 - DNA, 120 bp, Artificial Sequence
  ENSG00000165025_38 (sequence is synthesized)
agccagccctgcctgtagctgctgtatggtgattgcacttggacatcagtccaatgactgcaagtcggcctggattttcacttgcagaggctacagctgcattgtcaggtctcccagccc

SEQ ID NO: 517896 - DNA, 120 bp, Artificial Sequence
  ENSG00000165025_39 (sequence is synthesized)
tgcagagagctccctccactggttagcagtgtgttgtgttttccattcatttcagaagagctacattgtgtcactggacatttttaaaaactgtgatttttaataaaaatttaaaatttg

SEQ ID NO: 517897 - DNA, 120 bp, Artificial Sequence
  ENSG00000165025_40 (sequence is synthesized)
accccggcggcggctggagagcgaggaggagcgggtggccccgcgctgcgcccgccctcgcctcacctggcgcaggtggacacctgcgcaggtgtgtgccctccggcccctgaagcatgg

SEQ ID NO: 517898 - DNA, 120 bp, Artificial Sequence
  ENSG00000165028_0 (sequence is synthesized)
cctgcctgagttcgccagtggtccaggagccgcttttttccactcgggaagacttcagagaagtctcacaaaggactcggctggctgcttttctcagtgccgaagccgcgccatgctcgt

SEQ ID NO: 517899 - DNA, 120 bp, Artificial Sequence
  ENSG00000165028_1 (sequence is synthesized)
tctcagaagcggcctgaccaaggcgcttgcctcacggacgctcgcgcctcaggtgtgttcatcttttgctacgggccctagacaatacgatggaacgttctatgaatttcgtacttatta

SEQ ID NO: 517900 - DNA, 120 bp, Artificial Sequence
  ENSG00000165028_2 (sequence is synthesized)
ccttaaaccttcaaatatgaatgcgttcatggaaaatcttaagaaaaacattcatcttcggacctcttactctgaattggttggattctggagtgtagaatttggaggcagaacgaataa

SEQ ID NO: 517901 - DNA, 120 bp, Artificial Sequence
  ENSG00000165028_3 (sequence is synthesized)
agtgtttcatatttggaagtatgataattttgctcatcgagctgaagttcggaaagccttagccaactgtaaggaatggcaagaacaatctatcattccaaatttggctcgcattgataa

SEQ ID NO: 517902 - DNA, 120 bp, Artificial Sequence
  ENSG00000165028_4 (sequence is synthesized)
acaagagacggaaattacttacctgataccatggtccaaattagaaaagcctccaaaagaaggagtctatgaactagctgtttttcagatgaaacctggtgggccagctctgtggggtga

SEQ ID NO: 517903 - DNA, 120 bp, Artificial Sequence
  ENSG00000165028_5 (sequence is synthesized)
tgcatttgaaagagcaattaatgcccatgtcaatttaggctacacaaaagtagttggtgttttccacacagaatatggagaactcaacagagttcatgttctttggtggaatgagagtgc

SEQ ID NO: 517904 - DNA, 120 bp, Artificial Sequence
  ENSG00000165028_6 (sequence is synthesized)
agatagtcgtgcagctgggagacataagtcccatgaggatcccagagttgtggcggctgttcgggaaagtgtcaactacctagtttctcagcagaatatgcttctgattcctgcatcatt

SEQ ID NO: 517905 - DNA, 120 bp, Artificial Sequence
  ENSG00000165028_7 (sequence is synthesized)
ttcaccattgaaatagttttctactgaaatacaaaacatttcattaactgctctaagatgtgtctgctaatggtgcttaaattctcccaagaggttctcgcttttatttgaaggaggtgg

SEQ ID NO: 517906 - DNA, 120 bp, Artificial Sequence
  ENSG00000165028_8 (sequence is synthesized)
taagttaattagttaatttgctgtgcttcttgcatttttgaaagttacatattctccactgctttaagaaataattcagttcactttcaccttggcatttcagtatctgttacacattag

SEQ ID NO: 517907 - DNA, 120 bp, Artificial Sequence
  ENSG00000165028_9 (sequence is synthesized)
aagtagttgtcactatttcatcatcttggtttttcatttgttttagaatacctcttctgtattttgataactcattgctttatagcattttcttttactcaaataaggattttacatttc

SEQ ID NO: 517908 - DNA, 120 bp, Artificial Sequence
  ENSG00000165028_10 (sequence is synthesized)
cttgcctgacagtatttttgaattatttatataaaatatctatcttttcatcatgtctatagttcctgagattttaaaaaaatttgcttagtaaaggttattttgtgatataaaatggga

SEQ ID NO: 517909 - DNA, 120 bp, Artificial Sequence
  ENSG00000165028_11 (sequence is synthesized)
tttataaaaatattagattgtttatttctttactgtggaaaagtacaatgtcatctgtattaattattgcttttacattcattgattattagtcattctaacttggaaaataatgcaatt

SEQ ID NO: 517910 - DNA, 120 bp, Artificial Sequence
  ENSG00000165028_12 (sequence is synthesized)
gggtcacagtgttaaaaatctagaaaagacttgttggtttatatgctgaaattgttcatttataattaattttactaatttctacttagtttggatcactaacagagatcttgggacatt

SEQ ID NO: 517911 - DNA, 120 bp, Artificial Sequence
  ENSG00000165028_13 (sequence is synthesized)
tatttgttttaaagaaatatttatggttatggaaacgcttgccctaataaaaatcctgcatattcattgtttttttaaattcacattttatacttatatgatctctaaagctcttgctat

SEQ ID NO: 517912 - DNA, 120 bp, Artificial Sequence
  ENSG00000165028_14 (sequence is synthesized)
gttgctataagacagtaatatagtgataatttaccaactttattgaaaatgttgttacatcaataaaatagcatgctgggaacctgagaaggaaggtttctttagtactgccacagatgt

SEQ ID NO: 517913 - DNA, 120 bp, Artificial Sequence
  ENSG00000165028_15 (sequence is synthesized)
cctggagttttccttgaaacatctttcatttccattttacttgatgcctctacctactaaaactagatttggtacttccgatagtgtatatttacagctatattatatttacatttttac

SEQ ID NO: 517914 - DNA, 120 bp, Artificial Sequence
  ENSG00000165028_16 (sequence is synthesized)
agactatcttctgataatctgtatttacagctatgttattttatatttttaaaatcttacagctataaaatagtaaattgtgaattagctgtccaagggcaatttggaaaacaaactgta

SEQ ID NO: 517915 - DNA, 120 bp, Artificial Sequence
  ENSG00000165028_17 (sequence is synthesized)
cagtttcctctcatttatcaggctctaagcgatctgcagtttatctgggctattatgcaatgtgagatattatttatgagaggcaggcagtggcagcttaaacagacatacctcctcagc

SEQ ID NO: 517916 - DNA, 120 bp, Artificial Sequence
  ENSG00000165028_18 (sequence is synthesized)
attcttttccatgcagagttcaaagaggcctaagacatctcacatttatgtgaaatagttgaggcacaagtatgtggttaactacacataaattaccaataaaattaaaagttaactaaa

SEQ ID NO: 517917 - DNA, 120 bp, Artificial Sequence
  ENSG00000165028_19 (sequence is synthesized)
atactacagaagacatttaatattttgcttcagactgttatagtaccttagggttatgaacatcaattacctttgagccttactatatttaaagggaaggggaagctgacatttttatct

SEQ ID NO: 517918 - DNA, 120 bp, Artificial Sequence
  ENSG00000165028_20 (sequence is synthesized)
tttttaatgggtacactctacgttaccttaaaggcttccccggtttaagcaaaaatagaattatgtggtttaaatcatataccttattcttcatacttagctccaagtagattatgactt

SEQ ID NO: 517919 - DNA, 120 bp, Artificial Sequence
  ENSG00000165028_21 (sequence is synthesized)
ttcctaaaacttaacatgacagagatttgccttccagggggtctaatttgaagaggaaagtaatttaaatgtataggtttatataatagcattgtatttttctctattttattcattctt

SEQ ID NO: 517920 - DNA, 120 bp, Artificial Sequence
  ENSG00000165028_22 (sequence is synthesized)
tcattctcttcgatgactcccagcacctgcgcgtccatcttcattcttagccaatgacctttccttttacttaacagagaaaataacaatcagaagagtcttcataagttcccaccccgt

SEQ ID NO: 517921 - DNA, 120 bp, Artificial Sequence
  ENSG00000165028_23 (sequence is synthesized)
atgccctgccttctctcctttcactgtggatgaaccgcccgtgccccaagcaaagacaaaccctccacttgaacactcacttgctgaaggatgtggcttaggcagttttcctgtctcctg

SEQ ID NO: 517922 - DNA, 120 bp, Artificial Sequence
  ENSG00000165028_24 (sequence is synthesized)
aagccacagtattccccttcaactggattcttctcctcagcatataaatatacttttttttcctatctttaaaaaaaaaaaagagtaaaatcaccccatttttttcctttacaatatgac

SEQ ID NO: 517923 - DNA, 120 bp, Artificial Sequence
  ENSG00000165028_25 (sequence is synthesized)
tcaaaagagtagttcatacttcctgcctccattttcttccctcacattatctcttaaacattctctgatcacgccagccaaattgctcttgtcaactcatttcccagttctcatttcact

SEQ ID NO: 517924 - DNA, 120 bp, Artificial Sequence
  ENSG00000165028_26 (sequence is synthesized)
tgacttgttagcagttgacctctcctttcttctgggaagtttcttcgtttctccgaaacactcactgcacaagccttcatatctcctagtctccatcttgtctctttgacctctgatgta

SEQ ID NO: 517925 - DNA, 120 bp, Artificial Sequence
  ENSG00000165028_27 (sequence is synthesized)
aggactgagtccttggaccacttctcttttctatttatacttactccctgcgtcatcacccccagtcttgtggcttcaaatgctatctgtgtgtggatagctcctccagtccacacctct

SEQ ID NO: 517926 - DNA, 120 bp, Artificial Sequence
  ENSG00000165028_28 (sequence is synthesized)
tttctgaatcttttttcaaattcacacatgtgaatttgaattccaggctcatcacatccaggtgtgttccccacacctccacctgaatgtctattagaaatctcacacccctcttgtcca

SEQ ID NO: 517927 - DNA, 120 bp, Artificial Sequence
  ENSG00000165028_29 (sequence is synthesized)
aaactgagctcttgatctttaaccagaaactttatctcagctattggcaactccaggtttctgttttgctcaggccacagacttcagagtcattctcacactgccttttctctcatacac

SEQ ID NO: 517928 - DNA, 120 bp, Artificial Sequence
  ENSG00000165028_30 (sequence is synthesized)
cattatgtacctgtcagcaggtcccaaatatctagaatttgattgcttcacatccctatagcaactctcctggttcaagcccatcatcatctggatttttgggaagtggtcttaactggt

SEQ ID NO: 517929 - DNA, 120 bp, Artificial Sequence
  ENSG00000165028_31 (sequence is synthesized)
gtgctgcccttcccctctgctctcaaccctattttcaacatagcagtcagaataatctaaaatataaaccagatcatatcactcctctgctcaacaccccctcccaataccttcatgtca

SEQ ID NO: 517930 - DNA, 120 bp, Artificial Sequence
  ENSG00000165028_32 (sequence is synthesized)
tcctcagagttattgtccaagcctctaactgtggtctacaagtctttacatgatctgtcctgttacattttccactctcgctccagacctgacctaagaggcttttctctgaacttgcta

SEQ ID NO: 517931 - DNA, 120 bp, Artificial Sequence
  ENSG00000165028_33 (sequence is synthesized)
aacatgctcttacctgagggtccattcccactgcctctgcctggaatgctcttccccagacatgcatctgcgtggatcatttccatgcctcctcaggtctttgccctcatgaagccttcc

SEQ ID NO: 517932 - DNA, 120 bp, Artificial Sequence
  ENSG00000165028_34 (sequence is synthesized)
ctgacaaccctatttaagattgtaatcccctcccacagtggcccctatctgctagagactgaatgtttttgtccccccaaaattcctatgttgaagccttaatctcaacataggaggttt

SEQ ID NO: 517933 - DNA, 120 bp, Artificial Sequence
  ENSG00000165028_35 (sequence is synthesized)
ggcctttgtgagttagttttagatgaggtcatgtgggtaatagaattagtgcatttataagggcgtgaagagccctcactgtgaggaaaccagaatgtaagccttcaccagaacttcttc

SEQ ID NO: 517934 - DNA, 120 bp, Artificial Sequence
  ENSG00000165028_36 (sequence is synthesized)
atgctggcaccctggtcttagacttcccagccactagatctgtgagaaagaaatgtttgttgtttaagccaccctgtctatggtactcttgttacagcaacctgaactaagacactatcc

SEQ ID NO: 517935 - DNA, 120 bp, Artificial Sequence
  ENSG00000165028_37 (sequence is synthesized)
ctctcccctgctttctttttctgttatcaccataattaatgttttacttatatatgatttgttaatgtatgtctcttcccactagaaaccgaattctatgacagcaagggtttttgtttt

SEQ ID NO: 517936 - DNA, 120 bp, Artificial Sequence
  ENSG00000165028_38 (sequence is synthesized)
cattattgtcatattacctgtgcctggcatgtgataagccctaagtacttgttgactgaattaacatatgagatctgtgagtctgaaaaaagaagtacatcattccttcacatgtcattt

SEQ ID NO: 517937 - DNA, 120 bp, Artificial Sequence
  ENSG00000165028_39 (sequence is synthesized)
tgagccactgttaacagattacataactgttattggaagtgcctcactactccatttggaaagtattcctggaatacacgatgaatgactcagtagaagttctggctatgggggagtgcc

SEQ ID NO: 517938 - DNA, 120 bp, Artificial Sequence
  ENSG00000165028_40 (sequence is synthesized)
atcaataaataaaaataataccattgtctgttggttataagttgctgtcacagactatgaaggtatttgaattgtattttcaggaagagaaacagatatgcaaccaatctgatttggttc

SEQ ID NO: 517939 - DNA, 120 bp, Artificial Sequence
  ENSG00000165028_41 (sequence is synthesized)
cacaccctgccacagaagtcccaaaggagaagcaaatgccacttgtagactcaaactctggacttcattctcagcaccatctcttaacctactgagtaaatcctatgaacctgactaggg

SEQ ID NO: 517940 - DNA, 120 bp, Artificial Sequence
  ENSG00000165028_42 (sequence is synthesized)
tggcaactgaagttgtagtactttctgtcttcaaaggagggtgaacctggagtatgttggaagaagtgttaggttcattagagacacctctttcataactgctgtcacctagaatgtcta

SEQ ID NO: 517941 - DNA, 120 bp, Artificial Sequence
  ENSG00000165028_43 (sequence is synthesized)
ttctctaagcaccttcttgaaagaagcacattcccccaggaggaggaaatggtttgttttctttagtgacagttggcccaggatcctaaggtaaaggagtatgggcactagacaaaatga

SEQ ID NO: 517942 - DNA, 120 bp, Artificial Sequence
  ENSG00000165028_44 (sequence is synthesized)
gttttataatagtcgattggaaggaatggaagtttttgaatcacaggcttctgccttgaaagggcaagtccgtggtggtcatgaaccacccagagtgtgtacaaggctcctgccagaaga

SEQ ID NO: 517943 - DNA, 120 bp, Artificial Sequence
  ENSG00000165028_45 (sequence is synthesized)
aatgcctgtaggattaaaagcaaaacagcagaatcaaaaaggaagggcacgatgatgcccaggtgcagcctatattattaacagacaaggaaagaatccaaataaaagttctgtaaacca

SEQ ID NO: 517944 - DNA, 120 bp, Artificial Sequence
  ENSG00000165028_46 (sequence is synthesized)
cacaaaggactcggctggctgcttttctcagtgccgaagccgcgccatgctcgttctcagaagcggcctgaccaaggcgcttgcctcacggacgctcgcgcctcagataattttgctcat

SEQ ID NO: 517945 - DNA, 120 bp, Artificial Sequence
  ENSG00000165029_0 (sequence is synthesized)
gtaattgcgagcgagagtgagtggggccgggacccgcagagccgagccgacccttctctcccgggctgcggcagggcagggcggggagctccgcgcaccaacagagccggttctcagggc

SEQ ID NO: 517946 - DNA, 120 bp, Artificial Sequence
  ENSG00000165029_1 (sequence is synthesized)
gctttgctccttgttttttccccggttctgttttctccccttctccggaaggcttgtcaaggggtaggagaaagagacgcaaacacaaaagtggaaaacagttaatgaccagccacggcg

SEQ ID NO: 517947 - DNA, 120 bp, Artificial Sequence
  ENSG00000165029_2 (sequence is synthesized)
tccctgctgtgagctctggccgctgccttccagggctcccgagccacacgctgggggtgctggctgagggaacatggcttgttggcctcagctgaggttgctgctgtggaagaacctcac

SEQ ID NO: 517948 - DNA, 120 bp, Artificial Sequence
  ENSG00000165029_3 (sequence is synthesized)
tttcagaagaagacaaacatgtcagctgctgctggaagtggcctggcctctatttatcttcctgatcctgatctctgttcggctgagctacccaccctatgaacaacatgaatgccattt

SEQ ID NO: 517949 - DNA, 120 bp, Artificial Sequence
  ENSG00000165029_4 (sequence is synthesized)
tccaaataaagccatgccctctgcaggaacacttccttgggttcaggggattatctgtaatgccaacaacccctgtttccgttacccgactcctggggaggctcccggagttgttggaaa

SEQ ID NO: 517950 - DNA, 120 bp, Artificial Sequence
  ENSG00000165029_5 (sequence is synthesized)
ctttaacaaatccattgtggctcgcctgttctcagatgctcggaggcttcttttatacagccagaaagacaccagcatgaaggacatgcgcaaagttctgagaacattacagcagatcaa

SEQ ID NO: 517951 - DNA, 120 bp, Artificial Sequence
  ENSG00000165029_6 (sequence is synthesized)
gaaatccagctcaaacttgaagcttcaagatttcctggtggacaatgaaaccttctctgggttcctgtatcacaacctctctctcccaaagtctactgtggacaagatgctgagggctga

SEQ ID NO: 517952 - DNA, 120 bp, Artificial Sequence
  ENSG00000165029_7 (sequence is synthesized)
tgtcattctccacaaggtatttttgcaaggctaccagttacatttgacaagtctgtgcaatggatcaaaatcagaagagatgattcaacttggtgaccaagaagtttctgagctttgtgg

SEQ ID NO: 517953 - DNA, 120 bp, Artificial Sequence
  ENSG00000165029_8 (sequence is synthesized)
cctaccaagggagaaactggctgcagcagagcgagtacttcgttccaacatggacatcctgaagccaatcctgagaacactaaactctacatctcccttcccgagcaaggagctggctga

SEQ ID NO: 517954 - DNA, 120 bp, Artificial Sequence
  ENSG00000165029_9 (sequence is synthesized)
agccacaaaaacattgctgcatagtcttgggactctggcccaggagctgttcagcatgagaagctggagtgacatgcgacaggaggtgatgtttctgaccaatgtgaacagctccagctc

SEQ ID NO: 517955 - DNA, 120 bp, Artificial Sequence
  ENSG00000165029_10 (sequence is synthesized)
ctccacccaaatctaccaggctgtgtctcgtattgtctgcgggcatcccgagggaggggggctgaagatcaagtctctcaactggtatgaggacaacaactacaaagccctctttggagg

SEQ ID NO: 517956 - DNA, 120 bp, Artificial Sequence
  ENSG00000165029_11 (sequence is synthesized)
caatggcactgaggaagatgctgaaaccttctatgacaactctacaactccttactgcaatgatttgatgaagaatttggagtctagtcctctttcccgcattatctggaaagctctgaa

SEQ ID NO: 517957 - DNA, 120 bp, Artificial Sequence
  ENSG00000165029_12 (sequence is synthesized)
gccgctgctcgttgggaagatcctgtatacacctgacactccagccacaaggcaggtcatggctgaggtgaacaagaccttccaggaactggctgtgttccatgatctggaaggcatgtg

SEQ ID NO: 517958 - DNA, 120 bp, Artificial Sequence
  ENSG00000165029_13 (sequence is synthesized)
ggaggaactcagccccaagatctggaccttcatggagaacagccaagaaatggaccttgtccggatgctgttggacagcagggacaatgaccacttttgggaacagcagttggatggctt

SEQ ID NO: 517959 - DNA, 120 bp, Artificial Sequence
  ENSG00000165029_14 (sequence is synthesized)
agattggacagcccaagacatcgtggcgtttttggccaagcacccagaggatgtccagtccagtaatggttctgtgtacacctggagagaagctttcaacgagactaaccaggcaatccg

SEQ ID NO: 517960 - DNA, 120 bp, Artificial Sequence
  ENSG00000165029_15 (sequence is synthesized)
gaccatatctcgcttcatggagtgtgtcaacctgaacaagctagaacccatagcaacagaagtctggctcatcaacaagtccatggagctgctggatgagaggaagttctgggctggtat

SEQ ID NO: 517961 - DNA, 120 bp, Artificial Sequence
  ENSG00000165029_16 (sequence is synthesized)
tgtgttcactggaattactccaggcagcattgagctgccccatcatgtcaagtacaagatccgaatggacattgacaatgtggagaggacaaataaaatcaaggatgggtactgggaccc

SEQ ID NO: 517962 - DNA, 120 bp, Artificial Sequence
  ENSG00000165029_17 (sequence is synthesized)
tggtcctcgagctgacccctttgaggacatgcggtacgtctgggggggcttcgcctacttgcaggatgtggtggagcaggcaatcatcagggtgctgacgggcaccgagaagaaaactgg

SEQ ID NO: 517963 - DNA, 120 bp, Artificial Sequence
  ENSG00000165029_18 (sequence is synthesized)
tgtctatatgcaacagatgccctatccctgttacgttgatgacatctttctgcgggtgatgagccggtcaatgcccctcttcatgacgctggcctggatttactcagtggctgtgatcat

SEQ ID NO: 517964 - DNA, 120 bp, Artificial Sequence
  ENSG00000165029_19 (sequence is synthesized)
caagggcatcgtgtatgagaaggaggcacggctgaaagagaccatgcggatcatgggcctggacaacagcatcctctggtttagctggttcattagtagcctcattcctcttcttgtgag

SEQ ID NO: 517965 - DNA, 120 bp, Artificial Sequence
  ENSG00000165029_20 (sequence is synthesized)
cgctggcctgctagtggtcatcctgaagttaggaaacctgctgccctacagtgatcccagcgtggtgtttgtcttcctgtccgtgtttgctgtggtgacaatcctgcagtgcttcctgat

SEQ ID NO: 517966 - DNA, 120 bp, Artificial Sequence
  ENSG00000165029_21 (sequence is synthesized)
tagcacactcttctccagagccaacctggcagcagcctgtgggggcatcatctacttcacgctgtacctgccctacgtcctgtgtgtggcatggcaggactacgtgggcttcacactcaa

SEQ ID NO: 517967 - DNA, 120 bp, Artificial Sequence
  ENSG00000165029_22 (sequence is synthesized)
gatcttcgctagcctgctgtctcctgtggcttttgggtttggctgtgagtactttgccctttttgaggagcagggcattggagtgcagtgggacaacctgtttgagagtcctgtggagga

SEQ ID NO: 517968 - DNA, 120 bp, Artificial Sequence
  ENSG00000165029_23 (sequence is synthesized)
agatggcttcaatctcaccacttcggtctccatgatgctgtttgacaccttcctctatggggtgatgacctggtacattgaggctgtctttccaggccagtacggaattcccaggccctg

SEQ ID NO: 517969 - DNA, 120 bp, Artificial Sequence
  ENSG00000165029_24 (sequence is synthesized)
gtattttccttgcaccaagtcctactggtttggcgaggaaagtgatgagaagagccaccctggttccaaccagaagagaatatcagaaatctgcatggaggaggaacccacccacttgaa

SEQ ID NO: 517970 - DNA, 120 bp, Artificial Sequence
  ENSG00000165029_25 (sequence is synthesized)
gctgggcgtgtccattcagaacctggtaaaagtctaccgagatgggatgaaggtggctgtcgatggcctggcactgaatttttatgagggccagatcacctccttcctgggccacaatgg

SEQ ID NO: 517971 - DNA, 120 bp, Artificial Sequence
  ENSG00000165029_26 (sequence is synthesized)
agcggggaagacgaccaccatgtcaatcctgaccgggttgttccccccgacctcgggcaccgcctacatcctgggaaaagacattcgctctgagatgagcaccatccggcagaacctggg

SEQ ID NO: 517972 - DNA, 120 bp, Artificial Sequence
  ENSG00000165029_27 (sequence is synthesized)
ggtctgtccccagcataacgtgctgtttgacatgctgactgtcgaagaacacatctggttctatgcccgcttgaaagggctctctgagaagcacgtgaaggcggagatggagcagatggc

SEQ ID NO: 517973 - DNA, 120 bp, Artificial Sequence
  ENSG00000165029_28 (sequence is synthesized)
cctggatgttggtttgccatcaagcaagctgaaaagcaaaacaagccagctgtcaggtggaatgcagagaaagctatctgtggccttggcctttgtcgggggatctaaggttgtcattct

SEQ ID NO: 517974 - DNA, 120 bp, Artificial Sequence
  ENSG00000165029_29 (sequence is synthesized)
ggatgaacccacagctggtgtggacccttactcccgcaggggaatatgggagctgctgctgaaataccgacaaggccgcaccattattctctctacacaccacatggatgaagcggacgt

SEQ ID NO: 517975 - DNA, 120 bp, Artificial Sequence
  ENSG00000165029_30 (sequence is synthesized)
cctgggggacaggattgccatcatctcccatgggaagctgtgctgtgtgggctcctccctgtttctgaagaaccagctgggaacaggctactacctgaccttggtcaagaaagatgtgga

SEQ ID NO: 517976 - DNA, 120 bp, Artificial Sequence
  ENSG00000165029_31 (sequence is synthesized)
atcctccctcagttcctgcagaaacagtagtagcactgtgtcatacctgaaaaaggaggacagtgtttctcagagcagttctgatgctggcctgggcagcgaccatgagagtgacacgct

SEQ ID NO: 517977 - DNA, 120 bp, Artificial Sequence
  ENSG00000165029_32 (sequence is synthesized)
gaccatcgatgtctctgctatctccaacctcatcaggaagcatgtgtctgaagcccggctggtggaagacatagggcatgagctgacctatgtgctgccatatgaagctgctaaggaggg

SEQ ID NO: 517978 - DNA, 120 bp, Artificial Sequence
  ENSG00000165029_33 (sequence is synthesized)
agcctttgtggaactctttcatgagattgatgaccggctctcagacctgggcatttctagttatggcatctcagagacgaccctggaagaaatattcctcaaggtggccgaagagagtgg

SEQ ID NO: 517979 - DNA, 120 bp, Artificial Sequence
  ENSG00000165029_34 (sequence is synthesized)
ggtggatgctgagacctcagatggtaccttgccagcaagacgaaacaggcgggccttcggggacaagcagagctgtcttcgcccgttcactgaagatgatgctgctgatccaaatgattc

SEQ ID NO: 517980 - DNA, 120 bp, Artificial Sequence
  ENSG00000165029_35 (sequence is synthesized)
tgacatagacccagaatccagagagacagacttgctcagtgggatggatggcaaagggtcctaccaggtgaaaggctggaaacttacacagcaacagtttgtggcccttttgtggaagag

SEQ ID NO: 517981 - DNA, 120 bp, Artificial Sequence
  ENSG00000165029_36 (sequence is synthesized)
actgctaattgccagacggagtcggaaaggattttttgctcagattgtcttgccagctgtgtttgtctgcattgcccttgtgttcagcctgatcgtgccaccctttggcaagtaccccag

SEQ ID NO: 517982 - DNA, 120 bp, Artificial Sequence
  ENSG00000165029_37 (sequence is synthesized)
cctggaacttcagccctggatgtacaacgaacagtacacatttgtcagcaatgatgctcctgaggacacgggaaccctggaactcttaaacgccctcaccaaagaccctggcttcgggac

SEQ ID NO: 517983 - DNA, 120 bp, Artificial Sequence
  ENSG00000165029_38 (sequence is synthesized)
ccgctgtatggaaggaaacccaatcccagacacgccctgccaggcaggggaggaagagtggaccactgccccagttccccagaccatcatggacctcttccagaatgggaactggacaat

SEQ ID NO: 517984 - DNA, 120 bp, Artificial Sequence
  ENSG00000165029_39 (sequence is synthesized)
gcagaacccttcacctgcatgccagtgtagcagcgacaaaatcaagaagatgctgcctgtgtgtcccccaggggcaggggggctgcctcctccacaaagaaaacaaaacactgcagatat

SEQ ID NO: 517985 - DNA, 120 bp, Artificial Sequence
  ENSG00000165029_40 (sequence is synthesized)
ccttcaggacctgacaggaagaaacatttcggattatctggtgaagacgtatgtgcagatcatagccaaaagcttaaagaacaagatctgggtgaatgagtttaggtatggcggcttttc

SEQ ID NO: 517986 - DNA, 120 bp, Artificial Sequence
  ENSG00000165029_41 (sequence is synthesized)
cctgggtgtcagtaatactcaagcacttcctccgagtcaagaagttaatgatgccatcaaacaaatgaagaaacacctaaagctggccaaggacagttctgcagatcgatttctcaacag

SEQ ID NO: 517987 - DNA, 120 bp, Artificial Sequence
  ENSG00000165029_42 (sequence is synthesized)
cttgggaagatttatgacaggactggacaccaaaaataatgtcaaggtgtggttcaataacaagggctggcatgcaatcagctctttcctgaatgtcatcaacaatgccattctccgggc

SEQ ID NO: 517988 - DNA, 120 bp, Artificial Sequence
  ENSG00000165029_43 (sequence is synthesized)
gtggctctgatgaccacatcagtggatgtccttgtgtccatctgtgtcatctttgcaatgtccttcgtcccagccagctttgtcgtattcctgatccaggagcgggtcagcaaagcaaaa

SEQ ID NO: 517989 - DNA, 120 bp, Artificial Sequence
  ENSG00000165029_44 (sequence is synthesized)
cacctgcagttcatcagtggagtgaagcctgtcatctactggctctctaattttgtctgggatatgtgcaattacgttgtccctgccacactggtcattatcatcttcatctgcttccag

SEQ ID NO: 517990 - DNA, 120 bp, Artificial Sequence
  ENSG00000165029_45 (sequence is synthesized)
cagaagtcctatgtgtcctccaccaatctgcctgtgctagcccttctacttttgctgtatgggtggtcaatcacacctctcatgtacccagcctcctttgtgttcaagatccccagcaca

SEQ ID NO: 517991 - DNA, 120 bp, Artificial Sequence
  ENSG00000165029_46 (sequence is synthesized)
gcctatgtggtgctcaccagcgtgaacctcttcattggcattaatggcagcgtggccacctttgtgctggagctgttcaccgacaataagctgaataatatcaatgatatcctgaagtcc

SEQ ID NO: 517992 - DNA, 120 bp, Artificial Sequence
  ENSG00000165029_47 (sequence is synthesized)
gtgttcttgatcttcccacatttttgcctgggacgagggctcatcgacatggtgaaaaaccaggcaatggctgatgccctggaaaggtttggggagaatcgctttgtgtcaccattatct

SEQ ID NO: 517993 - DNA, 120 bp, Artificial Sequence
  ENSG00000165029_48 (sequence is synthesized)
tgggacttggtgggacgaaacctcttcgccatggccgtggaaggggtggtgttcttcctcattactgttctgatccagtacagattcttcatcaggcccagacctgtaaatgcaaagcta

SEQ ID NO: 517994 - DNA, 120 bp, Artificial Sequence
  ENSG00000165029_49 (sequence is synthesized)
tctcctctgaatgatgaagatgaagatgtgaggcgggaaagacagagaattcttgatggtggaggccagaatgacatcttagaaatcaaggagttgacgaagatatatagaaggaagcgg

SEQ ID NO: 517995 - DNA, 120 bp, Artificial Sequence
  ENSG00000165029_50 (sequence is synthesized)
aagcctgctgttgacaggatttgcgtgggcattcctcctggtgagtgctttgggctcctgggagttaatggggctggaaaatcatcaactttcaagatgttaacaggagataccactgtt

SEQ ID NO: 517996 - DNA, 120 bp, Artificial Sequence
  ENSG00000165029_51 (sequence is synthesized)
accagaggagatgctttccttaacaaaaatagtatcttatcaaacatccatgaagtacatcagaacatgggctactgccctcagtttgatgccatcacagagctgttgactgggagagaa

SEQ ID NO: 517997 - DNA, 120 bp, Artificial Sequence
  ENSG00000165029_52 (sequence is synthesized)
cacgtggagttctttgcccttttgagaggagtcccagagaaagaagttggcaaggttggtgagtgggcgattcggaaactgggcctcgtgaagtatggagaaaaatatgctggtaactat

SEQ ID NO: 517998 - DNA, 120 bp, Artificial Sequence
  ENSG00000165029_53 (sequence is synthesized)
agtggaggcaacaaacgcaagctctctacagccatggctttgatcggcgggcctcctgtggtgtttctggatgaacccaccacaggcatggatcccaaagcccggcggttcttgtggaat

SEQ ID NO: 517999 - DNA, 120 bp, Artificial Sequence
  ENSG00000165029_54 (sequence is synthesized)
tgtgccctaagtgttgtcaaggaggggagatcagtagtgcttacatctcatagtatggaagaatgtgaagctctttgcactaggatggcaatcatggtcaatggaaggttcaggtgcctt

SEQ ID NO: 518000 - DNA, 120 bp, Artificial Sequence
  ENSG00000165029_55 (sequence is synthesized)
ggcagtgtccagcatctaaaaaataggtttggagatggttatacaatagttgtacgaatagcagggtccaacccggacctgaagcctgtccaggatttctttggacttgcatttcctgga

SEQ ID NO: 518001 - DNA, 120 bp, Artificial Sequence
  ENSG00000165029_56 (sequence is synthesized)
agtgttctaaaagagaaacaccggaacatgctacaataccagcttccatcttcattatcttctctggccaggatattcagcatcctctcccagagcaaaaagcgactccacatagaagac

SEQ ID NO: 518002 - DNA, 120 bp, Artificial Sequence
  ENSG00000165029_57 (sequence is synthesized)
tactctgtttctcagacaacacttgaccaagtatttgtgaactttgccaaggaccaaagtgatgatgaccacttaaaagacctctcattacacaaaaaccagacagtagtggacgttgca

SEQ ID NO: 518003 - DNA, 120 bp, Artificial Sequence
  ENSG00000165029_58 (sequence is synthesized)
gttctcacatcttttctacaggatgagaaagtgaaagaaagctatgtatgaagaatcctgttcatacggggtggctgaaagtaaagaggaactagactttcctttgcaccatgtgaagtg

SEQ ID NO: 518004 - DNA, 120 bp, Artificial Sequence
  ENSG00000165029_59 (sequence is synthesized)
ttgtggagaaaagagccagaagttgatgtgggaagaagtaaactggatactgtactgatactattcaatgcaatgcaattcaatgcaatgaaaacaaaattccattacaggggcagtgcc

SEQ ID NO: 518005 - DNA, 120 bp, Artificial Sequence
  ENSG00000165029_60 (sequence is synthesized)
tttgtagcctatgtcttgtatggctctcaagtgaaagacttgaatttagttttttacctatacctatgtgaaactctattatggaacccaatggacatatgggtttgaactcacactttt

SEQ ID NO: 518006 - DNA, 120 bp, Artificial Sequence
  ENSG00000165029_61 (sequence is synthesized)
ttttttttttttgttcctgtgtattctcattggggttgcaacaataattcatcaagtaatcatggccagcgattattgatcaaaatcaaaaggtaatgcacatcctcattcactaagcca

SEQ ID NO: 518007 - DNA, 120 bp, Artificial Sequence
  ENSG00000165029_62 (sequence is synthesized)
tgccatgcccaggagactggtttcccggtgacacatccattgctggcaatgagtgtgccagagttattagtgccaagtttttcagaaagtttgaagcaccatggtgtgtcatgctcactt

SEQ ID NO: 518008 - DNA, 120 bp, Artificial Sequence
  ENSG00000165029_63 (sequence is synthesized)
ttgtgaaagctgctctgctcagagtctatcaacattgaatatcagttgacagaatggtgccatgcgtggctaacatcctgctttgattccctctgataagctgttctggtggcagtaaca

SEQ ID NO: 518009 - DNA, 120 bp, Artificial Sequence
  ENSG00000165029_64 (sequence is synthesized)
tgcaacaaaaatgtgggtgtctccaggcacgggaaacttggttccattgttatattgtcctatgcttcgagccatgggtctacagggtcatccttatgagactcttaaatatacttagat

SEQ ID NO: 518010 - DNA, 120 bp, Artificial Sequence
  ENSG00000165029_65 (sequence is synthesized)
cctggtaagaggcaaagaatcaacagccaaactgctggggctgcaagctgctgaagccagggcatgggattaaagagattgtgcgttcaaacctagggaagcctgtgcccatttgtcctg

SEQ ID NO: 518011 - DNA, 120 bp, Artificial Sequence
  ENSG00000165029_66 (sequence is synthesized)
actgtctgctaacatggtacactgcatctcaagatgtttatctgacacaagtgtattatttctggctttttgaattaatctagaaaatgaaaagatggagttgtattttgacaaaaatgt

SEQ ID NO: 518012 - DNA, 120 bp, Artificial Sequence
  ENSG00000165029_67 (sequence is synthesized)
ttgtactttttaatgttatttggaattttaagttctatcagtgacttctgaatccttagaatggcctctttgtagaaccctgtggtatagaggagtatggccactgccccactattttta

SEQ ID NO: 518013 - DNA, 120 bp, Artificial Sequence
  ENSG00000165029_68 (sequence is synthesized)
ttttcttatgtaagtttgcatatcagtcatgactagtgcctagaaagcaatgtgatggtcaggatctcatgacattatatttgagtttctttcagatcatttaggatactcttaatctca

SEQ ID NO: 518014 - DNA, 120 bp, Artificial Sequence
  ENSG00000165029_69 (sequence is synthesized)
cttcatcaatcaaatattttttgagtgtatgctgtagctgaaagagtatgtacgtacgtataagactagagagatattaagtctcagtacacttcctgtgccatgttattcagctcactg

SEQ ID NO: 518015 - DNA, 120 bp, Artificial Sequence
  ENSG00000165029_70 (sequence is synthesized)
gtttacaaatataggttgtcttgtggttgtaggagcccactgtaacaatactgggcagcctttttttttttttttttaattgcaacaatgcaaaagccaagaaagtataagggtcacaag

SEQ ID NO: 518016 - DNA, 120 bp, Artificial Sequence
  ENSG00000165029_71 (sequence is synthesized)
tctaaacaatgaattcttcaacagggaaaacagctagcttgaaaacttgctgaaaaacacaacttgtgtttatggcatttagtaccttcaaataattggctttgcagatattggataccc

SEQ ID NO: 518017 - DNA, 120 bp, Artificial Sequence
  ENSG00000165029_72 (sequence is synthesized)
cattaaatctgacagtctcaaatttttcatctcttcaatcactagtcaagaaaaatataaaaacaacaaatacttccatatggagcatttttcagagttttctaacccagtcttattttt

SEQ ID NO: 518018 - DNA, 120 bp, Artificial Sequence
  ENSG00000165029_73 (sequence is synthesized)
ctagtcagtaaacatttgtaaaaatactgtttcactaatacttactgttaactgtcttgagagaaaagaaaaatatgagagaactattgtttggggaagttcaagtgatctttcaatatc

SEQ ID NO: 518019 - DNA, 120 bp, Artificial Sequence
  ENSG00000165029_74 (sequence is synthesized)
attactaacttcttccactttttccagaatttgaatattaacgctaaaggtgtaagacttcagatttcaaattaatctttctatattttttaaatttacagaatattatataacccactg

SEQ ID NO: 518020 - DNA, 120 bp, Artificial Sequence
  ENSG00000165029_75 (sequence is synthesized)
ctgaaaaagaaaaaaatgattgttttagaagttaaagtcaatattgattttaaatataagtaatgaaggcatatttccaataactagtgatatggcatcgttgcattttacagtatcttc

SEQ ID NO: 518021 - DNA, 120 bp, Artificial Sequence
  ENSG00000165029_76 (sequence is synthesized)
aaaaatacagaatttatagaataatttctcctcatttaatatttttcaaaatcaaagttatggtttcctcattttactaaaatcgtattctaattcttcattatagtaaatctatgagca

SEQ ID NO: 518022 - DNA, 120 bp, Artificial Sequence
  ENSG00000165029_77 (sequence is synthesized)
actccttacttcggttcctctgatttcaaggccatattttaaaaaatcaaaaggcactgtgaactattttgaagaaaacacaacattttaatacagattgaaaggacctcttctgaagct

SEQ ID NO: 518023 - DNA, 120 bp, Artificial Sequence
  ENSG00000165029_78 (sequence is synthesized)
agaaacaatctatagttatacatcttcattaatactgtgttaccttttaaaatagtaattttttacattttcctgtgtaaacctaattgtggtagaaatttttaccaactctatactcaa

SEQ ID NO: 518024 - DNA, 120 bp, Artificial Sequence
  ENSG00000165029_79 (sequence is synthesized)
tcaagcaaaatttctgtatattccctgtggaatgtacctatgtgagtttcagaaattctcaaaatacgtgttcaaaaatttctgcttttgcatctttgggacacctcagaaaacttatta

SEQ ID NO: 518025 - DNA, 120 bp, Artificial Sequence
  ENSG00000165029_80 (sequence is synthesized)
acaactgtgaatatgagaaatacagaagaaaataataagccctctatacataaatgcccagcacaattcattgttaaaaaacaaccaaacctcacactactgtatttcattatctgtact

SEQ ID NO: 518026 - DNA, 120 bp, Artificial Sequence
  ENSG00000165029_81 (sequence is synthesized)
gaaagcaaatgctttgtgactattaaatgttgcacatcattcattcactgtatagtaatcattgactaaagccatttgtctgtgttttcttcttgtggttgtatatatcaggtaaaatat

SEQ ID NO: 518027 - DNA, 120 bp, Artificial Sequence
  ENSG00000165029_82 (sequence is synthesized)
tttccaaagagccatgtgtcatgtaatactgaaccactttgatattgagacattaatttgtacccttgttattatctactagtaataatgtaatactgtagaaatattgctctaattctt

SEQ ID NO: 518028 - DNA, 120 bp, Artificial Sequence
  ENSG00000165029_83 (sequence is synthesized)
ttcaaaattgttgcatcccccttagaatgtttctatttccataaggatttaggtatgctattatcccttcttataccctaagatgaagctgtttttgtgctctttgttcatcattggccc

SEQ ID NO: 518029 - DNA, 120 bp, Artificial Sequence
  ENSG00000165029_84 (sequence is synthesized)
tcattccaagcactttacgctgtctgtaatgggatctatttttgcactggaatatctgagaattgcaaaactagacaaaagtttcacaacagatttctaagttaaatcattttcattaaa

SEQ ID NO: 518030 - DNA, 120 bp, Artificial Sequence
  ENSG00000165029_85 (sequence is synthesized)
aggaaaaaagaaaaaaaattttgtatgtcaataactttatatgaagtattaaaatgcatatttctatgttgtaatataatgagtcacaaaataaagctgtgacagttctgttggtctaca

SEQ ID NO: 518031 - DNA, 120 bp, Artificial Sequence
  ENSG00000165029_86 (sequence is synthesized)
tgccaagaagtgcagcagtagcagcaaccggagatgcaaagcccaacatgatggggagagaaactcttctttcaatatgtgcttctgtaccaaaagtggaatttcacgagagacatattt

SEQ ID NO: 518032 - DNA, 120 bp, Artificial Sequence
  ENSG00000165029_87 (sequence is synthesized)
tgaaacatttctccttttgtgtgtgcgtgagtgtttccctgtttccagccaagggtattgtgagtttctcctgggcctccttcagaatctgggtgctctggaaagcagtgttttggcaac

SEQ ID NO: 518033 - DNA, 120 bp, Artificial Sequence
  ENSG00000165029_88 (sequence is synthesized)
atggggaaagtatggcagtgtgggagggtcagctgggtctgggtttgaatattgcatttgaatattttaccagcattgatgtcggataaattatttagtccctgtaagcctcagttttct

SEQ ID NO: 518034 - DNA, 120 bp, Artificial Sequence
  ENSG00000165029_89 (sequence is synthesized)
cttcttctacatacacataatatatttgactctttgttgtgattattggttacacatatgaagagcctggtgtggggcctggcacacaataggtgctcaataaatagaagttgataattt

SEQ ID NO: 518035 - DNA, 120 bp, Artificial Sequence
  ENSG00000165029_90 (sequence is synthesized)
taagctgatgcctccagcttcctcagtagggctgatggcaattacgttgtgcagctactggaaagaaatgaataaacccttgtccttgtaatggtggtgaaggggagggaggtagtttga

SEQ ID NO: 518036 - DNA, 120 bp, Artificial Sequence
  ENSG00000165029_91 (sequence is synthesized)
atacaacttcacttaattttacttccctattcaggcaggaattgccaaaccatccaggagtggaatatgcaacctggcgtcatgggccagctggttaaaataaaattgatttctggctta

SEQ ID NO: 518037 - DNA, 120 bp, Artificial Sequence
  ENSG00000165030_0 (sequence is synthesized)
agccccgagcgccggcggcccgactcccggccgcccctttctttctcctcgccggcccgagagcaggaacacgataacgaaggaggcccaacttcattcaataaggagcctgacggattt

SEQ ID NO: 518038 - DNA, 120 bp, Artificial Sequence
  ENSG00000165030_1 (sequence is synthesized)
atcccagacggtagaacaaaaggaagaatattgatggattttaaaccagagtttttaaagagcttgagaatacggggaaattaatttgttctcctacacacatagatagggtaaggttgt

SEQ ID NO: 518039 - DNA, 120 bp, Artificial Sequence
  ENSG00000165030_2 (sequence is synthesized)
ttctgatgcagctgagaaaaatgcagaccgtcaaaaaggagcaggcgtctcttgatgccagtagcaatgtggacaagatgatggtccttaattctgctttaacggaagtgtcagaagact

SEQ ID NO: 518040 - DNA, 120 bp, Artificial Sequence
  ENSG00000165030_3 (sequence is synthesized)
ccacaacaggtgaggagctgcttctcagtgaaggaagtgtggggaagaacaaatcttctgcatgtcggaggaaacgggaattcattcctgatgaaaagaaagatgctatgtattgggaaa

SEQ ID NO: 518041 - DNA, 120 bp, Artificial Sequence
  ENSG00000165030_4 (sequence is synthesized)
aaaggcggaaaaataatgaagctgccaaaagatctcgtgagaagcgtcgactgaatgacctggttttagagaacaaactaattgcactgggagaagaaaacgccactttaaaagctgagc

SEQ ID NO: 518042 - DNA, 120 bp, Artificial Sequence
  ENSG00000165030_5 (sequence is synthesized)
tgctttcactaaaattaaagtttggtttaattagctccacagcatatgctcaagagattcagaaactcagtaattctacagctgtgtactttcaagattaccagacttccaaatccaatg

SEQ ID NO: 518043 - DNA, 120 bp, Artificial Sequence
  ENSG00000165030_6 (sequence is synthesized)
tgagttcatttgtggacgagcacgaaccctcgatggtgtcaagtagttgtatttctgtcattaaacactctccacaaagctcgctgtccgatgtttcagaagtgtcctcagtagaacaca

SEQ ID NO: 518044 - DNA, 120 bp, Artificial Sequence
  ENSG00000165030_7 (sequence is synthesized)
tgcagggaagctgcagaagtcctgaaaacaagttccagattatcaagcaagagccgatggaattagagagctacacaagggagccaagagatgaccgaggctcttacacagcgtccatct

SEQ ID NO: 518045 - DNA, 120 bp, Artificial Sequence
  ENSG00000165030_8 (sequence is synthesized)
atcaaaactatatggggaattctttctctgggtactcacactctcccccactactgcaagtcaaccgatcctccagcaactccccgagaacgtcggaaactgatgatggtgtggtaggaa

SEQ ID NO: 518046 - DNA, 120 bp, Artificial Sequence
  ENSG00000165030_9 (sequence is synthesized)
agtcatctgatggagaagacgagcaacaggtccccaagggccccatccattctccagttgaactcaagcatgtgcatgcaactgtggttaaagttccagaagtgaattcctctgccttgc

SEQ ID NO: 518047 - DNA, 120 bp, Artificial Sequence
  ENSG00000165030_10 (sequence is synthesized)
cacacaagctccggatcaaagccaaagccatgcagatcaaagtagaagcctttgataatgaatttgaggccacgcaaaaactttcctcacctattgacatgacatctaaaagacatttcg

SEQ ID NO: 518048 - DNA, 120 bp, Artificial Sequence
  ENSG00000165030_11 (sequence is synthesized)
aactcgaaaagcatagtgccccaagtatggtacattcttctcttactcctttctcagtgcaagtgactaacattcaagattggtctctcaaatcggagcactggcatcaaaaagaactga

SEQ ID NO: 518049 - DNA, 120 bp, Artificial Sequence
  ENSG00000165030_12 (sequence is synthesized)
gtggcaaaactcagaatagtttcaaaactggagttgttgaaatgaaagacagtggctacaaagtttctgacccagagaacttgtatttgaagcaggggatagcaaacttatctgcagagg

SEQ ID NO: 518050 - DNA, 120 bp, Artificial Sequence
  ENSG00000165030_13 (sequence is synthesized)
ttgtctcactcaagagacttatagccacacaaccaatctctgcttcagactctgggtaaattactactgagtaagagctgggcatttagaaagatgtcatttgcaatagagcagtccatt

SEQ ID NO: 518051 - DNA, 120 bp, Artificial Sequence
  ENSG00000165030_14 (sequence is synthesized)
ttgtattatgctgaattttcactggacctgtgatgtcatttcactgtgatgtgcacatgttgtctgtttggtgtctttttgtgcacagattatgatgaagattagattgtgttatcactc

SEQ ID NO: 518052 - DNA, 120 bp, Artificial Sequence
  ENSG00000165030_15 (sequence is synthesized)
tgcctgtgtatagtcagatagtccatgcgaaggctgtatatattgaacattatttttgttgttctattataaagtgtgtaagttaccagtttcaataaaggattggtgacaaacacagaa

SEQ ID NO: 518053 - DNA, 120 bp, Artificial Sequence
  ENSG00000165046_0 (sequence is synthesized)
tagcttgggggtcccgggaaggagctgggaggacctaggcggccgttccgcggagcccggccgaggaggtccctatgttaactacttgagacaaaaataaatatggccttctacagttat

SEQ ID NO: 518054 - DNA, 120 bp, Artificial Sequence
  ENSG00000165046_1 (sequence is synthesized)
aattcagttctggctattgctcgaacaagattcccatttaaataagacatgtatgaagaactatgagagcaagaagtactcggatcctagtcagccaggcaatacagtacttcacccagg

SEQ ID NO: 518055 - DNA, 120 bp, Artificial Sequence
  ENSG00000165046_2 (sequence is synthesized)
aactagactaatacaaaagctacacacatccacttgctggctgcaagaagttcctggcaaacctcagctggagcaagccacaaaacatccacaggtgacaagccctcaggccacaaaaga

SEQ ID NO: 518056 - DNA, 120 bp, Artificial Sequence
  ENSG00000165046_3 (sequence is synthesized)
aactggcatggagattaaagaaggcaaacaatcttatagacaaaaaatcatggatgaactaaaatattattacaatggattctacttactttggattgacgccaaagttgctgccagaat

SEQ ID NO: 518057 - DNA, 120 bp, Artificial Sequence
  ENSG00000165046_4 (sequence is synthesized)
ggtttggaggctgttgcatggacaggtcctgaccagacgagagagacgaaggctgttgagaacttgtgttgatttcttccgcctggttccatttatggtgttcttaattgtacccttcat

SEQ ID NO: 518058 - DNA, 120 bp, Artificial Sequence
  ENSG00000165046_5 (sequence is synthesized)
ggaattcttattaccagtgtttctgaaactcttcccagagatgttgccatcaacttttgaaagtgaatccaaaaaggaagaaaaacagaaaaagaaaatggctgtaaagttggaactagc

SEQ ID NO: 518059 - DNA, 120 bp, Artificial Sequence
  ENSG00000165046_6 (sequence is synthesized)
aaaatttcttcaagaaaccatgacagaaatggcaaggaggaacagagccaagatgggcgatgcctctacacagctctcatcctacgtgaagcaggtccagacaggccacaagcccagcac

SEQ ID NO: 518060 - DNA, 120 bp, Artificial Sequence
  ENSG00000165046_7 (sequence is synthesized)
attgcagacatttggaaccaacaacctgctccgctttcagctcctgatgaaactgaagtctataaaagcagatgatgaaataattgccaaggaaggggtgacagcattgagtgtatcaga

SEQ ID NO: 518061 - DNA, 120 bp, Artificial Sequence
  ENSG00000165046_8 (sequence is synthesized)
actacaggctgcctgtagggcccgagggatgagatcactgggtctcacggaggaacaactgcgacaacagctcacggagtggcaggacctccacctgaaggagaacgtccctccttccct

SEQ ID NO: 518062 - DNA, 120 bp, Artificial Sequence
  ENSG00000165046_9 (sequence is synthesized)
tttgctcctgtcccgcaccttctacctgatagatgtgaagcccaagccgattgagataccactcagtggggaggctccaaagactgatattcttgtggaattacctactttcactgaatc

SEQ ID NO: 518063 - DNA, 120 bp, Artificial Sequence
  ENSG00000165046_10 (sequence is synthesized)
taaagagaacatggtggatcttgcacctcaactgaagggaactaaggatgaagactttatacagccgccaccagttacatcatcacccataacaccatcaacacctatttcattacctaa

SEQ ID NO: 518064 - DNA, 120 bp, Artificial Sequence
  ENSG00000165046_11 (sequence is synthesized)
aggacccatcacttcttctgaagaacctacactccaggccaaatcacaaatgacggcccagaacagcaaggctagttcaaaaggagcataaaggactacttgaggatggagctcactctc

SEQ ID NO: 518065 - DNA, 120 bp, Artificial Sequence
  ENSG00000165046_12 (sequence is synthesized)
ttcagcttccggccctcaacagtggcatctgtaaaggacctcccagataagactgtctggcttcagagagcggatcagctgtttagcccgtggggcagtcctttgaggcctggtaaccat

SEQ ID NO: 518066 - DNA, 120 bp, Artificial Sequence
  ENSG00000165046_13 (sequence is synthesized)
tccaggtgatgtgggtagtgagaccaagttcagaccacttagaaaaatataattgcaaagtcccatttcctctgtaccattgtcaccccactcaactttgtataaagcccaccccccatc

SEQ ID NO: 518067 - DNA, 120 bp, Artificial Sequence
  ENSG00000165046_14 (sequence is synthesized)
aaaaaagaaaaaaagaaaaacaaataattgagaaatggcttttgaggccaacagcaggaccagtgccatcagtggattgctaatgattattttaaatgctagaatctatcagagtgcaac

SEQ ID NO: 518068 - DNA, 120 bp, Artificial Sequence
  ENSG00000165046_15 (sequence is synthesized)
ttttgtatataaagtactcaaaactcaaagagaaataatactaagttgctacatcaggggcatatttcataggttactcataaagggtgtagctagaggaggaagttagggatttagtgg

SEQ ID NO: 518069 - DNA, 120 bp, Artificial Sequence
  ENSG00000165046_16 (sequence is synthesized)
aaagcaaatagtgctaaaaaaggcattgactactgtaaaagtttctgggttttaggaagagcagaaagcttatgatacataaaatgtttatctccccaggctccaaagactgatattctt

SEQ ID NO: 518070 - DNA, 120 bp, Artificial Sequence
  ENSG00000165046_17 (sequence is synthesized)
acgcgccttaaaccaagccccacaaagaagtcacttcggcgatgtaaacgcgactttgcggcttcctgggctgctaaggtgaaggacgcccgccctccccagaacttgagagcttattgg

SEQ ID NO: 518071 - DNA, 120 bp, Artificial Sequence
  ENSG00000165046_18 (sequence is synthesized)
aaaatgaactatttgggaactcaactatttaaattcaacgtaaacttcatcttaaaaatcccagagtaggaataataactgctggtgagaaccagtttcttgtctgcaaccgacttactg

SEQ ID NO: 518072 - DNA, 120 bp, Artificial Sequence
  ENSG00000165046_19 (sequence is synthesized)
tacaactttagtcagtattctgaaatttgttatatattttcctgtataacggtttttaaaaaaaacttttattttaggttcaggggtacatgtgcatgtttgtagaatagttataattgt

SEQ ID NO: 518073 - DNA, 120 bp, Artificial Sequence
  ENSG00000165046_20 (sequence is synthesized)
atcgtgccactgcactccagcctggagtgagatgccatctcaaaaaaacaaacaaacaaaaaaacaattttaagtaatacaatgctattaaagtatggaccctctaacatagatgaagtc

SEQ ID NO: 518074 - DNA, 120 bp, Artificial Sequence
  ENSG00000165046_21 (sequence is synthesized)
agtctaggagatgccaataatatttttattgtcatagatttccttcaagatagcccctaaaagttacttcagagctatggtaaacaggaaaaccctgcctcttcattttataaacagctg

SEQ ID NO: 518075 - DNA, 120 bp, Artificial Sequence
  ENSG00000165046_22 (sequence is synthesized)
caggaaaaccctgcctcttcattttataaacagctgcagaaaacctgtcttgggtttttaacactttaagaaccaagctgagcatggcacatatgcctgtaatcccagctccttgggagg

SEQ ID NO: 518076 - DNA, 120 bp, Artificial Sequence
  ENSG00000165046_23 (sequence is synthesized)
ggccagactgggcaacatagtgagacactatctcttgaaagaaagaaaatgaaacaagacagggtttttttggttttgtttttcatttttgtttttggcatgccctaaaataatgaatat

SEQ ID NO: 518077 - DNA, 120 bp, Artificial Sequence
  ENSG00000165046_24 (sequence is synthesized)
cagaaagtactacttctccccacccaaccccatcccaatttctcctgtaattaatatcttgcattagtgtgctatatttgtaatgattaaaaaaaccaatattgacatgttattattaaa

SEQ ID NO: 518078 - DNA, 120 bp, Artificial Sequence
  ENSG00000165046_25 (sequence is synthesized)
aatccagtcttcaatcacgggtttcctcgggcgttagccactgcctgcggagtgtggactggcagaaaaacgtcaccttcgggccccccagcaccaacgcgccttaaaccaagccccaca

SEQ ID NO: 518079 - DNA, 120 bp, Artificial Sequence
  ENSG00000165046_26 (sequence is synthesized)
tgaagcccaagccgattgagataccactcagtggggagtaacccaactctcagttctgatgtttaaggatgaagactttatacagccgccaccagttacatcatcacccataacaccatc

SEQ ID NO: 518080 - DNA, 120 bp, Artificial Sequence
  ENSG00000165046_27 (sequence is synthesized)
tagcttgggggtcccgggaaggagctgggaggacctaggcggccgttccgcggagcccggccgaggaggtaggggtgggcaggcccagccctcaggccgcgacctggtgggccgcgctgc

SEQ ID NO: 518081 - DNA, 120 bp, Artificial Sequence
  ENSG00000165046_28 (sequence is synthesized)
ctttttttcctccggatcccgctcggtccgcatcctgctcctctcatcagagcatgatccaggcttctgacagcttccagttcccaccgcgctctcctccacccacgacctcatccccgc

SEQ ID NO: 518082 - DNA, 120 bp, Artificial Sequence
  ENSG00000165046_29 (sequence is synthesized)
cagttccccagcacagcgcgaactctgaagctcggcctctcctcccccttccccgcacagcgcgctccgtccttttttccgtcccaggccctgcttctttctcctcggcttcatttccaa

SEQ ID NO: 518083 - DNA, 120 bp, Artificial Sequence
  ENSG00000165046_30 (sequence is synthesized)
caaccccgatcatccacgagggtcgtcgttcccgtgcctgtcccacctccgcaccagaaaaccaaagcatatcccccagaccccgccgcatgcaggccgcgcacacatcaggcgcgccga

SEQ ID NO: 518084 - DNA, 120 bp, Artificial Sequence
  ENSG00000165046_31 (sequence is synthesized)
agccgccgggcgaggaagccgagggcgcgttttgctcccgtgtggtgatgggcaaagccgagggagcccgggagcagcgggcgtggggcggcgccaatgcgagtgcgagtggtgtccgcc

SEQ ID NO: 518085 - DNA, 120 bp, Artificial Sequence
  ENSG00000165046_32 (sequence is synthesized)
gcccgggagcgcccgggcccgagcggattaaccgccgcctcaggtgtcgtctcctgcccgcgaaacaccacccaccgttagtgtccctatgttaactacttgagacaaaaataaatatgg

SEQ ID NO: 518086 - DNA, 120 bp, Artificial Sequence
  ENSG00000165046_33 (sequence is synthesized)
attcagttctggctattgctcgaacaagattccctagccattttgtccatcctacctgctcttcttattccccatcatgtgcatttcttcacttgccagattcccatttaaataagacat

SEQ ID NO: 518087 - DNA, 120 bp, Artificial Sequence
  ENSG00000165046_34 (sequence is synthesized)
tacgtcccttcagagaggaaattttttgcacaatggaatcagcttggcaccttagatacctgtctcctatggcttggaattctgagtaagaacttggaagttccaaaaaccattttagga

SEQ ID NO: 518088 - DNA, 120 bp, Artificial Sequence
  ENSG00000165046_35 (sequence is synthesized)
gcacctgattaactttctgaatgatccaccagtaggatcagcaccctggaaacaaagtaccttatgagatgggatggatatactccccagtaagatctttctggatataatgaagcttcc

SEQ ID NO: 518089 - DNA, 120 bp, Artificial Sequence
  ENSG00000165046_36 (sequence is synthesized)
tggagaaacagactggcaatcagaaagatttggctgcttccgacacctccatcttgggcctgcagaggctgcagcaatctgtgaggcagccgcaatctgcgaggcagccactcttctagc

SEQ ID NO: 518090 - DNA, 120 bp, Artificial Sequence
  ENSG00000165046_37 (sequence is synthesized)
acatatggctttcattagccaccattttgctaggaagcataattaagggtttaagccttaaccatgtttgtgttgggtgtgtgtgtttctggccagtttgtctttcacaaataagactat

SEQ ID NO: 518091 - DNA, 120 bp, Artificial Sequence
  ENSG00000165046_38 (sequence is synthesized)
tagtcatagggattgtgaaagtctgatataatccctgtgctacccagcaacaagtattacattaggatatttatgcttggtgttttcagtattaataatatgaaataatagatagactgc

SEQ ID NO: 518092 - DNA, 120 bp, Artificial Sequence
  ENSG00000165046_39 (sequence is synthesized)
catgcagctgaccaagggctttcttcccctggggagtggttagaaggccaaaggtatttcagcctgtaggtgataaaattagatttctttacttgctgtggttagacagcagtcagttaa

SEQ ID NO: 518093 - DNA, 120 bp, Artificial Sequence
  ENSG00000165046_40 (sequence is synthesized)
aacaagtaaaactccactgtcctgtctgggatcacctaaatgaggaatgtcaccagcacttcacagcaagaatatgcattctacaatgctttctaaatttgtgctccatcagagaagccc

SEQ ID NO: 518094 - DNA, 120 bp, Artificial Sequence
  ENSG00000165046_41 (sequence is synthesized)
caccatgtcccactaatgaagcccagttctttgggaatgatgaatccctactgtgcacatacagcaatcatggatcctgcctatcgaggtgattcacaatacactttcccatttcaaaaa

SEQ ID NO: 518095 - DNA, 120 bp, Artificial Sequence
  ENSG00000165046_42 (sequence is synthesized)
ggagaacgtccctccttcccttttgctcctgtcccgcaccttctacctgatagatgtgaagcccaagccgattgagataccactcagtggggaggatgaagactttatacagccgccacc

SEQ ID NO: 518096 - DNA, 120 bp, Artificial Sequence
  ENSG00000165046_43 (sequence is synthesized)
cccaagccgattgagataccactcagtggggaggtgagtacctgggttaatggggaccctcgacgtccatccaactgaggcctctccacaaacacttggtgtactcttgcagttagagca

SEQ ID NO: 518097 - DNA, 120 bp, Artificial Sequence
  ENSG00000165046_44 (sequence is synthesized)
ggcatttcttttggccttttagaatttgacccaactggctttatgtgttttaaaaatttctaaaaaaaccaaccaaccaaccacaaacaaacaaaacaaaggaaggccaggcacagtggc

SEQ ID NO: 518098 - DNA, 120 bp, Artificial Sequence
  ENSG00000165046_45 (sequence is synthesized)
aggtgtcgtctcctgcccgcgaaacaccacccaccgttagtgtgggtccacaggtttcgagcccctgttgaaaatgtcagctctgtggctaaggtccctatgttaactacttgagacaaa

SEQ ID NO: 518099 - DNA, 120 bp, Artificial Sequence
  ENSG00000165046_46 (sequence is synthesized)
agtaggtatgatttagtcagcccaacagacagttcagcagcccctgagaagagggagccttcactgagtgtggcagtcactgtgccggtgagaaaacagaggcagctccttccttctccc

SEQ ID NO: 518100 - DNA, 120 bp, Artificial Sequence
  ENSG00000165055_0 (sequence is synthesized)
gcgttacggaaagtgaagtgtttccggctccggtgtcatggccggctcctaccctgaaggtgcacctgcaatcctcgccgataagaggcagcagttcggaagccggttcctgagcgatcc

SEQ ID NO: 518101 - DNA, 120 bp, Artificial Sequence
  ENSG00000165055_1 (sequence is synthesized)
ggcgcgcgtcttccaccacaatgcctgggacaatgtggagtggtcggaagagcaagccgcggcggcggagagaaaagtccaggagaacagtatccagcgggtgtgccaggagaaacaagt

SEQ ID NO: 518102 - DNA, 120 bp, Artificial Sequence
  ENSG00000165055_2 (sequence is synthesized)
tgattatgagatcaatgcccacaaatactggaatgacttctacaaaatccacgaaaatgggtttttcaaggatagacattggctttttaccgaattccctgagctggcacctagccaaaa

SEQ ID NO: 518103 - DNA, 120 bp, Artificial Sequence
  ENSG00000165055_3 (sequence is synthesized)
tcaaaatcatttgaaggattggttcttggagaacaagagtgaagtatgtgaatgtagaaacaatgaggatggacctggtttaataatggaagaacagcacaagtgttcttcgaagagcct

SEQ ID NO: 518104 - DNA, 120 bp, Artificial Sequence
  ENSG00000165055_4 (sequence is synthesized)
tgaacataaaacacagacacctcctgtggaggagaatgtaactcagaaaattagtgacctggaaatttgtgctgatgagtttcctggatcctcagccacctaccgaatactggaggttgg

SEQ ID NO: 518105 - DNA, 120 bp, Artificial Sequence
  ENSG00000165055_5 (sequence is synthesized)
ctgtggtgtgggaaacacagtctttccaattttacaaacgaacaatgacccaggactctttgtttattgctgtgatttttcttccacagctatagaactggtccagacaaattcagaata

SEQ ID NO: 518106 - DNA, 120 bp, Artificial Sequence
  ENSG00000165055_6 (sequence is synthesized)
tgatccttctcggtgttttgcctttgttcacgacctgtgtgatgaagagaagagttacccagtgcccaagggcagtcttgatattatcattctcatatttgttctttcagcagttgttcc

SEQ ID NO: 518107 - DNA, 120 bp, Artificial Sequence
  ENSG00000165055_7 (sequence is synthesized)
agacaagatgcagaaggctatcaacaggctgagcaggcttctgaaacctggggggatggtacttctgcgagattacggccgctatgacatggctcagcttcggtttaaaaaaggtcagtg

SEQ ID NO: 518108 - DNA, 120 bp, Artificial Sequence
  ENSG00000165055_8 (sequence is synthesized)
tctatctggaaatttctatgtgagaggtgatggaaccagagtttacttcttcacacaagaggaactggacacgcttttcaccactgctggactggaaaaagttcagaatctggtggaccg

SEQ ID NO: 518109 - DNA, 120 bp, Artificial Sequence
  ENSG00000165055_9 (sequence is synthesized)
aagcaactgacaatgtaccgggtttggattcagtgcaaatactgcaagccccttctgtccagcaccagctaagaggcacctgctgccaacacgatgcaagcccgttgtgtttccgagctt

SEQ ID NO: 518110 - DNA, 87 bp, Artificial Sequence
  ENSG00000165055_10 (sequence is synthesized)
gaggatccattgagcccaggagtccagcctgggcaaaatagcgagagaccctgaatctgaaagtaatgataaaataaaaagaatata

SEQ ID NO: 518111 - DNA, 120 bp, Artificial Sequence
  ENSG00000165055_11 (sequence is synthesized)
accctgaatctgaaagtaatgataaaataaaaagaatataaatgaggtctcgttgatgctggacaattcaagaattcagacttgaaccttaaacctaggaaaagttactttgtatcagga

SEQ ID NO: 518112 - DNA, 120 bp, Artificial Sequence
  ENSG00000165055_12 (sequence is synthesized)
ttctaacaattatgcttcatatttgtgaagtcctttaaaacataattttctcaagttctttctttgagacctcaatctgtcttagcattttgtaactaataactgaaattttattcaaag

SEQ ID NO: 518113 - DNA, 120 bp, Artificial Sequence
  ENSG00000165055_13 (sequence is synthesized)
gaattgtaaaccttaaaccaccatttatttccatgtgaaaaagtgttatatatgacaagtgttttttgattgtaattgcgttaaatcttttgagagtgtaaatgccgggctaggcaattg

SEQ ID NO: 518114 - DNA, 120 bp, Artificial Sequence
  ENSG00000165055_14 (sequence is synthesized)
cagttaatacatacaggggttagtgaagggcttattaagttgtaggggaagcaagctgggaagaatcagatcagatattttcctgacaagaaaaaaatgaccctgtagacagcatcaaaa

SEQ ID NO: 518115 - DNA, 120 bp, Artificial Sequence
  ENSG00000165055_15 (sequence is synthesized)
tcctgacaagaaaaaaatgaccctgtagacagcatcaaaatgtggtgttcttgttaagtaattgatcgtggtctttgctttaatcttagttccgccaggcacggtggctcacacctgtaa

SEQ ID NO: 518116 - DNA, 120 bp, Artificial Sequence
  ENSG00000165055_16 (sequence is synthesized)
tcatatattgaaagtctgtggcaaccctgcatcaagcaagcctaccagtgccgtttctccaccaccatatgctcacttagtgtctgtgtgtcatgctttggtgattctcagaatatttca

SEQ ID NO: 518117 - DNA, 120 bp, Artificial Sequence
  ENSG00000165055_17 (sequence is synthesized)
gacttttttactattatgtatgttatagtgtgtgacgttactgttgtacttggtttggggttccacaaatcacatctgtgtaagacggtcaacttaataaatgcatgtgttgtgactgcc

SEQ ID NO: 518118 - DNA, 120 bp, Artificial Sequence
  ENSG00000165055_18 (sequence is synthesized)
ggcgcgcgtcttccaccacaatgcctggtaatcaccctgccccctcgcccggcctgtcgctggccgtctgtcccgccgcctcggagcattccgaaaagcccctgaccgccggccacgagt

SEQ ID NO: 518119 - DNA, 120 bp, Artificial Sequence
  ENSG00000165055_19 (sequence is synthesized)
caagctgccctacccgaggcactctccaaggggagagaaactcctaggccagcgactcaccctgctcgcagccaggacgtgaagcccctaagctgcccgtttgattttctcagggacaat

SEQ ID NO: 518120 - DNA, 120 bp, Artificial Sequence
  ENSG00000165055_20 (sequence is synthesized)
tcaaaaaaataaaaataaaaaaaatcttagttccatggaattttaagcactgttccccctctaacctatgtctaaagaattaaaagaatttggctgggtgcggtagctcatgcctgtaat

SEQ ID NO: 518121 - DNA, 120 bp, Artificial Sequence
  ENSG00000165055_21 (sequence is synthesized)
acagaggaagactctgtctcaaaaaaataaaagaaaagaattttcactttttgcaaaattatctttttttactgcacccttaagtgtttgacacaaaaggaattgagagaacttcttaat

SEQ ID NO: 518122 - DNA, 120 bp, Artificial Sequence
  ENSG00000165055_22 (sequence is synthesized)
tttaaccacatcatcacttcacttctgaatgtgatcactgtcagtgttagatgctttttttttttttttttaggagacagggctctcactttgttgcccaggctggagttcagtggtgca

SEQ ID NO: 518123 - DNA, 120 bp, Artificial Sequence
  ENSG00000165055_23 (sequence is synthesized)
atgatagctcattatcacctcgaacttctggcttgagccatcgctccacctcagcctcctgagtagctaggactgcaggtgggcaccatcatgcctagctaattgttagatccttttttt

SEQ ID NO: 518124 - DNA, 120 bp, Artificial Sequence
  ENSG00000165055_24 (sequence is synthesized)
actccagcctgggcgacaagagcgaaactgcatctcaaaaacaaagatgcctagctttcaccttgttgatgtttttctaaattttggaataataaatttatataggaatactgcaagaat

SEQ ID NO: 518125 - DNA, 120 bp, Artificial Sequence
  ENSG00000165055_25 (sequence is synthesized)
agtccatttttttctgatgtcccaacatcagcaaatatattaccaaatatatccatcacaagtaggaatacatggaaacattaatgccagccactaaccattcatgtttacccagtagtc

SEQ ID NO: 518126 - DNA, 120 bp, Artificial Sequence
  ENSG00000165055_26 (sequence is synthesized)
ccaataatagctttgtcacacaaaaacatgattatgttggctgggcacagtggctcctgtaatcttagcattttgggagcccaaggcaggaggatgacttgaggccaggagttcaagacc

SEQ ID NO: 518127 - DNA, 66 bp, Artificial Sequence
  ENSG00000165055_27 (sequence is synthesized)
ccaaggcaggaggatgacttgaggccaggagttcaagaccaggctgggtaatgtagcaagaccctg

SEQ ID NO: 518128 - DNA, 64 bp, Artificial Sequence
  ENSG00000165055_28 (sequence is synthesized)
ctcggctcactgcaatctccacctcccagcaccattcccagctaaattttttgtatttttagta

SEQ ID NO: 518129 - DNA, 65 bp, Artificial Sequence
  ENSG00000165055_29 (sequence is synthesized)
agttcgagaccagcctggccaacttaatgaaaccccatctctgctaacaataaggtggatcacct

SEQ ID NO: 518130 - DNA, 120 bp, Artificial Sequence
  ENSG00000165055_30 (sequence is synthesized)
aaaatgtaaaaaataaataattgtattgaatttattagttgtgtctcagtctccttcagtctacagtttaggcttgcttttgcacctttgcattttaaggtaagaggctattgtgtaaac

SEQ ID NO: 518131 - DNA, 120 bp, Artificial Sequence
  ENSG00000165055_31 (sequence is synthesized)
tcgaattgggtttgttggtgtttcttcatgatttggttcaggctctgcattttgggcaggaatattcagaggtgatgctgtgttcctcccataggatcgtatcaggcgacacatgattat

SEQ ID NO: 518132 - DNA, 120 bp, Artificial Sequence
  ENSG00000165055_32 (sequence is synthesized)
gaatttccccattattggtgatgtcacttagttgtgttgtctgccaggttctgccactgtaaagttaataagtattttgtagggaagtgctttgagactaaatatcctgttcctcatcaa

SEQ ID NO: 518133 - DNA, 120 bp, Artificial Sequence
  ENSG00000165055_33 (sequence is synthesized)
acttctaccccctagtttcagtatctattgctgttttttgtctgaataactatgatagttgccaaatagtggtttctgatccttccattccttctacactgattggttggtattttgtac

SEQ ID NO: 518134 - DNA, 120 bp, Artificial Sequence
  ENSG00000165055_34 (sequence is synthesized)
agaaaagctttctcatatctgatttacttgtctcaatatggacccatgggtatttgagtttcttgtggggttatttgttgttgtttttgagacaggctcacccaggctggagtgcagcag

SEQ ID NO: 518135 - DNA, 120 bp, Artificial Sequence
  ENSG00000165055_35 (sequence is synthesized)
cacgatcactgcttactgcttactgcagcctcgacctcccatgctcaagtgattctcccaccccagcctcccaagtagatgggactacaggcatgtgccaccaagcctaatttttgtatt

SEQ ID NO: 518136 - DNA, 67 bp, Artificial Sequence
  ENSG00000165055_36 (sequence is synthesized)
cttgagccaccgtgactggccccacttaatgggttttcagaggtgggagcaaagaatgaagggagga

SEQ ID NO: 518137 - DNA, 120 bp, Artificial Sequence
  ENSG00000165055_37 (sequence is synthesized)
aatgggttttcagaggtgggagcaaagaatgaagggaggaagagagctcccatcttttccattaccgtatttacttaaaactggaaaaaactgaatcactgggatggtatttcatttatc

SEQ ID NO: 518138 - DNA, 120 bp, Artificial Sequence
  ENSG00000165055_38 (sequence is synthesized)
ttttgaaatgaagaatagatacattaatttaaatgattctctaaagactgtccttcagcatccctaaagcattgcaaaactataggcacagtttttattttatctttctggcacctggtt

SEQ ID NO: 518139 - DNA, 120 bp, Artificial Sequence
  ENSG00000165055_39 (sequence is synthesized)
tgggctttggcttagattaaaaagacgagccttctcctgcccctgctcccttttattccctgccatctgctaagctcgactttttatctctcaggccaaatttgactctgtaagggactt

SEQ ID NO: 518140 - DNA, 120 bp, Artificial Sequence
  ENSG00000165055_40 (sequence is synthesized)
tgcataacgtttcatcctcagaatcgctaatgatgggcagaggactgttacatgtgttgggagggattaaagtatatgacctcagtgccacttaaaaaataaatactgtctcaactatca

SEQ ID NO: 518141 - DNA, 120 bp, Artificial Sequence
  ENSG00000165055_41 (sequence is synthesized)
atttgtgctgatgagtttcctggatcctcagccacctaccgaatactggaggttggctgtggtgtgggaaacacagtctttccaattttacaaacgaacaaaaatttctaagaaaatggc

SEQ ID NO: 518142 - DNA, 120 bp, Artificial Sequence
  ENSG00000165055_42 (sequence is synthesized)
attaatcatcaatatcatcaatgaatgtaaaactgaatgtagatggcatctttgccacagcctctttatgccatttaaataagatcgctgtgttcagtatcttactagaacccacttgtt

SEQ ID NO: 518143 - DNA, 120 bp, Artificial Sequence
  ENSG00000165055_43 (sequence is synthesized)
catgtaattcactggcttagaattggcatgttttctactgcctgtgaatcaggtttaaattgttgggcatagttttcaaagtcctctacaagagtgtgccctataaagtatgtcctctta

SEQ ID NO: 518144 - DNA, 120 bp, Artificial Sequence
  ENSG00000165059_0 (sequence is synthesized)
gcccctgccgccgccaccgccatgggcaacgcccccgccaagaaggacaccgagcaggaggagagcgtgaacgagttcctagccaaagccagaggagatttcctctacagatggggaaac

SEQ ID NO: 518145 - DNA, 120 bp, Artificial Sequence
  ENSG00000165059_1 (sequence is synthesized)
cccgctcaaaacaccgccagctcggatcagttcgaacggctcaggacgctgggcatgggctccttcgggcgggtgatgctggtgaggcaccaggagaccggcggccactacgccatgaag

SEQ ID NO: 518146 - DNA, 120 bp, Artificial Sequence
  ENSG00000165059_2 (sequence is synthesized)
atcctcaacaagcagaaggtggtgaagatgaagcaggtcgagcacatactgaacgagaagcgcatcctgcaggcgatcgactttccgttcctcgtcaagctccagttctcctttaaggac

SEQ ID NO: 518147 - DNA, 120 bp, Artificial Sequence
  ENSG00000165059_3 (sequence is synthesized)
aactcctacctgtacctggtgatggagtacgtgccgggtggggagatgttctcccgcctacagcgcgtcggaaggtttagcgagccccatgcctgtttctatgccgcccaggtcgtcctg

SEQ ID NO: 518148 - DNA, 120 bp, Artificial Sequence
  ENSG00000165059_4 (sequence is synthesized)
gccgtccagtacctacactcgctcgacctcatccaccgcgacctgaagcccgagaatctcctcatcgaccagcagggctacctgcaggtgacggacttcggtttcgccaagcgcgtgaag

SEQ ID NO: 518149 - DNA, 120 bp, Artificial Sequence
  ENSG00000165059_5 (sequence is synthesized)
ggccgcacttggaccttgtgcgggaccccagagtacctggcccccgagatcatcctgagcaaaggctacaacaaggccgtggactggtgggccctaggggtgctcatctatgagatggcc

SEQ ID NO: 518150 - DNA, 120 bp, Artificial Sequence
  ENSG00000165059_6 (sequence is synthesized)
accagcccatccagatctacgagaagatcgtctctgggagggtgcggtttccctccaaactcagctctgacctcaagcatctgctgcggagcctgctgcaggtggacctcaccaagcgct

SEQ ID NO: 518151 - DNA, 120 bp, Artificial Sequence
  ENSG00000165059_7 (sequence is synthesized)
tcggaaacctcaggaacggggttggcgacatcaagaaccacaagtggttcgccacaaccagctggatcgccatctatgagaagaaggtggaagctcccttcatcccgaagtacacaggcc

SEQ ID NO: 518152 - DNA, 120 bp, Artificial Sequence
  ENSG00000165059_8 (sequence is synthesized)
ctggggatgccagtaactttgacgactacgaggaggaagagctccggatctccatcaatgagaagtgtgccaaggagttttctgagttttaggggtgtgcttgtgcccctgtgggttttc

SEQ ID NO: 518153 - DNA, 120 bp, Artificial Sequence
  ENSG00000165059_9 (sequence is synthesized)
tttcctttttgtttttggtggtttgggggatgggagggttggattgaacagccagagggccccagagttccttgtatctaatttcatcctcaccccaccctccagggttgggggagcagg

SEQ ID NO: 518154 - DNA, 120 bp, Artificial Sequence
  ENSG00000165059_10 (sequence is synthesized)
aagcccagatatttggaggaacagaaacaccagctgctccctcacccccccccatgccttcctggtccctctgtgcttctctctttctcctcccacagggtcccccttgccccagccccc

SEQ ID NO: 518155 - DNA, 120 bp, Artificial Sequence
  ENSG00000165059_11 (sequence is synthesized)
ttctgcctgttttaaacgagtttctcagctctattcaggccaggtcttgctgttgtatcaagggacacggtgtggaaagaggggctcaaacttaactccagccctgaacaggcaccactt

SEQ ID NO: 518156 - DNA, 120 bp, Artificial Sequence
  ENSG00000165059_12 (sequence is synthesized)
actaagagaggatgaatgaaaagcacacctaccctttggcgtaatcctgcctgggaaggagagaggtttagtgccatgttcagtgggctgtttgctagaataaaaaattaaaacaaaaaa

SEQ ID NO: 518157 - DNA, 120 bp, Artificial Sequence
  ENSG00000165060_0 (sequence is synthesized)
gcgggcggcagacccggagcagcatgtggactctcgggcgccgcgcagtagccggcctcctggcgtcacccagcccagcccaggcccagaccctcacccgggtcccgcggccggcagagt

SEQ ID NO: 518158 - DNA, 120 bp, Artificial Sequence
  ENSG00000165060_1 (sequence is synthesized)
ggcagagttggccccactctgcggccgccgtggcctgcgcaccgacatcgatgcgacctgcacgccccgccgcgcaagttcgaaccaacgtggcctcaaccagatttggaatgtcaaaaa

SEQ ID NO: 518159 - DNA, 120 bp, Artificial Sequence
  ENSG00000165060_2 (sequence is synthesized)
gcagagtgtctatttgatgaatttgaggaaatctggaactttgggccacccaggctctctagatgagaccacctatgaaagactagcagaggaaacgctggactctttagcagagttttt

SEQ ID NO: 518160 - DNA, 120 bp, Artificial Sequence
  ENSG00000165060_3 (sequence is synthesized)
tgaagaccttgcagacaagccatacacgtttgaggactatgatgtctcctttgggagtggtgtcttaactgtcaaactgggtggagatctaggaacctatgtgatcaacaagcagacgcc

SEQ ID NO: 518161 - DNA, 120 bp, Artificial Sequence
  ENSG00000165060_4 (sequence is synthesized)
aaacaagcaaatctggctatcttctccatccagtggacctaagcgttatgactggactgggaaaaactgggtgtactcccacgacggcgtgtccctccatgagctgctggccgcagagct

SEQ ID NO: 518162 - DNA, 120 bp, Artificial Sequence
  ENSG00000165060_5 (sequence is synthesized)
cactaaagccttaaaaaccaaactggacttgtcttccttggcctattccggaaaagatgcttgatgcccagccccgttttaaggacattaaaagctatcaggccaagaccccagcttcat

SEQ ID NO: 518163 - DNA, 120 bp, Artificial Sequence
  ENSG00000165060_6 (sequence is synthesized)
tatgcagctgaggtctgttttttgttgttgttgttgtttattttttttattcctgcttttgaggacagttgggctatgtgtcacagctctgtagaaagaatgtgttgcctcctaccttgc

SEQ ID NO: 518164 - DNA, 120 bp, Artificial Sequence
  ENSG00000165060_7 (sequence is synthesized)
ccccaagttctgatttttaatttctatggaagattttttggattgtcggatttcctccctcacatgataccccttatcttttataatgtcttatgcctatacctgaatataacaaccttt

SEQ ID NO: 518165 - DNA, 120 bp, Artificial Sequence
  ENSG00000165060_8 (sequence is synthesized)
aaaaaagcaaaataataagaaggaaaaattccaggagggaaaatgaattgtcttcactcttcattctttgaaggatttactgcaagaagtacatgaagagcagctggtcaacctgctcac

SEQ ID NO: 518166 - DNA, 120 bp, Artificial Sequence
  ENSG00000165060_9 (sequence is synthesized)
tgttctatctccaaatgagacacattaaagggtagcctacaaatgttttcaggcttctttcaaagtgtaagcacttctgagctctttagcattgaagtgtcgaaagcaactcacacggga

SEQ ID NO: 518167 - DNA, 120 bp, Artificial Sequence
  ENSG00000165060_10 (sequence is synthesized)
agatcatttcttatttgtgctctgtgactgccaaggtgtggcctgcactgggttgtccagggagacctagtgctgtttctcccacatattcacatacgtgtctgtgtgtatatatatttt

SEQ ID NO: 518168 - DNA, 120 bp, Artificial Sequence
  ENSG00000165060_11 (sequence is synthesized)
ttcaatttaaaggttagtatggaatcagctgctacaagaatgcaaaaaatcttccaaagacaagaaaagaggaaaaaaagccgttttcatgagctgagtgatgtagcgtaacaaacaaaa

SEQ ID NO: 518169 - DNA, 120 bp, Artificial Sequence
  ENSG00000165060_12 (sequence is synthesized)
tcatggagctgaggaggtgccttgtaaacatgaaggggcagataaaggaaggagatactcatgttgataaagagagccctggtcctagacatagttcagccacaaagtagttgtcccttt

SEQ ID NO: 518170 - DNA, 120 bp, Artificial Sequence
  ENSG00000165060_13 (sequence is synthesized)
gtggacaagtttcccaaattccctggacctctgcttccccatctgttaaatgagagaatagagtatggttgattcccagcattcagtggtcctgtcaagcaacctaacaggctagttcta

SEQ ID NO: 518171 - DNA, 120 bp, Artificial Sequence
  ENSG00000165060_14 (sequence is synthesized)
attccctattgggtagatgaggggatgacaaagaacagtttttaagctatataggaaacattgttattggtgttgccctatcgtgatttcagttgaattcatgtgaaaataatagccatc

SEQ ID NO: 518172 - DNA, 120 bp, Artificial Sequence
  ENSG00000165060_15 (sequence is synthesized)
gtgccattgcactgtaacctgggtgactgagcaaaactctgtctcaaaataataataacaatataataataataatagccatcctttattgtacccttactgggttaatcgtattatacc

SEQ ID NO: 518173 - DNA, 120 bp, Artificial Sequence
  ENSG00000165060_16 (sequence is synthesized)
acattacctcattttaatttttactgacctgcactttatacaaagcaacaagcctccaggacattaaaattcatgcaaagttatgctcatgttatattattttcttacttaaagaaggat

SEQ ID NO: 518174 - DNA, 87 bp, Artificial Sequence
  ENSG00000165060_17 (sequence is synthesized)
tggcgtacgggagaattgcttgaccccaggcggaggaggttacagtgagtcgagatcgtacctgagcgacagagcgagactccgtct

SEQ ID NO: 518175 - DNA, 120 bp, Artificial Sequence
  ENSG00000165060_18 (sequence is synthesized)
ctccgtctcaaaaaaaaaaaaaaggagggtttattaatgagaagtttgtattaatatgtagcaaaggcttttccaatgggtgaataaaaacacattccattaagtcaagctgggagcagt

SEQ ID NO: 518176 - DNA, 120 bp, Artificial Sequence
  ENSG00000165060_19 (sequence is synthesized)
ggaggctgagacaggaggattgcttgaagccaggaattggagatcagcctgggcaacacagcaagatcctatctcttaaaaaaagaaaaaaaaacctattaataataaaacagtataaac

SEQ ID NO: 518177 - DNA, 120 bp, Artificial Sequence
  ENSG00000165060_20 (sequence is synthesized)
aaaagaaaaaaaaacctattaataataaaacagtataaacaaaagctaaataggtaaaatattttttctgaaataaaattattttttgagtctgatggaaatgtttaagtgcagtaggcc

SEQ ID NO: 518178 - DNA, 120 bp, Artificial Sequence
  ENSG00000165060_21 (sequence is synthesized)
agtgccagtgagaaaataaataacatcatacatgtttgtatgtgtttgcatcttgcttctactgaaagtttcagtgcaccccacttacttagaactcggtgacatgatgtactcctttat

SEQ ID NO: 518179 - DNA, 120 bp, Artificial Sequence
  ENSG00000165060_22 (sequence is synthesized)
ctgggacacagcacaaaagaggtatgcagtggggctgctctgacatgaaagtggaagttaaggaatctgggctcttatggggtccttgtgggccagcccttcaggcctattttactttca

SEQ ID NO: 518180 - DNA, 120 bp, Artificial Sequence
  ENSG00000165060_23 (sequence is synthesized)
gcctattttactttcattttacatatagctctaattggtttgattatctcgttcccaaggcagtgggagatccccatttaaggaaagaaaaggggcctggcacagtggctcatgcctgta

SEQ ID NO: 518181 - DNA, 60 bp, Artificial Sequence
  ENSG00000165060_24 (sequence is synthesized)
ttaaaaaattggctgggcgtggtggttcgtgcctataatttcagctactcaggaggctga

SEQ ID NO: 518182 - DNA, 120 bp, Artificial Sequence
  ENSG00000165060_25 (sequence is synthesized)
tcaggaggctgaggcaggagaatcgctgtaacctggggggtggaggttgcagtgagacgagatcatgccacttcactccagcctggccaacagagccatactccgtctcaaataaataaa

SEQ ID NO: 518183 - DNA, 120 bp, Artificial Sequence
  ENSG00000165060_26 (sequence is synthesized)
caaataaataaataaataaataaagggacttcaaacacatgaacagcagccaggggaagaatcaaaatcatattctgtcaagcaaactggaaaagtaccactgtgtgtaccaatagcctc

SEQ ID NO: 518184 - DNA, 120 bp, Artificial Sequence
  ENSG00000165060_27 (sequence is synthesized)
agcatcgcctcatttatggtgtggtccagtcatccatgtgaaggatgagtttccaggaaaaggttattaaatattcactgtaacatactggaggaggtgaggaattgcataatacaatct

SEQ ID NO: 518185 - DNA, 120 bp, Artificial Sequence
  ENSG00000165060_28 (sequence is synthesized)
tagaaaacttttttttcccctttctattttttgagacaggatctcactttggcactcaggctggaggacagtggtacaatcaaagctcatggcagcctcgacctccctgggcttgggcaa

SEQ ID NO: 518186 - DNA, 78 bp, Artificial Sequence
  ENSG00000165060_29 (sequence is synthesized)
caaagctcatggcagcctcgacctccctgggcttgggcaatcctcccacaggtgtgcacctccatagctggctaattt

SEQ ID NO: 518187 - DNA, 120 bp, Artificial Sequence
  ENSG00000165060_30 (sequence is synthesized)
gtcctcccaagatgctgggattacaggtgtgtgccacaggtgttcatcagaaagctttttctattatttttaccttcttgagtgggtagaacctcagccacatagaaaataaaatgttct

SEQ ID NO: 518188 - DNA, 120 bp, Artificial Sequence
  ENSG00000165060_31 (sequence is synthesized)
ggcatgacttatttagctctctggaattacaaagaaggaatgaggtgtgtaaaagagaacctgggtttttgaatcacaaatttagaatttaatcgaaactctgcctcttacttgtttgta

SEQ ID NO: 518189 - DNA, 120 bp, Artificial Sequence
  ENSG00000165060_32 (sequence is synthesized)
gacactgacagtggcctcatgttttttttttttttaatctataaaatggagatatctaacatgttgagcctgggcccacaggcaaagcacaatcctgatgtgagaagtactcagttcatg

SEQ ID NO: 518190 - DNA, 120 bp, Artificial Sequence
  ENSG00000165060_33 (sequence is synthesized)
acaactgttgttctcacatgcatagcataatttcatattcacattggaggacttctcccaaaatatggatgacgttccctactcaaccttgaacttaatcaaaatactcagtttacttaa

SEQ ID NO: 518191 - DNA, 120 bp, Artificial Sequence
  ENSG00000165060_34 (sequence is synthesized)
cttcgtattagattctgattccctggaaccatttatcgtgtgccttaccatgcttatattttacttgatcttttgcataccttctaaaactattttagccaatttaaaatttgacagttt

SEQ ID NO: 518192 - DNA, 120 bp, Artificial Sequence
  ENSG00000165060_35 (sequence is synthesized)
gcattaaattataggtttacaatatgctttatccagctatacctgccccaaattctgacagatgcttttgccacctctaaaggaagacccatgttcatagtgatggagtttgtgtggact

SEQ ID NO: 518193 - DNA, 120 bp, Artificial Sequence
  ENSG00000165060_36 (sequence is synthesized)
aaccatgcaaggttgccaaggaaaaatcgctttacgcttccaaggtacacactaagatgaaagtaattttagtccgtgtccagttggattcttggcacatagttatcttctgctagaaca

SEQ ID NO: 518194 - DNA, 120 bp, Artificial Sequence
  ENSG00000165060_37 (sequence is synthesized)
aactaaaacagctacatgccagcaagggagaaaggggaaggaggggcaaagttttgaaatttcatgtaaatttatgctgttcaaaacgacgagttcatgactttgtgtatagagtaagaa

SEQ ID NO: 518195 - DNA, 120 bp, Artificial Sequence
  ENSG00000165060_38 (sequence is synthesized)
ggcgtgagccactgcacccagccagaaatgccttctaatctttggtttatcttaattagccaggacacttggagtgcatcccgaagtacctgatcagtggcccctttggaatgtgtaaaa

SEQ ID NO: 518196 - DNA, 120 bp, Artificial Sequence
  ENSG00000165060_39 (sequence is synthesized)
cctgatcagtggcccctttggaatgtgtaaaactcagctcacttatatccctgcatccgctacagagacagaatccaagctcatatgttccatcttctctggctgtatagtttaaggaat

SEQ ID NO: 518197 - DNA, 120 bp, Artificial Sequence
  ENSG00000165060_40 (sequence is synthesized)
ggaaggcaccagaacagatttattgaaatgtttattagctgaagatttatttagacagttgaggaaaacatcagcacccagcagtaaaattggctctcaaagattttcttctcctgtgga

SEQ ID NO: 518198 - DNA, 120 bp, Artificial Sequence
  ENSG00000165060_41 (sequence is synthesized)
aagtcagacctctgaggccccatccaggtagaagtactagtgcaagaagggcctctgctgtccacttgtgtttctgtgatctgtgggaacattgttaacgccacatcttgacctcaaatt

SEQ ID NO: 518199 - DNA, 120 bp, Artificial Sequence
  ENSG00000165060_42 (sequence is synthesized)
tccagcctgggtgacaagagggaaactccattaaaaaaatgtaattcccgtgtctgccatcttaagtgtaaaggtggctaaattatatagaaaaataagacaatatcatttcccaattac

SEQ ID NO: 518200 - DNA, 120 bp, Artificial Sequence
  ENSG00000165060_43 (sequence is synthesized)
caatatcatttcccaattacattcctttcctaccgcactctatgatgctagctgagatttttccaaaagaaaatggcttaaataaaaccctaagagaaagaaaaactttaaatccctcca

SEQ ID NO: 518201 - DNA, 120 bp, Artificial Sequence
  ENSG00000165060_44 (sequence is synthesized)
aagctcaaaagtaatagaaacagatgagtttggagtcaggatttctctgtaagattgcctaggctgtgtactgcacatctccaggtgccactgttgacagagattataactacaatgtga

SEQ ID NO: 518202 - DNA, 120 bp, Artificial Sequence
  ENSG00000165060_45 (sequence is synthesized)
agtgaatggtgccactgacagttatgcaaaccgtccagagcatagccacctgatcctgctgggattcctcttgccagtccatcagcagttccccttgaaagtttcaccaaacatccctta

SEQ ID NO: 518203 - DNA, 120 bp, Artificial Sequence
  ENSG00000165060_46 (sequence is synthesized)
aatctgccctctcctgcccgtccccagtggaggtcctcatcatttttcacctgcatttttgcaggagctttcttatatccaccttcctccttttctctcagcccatcatctagctacaca

SEQ ID NO: 518204 - DNA, 120 bp, Artificial Sequence
  ENSG00000165060_47 (sequence is synthesized)
gtctccagggtaagctttcagaaaggcaatctcttgtctgtaaaacctaagcaggaccaaggccaagtttcttagcctgaaaaatgtgcttttctgactgaactgttcaggcactgactc

SEQ ID NO: 518205 - DNA, 120 bp, Artificial Sequence
  ENSG00000165060_48 (sequence is synthesized)
tacatataattatgcttttctaccccctcacactcaacactttgactccagcaatcccaaatccccagatccctaagtgtgctgtgctattttcacgtggctctcagacttggccagtgc

SEQ ID NO: 518206 - DNA, 120 bp, Artificial Sequence
  ENSG00000165060_49 (sequence is synthesized)
tgtttccattttggtctttattccccacatctctgcctggggggtagattctaccctgaaaaatgttcttggcacagccttgcaaactcctcctccactcagcctctgcctggatgccct

SEQ ID NO: 518207 - DNA, 120 bp, Artificial Sequence
  ENSG00000165060_50 (sequence is synthesized)
tgattgttccatgtcctcagcataccatgtttgtctttcccagcactgacctaccatgtgtcacccctgcttggctgtaccttccatgaggctaggactatgtgtctcctttgttgactg

SEQ ID NO: 518208 - DNA, 120 bp, Artificial Sequence
  ENSG00000165060_51 (sequence is synthesized)
ctgttgccctagcatcttgcacagttccttgcacacaattagagctctataaatgtcaaataaatgtgttataattatatgtttaagatagttgttcaaataaactctaaataaccccaa

SEQ ID NO: 518209 - DNA, 120 bp, Artificial Sequence
  ENSG00000165060_52 (sequence is synthesized)
agtctcccttgggtcaggggtcctggttgcactccgtgctttgcacaaagcaggctctccatttttgttaaatgcacgaatagtgctaagctgggaagttcttcctgaggtctaacctct

SEQ ID NO: 518210 - DNA, 120 bp, Artificial Sequence
  ENSG00000165060_53 (sequence is synthesized)
aagtgaggaccatgctctccaaacaggccatgtgctggactacctctgtttctgtctcctgggattccaatcagcaagtgagcaacgaagcaacccagacagtgtggttcataggatggc

SEQ ID NO: 518211 - DNA, 120 bp, Artificial Sequence
  ENSG00000165060_54 (sequence is synthesized)
tgggtaagtggctgtttgttttttccttactgtggatatgtatcagtgaaggaatctgtagaacattcttgatgggaacatttagtcatatcaagtcaataaattaatgtttaggctggg

SEQ ID NO: 518212 - DNA, 120 bp, Artificial Sequence
  ENSG00000165060_55 (sequence is synthesized)
ggggtcgctccgggtacgcgcgctggactagctcaccccgctccttctcagggcggcccggcggaagcggccttgcaactcccttctctggttctcccggttgcatttacactggcttct

SEQ ID NO: 518213 - DNA, 120 bp, Artificial Sequence
  ENSG00000165060_56 (sequence is synthesized)
ttctgctttccgaaggaaaaggggacattttgtcctgcggctgctggagtgcaatggtgtaatcatagctcactgcagcctctacctctctggctcaagcaatcctcccacctcggcctc

SEQ ID NO: 518214 - DNA, 120 bp, Artificial Sequence
  ENSG00000165060_57 (sequence is synthesized)
cctgcggtgcgactgcgggtcaagaagttcctttcaggtgaatttctcagaatggaattgctgggcaaaggggcagccaataatcaactcatttgatgccaaaagtggtggtgccagttc

SEQ ID NO: 518215 - DNA, 120 bp, Artificial Sequence
  ENSG00000165061_0 (sequence is synthesized)
acagttggtccgagctgccgaaaggtctggtcgcagagacaggaacgtgtaatcctcagcgtgctccagcccacagcttcgctctactgctcggcagggcagctggcctctgggcaccgg

SEQ ID NO: 518216 - DNA, 120 bp, Artificial Sequence
  ENSG00000165061_1 (sequence is synthesized)
cggcccctctgcctcgcggaaaagcctgatgaagtcctccgatattgatcaggatttattcacagacagttactgcaaggtgtgcagtgcacagctgatctccgaatcgcagcgtgtggc

SEQ ID NO: 518217 - DNA, 120 bp, Artificial Sequence
  ENSG00000165061_2 (sequence is synthesized)
ccactacgagagtcgaaaacatgcaagcaaagtccgactgtattacatgcttcaccccagggatggagggtgtcctgccaagaggctccggtcagaaaatggaagtgatgccgacatggt

SEQ ID NO: 518218 - DNA, 120 bp, Artificial Sequence
  ENSG00000165061_3 (sequence is synthesized)
ggataagaacaagtgctgcacactctgcaacatgtcattcacttcagcggtggtggccgattcccattatcaaggcaaaatccacgccaagaggttaaaactcttgctaggagagaagac

SEQ ID NO: 518219 - DNA, 120 bp, Artificial Sequence
  ENSG00000165061_4 (sequence is synthesized)
cccattaaagaccacagcaacacccctgagcccacttaagcccccacggatggacactgctccggtggtcgcatctccctatcaaagaagagattcagacagatactgtgggctctgtgc

SEQ ID NO: 518220 - DNA, 120 bp, Artificial Sequence
  ENSG00000165061_5 (sequence is synthesized)
agcctggtttaataaccctctgatggcccagcaacattatgatggcaagaaacacaaaaagaatgcggcaagagttgctttgttagaacaactggggacaaccctggatatgggggaact

SEQ ID NO: 518221 - DNA, 120 bp, Artificial Sequence
  ENSG00000165061_6 (sequence is synthesized)
gagaggtctgaggcgcaattacagatgtaccatctgcagtgtctccctaaactcaatagaacagtatcatgcccatctgaaaggatctaaacaccagaccaacctgaagaataagtagtg

SEQ ID NO: 518222 - DNA, 120 bp, Artificial Sequence
  ENSG00000165061_7 (sequence is synthesized)
aaagcatcaatcaagacataagaacaaaacattagcatttctctgccgtggagaattgcttatcaaccaccagaggaggcttctttcttgaacaataaacatttcttataaggattcaca

SEQ ID NO: 518223 - DNA, 120 bp, Artificial Sequence
  ENSG00000165061_8 (sequence is synthesized)
gattcacatacgactgatcttgatttttggaaatgaatgaggtttcttttttctttttcctttttttaattttggggtaagttatgatatttggatggatttttaaattctttcctgata

SEQ ID NO: 518224 - DNA, 120 bp, Artificial Sequence
  ENSG00000165061_9 (sequence is synthesized)
acatatttagcacatgttctaaattataatcctatagcaaacagttggagcattattcaaactgaaagtggaaaaatttaaatttccaatttattctagatttcctcagagcataattat

SEQ ID NO: 518225 - DNA, 120 bp, Artificial Sequence
  ENSG00000165061_10 (sequence is synthesized)
tggacacagttgagggtgacatgcacagaactggaacagatcactattagtggaaaataccaaatggacaaataaataccagtcgttttctccgttctccaagcacaggagccaggttta

SEQ ID NO: 518226 - DNA, 120 bp, Artificial Sequence
  ENSG00000165061_11 (sequence is synthesized)
ccatctgaacaatgaagacgaagggagtaaataaaggaagaattctcatcttttttcctgatcattcaaagaacagtttctcaaggttaagccaagtcctccttgcaagttgccaaataa

SEQ ID NO: 518227 - DNA, 120 bp, Artificial Sequence
  ENSG00000165061_12 (sequence is synthesized)
tagcttaggaaaagaattagtctgcctgcatgatgatcttcttaggcaaaaacgtcttcacagcccttgaccttggtgaatttttttccccaaaagcatccaaaagaagaattataaacc

SEQ ID NO: 518228 - DNA, 120 bp, Artificial Sequence
  ENSG00000165061_13 (sequence is synthesized)
ccagaatgagatggaaataaacaagtatttttttttatgatgtttggcctgaactgtgggctttaattgggggatactgatcgtttggaaagaagtgagaaaattctgaagaaatggcgg

SEQ ID NO: 518229 - DNA, 120 bp, Artificial Sequence
  ENSG00000165061_14 (sequence is synthesized)
ccttgggctaggcggggtcccctatttcttctgtttctcactgaagtcctactgctgagccaagactcagtcactctggaaagagcatgaccgataaagaaaacagttcctttctgatgg

SEQ ID NO: 518230 - DNA, 120 bp, Artificial Sequence
  ENSG00000165061_15 (sequence is synthesized)
ggagcgtctgagtgcagatcatgaggctctttctctaggtttaattcttttccatggtgaccggacttggtgtcttgtagcctggttacgaagtgggacgttgagcttctactgacgatg

SEQ ID NO: 518231 - DNA, 120 bp, Artificial Sequence
  ENSG00000165061_16 (sequence is synthesized)
ccctgcatggaccagctgggatctggctggggctgccctgtgtccctaacgaccataggcaatccatcttcttgtgtcagcaatttctggacacccactgttttccaccaagagctgagg

SEQ ID NO: 518232 - DNA, 120 bp, Artificial Sequence
  ENSG00000165061_17 (sequence is synthesized)
tggcaacaactcagtgagcaataaacaaaatgacacagaaatgcacagtgttgttatgaaggagcctgtttacctgtgttcaaaatctggcaccattcccttgagcagggcccgctcagg

SEQ ID NO: 518233 - DNA, 120 bp, Artificial Sequence
  ENSG00000165061_18 (sequence is synthesized)
agggaccaggtctgccagtttctgtgcctgcagagagacgaagccccacgagccacaccctactctacaagaggaaagggggttggatgggaagaatctattttgctgttttggaaagca

SEQ ID NO: 518234 - DNA, 120 bp, Artificial Sequence
  ENSG00000165061_19 (sequence is synthesized)
cacagccgacctacaaacctcctgtgatggtgtttcttcggatgtgtaaaataaggctttatttgtcaattccgctgtaaaataagcattgtccgagtaaaaacagcagcaacaacaaaa

SEQ ID NO: 518235 - DNA, 120 bp, Artificial Sequence
  ENSG00000165061_20 (sequence is synthesized)
ggaacagtgatcgtggggagaccctgaaaaccaagtgctggcctgtcttgcagatcatgctcctccttcagacgcagttgccagaaccagagcctaatggtagacgtcattcaaagccta

SEQ ID NO: 518236 - DNA, 120 bp, Artificial Sequence
  ENSG00000165061_21 (sequence is synthesized)
aagggatgagtggctgacctcagcagacctggctgtcctaagacccctaaataccatttcaggtgctcattctatcaccctagttcctttcgatgaagtaatgcagcagcttgcatctgc

SEQ ID NO: 518237 - DNA, 120 bp, Artificial Sequence
  ENSG00000165061_22 (sequence is synthesized)
agtagatattttaggctttgcagactgcacagtgtttactgcagctactcagcattgctgctgcagcacggaagcagccatagaggacatataaatgaaggagcatggctgtattccaat

SEQ ID NO: 518238 - DNA, 120 bp, Artificial Sequence
  ENSG00000165061_23 (sequence is synthesized)
aaaactttatttacaaagccggaaacccacccataggccataggtttgctgaccttggatccagaacactggagaggaaccagcaatggggactgaagcaggagcagcctggagattggg

SEQ ID NO: 518239 - DNA, 120 bp, Artificial Sequence
  ENSG00000165061_24 (sequence is synthesized)
aaggaaaaagtgaggctcacccaaaagaaatggacaagaaaggaaatgagcagaaggcttgctttagtttaatttttataatctcctttgtttcaaagtgtttattttcatatttttatt

SEQ ID NO: 518240 - DNA, 120 bp, Artificial Sequence
  ENSG00000165061_25 (sequence is synthesized)
gactgcttttcagaccaaaggcacattcatgaaccagattgttttccttctgctttatctttaactgccttctttaccaaatgcttttgtagagtagcagtgtttaaaaaagaaaaaaaa

SEQ ID NO: 518241 - DNA, 120 bp, Artificial Sequence
  ENSG00000165061_26 (sequence is synthesized)
tggtgcagttcctctgggaatgagcaatgtaacttaaaactagctgtgtcaataagtcaagggtccagaattcttgaggaaggggaatttcattagacatactaagccaaaagaagatgt

SEQ ID NO: 518242 - DNA, 120 bp, Artificial Sequence
  ENSG00000165066_0 (sequence is synthesized)
taaaacttctcatggagggtcccccgactcagaggcagaaagggggtctgagctgaggcttagggggccaccctgtccggccagggcaaggagagaggccaggagccctggggaggcctc

SEQ ID NO: 518243 - DNA, 120 bp, Artificial Sequence
  ENSG00000165066_1 (sequence is synthesized)
ccacctgccccgagcacctgacttccgagcagctgatcgggtgccggttcctgggccagggcctggcccatgccttaggtgggaggcagtcaggagctcggagacggtcctaagcctcca

SEQ ID NO: 518244 - DNA, 120 bp, Artificial Sequence
  ENSG00000165066_2 (sequence is synthesized)
ggcctgccatgagatttggggctagagagtgggctcttgggttttaggggcctggagaagccttccctgtcctgactgggagatcatggagtccaacctgcaggggacgttcctgctgaa

SEQ ID NO: 518245 - DNA, 120 bp, Artificial Sequence
  ENSG00000165066_3 (sequence is synthesized)
caacacgccgctggctcagtttccggagatgaaggccccggtgtgccagtactctgtgcagaactccttctacaagctcagccccccagggctgggcccccagctggccgccggaacccc

SEQ ID NO: 518246 - DNA, 120 bp, Artificial Sequence
  ENSG00000165066_4 (sequence is synthesized)
ccacgggatcacggacatcctgagcaggcccgtggctgcgccgaacaacagcctcctctccggctacccccacgtggcaggctttggggggctcagctcgcagggggtctactacagccc

SEQ ID NO: 518247 - DNA, 120 bp, Artificial Sequence
  ENSG00000165066_5 (sequence is synthesized)
ccaggtagggaatttttccaaggctgggaacgagtacccgacccggacccggaactgctgggcggacacgggccaagactggcgaggcgggcggcagtgcagcaacaccccagaccccct

SEQ ID NO: 518248 - DNA, 120 bp, Artificial Sequence
  ENSG00000165066_6 (sequence is synthesized)
gagtgacagcatacacaagaagaagcacacccggcccaccttcacggggcaccagatctttgccctggagaaaacctttgagcagaccaagtacttggctggccccgagagggcacggct

SEQ ID NO: 518249 - DNA, 120 bp, Artificial Sequence
  ENSG00000165066_7 (sequence is synthesized)
ggcatactcactgggcatgaccgagtcgcaggtcaaggtgtggttccagaaccgcaggaccaagtggcggaagaagagcgccctggagccctcgtcctccacgccccgggccccgggcgg

SEQ ID NO: 518250 - DNA, 120 bp, Artificial Sequence
  ENSG00000165066_8 (sequence is synthesized)
cgcgggtgcaggcgcaggcggggaccgcgcaccctcggagaacgaggacgacgagtacaacaagccgctggaccccgactcggacgacgagaagatccgcctgctgctgcgcaagcaccg

SEQ ID NO: 518251 - DNA, 120 bp, Artificial Sequence
  ENSG00000165066_9 (sequence is synthesized)
cttccccacgctcctgggggcgcagggactgagtctttctttggatgaggggcgcgtggaggaggagcagcaggtgcaggggaggaggaggggaggcgggggaggaggaggaaaaggagg

SEQ ID NO: 518252 - DNA, 120 bp, Artificial Sequence
  ENSG00000165066_10 (sequence is synthesized)
gaaaggggacaggcatcctagctaagggaggaggaggccaggagggaggcacagcactcctgagacctggaagccgctgccccttgcacctcctcgggcctcgcctgccagttctgcaga

SEQ ID NO: 518253 - DNA, 120 bp, Artificial Sequence
  ENSG00000165066_11 (sequence is synthesized)
ttcacaagtggacagaggactaaaatgaccaggctctgcagccaagaaactggctgtggggtcccagacatgccactgtgatccagctgttggggcggggggagtgggcaggacttccca

SEQ ID NO: 518254 - DNA, 120 bp, Artificial Sequence
  ENSG00000165066_12 (sequence is synthesized)
gggagggaggcagctggctggggagtcagaagtccagagtcttgggccccaagccagctgctggctgcagaagaaaagacaggtgagtggccaggtgcactcctcagacctgtgcacagg

SEQ ID NO: 518255 - DNA, 120 bp, Artificial Sequence
  ENSG00000165066_13 (sequence is synthesized)
aagggtcccactggaggggccagagctgagcacctaacccaggctgcaggaaatctgcctccaggaggggaagtgggacatcccagtggagaaaaaatgcccctgacactgcaggatgac

SEQ ID NO: 518256 - DNA, 120 bp, Artificial Sequence
  ENSG00000165066_14 (sequence is synthesized)
ggcccctgagctgcggaaatccccctggcctcctttctccgatttaccctcagggtcaatacctctgagaccgctgtgccctcctcatcctgacagccggggaaaaggggagggtgcagg

SEQ ID NO: 518257 - DNA, 120 bp, Artificial Sequence
  ENSG00000165066_15 (sequence is synthesized)
gagaggggaggcggggacggtgtgcccaagggccacccacctgggcatcatttggtgctgatataaggacaggcccacccagagagaaaaagcatcccacctggggaggaaaggaagggc

SEQ ID NO: 518258 - DNA, 120 bp, Artificial Sequence
  ENSG00000165066_16 (sequence is synthesized)
tgggaaagaccccagaacggcacccctccaacaaggcaggaagggagaaggacagcccctccggctgggtggaggatgccaggaaggggctgaaccacggcctgctgggaatcacggccc

SEQ ID NO: 518259 - DNA, 120 bp, Artificial Sequence
  ENSG00000165066_17 (sequence is synthesized)
ttcctttcctcagatcgccttgcggcctggcactggagctggtgctgacagggacgctggccaacagggtggtatttttcacccgggtgatctgagctgctggcaggtagggggtgggct

SEQ ID NO: 518260 - DNA, 120 bp, Artificial Sequence
  ENSG00000165066_18 (sequence is synthesized)
gggggaggcgggtgagggctggtcttagataggaatgcagcccagaagggaccaagcacttgcccatcctcactggctttcaaaaaataaacagtaaaaataaaagtcccatgaacctta

SEQ ID NO: 518261 - DNA, 120 bp, Artificial Sequence
  ENSG00000165066_19 (sequence is synthesized)
aaggatgcagcaggggcagctggcacctgggtctaggctttgctcagggccctggggcctccccgagctccaacccgctgcgccctcctcatcagccgctcagctgccctggggcgagag

SEQ ID NO: 518262 - DNA, 120 bp, Artificial Sequence
  ENSG00000165071_0 (sequence is synthesized)
actcatttataccaggaaacagacaagagaacaagaggctgccgaagacaaaacttctctgcaagcacctgtgcacagcaatgtgcgtgggcatctgtgagaagaagagaatctgtgaag

SEQ ID NO: 518263 - DNA, 120 bp, Artificial Sequence
  ENSG00000165071_1 (sequence is synthesized)
tttgagcaagcggccttcccaagatgtaccgaatatctcaactgatgtcaacaccagtagcaagttcttccaggttggaaagagaatatgctggagagctgtctcccacgtgcattttcc

SEQ ID NO: 518264 - DNA, 120 bp, Artificial Sequence
  ENSG00000165071_2 (sequence is synthesized)
caagtttcacctgtgattccctggatggttaccattcttttgaatgcggctccatagatcccctgacaggctcccactatacctgtcgccgaagtcccagactcctcaccaatggctact

SEQ ID NO: 518265 - DNA, 120 bp, Artificial Sequence
  ENSG00000165071_3 (sequence is synthesized)
atatttggactgaagacagcttcctgtgcgacaaagatggcaacataactctgaacccatcccagaccagcgttatgtataaggagaacttagttaggatatttagaaagaaaaagagaa

SEQ ID NO: 518266 - DNA, 120 bp, Artificial Sequence
  ENSG00000165071_4 (sequence is synthesized)
tctgccattccttttcttctctcttcaacctcagtacctccaaatcttggctgcatggaagtatctttggtgacatcaactcttctccaagtgaagacaactggttgaaggggaccagga

SEQ ID NO: 518267 - DNA, 120 bp, Artificial Sequence
  ENSG00000165071_5 (sequence is synthesized)
ggttggacacagaccattgcaatggaaatgaaaccaggttgttgcaagaggtcttctttcaggcaatcctgcttgctgtgtgcttaatcatttctgcatgtgcaagatggtttatgggag

SEQ ID NO: 518268 - DNA, 120 bp, Artificial Sequence
  ENSG00000165071_6 (sequence is synthesized)
aaatattagccagtgtcttcacatgctcattgatgataactgtagcttatgtgaaatcattgtttctcagccttgccagctatttcaaaaccactgcctgtgctcggtttgtcaaaattt

SEQ ID NO: 518269 - DNA, 120 bp, Artificial Sequence
  ENSG00000165071_7 (sequence is synthesized)
acttgcagtctacttggaatcaagtgttttattggaagggagtaagcgagtaatggagaaaaagccattttagtttgactatgtgattttaaaatgatctcagtttttccatcaaaatta

SEQ ID NO: 518270 - DNA, 120 bp, Artificial Sequence
  ENSG00000165071_8 (sequence is synthesized)
taatatgctcatgaaaataatattaatttgccttccctttgcaaacaccggcagttgaaaggaaaaggacggggaatgtgatggaaaagagaccgcctggaataaatgtccccctatgat

SEQ ID NO: 518271 - DNA, 120 bp, Artificial Sequence
  ENSG00000165071_9 (sequence is synthesized)
tctttaaggcagtggttctcgagcttgaattttcattaggaaattctgtgaggagcttgtaaccagatttctgggtctgccacatgcacctatctcttgctgaattgctttaatagaata

SEQ ID NO: 518272 - DNA, 120 bp, Artificial Sequence
  ENSG00000165071_10 (sequence is synthesized)
atgagagcaagtttgtctaactaataccaacctgacaacttgaataacaataaatgcaatttgtacataaaatataatgctgcaaaagtttgtcattcacctcagtggagtgacttgata

SEQ ID NO: 518273 - DNA, 120 bp, Artificial Sequence
  ENSG00000165071_11 (sequence is synthesized)
ttaggtggtaaccgtagatgatggttaatatgaaaatggacaggaaagaagcattttctgaaagttatattcttttgaaccacgttctaaaccaagtttttaatcttcttggggctcgta

SEQ ID NO: 518274 - DNA, 120 bp, Artificial Sequence
  ENSG00000165071_12 (sequence is synthesized)
attacctttcactttaatgtcacttaaagatataacacagaaaaatgccttgagggcaaaatataggcaaaacaccaatgcgctttcaaatgcatgaaaatggtgcagttgtacccttga

SEQ ID NO: 518275 - DNA, 120 bp, Artificial Sequence
  ENSG00000165071_13 (sequence is synthesized)
gccttgactcaagggctgtagatgttccctttccaccccccacacttggtgcgtgttcacaaagcaaatatggcctgtaattcaaatttgttctatgtgatactctctgagtaaaaactc

SEQ ID NO: 518276 - DNA, 120 bp, Artificial Sequence
  ENSG00000165071_14 (sequence is synthesized)
atacatgcagaaaattgtctttgctcgaaatgataatgccaaaatataactttatatataatttgcatttagtacatttttggttaaaaaataaactaataaataagtgaagtcatcagc

SEQ ID NO: 518277 - DNA, 120 bp, Artificial Sequence
  ENSG00000165071_15 (sequence is synthesized)
atggaaatgcagatgatttagactgttcttctctgactgatgactgggagtcagggaagatgaatgcagagtctgtgatcacctcctcttccagccacatcatatctcagcctcctggag

SEQ ID NO: 518278 - DNA, 120 bp, Artificial Sequence
  ENSG00000165071_16 (sequence is synthesized)
caagcggccttcccaagatgtaccgaatatctcaactgatgtcaacaccagtagcaatagaagtgtcttaatatgcactaatgagggagagtctagaacaatgattgaattcctcagatt

SEQ ID NO: 518279 - DNA, 120 bp, Artificial Sequence
  ENSG00000165071_17 (sequence is synthesized)
actcatttataccaggaaacagacaagagaacaagaggctgccgaagacaaaacttctctgcaagcacctgtgcacagcaatgtgcgtgggcatctgtgagaagaaggaagcttcgtatt

SEQ ID NO: 518280 - DNA, 120 bp, Artificial Sequence
  ENSG00000165071_18 (sequence is synthesized)
agtgtgaatgccactgatgtgagcccaacaggaagtgtgacctcattctgcttctttgcctctggttacgcaggctgttttcaaaagaaaacaagagaagttgtaagactgactttccca

SEQ ID NO: 518281 - DNA, 120 bp, Artificial Sequence
  ENSG00000165071_19 (sequence is synthesized)
tcagtagcttgtgcttcttaaatgccagtgttcactttggcaatgattttaacttcatttttttccttgaaagaaatgtggtatttttccttctagtagaaaaaaaaaaatcaccgtttt

SEQ ID NO: 518282 - DNA, 120 bp, Artificial Sequence
  ENSG00000165071_20 (sequence is synthesized)
tttttagatgcctgtgcataaatgtgaaaggagattgtttatcagctactattaagatgcaaaactgtttgtatataaaaaatgctgaatgattttgatagctacttgcagaaaataaga

SEQ ID NO: 518283 - DNA, 120 bp, Artificial Sequence
  ENSG00000165071_21 (sequence is synthesized)
gcgctgttaaaacggtagtggtttcaagtttcttccttcctcttgttattttctcccaaaaccccacttctaactctccctcacacacccacagttttctccctacaaatcaaccagccc

SEQ ID NO: 518284 - DNA, 120 bp, Artificial Sequence
  ENSG00000165071_22 (sequence is synthesized)
gaagcttgcagcacctggtgagaactcaacgaaggtgtgggtccgccttctgatgacggaacctgttacagctgtctgtctgaagcgatgagatgaggcaacccttgctctgggaaggca

SEQ ID NO: 518285 - DNA, 120 bp, Artificial Sequence
  ENSG00000165071_23 (sequence is synthesized)
gagtcacctggcatcatcaaggcctttagcacctgctaccacttgtctgctacgaagtaccagaaaatgacaaaaacctcggacttgaagcaaataaactaagtaaaaactctgaacacc

SEQ ID NO: 518286 - DNA, 120 bp, Artificial Sequence
  ENSG00000165071_24 (sequence is synthesized)
gaggctgccgaagacaaaacttctctgcaagcacctgtgcacagcaatgtgcgtgggcatctgtgagaagaaggaatgtccaggctgataaaaactattaaaatcactctctgtgactac

SEQ ID NO: 518287 - DNA, 120 bp, Artificial Sequence
  ENSG00000165071_25 (sequence is synthesized)
taatttcatgacttgtggccgtctctgaagtgcttgctgcagtgtggagtgatcgtatggctttattgtcatagagaagaccaaataagagaaaaaacaacaatgccaaccacacgatgg

SEQ ID NO: 518288 - DNA, 120 bp, Artificial Sequence
  ENSG00000165072_0 (sequence is synthesized)
gacctctcctctcccagccagtcgtggctggcctttcaaagtgtgcagttgtctcctccctgtccagccccatcgtcgcccaggaccagctgggccgcggtctgacctgaggctgctgct

SEQ ID NO: 518289 - DNA, 120 bp, Artificial Sequence
  ENSG00000165072_1 (sequence is synthesized)
cagcgccggggcgctggcgctctccattcgagcaccttccagcataccgctcggctccgggagccgctctgcaaagttgggcagctcagagcgcaagctttgcctctcgacttctccctc

SEQ ID NO: 518290 - DNA, 120 bp, Artificial Sequence
  ENSG00000165072_2 (sequence is synthesized)
cttgggtccccggcgcccccgcctcccacgatccctttcactaggagcagccagtcccagcgggctggcaacttgcaccccttcctagtcatcctccctgaaacgcgaccatgctgttaa

SEQ ID NO: 518291 - DNA, 120 bp, Artificial Sequence
  ENSG00000165072_3 (sequence is synthesized)
ggggcgtcctcctggcgttgcaagccctgcagctcgccggtgccctcgacctgcccgctgggtcctgtgcctttgaagagagcacttgcggctttgactccgtgttggcctctctgccgt

SEQ ID NO: 518292 - DNA, 120 bp, Artificial Sequence
  ENSG00000165072_4 (sequence is synthesized)
ggattttaaatgaggaaggccattacatttatgtggatacctcctttggcaagcagggggagaaagctgtgctgctaagtcctgacttacaggctgaggaatggagctgcctccgtttgg

SEQ ID NO: 518293 - DNA, 120 bp, Artificial Sequence
  ENSG00000165072_5 (sequence is synthesized)
tctaccagataaccacatcttcggagtctctgtcagatcccagccagctgaacctctacatgagatttgaagatgaaagctttgatcgcttgctttggtcagctaaggaaccttcagaca

SEQ ID NO: 518294 - DNA, 120 bp, Artificial Sequence
  ENSG00000165072_6 (sequence is synthesized)
gctggctcatagccagcttggatttgcaaaacagttccaagaaattcaagattttaatagaaggtgtactaggacagggaaacacagccagcatcgcactatttgaaatcaagatgacaa

SEQ ID NO: 518295 - DNA, 120 bp, Artificial Sequence
  ENSG00000165072_7 (sequence is synthesized)
ccggctactgtattgaatgtgactttgaagaaaatcatctctgtggctttgtgaaccgctggaatcccaatgtgaactggtttgttggaggaggaagtattcggaatgtccactccattc

SEQ ID NO: 518296 - DNA, 120 bp, Artificial Sequence
  ENSG00000165072_8 (sequence is synthesized)
tcccacaggatcacaccttcaagagtgaactgggccactacatgtacgtggactcagtttatgtgaagcacttccaggaggtggcacagctcatctccccgttgaccacggcccccatgg

SEQ ID NO: 518297 - DNA, 120 bp, Artificial Sequence
  ENSG00000165072_9 (sequence is synthesized)
ctggctgcctgtcattttattaccagatccagcaggggaatgacaatgtcttttccctttacactcgggatgtggctggcctttacgaggaaatctggaaagcagacaggccagggaatg

SEQ ID NO: 518298 - DNA, 120 bp, Artificial Sequence
  ENSG00000165072_10 (sequence is synthesized)
ctgcctggaaccttgcggaggtcgagttcagtgctccttaccccatggaggttatttttgaagttgctttcaatggtcccaagggaggttatgttgccctggatgatatttcattctctc

SEQ ID NO: 518299 - DNA, 120 bp, Artificial Sequence
  ENSG00000165072_11 (sequence is synthesized)
ctgttcactgccagaatcagacagaacttctgttcagtgccgtggaagccagctgcaattttgagcaagatctctgcaacttttaccaagataaagaaggtccaggttggacccgagtga

SEQ ID NO: 518300 - DNA, 120 bp, Artificial Sequence
  ENSG00000165072_12 (sequence is synthesized)
aagtaaaaccaaacatgtatcgggctggagaccacactacaggcttagggtattacctgctagccaacacaaagttcacatctcagcctggctacattggaaggctctatgggccctccc

SEQ ID NO: 518301 - DNA, 120 bp, Artificial Sequence
  ENSG00000165072_13 (sequence is synthesized)
agaagatctggtctgtgttggagtccccaaggggtgtttggatgcaagctgaaatcacctttaagaagcccatgcctaccaaggtggttttcatgagcctatgcaaaagtttctgggact

SEQ ID NO: 518302 - DNA, 120 bp, Artificial Sequence
  ENSG00000165072_14 (sequence is synthesized)
gtgggcttgtagccctggatgacattacaatacaattgggaagctgctcatcttcagagaaacttccacctccacctggagagtgtactttcgagcaagatgaatgtacatttactcagg

SEQ ID NO: 518303 - DNA, 120 bp, Artificial Sequence
  ENSG00000165072_15 (sequence is synthesized)
agaaaagaaaccggagcagctggcacaggaggaggggagaaactcccacttcctacacaggaccaaagggagatcacactactggggtaggctactacatgtacattgaggcctcccata

SEQ ID NO: 518304 - DNA, 120 bp, Artificial Sequence
  ENSG00000165072_16 (sequence is synthesized)
tggtgtatggacaaaaagcacgcctcttgtccaggcctctgcgaggagtctctggaaaacactgcttgacctttttctaccacatgtatggagggggcactggcctgctgagtgtttatc

SEQ ID NO: 518305 - DNA, 120 bp, Artificial Sequence
  ENSG00000165072_17 (sequence is synthesized)
tgaaaaaggaagaagacagtgaagagtccctcttatggaggagaagaggtgaacagagcatttcctggctacgagcactgattgaatacagctgtgagaggcaacaccagataatttttg

SEQ ID NO: 518306 - DNA, 120 bp, Artificial Sequence
  ENSG00000165072_18 (sequence is synthesized)
aagccattcgaggagtatcaataagaagtgatattgccattgatgatgttaaatttcaggcaggaccctgtggagaaatggaagatacaactcaacaatcatcaggatattctgaggact

SEQ ID NO: 518307 - DNA, 120 bp, Artificial Sequence
  ENSG00000165072_19 (sequence is synthesized)
taaatgaaattgagtattaagaaatgatctgcattggatttactagacgaaaaccatacctctcttcaatcaaaatgaaaacaaagcaaatgaatactggacagtcttaacaattttata

SEQ ID NO: 518308 - DNA, 120 bp, Artificial Sequence
  ENSG00000165072_20 (sequence is synthesized)
agttataaaatgactttagagcaccctccttcattacttttgcaaaaacatactgactcagggctctttttttctttttgcatatgacaactgttactagaaatacaggctactggtttt

SEQ ID NO: 518309 - DNA, 120 bp, Artificial Sequence
  ENSG00000165072_21 (sequence is synthesized)
gcatagatcattcatcttaattttggtaccagttaaaaatacaaatgtactatattgtagtcattttaaagtacacaaagggcacaatcaaaatgagatgcactcatttaaatctgcatt

SEQ ID NO: 518310 - DNA, 120 bp, Artificial Sequence
  ENSG00000165072_22 (sequence is synthesized)
cagtgaatgtattgggagaaaaataggtcttgcaggtttccttttgaattttaagtatcataaatatttttaaagtaaataatacggggtgtcagtaatatctgcagaatgaatgcagtc

SEQ ID NO: 518311 - DNA, 120 bp, Artificial Sequence
  ENSG00000165072_23 (sequence is synthesized)
tttcatgctaatgagttagtctggaaaaataaagtcttattttctatgttttattcatagaaatggagtattaatttttaatattttcaccatatgtgataacaaaggatctttcatgaa

SEQ ID NO: 518312 - DNA, 120 bp, Artificial Sequence
  ENSG00000165072_24 (sequence is synthesized)
tgtccaagggtaagtcagtattaattaatgctgtattacaaggcaatgctaccttctttattccccctttgaactacctttgaagtcactatgagcacatggatagaaatttaacttttt

SEQ ID NO: 518313 - DNA, 120 bp, Artificial Sequence
  ENSG00000165072_25 (sequence is synthesized)
tttgtaaagcaagcttaaaatgtttatgtatacatacccagcaacttttataaatgtgttaaacaattttactgatttttataataaatattttggtaagattttgaataatatgaattc

SEQ ID NO: 518314 - DNA, 120 bp, Artificial Sequence
  ENSG00000165072_26 (sequence is synthesized)
aggcagatatactaaactgcttttatttacttgtttagaaaattgtatatatatgtttgtgtatcctaacagctgctatgaaattataaaattacctaataaaaataatttgaaaatctt

SEQ ID NO: 518315 - DNA, 120 bp, Artificial Sequence
  ENSG00000165072_27 (sequence is synthesized)
gcctgctgtgctaagtgaatcccaggttgttaggagtttccagttttcagttaacagaattcatagctttatttttatgaatttcaggtggttttcatgagcctatgcaaaagtttctgg

SEQ ID NO: 518316 - DNA, 120 bp, Artificial Sequence
  ENSG00000165072_28 (sequence is synthesized)
ggaaagcttctaaaatagcattctaggaatcgtttactgcattttgaaatgtgcaaaattatgtcttgtgtctataatgaaatgcacttgtgattctacacacacaggatgatttgatat

SEQ ID NO: 518317 - DNA, 120 bp, Artificial Sequence
  ENSG00000165076_0 (sequence is synthesized)
agaaactctgtggggaagataagtcctgagcctagagctgccatttccacagacaactgaactaccttcaaacagatgtgtttttaggggcagcagatagaaggagctgaatccaggagt

SEQ ID NO: 518318 - DNA, 120 bp, Artificial Sequence
  ENSG00000165076_1 (sequence is synthesized)
ttccttccctgaaatgccccaacagaggcacagtcctccaccttccctggaacagagggctttcatctgtctctctgaagccatctccctcccctgtttatgcccagagctgctttccaa

SEQ ID NO: 518319 - DNA, 120 bp, Artificial Sequence
  ENSG00000165076_2 (sequence is synthesized)
tcccatggagtgcctccgtatctaaccatagccactgagtctaccaggtgttcctgagaagacaactaagccaaccgctccacactctgctgattttcttctacatctcacagggggaag

SEQ ID NO: 518320 - DNA, 120 bp, Artificial Sequence
  ENSG00000165076_3 (sequence is synthesized)
agctggatcaccatgaaatatgtcttctatttgggtgtcctcgctgggacatttttctttgctgactcatctgttcagaaagaagaccctgctccctatttggtgtacctcaagtctcac

SEQ ID NO: 518321 - DNA, 120 bp, Artificial Sequence
  ENSG00000165076_4 (sequence is synthesized)
gagacggtactgaacagacaattaaccccattcagatcgtccgctactggaactacagtcatagcgccccacaggatgacctcatgctcatcaagctggctaagcctgccatgctcaatc

SEQ ID NO: 518322 - DNA, 120 bp, Artificial Sequence
  ENSG00000165076_5 (sequence is synthesized)
ccaaagtccagccccttaccctcgccaccaccaatgtcaggccaggcactgtctgtctactctcaggtttggactggagccaagaaaacagtggccgacaccctgacttgcggcagaacc

SEQ ID NO: 518323 - DNA, 120 bp, Artificial Sequence
  ENSG00000165076_6 (sequence is synthesized)
tggaggcccccgtgatgtctgatcgagaatgccaaaaaacagaacaaggaaaaagccacaggaattccttatgtgtgaaatttgtgaaagtattcagccgaatttttggggaggtggccg

SEQ ID NO: 518324 - DNA, 120 bp, Artificial Sequence
  ENSG00000165076_7 (sequence is synthesized)
ttgctactgtcatctgcaaagacaagctccagggaatcgaggtggggcacttcatgggaggggacgtcggcatctacaccaatgtttacaaatatgtatcctggattgagaacactgcta

SEQ ID NO: 518325 - DNA, 120 bp, Artificial Sequence
  ENSG00000165076_8 (sequence is synthesized)
aggacaagtgagaccctacttctccctctgcattccactggctctgccatggactatacaagcagataattttccctctattcaaaataaaatctccaaatgaaaatttgggaatgtagc

SEQ ID NO: 518326 - DNA, 120 bp, Artificial Sequence
  ENSG00000165076_9 (sequence is synthesized)
atcacttaaagatctagcaggtaactgatgatgcactcaaattgggtcaattgaggtgagttttaagaaggaaccaattgcaaaggtatggagacattaaagggacaatattaagaatag

SEQ ID NO: 518327 - DNA, 120 bp, Artificial Sequence
  ENSG00000165076_10 (sequence is synthesized)
ttccataccaccagggtttgtattaagaaaatgcagttaccacctctaggcctaaaaaggcaagaggagaagataatttcaaaggaggcaaggagagatagagaaaaagcgagacctgtg

SEQ ID NO: 518328 - DNA, 120 bp, Artificial Sequence
  ENSG00000165076_11 (sequence is synthesized)
tgaggagacagcctgataaggattgtaacccctagtcaaggagcacagccactctgtgacaaaactgcagggagggacctgggaggataagtactccaatctcactcttcttcctccagt

SEQ ID NO: 518329 - DNA, 120 bp, Artificial Sequence
  ENSG00000165076_12 (sequence is synthesized)
tactttctggtgcttcctattggccaatagaaggaagccagaggacaagagagcccactgattaaatccatatatgtccccttccaaaggtgcagagcagaatggaataggactgttagt

SEQ ID NO: 518330 - DNA, 120 bp, Artificial Sequence
  ENSG00000165076_13 (sequence is synthesized)
gcatcagctagggaaccaaacaggagacacccagaactaggttatttattctctggtctccaccaaaatggacattgttcagttagataggcgagaaaattacatttccttgacatgcat

SEQ ID NO: 518331 - DNA, 120 bp, Artificial Sequence
  ENSG00000165076_14 (sequence is synthesized)
ttaaaatgtagtgaagggctccactacttactatatcaccctgagtgaattactcctatgtgcccccattaattcatgtgctaaatggggataaaaatggaatccactgcatagacttgt

SEQ ID NO: 518332 - DNA, 120 bp, Artificial Sequence
  ENSG00000165076_15 (sequence is synthesized)
tgtgagttaaatgacataatccagaaaaagcacttggtacagttcctggcactttgtaacattcagtatcttagcaatgatgatgatgatgatgatgattacttccaacccctctccctc

SEQ ID NO: 518333 - DNA, 120 bp, Artificial Sequence
  ENSG00000165076_16 (sequence is synthesized)
gagccaagaaaacagtgggctttggcagctggagccaccaggccatctgactctgcacagaggcccagccattcctgattggcagagacacaattcacatgaacaaggccgacaccctga

SEQ ID NO: 518334 - DNA, 120 bp, Artificial Sequence
  ENSG00000165078_0 (sequence is synthesized)
gctgctgctgcttgtcccaagaccaagtcgtaatagcaacttcccttcctcagctgcctgaactttttttttcccttgtagctggagagaagtgtcacattttgctcactctcaaccttc

SEQ ID NO: 518335 - DNA, 120 bp, Artificial Sequence
  ENSG00000165078_1 (sequence is synthesized)
ctcgcccacccccttcccggagaacctgtgcggtgtgtagagggtgctgtgagccacctccagcctcgggtggctgcttaagtaactttcaactcctctcttcttaacactatgaagtgt

SEQ ID NO: 518336 - DNA, 120 bp, Artificial Sequence
  ENSG00000165078_2 (sequence is synthesized)
ctcgggaagcgcaggggccaggcagctgctttcctgcctctttgctggctctttttgaagattctgcaaccggggcacagccacctttataacaaccgctatgctggtgataaagtgata

SEQ ID NO: 518337 - DNA, 120 bp, Artificial Sequence
  ENSG00000165078_3 (sequence is synthesized)
agatttattcccaaaacagaagaggaagcatatgcactgaagaaaatatcctatcaacttaaggtggacctgtggcagcccagcagtatctcctatgtatcagagggaacagttactgat

SEQ ID NO: 518338 - DNA, 120 bp, Artificial Sequence
  ENSG00000165078_4 (sequence is synthesized)
gtccatatcccccaaaatggttcccgagccctgttagccttcttacaggaagccaacatccagtacaaggtcctcatagaagatcttcagaaaacactggagaagggaagcagcttgcac

SEQ ID NO: 518339 - DNA, 120 bp, Artificial Sequence
  ENSG00000165078_5 (sequence is synthesized)
acccagagaaaccgaagatccctctctggatataattatgaagtttatcactccttagaagaaattcaaaattggatgcatcatctgaataaaactcactcaggcctcattcacatgttc

SEQ ID NO: 518340 - DNA, 120 bp, Artificial Sequence
  ENSG00000165078_6 (sequence is synthesized)
tctattggaagatcatatgagggaagatctctttttattttaaagctgggcagacgatcacgactcaaaagagctgtttggatagactgtggtattcatgcaagagaatggattggtcct

SEQ ID NO: 518341 - DNA, 120 bp, Artificial Sequence
  ENSG00000165078_7 (sequence is synthesized)
gccttttgtcagtggtttgtaaaagaagctcttctaacatataagagtgacccagccatgagaaaaatgttgaatcatctatatttctatatcatgcctgtgtttaacgtcgatggatac

SEQ ID NO: 518342 - DNA, 120 bp, Artificial Sequence
  ENSG00000165078_8 (sequence is synthesized)
ggaaagtgaagtggtgtgatgaaggagcttctatgcacccttgtgatgacacatactgtggcccttttccagaatctgagccggaagtgaaggctgtagctaacttccttcgaaaacaca

SEQ ID NO: 518343 - DNA, 120 bp, Artificial Sequence
  ENSG00000165078_9 (sequence is synthesized)
gaaagcacattagggcttatctctcctttcatgcatatgctcagatgttactgtatccctattcttacaaatatgcaacaattcccaattttagatgtgtggaatctgcagcttataaag

SEQ ID NO: 518344 - DNA, 120 bp, Artificial Sequence
  ENSG00000165078_10 (sequence is synthesized)
ctgtgaatgcacttcagtcagtatacggggtacgatacagatatggaccagcctccacaacgttgtatgtgagctctggtagctcaatggattgggcctacaaaaatggaataccttatg

SEQ ID NO: 518345 - DNA, 120 bp, Artificial Sequence
  ENSG00000165078_11 (sequence is synthesized)
catttgctttcgaactacgtgacactggatattttggatttttactcccagagatgctcatcaaacccacctgtacagaaactatgctggctgtgaaaaatatcacaatgcacctgctaa

SEQ ID NO: 518346 - DNA, 120 bp, Artificial Sequence
  ENSG00000165078_12 (sequence is synthesized)
agaaatgtccctgagacagcccaaggctcaggtcaactgccataggattctgagcaaggcctacttggccctggatagaaattgttttcaaagagaagggcagctgcttagagtgaacat

SEQ ID NO: 518347 - DNA, 120 bp, Artificial Sequence
  ENSG00000165078_13 (sequence is synthesized)
gtctatggactttaaaaagaccccacgcaatttgactttgtggcaatagaaaacagtaaaaaacagggcatagcctagtttgttataagaaaaagcatccattttctatccttttagagt

SEQ ID NO: 518348 - DNA, 120 bp, Artificial Sequence
  ENSG00000165078_14 (sequence is synthesized)
cttatttgattatggtgggagggaatgttttcaaatttcccatttctcaagaaatgttcatattaattgaggatttcccttcaataaatctcatgtcctcaattaggatctaggctagta

SEQ ID NO: 518349 - DNA, 120 bp, Artificial Sequence
  ENSG00000165078_15 (sequence is synthesized)
tctaggctagtaatgatgtttaattacttggttctcattggaaatggaaaattatgaaatggaaaaaaacaactatgcttcttaatgtaataaacataggccgggcgcggtggctcacac

SEQ ID NO: 518350 - DNA, 120 bp, Artificial Sequence
  ENSG00000165078_16 (sequence is synthesized)
ttgggaccaactgggatccagatccaaaggtttctgcaggttttactctgcaaaatatgagtccagaggactctcatgggagactcatgtttttctgtatgtgaaaacctggtagagaaa

SEQ ID NO: 518351 - DNA, 120 bp, Artificial Sequence
  ENSG00000165078_17 (sequence is synthesized)
ggtacagatacgtacatgatagctgtaattggcaaaagaaaatgaaaggattcttttttaatatataaaaatcaaggattttaaatatgtcaattcggtcctgaaaactgaaaatttaaa

SEQ ID NO: 518352 - DNA, 120 bp, Artificial Sequence
  ENSG00000165078_18 (sequence is synthesized)
tacatatgtaaaagcagcaaactgaggaatatttgtcattccccaaattaaaacatgaaccgtggtgtagtataattctggttaaatctttttatccttttcatacaagcaccactgatg

SEQ ID NO: 518353 - DNA, 120 bp, Artificial Sequence
  ENSG00000165078_19 (sequence is synthesized)
ctgcattcggctgtctgtcgtggtcagagctgtcatgaccttgtctatattctaccactctgctggtcatacgtggattgaccatgcacattgggaatgtatttctgctgcattccatgt

SEQ ID NO: 518354 - DNA, 120 bp, Artificial Sequence
  ENSG00000165078_20 (sequence is synthesized)
accaccactggaatggaagctctctacaaggcaaaaacctttggttcatgatgtatcccagtgcgtgaggcatggtgtgtgcatagtaaagacgtgttgaatacatgaaagtatctacat

SEQ ID NO: 518355 - DNA, 120 bp, Artificial Sequence
  ENSG00000165078_21 (sequence is synthesized)
gtaagtaatagttgaggctgccatgttcaatgaagagagtgaccactgaagaacatggctaagagcagaacaattggattcgccttcatttaagggactaatagaagaagaaaaccccat

SEQ ID NO: 518356 - DNA, 120 bp, Artificial Sequence
  ENSG00000165078_22 (sequence is synthesized)
aaagggggttgagaaggaaagaacagagagactggaagaaaagtttgagggaacagtgtgttaaaagccaagggaggagaatatttcaactaggaggtcaagtcctatgaaaagccagat

SEQ ID NO: 518357 - DNA, 120 bp, Artificial Sequence
  ENSG00000165084_0 (sequence is synthesized)
actgcgccgggcgctgcggagagcggcgagggtgggcgcgaggcggagaacgcgatgaatgagttctcccctcgcctcggagttgtctgagttggcggcgctgcgcccaggcttccggct

SEQ ID NO: 518358 - DNA, 120 bp, Artificial Sequence
  ENSG00000165084_1 (sequence is synthesized)
cgcgtggctccccgggctgccacccacgcccgcggccggggccgagccagccacgcagggcagccgaggctccggagctcctgtcccggccccagtccgggtaaaaggagggttgtcccc

SEQ ID NO: 518359 - DNA, 120 bp, Artificial Sequence
  ENSG00000165084_2 (sequence is synthesized)
aaggagggttgtccccagcggaggcgcacagccgcgcgttctccctgcactctcttcgcggtcccatctgttccccatggcgtctcatccgcaaacccggatccaggcttacctggagaa

SEQ ID NO: 518360 - DNA, 120 bp, Artificial Sequence
  ENSG00000165084_3 (sequence is synthesized)
gaacaagatcggtcccctgtttgaggaattaatgaccaagttaataactgagacacctgaccagccaatcccatttctcattgaccatcttcagtctaaacaagggaaccgtggacaact

SEQ ID NO: 518361 - DNA, 120 bp, Artificial Sequence
  ENSG00000165084_4 (sequence is synthesized)
tcaaagaactttgtctggatctgcagctctatgggcagaaagtgaaaaatcagaatccaaaggaacaagaagggatttcagaagctatgataaaccttggcaattaaatgcaaagaagcc

SEQ ID NO: 518362 - DNA, 120 bp, Artificial Sequence
  ENSG00000165084_5 (sequence is synthesized)
taaaaaatcaaaaagtgaccttgctgtgtctaatatttctccaccatcaccggactccaaatcattgccaaggtcagtagagcatccaaagtggaactggaggactaaaccacaaagccg

SEQ ID NO: 518363 - DNA, 120 bp, Artificial Sequence
  ENSG00000165084_6 (sequence is synthesized)
tgattttgatgaattgaatcacatccttcaggagagcaagaagctggggaaagcccttgagaatctctctcgaagtattgcaatttcagatgaactcgataaggaaacagtgacatttaa

SEQ ID NO: 518364 - DNA, 120 bp, Artificial Sequence
  ENSG00000165084_7 (sequence is synthesized)
ttcttctcttctgaggccccgtgtgattggagaatggattggtagagaagaaaatgatgctgatcccctagctgctgaaatgctacagcctccaattccaagaagcaaaaatgaccaatg

SEQ ID NO: 518365 - DNA, 120 bp, Artificial Sequence
  ENSG00000165084_8 (sequence is synthesized)
ggaaagtgaagatagtggctctagtcctgcaggaagcttaaagatggagcctaagaacaaaggattaaaacagcagcaacagcaacataagaaactcctggccgcaatgctctctcaaga

SEQ ID NO: 518366 - DNA, 120 bp, Artificial Sequence
  ENSG00000165084_9 (sequence is synthesized)
ttcttttgagtccatccacagccctaccccatctgtaacagaagaagatattgataatgaagatgatgcaatggaattgctggaggatcttaatgatttaagaatggagggagtaacaac

SEQ ID NO: 518367 - DNA, 120 bp, Artificial Sequence
  ENSG00000165084_10 (sequence is synthesized)
gagcctcaggccaaggtcacactgaacatctgttcaaggtgtgccaggcttcaaggagacaacctggaagaaaggacagaagagtcactaccaatactccattctccagatgaaaaaatc

SEQ ID NO: 518368 - DNA, 120 bp, Artificial Sequence
  ENSG00000165084_11 (sequence is synthesized)
ccagattcattcgattccttgcctgggactgaagaagcactaatggaggagggtgacgaatttgagaaagcatctaaactaacaggacctggagaagcctccagtggagtaggacactca

SEQ ID NO: 518369 - DNA, 120 bp, Artificial Sequence
  ENSG00000165084_12 (sequence is synthesized)
ctgaaaaactacatggaagaagatgaatccttaaagcaattgcaggtagttcatcaaccatggatcttgccaagtgacacagaaagtgaaggagtggaagcagaacaagagaaacgttcc

SEQ ID NO: 518370 - DNA, 120 bp, Artificial Sequence
  ENSG00000165084_13 (sequence is synthesized)
gctgatcttcttctttgcgttccatgctcttcttgtcctacgctggtctactctggtttgtgaaacagagagaagaagttgcaagtggtccttaaagaaatgcagttattcaaatcctta

SEQ ID NO: 518371 - DNA, 120 bp, Artificial Sequence
  ENSG00000165084_14 (sequence is synthesized)
tgtatagttctaattttatttactatgtgtaatcatttagagaatggttatttttataatctcaataataaacaagtactatcgtagccagggggtgcccaagtatgtaatcagagaaca

SEQ ID NO: 518372 - DNA, 120 bp, Artificial Sequence
  ENSG00000165084_15 (sequence is synthesized)
ctaatcctggcaaaggattgtggggtggtcaggaggccggctgccttttgacatggttagagtcctgggtttagattactttataaatagttattaagattaatatttgatatattaaat

SEQ ID NO: 518373 - DNA, 120 bp, Artificial Sequence
  ENSG00000165084_16 (sequence is synthesized)
attgcctgattcaaataactttgcttaaaatttttctgtattttaacttgtctagggttttctacttcttctatttttataatattttctcattttttagattactaaacattctactta

SEQ ID NO: 518374 - DNA, 120 bp, Artificial Sequence
  ENSG00000165084_17 (sequence is synthesized)
tccacatgtgccaagatgtgccatttaggtctctgcagaaattagctgtttggtatcatcacctgccatacatgttgtgtgcagcagtgagaagtatattctctaccactgctctttctc

SEQ ID NO: 518375 - DNA, 120 bp, Artificial Sequence
  ENSG00000165084_18 (sequence is synthesized)
atgattattttctctattcctattaaaatgaataattgatatgttaattaagtaaagcaaatcaataaggaatgaaatgcatggcccaaaacatagaaaatgaaaatcgtttgaccattt

SEQ ID NO: 518376 - DNA, 120 bp, Artificial Sequence
  ENSG00000165084_19 (sequence is synthesized)
atccaattattgaacccaattaagatgatccattttaaatttaatatatgctcgcttttggaatgtgttatgcattgatgttaagtgaatggatctaagtaaatctattgatatctctac

SEQ ID NO: 518377 - DNA, 120 bp, Artificial Sequence
  ENSG00000165084_20 (sequence is synthesized)
aagaaaatgaaacagaattgaaaatggtcttgtaaaattccacttggggtggcgatgctttgtggcttgaagtgtaagggatgagaacagcatgtgaattccaagaaagcaacacagaat

SEQ ID NO: 518378 - DNA, 120 bp, Artificial Sequence
  ENSG00000165084_21 (sequence is synthesized)
ggaaaatggatttacaatgtgtcagacagggaggcaacatcctgtggcatgtggcttgcatctcagcggtgggaaagaggatcttaatgatttaagaatggagggagtaacaaccctggt

SEQ ID NO: 518379 - DNA, 120 bp, Artificial Sequence
  ENSG00000165084_22 (sequence is synthesized)
ataagtttgaatataaaatgtgagtctggagaaaaaggaaggctaaaatttgaagaaatatacatggagaagacatgcaagacagtgtattagtcggttttcacactgctataaagaact

SEQ ID NO: 518380 - DNA, 76 bp, Artificial Sequence
  ENSG00000165084_23 (sequence is synthesized)
actcacagttcccaaaaggagaagcaagcactttcttctaaggagagagagagagcagtgaaagccacacattttt

SEQ ID NO: 518381 - DNA, 120 bp, Artificial Sequence
  ENSG00000165084_24 (sequence is synthesized)
tctaaggagagagagagagcagtgaaagccacacatttttaaaccatcagctctcgtgagaactcattatcaagagaacaacaagggggatatctgcccccatgatccaactacctccca

SEQ ID NO: 518382 - DNA, 120 bp, Artificial Sequence
  ENSG00000165084_25 (sequence is synthesized)
tttgacatgagatttgggtggggacactgagccaaataatatcagacaggtcctccagactgtgggttcaatgcttacaaaatcaaaacacaaaacatttagaatcaatttagccagtac

SEQ ID NO: 518383 - DNA, 120 bp, Artificial Sequence
  ENSG00000165084_26 (sequence is synthesized)
cacaaaacatttagaatcaatttagccagtaccctctaattacattttagatttttaaaaacacaaataaataagctaaaaacacacaagcaaacaaacaaccaaaccaaaccaaaccaa

SEQ ID NO: 518384 - DNA, 120 bp, Artificial Sequence
  ENSG00000165084_27 (sequence is synthesized)
caaaacaacacaaatgtcccaaataaagaaataatagccaaagtcacagatgaaagctaatgctgtcataaaacattaagacttccccacttgggtttgggtcctagttcttcctgaggt

SEQ ID NO: 518385 - DNA, 120 bp, Artificial Sequence
  ENSG00000165084_28 (sequence is synthesized)
cttaatgtctgtaacaataggtaatttggccctgggtctccttaaggcagggagattgagatgatgacacggtatagagcctgtcacctgcaaggactgactcaggtataaaaagggaaa

SEQ ID NO: 518386 - DNA, 120 bp, Artificial Sequence
  ENSG00000165084_29 (sequence is synthesized)
taaaatacctgtactctctaactgtggaacaagccatgaaatttgctattggtattagactttgaacgaaaaatgtaaagatacacatagggaatcaaactctcagctctgtactttggt

SEQ ID NO: 518387 - DNA, 120 bp, Artificial Sequence
  ENSG00000165084_30 (sequence is synthesized)
tattcggttcaaacttaaactatctgtattgtcagaaaccccacattataataacaattggccagcttcattaaaattcacagggtcctctcatgtgtaaatgtaagaactggggcattt

SEQ ID NO: 518388 - DNA, 120 bp, Artificial Sequence
  ENSG00000165084_31 (sequence is synthesized)
agaactcccaaagatttaaatatcaactcctgctgaagacgagctctcaatcaaattacaagctgcctgaaaagttatagtaaaacaacagagtcagcaaatgctaaaaacactagaatt

SEQ ID NO: 518389 - DNA, 120 bp, Artificial Sequence
  ENSG00000165084_32 (sequence is synthesized)
agaatgatgagaaaggaaagaaataagacaatcagaaagagaccatattaaaagtatgcttaagatatttaaagatatagatcaggcgcaatggctcacgtctgtaatcccagcactttc

SEQ ID NO: 518390 - DNA, 120 bp, Artificial Sequence
  ENSG00000165084_33 (sequence is synthesized)
gcccaggtaaagccatgttttcctacacttaaaaatgtaaataaatatcccttagataatctggacagcagtttcttatatagcatgtctgagcactatattttgctgggctataaaagg

SEQ ID NO: 518391 - DNA, 120 bp, Artificial Sequence
  ENSG00000165084_34 (sequence is synthesized)
tttaattgttgtttattggtacaataagggattctagttactaatatctacctgtagtcaataaagcaaacattgattggttgatcgaatcattgattcattcaataggtattgattcag

SEQ ID NO: 518392 - DNA, 120 bp, Artificial Sequence
  ENSG00000165084_35 (sequence is synthesized)
caccagctatgagctaggcagagttctaggccctacagagaaaactgatatcaaactaagaaagtctttttccaagtgctacagtaggggtgggggaggagagagataacaaactggtga

SEQ ID NO: 518393 - DNA, 120 bp, Artificial Sequence
  ENSG00000165084_36 (sequence is synthesized)
gcaaatgttaaacaaaatgattctagagagtgctaaatactgtgaggaagataaaatgataaaataataaagacttctgaagattggttagggtaacctcttgtagaagtatcattggag

SEQ ID NO: 518394 - DNA, 120 bp, Artificial Sequence
  ENSG00000165084_37 (sequence is synthesized)
accgaaggatgacacaccagccatctgaccatgagagaacatcattcaaggcaaaggaaacagaccaccaccaacaaaaaaagatgcactggggaatttccagtaacacttttgttagct

SEQ ID NO: 518395 - DNA, 120 bp, Artificial Sequence
  ENSG00000165084_38 (sequence is synthesized)
ctcttaatatctgattttttgagcactagaacactgcctctcacagaatcctagcttaaaacagcaatgaacagactagaattctaggctaaaaccaacaagatgaaatgtgactgatat

SEQ ID NO: 518396 - DNA, 120 bp, Artificial Sequence
  ENSG00000165084_39 (sequence is synthesized)
gaatataaatggtgcacataagttcacaaacccaattacacagcacaaaatgatatccacgtggcttgacagctgttcatattagaaaaatctagggattctaatggactacatattgga

SEQ ID NO: 518397 - DNA, 120 bp, Artificial Sequence
  ENSG00000165084_40 (sequence is synthesized)
gattgctctttgctgttcctgactggaaaaaaaaatatgtagatattacccttgggcagatttcagcccaacttaaagtatcattagagctgtccaaaatggaacagcctgctttgcaca

SEQ ID NO: 518398 - DNA, 120 bp, Artificial Sequence
  ENSG00000165084_41 (sequence is synthesized)
tagagaactcacattgctcaactcaaaaaagagcagaaggaaggaagaaggaaggacacgtaacagggatttttacaaaaacagaattcggtatttcttggagactactttaagacagtt

SEQ ID NO: 518399 - DNA, 120 bp, Artificial Sequence
  ENSG00000165084_42 (sequence is synthesized)
tttggtttctgtaagtctgtgacttattacttgttcctttaattccaataaaattttcttcatttttgttatttttaaaacattaagaagaaaaaaatgatattgatataaggtagatgg

SEQ ID NO: 518400 - DNA, 120 bp, Artificial Sequence
  ENSG00000165084_43 (sequence is synthesized)
tgaagtttagcaaaagtttagtttataatgatatctctcaaaatagcaaactgaagtttaaaattcttaagctataattttaaaggaatttagattaaacttttaatatgttgttggcta

SEQ ID NO: 518401 - DNA, 120 bp, Artificial Sequence
  ENSG00000165084_44 (sequence is synthesized)
agtataatacaaaataaaaactaaataaatcttggttttgccacatattagctgtgtaatatagacaatttacttctctgttattgtttcctcagaatgagggcagtaacttgtagccgt

SEQ ID NO: 518402 - DNA, 120 bp, Artificial Sequence
  ENSG00000165084_45 (sequence is synthesized)
ctgaaaagattgttataagcatggagttagttgctgtatataaagcagttagaccagtacctgacaatattacatgctaagtaagtgcttgctattactgttgctgttattattaattat

SEQ ID NO: 518403 - DNA, 120 bp, Artificial Sequence
  ENSG00000165084_46 (sequence is synthesized)
agagattttaaaagttttgaatagccttgtcttagggaaaagaaaccatttagtacatattttatttacattagactcacataaagttgcatgtaagaactaaattgaaataccctaagc

SEQ ID NO: 518404 - DNA, 120 bp, Artificial Sequence
  ENSG00000165084_47 (sequence is synthesized)
atatgaatatttattagactgtattttgtgctttgtgtatgctgcactttaccttctgactacgtaatgaagcgttattctgtgtgcaactgtgatcaaaattcaagtctgtctgcttta

SEQ ID NO: 518405 - DNA, 120 bp, Artificial Sequence
  ENSG00000165084_48 (sequence is synthesized)
ttctctgataataattgccttgtttacatctattgtctataaaatatacccaaagtacatatttcagccctcactccaaaatgtctaccttttattttgaggatgctttagaaaaataga

SEQ ID NO: 518406 - DNA, 120 bp, Artificial Sequence
  ENSG00000165084_49 (sequence is synthesized)
ataaagttgaaaggggcagatagtaaattcaggttttatgttttccgtaaatgacgggaaagtttgcagagatttcaaagtttcttcaggcctgttactttcatgaaaccttattaatct

SEQ ID NO: 518407 - DNA, 120 bp, Artificial Sequence
  ENSG00000165084_50 (sequence is synthesized)
tgtatatgtaggatatctttttatattttttaatgtagtatatgtatgtttttgcttcatcagaaatctcttcatataaatttttaaactgaacttctctttggaacatcatttttctga

SEQ ID NO: 518408 - DNA, 120 bp, Artificial Sequence
  ENSG00000165084_51 (sequence is synthesized)
agaaagaaaatgaaatgttatttcagagtgatccacatataaaacaatgagttttgaagtcagtggtatcaattattctgctacaaataaagagtatgattttcaaatactttataacaa

SEQ ID NO: 518409 - DNA, 120 bp, Artificial Sequence
  ENSG00000165084_52 (sequence is synthesized)
aaaaatataggccattttctgaagtttttgttaaaaatgagattccttggttttaagtgtttatggcagtaaaatactatcattataaaaaatgatatattgcttatcatttttgcatag

SEQ ID NO: 518410 - DNA, 120 bp, Artificial Sequence
  ENSG00000165084_53 (sequence is synthesized)
gcctacaaaggtgttatttggtcaatggtgacaggtttgaaagatgttttctgatgctgtaaaaactgcattcatgctaacattaaggagattgtatcatggcgttttcattacatgctg

SEQ ID NO: 518411 - DNA, 120 bp, Artificial Sequence
  ENSG00000165084_54 (sequence is synthesized)
ttggtcccttccaattgggtcttttcctcacctccaaatcattaacatggcagacgtgccctatgtggcagtggtagcttcattcaacaaacatttactgagcacttactctatgctaag

SEQ ID NO: 518412 - DNA, 120 bp, Artificial Sequence
  ENSG00000165084_55 (sequence is synthesized)
cacttggctggggtctgggaacataaaaataaaatcattgtgatctgtgtttgaaggaattttacattgtaatgttcaagatacaatacgtcactacctgtgctaactgcgctaattgga

SEQ ID NO: 518413 - DNA, 120 bp, Artificial Sequence
  ENSG00000165084_56 (sequence is synthesized)
tgaagcacacagttgtgtataggggtaacacctaaagcagaggtaagggacagtgacccaggaatgtttcctagagaagccgattactctggctagtcctgaaaagcaaatagatgtaag

SEQ ID NO: 518414 - DNA, 120 bp, Artificial Sequence
  ENSG00000165084_57 (sequence is synthesized)
ctcagcaggtggggtgtggtcattgtaggtttgctcacgtaggtatgggctgttttgcgattgtgctccataactatacctgtaaatggttcctctgctttggacagtaacagggaaggg

SEQ ID NO: 518415 - DNA, 120 bp, Artificial Sequence
  ENSG00000165084_58 (sequence is synthesized)
gcaactgagatccagggtttctttcaggagatgcagttgtccactccatgctggtactccctagatctcagctgccctgactgaaggttctagtctcccaagctgaagaccgaggattga

SEQ ID NO: 518416 - DNA, 120 bp, Artificial Sequence
  ENSG00000165084_59 (sequence is synthesized)
gtcttggagactatctaatgatgagcaattaataactagtcctcattaattctttttttagacattttagcctgtggtctgagcaagtttaataataagagatagttgaaggtttggact

SEQ ID NO: 518417 - DNA, 120 bp, Artificial Sequence
  ENSG00000165084_60 (sequence is synthesized)
ttcttcatgtaattccacatatctcagcacaggtggcaagcagtgtaataatgttggtctctaggtcatgagattatcctcttatagcttggaatgttacaagtccactggactttatct

SEQ ID NO: 518418 - DNA, 120 bp, Artificial Sequence
  ENSG00000165084_61 (sequence is synthesized)
taaaataatgccatattcaatttcttgtttttgaaatggattccagcaaaatgtatgtgattgtgtctatttcagaaaaatataaatgctaagttcttggaaatttatgtgaaatctaat

SEQ ID NO: 518419 - DNA, 120 bp, Artificial Sequence
  ENSG00000165084_62 (sequence is synthesized)
tttatagagtttatatagaatcattgtaagatgcaatagagacatctggtatttaaaatctttttgaatctacattttgtagatgtgtgtgctatagcttatgtgtttgtaaatgtttaa

SEQ ID NO: 518420 - DNA, 120 bp, Artificial Sequence
  ENSG00000165084_63 (sequence is synthesized)
cttgtctttgttatctataccaagatataactggctgaaaaatatttattatgcatggaaagcactctgtaaaccttgtgaagtgataaataagtgaaaggtataattgttagttgacat

SEQ ID NO: 518421 - DNA, 120 bp, Artificial Sequence
  ENSG00000165084_64 (sequence is synthesized)
taatataaaaaaggattattcttcaataaaattggttgatttgaagggaaaaaatccttttagttgaactagtagaagttagtaataactattgactcttgttttgtttattaaggaaac

SEQ ID NO: 518422 - DNA, 120 bp, Artificial Sequence
  ENSG00000165084_65 (sequence is synthesized)
tgactcttgttttgtttattaaggaaactagcattgttaatatatactgattaatatttaattattcacagttgtttaattatatatttgtggatttcttttctaaatgttttaggcata

SEQ ID NO: 518423 - DNA, 120 bp, Artificial Sequence
  ENSG00000165084_66 (sequence is synthesized)
tttttaagtagatcaaatattttctgtaagattgctttaaatgctccttataaattcacattgcaaaagtaacttaatatggaattaacacttgtcagataataaaacagccaaacttgt

SEQ ID NO: 518424 - DNA, 120 bp, Artificial Sequence
  ENSG00000165084_67 (sequence is synthesized)
gtctaatatttctccaccatcaccggactccaaatcatgtaaggaagtctcttattcaaatgctattcaaagcatgtaagtttatgttgttaagaaaatgaagaaaaggtattaattgaa

SEQ ID NO: 518425 - DNA, 120 bp, Artificial Sequence
  ENSG00000165084_68 (sequence is synthesized)
gcccaacttttcatctgatatttctggcctttaatcttagtgaatttcacttttactccgcatttacattgatcttcattcatacgtatgtatttgcttgcttatattctcaaacatgtg

SEQ ID NO: 518426 - DNA, 120 bp, Artificial Sequence
  ENSG00000165084_69 (sequence is synthesized)
taattcacttggacccttttgagtataatattccttgaagaatataaactgcatggagcgggtctcttgtttctcatagccaattgtagcattacatcatattgaaagcagtagctacct

SEQ ID NO: 518427 - DNA, 120 bp, Artificial Sequence
  ENSG00000165084_70 (sequence is synthesized)
atatttaatgaagtatgtaaaagcaaattaaatctcttagaatagaagcaaagaagatttctattcaaaacatttcataaaatttcttaaaaaatatttcatctgggattttcctgaagt

SEQ ID NO: 518428 - DNA, 120 bp, Artificial Sequence
  ENSG00000165084_71 (sequence is synthesized)
cctactcattaatttgtgatggaagtccctatattctcttcactactactgtaatatctttgtttttatgttactacaaaggaatgactgaggttgggtattttataaagaaaaaaggtt

SEQ ID NO: 518429 - DNA, 120 bp, Artificial Sequence
  ENSG00000165084_72 (sequence is synthesized)
caagaagcatgacactagcatctgcttcttgtgagagccgcaggaagcttccactcatggcagaaggtgaaggggtgcacgcatcatatggcgagaggaaggagaaagagatagcagagg

SEQ ID NO: 518430 - DNA, 120 bp, Artificial Sequence
  ENSG00000165084_73 (sequence is synthesized)
gaggtgccaggctctttttaacagtcagatcttgtaagaaccaacagagtgagaagtcactccttaccatgaggacagcaccaagccactcatgagggattgacccccataacccaaata

SEQ ID NO: 518431 - DNA, 120 bp, Artificial Sequence
  ENSG00000165084_74 (sequence is synthesized)
ccttccaccaggccccacctccgatattggtgatcaaatttaccatgtgatttggagaggacaaatatccaagctataccacctaagtatcccttctctctcaatggcctactgctttgg

SEQ ID NO: 518432 - DNA, 120 bp, Artificial Sequence
  ENSG00000165084_75 (sequence is synthesized)
tagctactgggattctccagtgctctgctatccccacatatgtataaacatgtcaaaaatctcaggagcctctagcaaatcacagctattcttggaagaaaagagaacttgcaagctgtt

SEQ ID NO: 518433 - DNA, 120 bp, Artificial Sequence
  ENSG00000165084_76 (sequence is synthesized)
cttcttatacatcaattccttgtgcttgttacagggtgagatgtttgattttagtttcaacagagaaaggagtaggcagaaaatatttatctttgtttgaaaatgtttgaaaaaccacta

SEQ ID NO: 518434 - DNA, 120 bp, Artificial Sequence
  ENSG00000165084_77 (sequence is synthesized)
tgtgctaactggaatctgcatctgggtcatttgtgaaagcaactaaatttaactttgtgagcagcttcatttacatagtggtactcataaaaagtattgcattaaccacaccaagttctt

SEQ ID NO: 518435 - DNA, 120 bp, Artificial Sequence
  ENSG00000165084_78 (sequence is synthesized)
gtgagaattatatgaagtgttaacaacttaaaatgttcttcagaaattgtgattgtaaccaaattgtcctgcttcatcagtttggtatatagaattaggtcccaacattttaaaaaatat

SEQ ID NO: 518436 - DNA, 120 bp, Artificial Sequence
  ENSG00000165084_79 (sequence is synthesized)
acaagtttaaaatttgcatgtcttttttacaacagtatagccagtaatatccagcacagtgcctgtttcaattaataaatgctaaatgataaaaatgaataaaggaagaaataaaaaatg

SEQ ID NO: 518437 - DNA, 120 bp, Artificial Sequence
  ENSG00000165084_80 (sequence is synthesized)
agtgacacagaaagtgaaggagtggaagcagaacaagagaaacgtgagtagacactattgtttattgacaaatttcttttaccagaaggaaatccacaataaagctatttcactttcata

SEQ ID NO: 518438 - DNA, 120 bp, Artificial Sequence
  ENSG00000165091_0 (sequence is synthesized)
cagaaactatgagggcagaacccagcaatctgtgctttctttcacaagccctccaggagttgctgaaatttaggaatcattgccccaaaaagtggccctcataatgatgccagatgggat

SEQ ID NO: 518439 - DNA, 120 bp, Artificial Sequence
  ENSG00000165091_1 (sequence is synthesized)
gaaagatcactgttttagtctgcgtggtgcagtggaacagatagacctcggtttgaatctcagctctactgtttactagacatgaaatggggaaatctaaaatgagatgccagaagcctc

SEQ ID NO: 518440 - DNA, 120 bp, Artificial Sequence
  ENSG00000165091_2 (sequence is synthesized)
aaaaatggaaaaccccctgtgcttcacatctgaaaatctctgctgggggcagcaactttgagcctgtggggaaggaactgtccacgtggagtggtctggtgaatgcttaaggagctgcag

SEQ ID NO: 518441 - DNA, 120 bp, Artificial Sequence
  ENSG00000165091_3 (sequence is synthesized)
aagggaagtccctctccaaactagccagccactgagaccttctgacaggacacccccaggatgtcacccaaaaaagtacaaatcaaagtggaggaaaaagaagacgagactgaggaaagc

SEQ ID NO: 518442 - DNA, 120 bp, Artificial Sequence
  ENSG00000165091_4 (sequence is synthesized)
tcaagtgaagaggaagaggaggtggaagataagctacctcgaagagagagcttgagaccaaagaggaaacggaccagagatgttatcaatgaggatgacccagaacctgaaccagaggat

SEQ ID NO: 518443 - DNA, 120 bp, Artificial Sequence
  ENSG00000165091_5 (sequence is synthesized)
gaagaaacaaggaaggcaagagaaaaagagaggaggaggaggctaaagagaggagcagaagaagaagaaattgatgaagaggaattggaaagattgaaggcagagttagatgagaaaaga

SEQ ID NO: 518444 - DNA, 120 bp, Artificial Sequence
  ENSG00000165091_6 (sequence is synthesized)
caaataattgctactgtcaaatgcaaaccatggaagatggagaagaaaattgaagttctcaaggaggcaaaaaaatttgtgagtgaaaatgaaggggctcttgggaaaggaaaaggaaaa

SEQ ID NO: 518445 - DNA, 120 bp, Artificial Sequence
  ENSG00000165091_7 (sequence is synthesized)
cggtggtttgcatttaagatgatgatggccaagaaatgggcaaaattcctccgtgattttgagaacttcaaagctgcgtgtgtcccatgggaaaataaaatcaaggctattgaaagtcag

SEQ ID NO: 518446 - DNA, 120 bp, Artificial Sequence
  ENSG00000165091_8 (sequence is synthesized)
tttggctcctcagtggcctcatacttcctcttcttgagatggatgtatggagtcaatatggttctctttatcctgacatttagcctcatcatgttgccagagtacctctggggtttgcca

SEQ ID NO: 518447 - DNA, 120 bp, Artificial Sequence
  ENSG00000165091_9 (sequence is synthesized)
tatggcagtttacctaggaaaaccgttcccagagccgaagaggcatcggcagcaaactttggtgtgttgtacgacttcaatggtttggcacaatattccgttctcttttatggctattat

SEQ ID NO: 518448 - DNA, 120 bp, Artificial Sequence
  ENSG00000165091_10 (sequence is synthesized)
gacaataaacgaacaattggatggatgaatttcaggttgccgctctcctattttctagtggggattatgtgcattggatacagctttctggttgtcctcaaagcaatgaccaaaaacatt

SEQ ID NO: 518449 - DNA, 120 bp, Artificial Sequence
  ENSG00000165091_11 (sequence is synthesized)
ggtgatgatggaggtggagatgacaacactttcaatttcagctggaaggtctttaccagctgggactacctgatcggcaatcctgaaacagcagacaacaaatttaattctatcacaatg

SEQ ID NO: 518450 - DNA, 120 bp, Artificial Sequence
  ENSG00000165091_12 (sequence is synthesized)
gctaacttcttcgtgtttctaacacttggagggagtggatacctcatcttttgggctgtgaagcgatcccaggaatttgcacagcaagatcctgacacccttgggtggtgggaaaaaaat

SEQ ID NO: 518451 - DNA, 120 bp, Artificial Sequence
  ENSG00000165091_13 (sequence is synthesized)
gaaatgaacatggttatgtccctcctagggatgttctgtccaacattgtttgacttatttgctgaattagaagactaccatcctctcatcgctttgaaatggctactgggacgcattttt

SEQ ID NO: 518452 - DNA, 120 bp, Artificial Sequence
  ENSG00000165091_14 (sequence is synthesized)
gctcttcttttaggcaatttatacgtatttattcttgcattaatggatgagattaacaacaagattgaagaggagaagctagtaaaggccaatattaccctttgggaagccaatatgatc

SEQ ID NO: 518453 - DNA, 120 bp, Artificial Sequence
  ENSG00000165091_15 (sequence is synthesized)
aaggcctacaatgcatcattctctgaaaatagcactggaccacccttttttgttcaccctgcagatgtacctcgaggaccttgctgggaaacaatggtgggacaggagtttgtgaggctg

SEQ ID NO: 518454 - DNA, 120 bp, Artificial Sequence
  ENSG00000165091_16 (sequence is synthesized)
acagtctctgatgttctgaccacctacgtcacaatcctcattggggactttctaagggcatgttttgtgaggttttgcaattattgctggtgctgggacttggagtatggatatccttca

SEQ ID NO: 518455 - DNA, 120 bp, Artificial Sequence
  ENSG00000165091_17 (sequence is synthesized)
tacaccgaattcgacatcagtggcaacgtcctcgctctgatcttcaaccaaggcatgatctggatgggctccttctttgctcccagcctcccaggcatcaatatccttcgactccataca

SEQ ID NO: 518456 - DNA, 120 bp, Artificial Sequence
  ENSG00000165091_18 (sequence is synthesized)
tccatgtacttccagtgctgggccgttatgtgctgcaatgttcctgaggccagggtcttcaaagcttccagatcaaataacttctacctgggcatgctactgctcatcctcttcctgtcc

SEQ ID NO: 518457 - DNA, 120 bp, Artificial Sequence
  ENSG00000165091_19 (sequence is synthesized)
acaatgcctgtcttgtacatgatcgtgtccctcccaccatcttttgattgtggtccattcagtggcaaaaatagaatgtttgaagtcattggagagaccctggagcacgatttcccaagc

SEQ ID NO: 518458 - DNA, 120 bp, Artificial Sequence
  ENSG00000165091_20 (sequence is synthesized)
tggatggcgaagatcttgagacagctttcaaaccctgggctggtcattgctgtcattttggtgatggttttggccatctattatctcaatgctactgccaagggccagaaggcagcgaat

SEQ ID NO: 518459 - DNA, 120 bp, Artificial Sequence
  ENSG00000165091_21 (sequence is synthesized)
ctggatctcaaaaagaagatgaaaatgcaagctttggagaacaaaatgcgaaacaagaaaatggcagctgcacgagcagctgcagctgctggtcgccagtaataagtatcctgagagccc

SEQ ID NO: 518460 - DNA, 120 bp, Artificial Sequence
  ENSG00000165091_22 (sequence is synthesized)
agaaaaggtacactttgccttgctgtttaaaagtaatgcaatatgtgaacgcccagagaacaagcactgtggaactgctattttcctgttctacccttgatggattttcaaggtcatgct

SEQ ID NO: 518461 - DNA, 120 bp, Artificial Sequence
  ENSG00000165091_23 (sequence is synthesized)
ggccaattaaggcatcatcagtcctacctgagcaacaagaatctaaactttattccaagtcagaaactgtttctgcagagccactctctcccctgctccatttcgtgacttttttttttt

SEQ ID NO: 518462 - DNA, 120 bp, Artificial Sequence
  ENSG00000165091_24 (sequence is synthesized)
ttttaacaaattgagtttagaagtgagtgtaatccagcaatacagtttactggtttagttggtgggttaattaaaaaaaatttgctcatatgaactttcattttatatgtttcttttgcc

SEQ ID NO: 518463 - DNA, 120 bp, Artificial Sequence
  ENSG00000165091_25 (sequence is synthesized)
gagttatgggtcttcacgcagccagcatgctgtgttttgggctctgcctcttgtaatttttagaaattaattagtttattctttatttatatttatttatttatttattttcagatggga

SEQ ID NO: 518464 - DNA, 120 bp, Artificial Sequence
  ENSG00000165091_26 (sequence is synthesized)
gcagaaatatttcaccctttttcctctaagttcagaaatatttgcaaaaagtactcattgtaatcattcattaactcactttttgaaaccaataccttattttctctttttttctacctg

SEQ ID NO: 518465 - DNA, 120 bp, Artificial Sequence
  ENSG00000165091_27 (sequence is synthesized)
tctccccaaccacgcgccccacaaatatattcctaaaacctttgtatttggtgctggattcagtatgaaaagaaatagggtttttagaagaaaaaaaaatcctatatgaattggggcctg

SEQ ID NO: 518466 - DNA, 120 bp, Artificial Sequence
  ENSG00000165091_28 (sequence is synthesized)
gatagcactgagttgaagatcttgaagatctcttactttgagaaggtacatgagtcttacacaacctagctttttatgagataaaattaaaaaaaaaaggaaagacatcataaatgactg

SEQ ID NO: 518467 - DNA, 120 bp, Artificial Sequence
  ENSG00000165091_29 (sequence is synthesized)
ttgttctctcacagtctgctcatttgtcttccaatgatcatgttatcagtggtgaatccatacaggtctgcatcaaactcgatacaattcttgcctccttggagggaagaattcagctga

SEQ ID NO: 518468 - DNA, 120 bp, Artificial Sequence
  ENSG00000165091_30 (sequence is synthesized)
ggggcagaagtaggtttatggcagagggagagaatgaggcaagttttagagcaggagtgtaggtttattaaaaagttttacagcaggaacaaaaggaaataaaatatacttggaagagag

SEQ ID NO: 518469 - DNA, 120 bp, Artificial Sequence
  ENSG00000165091_31 (sequence is synthesized)
ccaagtgggcaaattgagagttccaagtgccctgttcagctttgacctgggtttctatacactggcatggttctggagtttgcatctctccccgcttgatttttttggcggatgggctgt

SEQ ID NO: 518470 - DNA, 120 bp, Artificial Sequence
  ENSG00000165091_32 (sequence is synthesized)
ccgtgtggatggtggcctgccggcagttggaaggagctatgtgtacaatgtgttactgaagttgtgtgcctgctcacttgtgacgttttcccttaccatccagcgttcctggaggaaggt

SEQ ID NO: 518471 - DNA, 120 bp, Artificial Sequence
  ENSG00000165091_33 (sequence is synthesized)
catatactagttaaactctgccattttgcttagtgggcatgcttgagcccacttgcccaactcctaagatctccggctcaggtgttttctatctattgggagactgtctttccctagcac

SEQ ID NO: 518472 - DNA, 120 bp, Artificial Sequence
  ENSG00000165091_34 (sequence is synthesized)
tggttgccactaattattattttagagagatagtttaaccaccacctgaccatcaccaaatggtcacctgacattcctgtgggatgggtggtggggggcctctcttgccctgcttatgtt

SEQ ID NO: 518473 - DNA, 120 bp, Artificial Sequence
  ENSG00000165091_35 (sequence is synthesized)
tttatgtttgcctaactacctactctaacaatcatatcctgtaagcttggattctaatgttctataatttttttctttgctttttttgttaaggtcaggaaaacacacttctgttggggg

SEQ ID NO: 518474 - DNA, 120 bp, Artificial Sequence
  ENSG00000165091_36 (sequence is synthesized)
ccttaatttatagatatgtttaagcattattatggatttacagtttgaattgactttaagtagtaacactcagtgccctcactagccttgttgtgcgactttaattgcatagcttaactc

SEQ ID NO: 518475 - DNA, 120 bp, Artificial Sequence
  ENSG00000165091_37 (sequence is synthesized)
agtgtgcctttccaaaactaagccaatttgcttgccattccctgcagttgacttactgatttctattatcctgtctctgagtttctcattctttttgatcaccaaaaggcagccatagaa

SEQ ID NO: 518476 - DNA, 120 bp, Artificial Sequence
  ENSG00000165091_38 (sequence is synthesized)
taatcgcactgtttccctgccagttctaaactttattcctctggttgtctttttcagattgacttccattctcaatcttatcactccctttttaggattccttgggctcttatgtctgta

SEQ ID NO: 518477 - DNA, 120 bp, Artificial Sequence
  ENSG00000165091_39 (sequence is synthesized)
attcagagtctattatttatattgattttcatgtgacttgtaatggttccttattattttttgatgcatggattatctttcttgtccttattgtaaattctctgtgagcaggggttgtat

SEQ ID NO: 518478 - DNA, 120 bp, Artificial Sequence
  ENSG00000165091_40 (sequence is synthesized)
cttctaactcttttgtatgcctagtatagtgctgtgcacaagtaggcgctgaataaatgcttgctaattaaattgaatcaatttaacttacagcaattgtgttatgagacaaaaacttct

SEQ ID NO: 518479 - DNA, 120 bp, Artificial Sequence
  ENSG00000165091_41 (sequence is synthesized)
gttacctgcatgaaaacattttactatgatgtaagaaatggattatctgttgataggctgagtttattgtttaattagattataatgcagatgagtaaataaagctagtgtttatttcta

SEQ ID NO: 518480 - DNA, 90 bp, Artificial Sequence
  ENSG00000165091_42 (sequence is synthesized)
gacgggtggagcaaaggaacaagaagccaaaaactctcagggcacttactatgattgtgtaaaagagagactcatcaattaacacagatg

SEQ ID NO: 518481 - DNA, 120 bp, Artificial Sequence
  ENSG00000165091_43 (sequence is synthesized)
tctgatcttcaaccaaggcatgatctgatctgtcctgaattattaaacctttgggtgctgacagacaccggacccctctgcaaatgctaaaaccgtcttgcttctgtcacacaaagacaa

SEQ ID NO: 518482 - DNA, 120 bp, Artificial Sequence
  ENSG00000165091_44 (sequence is synthesized)
ctctccagggctccatcgtcctgccatgggatgactgttaaattcctgtgcctgactaggtgaatcaatatggaaaagatattataaaaatattgtttcctcctttgtcaggaagaaaag

SEQ ID NO: 518483 - DNA, 120 bp, Artificial Sequence
  ENSG00000165091_45 (sequence is synthesized)
gtgtatggcaattagtagattaaaaaaagagagtcaatatctcttccataagattggcttttaaaaaattgcttattagtaaaaatagctaagatttgttgaatgttgactgtgtgctgg

SEQ ID NO: 518484 - DNA, 120 bp, Artificial Sequence
  ENSG00000165091_46 (sequence is synthesized)
ctctgaatttcatgtatattatctcacactgtttgcaaatctatcccttgaggtaaatactatttgtatgtcccctttacagttgcatataaaggaaggatagttgaaaatggtgcaaag

SEQ ID NO: 518485 - DNA, 120 bp, Artificial Sequence
  ENSG00000165091_47 (sequence is synthesized)
tagcattgtactggcctttcacatgctatgtttaatcacgcaggattgtatggaatgggattgtacagaatgaggcctgggtttgctaaatcctgggggagattgtctaagctgtcactt

SEQ ID NO: 518486 - DNA, 120 bp, Artificial Sequence
  ENSG00000165091_48 (sequence is synthesized)
gaagggaaaactgtagcatgtgggacttaaaaacagcttgggatggagtttgaggtagggcgagagggaaaaagatcttggcagatacattctgaacaaatacttgtgtcatcctcaact

SEQ ID NO: 518487 - DNA, 120 bp, Artificial Sequence
  ENSG00000165091_49 (sequence is synthesized)
agtcaactggcaagtccattgctcagcttgttgaaatactctgcacagaatgcaaggaaaaactgttttcatgaggtagcccatgaagcgatgaagcaaggcaaatttatctgcctggat

SEQ ID NO: 518488 - DNA, 120 bp, Artificial Sequence
  ENSG00000165091_50 (sequence is synthesized)
cattgctgtaagatcctagatcccacactccatggtgtgatgttttagccaagtctggaagtagcacaggccctaaaatctcatgattgcaggttgtcaactctgctgtaggcttgccac

SEQ ID NO: 518489 - DNA, 120 bp, Artificial Sequence
  ENSG00000165091_51 (sequence is synthesized)
ttcaagggcaagtggttggttggggctgggatttgggcagagccatagaaagaaagggaacattcaagggaatttgatgatgtgcatgatgtctctgtctgatacaaaaagaaaaaaaaa

SEQ ID NO: 518490 - DNA, 120 bp, Artificial Sequence
  ENSG00000165091_52 (sequence is synthesized)
agaaggtattaagaatgactcccaagtttctgacttggtcagttgagtagaagggaaatttttatttttatttttatttttaaaatttcagtaagtttttagggaacaggtggtgtttgg

SEQ ID NO: 518491 - DNA, 120 bp, Artificial Sequence
  ENSG00000165091_53 (sequence is synthesized)
ttctgagattttggtgcacctatcacctaagcagggtacactatgcccaatgtgtagtctcttatccctcaccccccatcctttcccttgactccccaaagtccattgtaacattcttat

SEQ ID NO: 518492 - DNA, 120 bp, Artificial Sequence
  ENSG00000165091_54 (sequence is synthesized)
tccccaaagtccattgtaacattcttatgcctttgtgtcctcataatttagctcccaattgtgagtgagaacatatgatgtttggttttccactcccgagttgcttcacttacaataata

SEQ ID NO: 518493 - DNA, 120 bp, Artificial Sequence
  ENSG00000165091_55 (sequence is synthesized)
gtctccaattcatgccaacatctattattttttgattttttgatcatgaccattgttgtaggagggaggtggtatcccattatggttttgatttgtatttccctgataattagtgatgct

SEQ ID NO: 518494 - DNA, 120 bp, Artificial Sequence
  ENSG00000165091_56 (sequence is synthesized)
gaacatctttccatatacttgttggccatttgtatatctgagtagaaggtaattctaataaataaaacaggaaggcagcagaaagaggtttgtttgggatatggcttgattatttgcaag

SEQ ID NO: 518495 - DNA, 120 bp, Artificial Sequence
  ENSG00000165091_57 (sequence is synthesized)
atatttgctgtagcttaggagaaaggtggatgttggtgatactgattttgtcattatctgtgagttaaagtttctaaaatcacgtggcttcctagggaaagcatatagaatgacaaggga

SEQ ID NO: 518496 - DNA, 120 bp, Artificial Sequence
  ENSG00000165091_58 (sequence is synthesized)
agatggctagatggctagtaatggcaccctgaacaacttcagcatttagaggtgggtggaggaggataagcccatggaagaaacagaaaggatgggccagcgagatgagaggagaagcta

SEQ ID NO: 518497 - DNA, 120 bp, Artificial Sequence
  ENSG00000165091_59 (sequence is synthesized)
agggagtagacagttaccagagggaaggtgggatcagttaagaaccttagtatgttgcaaagaaataacctgcaatgcggaccaacccggggaacgtctgtaaaaatgatgacaattctt

SEQ ID NO: 518498 - DNA, 120 bp, Artificial Sequence
  ENSG00000165091_60 (sequence is synthesized)
aattgtaatttaaaatgtaattgtattgagagctctctctgtctttgtctcatcataatttgaagcagattaactacatattagctagaaaaagccctttgaaattttccttcaatgtat

SEQ ID NO: 518499 - DNA, 120 bp, Artificial Sequence
  ENSG00000165091_61 (sequence is synthesized)
caatagattctatgactttttgtaagtagaaactgcctattggtaaaatagcacttaattgagataatgcttgtgaaagccatttctaaactttgaattgacatacaaaataaaggtggc

SEQ ID NO: 518500 - DNA, 120 bp, Artificial Sequence
  ENSG00000165091_62 (sequence is synthesized)
ctggctgtctgactttgagatggtaccttttataaggtcgtctccatcaccctcattgaaagtgcctcctcggactggccaaaagcagttaggtaatgctcttcggtgaacgacagtgag

SEQ ID NO: 518501 - DNA, 60 bp, Artificial Sequence
  ENSG00000165091_63 (sequence is synthesized)
tcaggaaataacataagcaaacgtcccctatttcccccacgatggagctggagcatggtg

SEQ ID NO: 518502 - DNA, 120 bp, Artificial Sequence
  ENSG00000165091_64 (sequence is synthesized)
gatggagaagaaaattgaagttctcaagtatggtgccactttttataagtagaaacactttccctgatattgattttctaaatcctctgaatattccatatatatatatatatatatata

SEQ ID NO: 518503 - DNA, 120 bp, Artificial Sequence
  ENSG00000165092_0 (sequence is synthesized)
atcagaaccaaattgctgagccagtcacctgtgttccaggagccgaatcagaaatgtcatcctcaggcacgccagacttacctgtcctactcaccgatttgaagattcaatatactaaga

SEQ ID NO: 518504 - DNA, 120 bp, Artificial Sequence
  ENSG00000165092_1 (sequence is synthesized)
tcttcataaacaatgaatggcatgattcagtgagtggcaagaaatttcctgtctttaatcctgcaactgaggaggagctctgccaggtagaagaaggagataaggaggatgttgacaagg

SEQ ID NO: 518505 - DNA, 120 bp, Artificial Sequence
  ENSG00000165092_2 (sequence is synthesized)
cagtgaaggccgcaagacaggcttttcagattggatccccgtggcgtactatggatgcttccgagagggggcgactattatacaagttggctgatttaatcgaaagagatcgtctgctgc

SEQ ID NO: 518506 - DNA, 120 bp, Artificial Sequence
  ENSG00000165092_3 (sequence is synthesized)
tggcgacaatggagtcaatgaatggtggaaaactctattccaatgcatatctgaatgatttagcaggctgcatcaaaacattgcgctactgtgcaggttgggctgacaagatccagggcc

SEQ ID NO: 518507 - DNA, 120 bp, Artificial Sequence
  ENSG00000165092_4 (sequence is synthesized)
gtacaataccaattgatggaaatttttttacatatacaagacatgaacctattggtgtatgtggccaaatcattccttggaatttcccgttggttatgctcatttggaagatagggcctg

SEQ ID NO: 518508 - DNA, 120 bp, Artificial Sequence
  ENSG00000165092_5 (sequence is synthesized)
cactgagctgtggaaacacagtggttgtcaaaccagcagagcaaactcctctcactgctctccacgtggcatctttaataaaagaggcagggtttcctcctggagtagtgaatattgttc

SEQ ID NO: 518509 - DNA, 120 bp, Artificial Sequence
  ENSG00000165092_6 (sequence is synthesized)
ctggttatgggcctacagcaggggcagccatttcttctcacatggatatagacaaagtagccttcacaggatcaacagaggttggcaagttgatcaaagaagctgccgggaaaagcaatc

SEQ ID NO: 518510 - DNA, 120 bp, Artificial Sequence
  ENSG00000165092_7 (sequence is synthesized)
tgaagagggtgaccctggagcttggaggaaagagcccttgcattgtgttagctgatgccgacttggacaatgctgttgaatttgcacaccatggggtattctaccaccagggccagtgtt

SEQ ID NO: 518511 - DNA, 120 bp, Artificial Sequence
  ENSG00000165092_8 (sequence is synthesized)
aggagtgttgagcgggctaagaagtatatccttggaaatcctctgaccccaggagtcactcaaggccctcagattgacaaggaacaatatgataaaatacttgacctcattgagagtggg

SEQ ID NO: 518512 - DNA, 120 bp, Artificial Sequence
  ENSG00000165092_9 (sequence is synthesized)
aagaaagaaggggccaaactggaatgtggaggaggcccgtgggggaataaaggctactttgtccagcccacagtgttctctaatgttacagatgagatgcgcattgccaaagaggagatt

SEQ ID NO: 518513 - DNA, 120 bp, Artificial Sequence
  ENSG00000165092_10 (sequence is synthesized)
tttggaccagtgcagcaaatcatgaagtttaaatctttagatgacgtgatcaaaagagcaaacaatactttctatggcttatcagcaggagtgtttaccaaagacattgataaagccata

SEQ ID NO: 518514 - DNA, 120 bp, Artificial Sequence
  ENSG00000165092_11 (sequence is synthesized)
acaatctcctctgctctgcaggcaggaacagtgtgggtgaattgctatggcgtggtaagtgcccagtgcccctttggtggattcaagatgtctggaaatggaagagaactgggagagtac

SEQ ID NO: 518515 - DNA, 120 bp, Artificial Sequence
  ENSG00000165092_12 (sequence is synthesized)
ggtttccatgaatatacagaggtcaaaacagtcacagtgaaaatctctcagaagaactcataaagaaaatacaagagtggagagaagctcttcaatagctaagcatctccttacagtcac

SEQ ID NO: 518516 - DNA, 120 bp, Artificial Sequence
  ENSG00000165092_13 (sequence is synthesized)
taatatagtagattttaaagacaaaatttttcttttcttgatttttttaaacataagctaaatcatattagtattaatactacccatagaaaacttgacatgtagcttcttctgaaagaa

SEQ ID NO: 518517 - DNA, 120 bp, Artificial Sequence
  ENSG00000165092_14 (sequence is synthesized)
ttatttgccttctgaaatgtgacccccaagtcctatcctaaataaaaaaagacaaattcggatgtatgatctctctagctttgtcatagttatgtgattttcctttgtagctacttttgc

SEQ ID NO: 518518 - DNA, 120 bp, Artificial Sequence
  ENSG00000165092_15 (sequence is synthesized)
aggataataattttatagaaaaggaacagttgcatttagcttctttcccttagtgactcttgaagtacttaacatacacgttaactgcagagtaaattgctctgttcccagtagttataa

SEQ ID NO: 518519 - DNA, 120 bp, Artificial Sequence
  ENSG00000165092_16 (sequence is synthesized)
agtccttggactgttttgaaaagtttcctaggatgtcatgtctgcttgtcaaaagaaataatccctgtaatatttagctgtaaactgaatataaagcttaataaaaacaaccttgcatga

SEQ ID NO: 518520 - DNA, 120 bp, Artificial Sequence
  ENSG00000165092_17 (sequence is synthesized)
atgaagtatgttttatgtaactatttttgagccaacaattttaaaacaaaaactctttttaatgatttgttacttattttagccttcaaacatatggatagaatataagcagatgtagtt

SEQ ID NO: 518521 - DNA, 120 bp, Artificial Sequence
  ENSG00000165092_18 (sequence is synthesized)
ctatataattctcaattttaaaaagaagagttcttattctatctaatgatgaagctttctctaaaacagatggatgcttatgtatttgttaaatgtggagtaaatgtaagatttgttgaa

SEQ ID NO: 518522 - DNA, 120 bp, Artificial Sequence
  ENSG00000165092_19 (sequence is synthesized)
gtggccaggatcgggtctgggaagctcggagatttcactgtgagtggagtcagagggaaggcatttggagcaaaggcttctgtaagagggagtaggatggaaattgatctttgaagaaag

SEQ ID NO: 518523 - DNA, 120 bp, Artificial Sequence
  ENSG00000165092_20 (sequence is synthesized)
tatttactgtctgctgagtgcataagaatgcagtctctgccagtcactggagacatcaagccctgaccactacaggaagcacatggtttccattacataaaatttacacatttggatttg

SEQ ID NO: 518524 - DNA, 120 bp, Artificial Sequence
  ENSG00000165097_0 (sequence is synthesized)
gctgcagccgtcctgtgcgcgcggcgcgcggctccggagaggcgcccgcagtccagggcggcgcgcaccgcctcgctggcgctcagagcggtgccttttccccgagactcccggcacctc

SEQ ID NO: 518525 - DNA, 120 bp, Artificial Sequence
  ENSG00000165097_1 (sequence is synthesized)
gctcagagcggtgccttttccccgagactcccggcacctcttcagcgcaaagattatttaatgtaatggcaactccacgggggaggacaaagaaaaaagcatcttttgatcattctccgg

SEQ ID NO: 518526 - DNA, 120 bp, Artificial Sequence
  ENSG00000165097_2 (sequence is synthesized)
atagccttcctttgaggagctccggtaggcaggcgaagaagaaagcaacagagacaacagatgaggatgaagatggtggctcagagaagaagtacaggaaatgtgaaaaggcaggctgta

SEQ ID NO: 518527 - DNA, 120 bp, Artificial Sequence
  ENSG00000165097_3 (sequence is synthesized)
cggcaacatgtcctgtgtgctttgcaagtgcttctgaaagatgtgccaaaaatggctacacctcccgatggtatcatctctcctgtggggaacatttctgtaatgaatgctttgaccatt

SEQ ID NO: 518528 - DNA, 120 bp, Artificial Sequence
  ENSG00000165097_4 (sequence is synthesized)
actacagaagccataaggatggatatgacaaatatactacatggaaaaaaatatggactagcaatggcaaaaccgaacctagtcccaaagctttcatggcagaccagcaactcccctact

SEQ ID NO: 518529 - DNA, 120 bp, Artificial Sequence
  ENSG00000165097_5 (sequence is synthesized)
gggttcagtgtacaaaacctgagtgtagaaaatggaggcagcttaccaaggaaatccagcttactccacagatagccaagacttatcgatgcggtatgaaaccaaatactgctattaagc

SEQ ID NO: 518530 - DNA, 120 bp, Artificial Sequence
  ENSG00000165097_6 (sequence is synthesized)
ctgagacctcagatcattgttccctcccagaggatctaagagtattggaagtttccaaccattggtggtactctatgctcatcctacctcctttgctgaaagacagtgtggcagcgcccc

SEQ ID NO: 518531 - DNA, 120 bp, Artificial Sequence
  ENSG00000165097_7 (sequence is synthesized)
tgctgtctgcctactaccctgactgtgttggcatgagcccctcctgcaccagcacaaaccgcgccgctgccactggcaatgccagccctgggaagctggagcactccaaggctgccctct

SEQ ID NO: 518532 - DNA, 120 bp, Artificial Sequence
  ENSG00000165097_8 (sequence is synthesized)
ccgtgcacgttccaggcatgaaccgatacttccagcctttctaccagcccaatgagtgtggcaaagccctctgtgtgaggccggatgtgatggaactggatgagctctatgagtttccag

SEQ ID NO: 518533 - DNA, 120 bp, Artificial Sequence
  ENSG00000165097_9 (sequence is synthesized)
agtattcccgagaccccaccatgtacctggctttgagaaacctcatcctcgcactgtggtatactaactgcaaagaagctcttactcctcagaaatgtattcctcacatcatcgtccggg

SEQ ID NO: 518534 - DNA, 120 bp, Artificial Sequence
  ENSG00000165097_10 (sequence is synthesized)
gtctcgtgcgtattcgatgcgttcaggaagtggagagaatactgtattttatgaccagaaaaggtctcatcaacactggagttctcagcgtgggagccgaccagtatcttctccctaagg

SEQ ID NO: 518535 - DNA, 120 bp, Artificial Sequence
  ENSG00000165097_11 (sequence is synthesized)
gaggccgagtctgggatgataaatcttttaaaggcgtcacagtgggaagaggagctcagattgtcaatgggtgtattaacaacccagtagcattaatgtgtgaacaacttggcatcagca

SEQ ID NO: 518536 - DNA, 120 bp, Artificial Sequence
  ENSG00000165097_12 (sequence is synthesized)
tgcataaatttggagaaagatgtgacttaattcaggaaggtggaagaataactgaccccactattgacaagcgcatggattttcattttaatgctctcttggatgttgtctctgagtgga

SEQ ID NO: 518537 - DNA, 120 bp, Artificial Sequence
  ENSG00000165097_13 (sequence is synthesized)
gaaaggataagactcagctccaagatgtccctttaggagaaaagatagaagaaatctacaaggcatttattaaggaatctggtatccaattcagtgagctggagggacaggtgcttcagt

SEQ ID NO: 518538 - DNA, 120 bp, Artificial Sequence
  ENSG00000165097_14 (sequence is synthesized)
tccatctcagtaacctggagtacgcctgtggcagcaaccttcaccaggtatctgctcgctcgtgggaccacaatgaattctttgcccagtttgctggtgaccacactctgctaactcccg

SEQ ID NO: 518539 - DNA, 120 bp, Artificial Sequence
  ENSG00000165097_15 (sequence is synthesized)
ggtactcggtgataattgaaaaactggcagaagggcttgacattcaactcaaatctccacaggtgcagtgtattgattattctggagatgaagtgcaggttaccactacagatggcacag

SEQ ID NO: 518540 - DNA, 120 bp, Artificial Sequence
  ENSG00000165097_16 (sequence is synthesized)
ggtattctgcacaaaaggtattagtcactgtaccactggctttactacagaaaggtgccattcagtttaatccaccgttgtcagagaagaagatgaaggctatcaacagcttaggcgcag

SEQ ID NO: 518541 - DNA, 120 bp, Artificial Sequence
  ENSG00000165097_17 (sequence is synthesized)
gcatcattgaaaagattgccttgcaatttccgtatagattttgggacagtaaagtacaaggggctgacttttttggtcacgttcctcccagtgccagcaagcgagggctttttgccgtgt

SEQ ID NO: 518542 - DNA, 120 bp, Artificial Sequence
  ENSG00000165097_18 (sequence is synthesized)
tctatgacatggatccccagaagaagcacagcgtgctgatgtctgtgattgccggggaggctgtcgcatccgtgaggaccctggatgacaaacaggtgctgcagcagtgcatggccacgc

SEQ ID NO: 518543 - DNA, 120 bp, Artificial Sequence
  ENSG00000165097_19 (sequence is synthesized)
tccgggagctgttcaaggagcaggaggtcccagatcccacaaagtattttgtcactcggtggagcacagacccatggatccagatggcatacagttttgtgaagacaggtggaagtgggg

SEQ ID NO: 518544 - DNA, 120 bp, Artificial Sequence
  ENSG00000165097_20 (sequence is synthesized)
aggcctacgatatcattgctgaagacattcaaggaaccgtctttttcgctggtgaggcaacaaacaggcatttcccacaaactgttacaggggcatatttgagtggcgttcgagaagcaa

SEQ ID NO: 518545 - DNA, 120 bp, Artificial Sequence
  ENSG00000165097_21 (sequence is synthesized)
gcaagattgcagcattttaagaattcggtggacccagctttcttctgtaccccagatggggaaatttgaatcacatgttaaacctcagttttataagagggggaaaaaaccgtctctaca

SEQ ID NO: 518546 - DNA, 120 bp, Artificial Sequence
  ENSG00000165097_22 (sequence is synthesized)
tagtaaaactgaaatgtttctaaggcgatatgataatgcaaacctatttcatcactctaaaagcactgacctcaaaaaaccttataagcacttagatttaattgcattttccataggttc

SEQ ID NO: 518547 - DNA, 120 bp, Artificial Sequence
  ENSG00000165097_23 (sequence is synthesized)
ggaagttccctttagatttcacattttatatggctgatcaattttcatacattgagaaaccaagtcaatcaagcaggaatcatttaaaaaccagataaagccatgtttttcttctgtgac

SEQ ID NO: 518548 - DNA, 120 bp, Artificial Sequence
  ENSG00000165097_24 (sequence is synthesized)
aatttatcagtatctttaccaatgagccttaatttttatataggtccaatattgagcttttacttaaaatttagatagaacttttttttggatacagcacaaactccagttgacagtaaa

SEQ ID NO: 518549 - DNA, 120 bp, Artificial Sequence
  ENSG00000165097_25 (sequence is synthesized)
atgaagcttctaggtattttgtattgtacatatttcctcctactgggtgttcaaaagaaatttaaattcaagtaccttttgtgataaaatgttttagatttgtgcacccattggcaaaac

SEQ ID NO: 518550 - DNA, 120 bp, Artificial Sequence
  ENSG00000165097_26 (sequence is synthesized)
aggaaagtttccagataggtattgtatcattgagaatgcagcacagatagtgtgggcttcacactatagacacagaatatagctttttcttaaagccaaatttgggtgataggacacttt

SEQ ID NO: 518551 - DNA, 120 bp, Artificial Sequence
  ENSG00000165097_27 (sequence is synthesized)
aaatatccttaattttggcaaccactagcaaaaaaacttgtcagaataatttaaccaagcccctctccacttcttttatttaaaagcactgattcaattgctaggaatatttttgcagat

SEQ ID NO: 518552 - DNA, 120 bp, Artificial Sequence
  ENSG00000165097_28 (sequence is synthesized)
ttttctttacagtattccataggcaggtccactggaaaactgcagaaaaatgtgagctctcctggtaaatagtatacattttataagctatattttaaaggcctaagaacatggcaagta

SEQ ID NO: 518553 - DNA, 120 bp, Artificial Sequence
  ENSG00000165097_29 (sequence is synthesized)
tttacttttatcttttttttaaaaacactcatgacagaaaacagtttaataatatctcattctaaaataaaacactggttgcagggtcttcaggatgcctattttgccaagaaacttcag

SEQ ID NO: 518554 - DNA, 120 bp, Artificial Sequence
  ENSG00000165097_30 (sequence is synthesized)
tatacaggttagaaatatgcttttgtttttgaacaataatatactggtttgctttaaagaagggactaaatatgactttaaagagacttcaaaatattgagtattttaaaaatttaaaag

SEQ ID NO: 518555 - DNA, 120 bp, Artificial Sequence
  ENSG00000165097_31 (sequence is synthesized)
ttgagtattttaaaaatttaaaagtaggtcagtttataacgagtaaatacctaacacaccaagaatgtgcagtgaacctcaggcatttaagacacctcccccaccgcccgccccccgccc

SEQ ID NO: 518556 - DNA, 120 bp, Artificial Sequence
  ENSG00000165097_32 (sequence is synthesized)
aacaagccaacagctgtatatctcaaaagttaacccaagacaactctgatatttaggttatttgttgagactcattggtactgactggcaagtattctgctttaaagtatcatgtattaa

SEQ ID NO: 518557 - DNA, 120 bp, Artificial Sequence
  ENSG00000165097_33 (sequence is synthesized)
aatgtttagacagcatgtgttttaaagtgataaatgcaaaatgttaagtttgaaatggttaacagtaaattattatgttagtttccaggcacttgaactgtgctacaagtaggggaaaac

SEQ ID NO: 518558 - DNA, 120 bp, Artificial Sequence
  ENSG00000165097_34 (sequence is synthesized)
ctactttaaagtatggtaaatgtgtgttttaaacttcctatcaagtgacatacttcatttgattttttgtttaagaagccatggtacttttttcttgagttactttggatatgttttttc

SEQ ID NO: 518559 - DNA, 120 bp, Artificial Sequence
  ENSG00000165097_35 (sequence is synthesized)
aatgccatctgaagattttgtaattgagtagcagtaaatatacagatttacaatgttttaactacagttcatgaatagctggttgtgtaaaactaataaaaaactagactttcacatgta

SEQ ID NO: 518560 - DNA, 120 bp, Artificial Sequence
  ENSG00000165097_36 (sequence is synthesized)
gctggaggtgtttggttcttctgcagcagggttcgtgaaagttgcagggtttagtcagtaaccacaagtcaagaaggaggccgtaaggcatgcatgttgctggtgcacgtggttctgtat

SEQ ID NO: 518561 - DNA, 120 bp, Artificial Sequence
  ENSG00000165097_37 (sequence is synthesized)
gtggcatgattctggagctggcagtagtagtaatggcgtcctgattgtagcaacgataatggggtctggagccagaaatgtccaattcccaatgtttgtgatgtgtttcactacttatga

SEQ ID NO: 518562 - DNA, 120 bp, Artificial Sequence
  ENSG00000165097_38 (sequence is synthesized)
agcatattgatgtatcttgtaaattttagttttaaagcatcaccctgattctcagaggttagtggggcagatactaccttcattttatagatgtatggcagagatgagtggcaggcttgg

SEQ ID NO: 518563 - DNA, 120 bp, Artificial Sequence
  ENSG00000165097_39 (sequence is synthesized)
ccacacagtagaatgtattaggaatgatgcataaagttctcctgactccatagttagggctctttcctcctcaagtactgcttttcggggttttgttttttttttttttttgagacagtc

SEQ ID NO: 518564 - DNA, 120 bp, Artificial Sequence
  ENSG00000165097_40 (sequence is synthesized)
acaggcatgagccaccgcacctggcctctgctgactcttcttatctaagatgattattcaccatcaggacgttttttgcccactcttccctgtggttgccacttctgcttagccaggcat

SEQ ID NO: 518565 - DNA, 120 bp, Artificial Sequence
  ENSG00000165097_41 (sequence is synthesized)
gcattggcacccttgtgcagtgagcaacctgcacagttgcacatggcagcccttgttcttgccagtataacagcatgggttgttgataccagtgtagtggtagtgtgaggttctgttgct

SEQ ID NO: 518566 - DNA, 80 bp, Artificial Sequence
  ENSG00000165102_0 (sequence is synthesized)
cgctggccgcgctgctgctggccgcgtccgtgctgagcgccgcgctgctggcccccggcggctcttcggggcgcgatgcc

SEQ ID NO: 518567 - DNA, 120 bp, Artificial Sequence
  ENSG00000165102_1 (sequence is synthesized)
gggcgcgatgcccaggccgcgccgccacgagacttagacaaaaaaagacatgcagagctgaagatggatcaggctttgctactcatccataatgaacttctctggaccaacttgaccgtc

SEQ ID NO: 518568 - DNA, 120 bp, Artificial Sequence
  ENSG00000165102_2 (sequence is synthesized)
tactggaaatctgaatgctgttatcactgcttgtttcaggttctggtaaacgttcctcagagtccaaaagcagggaagcctagtgctgcagctgcctctgtcagcacccagcacggatct

SEQ ID NO: 518569 - DNA, 120 bp, Artificial Sequence
  ENSG00000165102_3 (sequence is synthesized)
atcctgcagctgaacgacaccttggaagagaaagaagtttgtaggttggaatacagatttggagaatttggaaactattctctcttggtaaagaacatccataatggagttagtgaaatt

SEQ ID NO: 518570 - DNA, 120 bp, Artificial Sequence
  ENSG00000165102_4 (sequence is synthesized)
gcctgtgacctggctgtgaacgaggatccagttgatagtaaccttcctgtgagcattgcattccttattggtcttgctgtcatcattgtgatatcctttctgaggctcttgttgagtttg

SEQ ID NO: 518571 - DNA, 120 bp, Artificial Sequence
  ENSG00000165102_5 (sequence is synthesized)
gatgactttaacaattggatttctaaagccataagttctcgagaaactgatcgcctcatcaattctgagctgggatctcccagcaggacagaccctctcgatggtgatgttcagccagca

SEQ ID NO: 518572 - DNA, 120 bp, Artificial Sequence
  ENSG00000165102_6 (sequence is synthesized)
acgtggcgtctatctgccctgccgccccgcctccgcagcgtggacaccttcagggggattgctcttatactcatggtctttgtcaattatggaggaggaaaatattggtacttcaaacat

SEQ ID NO: 518573 - DNA, 120 bp, Artificial Sequence
  ENSG00000165102_7 (sequence is synthesized)
gcaagttggaatgggctgacagtggctgacctcgtgttcccgtggtttgtatttattatgggatcttccatttttctatcgatgacttctatactgcaacgggggtgttcaaaattcaga

SEQ ID NO: 518574 - DNA, 120 bp, Artificial Sequence
  ENSG00000165102_8 (sequence is synthesized)
ttgctggggaagattgcatggaggagtttcctgttaatctgcataggaattatcattgtgaatcccaattattgccttggtccattgtcttgggacaaggtgcgcattcctggtgtgctg

SEQ ID NO: 518575 - DNA, 120 bp, Artificial Sequence
  ENSG00000165102_9 (sequence is synthesized)
cagcgattgggagtgacatactttgtggttgctgtgttggagctcctctttgctaaacctgtgcctgaacattgtgcctcggagaggagctgcctttctcttcgagacatcacgtccagc

SEQ ID NO: 518576 - DNA, 120 bp, Artificial Sequence
  ENSG00000165102_10 (sequence is synthesized)
tggccccagtggctgctcatcctggtgctggaaggcctgtggctgggcttgacattcctcctgccagtccctgggtgccctactggttatcttggtcctgggggcattggagattttggc

SEQ ID NO: 518577 - DNA, 120 bp, Artificial Sequence
  ENSG00000165102_11 (sequence is synthesized)
aagtatccaaattgcactggaggagctgcaggctacatcgaccgcctgctgctgggagacgatcacctttaccagcacccatcttctgctgtactttaccacaccgaggtggcctatgac

SEQ ID NO: 518578 - DNA, 120 bp, Artificial Sequence
  ENSG00000165102_12 (sequence is synthesized)
cccgagggcatcctgggcaccatcaactccatcgtgatggcctttttaggagttcaggcaggaaaaatactattgtattacaaggctcggaccaaagacatcctgattcgattcactgct

SEQ ID NO: 518579 - DNA, 120 bp, Artificial Sequence
  ENSG00000165102_13 (sequence is synthesized)
tggtgttgtattcttgggctcatttctgttgctctgacgaaggtttctgaaaatgaaggctttattccagtaaacaaaaatctctggtccctttcgtatgtcactacgctcagttctttt

SEQ ID NO: 518580 - DNA, 120 bp, Artificial Sequence
  ENSG00000165102_14 (sequence is synthesized)
gccttcttcatcctgctggtcctgtacccagttgtggatgtgaaggggctgtggacaggaaccccattcttttatccaggaatgaattccattctggtatatgtcggccacgaggtgttt

SEQ ID NO: 518581 - DNA, 120 bp, Artificial Sequence
  ENSG00000165102_15 (sequence is synthesized)
gagaactacttcccctttcagtggaagctgaaggacaaccagtcccacaaggagcacctgactcagaacatcgtcgccactgccctctgggtgctcattgcctacatcctctatagaaag

SEQ ID NO: 518582 - DNA, 120 bp, Artificial Sequence
  ENSG00000165102_16 (sequence is synthesized)
aagattttttggaaaatctgatggctcccactgagatgtgctgctggaagactctagtaggcctgcagggaggactgaagcagcctttgttaaagggaagcattcattaggaaattgact

SEQ ID NO: 518583 - DNA, 120 bp, Artificial Sequence
  ENSG00000165102_17 (sequence is synthesized)
ggctgcgtgtttacagactctgggggaagacactgatgtcctcaaactggttaactgtgacacggctcgccagaactctgcctgtctatttgtgacttacagatttgaaatgtaattgtc

SEQ ID NO: 518584 - DNA, 120 bp, Artificial Sequence
  ENSG00000165102_18 (sequence is synthesized)
ttttttcctccatcttctgtggaaatggatgtctttggaacttcattccgaggagataagctttaactttccaaaagggaattgccatgggtgtttttcttctgtggtgagtgaaacaat

SEQ ID NO: 518585 - DNA, 120 bp, Artificial Sequence
  ENSG00000165102_19 (sequence is synthesized)
ctgaggtctggttcttgctgaccttgttgccctgcaaacttcctttccacgtgtacgcgcacaccaacacgaaatgccatcactcctactgcggctgctatgaagcttactggttgtgat

SEQ ID NO: 518586 - DNA, 120 bp, Artificial Sequence
  ENSG00000165102_20 (sequence is synthesized)
gtgttataatttagtctgtttttttgattgaatgcagtttaatgtttccagaaagccaaagtaattttcttttcagatatgcaaggctttggtgggtccaaaaaatgtctatcacaagcc

SEQ ID NO: 518587 - DNA, 120 bp, Artificial Sequence
  ENSG00000165102_21 (sequence is synthesized)
gtatctgcctgtctgtccatcatcttccttcctccctatctctgtgtatctggatggcagccgctgcccaggggagtggctgtggggagggcaggtactgtctttgcctgtgggtccagc

SEQ ID NO: 518588 - DNA, 120 bp, Artificial Sequence
  ENSG00000165102_22 (sequence is synthesized)
tgagccatccctgctgggtgatgctgggcaagacccttggcccgtctgggccttggcttcctcacttgtgaaatgagcgggaagatgactctcagttccttccacctcttagacatggtg

SEQ ID NO: 518589 - DNA, 120 bp, Artificial Sequence
  ENSG00000165102_23 (sequence is synthesized)
aggtaacagacatcaaaagcttttctgaaatcttcagaagaaatagttccattacagaaaactcttcaaaataaatagtagtgaaaacttttaaaaactctcattggagtaagtcttttc

SEQ ID NO: 518590 - DNA, 120 bp, Artificial Sequence
  ENSG00000165102_24 (sequence is synthesized)
aagatgatcctccacaatggaggcagcgttcctacttgtcatcacacagctgaagacattgtttcttaggtgtgaaatcggggacaaaggacaaacagagacacacggcattgttcatgg

SEQ ID NO: 518591 - DNA, 120 bp, Artificial Sequence
  ENSG00000165102_25 (sequence is synthesized)
gaggcatcgtcaccctcctgggtgttctgtgggaatttcctgtgtgaggaaaacgtggccacagggttgtgctgtacccacccttccccggcgagatggccctcggcctgtgccgctgct

SEQ ID NO: 518592 - DNA, 120 bp, Artificial Sequence
  ENSG00000165102_26 (sequence is synthesized)
tccaccctcgccactccatggcagcttttggtctgtttccggctctgccctctgccctgaactctcatccggcttgtacctgcctgctggacccctccacctggaggccagcccatgtct

SEQ ID NO: 518593 - DNA, 120 bp, Artificial Sequence
  ENSG00000165102_27 (sequence is synthesized)
caggcccagccctagcctcttctcctcaaattctaagtgttttctctttaggtttccctggctttgtgaatggatcatgtgtctctaggtataaacctgacatcatctttccacccggct

SEQ ID NO: 518594 - DNA, 120 bp, Artificial Sequence
  ENSG00000165102_28 (sequence is synthesized)
tacctccaccagatctccccagttctgtctccatcttctacctgcagctgctctgttctcatggtcactgctgcatcactgagtctggacccttgttatcattttcaaactggcctcctt

SEQ ID NO: 518595 - DNA, 120 bp, Artificial Sequence
  ENSG00000165102_29 (sequence is synthesized)
ccctcgttccccacttcttaaagtcacctgtccattgccaccagattaagctttctccagccagatcacctctctctgagaaacctccattgacatggaaacaccattgtctggcacaca

SEQ ID NO: 518596 - DNA, 120 bp, Artificial Sequence
  ENSG00000165102_30 (sequence is synthesized)
tactcacatactcaccttcccgtcttgatccccacacatctttccagcctcccctcccactccactccctgctctctcctccacctccccatcctcttgtctcccctcccctctgaatcc

SEQ ID NO: 518597 - DNA, 120 bp, Artificial Sequence
  ENSG00000165102_31 (sequence is synthesized)
agcccagcggggcttctcctgcctccatcacatcacagaagtacctcctgcttctggttttaattagagccttccccgattacattttcctctgaattttttcctatctacatttgatct

SEQ ID NO: 518598 - DNA, 120 bp, Artificial Sequence
  ENSG00000165102_32 (sequence is synthesized)
gtcatgtttaaaccccctacttctaagggaacttctctaatctcttatcctcatccccaaatagtgttttcttcctctgggttcttataatgttggtatcaatctcacagcatttagtgc

SEQ ID NO: 518599 - DNA, 120 bp, Artificial Sequence
  ENSG00000165102_33 (sequence is synthesized)
ttcctgcctggtgtgacagttacctgtgtgcatgtgcaatttctaatttcccacgctagactgtgagcttcctaaggcaagaatcatgccttgttggtttctgtattcctcatggtgcca

SEQ ID NO: 518600 - DNA, 120 bp, Artificial Sequence
  ENSG00000165102_34 (sequence is synthesized)
aacacagtgccttctacattgcaggcgctgaataaacatttttaaagcaaaatgatgtggatttttaaaataaatatttaagtgctggtaagatgagcatgtatccggggtgcccatgaa

SEQ ID NO: 518601 - DNA, 120 bp, Artificial Sequence
  ENSG00000165102_35 (sequence is synthesized)
atgttcttggggccgtgtggggacagtcgtcattcctcctcctgccacccttttctttcagtgagtcactgtggatggtcccagctgtgtcatcccaaagttcagcagggaaagctgagc

SEQ ID NO: 518602 - DNA, 120 bp, Artificial Sequence
  ENSG00000165102_36 (sequence is synthesized)
tgggcctctccaggtgagttttctagaagcatttctcaaactgtgggttacatcaacttgggtgtcttgagctgtaaggaaggaactccggagtcagctgggctacaggggagcttctct

SEQ ID NO: 518603 - DNA, 120 bp, Artificial Sequence
  ENSG00000165102_37 (sequence is synthesized)
aagtcctgcgggaggccagacccagcctgagcttgctgttagctagcggaggcagctgctggtggcccaggtgctcgacaccaggcatcccctctcctcccacgaagggtgtgccataat

SEQ ID NO: 518604 - DNA, 120 bp, Artificial Sequence
  ENSG00000165102_38 (sequence is synthesized)
ccccttcaacaggaaatgcttcccagaagcctctcagcagcctcccctcctgtcctatcagctagaagcgcctcgcttgtcccaagaccagcagggacagggaactgtccgagcccgtgg

SEQ ID NO: 518605 - DNA, 120 bp, Artificial Sequence
  ENSG00000165102_39 (sequence is synthesized)
ctgtgtggaggaaggcgacccccagcacaagattggtttcctttgggaagggaagagggagtgtgttggggtaaggggtagagcagaggaatggtcagggggcaacaaccgctgacagct

SEQ ID NO: 518606 - DNA, 120 bp, Artificial Sequence
  ENSG00000165102_40 (sequence is synthesized)
gcaacaggtgcatggcatctcacagggaggcagggaggtgcgagctcctaagtaatggagcaaaaaaattctattctgtagaatggggagagaaaatgtgacattttaatttttttttgc

SEQ ID NO: 518607 - DNA, 120 bp, Artificial Sequence
  ENSG00000165102_41 (sequence is synthesized)
atttatattcctaattcctacttaaagtgaatatactgccgctgtagatcataaaatgtatcttttccatggccaacaaggggcatcttttataaatgcataataacccagtttgtatca

SEQ ID NO: 518608 - DNA, 120 bp, Artificial Sequence
  ENSG00000165102_42 (sequence is synthesized)
aagggtatcgacttaagtgaaatttcaacatgctgttactttttccttttaatgtaattctgttttccaaataaatgggggagacaaatggactttgagtaaatttcttagcatatcaaa

SEQ ID NO: 518609 - DNA, 83 bp, Artificial Sequence
  ENSG00000165102_43 (sequence is synthesized)
ggggtggctgctgtgtcttgggacaaggtgcgcattcctggtgtgctgcagcgattgggagtgacatactttgtggttgctgt

SEQ ID NO: 518610 - DNA, 120 bp, Artificial Sequence
  ENSG00000165102_44 (sequence is synthesized)
ggcatcctgggcaccatcaactccatcgtgatggcctttttaggagttcagtgctgcccagactgggtcaccaaacaggcctgtctgacggaacccttgtcacctttgtggagaattctc

SEQ ID NO: 518611 - DNA, 120 bp, Artificial Sequence
  ENSG00000165102_45 (sequence is synthesized)
tttgggccctgcctggaagtaagagccacggagcctgcccaggcaggaaaaatactattgtattacaaggctcggaccaaagacatcctgattcgattcactgcttggtgttgtattctt

SEQ ID NO: 518612 - DNA, 120 bp, Artificial Sequence
  ENSG00000165102_46 (sequence is synthesized)
agcacctacttcagaagggtgttgcaaggattgaataagttaattcatgtaaagttctaagaactggcacataaaaaatgttgattaatattagctattactataaattatttttaaagc

SEQ ID NO: 518613 - DNA, 120 bp, Artificial Sequence
  ENSG00000165102_47 (sequence is synthesized)
ttctcatcctttgatgttttcaaaaatgaatacctaatttcagagggattgtatgtgaagtccatatttcactgtttttaaatgtttccctgcctcccccaccctgcctctggttccacc

SEQ ID NO: 518614 - DNA, 120 bp, Artificial Sequence
  ENSG00000165102_48 (sequence is synthesized)
ctgtcccggtccctcttcctagtgctgcccagactgggtcaccaaacaggcctgtctgacggaacccttgtcacctttgtggagaattctctttgggccctgcctggaagtaagagccac

SEQ ID NO: 518615 - DNA, 120 bp, Artificial Sequence
  ENSG00000165102_49 (sequence is synthesized)
ggagcctgcccaggtgccccttctcctcctttccccatgacctgggcttctgcattccctgcagcagtggagatgtggtgtggctaccatgcttcccccgagctctgtgcctgctgcccc

SEQ ID NO: 518616 - DNA, 120 bp, Artificial Sequence
  ENSG00000165102_50 (sequence is synthesized)
attctgctcaggagcctcttcctgcggggaccctctggtgctctggcctcacctctgtggctcgtcctctctgatgcctcctcctccccagagagggcgttcatctctggtcccatgctc

SEQ ID NO: 518617 - DNA, 120 bp, Artificial Sequence
  ENSG00000165102_51 (sequence is synthesized)
ctctgttagtctccactagtcaaaggcagaggtgatgtttcccgcctccctgtaatcccagcacctagtagcgtgcccagcaagtgaatctctttgtcaggtagttaagacagtggatta

SEQ ID NO: 518618 - DNA, 120 bp, Artificial Sequence
  ENSG00000165102_52 (sequence is synthesized)
cggtctgccctcttctcttccacgggttgactccaatctcctgtttttcagatgatgctggagcctctcttctgagacgggcatgtgttatgtggttaggaagtccttccaaaagtcctg

SEQ ID NO: 518619 - DNA, 120 bp, Artificial Sequence
  ENSG00000165102_53 (sequence is synthesized)
gtgttatgtggttaggaagtccttccaaaagtcctgttactggatagttctcatacttgacccagtgcctacacgtgtgtataaaagagtgatttggggccgggcgcggtggctcacgcc

SEQ ID NO: 518620 - DNA, 120 bp, Artificial Sequence
  ENSG00000165102_54 (sequence is synthesized)
gggcatcctgggcaccatcaactccatcgtgatggcctttttaggagttcaggtatttgttcatttcattaggttactttttctgacaatttatgatattttattcactcatttaaaaac

SEQ ID NO: 518621 - DNA, 120 bp, Artificial Sequence
  ENSG00000165102_55 (sequence is synthesized)
catttcattaaaataattggaagcatattctctcttgtgctatgggcctaatatattctgttatctttgacagattgtgcagaaccaaaagttactgaaattcagcacattcaagtaatt

SEQ ID NO: 518622 - DNA, 120 bp, Artificial Sequence
  ENSG00000165102_56 (sequence is synthesized)
agatataattcttatattctcaaaaaaattcttacttatatggcttatcttagcacggcagtttctagataaaaggtttcccttgccaagctgcagtggctcatgcctataacgccaaca

SEQ ID NO: 518623 - DNA, 120 bp, Artificial Sequence
  ENSG00000165102_57 (sequence is synthesized)
gttcttccggtcatacggttgggtagcagatagggcagggagggtcagtcagtggcgttcttggggtgatacagctgggtagtgggtagggcagggagagtggcttgtgttgggcctgca

SEQ ID NO: 518624 - DNA, 120 bp, Artificial Sequence
  ENSG00000165102_58 (sequence is synthesized)
aggtcctagcagacgtgcgggttgattgcaaattcctaataggaaagagccagggtcaggcacaggcctggctttatccccacacctgagtaagacgctttggttcttatcccagtctct

SEQ ID NO: 518625 - DNA, 120 bp, Artificial Sequence
  ENSG00000165102_59 (sequence is synthesized)
catctggccagcttcctgttttgagtttgagccatgtccctgactgaccctccctctattaagagggattggcctgtttttggaagctgggctgagcccatgtctcttgaccgtatatat

SEQ ID NO: 518626 - DNA, 120 bp, Artificial Sequence
  ENSG00000165102_60 (sequence is synthesized)
tccatgtccaagagcttaaaaaagacttacttagatgcaatataggtatgtcttcccctttaggaaacaaataatgttgtcctgggatgagaggagaagtcctggctaacacttgaccta

SEQ ID NO: 518627 - DNA, 120 bp, Artificial Sequence
  ENSG00000165102_61 (sequence is synthesized)
gtctcaggggtaacagaggcagaagagaatccgcatataagtggacctgcgcagttcaaacctgtgttgttcaaggatcagctgtacattttggtgatgaaataattttgtatttagaaa

SEQ ID NO: 518628 - DNA, 120 bp, Artificial Sequence
  ENSG00000165102_62 (sequence is synthesized)
tacggcctttatctctgtagcactttctagttgatattgtgcttttccatatattccgtatattcatgtaatccctacatacactttctaggtagatcactggagcggtcagtccagtgg

SEQ ID NO: 518629 - DNA, 120 bp, Artificial Sequence
  ENSG00000165102_63 (sequence is synthesized)
caaggctcggaccaaagacatcctgattcgattcactgcttggtgttgtattcttgtaagtaagcagcattcctcgctaaaattcctttccttcacatgtatagatatttaaaaggaata

SEQ ID NO: 518630 - DNA, 120 bp, Artificial Sequence
  ENSG00000165102_64 (sequence is synthesized)
aaatgtttagcaacactgagctagccattgtcaccacatggcagcaggtaccattttcttcacttgaataacagagaggaacaaatctttccacctaaatgcacagatttattttcttag

SEQ ID NO: 518631 - DNA, 120 bp, Artificial Sequence
  ENSG00000165102_65 (sequence is synthesized)
gaaaatgtctttatcaataaggcagtgtttgccatcagatagccaggaatgcctgaagaaatgtgaggtatgggctctgtgtggagaggcgtatcagagagactgggcaaatcagaccag

SEQ ID NO: 518632 - DNA, 120 bp, Artificial Sequence
  ENSG00000165102_66 (sequence is synthesized)
gttgcagacatcaacttccagattatatgggaaagagagttgcaaggttgactgtttgttcatttcatcctgaccgcagccatgcctcctcttcagagtcactgtcatttaatcagtaag

SEQ ID NO: 518633 - DNA, 120 bp, Artificial Sequence
  ENSG00000165102_67 (sequence is synthesized)
cttaccctcttcaactcagtagaatggtgaagagattttgggagagtatttttcagttcatacatttaaaaaaatatgtttccatttaaaagagaaaaatataaggcacaagtttcagcc

SEQ ID NO: 518634 - DNA, 120 bp, Artificial Sequence
  ENSG00000165102_68 (sequence is synthesized)
acaggagaggagctgcctttctcttcgagacatcacgtccagctggccccagtggctgctcatcctggtgctggaaggcctgtggctgggcttgacattcctcctgccagtccctgggtg

SEQ ID NO: 518635 - DNA, 120 bp, Artificial Sequence
  ENSG00000165105_0 (sequence is synthesized)
agtcgcaggaggcgctccttggcggtgcctggagcccgggcgcaccccaccgctcccgggacctgttgggggctggcccgaaccgtcgtcgaagggagccgctcggccacccccgacgtt

SEQ ID NO: 518636 - DNA, 120 bp, Artificial Sequence
  ENSG00000165105_1 (sequence is synthesized)
cctcgccccgcccgacgttccctcaagtggccgaaccagccggacgagccaaactcgccgggcctcccggcggcagcaggtggccccgtccttccagggagggccctgcgccccgcggcg

SEQ ID NO: 518637 - DNA, 120 bp, Artificial Sequence
  ENSG00000165105_2 (sequence is synthesized)
ctccggagccctctcggccgcccccgccaggcgggatggaggcggatggggacggagaggagctggcccggctgcgctcagtcttcgccgcctgcgacgcgaaccgctcggggcgcctgg

SEQ ID NO: 518638 - DNA, 120 bp, Artificial Sequence
  ENSG00000165105_3 (sequence is synthesized)
agcgcgaggagttccgggcactgtgcacggagctgcgggtgcggccggccgacgccgaggcagtattccagcggctggacgccgaccgtgacggcgccatcaccttccaggagttcgcgc

SEQ ID NO: 518639 - DNA, 120 bp, Artificial Sequence
  ENSG00000165105_4 (sequence is synthesized)
gtggcttcctcgggtccctccgcggggggcggcgccgggactggggtcctctggatcccgcgcccgccgtgtctgaggcggggccggagacacacgacagcgaggaggacgaaggcgacg

SEQ ID NO: 518640 - DNA, 120 bp, Artificial Sequence
  ENSG00000165105_5 (sequence is synthesized)
aggacgcggcggcggcgctggccacctcgtgcggcccggcgagtcccggccgggcttggcaggatttccaggcgcgacttggggacgaagccaagttcattcccagagaagagcaagtta

SEQ ID NO: 518641 - DNA, 120 bp, Artificial Sequence
  ENSG00000165105_6 (sequence is synthesized)
gtaccttgtaccaaaacatcaaccttgtggagccaagattaattcagccatatgaacatgttataaagaacttcatccgtgagatcagacttcaaagcacagaaatggaaaatttggcca

SEQ ID NO: 518642 - DNA, 120 bp, Artificial Sequence
  ENSG00000165105_7 (sequence is synthesized)
ttgcggtgaagagagcccaggacaaggcagctatgcagttgagtgagttggaagaggaaatggatcagaggattcaggctgcagaacataagacacggaaagacgaaaaacgcaaagctg

SEQ ID NO: 518643 - DNA, 120 bp, Artificial Sequence
  ENSG00000165105_8 (sequence is synthesized)
aggaagccctcagtgacctcagacgtcagtatgaaactgaagtaggagatctgcaggtgaccattaaaaagctaagaaagctcgaagaacaatcaaaacgcgtaagtcaaaaggaagatg

SEQ ID NO: 518644 - DNA, 120 bp, Artificial Sequence
  ENSG00000165105_9 (sequence is synthesized)
tggctgcattgaaaaaacaaatttatgatttatcaatggaaaaccagaaagttaagaaagaccttttagaagcacagacaaacatagcctttcttcagagtgagttagatgctttgaaaa

SEQ ID NO: 518645 - DNA, 120 bp, Artificial Sequence
  ENSG00000165105_10 (sequence is synthesized)
gtgattatgctgatcagagtctgaatactgaaagggatctggaaataatccgagcatacacagaagatcgaaatagtcttgagaggcaaattgaaatactccaaacagctaaccggaagc

SEQ ID NO: 518646 - DNA, 120 bp, Artificial Sequence
  ENSG00000165105_11 (sequence is synthesized)
tacatgacagtaatgatggccttagaagtgcccttgaaaacagttatagcaagttcaacagatctttgcatataaataatatctcaccagggaatacaatttctagaagcagtcccaaat

SEQ ID NO: 518647 - DNA, 120 bp, Artificial Sequence
  ENSG00000165105_12 (sequence is synthesized)
tcattggtcattcccctcaacctctaggctatgacaggtcatcccgctcttcctatgtggatgaggactgtgactccctggccctctgtgatcctctgcagaggacaaattgtgaagttg

SEQ ID NO: 518648 - DNA, 120 bp, Artificial Sequence
  ENSG00000165105_13 (sequence is synthesized)
acagcctgcctgaaagctgcttcgacagcggcttgtctaccttgagagatcccaatgagtatgactcagaagtggaatacaagcaccagaggggatttcagaggtcacacggggtgcagg

SEQ ID NO: 518649 - DNA, 120 bp, Artificial Sequence
  ENSG00000165105_14 (sequence is synthesized)
agagctttggaggtgatgcttcagacacagatgttcctgacataagggatgaagagacatttggtttagaagatgtggcttccgtcttagactggaagccccaagggtctgttagtgaag

SEQ ID NO: 518650 - DNA, 120 bp, Artificial Sequence
  ENSG00000165105_15 (sequence is synthesized)
gcagcattgttagttcatcaagaaagcccatctcagcactctcgccccagacagacctggtagatgacaacgctaaatcttttagctcacagaaggcttacaagattgtacttgctgggg

SEQ ID NO: 518651 - DNA, 120 bp, Artificial Sequence
  ENSG00000165105_16 (sequence is synthesized)
acgctgcagtggggaagtctagtttcctcatgagactttgcaagaatgaatttcgagaaaatataagcgccaccctgggagttgatttccaaatgaaaaccctcattgtggatggagaac

SEQ ID NO: 518652 - DNA, 120 bp, Artificial Sequence
  ENSG00000165105_17 (sequence is synthesized)
gaacagttctgcagctctgggatacagctggtcaggagagattcagaagtattgccaagtcttacttcagaaaggcagatggtgttttgctgctgtatgatgttacatgtgagaaaagct

SEQ ID NO: 518653 - DNA, 120 bp, Artificial Sequence
  ENSG00000165105_18 (sequence is synthesized)
ttcttaacatacgagaatgggtagatatgattgaggatgcagcccatgagactgttcccattatgctggtaggaaacaaggctgacattcgtgacactgctgctacagagggacaaaaat

SEQ ID NO: 518654 - DNA, 120 bp, Artificial Sequence
  ENSG00000165105_19 (sequence is synthesized)
gtgtcccagggcactttggagagaaactggccatgacgtatggggcattattctgtgaaacaagtgccaaagatggttctaacatagtggaggctgttctgcaccttgctcgagaagtga

SEQ ID NO: 518655 - DNA, 120 bp, Artificial Sequence
  ENSG00000165105_20 (sequence is synthesized)
aaaagagaactgacaaggatgacagcagatccattaccaatctaaccgggaccaattccaaaaagtcaccacagatgaagaattgttgcaatggctaaatcccaaacatccttggcctgt

SEQ ID NO: 518656 - DNA, 120 bp, Artificial Sequence
  ENSG00000165105_21 (sequence is synthesized)
gaagtcttcatttccagaatactgaatttgtgtgacttatttggctcttaacagagtggcacatcctactgacactgtcctatggagagttacagtgcaggaaacctgaacccagctctc

SEQ ID NO: 518657 - DNA, 120 bp, Artificial Sequence
  ENSG00000165105_22 (sequence is synthesized)
aggtccctctggaactttggctcttctttgttttgtctcagtgagtgatttgggccctctggctaaatagactagtcatgtccttacaggtcttaaaagataacatgtaaatgtttttaa

SEQ ID NO: 518658 - DNA, 120 bp, Artificial Sequence
  ENSG00000165105_23 (sequence is synthesized)
ataattagattcatgtggtagctgaattaggttacccacaaagtcagcatttaaatatttgatactaaagttctagtaagaagggattctcatcctagctttgctgttaactggccttgt

SEQ ID NO: 518659 - DNA, 120 bp, Artificial Sequence
  ENSG00000165105_24 (sequence is synthesized)
gaccttggacatgtcacaagcccatgtcggatctgtttcttcatctgtaaaatgtgcagcttgccctcaaaggccttgcagcccttggcacctcagattctgtgggaagcagtaggacag

SEQ ID NO: 518660 - DNA, 120 bp, Artificial Sequence
  ENSG00000165105_25 (sequence is synthesized)
agagtgtggtggcccacagttaataatagaactatggttattcctgctttttaatattggagtattgatttttctcacttctgaaataaggacagaatttgattaaaaaatggaaacaga

SEQ ID NO: 518661 - DNA, 120 bp, Artificial Sequence
  ENSG00000165105_26 (sequence is synthesized)
aatatctattttttatgtataaagaaacatgtttgagacaaaaatagttgtatataaaaggatatttcataatctcagaatagttacaaagctcactgcttgaatttggtgttaaaaatt

SEQ ID NO: 518662 - DNA, 120 bp, Artificial Sequence
  ENSG00000165105_27 (sequence is synthesized)
ctaatggaaacatgtaaagccacatactactgaaagcacaatgcccaggaaagttgtcactcttcacttaagggagtggttgccaggggctgagaaagggaggatggggagtgactgcta

SEQ ID NO: 518663 - DNA, 120 bp, Artificial Sequence
  ENSG00000165105_28 (sequence is synthesized)
ataggtatgtggtttctttgggcgatgatgagaatgttctggaattggaatagtggtgatagttgtataactgtttgaatgtactaggaaccactgaattgtatactttgaaagggtgaa

SEQ ID NO: 518664 - DNA, 120 bp, Artificial Sequence
  ENSG00000165105_29 (sequence is synthesized)
ttttatggttgtgaattatctcactaaaaaaaatgctagtacttagagtgatgtaacattttgcaaaattttcattttcgtatccctgctgatttcaaaccttcccatggtttagaagca

SEQ ID NO: 518665 - DNA, 120 bp, Artificial Sequence
  ENSG00000165105_30 (sequence is synthesized)
taacctgtaatgtaatgcaagtcccctaactccctggttgctaacattaacttccttaagtaataatcaatgaaagaaattctatgcatggttttgaaataatatccttgaaagaggaat

SEQ ID NO: 518666 - DNA, 120 bp, Artificial Sequence
  ENSG00000165105_31 (sequence is synthesized)
caccattaggaaaggtgagtcagggtcctttgtttaatgtgactagtggctcatcatcaccagtgacctggttgggcctactctccttccagaacctgcattgcttcccagacctcccca

SEQ ID NO: 518667 - DNA, 120 bp, Artificial Sequence
  ENSG00000165105_32 (sequence is synthesized)
ctgagatgcctctaagagccaaaggagtcaacacttgagcctagggtgggctacaacaaaagattctaatttaccttgcttcatctaggtccaggccccaagtagcttgctgaaggaact

SEQ ID NO: 518668 - DNA, 120 bp, Artificial Sequence
  ENSG00000165105_33 (sequence is synthesized)
taaaaagtagctgttatttattgtattgtataagctaaaaacatttatttttgttgaatcgaaacaattccatgtagcaatcttttttctgttcacggtgtttgtgatagaaccttaaat

SEQ ID NO: 518669 - DNA, 120 bp, Artificial Sequence
  ENSG00000165105_34 (sequence is synthesized)
tccgcaagcatcagttttttgaaaaaatgggaattgaccggatagttacaggcaaagattataaatagctacaacatcatttaacttttataaacatgccttctctctattgaagacatc

SEQ ID NO: 518670 - DNA, 120 bp, Artificial Sequence
  ENSG00000165105_35 (sequence is synthesized)
tgatatttttgctggaaagttggatctatcctcagtaactctgccatgaattcctgtttcctggttccagaaaaagaaaagattacatttctgatcataaagaatgtcttgcatatggga

SEQ ID NO: 518671 - DNA, 120 bp, Artificial Sequence
  ENSG00000165105_36 (sequence is synthesized)
aatttttcaaaataaggggggtattatttatgtggcatgggaaaacttttgccatggctgtttgtcttagtggcatcttttgatgacattggatcagatatatgtagatgctgatatatg

SEQ ID NO: 518672 - DNA, 120 bp, Artificial Sequence
  ENSG00000165105_37 (sequence is synthesized)
ggacacatgtttaggttttggtgcagttgcacaaaactgtgttagtttatatgttactgtgttgcctttatttattctctccaaagtgtctctttatatttgttttacaatctgtgaaag

SEQ ID NO: 518673 - DNA, 120 bp, Artificial Sequence
  ENSG00000165105_38 (sequence is synthesized)
agtataccataatacagaagtattttcatagtctttacctctggattgtcctgtcagtatagccacgttgatgagattacaccagtgcctttgatggtcaaccaatcatctttaagtatt

SEQ ID NO: 518674 - DNA, 120 bp, Artificial Sequence
  ENSG00000165105_39 (sequence is synthesized)
tgagccctgataaatattttggtaacataatccaaattagagacttagagctctggttagcaatcatgtttaaagagaagcttcttaaagctctgtatgctgggagattcatgattatta

SEQ ID NO: 518675 - DNA, 120 bp, Artificial Sequence
  ENSG00000165105_40 (sequence is synthesized)
ccaacgttttgatttcatgaaggtgttctcaaatttaaagcacattttcagtaagaacaaaaatatttaatgtttttatcttagacttgatacatttgcatattactatggaagttattc

SEQ ID NO: 518676 - DNA, 120 bp, Artificial Sequence
  ENSG00000165105_41 (sequence is synthesized)
accttgtccctgtttttctttaagatattttaaaatcatagttatactacagtccttttttaaatgtatcctgatacattgtaaaatattttaatttcattgtggaaaataatgttggat

SEQ ID NO: 518677 - DNA, 120 bp, Artificial Sequence
  ENSG00000165105_42 (sequence is synthesized)
aaggagatatttttcactgttaacttttagcccatgcattttcataatttatttttttcacttgctgctttatatgacatatgtgacatttgattatttaacacttgatgtgatctgcat

SEQ ID NO: 518678 - DNA, 120 bp, Artificial Sequence
  ENSG00000165105_43 (sequence is synthesized)
aaacccaagttgcacaaccctcctgctgaagataaaattgaggttaaagataaagatttattttcatatttgtacagtgatcggcttcagtgatggtttttgtgggcatttattgtgtgt

SEQ ID NO: 518679 - DNA, 120 bp, Artificial Sequence
  ENSG00000165105_44 (sequence is synthesized)
gtgtaagaaatttcatatgtatatattaagtaggcctctgagtattgaataattgttttatgattttgatttatatggtttacattttcattgtgtgggccatatttcgtttatactgtt

SEQ ID NO: 518680 - DNA, 120 bp, Artificial Sequence
  ENSG00000165105_45 (sequence is synthesized)
tatttctcttcaaaccttaataattataccataaagtgtaatttttatagcaatgcaaatgtctaaggaactacaaatattttctacgttgtaaattcaataaagcttgcttcctttggc

SEQ ID NO: 518681 - DNA, 120 bp, Artificial Sequence
  ENSG00000165113_0 (sequence is synthesized)
acctccgcggtccgccccggcgccccgggacccgttagtgcccagcctgtgggccgaccgcgacccccgcccggcgcgagcctgcccccagctctgccgacacttgacccagaccagtcc

SEQ ID NO: 518682 - DNA, 120 bp, Artificial Sequence
  ENSG00000165113_1 (sequence is synthesized)
cgagcctgcccccagctctgccgacacttgacccagaccagtcccaacgcccagtgcggccgcccggggagccgcgggagaggcggcggcggggggaggagggagaggagggccgagccg

SEQ ID NO: 518683 - DNA, 120 bp, Artificial Sequence
  ENSG00000165113_2 (sequence is synthesized)
cacgggaggcccggttttgaagccgcttctctgcccgagttaggtttcgcccagcgcaatttctttctctatgtactttgcgaataagtttcggagcatcggttaacagcctatgggtga

SEQ ID NO: 518684 - DNA, 120 bp, Artificial Sequence
  ENSG00000165113_3 (sequence is synthesized)
aatttggctttcattcatgaatgagaaattattcttgacagaagtattttaaaagaaaaatctttacgatggcctcagcagtacttagttctgttcccaccaccgcttctcgttttgccc

SEQ ID NO: 518685 - DNA, 120 bp, Artificial Sequence
  ENSG00000165113_4 (sequence is synthesized)
tgttacaagtggatagtggcagtggctctgattctgaacctggaaaaggtaaaggtcgaaatactggaaagtctcaaactttaggaagcaagtcaactacaaatgagaaaaaaagagaga

SEQ ID NO: 518686 - DNA, 120 bp, Artificial Sequence
  ENSG00000165113_5 (sequence is synthesized)
aaagaagaaaaaagaaggaacagcaacagagtgaagcaaatgagctcaggaatcttgcttttaagaaaattccccagaaatcctcccatgctgtttgtaacgctcaacatgatcttccat

SEQ ID NO: 518687 - DNA, 120 bp, Artificial Sequence
  ENSG00000165113_6 (sequence is synthesized)
tgtcaaacccagtacagaaggattcacgagaagaaaattggcaagagtggagacaaagagatgagcagctgacatctgaaatgtttgaagcagatcttgagaaggcattgttactaagta

SEQ ID NO: 518688 - DNA, 120 bp, Artificial Sequence
  ENSG00000165113_7 (sequence is synthesized)
actagaatatgaagagcacaaaaaggagtatgaagatgctgaaaatacttcaactcagtccaaagttatgaataaaaaagataaaagaaagaatcatcagggaaaagacagacctctcac

SEQ ID NO: 518689 - DNA, 120 bp, Artificial Sequence
  ENSG00000165113_8 (sequence is synthesized)
agtatcactaaaagattttcattcggaagatcacattagtaaaaagactgaggaattgagttcttctcagactttatcacatgatggaggattcttcaatagactggaagatgatgttca

SEQ ID NO: 518690 - DNA, 120 bp, Artificial Sequence
  ENSG00000165113_9 (sequence is synthesized)
taaaattcttattagagaaaaacgaagagaacagcttacagaatataatggaacagataattgtacagctcatgaacacaaccaggaagtggttctgaaagatggaagaattgaaagact

SEQ ID NO: 518691 - DNA, 120 bp, Artificial Sequence
  ENSG00000165113_10 (sequence is synthesized)
aaagttagagcttgaaaggaaagatgctgaaatccagaagctgaaaaatgtaatcactcaatgggaggcaaagtataaggaagtaaaggcaagaaatgcacaattattgaaaatgcttca

SEQ ID NO: 518692 - DNA, 120 bp, Artificial Sequence
  ENSG00000165113_11 (sequence is synthesized)
ggaaggtgaaatgaaagataaggcagaaatacttctgcaagttgatgaatcacaaagtatcaagaatgagctcactattcaggtgacttcacttcatgctgcattagaacaagaaagatc

SEQ ID NO: 518693 - DNA, 120 bp, Artificial Sequence
  ENSG00000165113_12 (sequence is synthesized)
taaagtgaaagtattacaagcagagttagccaaataccagggtggcagaaaagggaaaagaaactctgaatccgaccagtgtaggtgattacattagcctttgaagtcaacacaaagttt

SEQ ID NO: 518694 - DNA, 120 bp, Artificial Sequence
  ENSG00000165113_13 (sequence is synthesized)
aaaacttccaggattttgcaaagttgtatatatttaatgctgtgcaactgctaaactatgcagtttttcttgaaggaactaaaagcaactagctccctaatggtctataattttatttct

SEQ ID NO: 518695 - DNA, 120 bp, Artificial Sequence
  ENSG00000165113_14 (sequence is synthesized)
tttggcttaaagtgaaaaagaagaaatagagaattccagcagaattcagtggttgtctactatccatacttcttatcactttagtttttcatcagtcaataaaattaatttactcttcca

SEQ ID NO: 518696 - DNA, 120 bp, Artificial Sequence
  ENSG00000165113_15 (sequence is synthesized)
tccctcgggaggcctccctccttccacccgcttgaggagagcccttctcttccctgtgaccccgaagaccgtggcgccgccgcctacgtgaggcgtttggaccctgcccggcccccgtag

SEQ ID NO: 518697 - DNA, 120 bp, Artificial Sequence
  ENSG00000165113_16 (sequence is synthesized)
aaaatatggatgttaatgtgggaacacaatcctttttgttcataaatgtatacttgtatcatttttgtaatgtgagaagaagctaagccatctggaaaaagaaattgaaaaagagttgaa

SEQ ID NO: 518698 - DNA, 120 bp, Artificial Sequence
  ENSG00000165113_17 (sequence is synthesized)
agatatttgggtaaagtactaattcatgccagccaaaaattataacagtgattatttagttagtgaaataacaaacgattagtgaatcttcaactgagaaggtatagaactgtcctataa

SEQ ID NO: 518699 - DNA, 120 bp, Artificial Sequence
  ENSG00000165113_18 (sequence is synthesized)
aattcaatatccactacaagtctatcacattttaaatttaaaattaaagtttaaaattaaaaattcatttttctcagtcacactagccacattgctagtgttctttcagtagtcgcatat

SEQ ID NO: 518700 - DNA, 120 bp, Artificial Sequence
  ENSG00000165113_19 (sequence is synthesized)
tggacagtgacaaatacagagcagatgtagaaagtcctagtatattgccagacagtactgctttagaactgtggctcatttttcttttggttttcatttaaattattttgaattgtataa

SEQ ID NO: 518701 - DNA, 120 bp, Artificial Sequence
  ENSG00000165113_20 (sequence is synthesized)
gggttttatctgaggaagaaaagaagattatttaggaaaatttagtattatcttgagttttctccacttttatccctctctcctttaattttcaatcacgtataatattgatatgtatta

SEQ ID NO: 518702 - DNA, 120 bp, Artificial Sequence
  ENSG00000165113_21 (sequence is synthesized)
gaatacattttcctccatcctgtttgtttctaaagtaattatatctttgagcaagccaagaattcagagctctgtaagttgacagtaaatcattaattatatcacttacttttaaaaaaa

SEQ ID NO: 518703 - DNA, 120 bp, Artificial Sequence
  ENSG00000165113_22 (sequence is synthesized)
tctatattcatgaaatggcatattgtgtttaataatgcttattgagttattttttagtattcttatatttttgagtaataatcactcataatttttagtgtcctaaactgaatgttgcct

SEQ ID NO: 518704 - DNA, 120 bp, Artificial Sequence
  ENSG00000165113_23 (sequence is synthesized)
ttgacatctattatagtgccaattatttggtaagatttttttattaaggtaaaaagtaagattatatcatatataatagataacaatgaagaggagaaatggaaatctcaaaattggaag

SEQ ID NO: 518705 - DNA, 120 bp, Artificial Sequence
  ENSG00000165113_24 (sequence is synthesized)
catattgttttttaacatatttgctttcttttcctctgtatatagtaatatgtatggttattttgctcatgtgatgtaatgatactgtctgtttattgtgaaactttttttttgtagctg

SEQ ID NO: 518706 - DNA, 120 bp, Artificial Sequence
  ENSG00000165113_25 (sequence is synthesized)
agaaaagaagaatactaacatacagttttcctgagttaccttaagtgagttgaaaactaaaagccctatccctcaaggaacttacagtccagtgacattacttatggagagagtaaagca

SEQ ID NO: 518707 - DNA, 120 bp, Artificial Sequence
  ENSG00000165113_26 (sequence is synthesized)
aaagagatgagcagatggggagtaggaggcaatgaggaagtcaagaggaaggggatctgaagtactccatcttggacacatctgacatctgaaatgtttgaagcagatcttgagaaggca

SEQ ID NO: 518708 - DNA, 120 bp, Artificial Sequence
  ENSG00000165115_0 (sequence is synthesized)
gtggcagagcgaagctgaggagtccagcgctcgccgacaggggcctgggctgtcccgagccggaatccagatcttacataagatggaagtctctcacactagatactgaacattaaatag

SEQ ID NO: 518709 - DNA, 120 bp, Artificial Sequence
  ENSG00000165115_1 (sequence is synthesized)
aaaatctatttagtaaaatctaagttgccatggaagaaataccagtaaaagttgctgtaagaattagacctctgctttgcaaagaagctcttcataatcatcaagtttgtgtgagagtta

SEQ ID NO: 518710 - DNA, 120 bp, Artificial Sequence
  ENSG00000165115_2 (sequence is synthesized)
ttccaaacagccagcaagttatcattgggagagatagagtcttcacttttgattttgtttttggcaaaaattccactcaagatgaagtttataacacatgtataaagcccctagtgttgt

SEQ ID NO: 518711 - DNA, 120 bp, Artificial Sequence
  ENSG00000165115_3 (sequence is synthesized)
cactcattgagggctataatgcaactgtttttgcctatggacaaactggatctgggaagacatacaccattggagggggccatattgcttcagttgtggagggccaaaagggtatcattc

SEQ ID NO: 518712 - DNA, 120 bp, Artificial Sequence
  ENSG00000165115_4 (sequence is synthesized)
ctcgagctattcaagaaatatttcaaagcatctctgaacatcctagcattgactttaatgtaaaagtatcttatatagaagtgtacaaggaagacctaagagatcttctagaattggaga

SEQ ID NO: 518713 - DNA, 120 bp, Artificial Sequence
  ENSG00000165115_5 (sequence is synthesized)
catccatgaaggatcttcacatccgagaagatgaaaaaggaaacacagtgattgttggggccaaggaatgccatgtggagagtgcaggtgaagtgatgagtcttttggagatggggaatg

SEQ ID NO: 518714 - DNA, 120 bp, Artificial Sequence
  ENSG00000165115_6 (sequence is synthesized)
cagccagacatacaggtaccactcaaatgaatgagcactccagcagatcacatgcaatttttacaatcagcatttgtcaagttcataaaaatatggaggcagctgaagatggatcatggt

SEQ ID NO: 518715 - DNA, 120 bp, Artificial Sequence
  ENSG00000165115_7 (sequence is synthesized)
attcccctcggcatattgtctcaaagttccactttgtggatttggcaggatcagaaagagtaaccaaaacggggaatactggtgaacggttcaaagaatccattcaaatcaatagtggat

SEQ ID NO: 518716 - DNA, 120 bp, Artificial Sequence
  ENSG00000165115_8 (sequence is synthesized)
tgctggctttaggaaatgtaataagcgctcttggggacccacgcaggaagagttcacatattccatatagggatgctaaaattacccggcttctgaaagattctctgggaggcagtgcta

SEQ ID NO: 518717 - DNA, 120 bp, Artificial Sequence
  ENSG00000165115_9 (sequence is synthesized)
agactgtcatgatcacatgtgtcagcccctcctcctcgaattttgatgagtccttaaattctctcaaatatgccaacagagcacggaacattagaaacaaacccactgtaaacttcagcc

SEQ ID NO: 518718 - DNA, 120 bp, Artificial Sequence
  ENSG00000165115_10 (sequence is synthesized)
ccgagtcagaccgtatagatgaaatggaatttgagattaaattgcttcgagaagctttgcaaagccagcaggctggtgtcagccaaactacccagatcaatcgagaagggagtcctgata

SEQ ID NO: 518719 - DNA, 120 bp, Artificial Sequence
  ENSG00000165115_11 (sequence is synthesized)
caaataggattcattctcttgaggagcaagtagctcagcttcaaggagaatgtctgggttaccagtgttgtgtagaagaagcctttaccttcctggttgacctaaaagatactgtcagac

SEQ ID NO: 518720 - DNA, 120 bp, Artificial Sequence
  ENSG00000165115_12 (sequence is synthesized)
taaacgaaaagcagcaacacaaactgcaggagtggtttaacatgatccaagaggtcaggaaggctgtcctcacctcatttcgaggaatcggaggcactgcaagtctggaagaaggaccac

SEQ ID NO: 518721 - DNA, 120 bp, Artificial Sequence
  ENSG00000165115_13 (sequence is synthesized)
agcatgttacagttctccagctgaagagagagcttaagaaatgccagtgtgtgcttgctgctgatgaagtagtatttaatcagaaggaactggaggtgaaggaactgaagaatcaagtgc

SEQ ID NO: 518722 - DNA, 120 bp, Artificial Sequence
  ENSG00000165115_14 (sequence is synthesized)
agatgatggtacaggaaaacaaagggcatgctgtatctttgaaagaagcgcaaaaagtgaatagactgcagaatgaaaaaataatagaacaacaacttcttgtggatcaactgagtgaag

SEQ ID NO: 518723 - DNA, 120 bp, Artificial Sequence
  ENSG00000165115_15 (sequence is synthesized)
aactaacaaaacttaacctgtcagtgacttcttcagctaaagaaaattgtggagatgggccagatgccaggatccctgaaaggagaccatatactgtaccatttgatactcatttggggc

SEQ ID NO: 518724 - DNA, 120 bp, Artificial Sequence
  ENSG00000165115_16 (sequence is synthesized)
attatatttatatcccatcaagacaagattccaggaaggtccacacaagtccgcctatgtactctctggatcgaatatttgctggatttcgaacacgaagtcagatgctgttgggtcaca

SEQ ID NO: 518725 - DNA, 120 bp, Artificial Sequence
  ENSG00000165115_17 (sequence is synthesized)
tagaagaacaagataaggtcctccactgccaattttctgataacagtgatgatgaagaatcagaaggccaagagaaatctggaactagatgtagaagtcgttcatggattcagaagccag

SEQ ID NO: 518726 - DNA, 120 bp, Artificial Sequence
  ENSG00000165115_18 (sequence is synthesized)
actctgtttgttcccttgttgaattgagtgatactcaggatgaaacacaaaagtcagatttggagaatgaagatttaaagattgattgtctccaggagagtcaagaattgaatttgcaaa

SEQ ID NO: 518727 - DNA, 120 bp, Artificial Sequence
  ENSG00000165115_19 (sequence is synthesized)
aattaaagaattcagaacgcatacttactgaagctaaacaaaaaatgagagaacttacaattaacatcaagatgaaggaagatctgattaaagaattaataaaaacaggtaatgatgcca

SEQ ID NO: 518728 - DNA, 120 bp, Artificial Sequence
  ENSG00000165115_20 (sequence is synthesized)
agtctgtaagcaagcagtattctttgaaagtaacaaagctagagcatgatgcagaacaggcaaaagtcgaactgattgaaacacaaaagcagctacaggagctggaaaacaaagatcttt

SEQ ID NO: 518729 - DNA, 120 bp, Artificial Sequence
  ENSG00000165115_21 (sequence is synthesized)
ctgatgttgcaatgaaggtaaaattacagaaagagtttcgtaaaaagatggatgctgcaaagctgagagttcaggtcttgcagaagaagcaacaagatagtaagaaactggcatcactgt

SEQ ID NO: 518730 - DNA, 120 bp, Artificial Sequence
  ENSG00000165115_22 (sequence is synthesized)
caatccaaaatgagaaacgtgctaatgagctagagcagagtgtagatcacatgaaatatcaaaagatacagctacaaagaaaactacgagaagaaaatgaaaaaaggaagcaactggatg

SEQ ID NO: 518731 - DNA, 120 bp, Artificial Sequence
  ENSG00000165115_23 (sequence is synthesized)
cagtaattaagcgggaccagcaaaaaatcaaagaaatacaattaaaaacaggacaggaagaaggtctaaaaccgaaagctgaggaccttgatgcatgtaacttgaaaaggagaaaaggtt

SEQ ID NO: 518732 - DNA, 120 bp, Artificial Sequence
  ENSG00000165115_24 (sequence is synthesized)
cgtttggaagtatagaccatctccagaaattggatgagcaaaagaaatggttagatgaagaagtagagaaagttctgaaccaacgccaagaattagaggagctggaagcagacttaaaga

SEQ ID NO: 518733 - DNA, 120 bp, Artificial Sequence
  ENSG00000165115_25 (sequence is synthesized)
aacgggaggccatagtttctaagaaggaggctctgttacaggagaagagtcacctggaaaataagaaattgagatctagtcaggccttaaacacagatagtttgaaaatatcaactcgcc

SEQ ID NO: 518734 - DNA, 120 bp, Artificial Sequence
  ENSG00000165115_26 (sequence is synthesized)
tgaacttactggaacaagagttgtctgaaaagaatgtgcagctccagaccagtacagctgaggagaaaacaaagatttcagaacaagttgaagtcctccagaaagaaaaggatcagctcc

SEQ ID NO: 518735 - DNA, 120 bp, Artificial Sequence
  ENSG00000165115_27 (sequence is synthesized)
agaaacgcagacacaatgtggatgaaaaacttaaaaatggtagagtgttatcacctgaagaagaacatgttcttttccaacttgaagaagggattgaagctttggaagctgcaattgaat

SEQ ID NO: 518736 - DNA, 120 bp, Artificial Sequence
  ENSG00000165115_28 (sequence is synthesized)
acaggaatgaaagtatccagaatcgccagaagtcacttagagcatcattccataacctctctcgtggtgaagcaaatgtcttggaaaagctagcttgcctgagtcctgttgagattagaa

SEQ ID NO: 518737 - DNA, 120 bp, Artificial Sequence
  ENSG00000165115_29 (sequence is synthesized)
ctattcttttcagatatttcaataaggtggtgaatttgcgagaagctgaacggaaacaacagttatataatgaagaaatgaaaatgaaagttctggaacgggataatatggttcgtgaat

SEQ ID NO: 518738 - DNA, 120 bp, Artificial Sequence
  ENSG00000165115_30 (sequence is synthesized)
aaaaggaacacgaacaaaagatgcagttgctattacatcatttcaaagaacaagatggagaaggcattatggaaactttcaaaacatatgaagataaaatccagcagttggaaaaagatc

SEQ ID NO: 518739 - DNA, 120 bp, Artificial Sequence
  ENSG00000165115_31 (sequence is synthesized)
tttatttctataagaaaaccagccgggatcataagaagaaacttaaggaactggtaggggaagcaattcggcggcaactagcaccatcagagtatcaagaggctggagatggagtcctga

SEQ ID NO: 518740 - DNA, 120 bp, Artificial Sequence
  ENSG00000165115_32 (sequence is synthesized)
agccagaaggaggaggcatgctttcagaagaattaaaatgggcatccagacctgaaagtatgaaattaagtggaagagaaagagaaatggacagttcagcaagcagcttaagaacacagc

SEQ ID NO: 518741 - DNA, 120 bp, Artificial Sequence
  ENSG00000165115_33 (sequence is synthesized)
caaatcctcaaaagctctgggaagatatcccagaattacctccaattcatagttctttagcaccccccagtgggcatatgttaggtaatgagaataaaacagaaacagatgataatcagt

SEQ ID NO: 518742 - DNA, 120 bp, Artificial Sequence
  ENSG00000165115_34 (sequence is synthesized)
ttacaaaatctcacagtcgactgtcatcccaaattcaggttgtgggaaatgtgggacgacttcatggtgtcacacctgtaaaactgtgtcgaaaagaattacgtcaaatttccgccttgg

SEQ ID NO: 518743 - DNA, 120 bp, Artificial Sequence
  ENSG00000165115_35 (sequence is synthesized)
aactatcattgcgacgttccagtcttggagttggcattggatcaatggctgctgattccatcgaagtatctaggaaaccaagggacttaaaaacttagacattgaataatagaactttta

SEQ ID NO: 518744 - DNA, 120 bp, Artificial Sequence
  ENSG00000165115_36 (sequence is synthesized)
gtagatatgtaaaaagattcctttttctaacctgttaaaaactaaagctcaagttcactacctctttcctcagaataaaggaagaaggggaggaaggaatccctaattcttttatatgct

SEQ ID NO: 518745 - DNA, 120 bp, Artificial Sequence
  ENSG00000165115_37 (sequence is synthesized)
atagatgtgtacatcttctatatatatttggggagttttagtttatattcccatagtaatcaaacatgttttccaatacttgataacatttaaatatttataaatacgcttaaatgtttt

SEQ ID NO: 518746 - DNA, 120 bp, Artificial Sequence
  ENSG00000165115_38 (sequence is synthesized)
tctcaaatacaagtatattttttttttaaaagatccagctaaatcttgcttttgtcagagggagtcacctgctgcatatgtgggctaagacaacctctcagctttatggattgaggctca

SEQ ID NO: 518747 - DNA, 120 bp, Artificial Sequence
  ENSG00000165115_39 (sequence is synthesized)
tttacagtcctcagaactcacagaaacggtcagtcctgactttttaaacatgctcactgttctgtttctggaatttttttggatttttaaaaatttataatgctatcttttatgtttgct

SEQ ID NO: 518748 - DNA, 120 bp, Artificial Sequence
  ENSG00000165115_40 (sequence is synthesized)
aatattatgcaatataagttttcatgtctttcctgctctatacactcaatatatctctcattatgttactaaaactgggagaaatgaatgctgttccatggaacacggaaattatagaat

SEQ ID NO: 518749 - DNA, 120 bp, Artificial Sequence
  ENSG00000165115_41 (sequence is synthesized)
aaaactaaagcattctaacatttcaagagaaagaacactggttatgacatctctggtcacatggagtatgtctgtaaagcttgaagtcttgccaaagcatctttaatgatttgatgggct

SEQ ID NO: 518750 - DNA, 120 bp, Artificial Sequence
  ENSG00000165115_42 (sequence is synthesized)
taagtctgatatttttttctataacctccttagtcaggctttgcacaccggccaaactacactggggctgtaaatatgtcaatgaaatttttactaaaatctccaagtttttctggtcaa

SEQ ID NO: 518751 - DNA, 120 bp, Artificial Sequence
  ENSG00000165115_43 (sequence is synthesized)
aattttactatataatgtacaatttagtttggaattaagaactaaacagtttgcacaccaaatgtagtttgtactttttaaccatatttttcagttataggaaacatccattgtaatgac

SEQ ID NO: 518752 - DNA, 120 bp, Artificial Sequence
  ENSG00000165115_44 (sequence is synthesized)
ctgaggaattattttgttacttatgttgttctttgttacttttccaaaacacttgtaaaccgaagttgagtttcttaaactaattaatgttttgttgggggctgtagcaaaaccatcctg

SEQ ID NO: 518753 - DNA, 120 bp, Artificial Sequence
  ENSG00000165115_45 (sequence is synthesized)
acatggatgcttactcagagtcacccacttccttgctgaatccatttttttctgatgtagtgctgctacagaccttttccttttgtcctttcctctgttgctgtggatttgatcatctca

SEQ ID NO: 518754 - DNA, 120 bp, Artificial Sequence
  ENSG00000165115_46 (sequence is synthesized)
cataggacccaaactgtcaccctgtgctcaaagacttaaggcttcctttctctcattgctagcccctagggagtagagtttcttggtctccttgctaaaaaccagttcctttaggaaaca

SEQ ID NO: 518755 - DNA, 120 bp, Artificial Sequence
  ENSG00000165115_47 (sequence is synthesized)
aaccaaaacaaaacaaacttataaaaaggaaaatatctcttaagcatggtactaaaatttatttaaattaaatagatttctgtggacttacctgggaatgaaacaatttataaatattgg

SEQ ID NO: 518756 - DNA, 120 bp, Artificial Sequence
  ENSG00000165115_48 (sequence is synthesized)
tccaatgagatactattttctaaatttcaaaaaactaatttacaaacttaactgggaaattttatttttaccaggaactgtttgaagtcagattctggtttccagctagtcttccatttt

SEQ ID NO: 518757 - DNA, 120 bp, Artificial Sequence
  ENSG00000165115_49 (sequence is synthesized)
gctagtcttccatttttataaatttatgtacatttatatataaatataaatcatacaaaccaaaggtaaaacatacacattataaatatgtataaatgcactgaccttttgccattatta

SEQ ID NO: 518758 - DNA, 120 bp, Artificial Sequence
  ENSG00000165115_50 (sequence is synthesized)
atatatgtatatacacttgtacatatacaagtatataaggaaatgtgtttgtatttccataagtaaaacaagtatgtgtaaattaattatttctaactaaggcatagcacataatcttac

SEQ ID NO: 518759 - DNA, 120 bp, Artificial Sequence
  ENSG00000165115_51 (sequence is synthesized)
aaggaacttataattaggatctttgttaataaatacatatttatttaaatatattattgctgtgctttgttgaaggcactgaccttttaccattatatatacttgtatataaacacttgt

SEQ ID NO: 518760 - DNA, 120 bp, Artificial Sequence
  ENSG00000165115_52 (sequence is synthesized)
gtatatatagatacacttgtatatatacatagatatagatatatataatggccaaaggtcagtgcccttagcaagcacagcaatatttataaataaatatttattaatgaagatcctaat

SEQ ID NO: 518761 - DNA, 120 bp, Artificial Sequence
  ENSG00000165115_53 (sequence is synthesized)
aataagttccttataagattaagtaatgtgctatgcgttatttaggaataattcatttaagaatgtattctgatactggaatcctacttgctcaagaaattaacacatacttgttttacc

SEQ ID NO: 518762 - DNA, 120 bp, Artificial Sequence
  ENSG00000165115_54 (sequence is synthesized)
tgtggaaatacacatttcctcaaagccaactcactaataaagcaagaaaatttatatcaaaacaacaatgattaggtttgactatgcaattgtgagttgatttctaaataacaaaggtat

SEQ ID NO: 518763 - DNA, 120 bp, Artificial Sequence
  ENSG00000165115_55 (sequence is synthesized)
ggtgtttttcttccttttggttaaacatatatcctttatatatatgacatttcatgccacatatgcaaacacacatataaataacgtcgtgaataatatattctggaaatgaacctctgg

SEQ ID NO: 518764 - DNA, 120 bp, Artificial Sequence
  ENSG00000165115_56 (sequence is synthesized)
tcattctagtttagtcggtgttctcacaaaggaaagaaaaaaattagacacctacccaaggcaagtaaaattatttttttacatatactaataatgattttactttttcacatgcttttt

SEQ ID NO: 518765 - DNA, 120 bp, Artificial Sequence
  ENSG00000165115_57 (sequence is synthesized)
ctaaacattttgtcactttattgcctttttgcatgtatataaaatgtttgtggttttctttttttcgttcattatgttcttttttcctcttaactgtaataaagcatttgaaaggaaaaa

SEQ ID NO: 518766 - DNA, 86 bp, Artificial Sequence
  ENSG00000165115_58 (sequence is synthesized)
gcctcagcctcatgagtagctgtgaccacaggtgcatgccaccgtgcccggctaattttctgatttttttgtggagacagggtctc

SEQ ID NO: 518767 - DNA, 120 bp, Artificial Sequence
  ENSG00000165115_59 (sequence is synthesized)
cccggctaattttctgatttttttgtggagacagggtctcactgtgttgctcaagctggtctcgaactcctgggctcagtgatcctaccacctcagcttcccaaagtgctgagattgatt

SEQ ID NO: 518768 - DNA, 120 bp, Artificial Sequence
  ENSG00000165115_60 (sequence is synthesized)
acgaatccatggtcttcattcagttggcttgtgaagtatctatccttgacctgcccttcactgctgtccttattcactttaaagctttgttcatctacgtagtaaaacctacttattgaa

SEQ ID NO: 518769 - DNA, 120 bp, Artificial Sequence
  ENSG00000165118_0 (sequence is synthesized)
ggaagtgcttgcggcctctgcccagcgagctgccccggggtctctctggtttcctaatcagggcaacgccgcgggagagaacctttaccttggctgcactaagttctcggtgccactccc

SEQ ID NO: 518770 - DNA, 120 bp, Artificial Sequence
  ENSG00000165118_1 (sequence is synthesized)
tggcagggcgggaccttgtttaggccctgtgatcgcgcggttcgtagtagcgcaaggcgcagagtggaccttgacccgcctagggcgggaagagtttggcccgccgggtcccaaagggca

SEQ ID NO: 518771 - DNA, 120 bp, Artificial Sequence
  ENSG00000165118_2 (sequence is synthesized)
gaatggacgggctcctaaatcccagggaatcctctaaattcattgcagaaaacagtcgggatgtgtttattgacagcggaggcgtacggagggtggcagagctgctgctggccaaggcgg

SEQ ID NO: 518772 - DNA, 120 bp, Artificial Sequence
  ENSG00000165118_3 (sequence is synthesized)
cggggccagagctgcgcgtggaggggtggaaagcccttcatgagctgaaccccagggcggccgacgaggccgcggtcaactgggtgttcgtgacagacacgctcaacttctccttttggt

SEQ ID NO: 518773 - DNA, 120 bp, Artificial Sequence
  ENSG00000165118_4 (sequence is synthesized)
cggagcaggacgagcacaagtgtgtggtgaggtacagagggaaaacatacagtgggtactggtccctgtgcgccgccgtcaacagagccctcgacgaagggataccaataactagtgcct

SEQ ID NO: 518774 - DNA, 120 bp, Artificial Sequence
  ENSG00000165118_5 (sequence is synthesized)
cgtactacgcgacagtgaccctggatcaggttcggaatatacttcgttctgacacagacgtttccatgcctttagtagaagagaggcatcggattctcaatgaaaccgggaaaattctgc

SEQ ID NO: 518775 - DNA, 120 bp, Artificial Sequence
  ENSG00000165118_6 (sequence is synthesized)
tggagaagtttggaggctcttttctcaactgcgtccgagaaagtgagaatagtgcgcagaagttaatgcacctggtggttgaaagttttccttcttacagagatgtgactctgtttgagg

SEQ ID NO: 518776 - DNA, 120 bp, Artificial Sequence
  ENSG00000165118_7 (sequence is synthesized)
ggaaaagagtttctttttacaaacgagcccaaatccttgtagcagatacgtggagtgtattggaaggaaaaggagatggctgcttcaaggacatctccagtatcaccatgtttgctgatt

SEQ ID NO: 518777 - DNA, 120 bp, Artificial Sequence
  ENSG00000165118_8 (sequence is synthesized)
atagattacctcaggttcttgctcatcttggagccctgaaatactctgatgacctactgaagaagcttctcaaaggagaaatgctctcatatggagacaggcaagaggtggaaatcagag

SEQ ID NO: 518778 - DNA, 120 bp, Artificial Sequence
  ENSG00000165118_9 (sequence is synthesized)
ggtgctcgctttggtgtgttgagctgatccgggattgtcttctggagcttattgaacaaaagggtgaaaaacctaatggagagatcaattccattcttctggattattacttatgggact

SEQ ID NO: 518779 - DNA, 120 bp, Artificial Sequence
  ENSG00000165118_10 (sequence is synthesized)
cctcaagtgtaaactgatccaaagaaaaccccctgcgttttatatcatatcatctgtacagttttgctttgatatttagagaacatgatcgaggttataggaaattgattgcccattctc

SEQ ID NO: 518780 - DNA, 76 bp, Artificial Sequence
  ENSG00000165118_11 (sequence is synthesized)
gaacatgatcgaggttataggaaattgattgcccattctcacttgaaaaatacttcctaggccgggcacagtggtt

SEQ ID NO: 518781 - DNA, 60 bp, Artificial Sequence
  ENSG00000165118_12 (sequence is synthesized)
ttcctaggccagatgtggtggctcatatgtataatcttagcactttgggaggccaaggca

SEQ ID NO: 518782 - DNA, 90 bp, Artificial Sequence
  ENSG00000165118_13 (sequence is synthesized)
gattgcttgaggcgggagacccccatctctacaaaaatttaaaaattagcctagcatggtggcacgctctgtaatcccaaatacgcggta

SEQ ID NO: 518783 - DNA, 120 bp, Artificial Sequence
  ENSG00000165118_14 (sequence is synthesized)
ctagcatggtggcacgctctgtaatcccaaatacgcggtaggctgaggctgaggagggtggattgcttgagcccaggggtttgaggctgcagtgagccacagtcacgccactgcattcta

SEQ ID NO: 518784 - DNA, 120 bp, Artificial Sequence
  ENSG00000165118_15 (sequence is synthesized)
tcctgggcaacagatggagaccttgtctcaaaaaaaaaaaattcctgacatcgctatgtattcccaactttatcatttgtctgcctgtttagttttgacttatgttttttttttttcccc

SEQ ID NO: 518785 - DNA, 120 bp, Artificial Sequence
  ENSG00000165118_16 (sequence is synthesized)
cctgtggacatgtagttgacggaaatcgtgaaggaactttaatattttatttaaatttcccaaaactaatcatgccttatgtgactaatcttcagtgataatatttcatctactgatata

SEQ ID NO: 518786 - DNA, 120 bp, Artificial Sequence
  ENSG00000165118_17 (sequence is synthesized)
ttttcttgaggtgtgtaattttcagtataccttaatcatttggtataaaaaagagagaggtttttgatatatgaatgctgttcttgtaaaaatcaatcttgacactttattttaaacttt

SEQ ID NO: 518787 - DNA, 120 bp, Artificial Sequence
  ENSG00000165118_18 (sequence is synthesized)
ttattggtaatgacagtgggttttgtacatcatgattttcaatttaggatatctgtctaatttgttttttcagagtaactatattggaattcaataaaaatattcaaaatttttcttaaa

SEQ ID NO: 518788 - DNA, 120 bp, Artificial Sequence
  ENSG00000165119_0 (sequence is synthesized)
gttttctgtctagctccgaccggctgaggcggcgcggcagcggagggacggcagtctcgcgcggctactgcagcactggggtgtcagttgttggtccgacccagaacgcttcagttctgc

SEQ ID NO: 518789 - DNA, 120 bp, Artificial Sequence
  ENSG00000165119_1 (sequence is synthesized)
tctgcaaggatatataataactgattggtgtgcccgtttaataaaagaatatggaaactgaacagccagaagaaaccttccctaacactgaaaccaatggtgaatttggtaaacgccctg

SEQ ID NO: 518790 - DNA, 120 bp, Artificial Sequence
  ENSG00000165119_2 (sequence is synthesized)
cagaagatatggaagaggaacaagcatttaaaagatctagaaacactgatgagatggttgaattacgcattctgcttcagagcaagaatgctggggcagtgattggaaaaggaggcaaga

SEQ ID NO: 518791 - DNA, 120 bp, Artificial Sequence
  ENSG00000165119_3 (sequence is synthesized)
atattaaggctctccgtacagactacaatgccagtgtttcagtcccagacagcagtggccccgagcgcatattgagtatcagtgctgatattgaaacaattggagaaattctgaagaaaa

SEQ ID NO: 518792 - DNA, 120 bp, Artificial Sequence
  ENSG00000165119_4 (sequence is synthesized)
tcatccctaccttggaagagggcctgcagttgccatcacccactgcaaccagccagctcccgctcgaatctgatgctgtggaatgcttaaattaccaacactataaaggaagtgactttg

SEQ ID NO: 518793 - DNA, 120 bp, Artificial Sequence
  ENSG00000165119_5 (sequence is synthesized)
actgcgagttgaggctgttgattcatcagagtctagcaggaggaattattggggtcaaaggtgctaaaatcaaagaacttcgagagaacactcaaaccaccatcaagcttttccaggaat

SEQ ID NO: 518794 - DNA, 120 bp, Artificial Sequence
  ENSG00000165119_6 (sequence is synthesized)
gctgtcctcattccactgacagagttgttcttattggaggaaaacccgatagggttgtagagtgcataaagatcatccttgatcttatatctgagtctcccatcaaaggacgtgcacagc

SEQ ID NO: 518795 - DNA, 120 bp, Artificial Sequence
  ENSG00000165119_7 (sequence is synthesized)
cttatgatcccaatttttacgatgaaacctatgattatggtggttttacaatgatgtttgatgaccgtcgcggacgcccagtgggatttcccatgcggggaagaggtggttttgacagaa

SEQ ID NO: 518796 - DNA, 120 bp, Artificial Sequence
  ENSG00000165119_8 (sequence is synthesized)
tgcctcctggtcggggtgggcgtcccatgcctccatctagaagagattatgatgatatgagccctcgtcgaggaccacctccccctcctcccggacgaggcggccggggtggtagcagag

SEQ ID NO: 518797 - DNA, 120 bp, Artificial Sequence
  ENSG00000165119_9 (sequence is synthesized)
ctcggaatcttcctcttcctccaccaccaccacctagagggggagacctcatggcctatgacagaagagggagacctggagaccgttacgacggcatggttggtttcagtgctgatgaaa

SEQ ID NO: 518798 - DNA, 120 bp, Artificial Sequence
  ENSG00000165119_10 (sequence is synthesized)
cttgggactctgcaatagatacatggagcccatcagaatggcagatggcttatgaaccacagggtggctccggatatgattattcctatgcagggggtcgtggctcatatggtgatcttg

SEQ ID NO: 518799 - DNA, 120 bp, Artificial Sequence
  ENSG00000165119_11 (sequence is synthesized)
gtggacctattattactacacaagtaactattcccaaagatttggctggatctattattggcaaaggtggtcagcggattaaacaaatccgtcatgagtcgggagcttcgatcaaaattg

SEQ ID NO: 518800 - DNA, 120 bp, Artificial Sequence
  ENSG00000165119_12 (sequence is synthesized)
tagaaggatccgaagatcggatcattaccattacaggaacacaggaccagatacagaatgcacagtatttgctgcagaacagtgtgaagcagtatgcagatgttgaaggattctaatgca

SEQ ID NO: 518801 - DNA, 120 bp, Artificial Sequence
  ENSG00000165119_13 (sequence is synthesized)
agatattttttcttttttatagtgtgaagcagtattctggaaagtttttctaagactagtgaagaactgaaggagtcctgcatctttttttttttatctgcttctgtttaaaaagccaac

SEQ ID NO: 518802 - DNA, 120 bp, Artificial Sequence
  ENSG00000165119_14 (sequence is synthesized)
attcctctgcttcataggtgttctgcatttgaggtgtagtgaaatctttgctgttcaccagatgtaatgttttagttccttacaaacagggttgggggggggaagggcgtgcaaaaacta

SEQ ID NO: 518803 - DNA, 120 bp, Artificial Sequence
  ENSG00000165119_15 (sequence is synthesized)
acattgaaattttgaaacagcagcagagtgagtggattttatttttcgttattgttggtggtttaaaaaattccccccatgtaattattgtgaacaccttgctttgtggtcactgtaaca

SEQ ID NO: 518804 - DNA, 120 bp, Artificial Sequence
  ENSG00000165119_16 (sequence is synthesized)
tttggggggtgggacagggaggaaaagtaacaatagtccacatgtccctggcatctgttcagagcagtgtgcagaatgtaatgctcttttgtaagaaacgttttatgatttttaaaataa

SEQ ID NO: 518805 - DNA, 120 bp, Artificial Sequence
  ENSG00000165119_17 (sequence is synthesized)
atttagtgaacctatttttggtggtcattttttttttaagacagtcattttaaaatggtggctgaatttcccaacccacccccaaactaaacactaagtttaattttcagctcctctgtt

SEQ ID NO: 518806 - DNA, 120 bp, Artificial Sequence
  ENSG00000165119_18 (sequence is synthesized)
ggacatataagtgcatctcttgttggacataggcaaaataacttggcaaacttagttctggtgatttcttgatggtttggaagtctattgctgggaagaaattccatcatacatattcat

SEQ ID NO: 518807 - DNA, 120 bp, Artificial Sequence
  ENSG00000165119_19 (sequence is synthesized)
gcttataataagctggggattttttgtttgtttttgcaaatgcttgcccctacttttcaacaattttctatgttagttgtgaagaactaaggtggggagcagtactacaagttgagtaat

SEQ ID NO: 518808 - DNA, 120 bp, Artificial Sequence
  ENSG00000165119_20 (sequence is synthesized)
ggtatgagtatataccagaattctgattggcagcaagttttattaatcagaataacacttggttatggaagtgactaatgctgaaaaaattgattatttttattagataatttctcacct

SEQ ID NO: 518809 - DNA, 120 bp, Artificial Sequence
  ENSG00000165119_21 (sequence is synthesized)
atagacttaaactgtcaatttgctctagtgtcttattagttaaactttgtaaaatatatatatacttgtttttccattgtatgcaaattgaaagaaaaagatgtaccatttctctgttgt

SEQ ID NO: 518810 - DNA, 120 bp, Artificial Sequence
  ENSG00000165119_22 (sequence is synthesized)
atgttggattatgtaggaaatgtttgtgtacaattcaaaaaaaaaaaagatgaaaaaagttcctgtggatgttttgtgtagtatcttggcatttgtattgatagttaaaattcacttcca

SEQ ID NO: 518811 - DNA, 120 bp, Artificial Sequence
  ENSG00000165119_23 (sequence is synthesized)
aataaataaaacacccatgatgctagatttgatgtgtgcccgatttgaacaagggttgattgacacctgtaaaatttgttgaaacgttcctcttaaaaggaaatatagtaatcttatgta

SEQ ID NO: 518812 - DNA, 120 bp, Artificial Sequence
  ENSG00000165119_24 (sequence is synthesized)
agggcgctccaggcgacagcactgcagacgccattatcctctgtttctctgctgcaccgacctcgacgtcttgcctgtgtcccacttgttcgcggcctataggctactgcagcactgggg

SEQ ID NO: 518813 - DNA, 120 bp, Artificial Sequence
  ENSG00000165119_25 (sequence is synthesized)
tattaaattaaaatttattgcttttcccccttttccctctccttgtttttttggccatatatctccgttgcccatgtactggatcgacttacccctgcgttgcccaccatgacgttggcc

SEQ ID NO: 518814 - DNA, 120 bp, Artificial Sequence
  ENSG00000165119_26 (sequence is synthesized)
catccgcccctgaacgcccatgtgaaaaccctggttggctatgcccaaaaatgtgctcgttgccaaacgggtaccatacttgacaacttctgattgaatgcccatgcccaatgccaacat

SEQ ID NO: 518815 - DNA, 120 bp, Artificial Sequence
  ENSG00000165119_27 (sequence is synthesized)
ttaagagtttaaactactacacgagcagcttcagtttatatgtctatagaaatttaaagatttacatcctagaaatcatttcatagtttagctacaaagacatttgtaataatttattat

SEQ ID NO: 518816 - DNA, 120 bp, Artificial Sequence
  ENSG00000165119_28 (sequence is synthesized)
tacagaattgatttcgaagttatccattcctgttttaacaaaagcccagattgagcagggtgggggggtggtttctttcaaacctcttcacattttaataagagtccaccaaattattca

SEQ ID NO: 518817 - DNA, 120 bp, Artificial Sequence
  ENSG00000165119_29 (sequence is synthesized)
cttcatcaagcaagataacatcttaattagaaatagcgacaaagtgtaaaaatccttgattgcaccatttcctgtgtgtgaatcaattacagtattactgaaaaccattgcaggtggctg

SEQ ID NO: 518818 - DNA, 120 bp, Artificial Sequence
  ENSG00000165119_30 (sequence is synthesized)
gttaaatccagaaaaatttttttgttttctttgggaagaaaaatgtccatctgttctttaacagcttgcacatggagcacaaagaatttaatgttgaggttgcatgatttaaatatgggt

SEQ ID NO: 518819 - DNA, 120 bp, Artificial Sequence
  ENSG00000165119_31 (sequence is synthesized)
gtgatcttggtggacctattattactacacaagtaactattcccaaagatgtaagtatctttaatactaccaggaacattttatcacttttatgattattcctcctttctgtatattttt

SEQ ID NO: 518820 - DNA, 120 bp, Artificial Sequence
  ENSG00000165119_32 (sequence is synthesized)
taattcagaaggttttaacaaaaatacacatttaggattgaggttatgttaatgggctttagtgagctgggttttcagctgtttgagtcttgtcaagtgatcagtgctattaataaaagt

SEQ ID NO: 518821 - DNA, 120 bp, Artificial Sequence
  ENSG00000165119_33 (sequence is synthesized)
agttaagtaggttttgagcccttaactaactaagggaaacattagtaagtgtgacataaatacattataactcaaaccttgacaggtttagggagcgttagatcatcagttaagattctg

SEQ ID NO: 518822 - DNA, 120 bp, Artificial Sequence
  ENSG00000165119_34 (sequence is synthesized)
tgaagagggattttatgagattaaaatacttgaatagtgaagctgggtgcagtggtgctcactcataatcccaactacaaaagagtctgaggcaggaggatcacttgagcccgagagttt

SEQ ID NO: 518823 - DNA, 120 bp, Artificial Sequence
  ENSG00000165119_35 (sequence is synthesized)
cctgggcaacatagcaagactccattttattaaatgaatttttttaaagtaccggtagtaattacaacggcaaagtaattttctatttttttctttctgtttttagggtggctccggata

SEQ ID NO: 518824 - DNA, 120 bp, Artificial Sequence
  ENSG00000165119_36 (sequence is synthesized)
tactaatcttgctggaagaagccttaaccaagcaaacttctcatttctctggtgaaaactgctgccaaaaccacttgttaaaaattgtacagagcctgtagaaaatatagaagattcatt

SEQ ID NO: 518825 - DNA, 120 bp, Artificial Sequence
  ENSG00000165119_37 (sequence is synthesized)
ggatgttggcctagttctgtgtggaagactagtgattttgttgtttttagataactaaatcgacaacaaatcacagtctgccatatggcacaggccatgcctctacaggacaaatgattg

SEQ ID NO: 518826 - DNA, 120 bp, Artificial Sequence
  ENSG00000165119_38 (sequence is synthesized)
gtgctgtaaaatgcagcatttcacaccttactagcattctttgtcttttctaccaaatattaacaactttcaattccgttttcttaattctgttctactaatgtccgatttactactcat

SEQ ID NO: 518827 - DNA, 120 bp, Artificial Sequence
  ENSG00000165119_39 (sequence is synthesized)
catttttcttgacacttaacattgctttaatttgtaattgctaatggtttttgaactcttctaattgtaatggacgtgtttatcattttaatttagcattgaaattgtcttgatgttgat

SEQ ID NO: 518828 - DNA, 120 bp, Artificial Sequence
  ENSG00000165120_0 (sequence is synthesized)
agtcatctttatccctttaagcatggtttattttctgagcaaggagtcatcatgggagaccttttttccttattttgggaggtagatcctcccccaatacctgtaaattgtgccattcca

SEQ ID NO: 518829 - DNA, 120 bp, Artificial Sequence
  ENSG00000165120_1 (sequence is synthesized)
aatcaggattatgaatgctggaaggatgactcttgtggaaccatagggagcttcctgctttggtattttgttatcgtatttgtcctgatgttcttctctagggcttctgtctggatgtct

SEQ ID NO: 518830 - DNA, 120 bp, Artificial Sequence
  ENSG00000165120_2 (sequence is synthesized)
gaggataaaaaggatgaaggcagtgggacaagtacttcagtaaggaaagcaagcaaagagacttcctgtaagcggcaaagcaaagacagtgcctgggatccctcacaaacaatgaagaaa

SEQ ID NO: 518831 - DNA, 120 bp, Artificial Sequence
  ENSG00000165120_3 (sequence is synthesized)
ccaaagcagaaccaacttacccctgtaaccaactcagaagtggctttggtcaatgcctatcctgaacaaagacgagccaggcgccagtctcagttcaatgaggtgaaccagaaccaacat

SEQ ID NO: 518832 - DNA, 120 bp, Artificial Sequence
  ENSG00000165120_4 (sequence is synthesized)
cccatcaccagacagtattaagaggagaaaaatggctcagaggcaaaggaatctgggaagttaccaaatgagcgaaaggcactgcctccactgcaaagccttgagaaccaacgaatggtt

SEQ ID NO: 518833 - DNA, 120 bp, Artificial Sequence
  ENSG00000165120_5 (sequence is synthesized)
ggcgcaccattcccgacagaagccttcagtaacaccgccaatgaaaagagacagtcaagaggaaagttccatatctgacattaacaagaaatttagtaaattttgaattttatcacgttc

SEQ ID NO: 518834 - DNA, 120 bp, Artificial Sequence
  ENSG00000165120_6 (sequence is synthesized)
ttccttcacttgaagccaaatgaaagagatgaataaaacatgaaaaatcaccagagctataggtgaggagacttttacaacaaagtctctctaccaacaaacaaaaacatacttggaacc

SEQ ID NO: 518835 - DNA, 120 bp, Artificial Sequence
  ENSG00000165120_7 (sequence is synthesized)
caagaggtaaaatctcacacaattcttcgttcaaaaaaaaaaaggccatcacgtgtttatggcaccattggaacaccaaagatctatatctgctatgatttttttatttgaaatagcaca

SEQ ID NO: 518836 - DNA, 120 bp, Artificial Sequence
  ENSG00000165120_8 (sequence is synthesized)
agacagatattttgtgccttgagtgtatatattttgtgccttgagtgtatgtattttgtttatgtctgtaatatgaataagaaagctctttgaaaatgtattatttatgttgagaaacca

SEQ ID NO: 518837 - DNA, 120 bp, Artificial Sequence
  ENSG00000165120_9 (sequence is synthesized)
gcttcctggaggagatgacgcgttagagtccacagccagaaacccagggcctggggacttgttctgaagtgtgcctcctaataaaaacattaagccatgccacagtaagctagtggatta

SEQ ID NO: 518838 - DNA, 120 bp, Artificial Sequence
  ENSG00000165124_0 (sequence is synthesized)
gttccctccggagttcccgagctgctgaggagtctggattgtgtctgtccccagtgtcagatgaaagggcgctgaggctcttggccgctgccccgcgcccagctccgcgcacgcccctct

SEQ ID NO: 518839 - DNA, 120 bp, Artificial Sequence
  ENSG00000165124_1 (sequence is synthesized)
gcgagtccggccgcccagcgcctcttcccgcccgagccgccgcctgcgctccggggcagccgctctgtctccagcgcgatgtggcctcgcctggccttttgttgctggggtctggcgctc

SEQ ID NO: 518840 - DNA, 120 bp, Artificial Sequence
  ENSG00000165124_2 (sequence is synthesized)
gtttcgggctgggcgacctttcagcagatgtccccgtcgcgcaatttcagcttccgcctcttccccgagaccgcgcccggggcccccgggagtatccccgcgccgcccgctcctggcgac

SEQ ID NO: 518841 - DNA, 120 bp, Artificial Sequence
  ENSG00000165124_3 (sequence is synthesized)
gaagcggcggggagcagagtggagcggctgggccaggcgttccggcgacgcgtgcggctgctgcgggagctcagcgagcgcctggagcttgtcttcctggtggatgattcgtccagcgtg

SEQ ID NO: 518842 - DNA, 120 bp, Artificial Sequence
  ENSG00000165124_4 (sequence is synthesized)
ggcgaagtcaacttccgcagcgagctcatgttcgtccgcaagctgctgtccgacttccccgtggtgcccacggccacgcgcgtggccatcgtgaccttctcgtccaagaactacgtggtg

SEQ ID NO: 518843 - DNA, 120 bp, Artificial Sequence
  ENSG00000165124_5 (sequence is synthesized)
ccgcgcgtcgattacatctccacccgccgcgcgcgccagcacaagtgcgcgctgctcctccaagagatccctgccatctcctaccgaggtggcggcacctacaccaagggcgccttccag

SEQ ID NO: 518844 - DNA, 120 bp, Artificial Sequence
  ENSG00000165124_6 (sequence is synthesized)
caagccgcgcaaattcttcttcatgctagagaaaactcaacaaaagttgtatttctcatcactgatggatattccaatgggggagaccctagaccaattgcagcgtcactgcgagattca

SEQ ID NO: 518845 - DNA, 120 bp, Artificial Sequence
  ENSG00000165124_7 (sequence is synthesized)
ggagtggagatcttcacttttggcatatggcaagggaacattcgagagctgaatgacatggcttccaccccaaaggaggagcactgttacctgctacacagttttgaagaatttgaggct

SEQ ID NO: 518846 - DNA, 120 bp, Artificial Sequence
  ENSG00000165124_8 (sequence is synthesized)
ttagctcgccgggcattgcatgaagatctaccttctgggagttttattcaagatgatatggtccactgctcatatctttgtgatgaaggcaaggactgctgtgaccgaatgggaagctgc

SEQ ID NO: 518847 - DNA, 120 bp, Artificial Sequence
  ENSG00000165124_9 (sequence is synthesized)
aaatgtgggacacacacaggccattttgagtgcatctgtgaaaaggggtattacgggaaaggtctgcagtatgaatgcacagcttgcccatcggggacatacaaacctgaaggctcacca

SEQ ID NO: 518848 - DNA, 120 bp, Artificial Sequence
  ENSG00000165124_10 (sequence is synthesized)
ggaggaatcagcagttgcattccatgtcctgatgaaaatcacacctctccacctggaagcacatcccctgaagactgtgtctgcagagagggatacagggcatctggccagacctgtgaa

SEQ ID NO: 518849 - DNA, 120 bp, Artificial Sequence
  ENSG00000165124_11 (sequence is synthesized)
cttgtccactgccctgccctgaagcctcccgaaaatggttactttatccaaaacacttgcaacaaccacttcaatgcagcctgtggggtccgatgtcaccctggatttgatcttgtggga

SEQ ID NO: 518850 - DNA, 120 bp, Artificial Sequence
  ENSG00000165124_12 (sequence is synthesized)
agcagcatcatcttatgtctacccaatggtttgtggtccggttcagagagctactgcagagtaagaacatgtcctcatctccgccagccgaaacatggccacatcagctgttctacaagg

SEQ ID NO: 518851 - DNA, 120 bp, Artificial Sequence
  ENSG00000165124_13 (sequence is synthesized)
gaaatgttatataagacaacatgtttggttgcctgtgatgaagggtacagactagaaggcagtgataagcttacttgtcaaggaaacagccagtgggatgggccagaaccccggtgtgtg

SEQ ID NO: 518852 - DNA, 120 bp, Artificial Sequence
  ENSG00000165124_14 (sequence is synthesized)
gagcgccactgttccacctttcagatgcccaaagatgtcatcatatccccccacaactgtggcaagcagccagccaaatttgggacgatctgctatgtaagttgccgccaagggttcatt

SEQ ID NO: 518853 - DNA, 120 bp, Artificial Sequence
  ENSG00000165124_15 (sequence is synthesized)
ttatctggagtcaaagaaatgctgagatgtaccacttctggaaaatggaatgtcggagttcaggcagctgtgtgtaaagacgtggaggctcctcaaatcaactgtcctaaggacatagag

SEQ ID NO: 518854 - DNA, 120 bp, Artificial Sequence
  ENSG00000165124_16 (sequence is synthesized)
gctaagactctggaacagcaagattctgccaatgttacctggcagattccaacagctaaagacaactctggtgaaaaggtgtcagtccacgttcatccagctttcaccccaccttacctt

SEQ ID NO: 518855 - DNA, 120 bp, Artificial Sequence
  ENSG00000165124_17 (sequence is synthesized)
ttcccaattggagatgttgctatcgtatacacggcaactgacctatccggcaaccaggccagctgcattttccatatcaaggttattgatgcagaaccacctgtcatagactggtgcaga

SEQ ID NO: 518856 - DNA, 120 bp, Artificial Sequence
  ENSG00000165124_18 (sequence is synthesized)
tctccacctcccgtccaggtctcggagaaggtacatgccgcaagctgggatgagcctcagttctcagacaactcaggggctgaattggtcattaccagaagtcatacacaaggagacctt

SEQ ID NO: 518857 - DNA, 120 bp, Artificial Sequence
  ENSG00000165124_19 (sequence is synthesized)
ttccctcaaggggagactatagtacagtatacagccactgacccctcaggcaataacaggacatgtgatatccatattgtcataaaaggttctccctgtgaaattccattcacacctgta

SEQ ID NO: 518858 - DNA, 120 bp, Artificial Sequence
  ENSG00000165124_20 (sequence is synthesized)
aatggggattttatatgcactccagataatactggagtcaactgtacattaacttgcttggagggctatgatttcacagaagggtctactgacaagtattattgtgcttatgaagatggc

SEQ ID NO: 518859 - DNA, 120 bp, Artificial Sequence
  ENSG00000165124_21 (sequence is synthesized)
gtctggaaaccaacatataccactgaatggccagactgtgccaaaaaacgttttgcaaaccacgggttcaagtcctttgagatgttctacaaagcagctcgttgtgatgacacagatctg

SEQ ID NO: 518860 - DNA, 120 bp, Artificial Sequence
  ENSG00000165124_22 (sequence is synthesized)
atgaagaagttttctgaagcatttgagacgaccctgggaaaaatggtcccatcattttgtagtgatgcagaggacattgactgcagactggaggagaacctgaccaaaaaatattgccta

SEQ ID NO: 518861 - DNA, 120 bp, Artificial Sequence
  ENSG00000165124_23 (sequence is synthesized)
gaatataattatgactatgaaaatggctttgcaattggaccaggtggctggggtgcagctaataggctggattactcttacgatgacttcctggacactgtgcaagaaacagccacaagc

SEQ ID NO: 518862 - DNA, 120 bp, Artificial Sequence
  ENSG00000165124_24 (sequence is synthesized)
atcggcaatgccaagtcctcacggattaaaagaagtgccccattatctgactataaaattaagttaatttttaacatcacagctagtgtgccattacccgatgaaagaaatgataccctt

SEQ ID NO: 518863 - DNA, 120 bp, Artificial Sequence
  ENSG00000165124_25 (sequence is synthesized)
gaatgggaaaatcagcaacgactccttcagacattggaaactatcacaaataaactgaaaaggactctcaacaaagaccccatgtattcctttcagcttgcatcagaaatacttatagcc

SEQ ID NO: 518864 - DNA, 120 bp, Artificial Sequence
  ENSG00000165124_26 (sequence is synthesized)
gacagcaattcattagaaacaaaaaaggcttcccccttctgcagaccaggctcagtgctgagagggcgtatgtgtgtcaattgccctttgggaacctattataatctggaacatttcacc

SEQ ID NO: 518865 - DNA, 120 bp, Artificial Sequence
  ENSG00000165124_27 (sequence is synthesized)
tgtgaaagctgccggatcggatcctatcaagatgaagaagggcaacttgagtgcaagctttgcccctctgggatgtacacggaatatatccattcaagaaacatctctgattgtaaagct

SEQ ID NO: 518866 - DNA, 120 bp, Artificial Sequence
  ENSG00000165124_28 (sequence is synthesized)
cagtgtaaacaaggcacctactcatacagtggacttgagacttgtgaatcgtgtccactgggcacttatcagccaaaatttggttcccggagctgcctctcgtgtccagaaaacacctca

SEQ ID NO: 518867 - DNA, 120 bp, Artificial Sequence
  ENSG00000165124_29 (sequence is synthesized)
actgtgaaaagaggagccgtgaacatttctgcatgtggagttccttgtccagaaggaaaattctcgcgttctgggttaatgccctgtcacccatgtcctcgtgactattaccaacctaat

SEQ ID NO: 518868 - DNA, 120 bp, Artificial Sequence
  ENSG00000165124_30 (sequence is synthesized)
gcagggaaggccttctgcctggcctgtcccttttatggaactaccccattcgctggttccagatccatcacagaatgttcaagttttagttcaactttctcagcggcagaggaaagtgtg

SEQ ID NO: 518869 - DNA, 120 bp, Artificial Sequence
  ENSG00000165124_31 (sequence is synthesized)
gtgccccctgcctctcttggacatattaaaaagaggcatgaaatcagcagtcaggttttccatgaatgcttctttaacccttgccacaatagtggaacctgccagcaacttgggcgtggt

SEQ ID NO: 518870 - DNA, 120 bp, Artificial Sequence
  ENSG00000165124_32 (sequence is synthesized)
tatgtttgtctctgtccacttggatatacaggcttaaagtgtgaaacagacatcgatgagtgcagcccactgccttgcctcaacaatggagtttgtaaagacctagttggggaattcatt

SEQ ID NO: 518871 - DNA, 120 bp, Artificial Sequence
  ENSG00000165124_33 (sequence is synthesized)
tgtgagtgcccatcaggttacacaggtcagcggtgtgaagaaaatataaatgagtgtagctccagtccttgtttaaataaaggaatctgtgttgatggtgtggctggctatcgttgcaca

SEQ ID NO: 518872 - DNA, 120 bp, Artificial Sequence
  ENSG00000165124_34 (sequence is synthesized)
tgtgtgaaaggatttgtaggcctgcattgtgaaacagaagtcaatgaatgccagtcaaacccatgcttaaataatgcagtctgtgaagaccaggttgggggattcttgtgcaaatgccca

SEQ ID NO: 518873 - DNA, 120 bp, Artificial Sequence
  ENSG00000165124_35 (sequence is synthesized)
cctggatttttgggtacccgatgtggaaagaacgtcgatgagtgtctcagtcagccatgcaaaaatggagctacctgtaaagacggtgccaatagcttcagatgcctgtgtgcagctggc

SEQ ID NO: 518874 - DNA, 120 bp, Artificial Sequence
  ENSG00000165124_36 (sequence is synthesized)
ttcacaggatcacactgtgaattgaacatcaatgaatgtcagtctaatccatgtagaaatcaggccacctgtgtggatgaattaaattcatacagttgtaaatgtcagccaggattttca

SEQ ID NO: 518875 - DNA, 120 bp, Artificial Sequence
  ENSG00000165124_37 (sequence is synthesized)
ggcaaaaggtgtgaaacagaacagtctacaggctttaacctggattttgaagtttctggcatctatggatatgtcatgctagatggcatgctcccatctctccatgctctaacctgtacc

SEQ ID NO: 518876 - DNA, 120 bp, Artificial Sequence
  ENSG00000165124_38 (sequence is synthesized)
ttctggatgaaatcctctgacgacatgaactatggaacaccaatctcctatgcagttgataacggcagcgacaataccttgctcctgactgattataacggctgggttctttatgtgaat

SEQ ID NO: 518877 - DNA, 120 bp, Artificial Sequence
  ENSG00000165124_39 (sequence is synthesized)
ggcagggaaaagataacaaactgtccctcggtgaatgatggcagatggcatcatattgcaatcacttggacaagtgccaatggcatctggaaagtctatatcgatgggaaattatctgac

SEQ ID NO: 518878 - DNA, 120 bp, Artificial Sequence
  ENSG00000165124_40 (sequence is synthesized)
ggtggtgctggcctctctgttggtttgcccatacctggtggtggtgcgttagttctggggcaagagcaagacaaaaaaggagagggattcagcccagctgagtcttttgtgggctccata

SEQ ID NO: 518879 - DNA, 120 bp, Artificial Sequence
  ENSG00000165124_41 (sequence is synthesized)
agccagctcaacctctgggactatgtcctgtctccacagcaggtgaagtcactggctacctcctgcccagaggaactcagtaaaggaaacgtgttagcatggcctgatttcttgtcagga

SEQ ID NO: 518880 - DNA, 120 bp, Artificial Sequence
  ENSG00000165124_42 (sequence is synthesized)
attgtggggaaagtgaagatcgattctaagagcatattttgttctgattgcccacgcttaggagggtcagtgcctcatctgagaactgcatctgaagatttaaagccaggttccaaagtc

SEQ ID NO: 518881 - DNA, 120 bp, Artificial Sequence
  ENSG00000165124_43 (sequence is synthesized)
aatctgttctgtgatccaggcttccagctggtcgggaaccctgtgcagtactgtctgaatcaaggacagtggacacaaccacttcctcactgtgaacgcattagctgtggggtgccacct

SEQ ID NO: 518882 - DNA, 120 bp, Artificial Sequence
  ENSG00000165124_44 (sequence is synthesized)
cctttggagaatggcttccattcagccgatgacttctatgctggcagcacagtaacctaccagtgcaacaatggctactatctattgggtgactcaaggatgttctgtacagataatggg

SEQ ID NO: 518883 - DNA, 120 bp, Artificial Sequence
  ENSG00000165124_45 (sequence is synthesized)
agctggaacggcgtttcaccatcctgccttgatgtcgatgagtgtgcagttggatcagattgtagtgagcatgcttcttgcctgaacgtagatggatcctacatatgttcatgtgtccca

SEQ ID NO: 518884 - DNA, 120 bp, Artificial Sequence
  ENSG00000165124_46 (sequence is synthesized)
ccgtacacaggagatgggaaaaactgtgcagaacctataaaatgtaaggctccaggaaatccggaaaatggccactcctcaggtgagatttatacagtaggtgccgaagtcacattttcg

SEQ ID NO: 518885 - DNA, 120 bp, Artificial Sequence
  ENSG00000165124_47 (sequence is synthesized)
tgtcaggaaggataccagttgatgggagtaaccaaaatcacatgtttggagtctggagaatggaatcatctaataccatattgtaaagctgtttcatgtggtaaaccggctattccagaa

SEQ ID NO: 518886 - DNA, 120 bp, Artificial Sequence
  ENSG00000165124_48 (sequence is synthesized)
aatggttgcattgaggagttagcatttacttttggcagcaaagtgacatataggtgtaataaaggatatactctggccggtgataaagaatcatcctgtcttgctaacagttcttggagt

SEQ ID NO: 518887 - DNA, 120 bp, Artificial Sequence
  ENSG00000165124_49 (sequence is synthesized)
cattcccctcctgtgtgtgaaccagtgaagtgttctagtccggaaaatataaataatggaaaatatattttgagtgggcttacctacctttctactgcatcatattcatgcgatacagga

SEQ ID NO: 518888 - DNA, 120 bp, Artificial Sequence
  ENSG00000165124_50 (sequence is synthesized)
gtggagaaccacctgccatcaaagatgctgtcattacggggaataacttcactttcaggaacaccgtcacttacacttgcaaagaaggctatactcttgctggtcttgacaccattgaat

SEQ ID NO: 518889 - DNA, 120 bp, Artificial Sequence
  ENSG00000165124_51 (sequence is synthesized)
gcctggccgacggcaagtggagtagaagtgaccagcagtgcctggctgtctcctgtgatgagccacccattgtggaccacgcctctccagagactgcccatcggctctttggagacattg

SEQ ID NO: 518890 - DNA, 120 bp, Artificial Sequence
  ENSG00000165124_52 (sequence is synthesized)
cattctactactgctctgatggttacagcctagcagacaattcccagcttctctgcaatgcccagggcaagtgggtacccccagaaggtcaagacatgccccgttgtatagctcatttct

SEQ ID NO: 518891 - DNA, 120 bp, Artificial Sequence
  ENSG00000165124_53 (sequence is synthesized)
gtgaaaaacctccatcggtttcctatagcatcttggaatctgtgagcaaagcaaaatttgcagctggctcagttgtgagctttaaatgcatggaaggctttgtactgaacacctcagcaa

SEQ ID NO: 518892 - DNA, 120 bp, Artificial Sequence
  ENSG00000165124_54 (sequence is synthesized)
agattgaatgtatgagaggtgggcagtggaacccttcccccatgtccatccagtgcatccctgtgcggtgtggagagccaccaagcatcatgaatggctatgcaagtggatcaaactaca

SEQ ID NO: 518893 - DNA, 120 bp, Artificial Sequence
  ENSG00000165124_55 (sequence is synthesized)
gttttggagccatggtggcttacagctgcaacaaggggttctacatcaaaggggaaaagaagagcacctgcgaagccacagggcagtggagtagtcctataccgacgtgccacccggtat

SEQ ID NO: 518894 - DNA, 120 bp, Artificial Sequence
  ENSG00000165124_56 (sequence is synthesized)
cttgtggtgaaccacctaaggttgagaatggctttctggagcatacaactggcaggatctttgagagtgaagtgaggtatcagtgtaacccgggctataagtcagtcggaagtcctgtat

SEQ ID NO: 518895 - DNA, 120 bp, Artificial Sequence
  ENSG00000165124_57 (sequence is synthesized)
ttgtctgccaagccaatcgccactggcacagtgaatcccctctgatgtgtgttcctctcgactgtggaaaacctcccccgatccagaatggcttcatgaaaggagaaaactttgaagtag

SEQ ID NO: 518896 - DNA, 120 bp, Artificial Sequence
  ENSG00000165124_58 (sequence is synthesized)
ggtccaaggttcagtttttctgtaatgagggttatgagcttgttggtgacagttcttggacatgtcagaaatctggcaaatggaataagaagtcaaatccaaagtgcatgcctgccaagt

SEQ ID NO: 518897 - DNA, 120 bp, Artificial Sequence
  ENSG00000165124_59 (sequence is synthesized)
gcccagagccgcccctcttggaaaaccagctagtattaaaggagttgaccaccgaggtaggagttgtgacattttcctgtaaagaagggcatgtcctgcaaggcccctctgtcctgaaat

SEQ ID NO: 518898 - DNA, 120 bp, Artificial Sequence
  ENSG00000165124_60 (sequence is synthesized)
gcttgccatcccagcaatggaatgactctttccctgtttgtaagattgttctttgtaccccacctcccctaatttcctttggtgtccccattccttcttctgctcttcattttggaagta

SEQ ID NO: 518899 - DNA, 120 bp, Artificial Sequence
  ENSG00000165124_61 (sequence is synthesized)
ctgtcaagtattcttgtgtaggtgggtttttcctaagaggaaattctaccaccctctgccaacctgatggcacctggagctctccactgccagaatgtgttccagtagaatgtccccaac

SEQ ID NO: 518900 - DNA, 120 bp, Artificial Sequence
  ENSG00000165124_62 (sequence is synthesized)
ctgaggaaatccccaatggaatcattgatgtgcaaggccttgcctatctcagcacagctctctatacctgcaagccaggctttgaattggtgggaaatactaccaccctttgtggagaaa

SEQ ID NO: 518901 - DNA, 120 bp, Artificial Sequence
  ENSG00000165124_63 (sequence is synthesized)
atggtcactggcttggaggaaaaccaacatgtaaagccattgagtgcctgaaacccaaggagattttgaatggcaaattctcttacacggacctacactatggacagaccgttacctact

SEQ ID NO: 518902 - DNA, 120 bp, Artificial Sequence
  ENSG00000165124_64 (sequence is synthesized)
cttgcaaccgaggctttcggctcgaaggtcccagtgccttgacctgtttagagacaggtgattgggatgtagatgccccatcttgcaatgccatccactgtgattccccacaacccattg

SEQ ID NO: 518903 - DNA, 120 bp, Artificial Sequence
  ENSG00000165124_65 (sequence is synthesized)
aaaatggttttgtagaaggtgcagattacagctatggtgccataatcatctacagttgcttccctgggtttcaggtggctggtcatgccatgcagacctgtgaagagtcaggatggtcaa

SEQ ID NO: 518904 - DNA, 120 bp, Artificial Sequence
  ENSG00000165124_66 (sequence is synthesized)
gttccatcccaacatgtatgccaatagactgtggcctccctcctcatatagattttggagactgtactaaactcaaagatgaccagggatattttgagcaagaagacgacatgatggaag

SEQ ID NO: 518905 - DNA, 120 bp, Artificial Sequence
  ENSG00000165124_67 (sequence is synthesized)
ttccatatgtgactcctcaccctccttatcatttgggagcagtggctaaaacctgggaaaatacaaaggagtctcctgctacacattcatcaaactttctgtatggtaccatggtttcat

SEQ ID NO: 518906 - DNA, 120 bp, Artificial Sequence
  ENSG00000165124_68 (sequence is synthesized)
acacctgtaatccaggatatgaacttctggggaaccctgtgctgatctgccaggaagatggaacttggaatggcagtgcaccatcctgcatttcaattgaatgtgacttgcctactgctc

SEQ ID NO: 518907 - DNA, 120 bp, Artificial Sequence
  ENSG00000165124_69 (sequence is synthesized)
ctgaaaatggctttttgcgttttacagagactagcatgggaagtgctgtgcagtatagctgtaaacctggacacattctagcaggctctgacttaaggctttgtctagagaatagaaagt

SEQ ID NO: 518908 - DNA, 120 bp, Artificial Sequence
  ENSG00000165124_70 (sequence is synthesized)
ggagtggtgcctccccacgctgtgaagccatttcatgcaaaaagccaaatccagtcatgaatggatccatcaaaggaagcaactacacatacctgagcacgttgtactatgagtgtgacc

SEQ ID NO: 518909 - DNA, 120 bp, Artificial Sequence
  ENSG00000165124_71 (sequence is synthesized)
ccggatatgtgctgaatggcactgagaggagaacatgccaggatgacaaaaactgggatgaggatgagcccatttgcattcctgtggactgcagttcacccccagtctcagccaatggcc

SEQ ID NO: 518910 - DNA, 120 bp, Artificial Sequence
  ENSG00000165124_72 (sequence is synthesized)
aggtgagaggagacgagtacacattccaaaaagagattgaatacacttgcaatgaagggttcttgcttgagggagccaggagtcgggtttgtcttgccaatggaagttggagtggagcca

SEQ ID NO: 518911 - DNA, 120 bp, Artificial Sequence
  ENSG00000165124_73 (sequence is synthesized)
ctcccgactgtgtgcctgtcagatgtgccaccccgccacaactggccaatggggtgacggaaggcctggactatggcttcatgaaggaagtaacattccactgtcacgagggctacatct

SEQ ID NO: 518912 - DNA, 120 bp, Artificial Sequence
  ENSG00000165124_74 (sequence is synthesized)
tgcacggtgctccaaaactcacctgtcagtcagatggcaactgggatgcagagattcctctctgtaaaccagtcaactgtggacctcctgaagatcttgcccatggtttccctaatggtt

SEQ ID NO: 518913 - DNA, 120 bp, Artificial Sequence
  ENSG00000165124_75 (sequence is synthesized)
tttcctttattcatgggggccatatacagtatcagtgctttcctggttataagctccatggaaattcatcaagaaggtgcctctccaatggctcctggagtggcagctcaccttcctgcc

SEQ ID NO: 518914 - DNA, 120 bp, Artificial Sequence
  ENSG00000165124_76 (sequence is synthesized)
tgccttgcagatgttccacaccagtaattgaatatggaactgtcaatgggacagattttgactgtggaaaggcagcccggattcagtgcttcaaaggcttcaagctcctaggactttctg

SEQ ID NO: 518915 - DNA, 120 bp, Artificial Sequence
  ENSG00000165124_77 (sequence is synthesized)
aaatcacctgtgaagccgatggccagtggagctctgggttcccccactgtgaacacacttcttgtggttctcttccaatgataccaaatgcgttcatcagtgagaccagctcttggaagg

SEQ ID NO: 518916 - DNA, 120 bp, Artificial Sequence
  ENSG00000165124_78 (sequence is synthesized)
aaaatgtgataacttacagctgcaggtctggatatgtcatacaaggcagttcagatctgatttgtacagagaaaggggtatggagccagccttatccagtctgtgagcccttgtcctgtg

SEQ ID NO: 518917 - DNA, 120 bp, Artificial Sequence
  ENSG00000165124_79 (sequence is synthesized)
ggtccccaccgtctgtcgccaatgcagtggcaactggagaggcacacacctatgaaagtgaagtgaaactcagatgtctggaaggttatacgatggatacagatacagatacattcacct

SEQ ID NO: 518918 - DNA, 120 bp, Artificial Sequence
  ENSG00000165124_80 (sequence is synthesized)
gtcagaaagatggtcgctggttccctgagagaatctcctgcagtcctaaaaaatgtcctctcccggaaaacataacacatatacttgtacatggggacgatttcagtgtgaataggcaag

SEQ ID NO: 518919 - DNA, 120 bp, Artificial Sequence
  ENSG00000165124_81 (sequence is synthesized)
tttctgtgtcatgtgcagaagggtatacctttgagggagttaacatatcagtatgtcagcttgatggaacctgggagccaccattctccgatgaatcttgcagtccagtttcttgtggga

SEQ ID NO: 518920 - DNA, 120 bp, Artificial Sequence
  ENSG00000165124_82 (sequence is synthesized)
aacctgaaagtccagaacatggatttgtggttggcagtaaatacacctttgaaagcacaattatttatcagtgtgagcctggctatgaactagaggggaacagggaacgtgtctgccagg

SEQ ID NO: 518921 - DNA, 120 bp, Artificial Sequence
  ENSG00000165124_83 (sequence is synthesized)
agaacagacagtggagtggaggggtggcaatatgcaaagagaccaggtgtgaaactccacttgaatttctcaatgggaaagctgacattgaaaacaggacgactggacccaacgtggtat

SEQ ID NO: 518922 - DNA, 120 bp, Artificial Sequence
  ENSG00000165124_84 (sequence is synthesized)
attcctgcaacagaggctacagtcttgaagggccatctgaggcacactgcacagaaaatggaacctggagccacccagtccctctctgcaaaccaaatccatgccctgttccttttgtga

SEQ ID NO: 518923 - DNA, 120 bp, Artificial Sequence
  ENSG00000165124_85 (sequence is synthesized)
ttcccgagaatgctctgctgtctgaaaaggagttttatgttgatcagaatgtgtccatcaaatgtagggaaggttttctgctgcagggccacggcatcattacctgcaaccccgacgaga

SEQ ID NO: 518924 - DNA, 120 bp, Artificial Sequence
  ENSG00000165124_86 (sequence is synthesized)
cgtggacacagacaagcgccaaatgtgaaaaaatctcatgtggtccaccagctcacgtagaaaatgcaattgctcgaggcgtacattatcaatatggagacatgatcacctactcatgtt

SEQ ID NO: 518925 - DNA, 120 bp, Artificial Sequence
  ENSG00000165124_87 (sequence is synthesized)
acagtggatacatgttggagggtttcctgaggagtgtttgtttagaaaatggaacatggacatcacctcctatttgcagagctgtctgtcgatttccatgtcagaatgggggcatctgcc

SEQ ID NO: 518926 - DNA, 120 bp, Artificial Sequence
  ENSG00000165124_88 (sequence is synthesized)
aacgcccaaatgcttgttcctgtccagagggctggatggggcgcctctgtgaagaaccaatctgcattcttccctgtctgaacggaggtcgctgtgtggccccttaccagtgtgactgcc

SEQ ID NO: 518927 - DNA, 120 bp, Artificial Sequence
  ENSG00000165124_89 (sequence is synthesized)
cgcctggctggacggggtctcgctgtcatacagctgtttgccagtctccctgcttaaatggtggaaaatgtgtaagaccaaaccgatgtcactgtctttcttcttggacgggacataact

SEQ ID NO: 518928 - DNA, 120 bp, Artificial Sequence
  ENSG00000165124_90 (sequence is synthesized)
gttccaggaaaaggaggactgggttttaaccactgcacgaccatctggctctcccaaaagcaggatcatctctcctcggtagtgcctgggcatcctggaacttatgcaaagaaagtccaa

SEQ ID NO: 518929 - DNA, 120 bp, Artificial Sequence
  ENSG00000165124_91 (sequence is synthesized)
catggtgctgggtcttgtttagtaaacttgttacttggggttactttttttattttgtgatatattttgttattccttgtgacatactttcttacatgtttccatttttaaatatgcctg

SEQ ID NO: 518930 - DNA, 120 bp, Artificial Sequence
  ENSG00000165124_92 (sequence is synthesized)
tattttctatataaaaattatattaaatagatgctgctctaccctcacaaaatgtacatattctgctgtctattgggaaagttcctggtacacatttttattcagttacttaaaatgatt

SEQ ID NO: 518931 - DNA, 120 bp, Artificial Sequence
  ENSG00000165124_93 (sequence is synthesized)
tttccattaaagtatattttgctactaaataatattttgctggatagtaccattttatgaggtggccaagggattcatagagaggactcatgatctttcatctgtgccactggcaccaca

SEQ ID NO: 518932 - DNA, 120 bp, Artificial Sequence
  ENSG00000165124_94 (sequence is synthesized)
taggagaccccttacaataaaggagacccctttgttctggttccatcttctatacaatatgtgtaataataaaagctttttctttcatttaatcaatcagagagtaactgttggacctgg

SEQ ID NO: 518933 - DNA, 120 bp, Artificial Sequence
  ENSG00000165124_95 (sequence is synthesized)
tactctccaccacataattatgtcctggtacttagggtagcctggctaattcttttcacaacatttgaaaagccgtaggcattaacttcatggatgtggagaaacagcataatgaccttg

SEQ ID NO: 518934 - DNA, 120 bp, Artificial Sequence
  ENSG00000165124_96 (sequence is synthesized)
gttcacaatgaaagtgctagccttctttctcgtggctggaataagaaatgcaagaactggaagattaacaaagagctgatacccggactggtaatcccacaactcactattttgggagga

SEQ ID NO: 518935 - DNA, 120 bp, Artificial Sequence
  ENSG00000165124_97 (sequence is synthesized)
aggggaagacagggaaagagaaggaaaaaggcaaatgggaaacattccccagagctgtgctcctggtctcacctgcaaaaaagaattgcagccacctaagagaaagctgagctgcccctc

SEQ ID NO: 518936 - DNA, 120 bp, Artificial Sequence
  ENSG00000165124_98 (sequence is synthesized)
agtcctcactgtcacctacctctatcacaacaattgtaccaagatgaagccttccccagacttcagaaaataaagtcaaaccctagattttgttttaaaataggaaactcagaatcaact

SEQ ID NO: 518937 - DNA, 120 bp, Artificial Sequence
  ENSG00000165124_99 (sequence is synthesized)
tgcctccatcctctgggaaaactgctcccacacaggccttggagtgtgttgtagcactgtggaggaatgcagaaaggatgaaagagatcttgattctcctagtggttctcttcactaccg

SEQ ID NO: 518938 - DNA, 120 bp, Artificial Sequence
  ENSG00000165124_100 (sequence is synthesized)
taggcatccctcagccattgactcctccttctttctcttgacattcactttcttggccagtcttacatgcttatgagtctactttccaataaatttactcatagtccattaacttccaaa

SEQ ID NO: 518939 - DNA, 120 bp, Artificial Sequence
  ENSG00000165124_101 (sequence is synthesized)
agggagagaaggagggaagcgggagatttttcttgactgccccctttccttcaaacattttataggcttcagggagagagaggaggaggagagagggaagaaaaaaagaggagagcgaga

SEQ ID NO: 518940 - DNA, 120 bp, Artificial Sequence
  ENSG00000165124_102 (sequence is synthesized)
tgaagaacgtgagttgctcttcagatcttactttgagtcctgacaaattgcctggatgctcccacctgaggggagttaccaggaaatggttgtactgttgggaagaattcatttgctgta

SEQ ID NO: 518941 - DNA, 120 bp, Artificial Sequence
  ENSG00000165124_103 (sequence is synthesized)
tcacatgttccctggcacaaatttgcaaaagtcttcttgagaaggagcttgttgtaaagtctccaagctatcctcttcccttaactcaaggtctactatgtgctatgtcagtcattgctg

SEQ ID NO: 518942 - DNA, 120 bp, Artificial Sequence
  ENSG00000165124_104 (sequence is synthesized)
cagttggtataaacgtgcaccactgcaaaacatgtactttgcaggtaatatttgcagctcaccatttcctctttgttgttaagaatagtttctactcattaagaaaataagaaaagctgg

SEQ ID NO: 518943 - DNA, 120 bp, Artificial Sequence
  ENSG00000165124_105 (sequence is synthesized)
tttgcccatacctggtatgttttaacaaaatgagtataattctgttggactctagaggtgatgctgcttaaatggacatcaggtttgctagcattgttgttcttggtttcaaacaaagat

SEQ ID NO: 518944 - DNA, 120 bp, Artificial Sequence
  ENSG00000165124_106 (sequence is synthesized)
taacagctatctctcttatttcctactccctgattatcctaactgtgggttattagaagcttttttcctaagtaagctgtttgcctctctgtgtgagaaatgcctttgaagatctacatt

SEQ ID NO: 518945 - DNA, 120 bp, Artificial Sequence
  ENSG00000165124_107 (sequence is synthesized)
aagactaccaagaagcatgctgaattagcagctggttgctaaactgtcttctaaggagattaattactggtattttttgtttattttaaggattgttttgttttgtaatcagtatataag

SEQ ID NO: 518946 - DNA, 120 bp, Artificial Sequence
  ENSG00000165124_108 (sequence is synthesized)
caggaccactgctatccatcttttatggcccttttcaaatagatcttggcttgtcttctaaaaaatactttttaataaatatcccaggagttttagtttgaagaattgcaaactaaattt

SEQ ID NO: 518947 - DNA, 120 bp, Artificial Sequence
  ENSG00000165124_109 (sequence is synthesized)
cattaggtgacccaggttctcagcattgtacatggcaataagcttgttctatctggatacatctatagaagtatatgcatatgacattattttttactttgctcatttgtttcaggtata

SEQ ID NO: 518948 - DNA, 120 bp, Artificial Sequence
  ENSG00000165124_110 (sequence is synthesized)
caggtatactaaaagaaaattaaatagacaaaaatgaattaaagtattagaaactgactaatacattctagaagtaagttgtatgaaactaggatacgtatactaataaatatagcacaa

SEQ ID NO: 518949 - DNA, 120 bp, Artificial Sequence
  ENSG00000165124_111 (sequence is synthesized)
aatatagcacaaaaatactaaacttcataaaaatgcggtgagatgacccttgcgaagcctcaaatacaatacttattttatttattagaaattattggccaggtacggtggctcacgcct

SEQ ID NO: 518950 - DNA, 120 bp, Artificial Sequence
  ENSG00000165124_112 (sequence is synthesized)
gaggagggtggatcacgaggtcaggagttggagaccgccctggacaatatggtgaagccctatctctactaaaaacgcacagaaaaattagccaggcatggtggtagatgcctgtaattc

SEQ ID NO: 518951 - DNA, 120 bp, Artificial Sequence
  ENSG00000165124_113 (sequence is synthesized)
gaggcaaactagaaacattaacttctattaatttattcatcaagtattttaggatggctaaataatttgataatgtgctgaaagatcattaaggttatatcaaattttagtaacaaataa

SEQ ID NO: 518952 - DNA, 120 bp, Artificial Sequence
  ENSG00000165124_114 (sequence is synthesized)
tatttgccaggattcttaaaaatgacaaaaactaagaaaactaagtcacatatgctggtaaaattcaaatgttgatgtatcctaaaagagaatagtaataaagtcctaacagcaactttt

SEQ ID NO: 518953 - DNA, 120 bp, Artificial Sequence
  ENSG00000165125_0 (sequence is synthesized)
agagtcctggctggctctgccaagtgtaacaaactcacagccctctccaaactggctggggctgctgggagactcccaaggaactcgtcaggaaggcaggagacaggagacgggacctct

SEQ ID NO: 518954 - DNA, 120 bp, Artificial Sequence
  ENSG00000165125_1 (sequence is synthesized)
acagggagacggtgggccggcccttgggggggctgatgtggccccaaggctgagtcccgtcagggtctggcctcggcctcaggcccccaaggagccggccctacaccccatgggtttgtc

SEQ ID NO: 518955 - DNA, 120 bp, Artificial Sequence
  ENSG00000165125_2 (sequence is synthesized)
actgcccaaggagaaagggctaattctctgcctatggagcaagttctgcagatggttccagagacgggagtcctgggcccagagccgagatgagcagaacctgctgcagcagaagaggat

SEQ ID NO: 518956 - DNA, 120 bp, Artificial Sequence
  ENSG00000165125_3 (sequence is synthesized)
ctgggagtctcctctccttctagctgccaaagataatgatgtccaggccctgaacaagttgctcaagtatgaggattgcaaggtgcaccagagaggagccatgggggaaacagcgctaca

SEQ ID NO: 518957 - DNA, 120 bp, Artificial Sequence
  ENSG00000165125_4 (sequence is synthesized)
catagcagccctctatgacaacctggaggccgccatggtgctgatggaggctgccccggagctggtctttgagcccatgacatctgagctctatgagggtcagactgcactgcacatcgc

SEQ ID NO: 518958 - DNA, 120 bp, Artificial Sequence
  ENSG00000165125_5 (sequence is synthesized)
tgttgtgaaccagaacatgaacctggtgcgagccctgcttgcccgcagggccagtgtctctgccagagccacaggcactgccttccgccgtagtccctgcaacctcatctactttgggga

SEQ ID NO: 518959 - DNA, 120 bp, Artificial Sequence
  ENSG00000165125_6 (sequence is synthesized)
gcaccctttgtcctttgctgcctgtgtgaacagtgaggagatcgtgcggctgctcattgagcatggagctgacatccgggcccaggactccctgggaaacacagtgttacacatcctcat

SEQ ID NO: 518960 - DNA, 120 bp, Artificial Sequence
  ENSG00000165125_7 (sequence is synthesized)
cctccagcccaacaaaacctttgcctgccagatgtacaacctgttgctgtcctacgacagacatggggaccacctgcagcccctggacctcgtgcccaatcaccagggtctcaccccttt

SEQ ID NO: 518961 - DNA, 120 bp, Artificial Sequence
  ENSG00000165125_8 (sequence is synthesized)
caagctggctggagtggagggtaacactgtgatgtttcagcacctgatgcagaagcggaagcacacccagtggacgtatggaccactgacctcgactctctatgacctcacagagatcga

SEQ ID NO: 518962 - DNA, 120 bp, Artificial Sequence
  ENSG00000165125_9 (sequence is synthesized)
ctcctcaggggatgagcagtccctgctggaacttatcatcaccaccaagaagcgggaggctcgccagatcctggaccagacgccggtgaaggagctggtgagcctcaagtggaagcggta

SEQ ID NO: 518963 - DNA, 120 bp, Artificial Sequence
  ENSG00000165125_10 (sequence is synthesized)
cgggcggccgtacttctgcatgctgggtgccatatatctgctgtacatcatctgcttcaccatgtgctgcatctaccgccccctcaagcccaggaccaataaccgcacgagcccccggga

SEQ ID NO: 518964 - DNA, 120 bp, Artificial Sequence
  ENSG00000165125_11 (sequence is synthesized)
caacaccctcttacagcagaagctacttcaggaagcctacatgacccctaaggacgatatccggctggtcggggagctggtgactgtcattggggctatcatcatcctgctggtagaggt

SEQ ID NO: 518965 - DNA, 120 bp, Artificial Sequence
  ENSG00000165125_12 (sequence is synthesized)
ctcgcttctttggacagaccatccttgggggcccattccatgtcctcatcatcacctatgccttcatggtgctggtgaccatggtgatgcggctcatcagtgccagcggggaggtggtac

SEQ ID NO: 518966 - DNA, 120 bp, Artificial Sequence
  ENSG00000165125_13 (sequence is synthesized)
ccatgtcctttgcactcgtgctgggctggtgcaacgtcatgtacttcgcccgaggattccagatgctaggccccttcaccatcatgattcagaagatgatttttggcgacctgatgcgat

SEQ ID NO: 518967 - DNA, 120 bp, Artificial Sequence
  ENSG00000165125_14 (sequence is synthesized)
tctgctggctgatggctgtggtcatcctgggctttgcttcagccttctatatcatcttccagacagaggaccccgaggagctaggccacttctacgactaccccatggccctgttcagca

SEQ ID NO: 518968 - DNA, 120 bp, Artificial Sequence
  ENSG00000165125_15 (sequence is synthesized)
ccttcgagctgttccttaccatcatcgatggcccagccaactacaacgtggacctgcccttcatgtacagcatcacctatgctgcctttgccatcatcgccacactgctcatgctcaacc

SEQ ID NO: 518969 - DNA, 120 bp, Artificial Sequence
  ENSG00000165125_16 (sequence is synthesized)
tcctcattgccatgatgggcgacactcactggcgagtggcccatgagcgggatgagctgtggagggcccagattgtggccaccacagtgatgctggagcggaagctgcctcgctgcctgt

SEQ ID NO: 518970 - DNA, 120 bp, Artificial Sequence
  ENSG00000165125_17 (sequence is synthesized)
ggcctcgctccgggatctgcggacgggagtatggcctgggagaccgctggttcctgcgggtggaagacaggcaagatctcaaccggcagcggatccaacgctacgcacaggccttccaca

SEQ ID NO: 518971 - DNA, 120 bp, Artificial Sequence
  ENSG00000165125_18 (sequence is synthesized)
cccggggctctgaggatttggacaaagactcagtggaaaaactagagctgggctgtcccttcagcccccacctgtcccttcctatgccctcagtgtctcgaagtacctcccgcagcagtg

SEQ ID NO: 518972 - DNA, 120 bp, Artificial Sequence
  ENSG00000165125_19 (sequence is synthesized)
ccaattgggaaaggcttcggcaagggaccctgaggagagacctgcgtgggataatcaacaggggtctggaggacggggagagctgggaatatcagatctgactgcgtgttctcacttcgc

SEQ ID NO: 518973 - DNA, 120 bp, Artificial Sequence
  ENSG00000165125_20 (sequence is synthesized)
ttcctggaacttgctctcattttcctgggtgcatcaaacaaaacaaaaaccaaacacccagaggtctcatctcccaggccccaggggagaaagaggagtagcatgaacgccaaggaatgt

SEQ ID NO: 518974 - DNA, 120 bp, Artificial Sequence
  ENSG00000165125_21 (sequence is synthesized)
acgttgagaatcactgctccaggcctgcattactccttcagctctggggcagaggaagcccagcccaagcacggggctggcagggcgtgaggaactctcctgtggcctgctcatcaccct

SEQ ID NO: 518975 - DNA, 120 bp, Artificial Sequence
  ENSG00000165125_22 (sequence is synthesized)
tccgacaggagcactgcatgtcagagcactttaaaaacaggccagcctgcttgggcgctcggtctccaccccagggtcataagtggggagagagcccttcccagggcacccaggcaggtg

SEQ ID NO: 518976 - DNA, 120 bp, Artificial Sequence
  ENSG00000165125_23 (sequence is synthesized)
cagggaagtgcagagcttgtggaaagcgtgtgagtgagggagacaggaacggctctgggggtgggaagtggggctaggtcttgccaactccatcttcaataaagtcgttttcggatccct

SEQ ID NO: 518977 - DNA, 120 bp, Artificial Sequence
  ENSG00000165125_24 (sequence is synthesized)
agagtcctggctggctctgccaagtgtaacaaactcacagccctctccaaactggctggggctgctgggagactcccaaggaactcgtcaggaaggcaggaccaataaccgcacgagccc

SEQ ID NO: 518978 - DNA, 120 bp, Artificial Sequence
  ENSG00000165125_25 (sequence is synthesized)
tagaacgcctgccccctgaaatgccaggggcctagagaagaggaagagatgggcagcagctggatcccctgggaatcctgaacacccgagagctccctgttctccatcccaggctacccc

SEQ ID NO: 518979 - DNA, 120 bp, Artificial Sequence
  ENSG00000165125_26 (sequence is synthesized)
gcgatccctgatgcttagatcccattctcaactcagaaatttttcaacccctcccactgtggttacctgttccctttcttgcccactccttttcccctgaggcattgggggttacagagt

SEQ ID NO: 518980 - DNA, 120 bp, Artificial Sequence
  ENSG00000165125_27 (sequence is synthesized)
ctagatcccatgctaggattgtctgtaatgccccagcccaccttccctttcagcccccagagcagggccctccagcctctcgtctctcctttccaaactctggagggagtcatgggagag

SEQ ID NO: 518981 - DNA, 120 bp, Artificial Sequence
  ENSG00000165125_28 (sequence is synthesized)
gatgaggaacctatgaatgtcactgtgaatgtgggttcttctgccctctaaaggctgtcatcaaaatgaaagggcagccaccttctccaggggtgccgtcctcctgcacatgcatcctat

SEQ ID NO: 518982 - DNA, 120 bp, Artificial Sequence
  ENSG00000165125_29 (sequence is synthesized)
ccatcccttccctcaacagggctccagttccactccttggattcctgacctctcaagaaccttagctccagagccccctctctagtgctgtgtgtatgaccctgggcattgagtgtgggg

SEQ ID NO: 518983 - DNA, 120 bp, Artificial Sequence
  ENSG00000165125_30 (sequence is synthesized)
aggctgaatctgcatgtgtgggtactttcccagctacattcttgctgtcaggtccccaggatcatcccagccctcccctcatcaccctcctccctgctcccccagcatcacctatgcctt

SEQ ID NO: 518984 - DNA, 120 bp, Artificial Sequence
  ENSG00000165125_31 (sequence is synthesized)
gggccatggcagggaagagatgaggaagtctagggggcactggctctggctaaacttggggaggaggagtaatgcagagatcagaggagacctatggtatcagaggatgggacgtcctcc

SEQ ID NO: 518985 - DNA, 120 bp, Artificial Sequence
  ENSG00000165125_32 (sequence is synthesized)
agaggtgagaaaaatcgggagtgttagggagaggtggctcttaggatcaagatgaggctcatacaaaactagggaccgtaaaaacccaaagtttggagcactgcagagctggtgatattg

SEQ ID NO: 518986 - DNA, 120 bp, Artificial Sequence
  ENSG00000165125_33 (sequence is synthesized)
ggtaaggcccccttggtctgctcccttccccacctccccaggcctgcacctctacccctcacccctccctcacctcccgtctttgtttggcacctttggctggacagatggtgctcccag

SEQ ID NO: 518987 - DNA, 120 bp, Artificial Sequence
  ENSG00000165125_34 (sequence is synthesized)
gcccggactggctccttgggagcattctgtcttaagagcctcagcctgtagggctggtgaaagaggatggggttgagatgggcacaggtgttcactatcttaagatctaattcgattctg

SEQ ID NO: 518988 - DNA, 120 bp, Artificial Sequence
  ENSG00000165125_35 (sequence is synthesized)
caagcctcttgtgagtacttctctaagggccaggcgtcttgctggggcttgtaaggatagagcatcacagcccctccacccaagaggggacggcaggtgaggacaatgccttctgtatct

SEQ ID NO: 518989 - DNA, 120 bp, Artificial Sequence
  ENSG00000165125_36 (sequence is synthesized)
ccactgcttgcctctagaacagtctctctggcaggaacacatagtatacatatgttcgcatggaggaatgagtgaacgattgaatgaatgaagcagagagaaccgcggacaccaggaacc

SEQ ID NO: 518990 - DNA, 120 bp, Artificial Sequence
  ENSG00000165125_37 (sequence is synthesized)
agaaaataagacaaaatgtgaaaaaagtgaccattcctatgtatctgtctcatcagacactgaccaaggccttactatttgcccagcactggggggatatgaagacctacaacgctcaaa

SEQ ID NO: 518991 - DNA, 120 bp, Artificial Sequence
  ENSG00000165125_38 (sequence is synthesized)
cccaaccttgaggtgtatttctctctcagtgcgggtggggactgaggggaagcgggtcaaaataacagatgttccgaggacctgtgctcttccgcattcaggtggtggaaatcgagactc

SEQ ID NO: 518992 - DNA, 120 bp, Artificial Sequence
  ENSG00000165125_39 (sequence is synthesized)
tagcgtttaagccctaaggacattcactggtggcttccagcccctgaaaacttcctaaacccgtgtcctgctttcttcaccatgacagcttggagtacagagcaggagaggagcagggaa

SEQ ID NO: 518993 - DNA, 120 bp, Artificial Sequence
  ENSG00000165125_40 (sequence is synthesized)
tcggaactcagggctatccctgcatgtggtctcttcttcaaggtctctaatagagttctctacccagttggtggcatgctagaaggaagtcctgcctgttggggctttccctgggtcacg

SEQ ID NO: 518994 - DNA, 120 bp, Artificial Sequence
  ENSG00000165125_41 (sequence is synthesized)
aaggaggcagatgtctggtcatagaggaaagcctgaagtctttgtgccttagggtttttctctgaccccaagagtaggagcctgctttagcctgaccggggaggctgcctggaggcccct

SEQ ID NO: 518995 - DNA, 120 bp, Artificial Sequence
  ENSG00000165125_42 (sequence is synthesized)
gtgttttcttttgctgaaggattctgggttggggatggtctctttctgtgaattatggcttcccatctctccagccgcccacctctcccccaaggcctgggagagtggggactggagcac

SEQ ID NO: 518996 - DNA, 120 bp, Artificial Sequence
  ENSG00000165125_43 (sequence is synthesized)
atgtttggctgatgacatcttggggcaacagaatggcattgttgttagagagtaggtcgtcctcactggcttcactcatcctcttcccactcttaggaccccagggccaggggatccagg

SEQ ID NO: 518997 - DNA, 120 bp, Artificial Sequence
  ENSG00000165125_44 (sequence is synthesized)
cacagagtgcaaaaaggcctgggggattggaaggggtggtggagattccctgtgtgcgatatcaggggagagcagaggggaggccctgcgctgagtggctgagaataggctgcttccgca

SEQ ID NO: 518998 - DNA, 120 bp, Artificial Sequence
  ENSG00000165125_45 (sequence is synthesized)
tgtcctgtctgccctcacttttcctcagatcatatgggggctgcctctgcagactttggctagaaaggcttgatgtcacccttgggagggatcccccctccctgccctgatctccttact

SEQ ID NO: 518999 - DNA, 120 bp, Artificial Sequence
  ENSG00000165125_46 (sequence is synthesized)
ggcctccgcactttcttggccttcttcttgctggatatcaggtgtccagagcaatgactcttctttgggtgggcacttcccagaaggatgctgaaattgcctgcaaggggagtttcctaa

SEQ ID NO: 519000 - DNA, 120 bp, Artificial Sequence
  ENSG00000165125_47 (sequence is synthesized)
tctgtgccgtcaaccaaagagaaggcatgggggcattgagataaacatgggatgactaagtaaataggaacaatatggacaagtgaggggtgagctaatggaagaaaggagcacacaatg

SEQ ID NO: 519001 - DNA, 120 bp, Artificial Sequence
  ENSG00000165125_48 (sequence is synthesized)
attgagaacccagtgctgtactaggtactaccacctgccttatctccgtcatcccggtaacaataatggaaggtgggtcctgttatccccctatgaatggggcaggcccagaaccctaga

SEQ ID NO: 519002 - DNA, 120 bp, Artificial Sequence
  ENSG00000165125_49 (sequence is synthesized)
gcaagtaaatggtgaagttgaatttgttccaaaggggactcacagggagaactgtggggtgggattgcgtgggattccatgcggtacaggatggtctagtgagaaaggaaggctttgagt

SEQ ID NO: 519003 - DNA, 120 bp, Artificial Sequence
  ENSG00000165125_50 (sequence is synthesized)
ctctccaggatgatcgggaacccaaactcctctttttacagtggacgtttcttggtgcttagcacgcagcccgctctgcttaaatctacattgctgggatccaagtcgagctctcaactt

SEQ ID NO: 519004 - DNA, 120 bp, Artificial Sequence
  ENSG00000165125_51 (sequence is synthesized)
tctcccgtgtcctccaggtcatctcccccttgggcttgggttttctcacttcctgatatttaatgcattacacatttattgaacataaggcactccacctttctgcagaaaatgaatatg

SEQ ID NO: 519005 - DNA, 120 bp, Artificial Sequence
  ENSG00000165125_52 (sequence is synthesized)
acactgttcctgctctcagggagttctcattcctatgaccaaagtttactgaaggcacatacggggctaaagatgggcttagtagacatcactagaagggtgtaaatgagtgttctggaa

SEQ ID NO: 519006 - DNA, 120 bp, Artificial Sequence
  ENSG00000165125_53 (sequence is synthesized)
gcatagagggggaagtgtgagatctgatttcggctgctgtggggtgtcctgggcagcttcatagaggctgcttaacctgaaccccactccagcccatgtgctggcactttgtcatctaag

SEQ ID NO: 519007 - DNA, 120 bp, Artificial Sequence
  ENSG00000165125_54 (sequence is synthesized)
gagcaatttggagggaaggtgatgcttgttggagctttttttagggttaaatacctgtatgaaatgtgtgaattgagtgtctgaaaagtcatccctgggtttctctggtatattgtgcac

SEQ ID NO: 519008 - DNA, 120 bp, Artificial Sequence
  ENSG00000165125_55 (sequence is synthesized)
gcttgccttggtaaatacttacacacatgcctacttgtaaatgcgcaaatagacatgtgcacaaaaggagctgtggcacttaggatggcagccgattccaaatctctaaacaaccacttt

SEQ ID NO: 519009 - DNA, 120 bp, Artificial Sequence
  ENSG00000165125_56 (sequence is synthesized)
ggctttctcatccccattgccaggaacatgagctggagggaggtggcccacaagtgcccaatgtatgcctccgccccacacattaccgctctttccttcatctgtggtcactgctcaggc

SEQ ID NO: 519010 - DNA, 120 bp, Artificial Sequence
  ENSG00000165125_57 (sequence is synthesized)
ttgccccccaacctccaagaaaaatcaggaggagccataaaactagaagaaccacataatttagtggtcagagcctggggctggattcttggccaagcatcctgcctttaactccgtgtg

SEQ ID NO: 519011 - DNA, 120 bp, Artificial Sequence
  ENSG00000165125_58 (sequence is synthesized)
atcttctggcaatgatttggttatgccgcttcagtttccttttctgaagcatgggagaactattcagctggtgttagaaggttgtaaagagcaaaagtgataatgagtgagatgctgcgg

SEQ ID NO: 519012 - DNA, 120 bp, Artificial Sequence
  ENSG00000165125_59 (sequence is synthesized)
gaatgagaggggccatgaacttcccctgcacagcactgtatccacccaggaatgcaagaagccacgcactccgagcaaccctgttatgtaccagccccagccctgcccagagggtacact

SEQ ID NO: 519013 - DNA, 120 bp, Artificial Sequence
  ENSG00000165125_60 (sequence is synthesized)
cactggtgggaaaggtatttgtggagagaccagtgggacccatgcctgtcttctctaactcctcttccagccctgattaaaactgagaatcgtgaccaagaaatgaccagtggggcatgc

SEQ ID NO: 519014 - DNA, 120 bp, Artificial Sequence
  ENSG00000165125_61 (sequence is synthesized)
gtcgtggctctgtctctgacttgcttcctccatctgtttcatgagcagatttgactcagtttctgaggggctttctagctctaaaaatcttatttgaacttttctcaagagtcttgtgat

SEQ ID NO: 519015 - DNA, 120 bp, Artificial Sequence
  ENSG00000165125_62 (sequence is synthesized)
cctgccttgtttctcagcacctaaaaaccaaattggacccatgcacacagtgcacacatctacaaggatggaggagcagatgagggtgtggggcggaggagacggagagaggaagtcagg

SEQ ID NO: 519016 - DNA, 120 bp, Artificial Sequence
  ENSG00000165125_63 (sequence is synthesized)
aatccttccctggtggcccagaggcagccctgagaaggaggtcattgatctgtttgctcaagaaataatgtgctagattttgtgccaggaaccccttagttgggttttcaccaggctaat

SEQ ID NO: 519017 - DNA, 120 bp, Artificial Sequence
  ENSG00000165125_64 (sequence is synthesized)
gttgaactagaccgttcaattttattataattaattgcctagtaaaagaaaacattctagaacctgaaaatacctttcatattgttacagtttcagatttgctctataatctcttttgac

SEQ ID NO: 519018 - DNA, 120 bp, Artificial Sequence
  ENSG00000165125_65 (sequence is synthesized)
tacttcatcagtgggagcttaaaaggcttcatctgacttttttttgtttctcccttagttgagtatttagtgatccataagaaaacatttttatgtataggatatttctgattccttttc

SEQ ID NO: 519019 - DNA, 120 bp, Artificial Sequence
  ENSG00000165125_66 (sequence is synthesized)
gagtgaagaatcctcattctaaaacggattatgaatcattgtacctctgaatcaggggttctccaccttggactattgacattttggacaggataattctttgcagtgagggctgtcatg

SEQ ID NO: 519020 - DNA, 120 bp, Artificial Sequence
  ENSG00000165125_67 (sequence is synthesized)
tgcagggtgcttagccgtgtccctgcctttgacccccgtgttgtgatctaaactcctgtgataagttgctattgaaaaatctatttgtcccccaagcacaggaatctttgagtaggtcag

SEQ ID NO: 519021 - DNA, 120 bp, Artificial Sequence
  ENSG00000165125_68 (sequence is synthesized)
ctctgtgcacctccttcagggacccaaggagagtcaggtgttttggggtcagccttactcccaagcaggtgagctagggctttctgtgctgtccccttgtgggcatatgaggttattgca

SEQ ID NO: 519022 - DNA, 120 bp, Artificial Sequence
  ENSG00000165125_69 (sequence is synthesized)
agtaatggctgggccggataccttcaaaacccgtccacaggctgggcccccctttttgctggagtctggagttcacagtcggaggaggctagttctctacaaaccttgctgggttgggtc

SEQ ID NO: 519023 - DNA, 120 bp, Artificial Sequence
  ENSG00000165125_70 (sequence is synthesized)
ataagctggctcttcacgcagggtgtggtctggctaggttgccagataaaatgcaggacactcagttcaatttaaatttgagataacgaataggctgctagtataagtgtatccccaata

SEQ ID NO: 519024 - DNA, 120 bp, Artificial Sequence
  ENSG00000165125_71 (sequence is synthesized)
ttgcacgtgacatacttatactaaaaaaaaattgtgcatctgacattcaaatctaactgagcatcctgtatttttatttggtaactctagcaactctgggtctgacagtagctttttgtt

SEQ ID NO: 519025 - DNA, 120 bp, Artificial Sequence
  ENSG00000165125_72 (sequence is synthesized)
ttccccaggccactagagtgtcagaattcatagggaatggaggtttatgggggacactttcagcttcagagacgtgtagggaccaaaggggaatctttgagcctgccactgactatacca

SEQ ID NO: 519026 - DNA, 120 bp, Artificial Sequence
  ENSG00000165125_73 (sequence is synthesized)
ccactaacatctaggatacagcgagtagaactctggacttggaaaaggtgctctctcggacccatttctagatttgccatcaatctttcacacatttggtcaaaatgggacacaaacgtg

SEQ ID NO: 519027 - DNA, 120 bp, Artificial Sequence
  ENSG00000165125_74 (sequence is synthesized)
gaagcatattggaggagggcagggaagagttagtggctggtctcttccctcgagtacccttagcatagaggaagggacacagatacatagcaattacagcacccagtgaaagatgctgaa

SEQ ID NO: 519028 - DNA, 120 bp, Artificial Sequence
  ENSG00000165125_75 (sequence is synthesized)
ataaaagtaaggccacaggagagagtgaagaacttctgagtgtctgtgtgtgtgtatgtggtgctagcgattgttttcccctcagtctagggtatctagagaggagggctttgtgcaaat

SEQ ID NO: 519029 - DNA, 120 bp, Artificial Sequence
  ENSG00000165125_76 (sequence is synthesized)
gcagctgatgaaaataataataacagttaattcaaaccaccttttggcattgctgctgattcattcactctacagatggtgtcagtgagcatctacaccatcctaggtgtatttctaggc

SEQ ID NO: 519030 - DNA, 120 bp, Artificial Sequence
  ENSG00000165125_77 (sequence is synthesized)
ataggcagtgcagaagacacaatgaacaattggcgggctgggggagttggattctagaaggaaagagcttcatgggcacagacatagggagaatggtgtgctctgcagtgctgagacagg

SEQ ID NO: 519031 - DNA, 120 bp, Artificial Sequence
  ENSG00000165125_78 (sequence is synthesized)
atgagaccaaaatgccaggtctaaggagtgggtgggacgtgcagagggtggaaaagtagttgcacaaagaccttaaagagcttctgtgttccttatccttagcattttgctaatctgggc

SEQ ID NO: 519032 - DNA, 120 bp, Artificial Sequence
  ENSG00000165125_79 (sequence is synthesized)
tagagaatgaagacttgaattaatgagggttagcaggagcaaggaggtagggactgaatgaagagagagctttccatgctgaactgacaggacctggtggcagctgctgtgcatgggggc

SEQ ID NO: 519033 - DNA, 120 bp, Artificial Sequence
  ENSG00000165125_80 (sequence is synthesized)
aaggcagaggagatgagtgagctgatgtctcctctctgattgccctcccacctccagctctggagtcaatttcttgccactgccagcgctttagaatgtgagctcctgtctatgtctttt

SEQ ID NO: 519034 - DNA, 120 bp, Artificial Sequence
  ENSG00000165125_81 (sequence is synthesized)
tgtatgtcacataattgtcaaactatggataaatagagttatttcatttactcccatagaaagaccaaatggctccaggccaagagaaaattgaatcaaagggacccatgtgtcttagtt

SEQ ID NO: 519035 - DNA, 120 bp, Artificial Sequence
  ENSG00000165125_82 (sequence is synthesized)
ggggtaagttctaattttaaaagagatttttagcacacagtaggtataagaataaagagatgatctggggattcagagaagataattttgcctaaaacaagcgagaagtggataataagg

SEQ ID NO: 519036 - DNA, 120 bp, Artificial Sequence
  ENSG00000165125_83 (sequence is synthesized)
agagactaatctgactcagcaaaataaacggatccatgaatcccaaattgggtaaatccaggaagggtccgaagacagaatgggaacattcagatgcacatgaaattcgatgaatgaatc

SEQ ID NO: 519037 - DNA, 120 bp, Artificial Sequence
  ENSG00000165125_84 (sequence is synthesized)
ctctagattggattctcttttttctctgcatctgtcattgttggccatagtttgtgtcttaggggccaatagccgaaacaaagtagtatctaaagccctctagacagctggtctgaaaat

SEQ ID NO: 519038 - DNA, 120 bp, Artificial Sequence
  ENSG00000165125_85 (sequence is synthesized)
gatggagaacactgtttcgcaaactttaatgtgagctgtttggaaactgagacccctgagcttgtctctgatttatcgccaccggtttttgcatgcaaggaccacttaagcaatgcttct

SEQ ID NO: 519039 - DNA, 120 bp, Artificial Sequence
  ENSG00000165125_86 (sequence is synthesized)
ccaactttcatatgcccaggaatcagctggaaatcttcttaaactgcagatttggattcactaggtggaagggtccgccagagcatttccatttcttataagggctcatgtgctgctgct

SEQ ID NO: 519040 - DNA, 120 bp, Artificial Sequence
  ENSG00000165125_87 (sequence is synthesized)
ctgctgctgatccaggggtccactttaagaaggaaggctgttgagatgatgtgagaagaaagacgagaggcagaaaggaagagacagagataatgaatgaatgaatgaatgaatgaatga

SEQ ID NO: 519041 - DNA, 120 bp, Artificial Sequence
  ENSG00000165125_88 (sequence is synthesized)
ctatgaggaaggaaggcctggagccaggcttgttcttatggtccactgttcttttgtgttaagccctgaagatgctattgttgggagggaagcgccaggatcaaagggttctgctgagaa

SEQ ID NO: 519042 - DNA, 120 bp, Artificial Sequence
  ENSG00000165125_89 (sequence is synthesized)
ggttgagtaggcagaggatggtgcaacaggagaaatcctgctagcctgtgcatatgactccctccacaaatatgagacaggaattccttgcacccctcggtccatgcaaaacaaggctta

SEQ ID NO: 519043 - DNA, 120 bp, Artificial Sequence
  ENSG00000165125_90 (sequence is synthesized)
tcctggagggcaatctcagggcacctggtgagggtcaaacaggaccactccaggggtaaactggttagcaggtaagcacatgtctacatagaactcctcccctccgtacctgaaatgcac

SEQ ID NO: 519044 - DNA, 120 bp, Artificial Sequence
  ENSG00000165125_91 (sequence is synthesized)
tgataatacattcacacatgatacattctggtcccaggacccggtaggggggaaggaaaccagtcacggacaatctcaaaacgcatgctaaatgggcaaaaagttgattgtatttactga

SEQ ID NO: 519045 - DNA, 120 bp, Artificial Sequence
  ENSG00000165125_92 (sequence is synthesized)
ctgtaaagagaaaagacatcaatggccccacctgccttgattgaagaccctgaggttcctgctgctgaggcacacacatctgtgtataataatggagtcaagccagggcctctccctcca

SEQ ID NO: 519046 - DNA, 120 bp, Artificial Sequence
  ENSG00000165125_93 (sequence is synthesized)
caactaggtatgctcactgtttccagctttcctattccatcccttcataggatctgggagtctcctctccttctagctgccaaagataatgatgtccaggccctgaacaagttgctcaag

SEQ ID NO: 519047 - DNA, 120 bp, Artificial Sequence
  ENSG00000165125_94 (sequence is synthesized)
tatgaggattgcaaggtgcaccagagaggtaagaagcacaaatgcagcatgatctcctaggtgagccccacacatggggcctcccaggagtgcccaggacctcgtgctgttggcctctga

SEQ ID NO: 519048 - DNA, 120 bp, Artificial Sequence
  ENSG00000165131_0 (sequence is synthesized)
agaggtcctatggaaggtgaggggagaaaatgcccctggaaagggttaagggccaggacaggaatggggcaggaggtgcacggatcctgctgggcactgggagcagggggcggccaaagg

SEQ ID NO: 519049 - DNA, 120 bp, Artificial Sequence
  ENSG00000165131_1 (sequence is synthesized)
cagtgggtgggcaggtccatgcctcccctggccccccagctctgcagggcagtgttcctggttcctatcttgctgctgctgcaggtgaagcctctgaacgggagcccaggccccaaagat

SEQ ID NO: 519050 - DNA, 120 bp, Artificial Sequence
  ENSG00000165131_2 (sequence is synthesized)
gggagccagacagagaaaacgccctctgcagaccagaatcaagaacagttcgaagagcactttgtggcctcctcagtgggtgagatgtggcaggtggtggacatggcccagcaggaagaa

SEQ ID NO: 519051 - DNA, 120 bp, Artificial Sequence
  ENSG00000165131_3 (sequence is synthesized)
ggccagtgtcatggttttctcaggagggccattgaggcggacattcccaaatatccaactctgcttcatgctcactcactgaccctccctccctcctgggctccaggtcacaactcccaa

SEQ ID NO: 519052 - DNA, 120 bp, Artificial Sequence
  ENSG00000165131_4 (sequence is synthesized)
aggagatgcaggcatggctctctgcctctgatcaccatcactgtatctcaaggttcagcagcagagataccagttgccatcagtgctaactgactgcctctccaggttcggagtttcatc

SEQ ID NO: 519053 - DNA, 120 bp, Artificial Sequence
  ENSG00000165131_5 (sequence is synthesized)
tcccagggccagagacagcagacccacatccttctctcccacacctctcctggttttgttcaggacagcagattagaggcaggaggcaatgacaataaaataacgataaaatcctgagaa

SEQ ID NO: 519054 - DNA, 120 bp, Artificial Sequence
  ENSG00000165131_6 (sequence is synthesized)
aatgacccactgtggtcatcttggaagcctcggccatccctgctggctgtgctccattcttgtgcctcgccattggaacgctctagtgagccggaatgaagttcaggcccatggctgtga

SEQ ID NO: 519055 - DNA, 80 bp, Artificial Sequence
  ENSG00000165138_0 (sequence is synthesized)
gcgcgtggcggcggcgatgggcgagggcgggctgcccccggccttccagctgctgctgcgcgcgtgtgaccagggcgaca

SEQ ID NO: 519056 - DNA, 80 bp, Artificial Sequence
  ENSG00000165138_1 (sequence is synthesized)
tgtgaccagggcgacacggagacggcgcggcggctgctggagccgggggcggcggagccagccgagcgcggcgcggagcc

SEQ ID NO: 519057 - DNA, 120 bp, Artificial Sequence
  ENSG00000165138_2 (sequence is synthesized)
cgcagcggcgggggcagtcggggctccggtgcccgtggattgctcggacgaggcgggcaacaccgcactgcagttcgccgcggccgggggccacgaaccgctggtgcgcttcctgctgcg

SEQ ID NO: 519058 - DNA, 120 bp, Artificial Sequence
  ENSG00000165138_3 (sequence is synthesized)
ccgcggtgcctcggtcaacagccgcaaccactacggctggagcgcgctcatgcaggcggccagatttgggcatgtgagtgtggcacacctcctgttggatcacggggctgatgtcaatgc

SEQ ID NO: 519059 - DNA, 120 bp, Artificial Sequence
  ENSG00000165138_4 (sequence is synthesized)
ccagaaccggctgggggccagtgtgctcactgtggcttctcggggcggccacctgggtgtggtgaagctgctcctggaagccggtgcctttgtggaccatcaccacccttcaggcgagca

SEQ ID NO: 519060 - DNA, 120 bp, Artificial Sequence
  ENSG00000165138_5 (sequence is synthesized)
actggggttgggcggcagcagggatgagcccttggacatcacagccctgatggctgccatccagcacgggcacgaggccgtggtgcgtctactgatggagtggggcgcggaccccaacca

SEQ ID NO: 519061 - DNA, 120 bp, Artificial Sequence
  ENSG00000165138_6 (sequence is synthesized)
cgcagcccggaccgtgggctggagcccgctgatgctggccgcactcactgggcggcttggagtggcccagcagctggtggagaagggcgccaaccctgaccacctcagcgtgctggagaa

SEQ ID NO: 519062 - DNA, 120 bp, Artificial Sequence
  ENSG00000165138_7 (sequence is synthesized)
gaccgccttcgaggttgcactggactgcaagcacagggaccttgtagactacctggacccgctgaccaccgtcaggcccaaaacagatgaggagaaaaggcgacctgatattttccatgc

SEQ ID NO: 519063 - DNA, 120 bp, Artificial Sequence
  ENSG00000165138_8 (sequence is synthesized)
attgaaaatgggaaacttccagctggtcaaagagattgccgatgaagaccccagccacgtgaacttggtcaatggggacggggcgacgccactgatgctagcagctgttacggggcagct

SEQ ID NO: 519064 - DNA, 120 bp, Artificial Sequence
  ENSG00000165138_9 (sequence is synthesized)
ggctctggtgcagctgctggtggagaggcacgcggatgttgacaagcaggacagcgtgcatggctggacggccctcatgcaggcaacctaccatgggaataaggaaattgtgaaatatct

SEQ ID NO: 519065 - DNA, 120 bp, Artificial Sequence
  ENSG00000165138_10 (sequence is synthesized)
gctaaaccaaggggccgatgtcactcttcgtgcaaaaaatggatacacggcctttgacctggtgatgctgctgaatgatcccgacacggaacttgttcgactgctggcatctgtctgcat

SEQ ID NO: 519066 - DNA, 120 bp, Artificial Sequence
  ENSG00000165138_11 (sequence is synthesized)
gcaggtgaataaagacaaaggccggccgagccaccagcctcccctgccccactcgaaggtccgacagccctggagcatcccagtgctgcccgatgacaagggtggactgaagtcctggtg

SEQ ID NO: 519067 - DNA, 120 bp, Artificial Sequence
  ENSG00000165138_12 (sequence is synthesized)
gaaccgaatgtccaatcggttccgaaagctcaaactgatgcagacgctgccccgtgggctgtccagcaaccagcctttgcctttctctgacgagcctgagccagctctggactccacaat

SEQ ID NO: 519068 - DNA, 120 bp, Artificial Sequence
  ENSG00000165138_13 (sequence is synthesized)
gagggctgccccccaggacaagacaagccgctctgcactccctgatgcggcccctgtgaccaaagacaatggtcctgggagcacaagaggagaaaaggaagacacgttattgacaaccat

SEQ ID NO: 519069 - DNA, 120 bp, Artificial Sequence
  ENSG00000165138_14 (sequence is synthesized)
gcttcgaaacggagctcccctcaccagactcccgagtgacaagctgaaagcagtcatccccccattcctacccccttccagttttgagctgtggagctctgatcggtcccggacgcgtca

SEQ ID NO: 519070 - DNA, 120 bp, Artificial Sequence
  ENSG00000165138_15 (sequence is synthesized)
caacgggaaggcagaccccatgaagactgcgctgccccagagagccagcaggggccaccccgtgggcggcgggggcacagacactacacccgtcaggcctgttaaatttccaagcctccc

SEQ ID NO: 519071 - DNA, 120 bp, Artificial Sequence
  ENSG00000165138_16 (sequence is synthesized)
cagaagcccagcctcttctgccaattctggaaacttcaaccactcgcctcattcatcgggcggctccagtggggtaggtgtgagccggcacggtggggagctgcttaaccgctcaggtgg

SEQ ID NO: 519072 - DNA, 120 bp, Artificial Sequence
  ENSG00000165138_17 (sequence is synthesized)
cagcatagacaatgtcttgtcccaaatcgctgcccagaggaaaaaagcagccggattattggagcagaaacccagccatcggtcaagccctgtggggccagcaccggggtccagcccgtc

SEQ ID NO: 519073 - DNA, 120 bp, Artificial Sequence
  ENSG00000165138_18 (sequence is synthesized)
tgagcttccagcctcccctgcaggtggcagcgctcctgttggcaagaaattggagaccagcaaaaggcctccatctggaacttccactacctccaagagcacctctccaaccctcacgcc

SEQ ID NO: 519074 - DNA, 120 bp, Artificial Sequence
  ENSG00000165138_19 (sequence is synthesized)
ctccccctcacccaaagggcacactgcagagtcctcagtgtcttcctcgtcatcccatcggcagtccaagagcagtgggggctccagcagtggcaccatcacagatgaggatgaactgac

SEQ ID NO: 519075 - DNA, 120 bp, Artificial Sequence
  ENSG00000165138_20 (sequence is synthesized)
tggaatccttaagaaattatcacttgagaaatatcagcccatttttgaggaacaagaggtggacatggaagcgttcctcacactgactgacggtgacttgaaggagctgggaattaagac

SEQ ID NO: 519076 - DNA, 120 bp, Artificial Sequence
  ENSG00000165138_21 (sequence is synthesized)
agatgggtccaggcagcagattctggcagcgatttctgaactgaacgcaggcaagggacgcgagagacaaattttacaggaaaccattcacaactttcactcttcctttgagagcagtgc

SEQ ID NO: 519077 - DNA, 120 bp, Artificial Sequence
  ENSG00000165138_22 (sequence is synthesized)
cagcaacaccagggcccctggcaacagcccctgtgcgtgatcctccttcccgcagccaccagcgtgagctctctgaatcccgggaccccttcacgtggccacagccccagccctgccccc

SEQ ID NO: 519078 - DNA, 120 bp, Artificial Sequence
  ENSG00000165138_23 (sequence is synthesized)
gtcacactgctgtgccttagtcatgttgttccctttgctcgggatgcccacttcacgtcgacggcattcattggtagtacttcttgctgcaacaaacttcaacacacagagacagattcc

SEQ ID NO: 519079 - DNA, 120 bp, Artificial Sequence
  ENSG00000165138_24 (sequence is synthesized)
catgtaacagtccagtgggggtgcttctgcttggcaggttggttcacacagtgatgcagggactcagctcctttcatcctgtgctctgccctccccgggagcctcagagtttgcttctgg

SEQ ID NO: 519080 - DNA, 120 bp, Artificial Sequence
  ENSG00000165138_25 (sequence is synthesized)
ctggcggcaagggaaagggacgatggagaaggcacggctgcttcttacctgccttgctcttaactgacacacatcactcctgctcacgtcctcttggccactggtagtcatgtggcccca

SEQ ID NO: 519081 - DNA, 120 bp, Artificial Sequence
  ENSG00000165138_26 (sequence is synthesized)
cctggatgcagaggaggccaggatgtgcagtctccacatagtggcttcccagcaacaacttttgacttagatggggggtatgtattatggtgagaggttagccttcctggcacatcttcc

SEQ ID NO: 519082 - DNA, 120 bp, Artificial Sequence
  ENSG00000165138_27 (sequence is synthesized)
cttaaaacttctaacttgcccctcctagtccaagtcacctctcagatgaagtcttttttgaccccctttcagccactgggtcccttagtgctgtgtatgtgactgctgtagcattccact

SEQ ID NO: 519083 - DNA, 120 bp, Artificial Sequence
  ENSG00000165138_28 (sequence is synthesized)
gcacctgctgcatacagcttacattggagatgtgtatgtcaaacgcatttttctttattgcaaagagagtctattatagaaggaaagaagtggaggcctgctgtgtggatcccttcttct

SEQ ID NO: 519084 - DNA, 120 bp, Artificial Sequence
  ENSG00000165138_29 (sequence is synthesized)
aagcagaaggctaatgggtcacattgtgtaaaggtctctggtgctcaaagtttctaggcaaagaagtgaaaatttggaattttgtctacatcctattaatgctgtgttcctcaaaaggga

SEQ ID NO: 519085 - DNA, 120 bp, Artificial Sequence
  ENSG00000165138_30 (sequence is synthesized)
attggcttgtgtagtttcctaccatatcatattttattaaattagaggggccctgacttttaaaacccactggctttctgaagtgttttccagtgaatgactcattcagccagtgcttgt

SEQ ID NO: 519086 - DNA, 120 bp, Artificial Sequence
  ENSG00000165138_31 (sequence is synthesized)
tgcatttatgttagctaccaggtgccaagtgtgcagacacaatacagagccttcaggctctcgacaggcaagagaacacctgtaaatagatggtcccgacattgagaggcagcatggtag

SEQ ID NO: 519087 - DNA, 120 bp, Artificial Sequence
  ENSG00000165138_32 (sequence is synthesized)
agtgggcagaccttgtgctctggactcaggttcaaagttcagatgaagctcaatggcctcttagttggagcttagaaccagtatgcccaaagtgctgggtctgcaggaagtacccagtcg

SEQ ID NO: 519088 - DNA, 120 bp, Artificial Sequence
  ENSG00000165138_33 (sequence is synthesized)
atggtaggctgcacagaattctgatctctaccttgagccatgctgagccacaagttggtctccttgggaggtgccatctctcatctgtccctcccccagccatgaaagcccattccccta

SEQ ID NO: 519089 - DNA, 120 bp, Artificial Sequence
  ENSG00000165138_34 (sequence is synthesized)
tgctggctttcagaggctgtcgttaacttactgcccagagcctcgtagttttcttcccctgccctgatggttgggtgtttttcctttaaattctctcagccttacactcacagaagccaa

SEQ ID NO: 519090 - DNA, 120 bp, Artificial Sequence
  ENSG00000165138_35 (sequence is synthesized)
ctttccacaggactgaagacaaagtgtttcatttagctgttactgatagacacctttacaaaggttactaatgtcccagcctttttaaggagacacactcattcatcccctactatgtgc

SEQ ID NO: 519091 - DNA, 120 bp, Artificial Sequence
  ENSG00000165138_36 (sequence is synthesized)
tggcagctttacctttgtcatttcatcctcatggccaccctggaggtggcattgtgtaacctcatcttgcacattcgggaaacggatgcttaggagagggaagcagcttgccagttaaac

SEQ ID NO: 519092 - DNA, 120 bp, Artificial Sequence
  ENSG00000165138_37 (sequence is synthesized)
agcccagaaggagcagatctggggtcagaaccggacctggtgggcttgcaagcctgtgccttttccactaactcctatagactcctggagctagaagcacttgtgattcttgttttaatt

SEQ ID NO: 519093 - DNA, 120 bp, Artificial Sequence
  ENSG00000165138_38 (sequence is synthesized)
tactgatggcttcaggggttaacagtaggcctagaattgtttgcctctgaaattcatggcccctgacgttatgtgctttgaggttttgtgcctgctttttgctgtggtcctgtttttttc

SEQ ID NO: 519094 - DNA, 120 bp, Artificial Sequence
  ENSG00000165138_39 (sequence is synthesized)
ataacaatatactggtatagcttccactcaggtaagtttgattgaacaatgatacacagctgcaccggggggtcaccttttcacaaatgtagacctccatgaactcattggatgaccctg

SEQ ID NO: 519095 - DNA, 120 bp, Artificial Sequence
  ENSG00000165138_40 (sequence is synthesized)
gacagagcggggctattcccattttgcagacaggacagcagaggctccagacaatgcctttcctttctttttcactggactcaagtgtccaaggcttttcatcctaggaagtttgtgtgc

SEQ ID NO: 519096 - DNA, 120 bp, Artificial Sequence
  ENSG00000165138_41 (sequence is synthesized)
tggttcacaagaggtccctggcaccctttctggggatgtttggatgcggctggtaggcagggaagagaaagggcaccccagcgggggcatgtgtggaggcagcacggaacatgtaggtta

SEQ ID NO: 519097 - DNA, 120 bp, Artificial Sequence
  ENSG00000165138_42 (sequence is synthesized)
tagatcgtcagggaggaggggtcagttgggtgcttgtttttctgatttttggtccttgatcacccccttcccttcccacacgtgtccccagcctgcctgtggctgttccccccacaagaa

SEQ ID NO: 519098 - DNA, 120 bp, Artificial Sequence
  ENSG00000165138_43 (sequence is synthesized)
gcacctcccttgcttggcaaccttcaccagcatttcccaaaagtatgctcctgggaaccctagttccacaggataataggtttttcataaagaaacgtagggtgtgtatgtgaaagtggg

SEQ ID NO: 519099 - DNA, 120 bp, Artificial Sequence
  ENSG00000165138_44 (sequence is synthesized)
gtgaggttccctggttgagtaggtttggcagacactaaagcgagctacacgatcatctttgctacaggcctctcacaaccttcagcatgccagcatgggtcaggcctcttcacagggcca

SEQ ID NO: 519100 - DNA, 120 bp, Artificial Sequence
  ENSG00000165138_45 (sequence is synthesized)
agaaactcatagcatctcccacattactctcatcacttctccaaggtgcttttgcaagactggaattccttggacaccattggagaagccccgctttttctggaacagcggcaaccaaga

SEQ ID NO: 519101 - DNA, 120 bp, Artificial Sequence
  ENSG00000165138_46 (sequence is synthesized)
ggccttgcagccctggaagtgggtcagggcccttggtggtcacctttttctccccagcagctctgcagaggtggcctgcttggcagtgggacatcaggggaccggtcctgctttgagatg

SEQ ID NO: 519102 - DNA, 120 bp, Artificial Sequence
  ENSG00000165138_47 (sequence is synthesized)
gcagggtccctgttctgagagctctccagcctgagggcattgagctgaggctccaccctgagctctcctgcagggtggagggcattgtttcccagcacccaggcagtgtcttgctggtgt

SEQ ID NO: 519103 - DNA, 120 bp, Artificial Sequence
  ENSG00000165138_48 (sequence is synthesized)
gtcgtgagtgctggatgtccaagtccctgctggccacggagggctcctgcctctcttcttcagcgccacaaaattacatggaggccagctggttttgtgaggagattgtttattttttaa

SEQ ID NO: 519104 - DNA, 120 bp, Artificial Sequence
  ENSG00000165138_49 (sequence is synthesized)
ttcttttgtttaccgaacgtttactgagcatctaccctgtgccagccctactcgtacgctctgtctccaaagatgaaaaaggacttctctgccctcaagggaaccccacagtatcttaga

SEQ ID NO: 519105 - DNA, 120 bp, Artificial Sequence
  ENSG00000165138_50 (sequence is synthesized)
ggagacaatcatgtcggtgagatggtgtggtgatgaagcctgctgggtatacagctcagggaaagtcatcgatgatggctcaggctcagcctgggcacgccccagaggagagagatggag

SEQ ID NO: 519106 - DNA, 120 bp, Artificial Sequence
  ENSG00000165138_51 (sequence is synthesized)
tggggcctcaaagggcaggtttaggcagaaaagaaaaagggcattccagctggggcatgtgcaaaggcagcacgtaatgtgtaagttctagatcgtcagggaggaagggtcagttgggtg

SEQ ID NO: 519107 - DNA, 120 bp, Artificial Sequence
  ENSG00000165138_52 (sequence is synthesized)
cctgtttttctgtttttagtcctttaaaatgagtagaagcaacctgttaccctggaaagagcactggacatagacctagtgctgcgtgatgttgagcacgtttcttcttccctttgagtc

SEQ ID NO: 519108 - DNA, 120 bp, Artificial Sequence
  ENSG00000165138_53 (sequence is synthesized)
ccagtttcccttttggttacagggggatagtagcccccagggatcatgtgaaagtgagaaagcccttttcacactgtggagcggtgcagatgtgggaaacctcaaagatggttgcccatt

SEQ ID NO: 519109 - DNA, 120 bp, Artificial Sequence
  ENSG00000165138_54 (sequence is synthesized)
ttaaatcctttcatctctcatctctctttcttctctcccttctgccctgacgtagccatggttgggtgggtgaggccagaagaaactgcctccggcaagaggtagcagccgctcaggtgg

SEQ ID NO: 519110 - DNA, 120 bp, Artificial Sequence
  ENSG00000165138_55 (sequence is synthesized)
ctctgctggcatcggagcccacagaagtgaggagtggccgatggacctgccctccaaatgtgcctgactctgggtcttgctgtcactggatttcctggcatggcagacagaaagaaagat

SEQ ID NO: 519111 - DNA, 120 bp, Artificial Sequence
  ENSG00000165138_56 (sequence is synthesized)
agtttgaccaagtcgtagaagctgatccagcgggtaaaaagggggcagggaactcgtcccttttattcttgcctcagagctgcctgaagacatgggccaggccggaggctggacaacttt

SEQ ID NO: 519112 - DNA, 120 bp, Artificial Sequence
  ENSG00000165138_57 (sequence is synthesized)
ggataacgctgacctgtacttccaagtaaatgcctcctgaagagcccgggacccttcctgggagaattctgcagccagaatgaaggtgccatcagcaggaggcactgtgaagcaccatcc

SEQ ID NO: 519113 - DNA, 120 bp, Artificial Sequence
  ENSG00000165138_58 (sequence is synthesized)
tgtcgctgtccttgtccattcctagcaagttaatcgtgtcttgttaaccagcagttcctgttcaacgtgtaaagagacctgatgttttccctaataaagctgataacagattttgcagga

SEQ ID NO: 519114 - DNA, 120 bp, Artificial Sequence
  ENSG00000165138_59 (sequence is synthesized)
aagagtggatttagaccctgccttaatttcagccccccagctgagaatccagtcccaaaaataacagttgttgttgccaaagcttgggaatgatagaagggaaatccacacagaatcacg

SEQ ID NO: 519115 - DNA, 120 bp, Artificial Sequence
  ENSG00000165138_60 (sequence is synthesized)
ggtagtgagctcgagcacaaagcccagttcattgtcctcggctcccctccccggcactgcgcttccttcctaaggctgagaccacctctccctgcccttgagaactccctttgctccagg

SEQ ID NO: 519116 - DNA, 120 bp, Artificial Sequence
  ENSG00000165138_61 (sequence is synthesized)
acccccgccaacttggggccctgcccagcagagtggagccatctcgcatcagcatagggacctcccaggttcccatttcctgctggagccctctccaaggctgagacacagggcatggcc

SEQ ID NO: 519117 - DNA, 120 bp, Artificial Sequence
  ENSG00000165138_62 (sequence is synthesized)
atccttgtgtcggagaccctgtctccacctctaggtttggccttcccctatagggccctcactagggccagtgtattcactgccaagagtctagaatgccattttagtttctgcccaagg

SEQ ID NO: 519118 - DNA, 120 bp, Artificial Sequence
  ENSG00000165138_63 (sequence is synthesized)
gagtgtctattttcctcaccatagacactttttattattttattgttatgtttgtgcagggacttaattctttgaaagattattgtttgtcggcctgtgtatattaaatgatgtaaagtt

SEQ ID NO: 519119 - DNA, 120 bp, Artificial Sequence
  ENSG00000165138_64 (sequence is synthesized)
agcgacaaggccagacagatgctctggcctgagatggaggttcccaatgggctcttctggtcctgagatgctgcatacaaaccccaggactatgacgacattgaggcatggaaaaaaaaa

SEQ ID NO: 519120 - DNA, 120 bp, Artificial Sequence
  ENSG00000165138_65 (sequence is synthesized)
aaaaaagcggcacaggctcattttagtcccacccttctgtgtccagatttcctgttcccccatcacagaatttcacaatggccctgaaaaaccatgcagcaggagcattttatgcagaga

SEQ ID NO: 519121 - DNA, 120 bp, Artificial Sequence
  ENSG00000165138_66 (sequence is synthesized)
gataaggttctctaggttggtttcagttgaacacagtgactgattcattggagttttcacattgagatatagtgacctccttaagtagctcctgtatgaagtaaacattggttattcata

SEQ ID NO: 519122 - DNA, 120 bp, Artificial Sequence
  ENSG00000165138_67 (sequence is synthesized)
attctagaagggcaggttcagtgccaggggctgcggtggggtcagcggagcccgctagtaaagtcaaggcccacgcagctgcggactcagacccgggcccagggccctgaccacagcgtg

SEQ ID NO: 519123 - DNA, 120 bp, Artificial Sequence
  ENSG00000165138_68 (sequence is synthesized)
aagaggggatggcgtggccgctcccacctctgccctgacaggaagtttctggagccccgggacagggcggcgagagggcgccgaagaggcaaaagggaacacgcgggtctgcggcgggcg

SEQ ID NO: 519124 - DNA, 120 bp, Artificial Sequence
  ENSG00000165138_69 (sequence is synthesized)
ttaagaaattatcacttgagaaatatcagcccatttttgaggaacaagagtctgtctctgtctcgtgcgtggtgagggagatgaggtggacatggaagcgttcctcacactgactgacgg

SEQ ID NO: 519125 - DNA, 120 bp, Artificial Sequence
  ENSG00000165138_70 (sequence is synthesized)
tctactggaaggacacgcagaactcagagtccagccctgcagaccactgagactgaggaagtggtgtgcttaagtatcggggggattgcctgtgacatgcaggttctgggcccactctct

SEQ ID NO: 519126 - DNA, 120 bp, Artificial Sequence
  ENSG00000165140_0 (sequence is synthesized)
gcaccacgagcgctgcggacactcggggcggcagtcggtctgtcagtcctcccgccaggtcccgcggcccgcacctgccgcccgcacctgcagctccgcacctgcggccagtgcctactg

SEQ ID NO: 519127 - DNA, 120 bp, Artificial Sequence
  ENSG00000165140_1 (sequence is synthesized)
ccctctcttgccgcccgcacctgcagccccgcacctgccgcttgcacctgcagccccgcgctctacccggttcaagcatggctgaccaggcgcccttcgacacggacgtcaacaccctga

SEQ ID NO: 519128 - DNA, 120 bp, Artificial Sequence
  ENSG00000165140_2 (sequence is synthesized)
cccgcttcgtcatggaggagggcaggaaggcccgcggcacgggcgagttgacccagctgctcaactcgctctgcacagcagtcaaagccatctcttcggcggtgcgcaaggcgggcatcg

SEQ ID NO: 519129 - DNA, 120 bp, Artificial Sequence
  ENSG00000165140_3 (sequence is synthesized)
cgcacctctatggcattgctggttctaccaacgtgacaggtgatcaagttaagaagctggacgtcctctccaacgacctggttatgaacatgttaaagtcatcctttgccacgtgtgttc

SEQ ID NO: 519130 - DNA, 120 bp, Artificial Sequence
  ENSG00000165140_4 (sequence is synthesized)
tcgtgtcagaagaagataaacacgccatcatagtggaaccggagaaaaggggtaaatatgtggtctgttttgatccccttgatggatcttccaacatcgattgccttgtgtccgttggaa

SEQ ID NO: 519131 - DNA, 120 bp, Artificial Sequence
  ENSG00000165140_5 (sequence is synthesized)
ccatttttggcatctatagaaagaaatcaactgatgagccttctgagaaggatgctctgcaaccaggccggaacctggtggcagccggctacgcactgtatggcagtgccaccatgctgg

SEQ ID NO: 519132 - DNA, 120 bp, Artificial Sequence
  ENSG00000165140_6 (sequence is synthesized)
caactgcttcatgctggacccggccatcggggagttcattttggtggacaaggatgtgaagataaaaaagaaaggtaaaatctacagccttaacgagggctacgccagggactttgaccc

SEQ ID NO: 519133 - DNA, 120 bp, Artificial Sequence
  ENSG00000165140_7 (sequence is synthesized)
tgccgtcactgagtacatccagaggaagaagttccccccagataattcagctccttatggggcccggtatgtgggctccatggtggctgatgttcatcgcactctggtctacggagggat

SEQ ID NO: 519134 - DNA, 120 bp, Artificial Sequence
  ENSG00000165140_8 (sequence is synthesized)
atttctgtaccccgctaacaagaagagccccaatggaaagctgagactgctgtacgaatgcaaccccatggcctacgtcatggagaaggctgggggaatggccaccactgggaaggaggc

SEQ ID NO: 519135 - DNA, 120 bp, Artificial Sequence
  ENSG00000165140_9 (sequence is synthesized)
cgtgttagacgtcattcccacagacattcaccagagggcgccggtgatcttgggatcccccgacgacgtgctcgagttcctgaaggtgtatgagaagcactctgcccagtgagcacctgc

SEQ ID NO: 519136 - DNA, 120 bp, Artificial Sequence
  ENSG00000165140_10 (sequence is synthesized)
cctgcctgcatccggagaattgcctctacctggaccttttgtctcacacagcagtaccctgacctgctgtgcaccttacattcctagagagcagaaataaaaagcatgactatttccacc

SEQ ID NO: 519137 - DNA, 120 bp, Artificial Sequence
  ENSG00000165140_11 (sequence is synthesized)
atcaaatgctgtagaatgcttggcactccctaaccaaatgctgtctccataatgccactggtgttaagatatattttgagtggatggaggagaaataaacttattcctccttaaaaaaaa

SEQ ID NO: 519138 - DNA, 120 bp, Artificial Sequence
  ENSG00000165140_12 (sequence is synthesized)
attgtggctaccagggggtcaggatgcgggcggtggagccctctggcctttgtgtggtagccgaggactctgtgtcagcgaccgttttccgggaaacttccgggcgagactcacatcttg

SEQ ID NO: 519139 - DNA, 120 bp, Artificial Sequence
  ENSG00000165140_13 (sequence is synthesized)
gaaattcaaatactcaatagctctcgaattctaggaatcttgagaagaggcctggattaaggattcagacgtgggccctcagatggccccgcgctctacccggttcaagcatggctgacc

SEQ ID NO: 519140 - DNA, 120 bp, Artificial Sequence
  ENSG00000165152_0 (sequence is synthesized)
agctgcgaggcgggaggaggtgaggctccggcgcacacccaaaccgcgctgcgcccgctccttccgggccccggagatggcgcctccaccgggatgagctagccagcctgggcaatacca

SEQ ID NO: 519141 - DNA, 120 bp, Artificial Sequence
  ENSG00000165152_1 (sequence is synthesized)
gaggcggccctcggcgcgcgcaggggaccgagctggtcgccccaaccggcaaagcagtcatctaatcttgaatgaaggatctgatcccagctcctgtgtcctaggtttgatttctgatga

SEQ ID NO: 519142 - DNA, 120 bp, Artificial Sequence
  ENSG00000165152_2 (sequence is synthesized)
ctctggcctgagttccaggatggttttttcttgggaccagacatgaacaaaagttgacctcatgagcacttcaacctctccagctgccatgctcctccggaggctgcggcgactctcctg

SEQ ID NO: 519143 - DNA, 120 bp, Artificial Sequence
  ENSG00000165152_3 (sequence is synthesized)
gggcagcactgctgtccagctcttcatcctaacagtggtgacgtttggcctgctggcccccctggcctgtcaccgacttctacactcttacttctatctgcgccattggcatctgaacca

SEQ ID NO: 519144 - DNA, 120 bp, Artificial Sequence
  ENSG00000165152_4 (sequence is synthesized)
aatgagccaagagttcctgcagcaaagcttgaaagagggtgaggctgccctccactattttgaggagcttccctctgccaatggctcagtgcccattgtctggcaggccaccccccggcc

SEQ ID NO: 519145 - DNA, 120 bp, Artificial Sequence
  ENSG00000165152_5 (sequence is synthesized)
ctggctggtgatcaccatcatcactgtggacaggcagcctggcttccactacgtcctgcaggttgtgtcccagttccaccggcttcttcagcaatgtggcccccagtgcgaggggcacca

SEQ ID NO: 519146 - DNA, 120 bp, Artificial Sequence
  ENSG00000165152_6 (sequence is synthesized)
actcttcctgtgcaacgtggagcgtagtgtgagccattttgatgccaagttgctctccaagtatgtccctgtggccaatcgctatgagggcactgaggatgattatggtgatgacccttc

SEQ ID NO: 519147 - DNA, 120 bp, Artificial Sequence
  ENSG00000165152_7 (sequence is synthesized)
gaccaactcgtttgagaaagagaagcaggactatgtctattgcctggagtcatccctgcagacctacaacccagactacgtcctgatggtagaagacgatgctgtaccagaagagcagat

SEQ ID NO: 519148 - DNA, 120 bp, Artificial Sequence
  ENSG00000165152_8 (sequence is synthesized)
cttcccagtcttggagcaccttctgcgggctcgcttctctgagccacatctcagagatgccctttatctcaagctgtatcaccccgagaggctccagcactacatcaatccagagcccat

SEQ ID NO: 519149 - DNA, 120 bp, Artificial Sequence
  ENSG00000165152_9 (sequence is synthesized)
gcggatcctggaatgggttggtgtaggcatgttgctggggcccttactaacctggatatacatgaggtttgccagccgcccagggtttagctggcctgtaatgctcttcttctccctgta

SEQ ID NO: 519150 - DNA, 120 bp, Artificial Sequence
  ENSG00000165152_10 (sequence is synthesized)
tagcatgggtctggtggagctggtgggtcggcactatttcctggaactgcggcggctgagtccttccctgtacagtgtggttcctgcctctcagtgttgcaccccagccatgctcttccc

SEQ ID NO: 519151 - DNA, 120 bp, Artificial Sequence
  ENSG00000165152_11 (sequence is synthesized)
ggcacctgcggcccgccggaccctcacctacctgtcccaagtgtactgccacaagggctttggcaaggacatggcactgtactcgctgttgagggccaagggagagagggcctatgtagt

SEQ ID NO: 519152 - DNA, 120 bp, Artificial Sequence
  ENSG00000165152_12 (sequence is synthesized)
ggagccgaacctcgtgaaacacatcgggctcttctccagtctccggtacaactttcatcccagtctcctctagggtgccaagagatgcctttctgaagttggccacttcttgaagattca

SEQ ID NO: 519153 - DNA, 120 bp, Artificial Sequence
  ENSG00000165152_13 (sequence is synthesized)
aatatttatctctttatttagacatggttgcctgcaggtatttcactgtttactgttgttagagatataggcactggggcagctgaggaacctcaatatgttaagagccttggctttggt

SEQ ID NO: 519154 - DNA, 120 bp, Artificial Sequence
  ENSG00000165152_14 (sequence is synthesized)
agcctcctggcaggagcagcagtttgccacaggtccggacctctccctccacacagccacactgcctcatgcagtctgacccacccagtgagggtgcatttgaacactgattatattctc

SEQ ID NO: 519155 - DNA, 120 bp, Artificial Sequence
  ENSG00000165152_15 (sequence is synthesized)
catttgtttttaagctctgctttgtgttagagcttgtgactgccaaaaattttgtgcacagtgatatgactgttttaggatcttaagggtagaattttgtgaaaggtgagatcctttgga

SEQ ID NO: 519156 - DNA, 120 bp, Artificial Sequence
  ENSG00000165152_16 (sequence is synthesized)
attgagttctttctcattgggtatgaaaatggatgtatgtttagaatatatgcccaacgaggcaggaccatgtggatagattccatttgtttccttgacctgatgtaataaaaactgata

SEQ ID NO: 519157 - DNA, 120 bp, Artificial Sequence
  ENSG00000165152_17 (sequence is synthesized)
ttggaggcaggtgatctggcttttctgttacctgggattttcttttcctatatatctgtagtgcactgataattgatattgttagtgagaactttaaggcacgacaagatctggaagagc

SEQ ID NO: 519158 - DNA, 120 bp, Artificial Sequence
  ENSG00000165152_18 (sequence is synthesized)
ttgtgaaccatcaaagtcagattgcttatgttgagtagtgatttaacattgaacatttctgtactactctgactctttgaaaattggacatttcagaatgatacaatataggggagctct

SEQ ID NO: 519159 - DNA, 120 bp, Artificial Sequence
  ENSG00000165152_19 (sequence is synthesized)
ttacaagtagcatatcatttttcctgactttcctggctgactgcttaccttcatttctttttcttctaggtagcatgatgttatagaaaaaaaaaaaaaaaaatcatggactgaagtcag

SEQ ID NO: 519160 - DNA, 120 bp, Artificial Sequence
  ENSG00000165152_20 (sequence is synthesized)
aagacctgaccttttatttcagatctctgccatggcctaacgacgtgaccaccttgggcaggtcatataatcactctgggtctcaatttcttcacctgtaaaatgaggacagtaatactt

SEQ ID NO: 519161 - DNA, 120 bp, Artificial Sequence
  ENSG00000165152_21 (sequence is synthesized)
acatgttaaagttgccttgaggattaaatggcagaatatatgtaaaacacctagcaagtgcttagtccatagaagacgcttggcaaacttttctctcctataataaacatatacaactca

SEQ ID NO: 519162 - DNA, 120 bp, Artificial Sequence
  ENSG00000165152_22 (sequence is synthesized)
agcttatttcggaaaaagatattggtgatgttgtttaaagtatgagatagggcatggagctgccacctatgtaccagctattccagatgaccaagccctgctagaataaagactgacttt

SEQ ID NO: 519163 - DNA, 120 bp, Artificial Sequence
  ENSG00000165152_23 (sequence is synthesized)
tcattgtgacctctgaaggatgtgcagctcagctttcacctatccccacgttcacccaagccaaaaagaagaattgttcattcaaactggaaatgatctccagcttggaaatgagactcc

SEQ ID NO: 519164 - DNA, 120 bp, Artificial Sequence
  ENSG00000165152_24 (sequence is synthesized)
tcatgagcttattctaagatcagagtctgaaaattattttctcaaaagttacaaataaatgtcttttaacagtactgtcagactagtgaccaacaagttactttatgaggatggatgatg

SEQ ID NO: 519165 - DNA, 120 bp, Artificial Sequence
  ENSG00000165152_25 (sequence is synthesized)
atattagagttcaagcaattgtccagtttgtttcgatgccacagtttgcttttaaattcccatagtgagcttccatcttgagacccactcaacacagaaggattacataaaggttgatca

SEQ ID NO: 519166 - DNA, 120 bp, Artificial Sequence
  ENSG00000165152_26 (sequence is synthesized)
cccacgctctacagatgaacaaattgagacccagagatgctaaactgctctgcaggtcacaaacctgaacagcagcatagccaaaatgggaacggagctcttctgacttcaagcccctgc

SEQ ID NO: 519167 - DNA, 120 bp, Artificial Sequence
  ENSG00000165152_27 (sequence is synthesized)
acttttttcttaaccacattaattttatgaatatctatgtggtcaaagtctcttttgtaaaatctgagtataagctgaactagatcatgtctctgtaagctaagatggcagaaacacatt

SEQ ID NO: 519168 - DNA, 120 bp, Artificial Sequence
  ENSG00000165152_28 (sequence is synthesized)
gtcatgttagtttggaggagcaaacagatataagtatgtgttgtaatgttatagtgagctgttatgtatcccccagcaatgtccaaagtgatcagagctactagatgacttattacaatg

SEQ ID NO: 519169 - DNA, 120 bp, Artificial Sequence
  ENSG00000165152_29 (sequence is synthesized)
ttcagatcccactccttcattcctcctctctcagtgacctgtctacccccaagctttagaactgagctctctccaacttagaactcattagagtttgttgcattagtgattggatctcct

SEQ ID NO: 519170 - DNA, 120 bp, Artificial Sequence
  ENSG00000165152_30 (sequence is synthesized)
catgaaagttttttgaccaatgacagtagagcccctttaagctagccaggcccaagatagggaagcactgctggtttacatttctgctctttctaattcagttgtctattgcatgcagac

SEQ ID NO: 519171 - DNA, 120 bp, Artificial Sequence
  ENSG00000165152_31 (sequence is synthesized)
atcccctgcccgacttctccattatggaaggctaaggccatccttccttgtccagtttctctacctacacactaacatgccttttccccatggagtgaactctgccagttgtctttggac

SEQ ID NO: 519172 - DNA, 120 bp, Artificial Sequence
  ENSG00000165152_32 (sequence is synthesized)
attttctgcagatgcaggctcagttctgctcttttgttcccacccacttctagatcttcctccatttaatcccttattcttataaggagtctaatttttgtgtattgtccttgattaggg

SEQ ID NO: 519173 - DNA, 120 bp, Artificial Sequence
  ENSG00000165152_33 (sequence is synthesized)
cagctgacagctttacaccaaagctgaagtctctcacttaatcctaagcaaggggctagggagaactaagatatccttcccatatcaagggatataggttactagaagggtggaggtctc

SEQ ID NO: 519174 - DNA, 120 bp, Artificial Sequence
  ENSG00000165152_34 (sequence is synthesized)
ttaacaggctcactcacctttcagagtttaaattatggtcaggcttaagaagctctctcttgtgactgagtgtattgcatagacatgtctgtgaaaataaaagcacccattttgctaagg

SEQ ID NO: 519175 - DNA, 120 bp, Artificial Sequence
  ENSG00000165152_35 (sequence is synthesized)
gttggtacccctacgtgctgaaatgaagagttctggagagaatctgagggatttgaggaatttcagatgttggggattttttcccccgcacagggagcggtattctgccctgtctacaca

SEQ ID NO: 519176 - DNA, 120 bp, Artificial Sequence
  ENSG00000165152_36 (sequence is synthesized)
ttagaatcacttggcctggacaaaagcttttttaaaaaagcgttcccctcatctcctccccccaaaccccgcatttccatccactagattctaatgcgtaagcaggagtgacaactactg

SEQ ID NO: 519177 - DNA, 120 bp, Artificial Sequence
  ENSG00000165152_37 (sequence is synthesized)
cccttgtgcttttttgggaacaagaaattgtccagggaaaagataaacgccaatcagtctctgatctcagtactagtctattttaagctaattaagcattgatttttttttttaagttta

SEQ ID NO: 519178 - DNA, 120 bp, Artificial Sequence
  ENSG00000165152_38 (sequence is synthesized)
tgacaaactgctattttccattcagttaaactaaatgcgttttaatgataggacggtaattaatctaacctattaatgaaaagctgtatgtctcgcagaactatgataaactacctaatg

SEQ ID NO: 519179 - DNA, 120 bp, Artificial Sequence
  ENSG00000165152_39 (sequence is synthesized)
acgtcagctaagggtctagaaatggaagaatgatcgctatatcttttttaaaaaatagaatttaggcatcttgggaaaaaaagaagctaatctacactggatttctgttagtgtgaagac

SEQ ID NO: 519180 - DNA, 120 bp, Artificial Sequence
  ENSG00000165152_40 (sequence is synthesized)
ttttgtccctgtacctgctagggcttacctgtaaatgaagtaagatggtcaacaccagggaaacaagtgttcctggtgcctggcagtggaacaccttgactatcttggaaagaattaact

SEQ ID NO: 519181 - DNA, 120 bp, Artificial Sequence
  ENSG00000165152_41 (sequence is synthesized)
ggccccaagtggacttcacatttcattccgtgaagtgggagcctgagaacatattttctgtgtgaggctgaaactgttggaggcttcctgagatcattcttgagaatggagcgaccacat

SEQ ID NO: 519182 - DNA, 120 bp, Artificial Sequence
  ENSG00000165152_42 (sequence is synthesized)
aggggtgagcagaaccaagagaatctcagggaaatggagccaatcaactgagttaggtcacccctaacttcaacccacacttgagtgttagagaagattctacaaagagagcagactttt

SEQ ID NO: 519183 - DNA, 120 bp, Artificial Sequence
  ENSG00000165152_43 (sequence is synthesized)
ctagtacctttcaattctcaccataaatatagcatgttgattaagagaatggactctgaagccggatttcatcagtttggattttggcttttcctctttctagcagtttgggtttgattt

SEQ ID NO: 519184 - DNA, 120 bp, Artificial Sequence
  ENSG00000165152_44 (sequence is synthesized)
tgccatcactcgttcagacggccgattggctgacggtcccgtcaatctccggggacatgactagcctcagacacctcagaaaattattttctgtgtgaggctgaaactgttggaggcttc

SEQ ID NO: 519185 - DNA, 120 bp, Artificial Sequence
  ENSG00000165152_45 (sequence is synthesized)
tcaccatgtaggtaaccatattctctagcaactgggatatatgtctttctcaaaagttccagttatctaacaccttcacaggtgtcacagctctccagaaaataaaatcaactctgtgtg

SEQ ID NO: 519186 - DNA, 120 bp, Artificial Sequence
  ENSG00000165156_0 (sequence is synthesized)
gccggctctctcccttccccctccgcccccggacggccgctggggcgcgcgcctctcctcgcacccccaccctgagtccccacactccgcggggccaccgagctgctgaggcccctttgc

SEQ ID NO: 519187 - DNA, 120 bp, Artificial Sequence
  ENSG00000165156_1 (sequence is synthesized)
ggccaccgagctgctgaggcccctttgcgggcccgccgagcggttccgggtttagggttcacaggtcagagttgactccctgaaaagtgcagccggtttgaaatgcaagatggcggcggc

SEQ ID NO: 519188 - DNA, 120 bp, Artificial Sequence
  ENSG00000165156_2 (sequence is synthesized)
gtggcgctgagaggcgcggcggcccctgcaggtagtggcgcgagccggctccgcgaccagcgggcccggagactctgggctgcgggtgggaactggagcgcagagtccgcggccggcacg

SEQ ID NO: 519189 - DNA, 120 bp, Artificial Sequence
  ENSG00000165156_3 (sequence is synthesized)
ggaaaggagaagacagactgctgctttggacctgttggtaatgatggcctgagctaaacatctaactagaagggatacccttccatttcaaagaacagaatgctaaggaagctgtggcaa

SEQ ID NO: 519190 - DNA, 120 bp, Artificial Sequence
  ENSG00000165156_4 (sequence is synthesized)
gtgattggagttgtgcttcaaaaatttcagaaattcagcagtattttatctgccaacaataagctctttacttgattgcaccatgagaaagctgctaatgagacttgttgagcacaaaaa

SEQ ID NO: 519191 - DNA, 120 bp, Artificial Sequence
  ENSG00000165156_5 (sequence is synthesized)
tggacttgaagaaccaaaagccattgttttcaaatgaagaacactgaacagttttaagcctcgatgctttttaatcaccactgagcttttcctcataacatcagaatggcaagcaggcga

SEQ ID NO: 519192 - DNA, 120 bp, Artificial Sequence
  ENSG00000165156_6 (sequence is synthesized)
aaatcaacaacaccttgcatggtccttgccagtgaacaagatccagaccttgagttgatatcagatttggatgaaggtcctcctgtgcttacacctgtagaaaacaccagagcagagagt

SEQ ID NO: 519193 - DNA, 120 bp, Artificial Sequence
  ENSG00000165156_7 (sequence is synthesized)
atctcaagtgatgaagaggttcatgaatctgtggattcagacaatcagcaaaataaaaaagttgaaggtggatatgaatgtaaatattgtacttttcaaactccagatctaaatatgttt

SEQ ID NO: 519194 - DNA, 120 bp, Artificial Sequence
  ENSG00000165156_8 (sequence is synthesized)
acttttcatgtggattcggaacatcccaatgtagtgctaaattcatcctatgtttgtgtcgaatgcaattttcttaccaaaaggtatgatgcactttctgagcataatctgaaatatcac

SEQ ID NO: 519195 - DNA, 120 bp, Artificial Sequence
  ENSG00000165156_9 (sequence is synthesized)
ccaggagaagagaattttaagttgactatggtgaaacgtaataaccagacaatctttgaacaaacaataaatgatctgacttttgatggtagttttgttaaagaggagaatgcagagcaa

SEQ ID NO: 519196 - DNA, 120 bp, Artificial Sequence
  ENSG00000165156_10 (sequence is synthesized)
gcagaatctacagaagtttcttcttcgggaatatctatcagtaaaactcctatcatgaaaatgatgaaaaataaagtggaaaataaacggattgcagttcatcataactcagttgaggac

SEQ ID NO: 519197 - DNA, 120 bp, Artificial Sequence
  ENSG00000165156_11 (sequence is synthesized)
gttcctgaagagaaagagaatgaaatcaaaccagaccgtgaagaaattgtagaaaatccaagttcttcagcttctgaatctaatacaagtacttccattgtaaacagaatacatccaagt

SEQ ID NO: 519198 - DNA, 120 bp, Artificial Sequence
  ENSG00000165156_12 (sequence is synthesized)
actgccagcacggtagtgacaccagcagcagttcttcctggattggcacaggtgataactgctgtatctgctcagcagaattctaatttgattcccaaagtcttaatccctgttaatagc

SEQ ID NO: 519199 - DNA, 120 bp, Artificial Sequence
  ENSG00000165156_13 (sequence is synthesized)
attcccacctacaatgctgcattggataacaatccccttttacttaacacctacaacaagttcccttacccaacaatgtcagaaattacagttctttctgctcaagcaaaatatacagag

SEQ ID NO: 519200 - DNA, 120 bp, Artificial Sequence
  ENSG00000165156_14 (sequence is synthesized)
gaacagatcaagatatggttttcagcccaacgtttaaaacatggtgttagttggactcccgaggaagtagaggaggcaagaaggaaacaattcaatggaacagtgcatactgtacctcag

SEQ ID NO: 519201 - DNA, 120 bp, Artificial Sequence
  ENSG00000165156_15 (sequence is synthesized)
accataactgttattcctacacacatttccacagggagtaatggtttaccatctattttacagacatgccaaatagttggtcagcctggtctggtccttactcaagtggctggaacaaac

SEQ ID NO: 519202 - DNA, 120 bp, Artificial Sequence
  ENSG00000165156_16 (sequence is synthesized)
accttgccagttacagcacctatagccttgacagtggcaggcgttccaagtcaaaataatatacagaaaagtcaggtacctgctgctcagcctactgcagaaacaaagccagcaacagca

SEQ ID NO: 519203 - DNA, 120 bp, Artificial Sequence
  ENSG00000165156_17 (sequence is synthesized)
gcagttccaacttctcaaagtgtcaaacatgaaactgcattggtaaaccctgattcatttggcattcgggcaaaaaagacaaaagagcaactggcagaattaaaagttagctaccttaaa

SEQ ID NO: 519204 - DNA, 120 bp, Artificial Sequence
  ENSG00000165156_18 (sequence is synthesized)
aatcagtttccccatgattcagaaattatcagacttatgaaaataacaggcctgacgaaaggagagattaaaaaatggtttagtgacacaaggtacaaccagagaaattcaaagagtaat

SEQ ID NO: 519205 - DNA, 120 bp, Artificial Sequence
  ENSG00000165156_19 (sequence is synthesized)
cagtgcttacatctcaacaatgattcctctaccaccattattatagactccagtgatgaaaccacggaatccccaactgttggtactgcacagcctaagcaatcctggaatccttttcct

SEQ ID NO: 519206 - DNA, 120 bp, Artificial Sequence
  ENSG00000165156_20 (sequence is synthesized)
gactttactccccaaaagtttaaagagaaaactgcagagcagcttcgtgtccttcaggcaagttttctcaacagctctgtacttacagatgaagaattaaataggttaagggcacaaacc

SEQ ID NO: 519207 - DNA, 120 bp, Artificial Sequence
  ENSG00000165156_21 (sequence is synthesized)
agaagaaatcaaaagctttaaaggaagagaaaatggaaatagatgaaagtaatgcaggtagttccaaagaagaagctggagaaacttctcctgcagatgaatctggtgcacctaagtcag

SEQ ID NO: 519208 - DNA, 120 bp, Artificial Sequence
  ENSG00000165156_22 (sequence is synthesized)
ggagtacaggcaagatatgtaaaaaaacacctgagcagctgcacatgcttaagagtgcatttgtccggacacagtggccatcaccagaagagtatgacaagttggccaaagaaagcgggc

SEQ ID NO: 519209 - DNA, 120 bp, Artificial Sequence
  ENSG00000165156_23 (sequence is synthesized)
ttgctagaacagacatagttagttggtttggggacacccgttatgcttggaagaatggaaacttgaaatggtactactactatcagagcgccaattcaagtagtatgaatggtctgtctt

SEQ ID NO: 519210 - DNA, 120 bp, Artificial Sequence
  ENSG00000165156_24 (sequence is synthesized)
cccttaggaaaagagggagagggagacccaaaggacggggaagaggaagaccgcgtgggcggcctagaggaagcaaaagaattaacaactgggacaggggaccatcactcataaaattta

SEQ ID NO: 519211 - DNA, 120 bp, Artificial Sequence
  ENSG00000165156_25 (sequence is synthesized)
aaactggaactgcaatacttaaggattattacctgaagcacaagtttcttaatgagcaagaccttgatgaacttgttaacaaatcacatatgggctatgagcaggtcagagagtggtttg

SEQ ID NO: 519212 - DNA, 120 bp, Artificial Sequence
  ENSG00000165156_26 (sequence is synthesized)
cagaaagacagagaagatcagaattaggtatagaattatttgaggaaaatgaggaggaagatgaagttattgatgaccaggaagaggatgaagaagaaacagatgatagtgacacttggg

SEQ ID NO: 519213 - DNA, 120 bp, Artificial Sequence
  ENSG00000165156_27 (sequence is synthesized)
aacctccacgacatgtgaaacggaagctgtctaaatcagatgactgaaatctgcctaaaacgttgaaggagaatcaattcttcaactcaagatgtctgatttactgtgaatttgcccaat

SEQ ID NO: 519214 - DNA, 120 bp, Artificial Sequence
  ENSG00000165156_28 (sequence is synthesized)
ctttgatgacattgaaaacgttttggggcatacacactcaaaaagcaggatccaatacccaaaagaaatggaacttaatgttgtgccaaagttaaactactgcagttggtggaagttctg

SEQ ID NO: 519215 - DNA, 120 bp, Artificial Sequence
  ENSG00000165156_29 (sequence is synthesized)
caatgtaaatagaacactaattaaaaaacaacttgtaaaaatgcaatttaaattttaatacagtacatttttcttctaatatgatggagacattctgaatcttagactttctgagggggt

SEQ ID NO: 519216 - DNA, 120 bp, Artificial Sequence
  ENSG00000165156_30 (sequence is synthesized)
ttaatgaccactagagcttgtcctcatattcagtccagtttaatactgtatgtctagtaagatgggctatatattgcctctattctttgagatgtgattaagcttagaactttgaccaaa

SEQ ID NO: 519217 - DNA, 120 bp, Artificial Sequence
  ENSG00000165156_31 (sequence is synthesized)
aatgggtaaaaaaaaaaaaaaaaaaaaaaccctgatttattactatgtcttatttatcagaccctgcactaagattaaaagttgtgcatgggcttatacaatttcaaatgtaaaaacagc

SEQ ID NO: 519218 - DNA, 120 bp, Artificial Sequence
  ENSG00000165156_32 (sequence is synthesized)
tacaatttcaaatgtaaaaacagcctatttatatatgttgaaacaataagattttatggtttcactggcccttaataattggatccttcattaaacacatccatgaataccactgtttct

SEQ ID NO: 519219 - DNA, 120 bp, Artificial Sequence
  ENSG00000165156_33 (sequence is synthesized)
actgttacttgttccattagaagctgatttgctttttattaaactgcaggaaattaattctgaagaaggaaaagaaactgacatggtaatttggatagggtgaagctttgaaataaatac

SEQ ID NO: 519220 - DNA, 120 bp, Artificial Sequence
  ENSG00000165156_34 (sequence is synthesized)
tgcaccaaaaatgtgaaaaagaatcacgtagtaaatgtatacttagtgttttcttacaatcgtggaaatcagaaatgtttatacaggtgtcagatcagaatttttaagagttatctttca

SEQ ID NO: 519221 - DNA, 120 bp, Artificial Sequence
  ENSG00000165156_35 (sequence is synthesized)
gtgaaattttataacagtttcagtgaatagagaaaaaattctgaactgatcataatgagttaaaagttagcttttcacttatgaatcatgggagtgttaactgttaactcttgccgtatc

SEQ ID NO: 519222 - DNA, 120 bp, Artificial Sequence
  ENSG00000165156_36 (sequence is synthesized)
aggagactgaaagttcatactaatttacaaactttgtaaagactggtgctgttcattcatattgggaagaaccctttcttttgtgaccataggaccatttttcaaaatgcgctttcttcg

SEQ ID NO: 519223 - DNA, 120 bp, Artificial Sequence
  ENSG00000165156_37 (sequence is synthesized)
tagaagaaatgttcagtttaattagctttggattttaacatgtttttctgaatgaccagatgtaggcttagccagtttattttctctaatttaatggataataaatattaagctcttggt

SEQ ID NO: 519224 - DNA, 120 bp, Artificial Sequence
  ENSG00000165156_38 (sequence is synthesized)
taaatgtttttcagccattgaaaatgttatgaaaaagccttgaatatgcatgctgctttcatttttataaactttttattttttaactatagctttattagtaattccaaaatgctgcaa

SEQ ID NO: 519225 - DNA, 120 bp, Artificial Sequence
  ENSG00000165156_39 (sequence is synthesized)
tgtagctgatttcctcactcagacagctggctttgtgggtggcttttttcatactactgttaacttttttaaaaaagaagcaatgtaaagaccgtaatgcactaagctttttttttttct

SEQ ID NO: 519226 - DNA, 120 bp, Artificial Sequence
  ENSG00000165156_40 (sequence is synthesized)
tttacacgtttaaaaacttcttaaagcactctgtaatataatgattaaattgctcccttttataaacattgctaatgtggtctgagttttgtttgacaataattttaatgttctcaaaat

SEQ ID NO: 519227 - DNA, 120 bp, Artificial Sequence
  ENSG00000165156_41 (sequence is synthesized)
ttgaaatgtcaagtattagaaatgaagcctttgaatatagttgtttcccttgcaatatgttaactctgtgtagctgtatataactattaatttccctcatctcttttataggcctgataa

SEQ ID NO: 519228 - DNA, 120 bp, Artificial Sequence
  ENSG00000165156_42 (sequence is synthesized)
aactcttctctgacgtttgctagcttttaaatatatttatttgacagagcaaaagaaccctcttctggttgattgtgaccttgaatacaaaataaaagtagtgattagtagtttacagtg

SEQ ID NO: 519229 - DNA, 120 bp, Artificial Sequence
  ENSG00000165156_43 (sequence is synthesized)
aaaaaatcagacttccacttgaagcaattgcatcttttaggattaatgtggctcagcggagctctgctgtgcttttaggattactgtggctcagcggagctctgcacaaagggtccgcga

SEQ ID NO: 519230 - DNA, 120 bp, Artificial Sequence
  ENSG00000165156_44 (sequence is synthesized)
tgtaggagaagacagactgctgctttggacctgttggtaatgatggcctgagctaaacatctaactagaagggatacccttccatttcaaagaacagaatgctaaggaagctgtggcaac

SEQ ID NO: 519231 - DNA, 120 bp, Artificial Sequence
  ENSG00000165156_45 (sequence is synthesized)
tgtaagttaagaaaatttttaatctgcgtatatgttcatcaaccacatacattttgaacagtcaccttgttgtatcagtcatcttcatttttgatattttctgaagtagtttttcttttc

SEQ ID NO: 519232 - DNA, 120 bp, Artificial Sequence
  ENSG00000165156_46 (sequence is synthesized)
cctaataagactaggtaccactagtatagctaagagataaatgattatcatgtgtagttttattattattatgtagagtttaatgtcttaattattatttttcatatgaattgggttttt

SEQ ID NO: 519233 - DNA, 120 bp, Artificial Sequence
  ENSG00000165156_47 (sequence is synthesized)
tttactttgttttgaaggaaagttacccaatctctatgaagggagactggcaggcaggttgaggggattcacaaacaaatactaaagataactaaaatgtattttattgcaatgccccct

SEQ ID NO: 519234 - DNA, 120 bp, Artificial Sequence
  ENSG00000165156_48 (sequence is synthesized)
aaaaagaaggggaaaagtacaccaaaggaaagacttaccacagggttgaggattgtgcagttttaggaaactaggtgaaaatgggtatcttttcatcttcattgcattgctcccaaaact

SEQ ID NO: 519235 - DNA, 120 bp, Artificial Sequence
  ENSG00000165156_49 (sequence is synthesized)
cttttaactagagtttaaaatgctttatgtatttatgaaattactcagtatctttttagtaatttataaaattactcaatatctttttctgttaaaagtcaaaggtctgttttaggccat

SEQ ID NO: 519236 - DNA, 120 bp, Artificial Sequence
  ENSG00000165156_50 (sequence is synthesized)
taggccatatataaattcatgtttgcttaggcggcatctgtctttgaaaactgtgatataaattatttctgttttagagatcaaaaggcaaataacagatttgatataaacccaattgct

SEQ ID NO: 519237 - DNA, 120 bp, Artificial Sequence
  ENSG00000165156_51 (sequence is synthesized)
taaaatatcttttcattctttggtataaaacaaacctgctaccagcactaacattgtatttgatttaaagtatatctctgtagtcttaaaaatgcaaataaatatggcttaaatttgaaa

SEQ ID NO: 519238 - DNA, 120 bp, Artificial Sequence
  ENSG00000165156_52 (sequence is synthesized)
ggcctgcctcgcggctgggtagtcgccgcagagggacagacagacccacagcctccctcgctctttttgggtgtctccgccaccgaaagagcttgggggcggggggctctctggagggaa

SEQ ID NO: 519239 - DNA, 120 bp, Artificial Sequence
  ENSG00000165156_53 (sequence is synthesized)
catctcagccccctgccttggtgaggacccagcaacttaggattgttgagaggagtgaagactgcgtattcccagcggagggcgccgccggagggagcaccccagtaatgttgggagtcc

SEQ ID NO: 519240 - DNA, 120 bp, Artificial Sequence
  ENSG00000165164_0 (sequence is synthesized)
ggtcgtcgacgctaatccttggccggacggatccacatctgttttctggctaccgagagggcagccatgaacacccaaaagggttccctcaccataaacgtccacagaggttccctcgcc

SEQ ID NO: 519241 - DNA, 120 bp, Artificial Sequence
  ENSG00000165164_1 (sequence is synthesized)
atgagcatccaaaggggttccctcgtcccccgggatatggatagctcgggtagagacatgcagctgcgggtgatcccggctgaggtgaagttcctggacacgatggccgggagggtgtac

SEQ ID NO: 519242 - DNA, 120 bp, Artificial Sequence
  ENSG00000165164_2 (sequence is synthesized)
cgcctcccgattactgtgcataatatttgccgctggaaccagaaaatccgatttaaggagcccgtcaagccacagttcaaactgatgttgaccagtctggataaagaacttgcttctggc

SEQ ID NO: 519243 - DNA, 120 bp, Artificial Sequence
  ENSG00000165164_3 (sequence is synthesized)
cttcagatgacagctatggtggaatatcatcctgataaagacgaagacacttttgaccggctacttatttcaatagaaaataaaacaacagaaattcctctaattgggttgattccatcc

SEQ ID NO: 519244 - DNA, 120 bp, Artificial Sequence
  ENSG00000165164_4 (sequence is synthesized)
tgtcaattggaaattgaatcagtagttaattttggcacactggttgccaatagtaaagtatattctaaagagattactatcactaaccatggcaaagctccaggcatatttaaggcagaa

SEQ ID NO: 519245 - DNA, 120 bp, Artificial Sequence
  ENSG00000165164_5 (sequence is synthesized)
taccacggccaattacccatcctcatttttccaactagtggtatcgtggatgctaagtcatcaatggttattaaagtagatttctgtgcagaccagccaagaattgtagatgaagaggca

SEQ ID NO: 519246 - DNA, 120 bp, Artificial Sequence
  ENSG00000165164_6 (sequence is synthesized)
atagtgattttgcaaggtcaacctgagatgctcttgagtatcaaagctcatgtggttgagcagattattgaattattaagcatgagtagtgacagaaggctggaatgcatacactttggt

SEQ ID NO: 519247 - DNA, 120 bp, Artificial Sequence
  ENSG00000165164_7 (sequence is synthesized)
cctgttttcttcggatcatcaaaaattaaacatgcacgtgtatacaataatagcccagagcccataaattgggtggccatcatacaagatgatgccgtgggagaagaattgggtacagat

SEQ ID NO: 519248 - DNA, 120 bp, Artificial Sequence
  ENSG00000165164_8 (sequence is synthesized)
attcaacaaagaacagatattgctttaaataatctcacctacataagaaaaataaagaacatagatactactatcattatctcctgtcttcctaatgaagggactttacaaccttatcaa

SEQ ID NO: 519249 - DNA, 120 bp, Artificial Sequence
  ENSG00000165164_9 (sequence is synthesized)
aagactgtaattacattttgtttcaccccaaagctaatggctgttggtaaaaaggatattggaccttcatacagacaggactatgctctctttttgagatttgagtccgtaggaagtaaa

SEQ ID NO: 519250 - DNA, 120 bp, Artificial Sequence
  ENSG00000165164_10 (sequence is synthesized)
gatggatttttgagagatgatgactataaaaccatcaaaagtgaacgatttcagaaagtggaattagcactgacaggcacaggacttcctgttttactacagtttgatccaggaccagtt

SEQ ID NO: 519251 - DNA, 120 bp, Artificial Sequence
  ENSG00000165164_11 (sequence is synthesized)
cttaattttaaaccttgtttcatgggtgaacgttcagaaattcagtgcatcataaaaaatcaatgcgaattacttcctgtgacgtaccactttaaaaaaactgcaaattttgaaattgat

SEQ ID NO: 519252 - DNA, 120 bp, Artificial Sequence
  ENSG00000165164_12 (sequence is synthesized)
cctgaaaagggcaagattactggagggggtatggtggatgtgatgtgttcatttgttccacatcaacttggagtcttcaaagtgaagcagatgatagagattattggtttagtggcagaa

SEQ ID NO: 519253 - DNA, 120 bp, Artificial Sequence
  ENSG00000165164_13 (sequence is synthesized)
gaagatttgcaatctttgtcggtaaaatctttccatcacgtatatttagctttcaacagcatctgtaaagcttccaccaagaaagttgtgatgaaatttgatcctggtatattgccttcg

SEQ ID NO: 519254 - DNA, 120 bp, Artificial Sequence
  ENSG00000165164_14 (sequence is synthesized)
atccgtaatcccacgggaaagtttgtggtcaaagacttggcaaaacgcaagaattatgcacctgtagcaatgcttcaatcagccatgacacgcactcacaatcatcgctcatgtgaagag

SEQ ID NO: 519255 - DNA, 120 bp, Artificial Sequence
  ENSG00000165164_15 (sequence is synthesized)
ggatatgctattagcctttcccaatgaccgagctgcaactatcaggtctaaagaccatcataaacatttcaggccaattttcacaaaagttccaagatttaactatgtgaatcatgattt

SEQ ID NO: 519256 - DNA, 120 bp, Artificial Sequence
  ENSG00000165164_16 (sequence is synthesized)
tgcatatactacatttgaaaaacagcaaaagaaattacatgaaaactattatgcaatgtatcttaaatatttaagaagtgtgcgcttgcagaagaaacaagcagagagggagcgcatgta

SEQ ID NO: 519257 - DNA, 120 bp, Artificial Sequence
  ENSG00000165164_17 (sequence is synthesized)
ttcatatgatgatacagacataggcttagagccaggatcaggtctaaagtcaccctcactctcagaagcggaaatagaagaggagctgtcttcagcagcaaattcaattagagcgaatcg

SEQ ID NO: 519258 - DNA, 120 bp, Artificial Sequence
  ENSG00000165164_18 (sequence is synthesized)
attgttaaccaccaggggtatagcatctcaggaggaagagtctgtgagaagaaaggttctcaaaggacttaaatcagaaccatccactccacaagaaaaacatgattgcagcttaatgtt

SEQ ID NO: 519259 - DNA, 120 bp, Artificial Sequence
  ENSG00000165164_19 (sequence is synthesized)
gacaccaaagcaaattcatcaagtaattgttgggccttctgtccttaactttggtaatatttgtgtgaactctccaaatactcatctacttcatgttattaatatgctacctatgcatgt

SEQ ID NO: 519260 - DNA, 120 bp, Artificial Sequence
  ENSG00000165164_20 (sequence is synthesized)
tttgctccagttagatactgatttagaagaacttcagaagaccaaccaattttcatacgtgattctacctacatccagtacttatatttcaatggtatttgactctcccaccattggaaa

SEQ ID NO: 519261 - DNA, 120 bp, Artificial Sequence
  ENSG00000165164_21 (sequence is synthesized)
attttggaagtctttcacctttacagtgaacaatgtacccagtggacacatcctagtggtggcagttgtccagccagtaacacttgagctatcttctaatgagctagtattgagaccacg

SEQ ID NO: 519262 - DNA, 120 bp, Artificial Sequence
  ENSG00000165164_22 (sequence is synthesized)
aggcttcttcatgaaaacatgttttcgggggacagttagattgtataatcgtcagaattgttgtgctcagtttcaatggcaacccgtaaacacaggaagagggatagcattttctatttg

SEQ ID NO: 519263 - DNA, 120 bp, Artificial Sequence
  ENSG00000165164_23 (sequence is synthesized)
tccagctaaaggcactgttgaagcatattcctcactggaatgtgaagtaacttggcagcagggcttcagttctccagaagaaggagaatttattcttcatgtctttcaaggaaacgcgtt

SEQ ID NO: 519264 - DNA, 120 bp, Artificial Sequence
  ENSG00000165164_24 (sequence is synthesized)
gaagctaaaatgtgttgcacatgtaattattttccttgaacatggtttttgttttgagggctatgaatttgttgggtatacactggtgtatatagttacctatatctagaattaactgta

SEQ ID NO: 519265 - DNA, 120 bp, Artificial Sequence
  ENSG00000165164_25 (sequence is synthesized)
aaacccaagactttcatgcaacagtactagtttttttgttagagcctctataaatatgtaatatcatcatgggagccattgaaatgaaattattttattaagagacacaaaaagtatttt

SEQ ID NO: 519266 - DNA, 120 bp, Artificial Sequence
  ENSG00000165164_26 (sequence is synthesized)
cagagaatatacttgatggattaaaaatgtgagtagagggaaagctgtaatatgcaattttaacctttttctggtacagtccagagggccttaaattcatgactcaatcaccaagcatga

SEQ ID NO: 519267 - DNA, 120 bp, Artificial Sequence
  ENSG00000165164_27 (sequence is synthesized)
ttttacatgtgtaccaaatttcccactcaatgttcttagaaatattaaagaagccaaatgctcttttactaaaccccatctatatttctaggacatgatgatactcttacatatttcagc

SEQ ID NO: 519268 - DNA, 120 bp, Artificial Sequence
  ENSG00000165164_28 (sequence is synthesized)
tgtggaggagtttttagcctcaagagatgagaaattcatctacttttagtgatggcaagtgacagaactcagtatggtttttcttctaagcctaaaataagctgggtcctactacttttc

SEQ ID NO: 519269 - DNA, 120 bp, Artificial Sequence
  ENSG00000165164_29 (sequence is synthesized)
ggtcctactacttttcattatgtgtaaattagttttattttttaaaaactttctattgaagtataacatgcatatgtatatgtatatgtggagaaacatgaagtgattaaataaaatatt

SEQ ID NO: 519270 - DNA, 120 bp, Artificial Sequence
  ENSG00000165164_30 (sequence is synthesized)
tgcaacagcagaaaactgcattcttactatttacccatatatggcaattcatctggataagcaaaacattattttaaagaatgataaggatgaatatcttaagaagactagagatggtgt

SEQ ID NO: 519271 - DNA, 120 bp, Artificial Sequence
  ENSG00000165164_31 (sequence is synthesized)
tttgcctccctaccaggatgctaaaccaccctctcctgcttcaattaaaaagacatacaccactagcaaattcaatgatgctgaacctgcaaagggaaacttatttattggagtggaagt

SEQ ID NO: 519272 - DNA, 120 bp, Artificial Sequence
  ENSG00000165164_32 (sequence is synthesized)
actgcctgaaaatttgcacttggatgaaagtgaaacatcagaggaagatcatgggtctctggaaaaggaaaaatatgaacaattcctttctcttgaggaaggaacaaaggcacactactt

SEQ ID NO: 519273 - DNA, 120 bp, Artificial Sequence
  ENSG00000165164_33 (sequence is synthesized)
ttttgagaaggttgtaaatgcagcacagacctggttcagtctctttggctggcctgaaggaccccattctttttctattccagagactataagaagggatgtatataaaatgcaattcta

SEQ ID NO: 519274 - DNA, 120 bp, Artificial Sequence
  ENSG00000165164_34 (sequence is synthesized)
ctcatcaacctcgccaccccaaaagttttccagacagaatgacttttccaaatataataagaccatttatgatgtgctgctccatttgagtggaaaaatgccacctggaattaattcaag

SEQ ID NO: 519275 - DNA, 120 bp, Artificial Sequence
  ENSG00000165164_35 (sequence is synthesized)
tcaatctttacctgtagataaccatgaaaaaagggtaattcaactccatttgcaacattcctcacttctggactttctcaatgctcaaggaggatgtatttcacatgtcctgccagaatt

SEQ ID NO: 519276 - DNA, 120 bp, Artificial Sequence
  ENSG00000165164_36 (sequence is synthesized)
atgtctaaatttgaagcctggagtaaacgggcatggacagatgtatttctacagatatacaaggttttggttctatcccgtgtagtgccatactgcagcaataatatgccccccatatgt

SEQ ID NO: 519277 - DNA, 120 bp, Artificial Sequence
  ENSG00000165164_37 (sequence is synthesized)
gtgcaaaatacaccaaaagtcaatccttgttttgcatccagcaacatatattctgattctgaaagaattttgcttagttggatgaacataaattatgagaatactcgacatgtgatatgg

SEQ ID NO: 519278 - DNA, 120 bp, Artificial Sequence
  ENSG00000165164_38 (sequence is synthesized)
aaaaactgtcacaaagatgttatcccttctgagagatggatagtaaattttgacaaagacctttcagatggtcttgtttttgcaacacagttgggagcctattgcccattcttgattgag

SEQ ID NO: 519279 - DNA, 120 bp, Artificial Sequence
  ENSG00000165164_39 (sequence is synthesized)
tctcattttataaatatgtacacacgaccaaaaagtcctgaagagtatctgcacaattgcctgattattgtaaatactctttatgaaattgactttgacgtggaaatacaggtgtgtctg

SEQ ID NO: 519280 - DNA, 120 bp, Artificial Sequence
  ENSG00000165164_40 (sequence is synthesized)
agggtgtttccaaaggagatggatgcaggagtcagtggcctgagaaaggaagatatgccctcagtgtgggttgttaccatccgattggctgtggcagtggccagaacaaagagacagaag

SEQ ID NO: 519281 - DNA, 89 bp, Artificial Sequence
  ENSG00000165164_41 (sequence is synthesized)
aagggggatattcagtttgcttggtcgtgatctctttctccctttggagcaggatgcatttttttctccttctgcccttggacatctga

SEQ ID NO: 519282 - DNA, 120 bp, Artificial Sequence
  ENSG00000165164_42 (sequence is synthesized)
caaaatgtaggacaaaaccatgcttatttcaaggtttgtagtcagagtcttttgcctatcattaatattattccatcgcaaggaatagttccatttgggggaataactgttctcaatatc

SEQ ID NO: 519283 - DNA, 120 bp, Artificial Sequence
  ENSG00000165164_43 (sequence is synthesized)
tcctgtaaacccactgtggcagaaaagtttgatacaagagcaaaggtttctattcgtcatgcgaatgttatagaccttaggattggtggatctgctgaaattgctgatgtagaaatcaat

SEQ ID NO: 519284 - DNA, 120 bp, Artificial Sequence
  ENSG00000165164_44 (sequence is synthesized)
cctgatgtatttaatttcagtggcgcctatattggtggtacccagattattccatttgtaataaaaaacaaaggtataacacgtgccagagtggagtttaatctaaaagactttccggat

SEQ ID NO: 519285 - DNA, 120 bp, Artificial Sequence
  ENSG00000165164_45 (sequence is synthesized)
ttttcaatggatcttaaagacaaatcagaagaatttaaagaccctgcagttccttatatatattctttggaattagaggaaaatacatctctggaatgtagcataacattttctcccaaa

SEQ ID NO: 519286 - DNA, 120 bp, Artificial Sequence
  ENSG00000165164_46 (sequence is synthesized)
gaagtgacagtagttgaattcatcattcaagttcagattaatttctttgagtcttcaaagctctacactaaatatttgtccagttctccttcgaatccaaaaacagtaccacttatccga

SEQ ID NO: 519287 - DNA, 120 bp, Artificial Sequence
  ENSG00000165164_47 (sequence is synthesized)
ccatgttacgttcaagctactgcattgcaatcaccattgaacttatctagtactaagtttgtatttgaaatccctttacatgagatgaatcctaataacaaggtcacaaaaactcagaat

SEQ ID NO: 519288 - DNA, 120 bp, Artificial Sequence
  ENSG00000165164_48 (sequence is synthesized)
cttgttttatataatattaccaaacaccatgtgacatggactttggatcttagtaatactggcaaacttttcaaagacggcacattcaagttcagtgtactgaatgggattctacgacca

SEQ ID NO: 519289 - DNA, 120 bp, Artificial Sequence
  ENSG00000165164_49 (sequence is synthesized)
aatgaaaagtataatgtttccataagtttctgtccaaatcgtcctgggacatacacagcagatattcctatgcttttaaattatattccagtttgctataaaatattacatcttactggg

SEQ ID NO: 519290 - DNA, 120 bp, Artificial Sequence
  ENSG00000165164_50 (sequence is synthesized)
gaagtaaaatcaccagagttattgtttgaccctccatttatatttttcactcctgttcctttggatataacaactgtaatggatatcaacattttacctcaaaactatttcagaaattca

SEQ ID NO: 519291 - DNA, 120 bp, Artificial Sequence
  ENSG00000165164_51 (sequence is synthesized)
actctatgtgtccagattcccacagtaaggcttcttgatggtgaagagattcaccctctttctgtgaaatttccaaaaggcagagtcatcccaggctctcacagtggaattaataataag

SEQ ID NO: 519292 - DNA, 120 bp, Artificial Sequence
  ENSG00000165164_52 (sequence is synthesized)
aaatccaatcctgatgctcatgctttgtgtctacatgtatgaaagactccctacatatctccctaagaaggtggtgtcctttgaatgtactctacatgacacggtgctgaataagattct

SEQ ID NO: 519293 - DNA, 120 bp, Artificial Sequence
  ENSG00000165164_53 (sequence is synthesized)
actgaaaaattccagctcgcgaaacttagtgtataatgctagaattgttggaagagatgctgctgacttctccctttcccaaaaagggaatgttgtgacaatttctccaagaaatgaaat

SEQ ID NO: 519294 - DNA, 120 bp, Artificial Sequence
  ENSG00000165164_54 (sequence is synthesized)
taatgtcactctgaaattcaccagtcgctttattcgtcctgctgaagcttcactactattaatttcaaaacccaagaatgcagtaagaggaattacaatgacttttgctcttaaaggcaa

SEQ ID NO: 519295 - DNA, 120 bp, Artificial Sequence
  ENSG00000165164_55 (sequence is synthesized)
agtcctcgattttaaagccattgacattataaaatgcgaaagcccatgttatcaatttcaggaagtcactgtaaatgtgaaaaaccccttccatacggctggggacttcagtgtcatttt

SEQ ID NO: 519296 - DNA, 120 bp, Artificial Sequence
  ENSG00000165164_56 (sequence is synthesized)
ggtggaatcctcaacatttgtctcttcgccaacgaagttaactgaatccaggcaatacccgaaacatgatgatgatatgagtagcagtgggagtgacactgatcagggctgttccgattc

SEQ ID NO: 519297 - DNA, 120 bp, Artificial Sequence
  ENSG00000165164_57 (sequence is synthesized)
cccaaatgtcttacatacctcaattaagtccacttttatcagagagttcttctgctccatgcatactgttcacctgggagtgaaaggaacttcaagcctagagctccgctttcttccctt

SEQ ID NO: 519298 - DNA, 120 bp, Artificial Sequence
  ENSG00000165164_58 (sequence is synthesized)
taacatgcacgtgcgctactgtgtcatcatcttgagcaacaaaaagattggacaattaatatatgttgcggaaggaaaaggtatgacccccttgccttccagttgccttccaatgaatac

SEQ ID NO: 519299 - DNA, 120 bp, Artificial Sequence
  ENSG00000165164_59 (sequence is synthesized)
gtcttcaagtccagtttattacagcactactcgagaagaagggcctaataagaaatacccagttctgtatttgaaatgcaaaccctatcaaatcctgtatgtggaccttaaattgccaat

SEQ ID NO: 519300 - DNA, 120 bp, Artificial Sequence
  ENSG00000165164_60 (sequence is synthesized)
gactaatgaagccaaggaaaaggctttggcttttgcagcacagcaacagatgtcgagtattgagtatgagcgaaggttgatcacaggcactctagagagcagtagtatccgtgtggccat

SEQ ID NO: 519301 - DNA, 120 bp, Artificial Sequence
  ENSG00000165164_61 (sequence is synthesized)
cgccctcctgggactgacgaagatcgagactcttatgctctttcgtatctcaaagttgaggaagcctaagaccgtttcatacacaacagaagtgagccttccaaagtatttttatatccc

SEQ ID NO: 519302 - DNA, 120 bp, Artificial Sequence
  ENSG00000165164_62 (sequence is synthesized)
tgagaaaatctccattccttggattccagaacctcaagtaattaaactttcaaaagcaaaagcttcagatggatctgttccacttcctttgcaatttcttcctctccaatctggacgcta

SEQ ID NO: 519303 - DNA, 120 bp, Artificial Sequence
  ENSG00000165164_63 (sequence is synthesized)
cccttgtaaaattttattgaaatcaaggtatgatgtgcgtgcctattatgttgaaggtattgtgaatgaagaacaaccagaggccaaatttgagtttgaaacaccagcatttgaagccct

SEQ ID NO: 519304 - DNA, 120 bp, Artificial Sequence
  ENSG00000165164_64 (sequence is synthesized)
tactcagaatattccaataaaaaatcaaacaaacgataaatggacctttcaagttactatagaaggagaatggttttatggacctgttgatttacatgttggaccagatgaaattgtgga

SEQ ID NO: 519305 - DNA, 120 bp, Artificial Sequence
  ENSG00000165164_65 (sequence is synthesized)
gtatcctctcacattcaaacctatttttgaatgtgtcattacgggtaaacttattctacaaaatgaagtagatggtagggagcacatctttgacataaaaggggttgggaaaaaaccttc

SEQ ID NO: 519306 - DNA, 120 bp, Artificial Sequence
  ENSG00000165164_66 (sequence is synthesized)
ggccttggaacacatcactgtggaatgtcaagtggggaatgtgacacaaaagcatataacattgcctcatttcacaaatactgccctaacatttaaggtaactgcagatcttccaatagt

SEQ ID NO: 519307 - DNA, 120 bp, Artificial Sequence
  ENSG00000165164_67 (sequence is synthesized)
gtggggaaatccacaaattacagtatacccttataaagaaattctgtacctgattcatgtgcgcccttggaaacgtggtatattgaaaggtacaattacattttctactacaagaagatg

SEQ ID NO: 519308 - DNA, 120 bp, Artificial Sequence
  ENSG00000165164_68 (sequence is synthesized)
tactacaagaaggaaacatgatgattatgaggaagacacagatcaagatcaagccctctcctgtcttgattcaataacagaacaatctagcattttggatgatgcagacacatatggtaa

SEQ ID NO: 519309 - DNA, 120 bp, Artificial Sequence
  ENSG00000165164_69 (sequence is synthesized)
ttttaacaatttaagattctggtataatcttgagatccatagcactcctggaccacccatagagattatggaaatgacatgtattgctctggacagcacttgcattgaaatacctctctc

SEQ ID NO: 519310 - DNA, 120 bp, Artificial Sequence
  ENSG00000165164_70 (sequence is synthesized)
taatccaaaagatagaggtcttcacttagaggtgcagttaacgagtgctgcccttaatggggataatgaaattatcctgagtccactacagtgcaccaaatatattgtatggtattctcc

SEQ ID NO: 519311 - DNA, 120 bp, Artificial Sequence
  ENSG00000165164_71 (sequence is synthesized)
agcaactacaggctacagcgatgaaagcattatttttcagcctgaaatggctgaagagttctggtatttactgaagttaactattgaattaccaaaaccaaccacaatgccagaaataca

SEQ ID NO: 519312 - DNA, 120 bp, Artificial Sequence
  ENSG00000165164_72 (sequence is synthesized)
gtgcgaccttggcaagcatgtcactcagatcattcctttagttaattgtacgcatgaaaccttaaaattgcaagtaacaaacagtaatcctgaaaattttgtcctggatattaacagaaa

SEQ ID NO: 519313 - DNA, 120 bp, Artificial Sequence
  ENSG00000165164_73 (sequence is synthesized)
atcacaactgatcatatctcctcactccaccacagaattacctgttctcttttatccttctgcacttggaagagctgatcatcaagcttgcatcaacttctactgtactcagtttacaga

SEQ ID NO: 519314 - DNA, 120 bp, Artificial Sequence
  ENSG00000165164_74 (sequence is synthesized)
atggaaattctacttatctggagtaggactatttccccagcctctagacacggaaagaataaccacacgcattggtcttcagtcaactattgttatacctttcaaaaatcccacaatgga

SEQ ID NO: 519315 - DNA, 120 bp, Artificial Sequence
  ENSG00000165164_75 (sequence is synthesized)
agatgtcctcattgatataatactgacaagtgtggaacatcccaggaatcttgtcatggatcattgctgggatagcttcatctatgagagttctgccttcagatttagttctccgagtga

SEQ ID NO: 519316 - DNA, 120 bp, Artificial Sequence
  ENSG00000165164_76 (sequence is synthesized)
aatacaaggaattgcactgcctcctaaaggaaatatagatatctcattgttatttatacctcaaattatgaaattacacaaaacaatggttattattgagatgacgaaagcaaatggaaa

SEQ ID NO: 519317 - DNA, 120 bp, Artificial Sequence
  ENSG00000165164_77 (sequence is synthesized)
atattggcctattgacaattttgatgagttggatataaaatttaaaagtattgtgggaatcgacagcgaagaaatccaagcaatacactggatataccctattgttggactcccacaagc

SEQ ID NO: 519318 - DNA, 120 bp, Artificial Sequence
  ENSG00000165164_78 (sequence is synthesized)
accacctcctaaatctcccccagttgtcatacaatgtcagtccaggaagcgggcagaagagaaggtagaaatcatactgaatgctggttttttcggatttagtcttactccagatctgac

SEQ ID NO: 519319 - DNA, 120 bp, Artificial Sequence
  ENSG00000165164_79 (sequence is synthesized)
agaagttttagtgattccaaaaagaaattcacataatttttgtgaggatcccaatgaaattcctaaaatacatgaattcgagtatgaaattcaatttgaatctgaagctatgaagtctaa

SEQ ID NO: 519320 - DNA, 120 bp, Artificial Sequence
  ENSG00000165164_80 (sequence is synthesized)
gttggaatcctgtgtagctttatatatgattgaaaaatcttatgatattatggctaaaaggataacatttatcttcaatctggtattcacaccaaagaaaccattaaggtctcacataac

SEQ ID NO: 519321 - DNA, 120 bp, Artificial Sequence
  ENSG00000165164_81 (sequence is synthesized)
actgaaaatagagtgcgtaacagaagggatctggaagtttcccataatgttgatcgctactgaacctgatacggatgctgtcattgacattgaaggagttggtttatttaaggaatctgt

SEQ ID NO: 519322 - DNA, 120 bp, Artificial Sequence
  ENSG00000165164_82 (sequence is synthesized)
ttttgaacttaggctgaaaagtcagacaagaaatcctgagccgttcaccgcacacttcctacctggcagcgatctggagttttttgtaaaacctcaggctggagaacttcttccttttaa

SEQ ID NO: 519323 - DNA, 120 bp, Artificial Sequence
  ENSG00000165164_83 (sequence is synthesized)
cacaaacggaactctcatcactgtaggatttaaacctaaaatgtactgtaggaaatataaagcaacattagtaatacagacagaagaaatgtactggaagtatgagatcaatggattaac

SEQ ID NO: 519324 - DNA, 120 bp, Artificial Sequence
  ENSG00000165164_84 (sequence is synthesized)
tccaactaccgtgccaccaaaaaatgcaaaagccaaaattgatgctactcacaagacacatgacaacatgccagtccgtccacataattttgtccgtgaaaatactaaactcataagaac

SEQ ID NO: 519325 - DNA, 120 bp, Artificial Sequence
  ENSG00000165164_85 (sequence is synthesized)
aggggtgtcttccaccatcaagggtgctcctttggtgaagaatcaataaaatttttttccaaaatatttcttggtctcaggtagaactttgatgactattatttcatcttttggaatatt

SEQ ID NO: 519326 - DNA, 120 bp, Artificial Sequence
  ENSG00000165164_86 (sequence is synthesized)
tctgaggaataatggtttaattataataggccttctatatttccttgtcttttaaaattcaatctgttctctgaatatattatacttcatttgtgagttatgaatgttttttggttgcga

SEQ ID NO: 519327 - DNA, 120 bp, Artificial Sequence
  ENSG00000165164_87 (sequence is synthesized)
acattggaattggttcacttttaaagtgcaggtgtatatttgtggtaaaacgaaatataatttaaatgacaacagtatttccaataacagcgttgctaataaagctaaatgtctcatgta

SEQ ID NO: 519328 - DNA, 120 bp, Artificial Sequence
  ENSG00000165164_88 (sequence is synthesized)
gactctaggacttgcaccagcagcctcctttgggctttcagccttcggcctcagaatggggcctgcactgtagcttccctggtttgggggatttgggacttggcctgagccatgcttctg

SEQ ID NO: 519329 - DNA, 120 bp, Artificial Sequence
  ENSG00000165164_89 (sequence is synthesized)
gcttccctgggagcccctattggcttctgtcattctgcagtttgtagccagcctactgtgggacttcgcctttgtgattgttcagccaattcttcctaataaattcccgtttatatatat

SEQ ID NO: 519330 - DNA, 120 bp, Artificial Sequence
  ENSG00000165164_90 (sequence is synthesized)
agacactaaataaactagcaagaaaaggttttactacatggtgacagataaagaataacaattttgctgtgcaaaaatcaacttatctcaactgctacatcttggtttacctttcttttg

SEQ ID NO: 519331 - DNA, 120 bp, Artificial Sequence
  ENSG00000165164_91 (sequence is synthesized)
tcaaagagcagaattttaagtatggtatataacaaacagttgtcaacactagaggaaagttaaaaaaaatactttccttccatattaaggaactttagaacagacaaataatgactgtaa

SEQ ID NO: 519332 - DNA, 120 bp, Artificial Sequence
  ENSG00000165168_0 (sequence is synthesized)
ttcctcattggaagaagaagcatagtatagaagaaaggcaaacacaacacattcaacctctgccaccatggggaactgggctgtgaatgaggggctctccatttttgtcattctggtttg

SEQ ID NO: 519333 - DNA, 120 bp, Artificial Sequence
  ENSG00000165168_1 (sequence is synthesized)
gctggggttgaacgtcttcctctttgtctggtattaccgggtttatgatattccacctaagttcttttacacaagaaaacttcttgggtcagcactggcactggccagggcccctgcagc

SEQ ID NO: 519334 - DNA, 120 bp, Artificial Sequence
  ENSG00000165168_2 (sequence is synthesized)
ctgcctgaatttcaactgcatgctgattctcttgccagtctgtcgaaatctgctgtccttcctcaggggttccagtgcgtgctgctcaacaagagttcgaagacaactggacaggaatct

SEQ ID NO: 519335 - DNA, 120 bp, Artificial Sequence
  ENSG00000165168_3 (sequence is synthesized)
cacctttcataaaatggtggcatggatgattgcacttcactctgcgattcacaccattgcacatctatttaatgtggaatggtgtgtgaatgcccgagtcaataattctgatccttattc

SEQ ID NO: 519336 - DNA, 120 bp, Artificial Sequence
  ENSG00000165168_4 (sequence is synthesized)
agtagcactctctgaacttggagacaggcaaaatgaaagttatctcaattttgctcgaaagagaataaagaaccctgaaggaggcctgtacctggctgtgaccctgttggcaggcatcac

SEQ ID NO: 519337 - DNA, 120 bp, Artificial Sequence
  ENSG00000165168_5 (sequence is synthesized)
tggagttgtcatcacgctgtgcctcatattaattatcacttcctccaccaaaaccatccggaggtcttactttgaagtcttttggtacacacatcatctctttgtgatcttcttcattgg

SEQ ID NO: 519338 - DNA, 120 bp, Artificial Sequence
  ENSG00000165168_6 (sequence is synthesized)
ccttgccatccatggagctgaacgaattgtacgtgggcagaccgcagagagtttggctgtgcataatataacagtttgtgaacaaaaaatctcagaatggggaaaaataaaggaatgccc

SEQ ID NO: 519339 - DNA, 120 bp, Artificial Sequence
  ENSG00000165168_7 (sequence is synthesized)
aatccctcagtttgctggaaaccctcctatgacttggaaatggatagtgggtcccatgtttctgtatctctgtgagaggttggtgcggttttggcgatctcaacagaaggtggtcatcac

SEQ ID NO: 519340 - DNA, 120 bp, Artificial Sequence
  ENSG00000165168_8 (sequence is synthesized)
caaggtggtcactcaccctttcaaaaccatcgagctacagatgaagaagaaggggttcaaaatggaagtgggacaatacatttttgtcaagtgcccaaaggtgtccaagctggagtggca

SEQ ID NO: 519341 - DNA, 120 bp, Artificial Sequence
  ENSG00000165168_9 (sequence is synthesized)
cccttttacactgacatccgcccctgaggaagacttctttagtatccatatccgcatcgttggggactggacagaggggctgttcaatgcttgtggctgtgataagcaggagtttcaaga

SEQ ID NO: 519342 - DNA, 120 bp, Artificial Sequence
  ENSG00000165168_10 (sequence is synthesized)
tgcgtggaaactacctaagatagcggttgatgggccctttggcactgccagtgaagatgtgttcagctatgaggtggtgatgttagtgggagcagggattggggtcacacccttcgcatc

SEQ ID NO: 519343 - DNA, 120 bp, Artificial Sequence
  ENSG00000165168_11 (sequence is synthesized)
cattctcaagtcagtctggtacaaatattgcaataacgccaccaatctgaagctcaaaaagatctacttctactggctgtgccgggacacacatgcctttgagtggtttgcagatctgct

SEQ ID NO: 519344 - DNA, 120 bp, Artificial Sequence
  ENSG00000165168_12 (sequence is synthesized)
gcaactgctggagagccagatgcaggaaaggaacaatgccggcttcctcagctacaacatctacctcactggctgggatgagtctcaggccaatcactttgctgtgcaccatgatgagga

SEQ ID NO: 519345 - DNA, 120 bp, Artificial Sequence
  ENSG00000165168_13 (sequence is synthesized)
gaaagatgtgatcacaggcctgaaacaaaagactttgtatggacggcccaactgggataatgaattcaagacaattgcaagtcaacaccctaataccagaataggagttttcctctgtgg

SEQ ID NO: 519346 - DNA, 120 bp, Artificial Sequence
  ENSG00000165168_14 (sequence is synthesized)
acctgaagccttggctgaaaccctgagtaaacaaagcatctccaactctgagtctggccctcggggagtgcatttcattttcaacaaggaaaacttctaacttgtctcttccatgaggaa

SEQ ID NO: 519347 - DNA, 120 bp, Artificial Sequence
  ENSG00000165168_15 (sequence is synthesized)
ataaatgtgggttgtgctgccaaatgctcaaataatgctaattgataatataaataccccctgcttaaaaatggacaaaaagaaactataatgtaatggttttcccttaaaggaatgtca

SEQ ID NO: 519348 - DNA, 120 bp, Artificial Sequence
  ENSG00000165168_16 (sequence is synthesized)
aagattgtttgatagtgataagttacatttatgtggagctctatggttttgagagcacttttacaaacattatttcatttttttcctctcagtaatgtcagtggaagttagggaaaagat

SEQ ID NO: 519349 - DNA, 120 bp, Artificial Sequence
  ENSG00000165168_17 (sequence is synthesized)
tcttggactcaattttagaatcaaaagggaaaggatcaaaaggttcagtaacttccctaagattatgaaactgtgaccagatctagcccatcttactccaggtttgatactctttccaca

SEQ ID NO: 519350 - DNA, 120 bp, Artificial Sequence
  ENSG00000165168_18 (sequence is synthesized)
tgagctgcctcagaatcctcaaaatcagtttttatattccccaaaagaagaaggaaaccaaggagtagctatatatttctactttgtgtcatttttgccatcattattatcatactgaag

SEQ ID NO: 519351 - DNA, 120 bp, Artificial Sequence
  ENSG00000165168_19 (sequence is synthesized)
gaaattttccagatcattaggacataatacatgttgagagtgtctcaacacttattagtgacagtattgacatctgagcatactccagtttactaatacagcagggtaactgggccagat

SEQ ID NO: 519352 - DNA, 120 bp, Artificial Sequence
  ENSG00000165168_20 (sequence is synthesized)
gttctttctacagaagaatattggattgattggagttaatgtaatactcatcatttaccactgtgcttggcagagagcggatactcaagtaagttttgttaaatgaatgaatgaatttag

SEQ ID NO: 519353 - DNA, 120 bp, Artificial Sequence
  ENSG00000165168_21 (sequence is synthesized)
aaccacacaatgccaagatagaattaatttaaagccttaaacaaaatttatctaaagaaataacttctattactgtcatagaccaaaggaatctgattctccctagggtcaagaacaggc

SEQ ID NO: 519354 - DNA, 120 bp, Artificial Sequence
  ENSG00000165168_22 (sequence is synthesized)
taaggatactaaccaataggattgcctgaagggttctgcacattcttatttgaagcatgaaaaaagagggttggaggtggagaattaacctcctgccatgactctggctcatctagtcct

SEQ ID NO: 519355 - DNA, 120 bp, Artificial Sequence
  ENSG00000165168_23 (sequence is synthesized)
gctccttgtgctataaaataaatgcagactaatttcctgcccaaagtggtcttctccagctagcccttatgaatattgaacttaggaattgtgacaaatatgtatctgatatggtcattt

SEQ ID NO: 519356 - DNA, 120 bp, Artificial Sequence
  ENSG00000165168_24 (sequence is synthesized)
gttttaaataacacccaccccttattttccgtaaatacacacacaaaatggatcgcatctgtgtgactaatggtttatttgtattatatcatcatcatcatcctaaaattaacaacccag

SEQ ID NO: 519357 - DNA, 120 bp, Artificial Sequence
  ENSG00000165168_25 (sequence is synthesized)
aaacaaaaatctctatacagagatcaaattcacactcaatagtatgttctgaatatatgttcaagagagagtctctaaatcactgttagtgtggccaagagcagggttttctttttgttc

SEQ ID NO: 519358 - DNA, 120 bp, Artificial Sequence
  ENSG00000165168_26 (sequence is synthesized)
ttagaactgctcccatttctgggaactaaaaccagttttatttgccccaccccttggagccacaaatgtttagaactcttcaacttcggtaatgaggaagaaggagaaagagctggggga

SEQ ID NO: 519359 - DNA, 120 bp, Artificial Sequence
  ENSG00000165168_27 (sequence is synthesized)
agggcagaagactggtttaggaggaaaaggaaataaggagaaaagagaatgggagagtgagagaaaataaaaaaggcaaaagggagagagaggggaagggggtctcatattggtcattcc

SEQ ID NO: 519360 - DNA, 120 bp, Artificial Sequence
  ENSG00000165168_28 (sequence is synthesized)
ctgccccagatttcttaaagtttgatatgtatagaatataattgaaggaggtatacacatattgatgttgttttgattatctatggtattgaatcttttaaaatctggtcacaaattttg

SEQ ID NO: 519361 - DNA, 120 bp, Artificial Sequence
  ENSG00000165168_29 (sequence is synthesized)
atgctgagggggattattcaagggactaggatgaactaaataagaactcagttgttctttgtcatactactattcctttcgtctcccagaatcctcagggcactgagggtaggtctgaca

SEQ ID NO: 519362 - DNA, 120 bp, Artificial Sequence
  ENSG00000165168_30 (sequence is synthesized)
aataaggcctgctgtgcgaatatagcctttctgaaatgtaccaggatggtttctgcttagagacacttaggtccagcctgttcacactgcacctcaggtatcaattcatctattcaacag

SEQ ID NO: 519363 - DNA, 120 bp, Artificial Sequence
  ENSG00000165168_31 (sequence is synthesized)
atatttattgtgttattactatgagtcaggctctgtttattgtttcaattctttacaccaaagtatgaactggagagggtacctcagttataaggagtctgagaatattggccctttcta

SEQ ID NO: 519364 - DNA, 120 bp, Artificial Sequence
  ENSG00000165168_32 (sequence is synthesized)
acctatgtgcataattaaaaccagcttcatttgttgctccgagagtgtttctccaaggttttctatcttcaaaaccaactaagttatgaaagtagagagatctgccctgtgttatccagt

SEQ ID NO: 519365 - DNA, 120 bp, Artificial Sequence
  ENSG00000165168_33 (sequence is synthesized)
tatgagataaaaaatgaatataagagtgcttgtcattataaaagtttccttttttattctctcaagccaccagctgccagccaccagcagccagctgccagcctagcttttttttttttt

SEQ ID NO: 519366 - DNA, 120 bp, Artificial Sequence
  ENSG00000165168_34 (sequence is synthesized)
ttttttttttagcacttagtatttagcatttattaacaggtactctaagaatgatgaagcattgtttttaatcttaagactatgaaggtttttcttagttcttctgcttttgcaattgtg

SEQ ID NO: 519367 - DNA, 120 bp, Artificial Sequence
  ENSG00000165168_35 (sequence is synthesized)
tttgtgaaatttgaatacttgcaggctttgtatgtgaataattctagcgggggacctgggagataattcctacggggaattcttaaaactgtgctcaactattaaaatgaatgagctttc

SEQ ID NO: 519368 - DNA, 120 bp, Artificial Sequence
  ENSG00000165168_36 (sequence is synthesized)
gggccttcctctctctatcaccaataattgtcttatgatttggtagttgctcaactagcatttattgaattgaaatgaatgggctctgagcaattcaagacgaattgtacgtgggcagac

SEQ ID NO: 519369 - DNA, 120 bp, Artificial Sequence
  ENSG00000165169_0 (sequence is synthesized)
agtgcgcggccgcggtgctctaccggcgtgtcgctccgccccagggagagccggcgctaccatggaggagtaccatcgccactgcgacgaggttggcttcaatgctgaggaagcccacaa

SEQ ID NO: 519370 - DNA, 120 bp, Artificial Sequence
  ENSG00000165169_1 (sequence is synthesized)
tattgtcaaagagtgtgtagatggggttttaggtggtgaagattataatcacaacaacatcaaccagtggactgcaagcatagtggaacaatccttaacacacctggttaagttgggaaa

SEQ ID NO: 519371 - DNA, 120 bp, Artificial Sequence
  ENSG00000165169_2 (sequence is synthesized)
agcctataaatatattgtgacctgtgcagtggtccagaagagcgcatatggctttcacacagccagctcctgtttttgggataccacatctgatggaacctgtaccgtaagatgggagaa

SEQ ID NO: 519372 - DNA, 120 bp, Artificial Sequence
  ENSG00000165169_3 (sequence is synthesized)
ccggaccatgaactgtattgtcaacgtttttgccattgctattgttctttaactgactaaaaatgttgggctaaagccattaacttaagaatttgtcagtgtatcctttccaaaaagagt

SEQ ID NO: 519373 - DNA, 120 bp, Artificial Sequence
  ENSG00000165169_4 (sequence is synthesized)
aatagttgtttactagtgtgctagatgaaaagcgtgcaatatgctttaaagctatcaacaaaaactgaatattataagcaagcaatatcatagtaattggcagattagctcatattctat

SEQ ID NO: 519374 - DNA, 120 bp, Artificial Sequence
  ENSG00000165169_5 (sequence is synthesized)
acagcatcgtttaaataggaaaaatttaatgctagcaaaaaataaatttagaaatatggcatgacatgaaaatacaatcttatatttacaccagcttttcactaatattttgtacctaag

SEQ ID NO: 519375 - DNA, 120 bp, Artificial Sequence
  ENSG00000165169_6 (sequence is synthesized)
gtgatggggaactccattcagataataaaattctctttcagctagagaagttaacaggaataaatatatgaacaaaaaagctgcaaggataaatgtggagaaaatgatgagaattagcta

SEQ ID NO: 519376 - DNA, 120 bp, Artificial Sequence
  ENSG00000165169_7 (sequence is synthesized)
acatttttaagtttttttaaactttcttcccctcagttgtacttaatatttagtggaaagtaataatttttttaattttctatcaactaatagtatagtaacaactatgattaacttgtt

SEQ ID NO: 519377 - DNA, 120 bp, Artificial Sequence
  ENSG00000165169_8 (sequence is synthesized)
ttgcagtatatgatgaacagtgtatgactcaaacagctgccttacaattcactcattccatgtggaacaaacatttatcagatgcctattatgggcatatgtctctgctaagcaccatag

SEQ ID NO: 519378 - DNA, 120 bp, Artificial Sequence
  ENSG00000165169_9 (sequence is synthesized)
ttgtcaatgtgctgtgcaaatgctaagttccttttagcaattgttcagttggaagacgtattaatatttggggaaggaaaagaaagtagttgttttacaagggaggaaaaaagtgaatct

SEQ ID NO: 519379 - DNA, 120 bp, Artificial Sequence
  ENSG00000165169_10 (sequence is synthesized)
ggttacacatatggaagtaagcaaaatgaaaagcacttattgctttctgacagaattatagatgtaattttaagagttgctcctagcaagttaaaagtgcatataaaatatgcaactctt

SEQ ID NO: 519380 - DNA, 120 bp, Artificial Sequence
  ENSG00000165169_11 (sequence is synthesized)
agttaaaggccttattatcagtcttacctatacaagtagtaaattttgtcattgctttagttacaaccatctgtaaataacttaaaagacttattatgtggggttcaaattgagtggaat

SEQ ID NO: 519381 - DNA, 120 bp, Artificial Sequence
  ENSG00000165169_12 (sequence is synthesized)
aaagtatagattaaaagtatacaatccttagcacgttatctcagggcttatgaaatgtaattaaatttattaagaaaatagatgaaaaattagggtacacagctggccaccaaatgcgaa

SEQ ID NO: 519382 - DNA, 120 bp, Artificial Sequence
  ENSG00000165169_13 (sequence is synthesized)
gtcaatctgctacttaaccctgaaaacaaaatcagttttgcatattaccactaacactaatacatatagagagcggaaccataactcattgaattttggagaggaataagcttagcgtta

SEQ ID NO: 519383 - DNA, 120 bp, Artificial Sequence
  ENSG00000165169_14 (sequence is synthesized)
atattgacaatattaaggcaatattcttgtaggaatactatgtgcatgtttgatattttgccaaataacaataattaataattgttcaatgtttaagaataatattaacaaaataaagga

SEQ ID NO: 519384 - DNA, 120 bp, Artificial Sequence
  ENSG00000165169_15 (sequence is synthesized)
gtttaatgcagtgatctttgtttttggcacatcaaaaattctcagtcattattcatgtttctttatgctgctggcttttgtgccctggaagatcataatagtgaccaaaatatacatgca

SEQ ID NO: 519385 - DNA, 120 bp, Artificial Sequence
  ENSG00000165169_16 (sequence is synthesized)
gacttgttttttattattgttgtttaagcataatttaagaaaaaaaatttttacctggtgaacttgctatctgctctgtttctagttaaaatataataaatattatcttcctgtgctgta

SEQ ID NO: 519386 - DNA, 120 bp, Artificial Sequence
  ENSG00000165169_17 (sequence is synthesized)
ctcccagcgagggcggtcccaagagttggggtgcggcgtcctccgagcccgggtcctctcccctgggcccgggatccgccccgcccgacccgttctccccaccccaaagtcctgagattc

SEQ ID NO: 519387 - DNA, 120 bp, Artificial Sequence
  ENSG00000165169_18 (sequence is synthesized)
ggggtgggaggggtggccaggagcgcgcggatcagacggtggggtcggggcagggttgggaggacgaggcctgacttgggtgcgaggagtgggcatggggtgacgggcgccgccctccta

SEQ ID NO: 519388 - DNA, 120 bp, Artificial Sequence
  ENSG00000165169_19 (sequence is synthesized)
tgctgggattacaagcgcgagccaccctgcccggccgaaaagatctcaaacattcatctcttacaagatttagatgactatcatcaatatgccttaacatcagtagtttaggagactcta

SEQ ID NO: 519389 - DNA, 120 bp, Artificial Sequence
  ENSG00000165169_20 (sequence is synthesized)
gcccactttgtctagttgcaaactgtaattctccctgtggtcccactgaatatcattccacagcattcttggatatatatgatgtattgacaattcaggtctagatagaaatggccccta

SEQ ID NO: 519390 - DNA, 120 bp, Artificial Sequence
  ENSG00000165169_21 (sequence is synthesized)
ttgcttcatgaagaatatcctttccccaaatgtcttctgaggagctcaagattaaagctagtatcctgtacagacacttgcaggactgctagtatgatatatattgaccctatgggagac

SEQ ID NO: 519391 - DNA, 120 bp, Artificial Sequence
  ENSG00000165171_0 (sequence is synthesized)
acacgcccgaggcgcgctggattggcggagcatggcccaggaggagggtgggagcctgcccgaggtgcgggcgcgggtcagggccgcgcatggcatccccgacctggcccaaaagctcca

SEQ ID NO: 519392 - DNA, 120 bp, Artificial Sequence
  ENSG00000165171_1 (sequence is synthesized)
tttctatgaccgctgggctccggactacgaccaggatgtggccaccctgctgtaccgtgcgccccgcctcgcagtggactgcctcacacaagcccttccaggcccgccccacagtgccct

SEQ ID NO: 519393 - DNA, 120 bp, Artificial Sequence
  ENSG00000165171_2 (sequence is synthesized)
gatcctggacgtggcctgtggcacaggcctagtggctgccgagctgcgggctccaggcttcctccagctgcatggggtggatgggagcccagggatgctggaacaggcccaggcccccgg

SEQ ID NO: 519394 - DNA, 120 bp, Artificial Sequence
  ENSG00000165171_3 (sequence is synthesized)
gtcggtgccctcagtgacggccaggtgccctgcaatgcgatacctgagctacatgtcaccaagccaggtgggctggtgtgtctgaccaccaggaccaactcgtccaaccttcaatacaag

SEQ ID NO: 519395 - DNA, 120 bp, Artificial Sequence
  ENSG00000165171_4 (sequence is synthesized)
gaggctctggaggccaccctggacaggctggagcaggctgggatgtgggaaggcctggtggcctggcctgtggaccgcctgtggaccgctgggagctggctacctccgagctggaggtgg

SEQ ID NO: 519396 - DNA, 120 bp, Artificial Sequence
  ENSG00000165171_5 (sequence is synthesized)
tatccggcatctctgccaaggatggcttcatctccggcattgtctacctgtaccgaaagtggaaggcgacccaggttgaggaagtgagatccagcccccagcccccagctggcccctgac

SEQ ID NO: 519397 - DNA, 120 bp, Artificial Sequence
  ENSG00000165171_6 (sequence is synthesized)
tccatgtggccttagctgggcccatctgctgggcctcctctgcctcccctgtaaaatgggacctccgaaccaaccctgcccctcagaaatgccctgcctattaaatgagctcccagaaaa

SEQ ID NO: 519398 - DNA, 120 bp, Artificial Sequence
  ENSG00000165171_7 (sequence is synthesized)
gctgatagtcggtgccctcagtgacggccaggtgccctgcaatgcgatacctgagctacatgtcaccaagccagggacaaccatccccagcagagatggcccaggactgtggctcctgcc

SEQ ID NO: 519399 - DNA, 120 bp, Artificial Sequence
  ENSG00000165171_8 (sequence is synthesized)
cctcccccacctcacctacccctctcccccaggtgggctggtgtgtctgaccaccaggaccaactcgtccaaccttcaatacaaggaggctctggaggccaccctggacaggctggagca

SEQ ID NO: 519400 - DNA, 120 bp, Artificial Sequence
  ENSG00000165171_9 (sequence is synthesized)
ggctaagcgaggggcagcgtcctgcccagcgtcacacacagcctagcctaacatcccagccaccaacagcagacccaggcaaacaggccgggcagacaggtggccagctcggctcttatc

SEQ ID NO: 519401 - DNA, 120 bp, Artificial Sequence
  ENSG00000165171_10 (sequence is synthesized)
catggacaaccaggagcaactccaccctcctctgcagcctccttttcccagtctgggagtcaggtggtataaatgctacaatccagtccccgtaggactgcagtgagaatcaggtgaaat

SEQ ID NO: 519402 - DNA, 120 bp, Artificial Sequence
  ENSG00000165171_11 (sequence is synthesized)
cctgtctctaaggtttttgctttggtcctgacccacagtgagggctcagttctgttccttcctctcactgcttcctcactcattcatagactgcctttggagcatctctttctctttcct

SEQ ID NO: 519403 - DNA, 120 bp, Artificial Sequence
  ENSG00000165175_0 (sequence is synthesized)
ctgctgccggcccctcttccccgacggctaataataaacccgggttcctgtttcccggccgcggccactccagattcggggctgaggggctcactctgcaaccaaggcacgtgcattctg

SEQ ID NO: 519404 - DNA, 120 bp, Artificial Sequence
  ENSG00000165175_1 (sequence is synthesized)
gtcatcccacgcggggagcgcgcgcaaggcccgcccagcccccacatgccagccccaccctccagtcggtccggacgccgacgcctttttgaccctcgctgtgcccggccctcctcatct

SEQ ID NO: 519405 - DNA, 120 bp, Artificial Sequence
  ENSG00000165175_2 (sequence is synthesized)
ggcctgcccagggcttggtgctggcggggtccagctgctccaatccctcctcctctgctctgccctgccctgccctggcctgccccggcgccctccctcagcccgggtatcaggcgagag

SEQ ID NO: 519406 - DNA, 120 bp, Artificial Sequence
  ENSG00000165175_3 (sequence is synthesized)
gcggagctggcccggcgcgccccgcccccgctgtagaaagggccgggcgagtgttactcgcggtcatcccggcctgggccttttatctcggtgctgccgggggaggcgggaggaggagac

SEQ ID NO: 519407 - DNA, 120 bp, Artificial Sequence
  ENSG00000165175_4 (sequence is synthesized)
accaggggtggccctgagcgccggcgacacctttcctggactataaattgagcacctgggatgggtagggggccaacgcagtcaccgccgtccgcagtcacagtccagccactgaccgca

SEQ ID NO: 519408 - DNA, 120 bp, Artificial Sequence
  ENSG00000165175_5 (sequence is synthesized)
gcagcgcccttgcgtagcagccgcttgcagcgagaacactgaattgccaacgagcaggagagtctcaaggcgcaagaggaggccagggctcgacccacagagcaccctcagccatcgcga

SEQ ID NO: 519409 - DNA, 120 bp, Artificial Sequence
  ENSG00000165175_6 (sequence is synthesized)
gtttccgggcgccaaagccaggagaagccgcccatcccgcagggccggtctgccagcgagacgagagttggcgagggcggaggagtgccgggaatcccgccacaccggctatagccaggc

SEQ ID NO: 519410 - DNA, 120 bp, Artificial Sequence
  ENSG00000165175_7 (sequence is synthesized)
ccccagcgcgggccttggagagcgcgtgaaggcgggcatccccttgacccggccgaccatccccgtgcccctgcgtccctgcgctccaacgtccgcgcggccaccatgatgcaaatctgc

SEQ ID NO: 519411 - DNA, 120 bp, Artificial Sequence
  ENSG00000165175_8 (sequence is synthesized)
gacacctacaaccagaagcactcgctctttaacgccatgaatcgcttcattggcgccgtgaacaacatggaccagacggtgatggtgcccagcttgctgcgcgacgtgcccctggctgac

SEQ ID NO: 519412 - DNA, 120 bp, Artificial Sequence
  ENSG00000165175_9 (sequence is synthesized)
cccgggttagacaacgatgttggcgtggaggtaggcggcagtggcggctgcctggaggagcgcacgcccccagtccccgactcgggaagcgccaatggcagctttttcgcgccctctcgg

SEQ ID NO: 519413 - DNA, 120 bp, Artificial Sequence
  ENSG00000165175_10 (sequence is synthesized)
acgtgcttctcaagtccatccgcaacgacatcgagtggggggtcctgcaccagccgcctccaccggctgggagcgaggagggcagtgcctggaagtccaaggacatcctggtggacctgg

SEQ ID NO: 519414 - DNA, 120 bp, Artificial Sequence
  ENSG00000165175_11 (sequence is synthesized)
gccacttggagggtgcggacgccggcgaagaagacctggaacagcagttccactaccacctgcgcgggctgcacactgtgctctcgaaactcacgcgcaaagccaacatcctcactaaca

SEQ ID NO: 519415 - DNA, 120 bp, Artificial Sequence
  ENSG00000165175_12 (sequence is synthesized)
gatacaagcaggagatcggcttcggcaattggggccactgaggcgtggcgcccgtggctgcccagcaccttcttcgacccatctcaccctctctcattcctcaaagcttttttttttttt

SEQ ID NO: 519416 - DNA, 120 bp, Artificial Sequence
  ENSG00000165175_13 (sequence is synthesized)
cctggctggggggcgggaagggcagactgcaaactggggggctgcgtacgtgcaggaggcgcggtggggctgcgtggaggagggggccacgtgtgagagagaagaaaatggtggccggag

SEQ ID NO: 519417 - DNA, 120 bp, Artificial Sequence
  ENSG00000165175_14 (sequence is synthesized)
atgggagggcccaaggaacctcctgggagggggcctgcattctatgttggtgggaatgggactgggctgacgccctgcattcagcctgtgcctttcctggggtttcttttctgttctttt

SEQ ID NO: 519418 - DNA, 120 bp, Artificial Sequence
  ENSG00000165175_15 (sequence is synthesized)
cggaggagagggcccgagaaggggccataccagggcgcggcgctgggttgccacacttgggaaagcagcccggagctgggtgctggggaaggcggggcgcgtagcctcccgccgccctgc

SEQ ID NO: 519419 - DNA, 120 bp, Artificial Sequence
  ENSG00000165175_16 (sequence is synthesized)
ggttgggccggtggaggcccaggcgttgctaggattgcatcagttttcctgtttgcactatttctttttgtaacattggccctgtgtgaagtatttcgaatctcctccttgctctgaaac

SEQ ID NO: 519420 - DNA, 120 bp, Artificial Sequence
  ENSG00000165175_17 (sequence is synthesized)
ttcagcgattccattgtgataagcgcacaaacagcactgtctgtcggtaatcggtactactttattaatgattttctgttacactgtatagtagtcctatggcacccccaccccatccct

SEQ ID NO: 519421 - DNA, 120 bp, Artificial Sequence
  ENSG00000165175_18 (sequence is synthesized)
ttcgtgccactcccgtccccacccccaccccagtgtgtataagctggcatttcgccagcttgtacgtagcttgccactcagtgaaaataataacattattatgagaaagtggacttaacc

SEQ ID NO: 519422 - DNA, 120 bp, Artificial Sequence
  ENSG00000165175_19 (sequence is synthesized)
gaaatggaaccaactgacattctatcgtgttgtacatagaatgatgaagggttccactgttgttgtatgtcttaaatttatttaaaactttttttaatccagatgtagactatattctaa

SEQ ID NO: 519423 - DNA, 120 bp, Artificial Sequence
  ENSG00000165175_20 (sequence is synthesized)
aaaataaaaaagcaaatgtgtcaactaaattggacaagcgtctggtcctcattaatctgccaatgaatggtttcgtcattaaataaaaatcaatttaattgatttactagcaaaagtaaa

SEQ ID NO: 519424 - DNA, 120 bp, Artificial Sequence
  ENSG00000165175_21 (sequence is synthesized)
aagggcccagagctctggccggcggaccttttccttctggagtttccccggcgggtattagtccttgtggcaccaagtcagaatttcattcaaaagacaattaggaagatggttttctat

SEQ ID NO: 519425 - DNA, 120 bp, Artificial Sequence
  ENSG00000165175_22 (sequence is synthesized)
ggaaaatatttaagtgtaggtcttaatgtgaaagaaagagggagagaaagaaacccctttattatgttctcccttccttaggcattttttgtcccgtgggaaaaaactgtactagggaca

SEQ ID NO: 519426 - DNA, 81 bp, Artificial Sequence
  ENSG00000165175_23 (sequence is synthesized)
ggcattttttgtcccgtgggaaaaaactgtactagggacagagacctctgttaagttttagagaaaagggatctttttttt

SEQ ID NO: 519427 - DNA, 78 bp, Artificial Sequence
  ENSG00000165175_24 (sequence is synthesized)
caggccgagaaaagggatttaaaatgagaagcttgaatcttattgaacataattgtaggactgccagagaggactggt

SEQ ID NO: 519428 - DNA, 120 bp, Artificial Sequence
  ENSG00000165175_25 (sequence is synthesized)
cttattgaacataattgtaggactgccagagaggactggtggatgaggaatatggcaagggacatgagatgggaaaaattaaataggctgtggtttggaagtctcaaagtgaaattcaag

SEQ ID NO: 519429 - DNA, 120 bp, Artificial Sequence
  ENSG00000165175_26 (sequence is synthesized)
gtgcaaggctcttaaaagttaaatccagcgattcggtacatagcttaggccctattaaatgacccagtgctttaagaactatcttttgaaaggaacacttcacacaagcaccctcaaaaa

SEQ ID NO: 519430 - DNA, 120 bp, Artificial Sequence
  ENSG00000165175_27 (sequence is synthesized)
taattagacacctccccatttctctgttaaatggtgaaagacacccaagactagacctaactactgtcaccctctcctggcctcttggcagccaaaaggccacatggcccaggctctcca

SEQ ID NO: 519431 - DNA, 120 bp, Artificial Sequence
  ENSG00000165175_28 (sequence is synthesized)
gcatcactgtgtagccgacttggacaaaaatggacttctccccattgccacttgcagatctcttcaaagaatcagcagatctgatagtgtgcccctcttcatccccggcaaccactgtta

SEQ ID NO: 519432 - DNA, 120 bp, Artificial Sequence
  ENSG00000165175_29 (sequence is synthesized)
aaggaaagattgggaaagatcccaccccgccaggagggaggcaaaagcctctgacgctcccctccccccatagctgaccaaggccagggccactgcgggagcaccgcgcgtccacgtgca

SEQ ID NO: 519433 - DNA, 120 bp, Artificial Sequence
  ENSG00000165181_0 (sequence is synthesized)
aaagaagaaagtgcttcaagaaggaagtagtagtccaatgtgttgggctcctgttaaaagctcaagttatgtgaggatagtgagttgaccattagcttgactaaattctcagctgtttca

SEQ ID NO: 519434 - DNA, 120 bp, Artificial Sequence
  ENSG00000165181_1 (sequence is synthesized)
gttccgggaatgacagatacctcagtcttggaccaatggaaagcaagtttctttgtggaggatttccttgagaaaaaaacaattacaagaatggtgacccagattaattgtgaatttgag

SEQ ID NO: 519435 - DNA, 120 bp, Artificial Sequence
  ENSG00000165181_2 (sequence is synthesized)
gaagttgttccaagttcaaatccagactcccaaattgaagtagaggaggtcagtttatacacccacatggactacaatgaagtctttacccctgtcagttgtttagaaaaatgttcagca

SEQ ID NO: 519436 - DNA, 120 bp, Artificial Sequence
  ENSG00000165181_3 (sequence is synthesized)
cttcaaaaccagaaccaagatttatttattgatgataaaggaatactttttgtaagtagtagaaaacacctaccaactttgcctactctcttgagtagactaaaactgtttttggtaaag

SEQ ID NO: 519437 - DNA, 120 bp, Artificial Sequence
  ENSG00000165181_4 (sequence is synthesized)
gatcctcttttagatttcaaaggacagatcttcacagaagctaatttttccagggaatgtttctctcttcaagaaactttggaagcttttgtgaaagaagatttttgtatggataaagtg

SEQ ID NO: 519438 - DNA, 120 bp, Artificial Sequence
  ENSG00000165181_5 (sequence is synthesized)
aacttttgtcaagagaaactagaagatacaatatgtttaaatgagccgtcaagttttcttattgagtatgaattcttaatacctccaagcctcaaaccagaaattgatattccatcactc

SEQ ID NO: 519439 - DNA, 120 bp, Artificial Sequence
  ENSG00000165181_6 (sequence is synthesized)
tcagaactgaaggagttattaaacccagtgccagaaataataaactatgtagatgaaaaggaaaagctttttgaaagagatcttactaacaagcatggaattgaggatatcggggatata

SEQ ID NO: 519440 - DNA, 120 bp, Artificial Sequence
  ENSG00000165181_7 (sequence is synthesized)
aaattcagctccacagagattttgaccattcaaagccagagtgaaccagaagagtgcagtaaaccaggagagttagaaatgccactaactcctctattcctaacatgccaacattcttca

SEQ ID NO: 519441 - DNA, 120 bp, Artificial Sequence
  ENSG00000165181_8 (sequence is synthesized)
gtgaattcattacgtacagaacttcagacatttccattatctccggtttgtaaaattaatttgcttactgctgaagaatcagctaatgaatactacatgatgtggcaattagaaagatgt

SEQ ID NO: 519442 - DNA, 120 bp, Artificial Sequence
  ENSG00000165181_9 (sequence is synthesized)
agaagccctttgaacccatttttgcttacagtgccaagaattcaagagccccacagccaatattcagttacagatttgaaaaagatattttctgttaaagaagaaagccttgtgattaat

SEQ ID NO: 519443 - DNA, 120 bp, Artificial Sequence
  ENSG00000165181_10 (sequence is synthesized)
ctggaaaaggcagagtggtggaaacaagcaggactaaatctgaaaatgatggaaacattggaacatctgaatacatatttatgtcatgataatttgtcttctaatgacactaaaattgag

SEQ ID NO: 519444 - DNA, 120 bp, Artificial Sequence
  ENSG00000165181_11 (sequence is synthesized)
atatttttgcctacgaaagtgcttcaattagaatcatgtctagaacataaaagtcattcttcacctattgcacttattgatgaaaaatctacaaatgctcatttatcacttccacaaaag

SEQ ID NO: 519445 - DNA, 120 bp, Artificial Sequence
  ENSG00000165181_12 (sequence is synthesized)
agtccatctctggcaaaagaagtaccagatctatgtttttctgatgactatttctctgataaaggagcagcaaaagaagaaaaaccaaagaatgaccaagaaccagtaaacagaataatc

SEQ ID NO: 519446 - DNA, 120 bp, Artificial Sequence
  ENSG00000165181_13 (sequence is synthesized)
caaaagaaagaaaataacgatcactttgaacttgactgcacaggaccatctattaaatcaccttcctcttcaataattaaaaaagcatcttttgaacatggcaaaaaacaagagaatgat

SEQ ID NO: 519447 - DNA, 120 bp, Artificial Sequence
  ENSG00000165181_14 (sequence is synthesized)
ttggaccttttgagcgactttattatgctgcgaaataaatataagacttgcacctcaaagactgaagtcacaaacagtgatgaaaaacatgataaagaagcatgttctttgacacttcaa

SEQ ID NO: 519448 - DNA, 120 bp, Artificial Sequence
  ENSG00000165181_15 (sequence is synthesized)
gaagaaagtcctattgttcatattaataaaaccctggaggaaataaatcaggaaaggggaacagatagtgtcattgaaattcaagcgtcagatagccagtgccaagcattttgcctcctc

SEQ ID NO: 519449 - DNA, 120 bp, Artificial Sequence
  ENSG00000165181_16 (sequence is synthesized)
gaagcagcagcttctcctatcttaaaaaaccttgtatccttgtgtaccctccctactgctaattggaaatttgccactgttatttttgaccaaacaaggtttctcttaaaggaacaagaa

SEQ ID NO: 519450 - DNA, 120 bp, Artificial Sequence
  ENSG00000165181_17 (sequence is synthesized)
aaagtagtaagtgatgctgttcgccaaggtacaattgatgaaagagaaatgactttcaagcatgccgctctcttacatcttctggtaacaattagagatgtccttttaacatgcagcttg

SEQ ID NO: 519451 - DNA, 120 bp, Artificial Sequence
  ENSG00000165181_18 (sequence is synthesized)
gacacagcattgggatatttgtcgaaggcaaaagatatctacaacagcattttaggcccctatttgggtgacatttggagacagctggagattgtacagtttattagggggaaaaagcct

SEQ ID NO: 519452 - DNA, 120 bp, Artificial Sequence
  ENSG00000165181_19 (sequence is synthesized)
cggtgaaaaacattttctcattaaaattcttaacaaaatagaaggtttaacactgactgtccttcattcaaatgaaagaaaagattttctggaatctgaaggtgttttaaggggtacaag

SEQ ID NO: 519453 - DNA, 120 bp, Artificial Sequence
  ENSG00000165181_20 (sequence is synthesized)
ttcctgtgtagttgtacataatcaatatattggagcagatttcccctggagtaatttctcatttgtggtggaatacaattatgtggaagactcttgttggactaaacactgcaaagagtt

SEQ ID NO: 519454 - DNA, 120 bp, Artificial Sequence
  ENSG00000165181_21 (sequence is synthesized)
gaatattccttacatggcctttaaagtgattcttccagacacagttttagaaagaagcaccttgctggatagatttggaggttttcttttggaaattcagattccatatgtgttttttgc

SEQ ID NO: 519455 - DNA, 120 bp, Artificial Sequence
  ENSG00000165181_22 (sequence is synthesized)
atctgaaggacttcttaatactccagacatacttcagctgctagaatccaactataacatctcactagtagagagaggctgcagtgagtcattgaaactctttggaagttcagagtgtta

SEQ ID NO: 519456 - DNA, 120 bp, Artificial Sequence
  ENSG00000165181_23 (sequence is synthesized)
tgtagtggtgacaattgatgaacacactgccataattttgcaggatctagaagaattgaattatgagaaggcatcagacaatatcattatgaggctgatggcattatcattacagtacag

SEQ ID NO: 519457 - DNA, 120 bp, Artificial Sequence
  ENSG00000165181_24 (sequence is synthesized)
atattgttggataattttatataccaaagaaacattaaattcagagtatctgcttacagaaaagacacttcatcacctagcactgatttatgcagctttggtttcatttgggctaaactc

SEQ ID NO: 519458 - DNA, 120 bp, Artificial Sequence
  ENSG00000165181_25 (sequence is synthesized)
tgaagaactggatgtaaagcttataattgccccaggagtagaagcaactgccttgataattcgacaaattgctgaccacagtttaatgacctcaaagagagatcctcatgaatggttgga

SEQ ID NO: 519459 - DNA, 120 bp, Artificial Sequence
  ENSG00000165181_26 (sequence is synthesized)
taaatcctggcttaaagtttcaccatctgaggaagaaatgtacttacttgattttccatgtattaacccattggtggctcagctcatgctaaataaaggaccttcactgcattggatatt

SEQ ID NO: 519460 - DNA, 120 bp, Artificial Sequence
  ENSG00000165181_27 (sequence is synthesized)
attagcaactctgtgtcaacttcaggaactcctacctgaagtcccagaaaaagtgttaaagcatttttgtagcatcacttccctattcaagattggttcttcttccataacaaaatcacc

SEQ ID NO: 519461 - DNA, 120 bp, Artificial Sequence
  ENSG00000165181_28 (sequence is synthesized)
gcaaatttcgtcacctcaggaaaataggaatcagattagtaccttgtcttctcaaagttcagcttctgatttagactctgtcattcaagaacataatgaatattatcagtatttaggatt

SEQ ID NO: 519462 - DNA, 120 bp, Artificial Sequence
  ENSG00000165181_29 (sequence is synthesized)
aggagagacagtgcaggaagacaaaaccaccattttgaatgacaactcttccattatggaactaaaagaaatctcaagttttttaccacctgtgacttcatacaatcagaccagctactg

SEQ ID NO: 519463 - DNA, 120 bp, Artificial Sequence
  ENSG00000165181_30 (sequence is synthesized)
gaaagactccagctgtaaatctaatatagggcagaatactccttttctaattaatatagaatcaaggagaccggcttataactcctttctaaaccacagtgattcagagtcagatgtctt

SEQ ID NO: 519464 - DNA, 120 bp, Artificial Sequence
  ENSG00000165181_31 (sequence is synthesized)
ttctttgggtctaacacaaatgaactgtgaaactataaaatcaccaactgacactcagaagagagtgtcagttgtcccccgttttataaattctcagaaaaggagaacacatgaagcaaa

SEQ ID NO: 519465 - DNA, 120 bp, Artificial Sequence
  ENSG00000165181_32 (sequence is synthesized)
aggtttcataaataaagatgtatcggaccctatcttttcactagagggcactcaatctcctcttcattggaactttaagaaaaatatatgggaacaagagaatcacccgttcaacttaca

SEQ ID NO: 519466 - DNA, 120 bp, Artificial Sequence
  ENSG00000165181_33 (sequence is synthesized)
atatggtgcacagcagactgcatgtaacaaattgtactctcagaaaggtaatttattcactgatcagcaaaaatgtctatcagatgagtctgaaggcctcacatgtgaaagttcaaaaga

SEQ ID NO: 519467 - DNA, 120 bp, Artificial Sequence
  ENSG00000165181_34 (sequence is synthesized)
tgagactttctggagagaattaccatctgtccccagtttggatttatttcgtgcttctgattctaatgcaaatcaaaaagaattcaacagcctttatttctaccaaagagctggaaaaag

SEQ ID NO: 519468 - DNA, 120 bp, Artificial Sequence
  ENSG00000165181_35 (sequence is synthesized)
tttaggacagaaaaggcaccatgaatcttcatttaactcaggagacaaggaatcattaacaggttttatgtgctcacaactaccacaattcaaaaaacgacgtctagcatatgaaaaagt

SEQ ID NO: 519469 - DNA, 120 bp, Artificial Sequence
  ENSG00000165181_36 (sequence is synthesized)
ccctggtagagttgatgggcagactcggctgaggtttttttgaaggaggagaagagcaatgttacatgccatattccactgtttttgatgctaatccactagcgcaattatttagatttg

SEQ ID NO: 519470 - DNA, 120 bp, Artificial Sequence
  ENSG00000165181_37 (sequence is synthesized)
ctcatacactaaagaaaacacaattgttcatatatgtctcagtatttctgtattaaatattcataatatgtattctgccctatggtttgcatctttgtaagttaaatattctaatttatc

SEQ ID NO: 519471 - DNA, 120 bp, Artificial Sequence
  ENSG00000165181_38 (sequence is synthesized)
atttgtgaataaataaagataaaatcataatgtaaaaggtgaatgtttggcttccttgaattaagtgtaaaagaaaattctagacattaatgttaactattatcctttctagtctcagct

SEQ ID NO: 519472 - DNA, 120 bp, Artificial Sequence
  ENSG00000165181_39 (sequence is synthesized)
ggggcctggtctggccaatggaagcacagagtgcaggctcagtggtcacgtgtccagcgggcgggaattttaccccaggaagagatgcaggaggcgatttttacctcagatgttgaaatt

SEQ ID NO: 519473 - DNA, 120 bp, Artificial Sequence
  ENSG00000165181_40 (sequence is synthesized)
tacactgctttgaaagaaagaagatatgttttcagcattgaaatatcatgcaatagactatttatatgagaatgtggttagaaagaagttttacagagatgctttattgcttcgaatccc

SEQ ID NO: 519474 - DNA, 120 bp, Artificial Sequence
  ENSG00000165181_41 (sequence is synthesized)
aatgttagattctggatttcctctaggtaattgggaaaatcactaggttctagcattccatataggccctggctctgccagaatttatgactttggatttctctaggtcccattttcttg

SEQ ID NO: 519475 - DNA, 120 bp, Artificial Sequence
  ENSG00000165181_42 (sequence is synthesized)
aaaaaatgatgaagtttgactagctaaccctaaaatcttgttatgtcctaaaattctatagtctcagtttttaaatttctagccattttcatttaaagtgactttgtttccttttataaa

SEQ ID NO: 519476 - DNA, 120 bp, Artificial Sequence
  ENSG00000165181_43 (sequence is synthesized)
tgattaaattgctagcagtttccgttcacattggcctagacgcaaaccagcattttgcagtaactgttttttgacctaacagctgaacattagcattcaataatatcactctttaacaat

SEQ ID NO: 519477 - DNA, 120 bp, Artificial Sequence
  ENSG00000165181_44 (sequence is synthesized)
agacagctagccaagattctaaagaaacccagacaaggcagggtggagaccgagaggagaaatttattccagaaattaactgttagcagtagtgtttcttaatacataagctatatcata

SEQ ID NO: 519478 - DNA, 120 bp, Artificial Sequence
  ENSG00000165181_45 (sequence is synthesized)
ctcctcaagtagattctttgcttaaaactttcactgtaaataattttatagcaaccatgtgaataacttaagaataatagaatcagtctcatttgtaggcactgtagaccatctccattc

SEQ ID NO: 519479 - DNA, 120 bp, Artificial Sequence
  ENSG00000165181_46 (sequence is synthesized)
cctacatgtcagagactctgggggatgaattggagatattaagaggtaaaatgatgcagagaagaccaaggtcagcagaagtcaaatacttctatttctttaaaattttgcttaggctac

SEQ ID NO: 519480 - DNA, 120 bp, Artificial Sequence
  ENSG00000165181_47 (sequence is synthesized)
agacacccctgcacacaggccatttaaatgagtctccatcacagtctgaccctttgagtcaggaagtgaagatcatcacagttaaccctcccacatcaagaaagttaaaacctaggacaa

SEQ ID NO: 519481 - DNA, 120 bp, Artificial Sequence
  ENSG00000165181_48 (sequence is synthesized)
aattgaagttagaaaacttccaacttaaagtatcattttctgtaaacacaatttaagaacaaattactaagaggaaatatttgcaacccagataataggaaaaaaagtttacatttctca

SEQ ID NO: 519482 - DNA, 120 bp, Artificial Sequence
  ENSG00000165181_49 (sequence is synthesized)
tatataaagaattcctacaaattgatagaaagaagacaacctgatagaagaacgggcaaaatatatgaacagatatttcctcagaaaaaaacaaaaattgtcaataaacatttgaaacac

SEQ ID NO: 519483 - DNA, 120 bp, Artificial Sequence
  ENSG00000165182_0 (sequence is synthesized)
aaccgcaagcaggcagcggtgcgggtgacggccgtactgcaaactcggtgcggcgaaggtttagttcaatcacccggttctagaagccgcgtcgctgagccgcagcgcgtcgcgcccggg

SEQ ID NO: 519484 - DNA, 120 bp, Artificial Sequence
  ENSG00000165182_1 (sequence is synthesized)
cagcgggtgaacgcaaaccccgccctccaggaggctccgcccctgcgccggcggttgctaggcggcaagaaagcgccggctctgtgtggacggtacgcggaggcgcgaggagggaggcgc

SEQ ID NO: 519485 - DNA, 120 bp, Artificial Sequence
  ENSG00000165182_2 (sequence is synthesized)
ctggcgttgccgcggcgctgggaaactgtctttgcagcggcgactgggcgcccagcggcgtgtactgggatttctgtgagcagaggctgccgagagggggcgcttggagggccaccggcg

SEQ ID NO: 519486 - DNA, 120 bp, Artificial Sequence
  ENSG00000165182_3 (sequence is synthesized)
gcttcgaaagcttcgcagccggaagccgccggttggcggcctggatttaccttacgaaaggttttaaccaaggacttgaggtttctcaggttttaaatttaaactaatatgctgtgtcct

SEQ ID NO: 519487 - DNA, 120 bp, Artificial Sequence
  ENSG00000165182_4 (sequence is synthesized)
ttaatcggaaaaggctctgaccttattttttcccgttaagaaacaagcgattacttcattggagggaaaatgaatcgttcctcaaatgtaccacgtaaaggtattctgaaatcaggtaca

SEQ ID NO: 519488 - DNA, 120 bp, Artificial Sequence
  ENSG00000165182_5 (sequence is synthesized)
agatccttacaaaaagttcgcagagtacatttcgcaaatgcacgaaatgcaagatcattactatcaatgcttaaagacatttcagctcaaataatacagagggcttggttatctcataca

SEQ ID NO: 519489 - DNA, 120 bp, Artificial Sequence
  ENSG00000165182_6 (sequence is synthesized)
aacaaaatgatatttcgactcctaaaacacgcaatttgtgcagcggaattctatgtaacacatgaaatactgaagaaagtggcccccttagaggctaagcttattaaggatcctactatg

SEQ ID NO: 519490 - DNA, 120 bp, Artificial Sequence
  ENSG00000165182_7 (sequence is synthesized)
actgatggccatggttacaagtattttagtggaaaaaatgtattaatgccgtcaagtaaggcagtggatgatgcttgcaaactaatgggggaaaggaaatttcaccgtataattatggaa

SEQ ID NO: 519491 - DNA, 120 bp, Artificial Sequence
  ENSG00000165182_8 (sequence is synthesized)
gatgaacgtattttcccgaagtccaaagtaactgatataatggatgttgtcaccatgcaagattatgtacaatatcgcagttttttcgatgaggcccctgcattttctggcggcagaaat

SEQ ID NO: 519492 - DNA, 120 bp, Artificial Sequence
  ENSG00000165182_9 (sequence is synthesized)
aacagctggcgcaaattaaatcttgaaaatattcccaggacaatgctaatgtatgacatagttcattattcagagtctggagtgatctcaaaccgtctacgaaatgaaatgaagtttctg

SEQ ID NO: 519493 - DNA, 120 bp, Artificial Sequence
  ENSG00000165182_10 (sequence is synthesized)
ttacagagaccagtaacgcaagagatccataagcaccagctacggattgtttctgaaattaggggtccatacttaactgtccaacctctatatcggccctacaaacagcaaaatcaagtt

SEQ ID NO: 519494 - DNA, 120 bp, Artificial Sequence
  ENSG00000165182_11 (sequence is synthesized)
aaatttctgggtcgtcgatccaagcaagctcaaatgaaagttgaaaaaatgagaaaagtttatttggctaaagaaaaaaatacttctgaggtgactgaaccaaaaacgggcccatcaggt

SEQ ID NO: 519495 - DNA, 120 bp, Artificial Sequence
  ENSG00000165182_12 (sequence is synthesized)
acaaaggataactatcatctccactccatcttttgacattgtgaaaactaaggaatctatgtcagagtgtcagctggaaaaagaaaaaaggactcattttcctggtatcaaaacttggca

SEQ ID NO: 519496 - DNA, 120 bp, Artificial Sequence
  ENSG00000165182_13 (sequence is synthesized)
gctggtgattctccatcatgataatgaacagttaattgacagaaaaccaaagttgtttaacaatctgcttgtctgtctataaataatgagtatgtgtaataaaggaaaataacatagaat

SEQ ID NO: 519497 - DNA, 120 bp, Artificial Sequence
  ENSG00000165182_14 (sequence is synthesized)
agtatctgaattgcattcaaattatacagaataagttatttcaccatgaaacagcccaccaggtaggtagtgtgtttttttttaagcaccatgtttcaaagtgtctccacttactagcta

SEQ ID NO: 519498 - DNA, 80 bp, Artificial Sequence
  ENSG00000165185_0 (sequence is synthesized)
aggctggcgcccccgccccccgccccgctcctcggtccgccgcccgccgggcgccttccccgctccacttacctttggtg

SEQ ID NO: 519499 - DNA, 120 bp, Artificial Sequence
  ENSG00000165185_1 (sequence is synthesized)
ttacctttggtgcccggccctctggccgctctcctcccgccctcgcgccccttcggcccgtcccgtccagcccgggctgcccggctctcgcaggcccccccgcgccgaccgcgttcctat

SEQ ID NO: 519500 - DNA, 120 bp, Artificial Sequence
  ENSG00000165185_2 (sequence is synthesized)
gttcctatggacagacgcacagacacctgcaggagtgacactgctgatcctgtaacatggaggattgtcttcatacctcatctgagaatctgtccaaattggtcagctgggcccatagcc

SEQ ID NO: 519501 - DNA, 120 bp, Artificial Sequence
  ENSG00000165185_3 (sequence is synthesized)
atgggactatttgcagcctcattccaaacctgaaacacttgctttctgaaggttcccatgggaacctgacagcaatgtggggctgtagtgctggccatgcttatcactggccactaacag

SEQ ID NO: 519502 - DNA, 120 bp, Artificial Sequence
  ENSG00000165185_4 (sequence is synthesized)
ctacttgcagagctgggtcccaagagagggtctgtttccaggataacagaagttttaactctgatagtcccagtataatcggggtgccctctgagacacagactagccctgttgaaaggt

SEQ ID NO: 519503 - DNA, 120 bp, Artificial Sequence
  ENSG00000165185_5 (sequence is synthesized)
accctgggagaccagtgaaagcaaagctagactgtaaccggaccagagactcttgtgacttctcctactgtagtgagccctctgaactggatgaaactgttgaagaatatgaagatgaga

SEQ ID NO: 519504 - DNA, 120 bp, Artificial Sequence
  ENSG00000165185_6 (sequence is synthesized)
acaccctgtttgacatggtttgtgagtcttctgttacagatgaggatagtgactttgaaccccaaacccaaaggcctcaaagcattgctcgcaaaagacctggggtagtcccatcttccc

SEQ ID NO: 519505 - DNA, 120 bp, Artificial Sequence
  ENSG00000165185_7 (sequence is synthesized)
tccattcaagctcccagacgcagatggttgacgaatgcagcaatgatgtcatcatcaagaaaatcaaacaagaaatccccgaagattattacattgtggcaaatgcagaactgacaggag

SEQ ID NO: 519506 - DNA, 120 bp, Artificial Sequence
  ENSG00000165185_8 (sequence is synthesized)
gagtagatggaccagccctgtccttgacacagatggcaaaacccaagcctcagactcacgctggtccctcctgtgtagggtctgctaaactgattccccatgtcacatctgccatcagca

SEQ ID NO: 519507 - DNA, 120 bp, Artificial Sequence
  ENSG00000165185_9 (sequence is synthesized)
cggagctagacccacacggtatgtctgcatccccctctgtgatctccagaccaattgtccagaagactgctagggtatctctggcttcaccaaacagaggaccccctggtacacatggca

SEQ ID NO: 519508 - DNA, 120 bp, Artificial Sequence
  ENSG00000165185_10 (sequence is synthesized)
ccaaccaacaggtggccatgcaaatgcctgtgagcacatcccatcctaacaaacagatcagtatccccttgtctgccctgcagctgcctggacaggatgagcaagttgcctctgaagagt

SEQ ID NO: 519509 - DNA, 120 bp, Artificial Sequence
  ENSG00000165185_11 (sequence is synthesized)
tcctgtcccatctgcccagccaggtctcctcctgtgaggtagccctttctccctcagttaacacagagccagaagtgagctccagtcagcagcagcccccagtcgctccagccataacca

SEQ ID NO: 519510 - DNA, 120 bp, Artificial Sequence
  ENSG00000165185_12 (sequence is synthesized)
ctgaggccacagcacagtgcataccagcttattccactaagctcaacaaatttcctgtatttaatattaatgatgacttgaatgatctgtgtaccagtgcagtaagcccaaatactacca

SEQ ID NO: 519511 - DNA, 120 bp, Artificial Sequence
  ENSG00000165185_13 (sequence is synthesized)
aagccacgcggtacgccttgaatgtgtggcgttattggtgcatgaccaacgggctcaaagaccacacagacatcaccaagatccctgcagtgaagttgaacgagctgctcgagaactttt

SEQ ID NO: 519512 - DNA, 120 bp, Artificial Sequence
  ENSG00000165185_14 (sequence is synthesized)
atgtcaccgtcaagaagagcgacggctcggacttcctggccacctcgctccatgctattcgccgaggcctggaccgcatcctgaagaatgcaggtgtcggcttttccatcaccagcagca

SEQ ID NO: 519513 - DNA, 120 bp, Artificial Sequence
  ENSG00000165185_15 (sequence is synthesized)
ccttcagctcctccaccaagaaactcaaggagaagctgtgggtgctgagtaaggcaggcatgtcgggcgcgcgttctcgcaacatcgtctacttctccctttctgacgaggaggagatgt

SEQ ID NO: 519514 - DNA, 120 bp, Artificial Sequence
  ENSG00000165185_16 (sequence is synthesized)
ggcaggcagggtgtctgggggatgacagccctatcactctcctgtccactgtggtcaagtacaacagccagtacctgaacatgcggacgctgcaggagcatgcggatctgatgtatggtg

SEQ ID NO: 519515 - DNA, 120 bp, Artificial Sequence
  ENSG00000165185_17 (sequence is synthesized)
acatcgagctgctcaaagacccccaaaaccagccctactttgcccggacggacagcgtcaagcgggagagtcggagcggctccaccagagtgtgtcacgggaagatctaccatgagcatt

SEQ ID NO: 519516 - DNA, 120 bp, Artificial Sequence
  ENSG00000165185_18 (sequence is synthesized)
cccggggacacaaacagtgcccttactgcctcctctacaagtacatgtacatccaccggccgcccacccaaatggaggccaagtcccccttctacctgactgccaggaaggaggccacag

SEQ ID NO: 519517 - DNA, 120 bp, Artificial Sequence
  ENSG00000165185_19 (sequence is synthesized)
acatgggcagcgtgtggtatgaggagcagaggatggggctgcgctctcttcggggaattgtcccaaacttagccaagaaggtcaagctggaaaactgtgagaacttcacctttgtctcgt

SEQ ID NO: 519518 - DNA, 120 bp, Artificial Sequence
  ENSG00000165185_20 (sequence is synthesized)
tcactcaggtctcccggaggcttggctcccacagctgctgccagtgagcccccactggggcccggccactgccctgtcacctgctcgggccagccagggttggagcagctggagctcctt

SEQ ID NO: 519519 - DNA, 120 bp, Artificial Sequence
  ENSG00000165185_21 (sequence is synthesized)
ggaggcaggggctgaccaggtgtgacctcccggtctggcggctctcccctggtgtggcctgccctccctttgacttggggtttgctttttaaaatgaaactagatgagtctaaatcattc

SEQ ID NO: 519520 - DNA, 120 bp, Artificial Sequence
  ENSG00000165185_22 (sequence is synthesized)
ggatggtttatccaaatgtgcgtcaacttcgttagcttttagaatctaacacaatgtataattgttacatacaagagtgaggaaattcattttctctagtgcctttctagcacaggtttt

SEQ ID NO: 519521 - DNA, 120 bp, Artificial Sequence
  ENSG00000165185_23 (sequence is synthesized)
ctcaaaacaaacaaacaaaaaaggaaactgttaagtagtcgtttaaaaaaaaaatcccagtagcgcagtagctttagaacgttaggaagactgtacactttgttgaattacactcacaat

SEQ ID NO: 519522 - DNA, 120 bp, Artificial Sequence
  ENSG00000165185_24 (sequence is synthesized)
tagaaactagagagaggcagacacgttccctatttccaggagacagattgcgcttgatgcgccttttttttctgttggtggataaggtggttctggagggcaggcagccttgtgtcgggg

SEQ ID NO: 519523 - DNA, 120 bp, Artificial Sequence
  ENSG00000165185_25 (sequence is synthesized)
agtatcctcaagcgacacttggtcatctgacaaggacttgggctgctcccacggctcccagcagcggtaggaaccccatctcggctgtcaatggagagaattttatgataaaagattcac

SEQ ID NO: 519524 - DNA, 120 bp, Artificial Sequence
  ENSG00000165185_26 (sequence is synthesized)
gcaccagaagggtgtctgtgagaacaaggcttctagtgaactagacagtttgtaccatgagggaatttctagtagtgaaggaaaatggcttggaaaagccaatctgtgatcaaaatgtga

SEQ ID NO: 519525 - DNA, 120 bp, Artificial Sequence
  ENSG00000165185_27 (sequence is synthesized)
aaacctcctgaagcagaagtgcctatgttttatttctcagcaccatgtgagagctcctttgattggaacattttttgaggtttctgtctgttcttcgtgtcatcccattattcggtcagc

SEQ ID NO: 519526 - DNA, 120 bp, Artificial Sequence
  ENSG00000165185_28 (sequence is synthesized)
atataccactggatctataaaacaactaaaggtaatttttagtcttagccaagaaaagctaaccaaacaagctgcaaaaaacacagatccccaaactttctttattaaagagatttggaa

SEQ ID NO: 519527 - DNA, 120 bp, Artificial Sequence
  ENSG00000165185_29 (sequence is synthesized)
tatttttgtcaatgtatgacttttcagccacaattacatgtcatcattttaggatggcaccaatacttgggacacgatgatttaggcaccccaccaggtaagcaaactcagcattaagga

SEQ ID NO: 519528 - DNA, 120 bp, Artificial Sequence
  ENSG00000165185_30 (sequence is synthesized)
tgtagttataaaattagcgcataatggtaggtaatgcagtttgaaaccatttcactcaggtaaaatgcaacctgaccacattatttaaaaatcagcagaattttctaataactactctga

SEQ ID NO: 519529 - DNA, 120 bp, Artificial Sequence
  ENSG00000165185_31 (sequence is synthesized)
gtgcaacaacaagtgaaaaaggagctcaaagagtgctcattaagagtaacaataatttctagggaccttgactttgcatttgaggaaaatcttgtgtaactttattccattatgctccta

SEQ ID NO: 519530 - DNA, 120 bp, Artificial Sequence
  ENSG00000165185_32 (sequence is synthesized)
atatgctttctaatcccaaattaaaactctaatacaaattcattttgtagaagtcttaaaatcagtcctctttctttttgaaaacattattttagtatttattttaattaattggtttct

SEQ ID NO: 519531 - DNA, 120 bp, Artificial Sequence
  ENSG00000165185_33 (sequence is synthesized)
taaaaaatcatacactagtcattgacatatgtaatacttcctttaccagagaagactcaaccaatgctgccttaagatttaatgttattccctttttagtcactgtgcatttataagttt

SEQ ID NO: 519532 - DNA, 120 bp, Artificial Sequence
  ENSG00000165185_34 (sequence is synthesized)
gtttactagttgacctttcctgaatagagattagtttcggcatttctccatctgtatataaataacaggtaatatttaatcatcagtgtatgacttgatatcacataacgttctggtgtg

SEQ ID NO: 519533 - DNA, 120 bp, Artificial Sequence
  ENSG00000165185_35 (sequence is synthesized)
gtttcctgtagtgatcttagggttttgatttaaaagaaatacacaaaacattaggtacaatttcctttagtttgctaaacacccaaaggatattttgttttgttggttctgcacttaaac

SEQ ID NO: 519534 - DNA, 120 bp, Artificial Sequence
  ENSG00000165185_36 (sequence is synthesized)
tgaaatacaacctatgtgaactattgggcaaagcctgcagcctaattaattaaaacctccatttttatttgaatagattcaagtagaaattgccgttaggaatcactgggatcttttcgg

SEQ ID NO: 519535 - DNA, 120 bp, Artificial Sequence
  ENSG00000165185_37 (sequence is synthesized)
attttgaccttttcaaaggtagcaataactactccagaggttgtaatctttctgttggtagtggcttttcatcagctaaataatcatctctgcctcaaatgtgttgcctgtcacctagtt

SEQ ID NO: 519536 - DNA, 120 bp, Artificial Sequence
  ENSG00000165185_38 (sequence is synthesized)
gatgttccataaaatccctgggttctgaagtgaattattataattaataatcaggagggcgaatcttcagtggcatctgatggaatgaaagaactgtgtctgagcagcctaaaagctgtt

SEQ ID NO: 519537 - DNA, 120 bp, Artificial Sequence
  ENSG00000165185_39 (sequence is synthesized)
tgtgacatgccaccttgggaaacaagagtgaggaagaaaacacagtcatcaagtgccagcgtgtgccacccattgtactaggtactttattatgcatttatgtatatgtgtgtgtgtctg

SEQ ID NO: 519538 - DNA, 120 bp, Artificial Sequence
  ENSG00000165185_40 (sequence is synthesized)
tgtatacacacaaacacatatacataagtgtttacacacacacacgcacaatatgtggttaagcctggtaagcctgctaaaatggcaaagcggcctggcgcgtggctcacgcctataatc

SEQ ID NO: 519539 - DNA, 120 bp, Artificial Sequence
  ENSG00000165185_41 (sequence is synthesized)
ctccatctcaaaaaaaataaaaaataaaatggcgaagcacctgtccatgtgtttggccaaagccgtcctccgaggtcttaagggggccagagtagcagtcctcgttggcgttctaaggca

SEQ ID NO: 519540 - DNA, 120 bp, Artificial Sequence
  ENSG00000165185_42 (sequence is synthesized)
gttgttctggcttccagtcagctctaaaccttaccttctggggactccaggattttctgctcttggcctaatgcaagagaaaggagaatccccagagaaagaagtggggaggtaaagagc

SEQ ID NO: 519541 - DNA, 120 bp, Artificial Sequence
  ENSG00000165185_43 (sequence is synthesized)
gttttctccacttacctttgggttttttatgctcccaagtagaaataaatatcaagaattcacaggttgactgaagcacaagttgcccctgggctctgtgtcaaggctggtggtactgta

SEQ ID NO: 519542 - DNA, 120 bp, Artificial Sequence
  ENSG00000165185_44 (sequence is synthesized)
ggtgttatgagaggacccatagggtgtccttcaggtgagctgttgtccacagcacctttcatatctgctgtaaagggagccctactttctgtctatcccccccaccgccggcccccggaa

SEQ ID NO: 519543 - DNA, 120 bp, Artificial Sequence
  ENSG00000165185_45 (sequence is synthesized)
tctaagcagactccctgttggaagcttactctggcacagaagctaggatgtcaccttaaagggtgtgattcaattgaatatagtttagtgcggtaccaggcacatcataagcatgcaata

SEQ ID NO: 519544 - DNA, 120 bp, Artificial Sequence
  ENSG00000165185_46 (sequence is synthesized)
aatgttagccagcttagttataacttttggtaataattaatattatttaactaatttgcattataccacttatttcttccattatggagattctgtctcccttaaactgttaaacttgaa

SEQ ID NO: 519545 - DNA, 120 bp, Artificial Sequence
  ENSG00000165185_47 (sequence is synthesized)
gataatctggtcaagttaacacattttcgcccatgaattctacctccaacacagccaagctctgatacctcagatataagcaaaaacaagtgaaggaagaacagaaaagccttatggggc

SEQ ID NO: 519546 - DNA, 120 bp, Artificial Sequence
  ENSG00000165185_48 (sequence is synthesized)
tttatgagaaggtttttccattgtttagtgtgtttgcaaaaaggaattttatggaagtacctaaccaaagctgtgacagaagggtctccttggtcatgtggcattttccagctttccttg

SEQ ID NO: 519547 - DNA, 120 bp, Artificial Sequence
  ENSG00000165185_49 (sequence is synthesized)
gattttatgctacattaatttgccctggctgataaatggtgtttgaagaaatgtgaaattttgttactttgatttttattttaattcaagcttattaaaagcatcaagcattatatgcca

SEQ ID NO: 519548 - DNA, 120 bp, Artificial Sequence
  ENSG00000165185_50 (sequence is synthesized)
cactcagcattttcatagacatagtcattaggagaatctggacaaagtaatactcttgtagaaacggaagcatcttgctgtacttgaaagataactggactcagagctacttcactcctc

SEQ ID NO: 519549 - DNA, 120 bp, Artificial Sequence
  ENSG00000165185_51 (sequence is synthesized)
acttgggcaaatgccgatatcactttgcttagctataaagtgccatcagtgggatggatcgtcttcacggtgaaccgtgttacacttctgcaattcctcaagttcatattaattaggaag

SEQ ID NO: 519550 - DNA, 120 bp, Artificial Sequence
  ENSG00000165185_52 (sequence is synthesized)
tggcagagctaggacacaaaattcctaattcctgaagatagttagtctcctaattaagtgcttctcactatattgggatgccttctttaggaataagactttcctttaattttcaagttc

SEQ ID NO: 519551 - DNA, 120 bp, Artificial Sequence
  ENSG00000165185_53 (sequence is synthesized)
cacaacttctaaaattattttgctatctcgaagcagcagaatattgatcatttttctcagtttaggctaacacagtccacaccattaccacttaaataaagtaaccgaatgctaaatatt

SEQ ID NO: 519552 - DNA, 120 bp, Artificial Sequence
  ENSG00000165185_54 (sequence is synthesized)
atccttatcaaacatccatcactttgttgcttttatgagatgtagattgctaaaaacttttgagctagtagacgttacctttaagcatcaatgaatgcaaacagtgaagacctcaaagaa

SEQ ID NO: 519553 - DNA, 120 bp, Artificial Sequence
  ENSG00000165185_55 (sequence is synthesized)
gagttacctcattttctctacatgatctccaatgtagtctcagataaggcccatacatagttaaaagctggtaacagctctgaacagaagtatgtattaaatgtttcaaacttgtatata

SEQ ID NO: 519554 - DNA, 120 bp, Artificial Sequence
  ENSG00000165185_56 (sequence is synthesized)
tttttgaatgcttttgtttttggagtgaatttttaatactctgtgttaaaagaaaaacattccatcttgtaggcagtgttcctcagtaaaaatctttgttgcattttcccatataaatga

SEQ ID NO: 519555 - DNA, 120 bp, Artificial Sequence
  ENSG00000165185_57 (sequence is synthesized)
atcacccttattaaaacaggaggagggagggatttgtggtgacctaccgctgccctccctttctaagagaagaggaggccatggggtatgataactaaatgaacatctctggaagttcct

SEQ ID NO: 519556 - DNA, 120 bp, Artificial Sequence
  ENSG00000165185_58 (sequence is synthesized)
ccgtctgatatgtgtattctgacataacagaatttcccaagacttctttgaggaaggctgtccacgcttcaggcaaagtttacccattattattatgattttgaatattccttgttcatt

SEQ ID NO: 519557 - DNA, 120 bp, Artificial Sequence
  ENSG00000165185_59 (sequence is synthesized)
acagtccagaaaatctgcagaagttctccatgttcagtggttgaccagaatctgattgttgcgctcaattaaagtgcttattatttagctaaaacaacttatatggaagttaattatttc

SEQ ID NO: 519558 - DNA, 120 bp, Artificial Sequence
  ENSG00000165185_60 (sequence is synthesized)
aggaaatacataataagaccaaaaaaatcactggataatatgtagatatattttagttccattactattaatagcaattagataactctccctccccccattgaggtgagaatgggctcc

SEQ ID NO: 519559 - DNA, 120 bp, Artificial Sequence
  ENSG00000165185_61 (sequence is synthesized)
tagatacttggtggtcaatagaactgatttgattaactttcatttaactgtggttattgttacatctactgattttttcaaataaaaatttctagaaggctcagatttgactaagactgt

SEQ ID NO: 519560 - DNA, 120 bp, Artificial Sequence
  ENSG00000165185_62 (sequence is synthesized)
gttacgtgctttctcacagctgccatatattctcatgtaatctttacaaccgctctacaaggtatgtctaattatttccattttacttattgagaatctaggctcagaggagttaaaatt

SEQ ID NO: 519561 - DNA, 120 bp, Artificial Sequence
  ENSG00000165185_63 (sequence is synthesized)
ctgaaaatctcaccgataagttggagaatttaagtttgtaagttggagaatgcaggttttctgactccaaatctagtgctcagtccatgagacaaaactgcctcctggaggccatggaag

SEQ ID NO: 519562 - DNA, 120 bp, Artificial Sequence
  ENSG00000165185_64 (sequence is synthesized)
tccattaactttaagaaagttaaacacagttttggtttgtttggcaaatatttcatctctcaagccatactgtgtcacccctccatgtattctcttactaaatgattgctcacttgggaa

SEQ ID NO: 519563 - DNA, 120 bp, Artificial Sequence
  ENSG00000165185_65 (sequence is synthesized)
cttaatcgatcctggaaagcctggcggttccccagtattttctgcctactgggaaccttctgtctttatccaataagtaatttatattacctgtcatctaccttaaagggcagatggtca

SEQ ID NO: 519564 - DNA, 120 bp, Artificial Sequence
  ENSG00000165185_66 (sequence is synthesized)
tgtgaatttattctaatgaaagttagtttacaagctgcacctgttttgacattggactcactgcttaaaaagtaaaggagttcctaacttacgcaacaattacatgctcaggttttttac

SEQ ID NO: 519565 - DNA, 120 bp, Artificial Sequence
  ENSG00000165185_67 (sequence is synthesized)
ttttgccatttaattttggtcagaggatttttataatctgtaggctatagcactgtcatagaaaaatatacctttttttttttttgagactcaggagtctcactctgttgcccaggctgg

SEQ ID NO: 519566 - DNA, 87 bp, Artificial Sequence
  ENSG00000165185_68 (sequence is synthesized)
cgacctaaaaatatacttatttactcgttttctgttcttttttcctttatcggggcatatttattttctctttggagacttacaaag

SEQ ID NO: 519567 - DNA, 120 bp, Artificial Sequence
  ENSG00000165185_69 (sequence is synthesized)
tatcggggcatatttattttctctttggagacttacaaagcaataggttatatgaaactctgagatcatctagtcaaattcccccattttatcaataaggaaatttaaggccagagatat

SEQ ID NO: 519568 - DNA, 120 bp, Artificial Sequence
  ENSG00000165185_70 (sequence is synthesized)
taaagggcccatccaagatcagccaaacaataagtaatagattcaggactagagagttagtccagaactctctcctccatatcacagctgagaagatttagatttttttaaattaataga

SEQ ID NO: 519569 - DNA, 120 bp, Artificial Sequence
  ENSG00000165185_71 (sequence is synthesized)
gctgcatctggcaaaatgacatccggctcacagaagaccctagtgagcttcttgtaccttcccagaaaaacccagaagaaggccaaatctcaattctagaatctagaaggaattgatgta

SEQ ID NO: 519570 - DNA, 120 bp, Artificial Sequence
  ENSG00000165185_72 (sequence is synthesized)
atttatgaggcatatggaggtagcttggggcaaaagtttccaagtagctcaattcctggcttacttcatgaaacaggccctgtgaaattaaaaacatgaaagctatttagtacttgtcct

SEQ ID NO: 519571 - DNA, 120 bp, Artificial Sequence
  ENSG00000165185_73 (sequence is synthesized)
cttccccaatcatgcctgtcaccttactcggagtcagagctcctgagccagagaaatactagctgatgcttattacaccgggaagagaaaaagttcatatccaccctctcttctttctcc

SEQ ID NO: 519572 - DNA, 120 bp, Artificial Sequence
  ENSG00000165185_74 (sequence is synthesized)
ccaacccacttcctcttcattcaatcccacataaatcttagagctaaaacaggagcagaaagcagagaaggactattagacctatggtggcatcccaagaataaagccctttaggtgaag

SEQ ID NO: 519573 - DNA, 120 bp, Artificial Sequence
  ENSG00000165185_75 (sequence is synthesized)
gtagaaacaataaatacctgagtagcagaacacgcaaatattatgattttttatgtatgatgttgggttcagagacccataaaatcaggcaataggaaggaaaaggatgctgcttcaata

SEQ ID NO: 519574 - DNA, 120 bp, Artificial Sequence
  ENSG00000165185_76 (sequence is synthesized)
gaaaagtaaactagaaattggacttggaaatatgttcatcaccttaccattgacctgggatttaactgaaaaagggattcaacaaacattcacatgaacagggtctgggaagaaaggacc

SEQ ID NO: 519575 - DNA, 120 bp, Artificial Sequence
  ENSG00000165185_77 (sequence is synthesized)
aacattcacatgaacagggtctgggaagaaaggaccacgtttaaggatgagtatagagaaaaaaataaaatgaggcatataaaaaagtcaatgggccaggcgcggtggctcacgcctata

SEQ ID NO: 519576 - DNA, 120 bp, Artificial Sequence
  ENSG00000165185_78 (sequence is synthesized)
caaattgcctgtaagaaaaccaaagagcatctggcttcagacttctgctctatagcaccaaatgccaggaaacaatagagaattgtgagggggaaaagttgtgactttggaattttatac

SEQ ID NO: 519577 - DNA, 120 bp, Artificial Sequence
  ENSG00000165185_79 (sequence is synthesized)
atattttatatgttaagatacataattttttagttatgataaccatccaggaaatatatgagctatgtaatagtcttacaaagataataagttgtacagcaacctacgaggcttgattta

SEQ ID NO: 519578 - DNA, 120 bp, Artificial Sequence
  ENSG00000165185_80 (sequence is synthesized)
aataaaacaatgtttgcttagtatcctaatttcagtgggctctgggctattaaataccaggacattatccactagaggaagggtatgtatgcttttaaatagataatatggctagaagct

SEQ ID NO: 519579 - DNA, 120 bp, Artificial Sequence
  ENSG00000165185_81 (sequence is synthesized)
acatatctaaaagcacccgaagtcctcatatgaataggctaaattaatacaataaggtgtaataaatgccataccacagcatcatgtttcttcatttttattaccgaaataatgtataaa

SEQ ID NO: 519580 - DNA, 120 bp, Artificial Sequence
  ENSG00000165185_82 (sequence is synthesized)
ttgctcttgattttccccaccatcatttaaaacactctatcctgaaagagtccactgcttccaagtgagaaaagccaaggagtcccctgcgttgggggtgtaataacctagactagagct

SEQ ID NO: 519581 - DNA, 120 bp, Artificial Sequence
  ENSG00000165185_83 (sequence is synthesized)
tatagactgaagcccatgtgcttctccatgctcaaacgcagaactaaaaatgggtataaagtcagaaaattgcagaatataagtctgtgtttcaaaaagcaatcaggaaaaaacaaacaa

SEQ ID NO: 519582 - DNA, 120 bp, Artificial Sequence
  ENSG00000165185_84 (sequence is synthesized)
aaaacttgttttagaatacaaatgcaagaaaagttcaatttcaacagcagaaagatggcctggggcagtgagatgctttccttagctgtacttgaagttttatggaacgccatttaaatt

SEQ ID NO: 519583 - DNA, 120 bp, Artificial Sequence
  ENSG00000165185_85 (sequence is synthesized)
cagacatcaagggaatgaatgcagttttaaaaatccgaattatttctggagtctacaatgtcagtgttagaactaatgctgggttgttttgttttttcatttgcttgcactggaaggcct

SEQ ID NO: 519584 - DNA, 120 bp, Artificial Sequence
  ENSG00000165185_86 (sequence is synthesized)
tgaaaacacacaggagtgtagagtatcgtcagctctgatgctcagtttcttcctggcaatagaatggttttatctgtgccccaagcttttgccaatttaaactctaaactaaattttcaa

SEQ ID NO: 519585 - DNA, 120 bp, Artificial Sequence
  ENSG00000165185_87 (sequence is synthesized)
tgacaccagcatgtttgctttaaatttagcaatagaataggcaatggactgctttgcatttccttagtttttcattctgaaacagagcaaaacatcttcccaaagagatggagacaatct

SEQ ID NO: 519586 - DNA, 120 bp, Artificial Sequence
  ENSG00000165185_88 (sequence is synthesized)
cttctgggtagattccaagtataacctgtcccagggtcctcttgctcagctgtgactaacaaaagtctgttcaatttaactacttagataagaagcgcaatgcttttatttaaaaattta

SEQ ID NO: 519587 - DNA, 120 bp, Artificial Sequence
  ENSG00000165185_89 (sequence is synthesized)
atattttctatggggctgtattttccaaataatagcaacaaaactgtcctaacgttttcactgttctgtaattttgttttaatatagaggatacccataatttcttaacactggaaacat

SEQ ID NO: 519588 - DNA, 120 bp, Artificial Sequence
  ENSG00000165185_90 (sequence is synthesized)
cattctgaacgatgtaggaagcggtcagtaacgtgaatgatgttattgtaccgtctccagctttttccttcttcccccagatggtcgcacctgtgcatacatccctgtgcatgtgggggc

SEQ ID NO: 519589 - DNA, 120 bp, Artificial Sequence
  ENSG00000165185_91 (sequence is synthesized)
acatgagtgggaaagtgggtgtcactcctattttctgtcctagagtgtcagcgttggaagggatttttttttgttcctccagtccggccctctagttgatagtccagtagtctgttaaca

SEQ ID NO: 519590 - DNA, 120 bp, Artificial Sequence
  ENSG00000165185_92 (sequence is synthesized)
atttgtaaggacctgggttatattttaaaggtggttgttgttgttgtttgggttcacttatgtatatgcagcttgactgttcaacccagatttttaaacaataaaaagatttaatgtata

SEQ ID NO: 519591 - DNA, 120 bp, Artificial Sequence
  ENSG00000165185_93 (sequence is synthesized)
tgaggccacagcacagtgcataccagaccaggatgaaagagcagctgagctcagcagggagcagaacgagaaaaccatccggagcacgcagaccgcgctccgcaatttcccttattccac

SEQ ID NO: 519592 - DNA, 120 bp, Artificial Sequence
  ENSG00000165185_94 (sequence is synthesized)
aggagttggatgcctaccttgcctctttctttgttgatgccaggcagaaggatgggtccgaatacgaacccaacagcttggccaattaccagtgtgggctcgaaaggtacctgaaagaac

SEQ ID NO: 519593 - DNA, 120 bp, Artificial Sequence
  ENSG00000165185_95 (sequence is synthesized)
acaggtatggctatagcatcaccagggataaggaattcaagcgttcccaagaggccctgaagcagaagcaaattgaactccgctgtaaaggaaaaggaaataagccacacaagtccatga

SEQ ID NO: 519594 - DNA, 120 bp, Artificial Sequence
  ENSG00000165185_96 (sequence is synthesized)
agctcacctttgctgacgagctcatcctgcggaaaaggggactgctaagccgatataaccccgagggtttgctcaacctagtctggctcaacaacacaaaagcttttgggcattgcacag

SEQ ID NO: 519595 - DNA, 120 bp, Artificial Sequence
  ENSG00000165185_97 (sequence is synthesized)
gcttccatggatctaccttaaaatggggtgatatccggctccgggtaacagagacgggtctcgagtacttggagtggatgggtcaggacactggagacttgaatgccaaaaccaagagag

SEQ ID NO: 519596 - DNA, 120 bp, Artificial Sequence
  ENSG00000165185_98 (sequence is synthesized)
gggggacagactcccgtgtgtatgccacccagcacgccccacagacctgccctgtccaggactataaggagtatgcccagcggcggcctcccgccatgcgctacgaggatgcccctttct

SEQ ID NO: 519597 - DNA, 120 bp, Artificial Sequence
  ENSG00000165185_99 (sequence is synthesized)
acttatccatcaagccagtcgtgaacctggcggctctgcattggtacaactgccaggcccttggcaagaacaagctggccaagatggtgaagaccatgtgtgagaagggcaacatccctg

SEQ ID NO: 519598 - DNA, 120 bp, Artificial Sequence
  ENSG00000165185_100 (sequence is synthesized)
gcaggaaaaccaacttcagtgtgtatcagagctgcagcaccttgtctgaggcccagagcaaccagctcgtgctgatctgtaacaatctgagccagcaggctgcccagtcagtggccggcc

SEQ ID NO: 519599 - DNA, 120 bp, Artificial Sequence
  ENSG00000165185_101 (sequence is synthesized)
actccaacaatggcaatttcatcgtctccgcctcctatgactcttcctcagacaccgcttgaccaggtggcttgagcaagactccagtttggttactgtgtccggagaaactgtgattat

SEQ ID NO: 519600 - DNA, 120 bp, Artificial Sequence
  ENSG00000165185_102 (sequence is synthesized)
acaccgcttctcgttccccttcctgtgccctcagtgttaattcactttataaaaatataaatatataatatatttttctttttacaaataagccaatggagataatttagtattactaac

SEQ ID NO: 519601 - DNA, 120 bp, Artificial Sequence
  ENSG00000165185_103 (sequence is synthesized)
atagtatttataggcttaagacaaatgtacttgtgggcgatcaaatgtaattactgttacagactttacaaaaccatacgtggttctcaggcaacacaaagtagagagggaattctgttt

SEQ ID NO: 519602 - DNA, 120 bp, Artificial Sequence
  ENSG00000165186_0 (sequence is synthesized)
ctcctcccgcgcccgctctgctctaggatgctgcggcaggttctgcacaggggcttgaggacgtgtttctcccggctcggccacttcattgccagtcaccctgtcttcttcgcctcggcg

SEQ ID NO: 519603 - DNA, 120 bp, Artificial Sequence
  ENSG00000165186_1 (sequence is synthesized)
ccggtgctcatctccatcctgctcggcgccagcttcagccgctaccaggtcgaggagagcgtggagcacctgctggcgccccagcacagcctggccaagatcgagcgcaacctcgttaac

SEQ ID NO: 519604 - DNA, 120 bp, Artificial Sequence
  ENSG00000165186_2 (sequence is synthesized)
agcctcttcccggtcaaccgctccaagcaccgtctctactcggacctgcagacccccgggcgctacggccgggtcatcgtcacctccttccagaaagccaacatgctggaccagcatcac

SEQ ID NO: 519605 - DNA, 120 bp, Artificial Sequence
  ENSG00000165186_3 (sequence is synthesized)
accgacctgatcttaaagttgcatgctgctgtcaccaagatccaggttccaaggcctggttttaattacacgtttgcccatatatgtatcctgaataatgataagacttgcatcgtggat

SEQ ID NO: 519606 - DNA, 120 bp, Artificial Sequence
  ENSG00000165186_4 (sequence is synthesized)
gacatagtgcacgtcctggaagagctaaagaatgctcgggccaccaatcggaccaattttgctatcacatacccaatcactcacttaaaggacgggagggctgtgtacaatgggcaccag

SEQ ID NO: 519607 - DNA, 120 bp, Artificial Sequence
  ENSG00000165186_5 (sequence is synthesized)
cttgggggcgtcactgtgcacagcaaagaccgggtgaaatctgcagaggccatccagctcacctactacctgcagtcaatcaacagtctcaatgacatggtggctgagaggtgggagtcc

SEQ ID NO: 519608 - DNA, 120 bp, Artificial Sequence
  ENSG00000165186_6 (sequence is synthesized)
agcttctgcgacactgtcagactgtttcagaaatccaacagcaaagtcaaaatgtacccttacacgtcctcctcactgagggaagatttccagaagaccagccgcgtatcagaacgttac

SEQ ID NO: 519609 - DNA, 120 bp, Artificial Sequence
  ENSG00000165186_7 (sequence is synthesized)
ctggtcaccagcctgattctggtggttaccatggccatcctgtgttgctctatgcaggactgcgtccgcagcaaaccctggctaggcctgctcggattggtgaccataagcctggccact

SEQ ID NO: 519610 - DNA, 120 bp, Artificial Sequence
  ENSG00000165186_8 (sequence is synthesized)
ctcactgcagccgggatcatcaatcttactggtgggaaatataattccaccttcctgggagtccctttcgtcatgctaggtcatggattatatgggacttttgaaatgttatcctcctgg

SEQ ID NO: 519611 - DNA, 120 bp, Artificial Sequence
  ENSG00000165186_9 (sequence is synthesized)
aggaaaactagagaagaccaacatgttaaagagagaactgcagcagtctatgcagactccatgctctccttttctctcaccactgccatgtacctggtcacctttggcataggggccagc

SEQ ID NO: 519612 - DNA, 120 bp, Artificial Sequence
  ENSG00000165186_10 (sequence is synthesized)
cctttcacgaacattgaggcagccaggattttctgctgcaattcctgtattgcaatcttcttcaactacctctatgtactctcgttttatggttccagcctagtgttcactggctacata

SEQ ID NO: 519613 - DNA, 120 bp, Artificial Sequence
  ENSG00000165186_11 (sequence is synthesized)
gaaaacaattaccagcatagtatcttctgtagaaaagtcccaaagcctgaggcattgcaggagaagccggcatggtacaggtttctcctgacggccagattcagtgaggacacagctgaa

SEQ ID NO: 519614 - DNA, 120 bp, Artificial Sequence
  ENSG00000165186_12 (sequence is synthesized)
ggcgaggaagcgaacacttacgagagtcacctattggtatgtttcctcaaacgctattactgtgactggataaccaacacctatgtcaagccttttgtagttctcttttaccttatttat

SEQ ID NO: 519615 - DNA, 120 bp, Artificial Sequence
  ENSG00000165186_13 (sequence is synthesized)
atttcctttgccttaatgggctatctgcaggtcagtgaagggtcagaccttagtaacattgtagcaaccgcgacacaaaccattgagtacactactgcccagcaaaagtacttcagcaac

SEQ ID NO: 519616 - DNA, 120 bp, Artificial Sequence
  ENSG00000165186_14 (sequence is synthesized)
tacagtcctgtgattgggttttacatatatgagtctatagaatactggaacactagtgtccaagaagatgttctagaatacaccaaggggtttgtgcggatatcctggtttgagagctat

SEQ ID NO: 519617 - DNA, 120 bp, Artificial Sequence
  ENSG00000165186_15 (sequence is synthesized)
ttaaattaccttcggaaactcaatgtatccactggcttgcctaagaaaaatttcacagacatgttgaggaattcctttctgaaagcccctcaattttcacattttcaagaggacatcatc

SEQ ID NO: 519618 - DNA, 120 bp, Artificial Sequence
  ENSG00000165186_16 (sequence is synthesized)
ttctctaaaaaatacaatgatgaggtcgatgtagtggcctccagaatgtttttggtggccaagaccatggaaacaaacagagaagaactctatgatctcttggaaaccctgaggagactt

SEQ ID NO: 519619 - DNA, 120 bp, Artificial Sequence
  ENSG00000165186_17 (sequence is synthesized)
tctgtcacctccaaggtgaagttcatcgtcttcaatccgtcctttgtatacatggatcgatatgcctcctctctgggagcccccctgcacaactcctgcatcagtgctttgttcctgctc

SEQ ID NO: 519620 - DNA, 120 bp, Artificial Sequence
  ENSG00000165186_18 (sequence is synthesized)
ttcttctcggcattcctggtggcagattcactgattaacgtctggatcactctcacagttgtgtccgtggagtttggagtgataggtttcatgacattatggaaagtagaactggactgc

SEQ ID NO: 519621 - DNA, 120 bp, Artificial Sequence
  ENSG00000165186_19 (sequence is synthesized)
atttctgtgctatgcttaatttatggaattaattacacaattgacaattgtgctccaatgttatccacatttgttctgggcaaggatttcacaagaactaaatgggtaaaaaatgccctg

SEQ ID NO: 519622 - DNA, 120 bp, Artificial Sequence
  ENSG00000165186_20 (sequence is synthesized)
gaagtgcatggggtagctattttacagagttacctctgctatattgttggtctgattcctcttgcagctgtgccttcaaatctgacctgtacactgttcaggtgcttgtttttaatagca

SEQ ID NO: 519623 - DNA, 120 bp, Artificial Sequence
  ENSG00000165186_21 (sequence is synthesized)
tttgtcaccttctttcactgctttgccattttacctgtgatactgactttcctgccaccctctaagaaaaaaaggaaagagaagaaaaatcctgagaaccgggaggaaattgagtgtgta

SEQ ID NO: 519624 - DNA, 120 bp, Artificial Sequence
  ENSG00000165186_22 (sequence is synthesized)
gaaatggtagatatcgatagtacccgtgtggttgaccaaattacaacagtgtgataatgtctgcttggcatattttcaccttaggtcttatcaagaccaaagagattatgttaatgaaac

SEQ ID NO: 519625 - DNA, 88 bp, Artificial Sequence
  ENSG00000165186_23 (sequence is synthesized)
ttaggtcttatcaagaccaaagagattatgttaatgaaacaattaaattcaaagttcttcccttttttaaagataggaaacaggcatt

SEQ ID NO: 519626 - DNA, 75 bp, Artificial Sequence
  ENSG00000165186_24 (sequence is synthesized)
gagacctatagtctcttaaactaagatcaagtagaagaaagcttattaacaagcaggatcctgccttatccaaac

SEQ ID NO: 519627 - DNA, 120 bp, Artificial Sequence
  ENSG00000165186_25 (sequence is synthesized)
agaaagcttattaacaagcaggatcctgccttatccaaactgcagatgttgctggcattgtgacaaaacccactgattgaaaggtcaactgccaaggcagaaacacctttaagcattgtt

SEQ ID NO: 519628 - DNA, 120 bp, Artificial Sequence
  ENSG00000165186_26 (sequence is synthesized)
caaacaataaggcttccagaacttctgtagagcagtagctccagtcatggtctgtggtttgaggttttagctgtctcacctagctccctaacactgaaggagatacttgtgaaagttctg

SEQ ID NO: 519629 - DNA, 120 bp, Artificial Sequence
  ENSG00000165186_27 (sequence is synthesized)
accagcaaaagcaagccagagccttggaaactgatatgtggtagagtggccatcactcatggactaaaattgattcaccgctaaatttacccaggtgaagcagtttcgttgtctagaatg

SEQ ID NO: 519630 - DNA, 120 bp, Artificial Sequence
  ENSG00000165186_28 (sequence is synthesized)
aaattatcatattccgccattggtatgcctttaacatttgtatagtttggtttgcttaaaacaccttaaaaccaatgacagctccagcactgcagaattggtgtgattctactttggaat

SEQ ID NO: 519631 - DNA, 120 bp, Artificial Sequence
  ENSG00000165186_29 (sequence is synthesized)
agcttgtcacttgtcaccaaatgggtctgctttattagttacagctcttggcaggaggatccagggacccaaaaccacagggccaaacccaaatacctggcatgatggagcaaaagcagg

SEQ ID NO: 519632 - DNA, 120 bp, Artificial Sequence
  ENSG00000165186_30 (sequence is synthesized)
tgtctacttggacccagatatagtgtctccattttaacaacaacaacaaaatagccagctggtacagctgtttgcattggccctacatgcattttttgcatggatatccagaaacatctg

SEQ ID NO: 519633 - DNA, 120 bp, Artificial Sequence
  ENSG00000165186_31 (sequence is synthesized)
cccacacaaaactgcggggaaaaaaaatgaacactgaaatagttatttgctgttgcttccaacttgtagtgccagtctgcctttgctgtgaaacacacctgctcagagacagagagggga

SEQ ID NO: 519634 - DNA, 120 bp, Artificial Sequence
  ENSG00000165186_32 (sequence is synthesized)
agaagatctttggtaagtctaagtcctgacgctgagaagctttgtaaaagtgcagggagataaagggccaaaagggagatagatggaaaacactggaaaaagtattcactgatacaaatc

SEQ ID NO: 519635 - DNA, 120 bp, Artificial Sequence
  ENSG00000165186_33 (sequence is synthesized)
tatcaatgatggcagtccaattctcttgctaaagtggctgcacctcaccttgctggtcccccccacaccttttttgatgtccttctgcgtcatcatagcaaggcccttctgtaaattaac

SEQ ID NO: 519636 - DNA, 120 bp, Artificial Sequence
  ENSG00000165186_34 (sequence is synthesized)
aagcctagatatttatactcttgacttccagtatctacagaagaatggttcatagatctaaacagaaatggtttagatctaaaaaggctgtatacgttgcccaggcccctgcatttcttt

SEQ ID NO: 519637 - DNA, 120 bp, Artificial Sequence
  ENSG00000165186_35 (sequence is synthesized)
aaatttataaaaatgaagctaaaacctggttacatttgaagcaaatatctacagtatttttcccttttagagatgtagcttccttagacatctgtagtggtaagcatttcccaaaagcat

SEQ ID NO: 519638 - DNA, 120 bp, Artificial Sequence
  ENSG00000165186_36 (sequence is synthesized)
cttacctttctgaaccttagcagacatactgtgcagcttacctatcttctgcagaggaggaaactgagacctaggagaataaagtgactcactcaggtcacaccactaaagggttttcat

SEQ ID NO: 519639 - DNA, 120 bp, Artificial Sequence
  ENSG00000165186_37 (sequence is synthesized)
catttcagcatacctaagacagggcagtccaattttcagtattctcataagatggctattactcctctcaaaatgcatttccaaagtaggaacataggacttcgttggccacagggcaga

SEQ ID NO: 519640 - DNA, 120 bp, Artificial Sequence
  ENSG00000165186_38 (sequence is synthesized)
catttttttagtgtctggaattaaaatgtttgaggtttaggtttgccattgtctttccaaaaggccaaataattcagatgtaaccacaccaagtgcaaacctgtgctttctatttcacgt

SEQ ID NO: 519641 - DNA, 120 bp, Artificial Sequence
  ENSG00000165186_39 (sequence is synthesized)
actgttgtccatacagttctaaatacatgtgcaggggattgtagctaatgcattacacagtcgttcagtcttctctgcagacacactaagtgatcataccaacgtgttatacactcaact

SEQ ID NO: 519642 - DNA, 120 bp, Artificial Sequence
  ENSG00000165186_40 (sequence is synthesized)
agaagataataagctttaatctgagggcaagtacagtcctgacaaaagggcaagtttgcataatagatcttcgatcaattctctctccaaggggcccgcaactaggctattattcataaa

SEQ ID NO: 519643 - DNA, 120 bp, Artificial Sequence
  ENSG00000165186_41 (sequence is synthesized)
acacaactgaagaggggattggttttactgttaaatcatgtgttgctaaatcattttctgaacagtgtgttctaaatcagtcattgatttagtgtcagccacgtggagcacctcggctta

SEQ ID NO: 519644 - DNA, 120 bp, Artificial Sequence
  ENSG00000165186_42 (sequence is synthesized)
aagcagctccacaaaacctgacacaacacacacaccaattaaatggattttgttgagaatttaatcattcaatttggtcaaccagaatgacttcctgtggaactctgttttatgacagat

SEQ ID NO: 519645 - DNA, 120 bp, Artificial Sequence
  ENSG00000165186_43 (sequence is synthesized)
aatagttttccaacttgattgagtctctgtataccctgggatattgtattttttaatgaagggcattttcaaacttgtcaacttctcttttcagcacttgaaatgaaggcttatggaatt

SEQ ID NO: 519646 - DNA, 120 bp, Artificial Sequence
  ENSG00000165186_44 (sequence is synthesized)
ctgactgtgaaatgaatttttctattgggagattatgcatgccaagatttattatttattgttagataattattatttatttgttaatactgattattgattattgctctgctgcattgg

SEQ ID NO: 519647 - DNA, 120 bp, Artificial Sequence
  ENSG00000165186_45 (sequence is synthesized)
tttagccccgctatggagaagacactttagaagtaactcagaatcacatccccataaaatctaagtctttacttcatcaagttttactttttgaattgctataaagacggaaaaattgat

SEQ ID NO: 519648 - DNA, 120 bp, Artificial Sequence
  ENSG00000165186_46 (sequence is synthesized)
ccctgcaaacacttgaagaagctgtgttttttttctttcaattaattccaaccaagacattaacgtccactttaccaaagaaacttacttggttggtttttagttggtgtttgttgtttg

SEQ ID NO: 519649 - DNA, 120 bp, Artificial Sequence
  ENSG00000165186_47 (sequence is synthesized)
tttaccaaagaaaatattcgattcatcaaaaatattgctcctggtcaactaaaaaactgtgatactgggacttttttggccattcataaggaaaatttttaaaagtcaaggtaagggtga

SEQ ID NO: 519650 - DNA, 120 bp, Artificial Sequence
  ENSG00000165186_48 (sequence is synthesized)
tattctctcatttagtggaagaagaagatgtcaattcacagggaatgtggtgttcgcaagaaagaaaatgatacttgaaatagggcattattgtttagcctacagcaacatttcaacaag

SEQ ID NO: 519651 - DNA, 120 bp, Artificial Sequence
  ENSG00000165186_49 (sequence is synthesized)
cagcatcagggctcctcaggttaaaagaagtacagtttgtttcagagaaaaaggaagacaaaccctcgtgaaatgtttctccattgttccagctcataagttttactttgttttgggttt

SEQ ID NO: 519652 - DNA, 120 bp, Artificial Sequence
  ENSG00000165186_50 (sequence is synthesized)
tggagtttttagtttctttgatgtttgttttgctttaatttggtttgtggtttgtgtttgcttgtgtttgcttctgcctttcctaccttctgccttttactccctcagttttcagtcaga

SEQ ID NO: 519653 - DNA, 120 bp, Artificial Sequence
  ENSG00000165186_51 (sequence is synthesized)
agtgtgataatcagatgccatcctccatggccacgcttatgtatgcaatataccgctccaaatgaggaccttggtaacccttgaccctttaattctaactaaccatcacccaatcgtaag

SEQ ID NO: 519654 - DNA, 120 bp, Artificial Sequence
  ENSG00000165186_52 (sequence is synthesized)
tggcattatgggaccatgataccacttttctccagtgtcaatgacagagctcagctgtgtccatcacaagaaaaggtggaatgggcagctgtcttgggggtgtggcaagaggcagaacct

SEQ ID NO: 519655 - DNA, 120 bp, Artificial Sequence
  ENSG00000165186_53 (sequence is synthesized)
tggatcctattaaagtacccctgtagcttatagtagtgtttgacctctgtgactctgttttctcatctgtaaaatggggataatatcagtaaatgtctttaaattcagcaaatacttatc

SEQ ID NO: 519656 - DNA, 120 bp, Artificial Sequence
  ENSG00000165186_54 (sequence is synthesized)
gagtgccaaatatcgcccagatactgttcgagaggctggggacacaacagtcaacaaatcagattttttaaaatctgctcttgtagagtctacctttgagtgacattgcaggtatattgt

SEQ ID NO: 519657 - DNA, 120 bp, Artificial Sequence
  ENSG00000165186_55 (sequence is synthesized)
ggggattgaatgagatgagagatgacatttggaaagcactcttggaaaggcctggcaaagaaaagagactcaagacattatttgtaattcagcaatctcgcacagtagcattagggctcg

SEQ ID NO: 519658 - DNA, 120 bp, Artificial Sequence
  ENSG00000165186_56 (sequence is synthesized)
ggatgtaaagctactgagaagtagatttgagcctgagaattagggctacaaatacaatgagttgccacagaaggtagttaattaccagtcattttaggacatcaaaatgaagctgatcac

SEQ ID NO: 519659 - DNA, 120 bp, Artificial Sequence
  ENSG00000165186_57 (sequence is synthesized)
cacatagtggggccactgtaaaggggctgcaagtcctggatgttggcatcatactatgatctttgaaaaaaacagatacaggcacttgcttttggggatggggaagggacaccactgatt

SEQ ID NO: 519660 - DNA, 120 bp, Artificial Sequence
  ENSG00000165186_58 (sequence is synthesized)
actgaataactgtggctggcttgtctgagggaatgtaaacattcccttgaggtaatttgcttttaattttgtgtaaaaagcaccaggtatttagagacataaagttcccgttttttaaaa

SEQ ID NO: 519661 - DNA, 120 bp, Artificial Sequence
  ENSG00000165186_59 (sequence is synthesized)
gaatagtaaatctgcaatacaaagaaaaatattaagttagtggattcgctggcaaagaactaagaatggctgcagccaacacactgcagagttcctccctgtggtggttacaactgttat

SEQ ID NO: 519662 - DNA, 120 bp, Artificial Sequence
  ENSG00000165186_60 (sequence is synthesized)
ttctgtttcatgccagtccaggagaaagcaaagaggaaagtggatgagctataatccgttcacctgaataggcagtgccaggatgtcccccccagcttgcctctcacccgccccgctgct

SEQ ID NO: 519663 - DNA, 120 bp, Artificial Sequence
  ENSG00000165186_61 (sequence is synthesized)
gcccagctgatttgtttgaagtcctctttgatatctatgagagcaccgtggaaggaagaagaagggaggcgaccggagagctatggcctctgtgcagatttttgagttagattaaaatta

SEQ ID NO: 519664 - DNA, 120 bp, Artificial Sequence
  ENSG00000165186_62 (sequence is synthesized)
gtaccacctgattaggagcctacctggtgaggaaaaaagccttcttttcaaagtacaaaaaaaagcgatgtgtaccaaggagaaaaccagcagagaaagcttggtggaagaagtgatgtt

SEQ ID NO: 519665 - DNA, 120 bp, Artificial Sequence
  ENSG00000165186_63 (sequence is synthesized)
cttgtggaatgtgccagcagcttctccttccagaatgctgacaccagatgaatctttggttagaattaagcctacccctttgtttttcacatgagaaaactgaaccctcgagtaatgaaa

SEQ ID NO: 519666 - DNA, 120 bp, Artificial Sequence
  ENSG00000165186_64 (sequence is synthesized)
ttatattcacagagctaattagaaacaggagactataattgaaatctagtttttagcctcaattctttctccattttgccactttactgccaaattctattcatctaaattattggggtc

SEQ ID NO: 519667 - DNA, 120 bp, Artificial Sequence
  ENSG00000165186_65 (sequence is synthesized)
ttaacctgggggccaaatgagttcatgggaggggtctctgagtttcctacaattaagttacatgcaaaaatgtgtgtatatgttcaacatgtgcattttcctaaactgagggctcagatt

SEQ ID NO: 519668 - DNA, 120 bp, Artificial Sequence
  ENSG00000165186_66 (sequence is synthesized)
ccaaaagaggtctatgaccgaaaaagggtgaagaaccactgtcctaaattaatacagacctcattgggagtgtgatcctggtgtcctcattttggctaatgagcaatcaagaacttttga

SEQ ID NO: 519669 - DNA, 120 bp, Artificial Sequence
  ENSG00000165186_67 (sequence is synthesized)
actatcttttctctaaggatccaaaaatgcttcaaaatattggtttcttcatcccaagccaagtgcctacttctattcatttattcttcattcattctttcattcattcatttctttatt

SEQ ID NO: 519670 - DNA, 120 bp, Artificial Sequence
  ENSG00000165186_68 (sequence is synthesized)
ctgcaaatgtattttcagtgccaattcatgttctagcagcagctaaatatgccctccacagcaggaccaggaaaggagccctctgtactgtgctcttgttggcaagaggaacaccaggtt

SEQ ID NO: 519671 - DNA, 120 bp, Artificial Sequence
  ENSG00000165186_69 (sequence is synthesized)
gctaccacattctcactgttgcaacaaattatatatagcctcaaattttcagtaaccatcccacacacacatacacacataaaggcagcagccaacaaagccaacatatagaagtgtgcc

SEQ ID NO: 519672 - DNA, 120 bp, Artificial Sequence
  ENSG00000165186_70 (sequence is synthesized)
ctgtcaaagaaccaggaagagcagcctatttccaggttatatacagtgatatgctgtttacaactgcataccacatccttagaaggcctgctcccaaatgagccctactctgagatgtct

SEQ ID NO: 519673 - DNA, 120 bp, Artificial Sequence
  ENSG00000165186_71 (sequence is synthesized)
acaccaggcatgctttcacacacgtgcagtaccctactctcaaaacaagtatggagagaataagtctcattcatctcgttaatatttttagtgggcaaagaagcaaccgtggccatggac

SEQ ID NO: 519674 - DNA, 64 bp, Artificial Sequence
  ENSG00000165186_72 (sequence is synthesized)
aatatttttagtgggcaaagaagcaaccgtggccatggacagatgggtgcatttaaggacaggt

SEQ ID NO: 519675 - DNA, 120 bp, Artificial Sequence
  ENSG00000165186_73 (sequence is synthesized)
caacagagtgagacttcgtctcaaaaaaataaaggacaagtgtgttttatacacaaatatgcagaagcccagttctcttgactccaagtcagaagctagataaaatagaggttgctgggg

SEQ ID NO: 519676 - DNA, 120 bp, Artificial Sequence
  ENSG00000165186_74 (sequence is synthesized)
actccaagtcagaagctagataaaatagaggttgctgggggaagttggaaaataaatgactatactgtacttgttggctctgctgctgctgatataacttcaggcacaacggaagccgcc

SEQ ID NO: 519677 - DNA, 120 bp, Artificial Sequence
  ENSG00000165186_75 (sequence is synthesized)
tcggttggcctatgggaagggctgggtgaatcactgcttggccttgcatgaagcacaaaggacacaccaatggctgatcagtggcccttccatcatcttctgcccagccatgataaggaa

SEQ ID NO: 519678 - DNA, 120 bp, Artificial Sequence
  ENSG00000165186_76 (sequence is synthesized)
cttctgcccagccatgataaggaaagccttctattgagatggaggaatattagctcaactttgtagcatctgatgtaaagtttgaggggtttgtcttttttgtttgtttgtttgtttttt

SEQ ID NO: 519679 - DNA, 120 bp, Artificial Sequence
  ENSG00000165186_77 (sequence is synthesized)
ttacaggcgtgagccaccgtgcccggcaagggctttgttcattaggatcaacaaagtgctttgtctaattcctgcaaaatggcaaagacccagcccatttccattactcattccaggctc

SEQ ID NO: 519680 - DNA, 120 bp, Artificial Sequence
  ENSG00000165186_78 (sequence is synthesized)
tactcattccaggctcatgctcaggaaaactaataacgttctctttgacaaaacaatttccttaattttctaggatgaatcttgaacatgtttagctcagcctttcagatatttattctt

SEQ ID NO: 519681 - DNA, 120 bp, Artificial Sequence
  ENSG00000165186_79 (sequence is synthesized)
taaattaccatcctgtcaaaattgcctttacgcactgatccagaatcaccaaggcagttgccacgatgcctcccaggactgtgggtgactgggcaaactggtaatgacccgttggctctg

SEQ ID NO: 519682 - DNA, 120 bp, Artificial Sequence
  ENSG00000165186_80 (sequence is synthesized)
cttcacacacacacatacacattgacacacataaatgtacacatgcatatatgtgtgtacaacacaactataaaacatagaaacatatacctgtacatatgcacatgcttacatacacac

SEQ ID NO: 519683 - DNA, 120 bp, Artificial Sequence
  ENSG00000165186_81 (sequence is synthesized)
atatcacagatgtgcatgcacacatacacatgcacaccaccttttacaatatgcctgacacatttgaggcacattaaaatgccttggcaggcccagccctatagttctgtaaggtttggc

SEQ ID NO: 519684 - DNA, 120 bp, Artificial Sequence
  ENSG00000165186_82 (sequence is synthesized)
aggccaaaggcttcggatgtctgcaggataccattgaaaaaatgttatcttccccttctatatgtttcttatgcacgagcacagctaagagcagccaaatagtaagctttaaagaaaaga

SEQ ID NO: 519685 - DNA, 120 bp, Artificial Sequence
  ENSG00000165186_83 (sequence is synthesized)
aacctggaaaagtgaatgtgccttgcaatttaaaaattgctaacagtttcacagtgggaaaattgcatttgttggaattttccaagtcataagcaagaagaatagcatagacccaaaacg

SEQ ID NO: 519686 - DNA, 120 bp, Artificial Sequence
  ENSG00000165186_84 (sequence is synthesized)
acagagatctcttccaaggtatggaattgtggaaatttatttagaatatttgcttggtgatccagagaagggggaaagaagtggtgaggaagaatatatggggtgatccctccaaattgc

SEQ ID NO: 519687 - DNA, 120 bp, Artificial Sequence
  ENSG00000165186_85 (sequence is synthesized)
caactcctcgtcttaggaagaagtgggcagtttccattgatccctagcatcagtttgacgggaaaaccggtgcatttcatcaacctcaaggaaaggaagtgccatgcatggaggcctggt

SEQ ID NO: 519688 - DNA, 120 bp, Artificial Sequence
  ENSG00000165186_86 (sequence is synthesized)
ggcctggtgataggcaacatccatttagaagaacagtcacacaagcaacagaagaactatccaagactagaagcttagaagcttataccaaactctctgtctctctctctctctctcaca

SEQ ID NO: 519689 - DNA, 120 bp, Artificial Sequence
  ENSG00000165186_87 (sequence is synthesized)
cacagagtggatgggaggggacattaagaggaaccctagtgcagttcccccaaaaaaccttggcatagagtataacagggaaaaagtaattactgggaagctgaaaacaatcaaatatgt

SEQ ID NO: 519690 - DNA, 120 bp, Artificial Sequence
  ENSG00000165186_88 (sequence is synthesized)
gaggaatgactgaatatgagctgaggataatgtaaattgttctggattgtctataagataaagatacagagcctgaatctatgtttttctgaataaagagaccccatattctcttttgaa

SEQ ID NO: 519691 - DNA, 120 bp, Artificial Sequence
  ENSG00000165186_89 (sequence is synthesized)
ttattgacctataattcctcttcagcagctttgaatacactcaagttctcttcctattgtttatgatcccataatacaaccacccactatttgttgtggtttacaatccagcttagaacc

SEQ ID NO: 519692 - DNA, 120 bp, Artificial Sequence
  ENSG00000165186_90 (sequence is synthesized)
cttgagcaaaattattgaattattgaatgctaggcccaaacaaaagaaatttcagcttggttttagtaatttcttgatcaaacttctctcattcctctaaatgtacaaaggtttcaaagt

SEQ ID NO: 519693 - DNA, 120 bp, Artificial Sequence
  ENSG00000165186_91 (sequence is synthesized)
tgtaaaaaatatgtctacatagccaatgctcttagtatttttaacagcaaagataatctctgccaataattattaatgacaaaatagtgataactgttcaatgttgctttaacagtccaa

SEQ ID NO: 519694 - DNA, 120 bp, Artificial Sequence
  ENSG00000165186_92 (sequence is synthesized)
ttgtagtaggtgagaaaacaaaaaagaagagaagctatgttgaatatttagtaatgttggaaaagatcctcaccctagacataaaatagtttaaacatttaaacatggcccctctcttat

SEQ ID NO: 519695 - DNA, 120 bp, Artificial Sequence
  ENSG00000165186_93 (sequence is synthesized)
tgtcattgctagtgaaagaagttcctgaaattgcatattacattgtaaagttttgggctaaatcacaatacatttttaagttgcttccatggcaatagatcgtaagaccacagcttgtca

SEQ ID NO: 519696 - DNA, 120 bp, Artificial Sequence
  ENSG00000165186_94 (sequence is synthesized)
aagtaaccactaattcagtattcagaaaccttatcatctgttcctccaaaaagaccccatagttaatgttgtgtttcccagtattttagttgggtttcttcacacttaggcaagtgggtg

SEQ ID NO: 519697 - DNA, 120 bp, Artificial Sequence
  ENSG00000165186_95 (sequence is synthesized)
attctggtcataataaactattttcaaactaggaaaaagtatccaaatgctagagcacataatgagttcagcttggtcagttttgagacagataagcataaaaccctactagaaaaaaat

SEQ ID NO: 519698 - DNA, 120 bp, Artificial Sequence
  ENSG00000165186_96 (sequence is synthesized)
aatagtcaaacctaaagctttaaaaaatgtgagtcacatcacttttctccaggaaaggcagaacgtgctcagggtggaatttaatcaaaaatgtacccagaacaatttcccacaaagagc

SEQ ID NO: 519699 - DNA, 120 bp, Artificial Sequence
  ENSG00000165186_97 (sequence is synthesized)
tgtaatactttgcagcaaggggcattaataaactctaatttttaccgaaagtcaagagacacacagatcttttttggtaccctctacatcatcatagcaaggcccttctgaacattaaca

SEQ ID NO: 519700 - DNA, 120 bp, Artificial Sequence
  ENSG00000165186_98 (sequence is synthesized)
agcctagatgtttctactgcttatttgcagtatctacaggggaatggttcgtggatataaacagaaatgttttatctgaagaggctgtgtatgccaccccagacccctgcatttcttaat

SEQ ID NO: 519701 - DNA, 120 bp, Artificial Sequence
  ENSG00000165186_99 (sequence is synthesized)
atctataaaaatatgactaaacttgttacatttgaggcaaatatgtacagtatttttcccttttaaagatagtttaaaaaatcaaggtaataaaaaacggccaactctttcaggaaaaaa

SEQ ID NO: 519702 - DNA, 120 bp, Artificial Sequence
  ENSG00000165186_100 (sequence is synthesized)
aaaatccggtattttgtactacttgagtttctctaatgcctaaaatatgcatttaaatcatcccacacctacacagaaacaaaatcagcagggaaaaccatcccactgatgattggcaat

SEQ ID NO: 519703 - DNA, 120 bp, Artificial Sequence
  ENSG00000165186_101 (sequence is synthesized)
tccaccgttcctctccatctgaccagctttcaccagagggcgatctttcatgcttgcacatcgagtttatacaatgtagaagcccccaagtcacctgggaaatggctcatgccaaataca

SEQ ID NO: 519704 - DNA, 120 bp, Artificial Sequence
  ENSG00000165186_102 (sequence is synthesized)
tggagtccttagttgactatcttttcatattaaaatcccatcttccaatgaagcatcctgttttcaatactgatatcaaatttcgaatgtaaaggagatttcaaatgtattgctttcacc

SEQ ID NO: 519705 - DNA, 120 bp, Artificial Sequence
  ENSG00000165186_103 (sequence is synthesized)
caccttttcttttttattcatttatttttaattgacataaaaattgtatatatttatgggatacaatgtgatgttttgatatatgtatgcattgtggaatgattaaatcaagctaattaa

SEQ ID NO: 519706 - DNA, 120 bp, Artificial Sequence
  ENSG00000165188_0 (sequence is synthesized)
aaagcaaccaaagcttccagggtgtacaggaggtccaaagtcaccagaaggaagaagaaaacctgaaacagcgagagctggccaaacgctgctaagacctatgcaaataagacccaccca

SEQ ID NO: 519707 - DNA, 120 bp, Artificial Sequence
  ENSG00000165188_1 (sequence is synthesized)
cgctacctggaaatcgggcctgggaagtcagaaaacaaagcacatgcgtgcagggctgcacgaacggaggcggaggaggcggctccgagggagcagctgatcctgaaacagcagtggatc

SEQ ID NO: 519708 - DNA, 120 bp, Artificial Sequence
  ENSG00000165188_2 (sequence is synthesized)
cctgggagagcagcacagataaagatccaggcaataatgatgcttcctcctcttggacagccttttacagttctggccatggaacttcagagaaggtaggtctgatttggggggaaacag

SEQ ID NO: 519709 - DNA, 120 bp, Artificial Sequence
  ENSG00000165188_3 (sequence is synthesized)
gagatcttgacgtgtagtaatacaagcttactggatggagtaaagttagaattttcaggtaagagaattaaaaaaaaaaaaaaaacttataatcttgcccccagagataaccactgctaa

SEQ ID NO: 519710 - DNA, 120 bp, Artificial Sequence
  ENSG00000165188_4 (sequence is synthesized)
tatctggttgtttatctctccagacattttttccattgcacacacacttttggaaattggattatatggtaatatggttttgttgctggttctttttcgcttaatgacattatatcctag

SEQ ID NO: 519711 - DNA, 120 bp, Artificial Sequence
  ENSG00000165188_5 (sequence is synthesized)
gtatatatccatattaatagttttaccacatcatattaaaggctgcataatatctcttcctatggatggagcagaatctacttaatcaatgtcctattactggatgatgacgtagttctc

SEQ ID NO: 519712 - DNA, 120 bp, Artificial Sequence
  ENSG00000165188_6 (sequence is synthesized)
catacgtcaccgttaaaccagcgcctggatgggcatctctttactcacatctttgcagaagtccttgatggtttccgtggaatcgattcccagtgggggaaatgatgagtcaaggttaca

SEQ ID NO: 519713 - DNA, 120 bp, Artificial Sequence
  ENSG00000165188_7 (sequence is synthesized)
tcaaattattcgaatgacccatatgagaaacagagaaaagccaagtatttctggttgaaacggagaagctgggctggagtgcgcctccctccaactccccgctttaactccctaaggttg

SEQ ID NO: 519714 - DNA, 120 bp, Artificial Sequence
  ENSG00000165188_8 (sequence is synthesized)
gtgggatggccagctctaagatctcagaaggctgaccagctgtgtgctaagaacaaagcagaaggcagcgaggacgtctcccgcgaagcctccccgtgtgtggctgaggatggctgagca

SEQ ID NO: 519715 - DNA, 120 bp, Artificial Sequence
  ENSG00000165188_9 (sequence is synthesized)
gcagggccgggagcttgaggctgagtgccccgtctgctggaaccccttcaacaacacgttccatacccccaaaatgctggattgctgccactccttctgcgtggaatgtctggcccacct

SEQ ID NO: 519716 - DNA, 120 bp, Artificial Sequence
  ENSG00000165188_10 (sequence is synthesized)
cagccttgtgactccagcccggcgccgcctgctgtgcccactctgtcgccagcccacagtgctggcctcagggcagcctgtcactgacttgcccacggacactgccatgctcgccctgct

SEQ ID NO: 519717 - DNA, 120 bp, Artificial Sequence
  ENSG00000165188_11 (sequence is synthesized)
ccgcctggagccccaccatgtcatcctggaaggccatcagctgtgcctcaaggaccagcccaagagccgctacttcctgcgccagcctcaagtctacacgctggaccttggcccccagcc

SEQ ID NO: 519718 - DNA, 120 bp, Artificial Sequence
  ENSG00000165188_12 (sequence is synthesized)
tgggggccagactgggccgcccccagacacggcctctgccaccgtgtctacgcccatcctcatccccagccaccactctttgagggagtgtttccgcaaccctcagttccgcatctttgc

SEQ ID NO: 519719 - DNA, 120 bp, Artificial Sequence
  ENSG00000165188_13 (sequence is synthesized)
ctacctgatggccgtcatcctcagtgtcactctgttgctcatattctccatcttttggaccaagcagttcctttggggtgtggggtgagtgctgttcccagacaagaaaccaaacctttt

SEQ ID NO: 519720 - DNA, 120 bp, Artificial Sequence
  ENSG00000165188_14 (sequence is synthesized)
tcggttgctgctgggtatggtgactacggagcctcatttggtattgtcttcctttgtagtgttgtttattttacaatccagggattgttcaggccatgtgtttgcttctgggaacaattt

SEQ ID NO: 519721 - DNA, 120 bp, Artificial Sequence
  ENSG00000165188_15 (sequence is synthesized)
ccccaccccccaggaagctctctggccttggctccaagcaggtgtgctcaagaggctgccgactgggccacctggcagccccaggtgctgcgtgcatgctgccatggagacaggcccctg

SEQ ID NO: 519722 - DNA, 120 bp, Artificial Sequence
  ENSG00000165188_16 (sequence is synthesized)
ggttggtggcaagaaggcagtctcccaaagctttgccgattcaggggagggagcaactggagcctcaggccctccagagtagtctgcctgaccaccctggagcccacagaagcccaggac

SEQ ID NO: 519723 - DNA, 120 bp, Artificial Sequence
  ENSG00000165188_17 (sequence is synthesized)
aaaaaaaaacaaaaaaacgaaaagcttgaaggactgggagatgtggagcgacctccgggtgtgagtgtggcgtcatggaagggcagagaagcggttctgaccacagagctccacagcaag

SEQ ID NO: 519724 - DNA, 120 bp, Artificial Sequence
  ENSG00000165188_18 (sequence is synthesized)
ttgtgccaaagggctgcacagtggtatccaggaacctgactagcccaaatagcaagttgcatttctcactggagctgcttcaaaatcagtgcatatttttttgagttgctcttttactat

SEQ ID NO: 519725 - DNA, 120 bp, Artificial Sequence
  ENSG00000165188_19 (sequence is synthesized)
gggttgctaaaaaaaaaaaaaaaattgggaagtgagcttcaattctgtgggtaaatgtgtgtttgtttctctttgaatgtcttgccactggttgcagtaaaagtgttctgtattcattaa

SEQ ID NO: 519726 - DNA, 120 bp, Artificial Sequence
  ENSG00000165188_20 (sequence is synthesized)
cgggtgactggactgaatctgatagtcggagctcttaagcttcgaagtaggtgactttcacagcaaccaaagtgctgagcaggcagcccctttgtgcaaggaggaggttccagccacttt

SEQ ID NO: 519727 - DNA, 120 bp, Artificial Sequence
  ENSG00000165188_21 (sequence is synthesized)
cgaagagaaatgagggccccagagagaggaagcccagaagactcagttaccctcttcacatctacaaagacgaaattgccaccctacctttccagaccagggactccaggtgttgaaggg

SEQ ID NO: 519728 - DNA, 120 bp, Artificial Sequence
  ENSG00000165188_22 (sequence is synthesized)
gggaggaggagccagggtaggcagaggatggggaagaggctctggaaggggaagaggctctggaaggggaagaggctctggaagggctgatctggggactggggcagggaagcttctgca

SEQ ID NO: 519729 - DNA, 120 bp, Artificial Sequence
  ENSG00000165188_23 (sequence is synthesized)
aggcttccaggtaaggagaaaggcctttccaggggcttccttgccaggccaaggactgggtgagtaggatgtggagggttggccctctagctcaaggggaggagggaaagagggctggca

SEQ ID NO: 519730 - DNA, 120 bp, Artificial Sequence
  ENSG00000165188_24 (sequence is synthesized)
tcacaaaacccatctctgcgctagtcagggatttgaggtagcagggaaggaaacatttgtcctgtagcaaaacccgcagactgcagcttacccccagctccctggattcagggcagccaa

SEQ ID NO: 519731 - DNA, 120 bp, Artificial Sequence
  ENSG00000165188_25 (sequence is synthesized)
gggcacagacaatgaccataaggagcatttgcgtccagctccaaagcccagggcgacatctgctccaatgccggctctcttgggggctcttggtaggggtggcccaggccttcaccttga

SEQ ID NO: 519732 - DNA, 120 bp, Artificial Sequence
  ENSG00000165188_26 (sequence is synthesized)
cagaggggaggctgtaggagcatttgactcaactcgatgggttaggaactggtgatcaagaacaaaacgcttttgaacctaagtaaaacgtggtgattacacctttcaacacccacagaa

SEQ ID NO: 519733 - DNA, 120 bp, Artificial Sequence
  ENSG00000165188_27 (sequence is synthesized)
cactttgccccaggccaagcacaaggatgggacttcatggctgttcctttgctcctttcccccttctgccaggacgtctcccgcgaagcctccccgtgtgtggctgaggatggctgagca

SEQ ID NO: 519734 - DNA, 120 bp, Artificial Sequence
  ENSG00000165192_0 (sequence is synthesized)
acagtcctaggaccctatacagagcataagccaaaatggaagatggtcctgttttctatggctttaaaaacatttttattacaatgtttgctacgttttttttctttaagcttttaatta

SEQ ID NO: 519735 - DNA, 120 bp, Artificial Sequence
  ENSG00000165192_1 (sequence is synthesized)
aagtttttttggctctcctaacccatttctatatcgtcaaaggaaatagaaaagaagcggctaggatagcagaagagatctatggtggaatttcagattgctgggctgatcgatccccac

SEQ ID NO: 519736 - DNA, 120 bp, Artificial Sequence
  ENSG00000165192_2 (sequence is synthesized)
ttcatgaagctgcagctcaggggcgcttactggcccttaaaactttaattgcacaaggtgtcaatgtgaaccttgtgacaattaaccgggtgtcttctctccacgaggcatgccttggag

SEQ ID NO: 519737 - DNA, 120 bp, Artificial Sequence
  ENSG00000165192_3 (sequence is synthesized)
gtcacgtggcctgtgccaaagccttattggaaaatggtgcacacgtcaatggagtgacagttcacggagccacacccctcttcaatgcttgctgcagcggcagtgctgcatgtgtcaatg

SEQ ID NO: 519738 - DNA, 120 bp, Artificial Sequence
  ENSG00000165192_4 (sequence is synthesized)
tgctgctggagttcggagccaaggcccagttggaggtgcacctggcctcgcccatccatgaggcagtgaagagaggtcacagagagtgcatggagatcctgctggcaaataatgttaaca

SEQ ID NO: 519739 - DNA, 120 bp, Artificial Sequence
  ENSG00000165192_5 (sequence is synthesized)
ttgaccatgaggtgcctcagctcggaactcccctatatgtggcctgcacctaccagagggtagactgtgtgaagaaacttctagaattaggagccagtgtcgaccatggccagtggctgg

SEQ ID NO: 519740 - DNA, 120 bp, Artificial Sequence
  ENSG00000165192_6 (sequence is synthesized)
acaccccactccatgctgcagcgaggcagtccaatgtggaggtcatccacctgctaaccgactatggagctaacctgaagcgtagaaatgctcagggcaaaagtgcgcttgatctggcgg

SEQ ID NO: 519741 - DNA, 120 bp, Artificial Sequence
  ENSG00000165192_7 (sequence is synthesized)
ctccaaaaagcagcgtggagcaggcactcttgctccgtgaaggcccacctgctctttcccagctctgccgcctgtgtgtccggaagtgtctcggtcgagcatgtcatcaagccatccaca

SEQ ID NO: 519742 - DNA, 120 bp, Artificial Sequence
  ENSG00000165192_8 (sequence is synthesized)
agctacatctgccagagccactcgaacgattcctcctataccaatagtcctaagtgttcctgggaagatacttggaatgacacagattgttgtctgctgtacctagagtacctaatgtag

SEQ ID NO: 519743 - DNA, 120 bp, Artificial Sequence
  ENSG00000165192_9 (sequence is synthesized)
aagctcaacagcttagactcctagtatctttaaatgagctcagtcgaagtaaatcccccatgagctagaacacttgaggagtggaaactcctggttagtttaatgttctcattaaccaag

SEQ ID NO: 519744 - DNA, 120 bp, Artificial Sequence
  ENSG00000165192_10 (sequence is synthesized)
gggcaagtagaaaccatttagcttttagctcttgttgttaagaaacttaaaagaactgtgaagtagagtgaaaacaataggctgttttttgatgattcgggatcttcttgtacctaaaag

SEQ ID NO: 519745 - DNA, 120 bp, Artificial Sequence
  ENSG00000165192_11 (sequence is synthesized)
caaatgttaggtattccaagatatgttcttgatttagttccttccttcagcccttccccactttttttctttctttccttgaataaatctggtataattttgattttttgtatatatata

SEQ ID NO: 519746 - DNA, 80 bp, Artificial Sequence
  ENSG00000165192_12 (sequence is synthesized)
tacacacacacacatgcactcatatatttaatgttttcaaagtccttaatatatatagttcatatatgttttcaaagtcc

SEQ ID NO: 519747 - DNA, 120 bp, Artificial Sequence
  ENSG00000165192_13 (sequence is synthesized)
tttcaaagttctttatatataaagttatatatatttatatagactttatatatatatacatatataaagttaaggacttcagaaacattgtagttaactgaggcttccagttactgcggt

SEQ ID NO: 519748 - DNA, 120 bp, Artificial Sequence
  ENSG00000165192_14 (sequence is synthesized)
agaaacattgtagttaactgaggcttccagttactgcggtcctggttgataagagagactttggaagagatcagtgcacccagaggttggcatctattgcttattgcttctgatattaaa

SEQ ID NO: 519749 - DNA, 120 bp, Artificial Sequence
  ENSG00000165192_15 (sequence is synthesized)
tgctgttatttgaagtaagcagttctaggattgagaacactgggtgtccccaacaacctgaacccacaggcattgtctgaggcatgttgcaacccaagcactggcttattttcaaagtca

SEQ ID NO: 519750 - DNA, 120 bp, Artificial Sequence
  ENSG00000165192_16 (sequence is synthesized)
agatgctcagggtttttgaaataattacatactgatgccagccaccaaagtgggctcaatgctgggtcaatatttttttctgtggataggggcccaaaataagcacaaaggtatataaaa

SEQ ID NO: 519751 - DNA, 120 bp, Artificial Sequence
  ENSG00000165192_17 (sequence is synthesized)
agaggcttctccttttctgtcttctccttcttctcatttctctctccttctgtcacccctcctcttcctctattctttctcttttttgtgaatttagaacatgggaactggatagacttt

SEQ ID NO: 519752 - DNA, 120 bp, Artificial Sequence
  ENSG00000165192_18 (sequence is synthesized)
taattattgtaagtattactgtcatggttcagtattcagttctaaaatgaaaattccctctcagatcatcctaagactcatttcacacatgtttttttttcccccaatttttctagacct

SEQ ID NO: 519753 - DNA, 120 bp, Artificial Sequence
  ENSG00000165192_19 (sequence is synthesized)
ttggctctcaactggagacaattttgccccactcccactgagacatttgtcaatgtctgcagacatgtttagttgcaacaactgggggagaattgctactatcatctagacggtggagat

SEQ ID NO: 519754 - DNA, 120 bp, Artificial Sequence
  ENSG00000165192_20 (sequence is synthesized)
ggggagaattgctactatcatctagacggtggagatcagggatgcagctaatcaccctacagtgcacaggagccagcaacaaagaattatcagatctggccgggcatggtggctcacgcc

SEQ ID NO: 519755 - DNA, 63 bp, Artificial Sequence
  ENSG00000165192_21 (sequence is synthesized)
attttgggaggccgaggcaggcagatcgcactgtcaggagttcgagaaccgcctggccactgc

SEQ ID NO: 519756 - DNA, 120 bp, Artificial Sequence
  ENSG00000165192_22 (sequence is synthesized)
agacaactcagaagacactagacaacagcagtcttatctaaagaaataagacctccaaggacgaagcatcagaatgcttcaattaactggggaaaatgagaagaattgtgaagtttcaga

SEQ ID NO: 519757 - DNA, 88 bp, Artificial Sequence
  ENSG00000165192_23 (sequence is synthesized)
gctggagttcggagccaaggcccagttggaggtgcacctggcctcgcccatccatgaggcagtgaagagagagtctcgtgttctgctc

SEQ ID NO: 519758 - DNA, 120 bp, Artificial Sequence
  ENSG00000165194_0 (sequence is synthesized)
atggagtcgctcctgctgccggtgctgctgctgctggccatactgtggacgcaggctgccgccctcattaatctcaagtactcggtagaagaggagcagcgcgccgggacggtgattgcc

SEQ ID NO: 519759 - DNA, 120 bp, Artificial Sequence
  ENSG00000165194_1 (sequence is synthesized)
aacgtggccaaagacgcgcgagaggcgggcttcgcgctggacccccggcaggcttcagcctttcgcgtggtgtccaactcggctccacacctagtggacatcaatcccagctctggcctg

SEQ ID NO: 519760 - DNA, 120 bp, Artificial Sequence
  ENSG00000165194_2 (sequence is synthesized)
ctggtcaccaagcagaagattgaccgtgatctgctgtgccgccagagccccaagtgcatcatctcgctcgaggtcatgtccagctcaatggaaatctgcgtgataaaggtggagatcaag

SEQ ID NO: 519761 - DNA, 120 bp, Artificial Sequence
  ENSG00000165194_3 (sequence is synthesized)
gacctgaacgacaatgcgcccagtttcccggcagcacagatcgagctggagatctcggaggcagccagccctggcacgcgcatcccgctggacagcgcttacgatccagactcaggaagc

SEQ ID NO: 519762 - DNA, 120 bp, Artificial Sequence
  ENSG00000165194_4 (sequence is synthesized)
tttggcgtgcagacttacgagctcacgcccaacgagctgttcggcctggagatcaagacgcgcggcgacggctcccgctttgccgaactcgtggtggaaaagagcctggaccgcgagacg

SEQ ID NO: 519763 - DNA, 120 bp, Artificial Sequence
  ENSG00000165194_5 (sequence is synthesized)
cagtcgcactacagcttccgaatcactgcgctagacggtggcgacccgccgcgcctgggcaccgttggccttagtatcaaggtgaccgactccaatgacaacaacccggtgtttagcgag

SEQ ID NO: 519764 - DNA, 120 bp, Artificial Sequence
  ENSG00000165194_6 (sequence is synthesized)
tccacctacgcggtgagcgtgccagaaaactcgcctcccaacacacccgtcatccgcctcaacgccagcgatccagacgagggcaccaacggccaggtggtctactccttctatggctac

SEQ ID NO: 519765 - DNA, 120 bp, Artificial Sequence
  ENSG00000165194_7 (sequence is synthesized)
gtcaacgaccgcacgcgcgagctctttcagatcgacccgcacagtggcctggtcactgtcactggcgctttagactacgaagaggggcacgtgtacgaactggacgtgcaggctaaggac

SEQ ID NO: 519766 - DNA, 120 bp, Artificial Sequence
  ENSG00000165194_8 (sequence is synthesized)
ttggggcccaattccatcccggcacactgcaaggtcaccgtcagcgtgctggacaccaatgacaatccgccggtcatcaacctgctgtcagtcaacagtgagcttgtggaggtcagcgag

SEQ ID NO: 519767 - DNA, 120 bp, Artificial Sequence
  ENSG00000165194_9 (sequence is synthesized)
agcgcccccccgggctacgtgatcgccttggtgcgggtgtctgatcgcgactcaggcctcaatggacgtgtgcagtgccgtttgctgggcaatgtgccctttcgactgcaggaatatgag

SEQ ID NO: 519768 - DNA, 120 bp, Artificial Sequence
  ENSG00000165194_10 (sequence is synthesized)
agcttctccactattctggtggacggacggctggaccgcgagcagcacgaccaatacaacctcacaattcaggcacgcgacggcggcgtgcccatgctgcagagtgccaagtcctttacc

SEQ ID NO: 519769 - DNA, 120 bp, Artificial Sequence
  ENSG00000165194_11 (sequence is synthesized)
gtgctcatcactgacgaaaatgacaaccacccgcacttttccaagccctactaccaggtcattgtgcaggagaacaacacgcctggcgcctatctgctctctgtgtctgctcgcgacccc

SEQ ID NO: 519770 - DNA, 120 bp, Artificial Sequence
  ENSG00000165194_12 (sequence is synthesized)
gacctgggtctcaacggcagtgtctcctaccagatcgtgccgtcgcaggtgcgggacatgcctgtcttcacctatgtctccatcaatcccaactcaggcgacatctacgcgctgcgatcc

SEQ ID NO: 519771 - DNA, 120 bp, Artificial Sequence
  ENSG00000165194_13 (sequence is synthesized)
tttaaccacgagcagaccaaggcgttcgaattcaaggtgctggccaaggacggcggccttccctcactgcaaagcaacgctacggtgcgggtcatcatcctcgacgtcaacgacaacacc

SEQ ID NO: 519772 - DNA, 120 bp, Artificial Sequence
  ENSG00000165194_14 (sequence is synthesized)
ccggtcatcacagccccacctctgattaacggcactgccgaggtctacataccccgcaactctggcataggctacctggtgactgttgtcaaggcagaagactacgatgagggcgaaaat

SEQ ID NO: 519773 - DNA, 120 bp, Artificial Sequence
  ENSG00000165194_15 (sequence is synthesized)
ggccgagtcacctacgacatgaccgagggcgaccgcggcttctttgaaatagaccaggtcaatggcgaagtcagaaccacccgcaccttcggggagagctccaagtcctcctatgagctt

SEQ ID NO: 519774 - DNA, 120 bp, Artificial Sequence
  ENSG00000165194_16 (sequence is synthesized)
atcgtggtggctcacgaccacggcaagacatctctctctgcctctgctctcgtcctaatctacttgtcccctgctctcgatgcccaagagtcaatgggctctgtgaacttgtccttgatt

SEQ ID NO: 519775 - DNA, 120 bp, Artificial Sequence
  ENSG00000165194_17 (sequence is synthesized)
ttcattattgccctgggctccattgcgggcatcctctttgtaactatgatcttcgtggcaatcaagtgcaagcgagacaacaaagagatccggacctacaactgcagaattgctgagtac

SEQ ID NO: 519776 - DNA, 120 bp, Artificial Sequence
  ENSG00000165194_18 (sequence is synthesized)
tcctatgggcatcaaaagaaatcaagcaagaagaaaaaaatcagtaagaatgacatccgcctggtaccccgggatgtggaggagacagacaagatgaacgttgtcagttgctcttccctg

SEQ ID NO: 519777 - DNA, 120 bp, Artificial Sequence
  ENSG00000165194_19 (sequence is synthesized)
acctcctccctcaactattttgactaccaccagcagacgctgcccctgggctgccgccgctctgagagcactttcctgaatgtggagaaccagaatacccgcaacaccagtgctaaccac

SEQ ID NO: 519778 - DNA, 120 bp, Artificial Sequence
  ENSG00000165194_20 (sequence is synthesized)
atctaccatcactctttcaacagccaggggccccagcagcctgacctgattatcaacggtgtgcctctgcctgagactgaaaactattcttttgactccaactacgtgaatagccgagcc

SEQ ID NO: 519779 - DNA, 120 bp, Artificial Sequence
  ENSG00000165194_21 (sequence is synthesized)
catttaatcaagagcagctccaccttcaaggacttagagggcaacagcctgaaggatagtggacatgaggagagtgaccaaactgacagtgagcatgatgtccagcggagcctgtattgt

SEQ ID NO: 519780 - DNA, 120 bp, Artificial Sequence
  ENSG00000165194_22 (sequence is synthesized)
gatactgctgtcaacgatgtgctgaacaccagtgtgacctccatgggatctcagatgcctgatcatgatcagaatgaaggatttcattgccgggaagaatgccggattcttggccactct

SEQ ID NO: 519781 - DNA, 120 bp, Artificial Sequence
  ENSG00000165194_23 (sequence is synthesized)
gacaggtgctggatgccccggaaccccatgcccatccgttccaagtcccctgagcatgtgaggaacatcatcgcgctgtctattgaagctactgctgctgatgtcgaggcttatgacgac

SEQ ID NO: 519782 - DNA, 120 bp, Artificial Sequence
  ENSG00000165194_24 (sequence is synthesized)
tgcggccccaccaaacggactttcgcaacctttgggaaagatgtcagcgaccacccggctgaggagaggcctaccctgaaaggcaagaggactgtcgatgtgaccatctgcagccccaag

SEQ ID NO: 519783 - DNA, 120 bp, Artificial Sequence
  ENSG00000165194_25 (sequence is synthesized)
gtcaacagcgttatccgggaggcaggcaatggctgtgaggcgattagccctgtcacctcccccctccacctcaagagctctctgcccaccaagccttccgtgtcttacaccattgccctg

SEQ ID NO: 519784 - DNA, 120 bp, Artificial Sequence
  ENSG00000165194_26 (sequence is synthesized)
gctcccccagcccgtgatctggagcagtatgtcaacaatgtcaacaatggccctactcgtccctctgaagctgagccccgtggagctgatagcgagaaagtcatgcatgaggtcagcccc

SEQ ID NO: 519785 - DNA, 120 bp, Artificial Sequence
  ENSG00000165194_27 (sequence is synthesized)
attctgaaggaaggtcgcaacaaagagtcccctggtgtgaagcgtctgaaggatatcgttctctaaaccagtctccaggaagaagagaaagaaaccacactggctagtgaagaagcagga

SEQ ID NO: 519786 - DNA, 120 bp, Artificial Sequence
  ENSG00000165194_28 (sequence is synthesized)
gcttcttgttttaattgctcaccaatggttggttcttgagtggctatatttcagagcttttcctaaatgtattgtttataggtgattatcattctgtgacagtcccttgtttcaacaggc

SEQ ID NO: 519787 - DNA, 120 bp, Artificial Sequence
  ENSG00000165194_29 (sequence is synthesized)
agcaggggtgttcagttggagcaaattagctttggcttgagttgttcatggggccttgatgttggggaaacagagacaaattcagttgtgaaaagtattatgtattaagtgtttgaattt

SEQ ID NO: 519788 - DNA, 120 bp, Artificial Sequence
  ENSG00000165194_30 (sequence is synthesized)
atatatttttctatgtcaaaattataatataaattaccattgtttgtggaggattacatttaaaaaagcaaaaagtgaaaaaaaaaagctctggacacctttaataagctcgccactgtt

SEQ ID NO: 519789 - DNA, 120 bp, Artificial Sequence
  ENSG00000165194_31 (sequence is synthesized)
ttttgtagtgtagacaagttaatggtcatttattgtgtactattcattgattcagtgatgtgaaattgagcccccaaaaggttgtttctgaagctcgagtacttcccaatgccgctactt

SEQ ID NO: 519790 - DNA, 120 bp, Artificial Sequence
  ENSG00000165194_32 (sequence is synthesized)
tgctgtggacacccctgctttaaaaacccttttgctagctgtgctattgttgtatttgatattgcaaattgctatgtgtgtggtgatggcaaaaggcttttaaaagttggtgttttcttt

SEQ ID NO: 519791 - DNA, 120 bp, Artificial Sequence
  ENSG00000165194_33 (sequence is synthesized)
aaactacagacaaaaacaaagtgcaaacaactgagacagcaaatgaatgagcaacaccatgcatatagattgagtacttggagaatactcacgttttttaactcatgtagtgattgctca

SEQ ID NO: 519792 - DNA, 120 bp, Artificial Sequence
  ENSG00000165194_34 (sequence is synthesized)
ccactttgcaaagtatttttcctgcctttcagtggtctgcccaggtccatgatagatcattgcagaaagtcatttttggataggctgctatctaatttgcagttgtcagaaatactgtgc

SEQ ID NO: 519793 - DNA, 120 bp, Artificial Sequence
  ENSG00000165194_35 (sequence is synthesized)
tgaaagttttatgacatccatcttttaaattttcaggccctgaacaggaaagttgctcctgaagttatgtttccaggcttagaaattccctctctccaatcatctaaaattgaagatgac

SEQ ID NO: 519794 - DNA, 120 bp, Artificial Sequence
  ENSG00000165194_36 (sequence is synthesized)
tgaatctattttaagatctaaattagcatctcttcagacacacacttcctgattcagtgtttcccaatcatgattagaattagactgcaaagcacgtcatgggctgggattgagaactcc

SEQ ID NO: 519795 - DNA, 120 bp, Artificial Sequence
  ENSG00000165194_37 (sequence is synthesized)
atgttgctctgtatcttaggcttatatacgtagggatagagtaagcagtacaaagtgtatattttggaaaagacaggtaacaggtaacagcatcgctaatccaattactgtgccttctaa

SEQ ID NO: 519796 - DNA, 120 bp, Artificial Sequence
  ENSG00000165194_38 (sequence is synthesized)
acggagacactcagacacttgaactcatctttttatgactaatagttttttgattaaaaatgtgaacaagaaaatactaaaataaaaatcctttcgatttagccaactctttttgctgta

SEQ ID NO: 519797 - DNA, 120 bp, Artificial Sequence
  ENSG00000165194_39 (sequence is synthesized)
ggctaggaatacaccctttttaaattaacacactgtagatcctttttttctgttttaacattcctctaactcccccatttatcttttgtctattaatattcactagccaacatagtattt

SEQ ID NO: 519798 - DNA, 120 bp, Artificial Sequence
  ENSG00000165194_40 (sequence is synthesized)
ttgcagcctaagagttcattatttaaaaataaactaaagaaatatgtcacctttgttctgccttggtcttaagagagttgtttctagagaaacaagttttatggttctgttttcatttgt

SEQ ID NO: 519799 - DNA, 120 bp, Artificial Sequence
  ENSG00000165194_41 (sequence is synthesized)
ttcattttttgaaattcaggaatacacagagagaaggcctagaggttagagcactagaatgcaaaagaggatttattttcttaagtttaggtagataagtcagctcttttgaatgtttta

SEQ ID NO: 519800 - DNA, 120 bp, Artificial Sequence
  ENSG00000165194_42 (sequence is synthesized)
cttatttttgcctgagttcctagctttacgcattactaggaatattttcttttacaggagggagaagggttttgagggagggggtgggtaaggcagtagggatggggttaggtaggggag

SEQ ID NO: 519801 - DNA, 120 bp, Artificial Sequence
  ENSG00000165194_43 (sequence is synthesized)
aacatttctgaaaaagaacttataatgaagctacaaatccatccttatttcttattcagtgctgaatactacctcatgcaaaatattggtgtggctgcaaatttccctctgaagctgaca

SEQ ID NO: 519802 - DNA, 120 bp, Artificial Sequence
  ENSG00000165194_44 (sequence is synthesized)
caattaaggatgaattaccataacatcttcatttttcctcatttcattgcctctcatacagttttctccctctgatttatttcattttggtagtggattttgaattaagtatttatttct

SEQ ID NO: 519803 - DNA, 120 bp, Artificial Sequence
  ENSG00000165194_45 (sequence is synthesized)
ctttgcaagtgactatttgattaacacattaaaaattttttaaaaatttcccctttaagttatgatggctgcctatagaatttagactgtttctcaccctgatccatcctgatattatgt

SEQ ID NO: 519804 - DNA, 120 bp, Artificial Sequence
  ENSG00000165194_46 (sequence is synthesized)
tattagctacgatttcaaggtcactttgaagtcagacttcacagttttctacaggtgtatttcttgctatgctcagtgggaaccagggagcagaaaagattgtggaaagtgggaacatta

SEQ ID NO: 519805 - DNA, 120 bp, Artificial Sequence
  ENSG00000165194_47 (sequence is synthesized)
attgtcacgtggctgttgagccagagaggccactggctgccatgcctcttaccagccaagttttaaatggttagagtggcattggcattgattttgcttttctcttgggttttcttcatt

SEQ ID NO: 519806 - DNA, 120 bp, Artificial Sequence
  ENSG00000165194_48 (sequence is synthesized)
tcttttcataattcatcttcaagctatagatccatccttcttccctatccaaatactttgttctcagtgggcagtcagatttttttggcttccaaacctcactgagcatgttcagagaat

SEQ ID NO: 519807 - DNA, 120 bp, Artificial Sequence
  ENSG00000165194_49 (sequence is synthesized)
tcctctcattaaggaaatatttttccccacaattgtctgatgtatgagtcctctcagaagcacaagtgcatactaggaaggctttgtaaactggttttgtaggcaggctgtacctgcaaa

SEQ ID NO: 519808 - DNA, 120 bp, Artificial Sequence
  ENSG00000165194_50 (sequence is synthesized)
taggcattctgagcaaggatcctaaatttccctttggctcatgtcccccccgccccaccccaccttctcctttttggcatgtctggtgaaaagctacaaggttcacagggccaaatattc

SEQ ID NO: 519809 - DNA, 120 bp, Artificial Sequence
  ENSG00000165194_51 (sequence is synthesized)
tcccttttgttctctaaacatgttgcacacataaactcaagggagtgatttcggttcctaagtcctagggagttctattccatttattctgatgtcccttttaaggaggagttggtgttg

SEQ ID NO: 519810 - DNA, 120 bp, Artificial Sequence
  ENSG00000165194_52 (sequence is synthesized)
aagtgtgacatgctttaatgataactgctttggcaattccccagacaggtatacttcttcatccaaaattgcacctaaggtgttcatttagacaaaattgttcgcttagtgatccactga

SEQ ID NO: 519811 - DNA, 120 bp, Artificial Sequence
  ENSG00000165194_53 (sequence is synthesized)
tctctaatcagaaatatttttaaaaaatacaatttagatctctgaaaattggaaccactcaagagtatcatcttgatagtgttacttcagcatatgactgactgattttatgaagggagt

SEQ ID NO: 519812 - DNA, 120 bp, Artificial Sequence
  ENSG00000165194_54 (sequence is synthesized)
ttagctgacttttccctgtagccctatcatattaaaaacaaaaagtggtccacttgaagcagcaaggacaaagggcagtttagggagaggcagggtgaaggggatagctcgattgggcat

SEQ ID NO: 519813 - DNA, 120 bp, Artificial Sequence
  ENSG00000165194_55 (sequence is synthesized)
ccagagtggaaaaggattattattgtacataatagcagttctggctggaattccaatccactttctggggatcattttgatgttgaatgttcccccaaagcattctgacaagtttggtcc

SEQ ID NO: 519814 - DNA, 120 bp, Artificial Sequence
  ENSG00000165194_56 (sequence is synthesized)
acttggctctttaccccgggtaataagacccttattgactttgaaaaactggcataaatgagcttaagaaatccattgtatacagtcctagtgtttgccttcttggtaaaattacattta

SEQ ID NO: 519815 - DNA, 120 bp, Artificial Sequence
  ENSG00000165194_57 (sequence is synthesized)
aggatgtcatttcatgagtcaaattgtatctgctgacactgaagtgtattgagatgttgttctttagtttaagtatgtaacaaagtaatattcaaaggggatgtttgggggtggggctgg

SEQ ID NO: 519816 - DNA, 120 bp, Artificial Sequence
  ENSG00000165194_58 (sequence is synthesized)
gaccgggtggctttatattgataatgaaatattccagagcaaaacacattgtcctaatgaagttgttgcagctctcttcgttttcttgtgccgctggaattggcttgtgggtcacttgtt

SEQ ID NO: 519817 - DNA, 120 bp, Artificial Sequence
  ENSG00000165194_59 (sequence is synthesized)
gtgcaaaagtgaattaatttcaaataggaatcatattgcttttgtgaaacaaagaaaatttaccaccttgtctgatacatagattggaaggcgctcttggtaaagaataacccacaaaca

SEQ ID NO: 519818 - DNA, 120 bp, Artificial Sequence
  ENSG00000165194_60 (sequence is synthesized)
cctgatcttgattggaaagcattgtaggtcattagggaaaactgatgatgctgactgttgctccagctgtgttggcaattcaagatgaccttgttactaactgaaagttgctgtcaacct

SEQ ID NO: 519819 - DNA, 120 bp, Artificial Sequence
  ENSG00000165194_61 (sequence is synthesized)
tagcaaacaaaccagctaacaccattacagcactggttaagtagatttttactggcactggctggcgttcagctgaggaaggctaggatacagactttaatgaccaagagccagactagc

SEQ ID NO: 519820 - DNA, 120 bp, Artificial Sequence
  ENSG00000165194_62 (sequence is synthesized)
tcgagctagaaatcagcaacaaatacctccttgtgctatttgaatgctaaggtattagttgcaataggcttacgccttcgctcctctagtgaggggaatgagcctgatgacactattact

SEQ ID NO: 519821 - DNA, 120 bp, Artificial Sequence
  ENSG00000165194_63 (sequence is synthesized)
gtttacctgtcaaaccagggtggaaatttagagggatgcaagtacagtatgtctcattaagcagtctctgttgctgattatatgaagataaaattgttgtatatgctgatctgtatgtta

SEQ ID NO: 519822 - DNA, 120 bp, Artificial Sequence
  ENSG00000165194_64 (sequence is synthesized)
tgtacattttcacagtgattgaatcattgtaaaaagaaaaaagacaaaaaagaatcaccactgtctattttatgaagatgataaagcagctttattaaattattacagttatgtttcaaa

SEQ ID NO: 519823 - DNA, 120 bp, Artificial Sequence
  ENSG00000165194_65 (sequence is synthesized)
tggtgttatctgccacattgtttccttttatctggtggttctctgtttccccctttaaatgtgttttctctgcttcaaaaatttaatgcattttagtattaaaggctattatggaaaaag

SEQ ID NO: 519824 - DNA, 120 bp, Artificial Sequence
  ENSG00000165194_66 (sequence is synthesized)
agtagtttgcggcatccggaggagcagcagcagcagtagcggcggcggctggcgcagcgcggagacggacgagcgggcacagacggcagcacagctcccgtgcaccatgcctggcttgcc

SEQ ID NO: 519825 - DNA, 120 bp, Artificial Sequence
  ENSG00000165194_67 (sequence is synthesized)
cgggaggcactggcacccgcgtccctagcccggcgctggcccttggcgcgttgcgctccgcagcattccggctgagcgatttcatccgaaatcctaaacctcctaccccaaacccattgc

SEQ ID NO: 519826 - DNA, 120 bp, Artificial Sequence
  ENSG00000165194_68 (sequence is synthesized)
ctcctgcttgctcatactccacactcacactccccacaccacacactcactcttcctctctctctcacacattcacacacagcccgagacagacagagaaagcgagacagacctcccgag

SEQ ID NO: 519827 - DNA, 120 bp, Artificial Sequence
  ENSG00000165194_69 (sequence is synthesized)
tgcgcgagcgcccgggaggaagggagcccaacgcagcgcggccagcgcctctccgggaagatgaaatcaagacgctcctgcaagtaaacttcggcggcgacaaaatcgtcgactgtggca

SEQ ID NO: 519828 - DNA, 120 bp, Artificial Sequence
  ENSG00000165194_70 (sequence is synthesized)
caagtaaacttcggcggcgacaaaatcgtcgactgtggcagctgctgaggcggaccccagcgacgtgcaactgagctaggagggcttcctcccgcggcggcggcggcggcggcggcggcg

SEQ ID NO: 519829 - DNA, 120 bp, Artificial Sequence
  ENSG00000165194_71 (sequence is synthesized)
agaagcacccggtacccacggcggcggccccgcctctcctggccggtactgttgttgcctccccttccctcttccccattccccgccacccccggccattagaaagaccggggctttgat

SEQ ID NO: 519830 - DNA, 120 bp, Artificial Sequence
  ENSG00000165194_72 (sequence is synthesized)
tttcttggacaaattgccatctccccgtttccacaaacttgacgtggagggtcggactgcgttgttaactttgatttcctagacgaaaacgcccgcagaccctcaactgctctgtggggg

SEQ ID NO: 519831 - DNA, 120 bp, Artificial Sequence
  ENSG00000165194_73 (sequence is synthesized)
gaactccgctcccacctcggatcctggacagacgcgcccccaagcccttcgaagccagccttagcgcgagggagcgcgctcaagctctggcagcctctctcccctcccccttcctctgct

SEQ ID NO: 519832 - DNA, 120 bp, Artificial Sequence
  ENSG00000165194_74 (sequence is synthesized)
ggccccgggaccgccatccgactcaaccctataaccgggtgcccgcggcgcttgccagtaactgactcccgtctgcgacaccccctttctcccgaacaggcctcgaagaggccagtgtgg

SEQ ID NO: 519833 - DNA, 120 bp, Artificial Sequence
  ENSG00000165194_75 (sequence is synthesized)
cccccccagaccccggagggcgcattccaagcgggtactctctccgcagtgaactgggagcgctggggggaggtctttgcgcatgccaggtgcacagacagcgagttcgccagcctcagt

SEQ ID NO: 519834 - DNA, 120 bp, Artificial Sequence
  ENSG00000165194_76 (sequence is synthesized)
gccggtgcaccgcggcgggccgggcagtgcctgaaaggctgcgcctcctccgccctctttaccttcgcctcaagtactgtccggactcagcggtgcgtcctccaggccgcgcagacgccg

SEQ ID NO: 519835 - DNA, 120 bp, Artificial Sequence
  ENSG00000165194_77 (sequence is synthesized)
cccgacccgcagccctgggcggctgccgacagtcgcgcccggctaactttgaaggggtaaaactgagtagccgggctggagggagggggctcggggccgcgcggcgctcccttggcccct

SEQ ID NO: 519836 - DNA, 80 bp, Artificial Sequence
  ENSG00000165194_78 (sequence is synthesized)
cgcaacctcagcattggagccgccgcgggtgtcccccgcgcgccgccgggccgccctgggcgggacttctcccgcggcct

SEQ ID NO: 519837 - DNA, 120 bp, Artificial Sequence
  ENSG00000165194_79 (sequence is synthesized)
cttgtctcctcggctgttttataaaaggacaaaacagcaagtgtctgcattgcatctcggtttctcccattagcgaggagcaagacaaaaagacagaggagaaagtgagcctaaggggaa

SEQ ID NO: 519838 - DNA, 120 bp, Artificial Sequence
  ENSG00000165194_80 (sequence is synthesized)
aagagatccggacctacaactgcagccaggggccccagcagcctgacctgattatcaacggtgtgcctctgcctgagactgaaaactattcttttgactccaactacgtgaatagccgag

SEQ ID NO: 519839 - DNA, 120 bp, Artificial Sequence
  ENSG00000165195_0 (sequence is synthesized)
attggtgctgcggaacagcagggagggactccggctgcagccgcgggaggtccggacactggcggccatggaactcaccggtaatagaggacacatctcttaactgggttgctctaagaa

SEQ ID NO: 519840 - DNA, 120 bp, Artificial Sequence
  ENSG00000165195_1 (sequence is synthesized)
ctgatgtctaaaccgtctcagcatggcctgtagaggaggagctgggaatggccaccgtgcctcagctacactctctcgggttagccctggaagtctttacacatgtagaacccgtaccca

SEQ ID NO: 519841 - DNA, 120 bp, Artificial Sequence
  ENSG00000165195_2 (sequence is synthesized)
taatatatgcatggtatctgactttttctacccaaatatgggaggcgtggaaagccacatttaccagctctctcagtgcctgattgaaagagggcataaggttataattgtcacccatgc

SEQ ID NO: 519842 - DNA, 120 bp, Artificial Sequence
  ENSG00000165195_3 (sequence is synthesized)
ttatggaaatcgaaaaggcatccgttacctcaccagtggcctcaaagtctattacttgcctctgaaagtcatgtacaaccagtctacagccacgaccctctttcacagtctgccattgct

SEQ ID NO: 519843 - DNA, 120 bp, Artificial Sequence
  ENSG00000165195_4 (sequence is synthesized)
caggtacatatttgttcgggagagagtcacgataatccattcacatagttctttttctgctatggcccatgatgctctcttccacgccaagacaatggggcttcagacagtcttcacgga

SEQ ID NO: 519844 - DNA, 120 bp, Artificial Sequence
  ENSG00000165195_5 (sequence is synthesized)
ccattccctttttggatttgctgatgtcagctcggtgcttacaaacaagcttctaaccgtgtctctttgtgatacaaaccacatcatttgtgtgtcttatactagtaaggaaaatactgt

SEQ ID NO: 519845 - DNA, 120 bp, Artificial Sequence
  ENSG00000165195_6 (sequence is synthesized)
actaagagcagcactgaatcctgaaatagtgtccgtcattcctaatgctgtagatcctactgacttcactccagacccatttagaaggcatgatagtataactattgttgttgtcagcag

SEQ ID NO: 519846 - DNA, 120 bp, Artificial Sequence
  ENSG00000165195_7 (sequence is synthesized)
acttgtttacagaaaagggatcgatttgcttagtggtataatacctgaactctgtcagaaatatccagatttaaatttcataattggaggagagggaccaaagagaatcattttggaaga

SEQ ID NO: 519847 - DNA, 120 bp, Artificial Sequence
  ENSG00000165195_8 (sequence is synthesized)
agttcgggaaagataccagctgcatgacagggtgcgtcttttgggagctttagaacacaaggatgttagaaatgtcttagttcaaggacatatttttctgaatacctcccttactgaagc

SEQ ID NO: 519848 - DNA, 120 bp, Artificial Sequence
  ENSG00000165195_9 (sequence is synthesized)
attctgcatggcgatcgtggaagcagccagttgtggtttacaggttgtaagtaccagagttggtggaattcctgaggtgcttccagaaaaccttattattttatgtgagccttcagtaaa

SEQ ID NO: 519849 - DNA, 120 bp, Artificial Sequence
  ENSG00000165195_10 (sequence is synthesized)
atctttgtgtgaaggattggaaaaggctattttccaactgaagtcagggacattgccagctccagaaaacatccataacatagtaaagactttctacacctggaggaatgttgcagaaag

SEQ ID NO: 519850 - DNA, 120 bp, Artificial Sequence
  ENSG00000165195_11 (sequence is synthesized)
aactgaaaaggtatatgaccgggtatcagtggaagctgtgttgccaatggacaaacgactggacagacttatttctcactgcggcccagtaacaggctacatctttgctttgttggcagt

SEQ ID NO: 519851 - DNA, 120 bp, Artificial Sequence
  ENSG00000165195_12 (sequence is synthesized)
tttcaacttcctcttcctcattttcttgagatggatgactccagattctatcattgatgttgcaatagatgccactgggccacggggtgcctggactaataactattctcacagtaaaag

SEQ ID NO: 519852 - DNA, 120 bp, Artificial Sequence
  ENSG00000165195_13 (sequence is synthesized)
agggggtgagaataatgagatatctgaaaccaggtagaaggaagcctagattgtaagattttaaacatttgtaatagttctataaagactatggaaaataaccttgcttttggggggttt

SEQ ID NO: 519853 - DNA, 120 bp, Artificial Sequence
  ENSG00000165195_14 (sequence is synthesized)
ttgtttttttagagttaatttagtaagttatgctacctctatatcattcaatattttctgttgaggaaagataaaaatgtatgcaattcctgagtgtagaaacttcttgcacttatttaa

SEQ ID NO: 519854 - DNA, 120 bp, Artificial Sequence
  ENSG00000165195_15 (sequence is synthesized)
gaaatccctgtagcagagatgttttaacattatattttgagagctttgggtgctgaagggccaaacgttttctgggcattttttggccagtttttaatgtaacaccattagacactcacc

SEQ ID NO: 519855 - DNA, 120 bp, Artificial Sequence
  ENSG00000165195_16 (sequence is synthesized)
agatgtttacaagttttctttaggggaactacaacaattatatgaactgttttatatcatgttcatatacatttattaggaatctaaatcatgtctttgaacatttattaggttcactca

SEQ ID NO: 519856 - DNA, 120 bp, Artificial Sequence
  ENSG00000165195_17 (sequence is synthesized)
gtaggtgttacatgtaattaacaggttccttgagtaagatagtccatcagttaccagcacattttgaacccctgctctgtgtagaatgttgaactagatgcttcccgccattaaggacca

SEQ ID NO: 519857 - DNA, 120 bp, Artificial Sequence
  ENSG00000165195_18 (sequence is synthesized)
ggggtgcattcactctttgtttaccattcaaatggcttacttcatcataattgtggttgatatgagatcaatatccaacatgccaaaaatgctcatgccagttaatgccaggaaaaaaat

SEQ ID NO: 519858 - DNA, 120 bp, Artificial Sequence
  ENSG00000165195_19 (sequence is synthesized)
caccgacacactactagtactttgttcctgttgtatgcattctcctaggtagagcctccatcttcagttgtgtttgtgaaggtattttttgctttttaaatactggggaccgatatcact

SEQ ID NO: 519859 - DNA, 120 bp, Artificial Sequence
  ENSG00000165195_20 (sequence is synthesized)
gttgatagtgcagagaaaccctccacatttttcagtgcataattgagttttctataaatgccttcgtgttttctgagcagaatgtacgaggtgtgccatcccaaaaccagctgctaccct

SEQ ID NO: 519860 - DNA, 120 bp, Artificial Sequence
  ENSG00000165195_21 (sequence is synthesized)
gtccttttaatgtaagtcactccccttcactgtggcctcgctgatgtctgataagtattgtcagtgtgcaaaaggctttacttcagaatggtttatttatagcaaactaagttgaaaatt

SEQ ID NO: 519861 - DNA, 120 bp, Artificial Sequence
  ENSG00000165195_22 (sequence is synthesized)
ttagaaacagtctttgtgggtggatgttattaactgtcattgttgttgcccagagccatgggttttttaaccccaaattatccacatggtgtgtattatgaattctttgaactcttaagg

SEQ ID NO: 519862 - DNA, 120 bp, Artificial Sequence
  ENSG00000165195_23 (sequence is synthesized)
tttttgtgagaaaaggactgtgaattcaaaacaataaggcacttgtgggtgcactacatagattctgacagtgttgtgattctgtataggatttttaaaaatgacaacattcacaaaatt

SEQ ID NO: 519863 - DNA, 120 bp, Artificial Sequence
  ENSG00000165195_24 (sequence is synthesized)
tattactttttaaaaaataacatgcctattaactggttgcactgatataaaagaaatatatttgtgttttgtttgtactaaaatgcaaaagcaagagtgcaatttttaaaatctagaagt

SEQ ID NO: 519864 - DNA, 120 bp, Artificial Sequence
  ENSG00000165195_25 (sequence is synthesized)
taggggttttgttggagaaaaatggactgatctttaaactattcagtcttactgggatttttatgcatagaaactcacatataaacatgaaataaacagtgccagtattcataggaaagt

SEQ ID NO: 519865 - DNA, 120 bp, Artificial Sequence
  ENSG00000165195_26 (sequence is synthesized)
gagaaactgtaatatttggccattattctattcaacaggttttagaggcatgccaccattttttccttatatttttgcttaatttttttaaattgtcatttaattcttaaactgtcattt

SEQ ID NO: 519866 - DNA, 120 bp, Artificial Sequence
  ENSG00000165195_27 (sequence is synthesized)
atttgagatggaaataagatctaaagttagttgcctttgcctgtaaaacatgtgatttgcaaattattatttttcttttttttaacaaatggaagtaaatttgtttcacgtaaatcttaa

SEQ ID NO: 519867 - DNA, 120 bp, Artificial Sequence
  ENSG00000165195_28 (sequence is synthesized)
ttttcaacctttctggataccttaattgtaactgtcagtttgcactggtcggtatatggaaacacattgctctaccctgctacttagttgattttaaagtgaatttacagtgatgagaaa

SEQ ID NO: 519868 - DNA, 120 bp, Artificial Sequence
  ENSG00000165195_29 (sequence is synthesized)
tttgtgaaaaatatattgtatttcttttgatgtttcaaaaggttgcctatgaaaaactgatttgttaaaacatgctacatgtccaaaaataaagaccagaatgacattttgataattttc

SEQ ID NO: 519869 - DNA, 120 bp, Artificial Sequence
  ENSG00000165195_30 (sequence is synthesized)
gggcattcatggttgggatttctgtgtattttgaaaaataatgagacacattccataataatgttttaactggttttgttgatcttcctgaggtatgattatggtggagtatgtgttctt

SEQ ID NO: 519870 - DNA, 120 bp, Artificial Sequence
  ENSG00000165195_31 (sequence is synthesized)
cttagccaccttaaatataccttttttagaagtacgcaatgtataaacacaagtgaataacttaaagaatagtctgttgagatgaaacagaatagtccatattttgggtgtgtggaaggt

SEQ ID NO: 519871 - DNA, 120 bp, Artificial Sequence
  ENSG00000165195_32 (sequence is synthesized)
aatgcatgtcaaggtctacgtcttcaagaattgtaactcttgggggaccactgccagtttgcaaacaattccactcctggaaaaggtttaagagagtttctctcctttatggagtgcata

SEQ ID NO: 519872 - DNA, 120 bp, Artificial Sequence
  ENSG00000165195_33 (sequence is synthesized)
agaacattagcagcaataagaatttaagtgtaatataaatagcagacttggtttataaattaaatttcttttgtagcatgagttttcactcctttcttcccctctcatttaaaaaatcag

SEQ ID NO: 519873 - DNA, 120 bp, Artificial Sequence
  ENSG00000165195_34 (sequence is synthesized)
gcattctgtattctgaattcctcctgggacattagtgatgtgtttttttgtaacttaggaattgtacctaatttattttttaaccaaatagcatatcttcttgagatggctagctgagaa

SEQ ID NO: 519874 - DNA, 120 bp, Artificial Sequence
  ENSG00000165195_35 (sequence is synthesized)
agagtatgacacaagtgtgatcaaggatcagcaaaattaactacccatgcaaagattaaacctgttacctttacttccctaatgtggtattttaactagctgagctaaccaccaatggag

SEQ ID NO: 519875 - DNA, 120 bp, Artificial Sequence
  ENSG00000165195_36 (sequence is synthesized)
tgatggtatggcctttcctgtactcaattcagtaattgaacagttatttatcgaaccctctccagatgccaggcaccctgcagaaagtaacattctgaaaaggaacagccatgcctgtag

SEQ ID NO: 519876 - DNA, 120 bp, Artificial Sequence
  ENSG00000165195_37 (sequence is synthesized)
cccaaaagtgagtagttgtattaatggtccattccttattaacaaattaatttcctcaggagtttattggaccagatatcaaagtcccactggaatgtcttaagtgagagagaggataaa

SEQ ID NO: 519877 - DNA, 120 bp, Artificial Sequence
  ENSG00000165195_38 (sequence is synthesized)
tcaaagttttccttatccaggctttttggatgtctttttcctgagcctcctcttccaagcctgttttgctctcagtcaggatttaccagcactctgcatgtgtaggcacgctcacctgct

SEQ ID NO: 519878 - DNA, 120 bp, Artificial Sequence
  ENSG00000165195_39 (sequence is synthesized)
tccttctgtagtggtaatgacaacctacatttgtattctgcagttgataaagcctgttcgtggtacaatacctcatttgaccctcccaacaactgtagggtagatgttatctacatgaaa

SEQ ID NO: 519879 - DNA, 120 bp, Artificial Sequence
  ENSG00000165195_40 (sequence is synthesized)
ttgagtctcagagagggtaagtaactcacccaggttacacagtaagtaacagagatgacacacgagttcagcttttctggagctaagttctcctcttcctccacccatgcccagccactc

SEQ ID NO: 519880 - DNA, 120 bp, Artificial Sequence
  ENSG00000165195_41 (sequence is synthesized)
atatcctaggtgtagatcagaaggttcttaaaaatattgttagactgagctttaaaagcagtttggatcagagattttcattgtctgttttgtgttcacatggcagtcgaaagtctctag

SEQ ID NO: 519881 - DNA, 120 bp, Artificial Sequence
  ENSG00000165195_42 (sequence is synthesized)
gttccattgcattatacccttcttagaggctccagaataaatttttttatagtggtggggaaaagcccttattcttagaataagaatatagatcattggtaatagtaatcagttccattt

SEQ ID NO: 519882 - DNA, 120 bp, Artificial Sequence
  ENSG00000165195_43 (sequence is synthesized)
cttatgagatacttgtcaggattaaatgacataatgaatttaaagtatattgcctgtcatagcaagcactctgttactgttagctattatcatttatgactattgctctatgttgttttt

SEQ ID NO: 519883 - DNA, 120 bp, Artificial Sequence
  ENSG00000165195_44 (sequence is synthesized)
tgtttgtttgaagaatgggctcttaaccttgtacgagaaagaaaagggtgaggaagaaaatggattgaaggaattgtaggagactaaatgttaaaagtcattaaactaccttctggttta

SEQ ID NO: 519884 - DNA, 120 bp, Artificial Sequence
  ENSG00000165195_45 (sequence is synthesized)
tgcgtaccttaggtgtgttgcttctcctgcatgtaattgatatacatataattgatataaatctaatgcaaggactgttttcaaaatttttatataaataggaaacctagttaattcact

SEQ ID NO: 519885 - DNA, 120 bp, Artificial Sequence
  ENSG00000165195_46 (sequence is synthesized)
attttttccattagcccaatattatttgactttggggggccattgttggaggcaccatgaaaggcacaaaaaacagctgctttaactggaagcgtttgcagatttccaggccatactgtg

SEQ ID NO: 519886 - DNA, 120 bp, Artificial Sequence
  ENSG00000165195_47 (sequence is synthesized)
gaagcattctgcatggcgatcgtggaagcagccagttgtggtttacaggtatatgaccgggtatcagtggaagctgtgttgccaatggacaaacgactggacagacttatttctcactgc

SEQ ID NO: 519887 - DNA, 120 bp, Artificial Sequence
  ENSG00000165197_0 (sequence is synthesized)
aagacacatgcttctgcaagcttccatgaaggttgtgcaaaaaagtttcaatccagagttgggttccagctttctgtagctgtaagcattggtggccacaccacctccttacaaagcaac

SEQ ID NO: 519888 - DNA, 120 bp, Artificial Sequence
  ENSG00000165197_1 (sequence is synthesized)
tagaacctgcggcatacattggagagatttttttaattttctggacatgaagtaaatttagagtgctttctaatttcaggtagaagacatgtccaccttctgattatttttggagaacat

SEQ ID NO: 519889 - DNA, 120 bp, Artificial Sequence
  ENSG00000165197_2 (sequence is synthesized)
tttgatttttttcatctctctctccccacccctaagattgtgcaaaaaaagcgtaccttgcctaattgaaataatttcattggattttgatcagaactgattatttggttttctgtgtga

SEQ ID NO: 519890 - DNA, 120 bp, Artificial Sequence
  ENSG00000165197_3 (sequence is synthesized)
agttttgaggtttcaaactttccttctggagaatgccttttgaaacaattttctctagctgcctgatgtcaactgcttagtaatcagtggatattgaaatattcaaaatgtacagagagt

SEQ ID NO: 519891 - DNA, 120 bp, Artificial Sequence
  ENSG00000165197_4 (sequence is synthesized)
gggtagtggtgaatgttttcatgatgttgtacgtccagctggtgcagggctccagtaatgaacatggaccagtgaagcgatcatctcagtccacattggaacgatctgaacagcagatca

SEQ ID NO: 519892 - DNA, 120 bp, Artificial Sequence
  ENSG00000165197_5 (sequence is synthesized)
gggctgcttctagtttggaggaactacttcgaattactcactctgaggactggaagctgtggagatgcaggctgaggctcaaaagttttaccagtatggactctcgctcagcatcccatc

SEQ ID NO: 519893 - DNA, 120 bp, Artificial Sequence
  ENSG00000165197_6 (sequence is synthesized)
ggtccactaggtttgcggcaactttctatgacattgaaacactaaaagttatagatgaagaatggcaaagaactcagtgcagccctagagaaacgtgcgtggaggtggccagtgagctgg

SEQ ID NO: 519894 - DNA, 120 bp, Artificial Sequence
  ENSG00000165197_7 (sequence is synthesized)
ggaagagtaccaacacattcttcaagcccccttgtgtgaacgtgttccgatgtggtggctgttgcaatgaagagagccttatctgtatgaacaccagcacctcgtacatttccaaacagc

SEQ ID NO: 519895 - DNA, 120 bp, Artificial Sequence
  ENSG00000165197_8 (sequence is synthesized)
gtacctgaattagtgcctgttaaagttgccaatcatacaggttgtaagtgcttgccaacagccccccgccatccatactcaattatcagaagatccatccagatccctgaagaagatcgc

SEQ ID NO: 519896 - DNA, 120 bp, Artificial Sequence
  ENSG00000165197_9 (sequence is synthesized)
tgttcccattccaagaaactctgtcctattgacatgctatgggatagcaacaaatgtaaatgtgttttgcaggaggaaaatccacttgctggaacagaagaccactctcatctccaggaa

SEQ ID NO: 519897 - DNA, 120 bp, Artificial Sequence
  ENSG00000165197_10 (sequence is synthesized)
ccagctctctgtgggccacacatgatgtttgacgaagatcgttgcgagtgtgtctgtaaaacaccatgtcccaaagatctaatccagcaccccaaaaactgcagttgctttgagtgcaaa

SEQ ID NO: 519898 - DNA, 120 bp, Artificial Sequence
  ENSG00000165197_11 (sequence is synthesized)
gaaagtctggagacctgctgccagaagcacaagctatttcacccagacacctgcagctgtgaggacagatgcccctttcataccagaccatgtgcaagtggcaaaacagcatgtgcaaag

SEQ ID NO: 519899 - DNA, 120 bp, Artificial Sequence
  ENSG00000165197_12 (sequence is synthesized)
cattgccgctttccaaaggagaaaagggctgcccaggggccccacagccgaaagaatccttgattcagcgttccaagttccccatccctgtcatttttaacagcatgctgctttgccaag

SEQ ID NO: 519900 - DNA, 120 bp, Artificial Sequence
  ENSG00000165197_13 (sequence is synthesized)
ttgctgtcactgtttttttcccaggtgttaaaaaaaaaatccattttacacagcaccacagtgaatccagaccaaccttccattcacaccagctaaggagtccctggttcattgatggat

SEQ ID NO: 519901 - DNA, 120 bp, Artificial Sequence
  ENSG00000165197_14 (sequence is synthesized)
gtcttctagctgcagatgcctctgcgcaccaaggaatggagaggaggggacccatgtaatccttttgtttagttttgtttttgttttttggtgaatgagaaaggtgtgctggtcatggaa

SEQ ID NO: 519902 - DNA, 120 bp, Artificial Sequence
  ENSG00000165197_15 (sequence is synthesized)
tggcaggtgtcatatgactgattactcagagcagatgaggaaaactgtagtctctgagtcctttgctaatcgcaactcttgtgaattattctgattcttttttatgcagaatttgattcg

SEQ ID NO: 519903 - DNA, 120 bp, Artificial Sequence
  ENSG00000165197_16 (sequence is synthesized)
tatgatcagtactgactttctgattactgtccagcttatagtcttccagtttaatgaactaccatctgatgtttcatatttaagtgtatttaaagaaaataaacaccattattcaagcca

SEQ ID NO: 519904 - DNA, 120 bp, Artificial Sequence
  ENSG00000165197_17 (sequence is synthesized)
gaaggagattgggtgaatccaagttacttacggatgacataaaagatacaatcaactttggtgatccaattgccacactacaactatctgaccaacacgtttctgtttctctttagacca

SEQ ID NO: 519905 - DNA, 120 bp, Artificial Sequence
  ENSG00000165202_0 (sequence is synthesized)
atggacaacagcaactggaccagtgtgtcccattttgttctcttgggcatttccacccacccagaagagcaaatcccactcttccttgttttctcactcatgtacgcaatcaatatttct

SEQ ID NO: 519906 - DNA, 120 bp, Artificial Sequence
  ENSG00000165202_1 (sequence is synthesized)
ggcaacttggccatcatcacactgattctctctgctccacgcctccacatccccatgtacatcttcctcagtaacttggccttgacagacatctgcttcacctccaccacggtccccaag

SEQ ID NO: 519907 - DNA, 120 bp, Artificial Sequence
  ENSG00000165202_2 (sequence is synthesized)
atgctgcagattattttctcccctacaaaggtaatttcctacacaggctgtttagcccaaacttatttcttcatttgcttcgccgtcatggaaaacttcatcctggctgtgatggcctat

SEQ ID NO: 519908 - DNA, 120 bp, Artificial Sequence
  ENSG00000165202_3 (sequence is synthesized)
gccatgctgcatacctttctcataggccaactaatcttctgtgcagataacagaatcccccacttcttctgtgacctctacgctctgatgaagatctcctgcaccagcacctacctcaac

SEQ ID NO: 519909 - DNA, 120 bp, Artificial Sequence
  ENSG00000165202_4 (sequence is synthesized)
acccttatgattcacacagaaggtgctgttgtaatcagtggagctctggccttcattactgcctcctatgcctgcatcatcctggtggtcctccggatcccctcagccaagggcaggtgg

SEQ ID NO: 519910 - DNA, 120 bp, Artificial Sequence
  ENSG00000165202_5 (sequence is synthesized)
aaaaccttttctacctgcggctcccacctcactgtggtggccatattctatggcaccctcagttgggtctacttccggcccctttccagctattcagtgaccaagggtcgcattataaca

SEQ ID NO: 519911 - DNA, 87 bp, Artificial Sequence
  ENSG00000165202_6 (sequence is synthesized)
gtcgtgtacacagtggtgactaatggggatgtcaagggaggcttcatgaaatggatgagcagaatgcagacttttttctttagataa

SEQ ID NO: 519912 - DNA, 120 bp, Artificial Sequence
  ENSG00000165204_0 (sequence is synthesized)
atggaggctgccaatgagtcttcagagggaatctcattcgttttattgggactgacaacaagtcctggacagcagcggcctctctttgtgctgttcttgctcttgtatgtggccagcctc

SEQ ID NO: 519913 - DNA, 120 bp, Artificial Sequence
  ENSG00000165204_1 (sequence is synthesized)
ctgggtaatggactcattgtggctgccatccaggccagtccagcccttcatgcacccatgtacttcctgctggcccacctgtcctttgctgacctctgcttcgcctccgtcactgtgccc

SEQ ID NO: 519914 - DNA, 120 bp, Artificial Sequence
  ENSG00000165204_2 (sequence is synthesized)
aagatgttggccaacttgttggcccatgaccactccatctcgctggctggctgcctgacccaaatgtacttcttctttgccctgggggtaactgatagctgtcttctggcggccatggcc

SEQ ID NO: 519915 - DNA, 120 bp, Artificial Sequence
  ENSG00000165204_3 (sequence is synthesized)
ctcctgtatatcctgctcatggctcgcttgtccttctgtgcttcccaccaagtgccccacttcttctgtgaccaccagcctctcttaaggctctcgtgctctgacacccaccacatccag

SEQ ID NO: 519916 - DNA, 120 bp, Artificial Sequence
  ENSG00000165204_4 (sequence is synthesized)
ctgctcatcttcaccgagggcgccgcagtggtggtcactcccttcctgctcatcctcgcctcctatggggccatcgcagctgccgtgctccagctgccctcagcctctgggaggctccgg

SEQ ID NO: 519917 - DNA, 120 bp, Artificial Sequence
  ENSG00000165204_5 (sequence is synthesized)
gctgtgtccacctgtggctcccacctggctgtggtgagcctcttctatgggacagtcattgcagtctacttccaggccacatcccgacgcgaggcagagtggggccgtgtggccactgtc

SEQ ID NO: 519918 - DNA, 120 bp, Artificial Sequence
  ENSG00000165204_6 (sequence is synthesized)
atgtacactgtagtcacccccatgctgaaccccatcatctacagcctctggaatcgcgatgtacagggggcactccgagcccttctcattgggcgaaggatctcagctagtgactcctga

SEQ ID NO: 519919 - DNA, 80 bp, Artificial Sequence
  ENSG00000165209_0 (sequence is synthesized)
gaagcggagaccggagccgcgagcgccaccagggcagcagccgccgcagccgccgccgctgggcagaggagccggagacg

SEQ ID NO: 519920 - DNA, 120 bp, Artificial Sequence
  ENSG00000165209_1 (sequence is synthesized)
agcgggagcgggtaccgggcgcgggcagagcgcggcggcgcggagacggggttttgccatgttgacctggctggtctcgaactcctgaacgcaagtgatccgcctgcctcagcctcccaa

SEQ ID NO: 519921 - DNA, 120 bp, Artificial Sequence
  ENSG00000165209_2 (sequence is synthesized)
acaggcacgagccactgtgcctggcctcaactgttgcttcttataaaggtgtgttccagagaacaagccttcagacatttgctatattgacgctgagctgtcaggggactcaggcttatg

SEQ ID NO: 519922 - DNA, 120 bp, Artificial Sequence
  ENSG00000165209_3 (sequence is synthesized)
aggaggtattgttacacaaaacagtgtctagtgaagacgacaagaaagaggggaaaggatcggaaaaagaagctaaaatactatagaaaaccatgagatctattcgatcttttgctaatg

SEQ ID NO: 519923 - DNA, 120 bp, Artificial Sequence
  ENSG00000165209_4 (sequence is synthesized)
atgatcgccatgttatggtgaaacattcaacaatctatccatctccggaggaacttgaagctgttcagaatatggtatctactgttgaatgtgctcttaaacatgtctcagattggttgg

SEQ ID NO: 519924 - DNA, 120 bp, Artificial Sequence
  ENSG00000165209_5 (sequence is synthesized)
atgaaacaaataaaggcacaaaaacagagggtgagacagaagtgaagaaagatgaggccggagaaaactattccaaggatcaaggtggtcggacattgtgtggtgtaatgaggattggcc

SEQ ID NO: 519925 - DNA, 120 bp, Artificial Sequence
  ENSG00000165209_6 (sequence is synthesized)
tggttgcaaaaggcttgctgattaaagatgatatggacttggagctggttttaatgtgcaaagacaaacccacagagaccctgttaaatacagtcaaagataatcttcctattcagattc

SEQ ID NO: 519926 - DNA, 120 bp, Artificial Sequence
  ENSG00000165209_7 (sequence is synthesized)
agaaactcacagaagagaaatatcaagtggaacaatgtgtaaatgaggcatctattataattcggaatacaaaagagcccacgctaactttgaaggtgatacttacctcacctctaatta

SEQ ID NO: 519927 - DNA, 120 bp, Artificial Sequence
  ENSG00000165209_8 (sequence is synthesized)
gggacgaattggagaagaaggatggagaaaatgtttcgatgaaagatcctccggacttattggacaggcagaaatgcctgaacgccttggcgtctcttcgacatgccaaatggtttcagg

SEQ ID NO: 519928 - DNA, 120 bp, Artificial Sequence
  ENSG00000165209_9 (sequence is synthesized)
caagggcaaatggattaaaatcatgtgtaattgtcctccgcattctgcgtgatttgtgcaacagagtccccacatgggcaccattgaaaggatggccactagaacttatatgtgaaaagt

SEQ ID NO: 519929 - DNA, 120 bp, Artificial Sequence
  ENSG00000165209_10 (sequence is synthesized)
ctataggtacttgtaatagacctttgggcgctggggaggccttgagacgagtaatggagtgtttggcatctggaatactacttcctgggggtcctggtcttcatgatccttgtgagcgag

SEQ ID NO: 519930 - DNA, 120 bp, Artificial Sequence
  ENSG00000165209_11 (sequence is synthesized)
acccaacagatgctctgagctatatgaccatccagcaaaaagaagatattacccacagtgcacagcatgcactcagactatcagcctttggccagatttacaaagtgctggagatggacc

SEQ ID NO: 519931 - DNA, 120 bp, Artificial Sequence
  ENSG00000165209_12 (sequence is synthesized)
cccttccatctagtaagccttttcagaagtattcctggtcagttactgataaagaaggtgctgggtcttcagctctaaagaggccatttgaagatggattaggggatgataaagacccca

SEQ ID NO: 519932 - DNA, 120 bp, Artificial Sequence
  ENSG00000165209_13 (sequence is synthesized)
acaagaagatgaaacgaaacttaaggaaaattctggatagtaaagcaatagaccttatgaatgcactaatgaggctaaatcagatcaggcctgggcttcagtataagctcctatctcagt

SEQ ID NO: 519933 - DNA, 120 bp, Artificial Sequence
  ENSG00000165209_14 (sequence is synthesized)
ctggccccgttcatgccccagtcttcacaatgtctgtagatgtggatggcacaacatatgaagcctcaggaccatccaagaaaacagcaaaacttcacgtagcggtgaaggtattgcagg

SEQ ID NO: 519934 - DNA, 120 bp, Artificial Sequence
  ENSG00000165209_15 (sequence is synthesized)
caatgggatatccaacaggctttgatgcagatattgaatgtatgagttccgatgaaaaatcagataatgaaagtaaaaatgaaacagtgtcttcaaactcaagcaataatactggaaatt

SEQ ID NO: 519935 - DNA, 120 bp, Artificial Sequence
  ENSG00000165209_16 (sequence is synthesized)
ctacaactgaaacctccagtaccttagaggtaagaactcagggccctatcctcacagcaagtggcaaaaaccctgtaatggagctcaatgaaaaaagaagaggtctcaagtatgaactca

SEQ ID NO: 519936 - DNA, 120 bp, Artificial Sequence
  ENSG00000165209_17 (sequence is synthesized)
tctcagagactggtggaagccatgacaagcgctttgtaatggaggtagaagtagatggacagaaattcagaggcgcaggtccaaataagaaagtggcaaaggcgagtgcagctttagctg

SEQ ID NO: 519937 - DNA, 120 bp, Artificial Sequence
  ENSG00000165209_18 (sequence is synthesized)
ccttggagaaactgttttctggacccaatgcggcaaataataagaaaaagaagattatccctcaggcaaagggcgttgtgaatacagctgtgtctgcagcagtccaagctgttcggggca

SEQ ID NO: 519938 - DNA, 120 bp, Artificial Sequence
  ENSG00000165209_19 (sequence is synthesized)
gaggaagaggaactctaacaaggggagcttttgttggggcgacagctgctcctggctacatagctccaggctatggaacaccatatggttacagcacagctgcccctgcctatggtttac

SEQ ID NO: 519939 - DNA, 120 bp, Artificial Sequence
  ENSG00000165209_20 (sequence is synthesized)
ccaagagaatggttctgttacccgttatgaaatttccaacatatcctgttccccactactcattcttttagcaaatgacagaagctaattcctattgaacaacaatacagtacaacacag

SEQ ID NO: 519940 - DNA, 120 bp, Artificial Sequence
  ENSG00000165209_21 (sequence is synthesized)
aatgttagagaaaaagcctttttatcctgctttctttgaacacatacttgatcaaaattatttgtaaagaacatctttcctactttttgattttaacaaatgcaaatttagttctctaaa

SEQ ID NO: 519941 - DNA, 120 bp, Artificial Sequence
  ENSG00000165209_22 (sequence is synthesized)
acttgaaaaaaaaaaaagaaaccagttctgtgaaaacggtacctcatttctggaaaataacttataccagcccttctgttctagggaaataaaagtctagcagttcaaagtttaagtttt

SEQ ID NO: 519942 - DNA, 120 bp, Artificial Sequence
  ENSG00000165209_23 (sequence is synthesized)
aagagacgtatcagattatgtaaaattaaatttgtgaaggatgtatagagtctcaaacactgatcacaaataaactgctttgttgtaacacagagtactgcctggttcctgatgcagtca

SEQ ID NO: 519943 - DNA, 120 bp, Artificial Sequence
  ENSG00000165209_24 (sequence is synthesized)
ctgattcttagttgattgatatgtatttgccccagggcactttaatttgggctgtagttattttttttaatacaatagagacttttcatttaactttaactttgtaaatattgaagtgtg

SEQ ID NO: 519944 - DNA, 120 bp, Artificial Sequence
  ENSG00000165209_25 (sequence is synthesized)
taataaagccaataaaatatgggtttgaatattgttttagcttattatttttgatatgttttggtatcaaattacaaggaattgaaaactaataacttagccctagaagcccattcactt

SEQ ID NO: 519945 - DNA, 120 bp, Artificial Sequence
  ENSG00000165209_26 (sequence is synthesized)
gccatccccatgataaaggttccattctgttatttgagcattgcttattaaaatgatggcactacccagagatggggaaggagaatgtgattatcctagtttatgaatttccaagttttt

SEQ ID NO: 519946 - DNA, 120 bp, Artificial Sequence
  ENSG00000165209_27 (sequence is synthesized)
aaaaataataaattaatcaatcaatcaccctctcttgttcttgtggccttcttcactctgtaagatattgtgttcactccctggcttttttcatgcagatagaagattagtgattttgct

SEQ ID NO: 519947 - DNA, 120 bp, Artificial Sequence
  ENSG00000165209_28 (sequence is synthesized)
gggattcattgaagggtctcctttcctcttcaattacatcagaatctaaagcagcaacagggtccccataaaaacttgctcttcgattgtcccagttcttgttgagtgctgctgtgaaaa

SEQ ID NO: 519948 - DNA, 120 bp, Artificial Sequence
  ENSG00000165209_29 (sequence is synthesized)
gtgacaggtttcagccatgggtcagcatttctttttaagacacctgatgatgctggtggaaatggatcagtgggtaacattgtgctgttctgtaaagggtgcagacctaagtcctccact

SEQ ID NO: 519949 - DNA, 120 bp, Artificial Sequence
  ENSG00000165209_30 (sequence is synthesized)
tgcattctcaccttgtttggaaagccaatgatgttactaggtcaatggtttcattaaggtactcacccccatgaaggagcagcagtgtggtcccctgtcaatatttataaggcaccatgt

SEQ ID NO: 519950 - DNA, 120 bp, Artificial Sequence
  ENSG00000165209_31 (sequence is synthesized)
cttaaaaatgtctgtttttagtatgaattagctttcattttccctattcagttctgcttttgggaacttgacagggcccatccatgagaatgggcttcacaaaatatggcaaatgtatgt

SEQ ID NO: 519951 - DNA, 120 bp, Artificial Sequence
  ENSG00000165209_32 (sequence is synthesized)
accaaattccttcgggaccactaaataaaggtgaaatgggcaatgtacaacaaatgttagtgtcacttctcagatatatattacacaatgattagtttgtttcttctccttggtcttttg

SEQ ID NO: 519952 - DNA, 120 bp, Artificial Sequence
  ENSG00000165209_33 (sequence is synthesized)
tctttattagtggtgggtgatactttaataaaacctcatcacttgctggaaatagctgtaacttatcattctcatcctgtgcattagtggctagacataaacaagagggcccatttcagc

SEQ ID NO: 519953 - DNA, 120 bp, Artificial Sequence
  ENSG00000165209_34 (sequence is synthesized)
tgggagttttcatgtttcattgatgcgttttgctgacctatggatgaaacagagccatcactgagaagaaaaagcatggctgatagtgtccagtttttattaattaaatctttacagtag

SEQ ID NO: 519954 - DNA, 120 bp, Artificial Sequence
  ENSG00000165209_35 (sequence is synthesized)
tcctcattgtctttggaatactattaattggcagctgcggctgtattgttatttgaaattggtcatcaaatttggattccacgttggaatctctagatatttctcgttagaaaattcttt

SEQ ID NO: 519955 - DNA, 120 bp, Artificial Sequence
  ENSG00000165209_36 (sequence is synthesized)
tgaagtagctgactctgcttcataactcacgcgctctgtaatggtgaaaagggagctgtgctgttttccaacatgatggcagtcatttcaaatggtttctaccaagtctttttttttttt

SEQ ID NO: 519956 - DNA, 120 bp, Artificial Sequence
  ENSG00000165209_37 (sequence is synthesized)
ttttaattttgttgtttgttggaagttactaaccatgttgtaaacctgcccagttgctgcaaacttttacatttctctgctttacttaaaataatcgagctgtcagtcctttgttagaag

SEQ ID NO: 519957 - DNA, 120 bp, Artificial Sequence
  ENSG00000165209_38 (sequence is synthesized)
tggtaaccatgcaagttcaactgtttaaattctgtaatgaattaagtgtccccccacctgttgcccttcccacccttccattttgtaatgaaaattccacttacagctgaaagagcagag

SEQ ID NO: 519958 - DNA, 120 bp, Artificial Sequence
  ENSG00000165209_39 (sequence is synthesized)
aaatataaatgaagctcttggcttcaccaaattgcctgagattaacatgaagttttgcttctctgctcttttctccactgtaggtggttttttcattgacagcccctattgccagcctct

SEQ ID NO: 519959 - DNA, 120 bp, Artificial Sequence
  ENSG00000165209_40 (sequence is synthesized)
gagcgtcgcaccatttattattcacttgggccctcaagatttcttctctgacttctagaaccatcaggttgtctggcttgaaatggcaatttctatgtcttggtcttaagagcaatgtga

SEQ ID NO: 519960 - DNA, 120 bp, Artificial Sequence
  ENSG00000165209_41 (sequence is synthesized)
caccctgaggctatccagctttcagacactccactctgacaccctctttttgaaagcaatgactgatcattttaaagaagagcaatactttgttcaaagccacggtgtctgttttaaaac

SEQ ID NO: 519961 - DNA, 120 bp, Artificial Sequence
  ENSG00000165209_42 (sequence is synthesized)
ttttcctttggaaacctagcaatatctgtacttaacccctttttagcatagtttcttgtcagggagtttacaggtcagtgtagagcttaaaattagcgtgtgagctgtgctatgttctga

SEQ ID NO: 519962 - DNA, 120 bp, Artificial Sequence
  ENSG00000165209_43 (sequence is synthesized)
cagttttttacactttttagcacataaatagttacattcctgactgcgtcagttagcgttactataatttctcagagataggggtcctccttgaagccatatcctctgcacggggactgg

SEQ ID NO: 519963 - DNA, 120 bp, Artificial Sequence
  ENSG00000165209_44 (sequence is synthesized)
cccctagccagggatgtggcttgcagcttgtgtttcttcaggctgcaggagtaccccatctcttgtgcaaggtaattggtccagtagatttccaacatacctcatgctgactagatgaag

SEQ ID NO: 519964 - DNA, 120 bp, Artificial Sequence
  ENSG00000165209_45 (sequence is synthesized)
tgcatgggtggtgaagtaaggagttgagtttatatagttctgaagtcgtttgtagtctctctcaaattgttagcctggggaacaaaccactgagagattttgctggtattggccttttct

SEQ ID NO: 519965 - DNA, 120 bp, Artificial Sequence
  ENSG00000165209_46 (sequence is synthesized)
ttttttttttttttttaattttgggtgaatgtttgaaaatcatgaatcagccaccattattaattgaagagctgggaatacctcgttaatgtatttttaaaactggtgttggaccctctg

SEQ ID NO: 519966 - DNA, 120 bp, Artificial Sequence
  ENSG00000165209_47 (sequence is synthesized)
tgtatttcaggttaatacttttaagcagttttcagcacgtttatctcactttattctcgttctcctcggaccttcgtagccatatcacttgtataaaataggctgagatatagtgactgt

SEQ ID NO: 519967 - DNA, 120 bp, Artificial Sequence
  ENSG00000165209_48 (sequence is synthesized)
aagctgtgatctcagtatacaaaggtaagctcttttattttctgattaaagagaaaaatagtcaattaagacaacatgcatatatgacaatcatatatgatgtatttgatctcttaggtc

SEQ ID NO: 519968 - DNA, 120 bp, Artificial Sequence
  ENSG00000165209_49 (sequence is synthesized)
atatgtcatcgcattacctttaaaaattgtatggtctaaatgtaaaatagttatttttcaacatttgttttaatacccttgtaactgctttttactcaagacagacatttcacttacact

SEQ ID NO: 519969 - DNA, 120 bp, Artificial Sequence
  ENSG00000165209_50 (sequence is synthesized)
gtgtgtgtgtgtgtgtgtgtgtgtagaaacttaggatataacacgtatgtaaattacacacacatacctgtttaaatgtaagaattcagtgataggaacagttcatctaagaagatttta

SEQ ID NO: 519970 - DNA, 120 bp, Artificial Sequence
  ENSG00000165209_51 (sequence is synthesized)
tttaatgacagggcactcttttggccaaagcagtggaatttcctaagcagcaaggttggtaatagtgctggtaggatctgtatgtgtaagctgttacacaagctgaggatcaaagtgcca

SEQ ID NO: 519971 - DNA, 120 bp, Artificial Sequence
  ENSG00000165209_52 (sequence is synthesized)
atttctcaaggagaaaaacttctccgagaaatgaaagtctctgatctgtgttgtatgccctaatacaacaacagcaagaagccatagaaaaaagcaatagaaaatgaaaaaaaaaaaaaa

SEQ ID NO: 519972 - DNA, 120 bp, Artificial Sequence
  ENSG00000165209_53 (sequence is synthesized)
tcgggtggtgaatatcgagtctgcagagaccaaatagacttaaagcaatccatctgtcttttccaggttaggtagctagattatttatttcccaccttattcaaccatcatggagttcat

SEQ ID NO: 519973 - DNA, 120 bp, Artificial Sequence
  ENSG00000165209_54 (sequence is synthesized)
gtaaagatgtgagggttaggcagacattttaataaagatttgcttcatttaggtgtgtcccataaatgcatttaattgtgttagatgttgtgtgctaaggctgtatttgatatatgtaga

SEQ ID NO: 519974 - DNA, 120 bp, Artificial Sequence
  ENSG00000165209_55 (sequence is synthesized)
tgactgtaagctgtgatctcagtatacaaagcgtgactgaagcagcagcctgcacatgtggatggtcatcagtgcctcgcccagagatacctggccttcatccaaagggaccctgctgcc

SEQ ID NO: 519975 - DNA, 120 bp, Artificial Sequence
  ENSG00000165209_56 (sequence is synthesized)
gtatgttggactctgccatagactgaccctcttgtctggctgctgcagtttgtctgtaatgccctgacatgttgcattctccccatttggataaataaaaacaaacaaatgcttctgtca

SEQ ID NO: 519976 - DNA, 120 bp, Artificial Sequence
  ENSG00000165209_57 (sequence is synthesized)
caggtatgagccactgtgactggccgcaggtggtctgattctagtcctggctctgtcgcagactagctgcttgatctcaggaaatgtctctatttctagattgtcttcaatgttcttatc

SEQ ID NO: 519977 - DNA, 120 bp, Artificial Sequence
  ENSG00000165209_58 (sequence is synthesized)
ggtgaaagacaattatgggaagccagtggggcaatttgagctaaaatacacctcccgcgatgacagacgcagccttgagagagcagctgaggtgcgacatgagctccctgtaaccagcat

SEQ ID NO: 519978 - DNA, 120 bp, Artificial Sequence
  ENSG00000165209_59 (sequence is synthesized)
cctcaggtatgagtaaacattaaacctttgcagaacctgtgaaaaatgttagaggaattaaattttctttcctgtccatgtggcactttagctttttctgaagttgtttccttttcttgg

SEQ ID NO: 519979 - DNA, 120 bp, Artificial Sequence
  ENSG00000165209_60 (sequence is synthesized)
acttggtgacctttgctttgggttaggtcacgaataatataaatttgattagtggtttcatgttctatggactttctaaacaaaatatatatgtacatgtatatttatatttatatgtat

SEQ ID NO: 519980 - DNA, 120 bp, Artificial Sequence
  ENSG00000165215_0 (sequence is synthesized)
agcccagtcgccgccgcccgcccacaaagccacaggcaggtgcaggcgcagccgcggcgagagcgtatggagccgagccgttagcgcgcgccgtcggtgagtcagtccgtccgtccgtcc

SEQ ID NO: 519981 - DNA, 120 bp, Artificial Sequence
  ENSG00000165215_1 (sequence is synthesized)
ccggcccctcgtctccccgcacccggagccacccggtggagcgggccttgccgcggcagccatgtccatgggcctggagatcacgggcaccgcgctggccgtgctgggctggctgggcac

SEQ ID NO: 519982 - DNA, 120 bp, Artificial Sequence
  ENSG00000165215_2 (sequence is synthesized)
tcacgggcaccgcgctggccgtgctgggctggctgggcaccatcgtgtgctgcgcgttgcccatgtggcgcgtgtcggccttcatcggcagcaacatcatcacgtcgcagaacatctggg

SEQ ID NO: 519983 - DNA, 120 bp, Artificial Sequence
  ENSG00000165215_3 (sequence is synthesized)
agggcctgtggatgaactgcgtggtgcagagcaccggccagatgcagtgcaaggtgtacgactcgctgctggcactgccacaggaccttcaggcggcccgcgccctcatcgtggtggcca

SEQ ID NO: 519984 - DNA, 120 bp, Artificial Sequence
  ENSG00000165215_4 (sequence is synthesized)
tcctgctggccgccttcgggctgctagtggcgctggtgggcgcccagtgcaccaactgcgtgcaggacgacacggccaaggccaagatcaccatcgtggcaggcgtgctgttccttctcg

SEQ ID NO: 519985 - DNA, 120 bp, Artificial Sequence
  ENSG00000165215_5 (sequence is synthesized)
cccgaggcgcagaagcgcgagatgggcgcgggcctgtacgtgggctgggcggccgcggcgctgcagctgctggggggcgcgctgctctgctgctcgtgtcccccacgcgagaagaagtac

SEQ ID NO: 519986 - DNA, 120 bp, Artificial Sequence
  ENSG00000165215_6 (sequence is synthesized)
acggccaccaaggtcgtctactccgcgccgcgctccaccggcccgggagccagcctgggcacaggctacgaccgcaaggactacgtctaagggacagacgcagggagaccccaccaccac

SEQ ID NO: 519987 - DNA, 120 bp, Artificial Sequence
  ENSG00000165215_7 (sequence is synthesized)
caccaccaccaacaccaccaccaccaccgcgagctggagcgcgcaccaggccatccagcgtgcagccttgcctcggaggccagcccacccccagaagccaggaagcccccgcgctggact

SEQ ID NO: 519988 - DNA, 120 bp, Artificial Sequence
  ENSG00000165215_8 (sequence is synthesized)
ggggcagcttccccagcagccacggctttgcgggccgggcagtcgacttcggggcccagggaccaacctgcatggactgtgaaacctcacccttctggagcacggggcctgggtgaccgc

SEQ ID NO: 519989 - DNA, 120 bp, Artificial Sequence
  ENSG00000165215_9 (sequence is synthesized)
caatacttgaccaccccgtcgagccccatcgggccgctgcccccatgctcgcgctgggcagggaccggcagccctggaaggggcacttgatatttttcaataaaagcctttcgttttgca

SEQ ID NO: 519990 - DNA, 120 bp, Artificial Sequence
  ENSG00000165219_0 (sequence is synthesized)
gcagggaagccaacaggcgagtggcgaaggtggcggcagcggcggcgggggcagtcaccggctagggcgacggctccgaggccgagtggcggtccgacagagtcctccgtgtcctccccc

SEQ ID NO: 519991 - DNA, 120 bp, Artificial Sequence
  ENSG00000165219_1 (sequence is synthesized)
gcggtccgacagagtcctccgtgtcctcccccgcatgacccccttggggtaagtgtactggagagagttggttatacattctaggaatctcaaagggtctggctctgtcacccaggctgg

SEQ ID NO: 519992 - DNA, 120 bp, Artificial Sequence
  ENSG00000165219_2 (sequence is synthesized)
ctccgcctcccgggttcaagcgatcctcccatctgaccctcccaagtagctggcattcagtgatcagcctttgagcctttcccacattgaagatggtgaaactagatattcatactctgg

SEQ ID NO: 519993 - DNA, 120 bp, Artificial Sequence
  ENSG00000165219_3 (sequence is synthesized)
ctcatcacctcaagcaggaacgcttatatgtaaactctgagaaacagctcattcagaggctcaatgcagatgtacttaagacagctgaaaagttgtatcgtacagcatggattgcgaagc

SEQ ID NO: 519994 - DNA, 120 bp, Artificial Sequence
  ENSG00000165219_4 (sequence is synthesized)
aacagagaatcaatttggatcggcttatcataaccagtgctgaagcttcccctgctgaatgttgccaacatgccaaaattttggaagatacacaatttgttgatgggtataagcaattgg

SEQ ID NO: 519995 - DNA, 120 bp, Artificial Sequence
  ENSG00000165219_5 (sequence is synthesized)
gatttcaggagactgcttatggagaattcttgagtcgattgagggaaaatcctcgtcttattgcctcctctttggttgctggagagaaacttaatcaggagaacacacaaagtgttattt

SEQ ID NO: 519996 - DNA, 120 bp, Artificial Sequence
  ENSG00000165219_6 (sequence is synthesized)
acacagtttttacctccctgtatggcaattgcatcatgcaagaagatgaaagctacctccttcaggttttgcgatacttgattgaatttgaacttaaagaaagtgacaaccctaggcgac

SEQ ID NO: 519997 - DNA, 120 bp, Artificial Sequence
  ENSG00000165219_7 (sequence is synthesized)
ttttgaggagaggaacttgtgccttcagcatcttatttaaacttttttctgaaggactgttttctgccaaacttttcctcacagccactttacatgagccaattatgcaactgcttgttg

SEQ ID NO: 519998 - DNA, 120 bp, Artificial Sequence
  ENSG00000165219_8 (sequence is synthesized)
aagatgaagatcacctggaaacagatccaaacaagctaattgagaggttctctccatctcagcaggaaaaactctttggagagaagggctcagatagattcaggcaaaaagttcaagaaa

SEQ ID NO: 519999 - DNA, 120 bp, Artificial Sequence
  ENSG00000165219_9 (sequence is synthesized)
tggtggagtccaatgaagcaaagctagtggctttggtgaacaaatttattggttatctcaaacagaacacatattgttttccacatagtttaaggtggatcgtgtctcagatgtacaaaa

SEQ ID NO: 520000 - DNA, 120 bp, Artificial Sequence
  ENSG00000165219_10 (sequence is synthesized)
ccctctcctgtgtagataggctggaagttggggaggtcagggcaatgtgtactgatctcctgttggcctgcttcatttgtcctgcagttgtcaatccagaacaatatggaataatttccg

SEQ ID NO: 520001 - DNA, 120 bp, Artificial Sequence
  ENSG00000165219_11 (sequence is synthesized)
atgctcctattaatgaagtagcacgatttaatctgatgcaggtaggccgccttttgcagcagttagcaatgactggctctgaagagggagatccccgaacaaagagcagccttggaaagt

SEQ ID NO: 520002 - DNA, 120 bp, Artificial Sequence
  ENSG00000165219_12 (sequence is synthesized)
ttgacaaaagctgtgttgccgctttccttgatgttgtgattgggggccgtgcagtggagacccctccattgtcttccgtcaatcttctggaaggattgagcagaactgtggtttatataa

SEQ ID NO: 520003 - DNA, 120 bp, Artificial Sequence
  ENSG00000165219_13 (sequence is synthesized)
cctacagtcagcttattactctggtgaattttatgaagagtgtgatgtctggagatcaactgagagaagatagaatggctcttgacaatttattggcaaacctacccccggccaagccag

SEQ ID NO: 520004 - DNA, 120 bp, Artificial Sequence
  ENSG00000165219_14 (sequence is synthesized)
gaaaaagtagcagtttagaaatgactccctacaatacacctcagctatctccagcaaccactccagcaaataaaaagaatcgattacctatagcaactcggagcagaagccgcaccaata

SEQ ID NO: 520005 - DNA, 120 bp, Artificial Sequence
  ENSG00000165219_15 (sequence is synthesized)
tgctaatggacctacatatggaccatgaaggatcatctcaagaaaccattcaggaggtgcaaccagaagaggtgttggtcatttccttaggtacaggtccccagcttactccagggatga

SEQ ID NO: 520006 - DNA, 120 bp, Artificial Sequence
  ENSG00000165219_16 (sequence is synthesized)
tgtcagaaaatgaggtcctaaacatgcagctttcggatggaggacaaggagatgtccctgttgatgaaaacaaactccatggtaaacctgataaaaccttgcgcttttccctctgcagtg

SEQ ID NO: 520007 - DNA, 120 bp, Artificial Sequence
  ENSG00000165219_17 (sequence is synthesized)
ataatctggaaggaatatctgaaggtccttcaaatcgctccaattcagtgtcctccctagacctagaaggagagtctgtgtcagaacttggagcaggaccttctggcagtaatggagttg

SEQ ID NO: 520008 - DNA, 120 bp, Artificial Sequence
  ENSG00000165219_18 (sequence is synthesized)
aagctctacagctgttagaacatgagcaagctacaacacaggataaccttgatgataagctaaggaagtttgaaattcgtgacatgatgggattaacagatgatagggacatatcagaaa

SEQ ID NO: 520009 - DNA, 120 bp, Artificial Sequence
  ENSG00000165219_19 (sequence is synthesized)
cagtgagtgagacctggagtacagacgtcttgggaagtgactttgaccctaatattgatgaagatcgcttgcaagaaattgcaggtgctgcagcagagaacatgttaggcagtttgctgt

SEQ ID NO: 520010 - DNA, 120 bp, Artificial Sequence
  ENSG00000165219_20 (sequence is synthesized)
gcctcccaggttcagggtcagtgcttcttgacccctgcactggttctaccatatcagagacaacaagtgaagcttggagtgtagaggtattgccaagtgactcagaggccccagacctaa

SEQ ID NO: 520011 - DNA, 120 bp, Artificial Sequence
  ENSG00000165219_21 (sequence is synthesized)
agcaggaggagcgtctgcaagaactggagagctgttctggactgggtagcacatctgatgatacggatgtcagggaggtcagttcccgccccagcacaccaggcctcagtgttgtgtccg

SEQ ID NO: 520012 - DNA, 120 bp, Artificial Sequence
  ENSG00000165219_22 (sequence is synthesized)
gcataagtgcaacctctgaggatattcccaataagattgaagacctgagatctgagtgcagctctgattttgggggtaaagattctgtcactagtccagacatggatgaaataactcacg

SEQ ID NO: 520013 - DNA, 120 bp, Artificial Sequence
  ENSG00000165219_23 (sequence is synthesized)
gtgcccaccagctgacctctcctccttctcagtcagagtctctgctggccatgtttgatccactgtcttcacatgaaggggcttctgctgtggtaaggccaaaggttcactatgctaggc

SEQ ID NO: 520014 - DNA, 120 bp, Artificial Sequence
  ENSG00000165219_24 (sequence is synthesized)
catcgcatccaccaccagatcccccaatcctggaaggagctgtgggaggaaatgaggccaggttgccaaactttggttcccatgttttaactccagctgaaatggaggcattcaagcaaa

SEQ ID NO: 520015 - DNA, 120 bp, Artificial Sequence
  ENSG00000165219_25 (sequence is synthesized)
ggcattcttaccctgagagactagttcgaagcaggagctctgatatagtatcttctgtccggagacccatgagtgaccccagctggaaccggcgtccaggaaatgaagagcgagaactcc

SEQ ID NO: 520016 - DNA, 120 bp, Artificial Sequence
  ENSG00000165219_26 (sequence is synthesized)
ctccagctgcagccattggtgctacttctttggtggctgcacctcattcatcatcttcatccccgagtaaggactcctcaagaggagagactgaagaacgcaaagatagcgatgatgaga

SEQ ID NO: 520017 - DNA, 120 bp, Artificial Sequence
  ENSG00000165219_27 (sequence is synthesized)
aatcagacaggaacagaccttggtggagaaaacgttttgtttcagccatgcctaaagctcctataccatttagaaagaaagaaaaacaagaaaaagacaaagatgatctggggcctgaca

SEQ ID NO: 520018 - DNA, 120 bp, Artificial Sequence
  ENSG00000165219_28 (sequence is synthesized)
gattctcaacactcacagatgatcccagccctagactcagtgcacaagctcaggtggctgaggatattctggacaaatacaggaatgccattaaacggaccagccccagtgatggagcaa

SEQ ID NO: 520019 - DNA, 120 bp, Artificial Sequence
  ENSG00000165219_29 (sequence is synthesized)
tggcaaactatgaaagtacagaggttatgggtgatggtgaaagtgcacatgattctccccgtgacgaagcactgcagaacatctcggctgatgatctcccagactctgcaagccaagcag

SEQ ID NO: 520020 - DNA, 120 bp, Artificial Sequence
  ENSG00000165219_30 (sequence is synthesized)
cccacccgcaggattcagctttctcttacagagatgcaaaaaagaaactgaggcttgctctttgctctgcggactctgttgccttcccagtgctgacccattcaacaaggaatggtttac

SEQ ID NO: 520021 - DNA, 120 bp, Artificial Sequence
  ENSG00000165219_31 (sequence is synthesized)
cagaccacacagacccagaagacaatgaaattgtatgcttcttaaaagttcaaatagctgaagcaattaatttacaagataagaatctaatggctcaacttcaagaaacaatgcgctgtg

SEQ ID NO: 520022 - DNA, 120 bp, Artificial Sequence
  ENSG00000165219_32 (sequence is synthesized)
tgtgccgttttgataataggacttgtaggaaactgctggcttcgattgctgaggactacagaaaaagagccccatatattgcttatctcactcgttgtcgacaaggactacagaccacac

SEQ ID NO: 520023 - DNA, 120 bp, Artificial Sequence
  ENSG00000165219_33 (sequence is synthesized)
aggctcacctggaaaggctattgcaaagagttttgcgggacaaagaagtggccaatcgatactttaccactgtctgtgtgagattactgcttgagagcaaagaaaagaagatcagggaat

SEQ ID NO: 520024 - DNA, 120 bp, Artificial Sequence
  ENSG00000165219_34 (sequence is synthesized)
tcattcaagactttcagaaactcaccgcagctgacgataaaactgctcaggtagaagattttctgcagtttctttatggtgcaatggcccaggatgtcatatggcaaaacgcgagtgaag

SEQ ID NO: 520025 - DNA, 120 bp, Artificial Sequence
  ENSG00000165219_35 (sequence is synthesized)
aacagcttcaagatgcacagctggccattgagcgaagcgtgatgaaccggattttcaagctcgccttctaccctaatcaagatggggacatacttcgcgaccaggttcttcatgaacata

SEQ ID NO: 520026 - DNA, 120 bp, Artificial Sequence
  ENSG00000165219_36 (sequence is synthesized)
tccagagattgtctaaagtagtgactgcaaatcacagagctcttcagataccagaggtttatcttcgagaagcaccatggccatctgcacaatcagaaatcaggacaataagtgcttata

SEQ ID NO: 520027 - DNA, 120 bp, Artificial Sequence
  ENSG00000165219_37 (sequence is synthesized)
aaaccccccgggacaaagtgcagtgcatcctgagaatgtgctctacgattatgaacctcctgagcctggccaatgaggactctgtccctggagcggatgactttgttcctgtgttggtgt

SEQ ID NO: 520028 - DNA, 120 bp, Artificial Sequence
  ENSG00000165219_38 (sequence is synthesized)
agcttttatgctagctgtctgtctggagaggagtcctattggtggatgcagttcacagcagcagtagaattcattaaaaccatcgatgaccgaaagtgaccaagaccaaggcccaccaag

SEQ ID NO: 520029 - DNA, 120 bp, Artificial Sequence
  ENSG00000165219_39 (sequence is synthesized)
gcagcagactgttaatcagacaaacagatctctgagaaggtgcatcagctgctttgaaggctgaagattgttttgtatgatactgcacagcatcaggcattttaaagcagatctttacta

SEQ ID NO: 520030 - DNA, 120 bp, Artificial Sequence
  ENSG00000165219_40 (sequence is synthesized)
aacaggttaatgagctaacaagcaggttctctcgtctttgggctctttcctttctgagttgcatattctattttcttgtccccaagtagagactagtactacaaaaagggaccacatttt

SEQ ID NO: 520031 - DNA, 120 bp, Artificial Sequence
  ENSG00000165219_41 (sequence is synthesized)
tcaagtatttctaagtataaaaaacaaaacaaaaatctcttaggaaatgtctagacctccattcttggattccctttctttccttttattttaaaaaagaacagtacccctcttttaaga

SEQ ID NO: 520032 - DNA, 120 bp, Artificial Sequence
  ENSG00000165219_42 (sequence is synthesized)
tgctgtcttacattaatgagcatctaatggaaagaaggtatgagttgcactgaggattagaatagtggtgcgttagtggcattatctataaatacactcacctaaattgaaagctaagaa

SEQ ID NO: 520033 - DNA, 120 bp, Artificial Sequence
  ENSG00000165219_43 (sequence is synthesized)
ggaaatgtaaatataatatatatttatatttgatgtaatatggacatctgcagattctaataaacaaggactattgctgatagtaggctgtgacatactgtcttgtgaaatggtttcctt

SEQ ID NO: 520034 - DNA, 120 bp, Artificial Sequence
  ENSG00000165219_44 (sequence is synthesized)
gacaaaatttaagctgagcttaaaagcaaaaaacaaaaagtacacagaaatatttattaaaatgtaatacagtttattgaactttctaggtatggagtttgatggacagggctgccttta

SEQ ID NO: 520035 - DNA, 120 bp, Artificial Sequence
  ENSG00000165219_45 (sequence is synthesized)
atgagtgtgaaggtcactaagtcacttagacatctcaccgtggaagtttgtgagcctgcattaggagatagactgattaccatacatgacataaaaaggaacagtggatagctcatactt

SEQ ID NO: 520036 - DNA, 120 bp, Artificial Sequence
  ENSG00000165219_46 (sequence is synthesized)
tatggtggttcttctcctccgaaataatatactgcagaaatcccagacagagctccttacaaacctttaattgtaatatatttttgatgattattcacattgaatgcacagaccaagaat

SEQ ID NO: 520037 - DNA, 120 bp, Artificial Sequence
  ENSG00000165219_47 (sequence is synthesized)
tcagtgaatgtcattttttaaaaaactaatttgtattgtctgctctagtgatacaagttttactagtgataaactattttaatcaaccatactattcttatggaaaaaaatatctatttt

SEQ ID NO: 520038 - DNA, 120 bp, Artificial Sequence
  ENSG00000165219_48 (sequence is synthesized)
ggcaggtttctgtgcctttatttccctcttctgaaaaaaagtctgtgttttcatagtttggtttgcattgtatatcaataattaatcaggaatgggttttggtgcctgaaaaattggcca

SEQ ID NO: 520039 - DNA, 120 bp, Artificial Sequence
  ENSG00000165219_49 (sequence is synthesized)
tggaggcacaccaaagcttcaagcacaagtcttgtacatgggccatcactgtctggtttcacttcgtgtgtttcctaaacacatttagctgcttttttaacaaactcagccccatacttg

SEQ ID NO: 520040 - DNA, 120 bp, Artificial Sequence
  ENSG00000165219_50 (sequence is synthesized)
agtcccttgttgttgggagcatttccaggcatcttttaagggaactgtgacaaacagcctcgggcagatgaacacggaggctctctgttgtctgtctctgagatctttgtgtctgggaat

SEQ ID NO: 520041 - DNA, 72 bp, Artificial Sequence
  ENSG00000165219_51 (sequence is synthesized)
caacctccacctcccagttcaagtgattcccctgcctcagcctcgcgagtagctaggactacaggcgcatgt

SEQ ID NO: 520042 - DNA, 120 bp, Artificial Sequence
  ENSG00000165219_52 (sequence is synthesized)
cccgccttggcctcccaaagtgcgggattacaagcgtgaaccaccctgcccagccagaaactagattttctttatgcctccaccccttcttattcatttactttacaataccaaaataac

SEQ ID NO: 520043 - DNA, 120 bp, Artificial Sequence
  ENSG00000165219_53 (sequence is synthesized)
caccccttcttattcatttactttacaataccaaaataacaaattgcataggagtgtgggatgtggtttctgccttctagagagagatcagaattaaactagtactatgaaatgtccttt

SEQ ID NO: 520044 - DNA, 120 bp, Artificial Sequence
  ENSG00000165219_54 (sequence is synthesized)
tgaatgttaggtcaagaaatccatgtacagagtcgtgcacttcattggctgtaactgtcaaacttgccttgtattagaagttaaatcccatcgtaaatacatcacgaggccagctgtgtg

SEQ ID NO: 520045 - DNA, 120 bp, Artificial Sequence
  ENSG00000165219_55 (sequence is synthesized)
atttctgagacctagatgagagtccatttacttcagcctttgattcagtaaatgttaagcagcagaagacttcgaatggttgaaattcattgttacaggatttaactcataaaccaatga

SEQ ID NO: 520046 - DNA, 120 bp, Artificial Sequence
  ENSG00000165219_56 (sequence is synthesized)
gagattttttttttctctgcaatggttgctaagtctattccatgttaacactgtggaaataaatatgaagatgtggacattgcatcggggctcttttctgtggaagagaaggtggtggga

SEQ ID NO: 520047 - DNA, 120 bp, Artificial Sequence
  ENSG00000165219_57 (sequence is synthesized)
ttggggtgaagggctacactggaggcaggagatagggctgtgctgtgttggagccggggctgagggtagaccccccagagatttgacatctgtgacacctgtgaaatgggttcgggtgct

SEQ ID NO: 520048 - DNA, 120 bp, Artificial Sequence
  ENSG00000165219_58 (sequence is synthesized)
catgactccatagctggcggaggagcacagcacagctgttgcaggggcagctaaggtttcctctgaaaatctgtcaggagcaaggactactttggcattaaccatcactgtttgatttct

SEQ ID NO: 520049 - DNA, 120 bp, Artificial Sequence
  ENSG00000165219_59 (sequence is synthesized)
tgacaggtatgtgagatggggagtgatttgatttttttttttttttttaatagaaaagaggaatagttgttccccaaatgtttcttcctccactgccttccagtactttctttacatgaa

SEQ ID NO: 520050 - DNA, 120 bp, Artificial Sequence
  ENSG00000165219_60 (sequence is synthesized)
agattagtgtaaaagtacaaaatcagcccaggaaacattcagcagccactagttactacatagaatttataaagtggatgttaaatggagagagagttggctcaggtcccctgaaatctt

SEQ ID NO: 520051 - DNA, 120 bp, Artificial Sequence
  ENSG00000165219_61 (sequence is synthesized)
gtaggattaacttctctgaggaaaagaaaaatcaggtttgcattttgtattaatattctgcttttagaagtaatagaaatacaagttgaagattgtctttacttacaaaattatatttta

SEQ ID NO: 520052 - DNA, 120 bp, Artificial Sequence
  ENSG00000165219_62 (sequence is synthesized)
gagtgcagtgctgtgatctcggctcactgtaaccaccatctcccagtctctagtgattctcatggctcagcctccctggttgctcagattacaagtgtatgccaccacacccagctaatt

SEQ ID NO: 520053 - DNA, 120 bp, Artificial Sequence
  ENSG00000165219_63 (sequence is synthesized)
ggattataggcgtgagccaccgtgcccaaccacaaaattatatgtatatatatttaaacgtgtcaaacattttgctttctttctccattttaggtaaaatctcagccacagtaattgctt

SEQ ID NO: 520054 - DNA, 120 bp, Artificial Sequence
  ENSG00000165219_64 (sequence is synthesized)
ctcagccacagtaattgctttcttctgctttttctttataaaaacctgcttatgaaggccttctgatacagatagttaaatcgctgtagtaggaggctcaggttttctaagggattgcaa

SEQ ID NO: 520055 - DNA, 120 bp, Artificial Sequence
  ENSG00000165219_65 (sequence is synthesized)
atgtgctgcatggtttttctattcctatgtcctggaagcctttgtttaaagtgggctttacaaatgtgtccctgaggtgcgtgagcaagagaacaatctcagccccaatacgggggctgt

SEQ ID NO: 520056 - DNA, 120 bp, Artificial Sequence
  ENSG00000165219_66 (sequence is synthesized)
gttcttgccgtaagaatctgtagctgactggtgtgctgaacccgggcactctttttcctattgtttgccatggaaatttccactttggaccgagtaaggtcaactaggtgttttaaaatt

SEQ ID NO: 520057 - DNA, 120 bp, Artificial Sequence
  ENSG00000165219_67 (sequence is synthesized)
gtttttctcctatgtgattgggtgtgaagagggaaagtaggaatacactcagaattattactggattgcataaaagtgatagaagtgtagtggggttcacttcctcaattggtgcttcct

SEQ ID NO: 520058 - DNA, 120 bp, Artificial Sequence
  ENSG00000165219_68 (sequence is synthesized)
agatttttctctcccatctcttcctgctttgtttctttaaagaaaaggctgttgtctctctttttaaatatttaagtctagtgagtttattttgtacgcaattgctttaattttaaggga

SEQ ID NO: 520059 - DNA, 120 bp, Artificial Sequence
  ENSG00000165219_69 (sequence is synthesized)
agtaaatctgaaactatcttgaagcccaaaggatttttagtaagtggattaacagtgatgaggtatttgcgattactttaaatgccaaaatgcttgagaactttgccaggttaaaaatta

SEQ ID NO: 520060 - DNA, 120 bp, Artificial Sequence
  ENSG00000165219_70 (sequence is synthesized)
cttaatatattttagaatgtaggttagaaagtagtaggacaaggaatagctttattactcttgagaacacttggataaatgaaaatatagtttgcttccgtgttaagttgtggttgagct

SEQ ID NO: 520061 - DNA, 120 bp, Artificial Sequence
  ENSG00000165219_71 (sequence is synthesized)
atggagtgaccctggagctgccgcatcccacaggcctgagctcagcaagggttcaattcaagagagatgacgtctccacttggataatggcagacagtgtgggtagcggccatgcactag

SEQ ID NO: 520062 - DNA, 120 bp, Artificial Sequence
  ENSG00000165219_72 (sequence is synthesized)
gggaattcacctctgtcaaattaatactctcctgtctactggattcttcttgtgcttcacctggattaaaaagctgtactgcctcttttgaaacagataaaacctttctataagtctcaa

SEQ ID NO: 520063 - DNA, 120 bp, Artificial Sequence
  ENSG00000165219_73 (sequence is synthesized)
ttaatgagcttgcacaatcttgtatatgtacaggaaacccctcctgtctcctaatgtgattagtactgtaaaatattctataaaactgattaaaaggggagagcagtttgattcacaggg

SEQ ID NO: 520064 - DNA, 120 bp, Artificial Sequence
  ENSG00000165219_74 (sequence is synthesized)
cagaggtaatacaggtttatatagcatgggtaatgttaactaaatgctgcgtgttattataccatataatgttaccacgtgttcaaggaactgaaatgtgataaaatataaaacatcatt

SEQ ID NO: 520065 - DNA, 120 bp, Artificial Sequence
  ENSG00000165219_75 (sequence is synthesized)
ttcactctatgtaattcagtctaactgcgaagttcctgaagatgctttcagggattaaaattccctggtatgaaatagtagaaagccagttgtgaggagcccttccttgatgccacttct

SEQ ID NO: 520066 - DNA, 120 bp, Artificial Sequence
  ENSG00000165219_76 (sequence is synthesized)
caagtcagccctgctctcaggggcagtacctctccatcagtgcttttatagtcaggtttctacagaaatgttttgaagaagtgggaggctgatagcactccaaagagtgagatatgctgt

SEQ ID NO: 520067 - DNA, 120 bp, Artificial Sequence
  ENSG00000165219_77 (sequence is synthesized)
acattgatggtttaggtcttccggctttgttctctttgcatgaaccatactagcatttggccattagaagtaacaggcatgtagatgccagaccacttaaatgtaaagaaaatctgtgta

SEQ ID NO: 520068 - DNA, 120 bp, Artificial Sequence
  ENSG00000165219_78 (sequence is synthesized)
tgaagatactcataaaaacagaaaatgaattggaagtaatcataatttgattttttttttctggtatgcctctcaagttctaatggatcaaaaaaggaaccgtcaaagaatacttaaaac

SEQ ID NO: 520069 - DNA, 120 bp, Artificial Sequence
  ENSG00000165219_79 (sequence is synthesized)
tatatataaaatctagtgatttcgatgtgtttgtataatttttagaaaatgggattctaccagaatgtgaacatttatggtcacctgcctggcctaggactaacccaggagtttgtgttt

SEQ ID NO: 520070 - DNA, 120 bp, Artificial Sequence
  ENSG00000165219_80 (sequence is synthesized)
cactatggaactttgtcctgtagatctatagcaatcccttgctttaacaacccagttgactactattttagattccaggataatatttttgatgtgctgattttgacagagtaatggtcc

SEQ ID NO: 520071 - DNA, 120 bp, Artificial Sequence
  ENSG00000165219_81 (sequence is synthesized)
tgtcagtaaacagtgctgcatttgtgattgtggtacgttttttctctatgcatctcaggtacaattccagcactccccaagaatgtctagattctctaggagtgcctctgacatcattgc

SEQ ID NO: 520072 - DNA, 120 bp, Artificial Sequence
  ENSG00000165219_82 (sequence is synthesized)
atgcacaaaagtgctctattccagcagcagcactgtcatggtgagatctagtgagatagaatatgaatattgttagttttcaaatgcgtggagagagattcataaaggaagaatggaaaa

SEQ ID NO: 520073 - DNA, 120 bp, Artificial Sequence
  ENSG00000165219_83 (sequence is synthesized)
agacatttgttattatttaaaggggtttaagtctaaatttgaatagttttttttcctccttcagcatagagatgtctgaataaatgaagtctgcatgtaaaaatgcactgttggaagttc

SEQ ID NO: 520074 - DNA, 120 bp, Artificial Sequence
  ENSG00000165219_84 (sequence is synthesized)
tgttagcatgaattgctgataacagtgatttgagtgcaaacactttagaaatccgtcatccattcagtctgccctgaactttgacactgtcattctggtgatgatgagaaggtggagcta

SEQ ID NO: 520075 - DNA, 120 bp, Artificial Sequence
  ENSG00000165219_85 (sequence is synthesized)
ctcttcccaatttcctgctttggcaaggctctcagacctagaaatgggatgagtaggcagctgcatggtgcctcttaacattgagatatgtgctctttttaagtcttacctcctaatctg

SEQ ID NO: 520076 - DNA, 120 bp, Artificial Sequence
  ENSG00000165219_86 (sequence is synthesized)
gtaattttataaaatattagaacgctgtattagcaataagaagcaaagccccagaatctctttcagagagccaatgtctcaactcctctgtaagacttgctgggcttaagtttctagcta

SEQ ID NO: 520077 - DNA, 120 bp, Artificial Sequence
  ENSG00000165219_87 (sequence is synthesized)
ctttgagggtgtagaaagtggttccactcagatgaatgctaaggcagagctttagaaatgttcttgttctttgcaggaagtgatagtggtttcataaatggaagtcatgcctgtcactat

SEQ ID NO: 520078 - DNA, 120 bp, Artificial Sequence
  ENSG00000165219_88 (sequence is synthesized)
tgtttaaatatcatataccattgaagttaaacatatagaggacttctgacatatatattgctattaattattgcaggaaaatgggacgttattggtaattaaacattgaaaactcatcct

SEQ ID NO: 520079 - DNA, 120 bp, Artificial Sequence
  ENSG00000165219_89 (sequence is synthesized)
ttacattcctggaataagttgaagctttttatgtctatgttcattgagaatgtttatactgtaaatatcagtgagtgtttattttggaaggtagctgtataaaattgtttacttttttgg

SEQ ID NO: 520080 - DNA, 120 bp, Artificial Sequence
  ENSG00000165219_90 (sequence is synthesized)
tgaacagcctggcatcatttgagttggcaaaagcatctcttcctgaaagaagagagcatccaggagtaaagctagaaacttattccaaaggcctcttctcagcacggtggcactcaggaa

SEQ ID NO: 520081 - DNA, 120 bp, Artificial Sequence
  ENSG00000165219_91 (sequence is synthesized)
gaccaaatccgtctcaactggaatttggctgctgacccagccccagcctcagctttcttgtcggcactaagtggcacagcactccatctgtagatggagtcttgctctgtcacctaggct

SEQ ID NO: 520082 - DNA, 120 bp, Artificial Sequence
  ENSG00000165219_92 (sequence is synthesized)
ggggtaagtgtactggagagagttggttatacattctaggaatctcaaaggtaaagtatgatttaaaaatatttttttaaaataatttttttaagtttgcctacagctacaaatttttaa

SEQ ID NO: 520083 - DNA, 120 bp, Artificial Sequence
  ENSG00000165219_93 (sequence is synthesized)
aaagaatcgattacctataggtaaagagaatttctcgtattggagctttctcttaaatctaatatttcattagcctttgttattgctgagtgttttggaacatatgtttaagtacttggg

SEQ ID NO: 520084 - DNA, 120 bp, Artificial Sequence
  ENSG00000165219_94 (sequence is synthesized)
aaagtctttctcttcatgtttactgatggtatttcagtttttagaaatcgtatcagattagttaaggtttatcagtagtctttagctttgcctacatacttttcataattaattgaagtc

SEQ ID NO: 520085 - DNA, 120 bp, Artificial Sequence
  ENSG00000165219_95 (sequence is synthesized)
atgctatccacagtatactttctttaaattttattgtcttttcttgaaaaaattttggaaatgttataagtagtcatctttaaaactatgtagccctcagcctggtgtggtggcacgtgc

SEQ ID NO: 520086 - DNA, 83 bp, Artificial Sequence
  ENSG00000165219_96 (sequence is synthesized)
taaaactatgtagccctcagcctggtgtggtggcacgtgcctgtggtccctgctacttgggaggctgagatggggacatgatt

SEQ ID NO: 520087 - DNA, 120 bp, Artificial Sequence
  ENSG00000165219_97 (sequence is synthesized)
ctatctcaaaaaaaaaaaaaattatgtagccccctcctttctacaaagttctaaataatataataaacaatattattttagaagtttccatcaataaagtggaaaataatagtattttct

SEQ ID NO: 520088 - DNA, 120 bp, Artificial Sequence
  ENSG00000165219_98 (sequence is synthesized)
ttttcattaacaatcagtcttttatcaactgagctaagatatcttaatattacaaaatgaagcaaaagtttcattttattttttcaagtttgtttatttaagaattctatttaattaagc

SEQ ID NO: 520089 - DNA, 120 bp, Artificial Sequence
  ENSG00000165219_99 (sequence is synthesized)
aagccttatttgcttggttaacatttgctatctatctgtctataaaaaaattaattgagcatataccatgttccatactgtgggtaggcactttataaatgttgtttcatttaatcccca

SEQ ID NO: 520090 - DNA, 120 bp, Artificial Sequence
  ENSG00000165219_100 (sequence is synthesized)
cagaagtcctgtgagagtggatgtgtcttgcacatgaggcactgtgatagacactggatacaaagaccattaggacctgcccttactgtcaagttggctgttgatagtttagttagggag

SEQ ID NO: 520091 - DNA, 120 bp, Artificial Sequence
  ENSG00000165219_101 (sequence is synthesized)
agcaagaagagactagtacccttcagcatactaagcgttctgaggagataaatatgagggttatggtgacacctaacttagccaaaatggtagtggtatcaggagaagatcttggagcag

SEQ ID NO: 520092 - DNA, 120 bp, Artificial Sequence
  ENSG00000165219_102 (sequence is synthesized)
gtgaagtctgtttgcactttgtgatgaatgggagttagacaaagtaaacaagatgaggaaaaagtgtttaagccaggggaacaggagtattttagtgcctgcctatttataacgaggaac

SEQ ID NO: 520093 - DNA, 120 bp, Artificial Sequence
  ENSG00000165219_103 (sequence is synthesized)
tcagcaacacttagtgaacatagttctttttaatttatgcattttgaagagagggattttacttttaaacttctgtgagctaattttttaagaactgccagtttcttaaaattaatctac

SEQ ID NO: 520094 - DNA, 120 bp, Artificial Sequence
  ENSG00000165219_104 (sequence is synthesized)
cttatatttaacgtaatgtggaattgtatcaacaggagtgtggcatcatactcttcaagtctttgtcttattgtatcaccccaaaatgtcagttttcaaaataaaaaatagaaaaagcga

SEQ ID NO: 520095 - DNA, 120 bp, Artificial Sequence
  ENSG00000165219_105 (sequence is synthesized)
gaaaacgttttgtttcagccatgcctaaagcctggcatcatttgagttggcaaaagcatctcttcctgaaagaagagagcatccaggagtaaagctagaaacttattccaaaggcctctt

SEQ ID NO: 520096 - DNA, 120 bp, Artificial Sequence
  ENSG00000165219_106 (sequence is synthesized)
ctggggagagctgctttcacgccatactcaagcgcttgatgaggaggagagaatgaagctaggagttttgaatgtgtttttgagcagaggttaagagtcagtggttttgattttagtccc

SEQ ID NO: 520097 - DNA, 120 bp, Artificial Sequence
  ENSG00000165219_107 (sequence is synthesized)
aatggattcctgttaaattattcttcctatgacagatgactccgaagcaggttctgaaagttcctttaaaaaccttcattactattttaaggacaattatcagtcaacacttggaatttc

SEQ ID NO: 520098 - DNA, 120 bp, Artificial Sequence
  ENSG00000165233_0 (sequence is synthesized)
ggcccgcgggcggcgttcgctggagctggtggaccgggcggctgaccgaggggcggacgcgcggcggggcagaccgctggggactgcgggcggcgctgtgtccgtcgccatgacagatca

SEQ ID NO: 520099 - DNA, 120 bp, Artificial Sequence
  ENSG00000165233_1 (sequence is synthesized)
tccgtcgccatgacagatcagacctattgtgaccgcctggtgcaggacacgcctttcctgacaggccatgggcgcttgagtgagcagcaggtggacaggatcatcctccagctgaaccgt

SEQ ID NO: 520100 - DNA, 120 bp, Artificial Sequence
  ENSG00000165233_2 (sequence is synthesized)
tactacccacagatccttaccaacaaggaggcggaaaagttccggaaccccaaggcatccttgcgtgtgcggctctgtgacctcctgagccacctgcagcggagcggtgagcgggactgc

SEQ ID NO: 520101 - DNA, 120 bp, Artificial Sequence
  ENSG00000165233_3 (sequence is synthesized)
cctgtatatccatgcccagcccctgcacagccgcctgcccagccgccacgctctgcagaactcagattgcacagagctagactcgggcagccagagcggcgagctgagtaacaggggacc

SEQ ID NO: 520102 - DNA, 120 bp, Artificial Sequence
  ENSG00000165233_4 (sequence is synthesized)
catgagcttcctggctggcctgggccttgctgtgggactggccctgctcctgtactgctatccgccagaccccaagggcctgccagggacccggcgcgtcctcggtttctcgcctgtcat

SEQ ID NO: 520103 - DNA, 120 bp, Artificial Sequence
  ENSG00000165233_5 (sequence is synthesized)
catcgacagacatgtcagccgctacctgctggccttcctggcagatgacctaggggggctctgacagaccctggacccagggcctcacctgccactcaaccaaagagtcctcgagccggc

SEQ ID NO: 520104 - DNA, 120 bp, Artificial Sequence
  ENSG00000165233_6 (sequence is synthesized)
ccgccaaggggactgctgcttctttttctaaatgcatatttttcattatttataatttgtgtaaaaaacacaccttcaccttacaaggtgctgaccatattaaatgttcaggttctctca

SEQ ID NO: 520105 - DNA, 120 bp, Artificial Sequence
  ENSG00000165233_7 (sequence is synthesized)
tatcctgagggttggggcatctcctggaacaatgaggttggcccacaacagaacaggagtcaacacgggccctgctactggctcagttccggaaccccaaggcatccttgcgtgtgcggc

SEQ ID NO: 520106 - DNA, 120 bp, Artificial Sequence
  ENSG00000165233_8 (sequence is synthesized)
cagcccaggcctggcatcccctctcgcctcagcccctccccagaggccaccctctggccccgaggggagagtgtggcaggcacaggcagtgcagatgttggtctctgtctcccactttct

SEQ ID NO: 520107 - DNA, 120 bp, Artificial Sequence
  ENSG00000165233_9 (sequence is synthesized)
cccccttcctccgtctctctctcatggcagttttcacacagcatggggcatcttatacgtccactcttgcccttccttttctaacctcattccacggggatcccttcatgtctgtgtgga

SEQ ID NO: 520108 - DNA, 120 bp, Artificial Sequence
  ENSG00000165233_10 (sequence is synthesized)
cagcaaccttgttcccacagctgcatggcgctcctaggcggtcccagctggaattacccaaccccatgacggaccctttcattgcagcgatctgcacacgtgtgggtgtttccataggac

SEQ ID NO: 520109 - DNA, 120 bp, Artificial Sequence
  ENSG00000165233_11 (sequence is synthesized)
aggcagtgtggactcaggccctgggagtcatgtggatgccagtagcctgggcccacagagctgctgggatgtggggggcatatcaagttgaagatggcaactctgatctgacgcctctgt

SEQ ID NO: 520110 - DNA, 120 bp, Artificial Sequence
  ENSG00000165233_12 (sequence is synthesized)
ctggaggaggggctactgccccttggcccttagacaacaggacagagaccagagggactgggcggcttgtcccaggctactgggctgtggtctctgaccccctggaggcctccccacgcc

SEQ ID NO: 520111 - DNA, 120 bp, Artificial Sequence
  ENSG00000165233_13 (sequence is synthesized)
tcacagaacacagtgcagacggtgggcggggagagctcgaggggaggcccagccctgcaggtgggactggctctccctccccagccacgagtatgccacagggggctttcaaaaccaggc

SEQ ID NO: 520112 - DNA, 120 bp, Artificial Sequence
  ENSG00000165233_14 (sequence is synthesized)
agggccaagccttggccccactggaggtagagcaccttctgtggctcccgggtgcctttaggcccgtccaggagttggagcagaggagaagacccagactgtgcatagttccctgaggag

SEQ ID NO: 520113 - DNA, 120 bp, Artificial Sequence
  ENSG00000165233_15 (sequence is synthesized)
ggctagcctcaggtgccacagcctggttcggcctggcggccccaggaggcagcagcaaccttgggcttcctgcggggtgactaccttgccctccggccctgcccgttgactaactatgct

SEQ ID NO: 520114 - DNA, 120 bp, Artificial Sequence
  ENSG00000165233_16 (sequence is synthesized)
ctgtggttttgtttccagagaactcagattgcacagagctagactcgggcagccagagcggcgagctgagtaacaggggtaacacctccctgctgcccctccctctctctccctctctct

SEQ ID NO: 520115 - DNA, 120 bp, Artificial Sequence
  ENSG00000165233_17 (sequence is synthesized)
ccctctctctttaccctccccagggctccatctccgcctcaggggcttctccaccccaagtctggctccattcctggccttctgttggtgacagaccccccccctaaggtgctcgtttgg

SEQ ID NO: 520116 - DNA, 120 bp, Artificial Sequence
  ENSG00000165233_18 (sequence is synthesized)
gggctcttcaggcagcacctcagcctggcacccccactcccctgcgcagcccccaggcctcaggaccccacccctctgaggcccaggggagccctgttcacgctggtttctccccaggac

SEQ ID NO: 520117 - DNA, 120 bp, Artificial Sequence
  ENSG00000165233_19 (sequence is synthesized)
ttttacaaatgaagaaaccaagtctctgaggggtggagtagctggctaaggtcacacaggaagccacactatgtcccaacacttggaatgatgtcaccagccctgtgctttctttttttc

SEQ ID NO: 520118 - DNA, 120 bp, Artificial Sequence
  ENSG00000165233_20 (sequence is synthesized)
ggattacaggcatgagccaccgcaccttgccagccccatgctttctttgtgaccactcccagcctgtttcccaacctcccaccccacagggagtatgaggagtagcagtgatgcctgtga

SEQ ID NO: 520119 - DNA, 120 bp, Artificial Sequence
  ENSG00000165233_21 (sequence is synthesized)
tgatgcctgtgacagaggcaatgccaggcactatgtggtgtgggtaaggggcaggttgtcacaggagctgccatccagcaggtgtcctgacacccaacagggaagctgaggctgggggcc

SEQ ID NO: 520120 - DNA, 80 bp, Artificial Sequence
  ENSG00000165238_0 (sequence is synthesized)
ggcccgcgggcatggcggagcctcgggcgaaggcggcgcggccggggccccagcgctttctgcggcgcagcgtggtagag

SEQ ID NO: 520121 - DNA, 120 bp, Artificial Sequence
  ENSG00000165238_1 (sequence is synthesized)
tttctgcggcgcagcgtggtagagtcggaccaggaggagccgccgggcttggaggcagccgaggcgccgggcccgcagcccccgcagcccctgcagcgccgggtgcttctgctctgcaag

SEQ ID NO: 520122 - DNA, 80 bp, Artificial Sequence
  ENSG00000165238_2 (sequence is synthesized)
tctgcaagacgcgccgcctcatcgcggagcgcgcccgcggacgccccgccgcccccgcgcccgcagcgctggtagcgcag

SEQ ID NO: 520123 - DNA, 120 bp, Artificial Sequence
  ENSG00000165238_3 (sequence is synthesized)
acgcaggagcccggcccggaccccatcgcagccgctgtcgaaaccgcgcctgcccccgacggcggccccagggaggaggcggcggcgaccgtgaggaaggaggatgagggggcggccgag

SEQ ID NO: 520124 - DNA, 120 bp, Artificial Sequence
  ENSG00000165238_4 (sequence is synthesized)
gcgaagcctgagcccgggcgcactcgccgggacgagcccgaagaggaggaggacgacgaggacgacctcaaggccgtggccacctctctggacggccgcttcctcaagttcgacatcgag

SEQ ID NO: 520125 - DNA, 120 bp, Artificial Sequence
  ENSG00000165238_5 (sequence is synthesized)
ctgggccgcggttccttcaagacggtctacaaggggctggacacggagacctgggtggaggtggcctggtgtgagctgcaggaccggaagctcaccaagctggagcggcagcggttcaag

SEQ ID NO: 520126 - DNA, 120 bp, Artificial Sequence
  ENSG00000165238_6 (sequence is synthesized)
gaagaggctgagatgctgaaaggcctgcagcaccccaacatcgtgcgcttctacgacttctgggagtccagcgccaagggcaagcggtgcattgtgctggtgacggagctgatgacctca

SEQ ID NO: 520127 - DNA, 120 bp, Artificial Sequence
  ENSG00000165238_7 (sequence is synthesized)
gggacgctgaagacatacctgaagcggttcaaggtgatgaagcccaaggttctccgcagctggtgccggcagatcctgaagggcctgctgttcctgcacacaaggacgccacccatcatc

SEQ ID NO: 520128 - DNA, 120 bp, Artificial Sequence
  ENSG00000165238_8 (sequence is synthesized)
caccgagacctgaaatgtgacaatattttcatcaccggaccaactgggtctgtgaagattggcgacttgggcctggccactctgaaaagagcgtcatttgccaaaagtgtgataggtact

SEQ ID NO: 520129 - DNA, 120 bp, Artificial Sequence
  ENSG00000165238_9 (sequence is synthesized)
cccgagttcatggcgcccgagatgtacgaggagcactacgatgagtccgtggacgtctatgcctttgggatgtgcatgctggagatggccacctcggagtacccctactcggagtgccag

SEQ ID NO: 520130 - DNA, 120 bp, Artificial Sequence
  ENSG00000165238_10 (sequence is synthesized)
aatgcggcccagatctaccgcaaggtcacctgtggtatcaagccggccagctttgagaaagtgcacgatcctgaaatcaaggagattattggggagtgtatctgcaaaaacaaggaggaa

SEQ ID NO: 520131 - DNA, 120 bp, Artificial Sequence
  ENSG00000165238_11 (sequence is synthesized)
aggtacgagatcaaagacctgctgagccacgccttcttcgcagaggacacaggcgtgagggtggagctcgcggaggaggaccacggcaggaagtccaccatcgccctgaggctctgggtg

SEQ ID NO: 520132 - DNA, 120 bp, Artificial Sequence
  ENSG00000165238_12 (sequence is synthesized)
gaagaccccaagaaactgaagggaaagcccaaggacaatggagccatagagttcaccttcgacctggagaaggagacgccggatgaggtggcccaagagatgattgagtctggattcttc

SEQ ID NO: 520133 - DNA, 120 bp, Artificial Sequence
  ENSG00000165238_13 (sequence is synthesized)
cacgagagtgacgtcaagatcgtggccaagtccatccgtgaccgcgtggccttgatccagtggcggcgggagaggatctggcccgcgctgcagcccaaggagcagcaggatgtgggcagc

SEQ ID NO: 520134 - DNA, 120 bp, Artificial Sequence
  ENSG00000165238_14 (sequence is synthesized)
ccggacaaggccaggggtccgccggtgcccctgcaggtccaggtgacctaccatgcacaggctgggcagcccgggccaccagagcccgaggagccggaggccgaccagcacctcctgcca

SEQ ID NO: 520135 - DNA, 120 bp, Artificial Sequence
  ENSG00000165238_15 (sequence is synthesized)
cctacgttgccgaccagcgccacctccctggcctcggacagcaccttcgacagcggccagggctctaccgtgtactcagactcgcagagcagccagcagagcgtgatgcttggctccctt

SEQ ID NO: 520136 - DNA, 120 bp, Artificial Sequence
  ENSG00000165238_16 (sequence is synthesized)
gccgacgcagcgccgtccccggcccagtgtgtgtgcagcccccctgtgagcgaggggcccgtcctgccgcagagcctgccctcgctgggggcctaccagcagcccacggctgcacctggc

SEQ ID NO: 520137 - DNA, 120 bp, Artificial Sequence
  ENSG00000165238_17 (sequence is synthesized)
ttgccggtgggctctgtcccggcccccgcctgccctccgtccctccagcagcacttcccggatccggccatgagcttcgcccccgtgctgccgccgcccagcacccccatgcccacgggc

SEQ ID NO: 520138 - DNA, 120 bp, Artificial Sequence
  ENSG00000165238_18 (sequence is synthesized)
cccccggccagcagcctcctccgctggcccagccgacacccctgccgcaggtcctggccccacagcccgtggtccccctccagccggttcccccccacctgccaccgtacctggctccag

SEQ ID NO: 520139 - DNA, 120 bp, Artificial Sequence
  ENSG00000165238_19 (sequence is synthesized)
ccgtacctggctccagcctcccaggtgggggcccccgctcagctgaagcccctccagatgccacaggcgcccctgcagccgcttgctcaagtccctccgcagatgcccccgattcctgtt

SEQ ID NO: 520140 - DNA, 120 bp, Artificial Sequence
  ENSG00000165238_20 (sequence is synthesized)
gtgccccccatcacgcccctggcgggaatcgacggcctccctccggccctcccagacctgccgaccgcgactgtgcctcccgtgccaccacctcagtatttctctccagccgtgatcttg

SEQ ID NO: 520141 - DNA, 120 bp, Artificial Sequence
  ENSG00000165238_21 (sequence is synthesized)
ccgagcctcgctgccccactcccccctgcgtccccagccttgcctctgcaggctgtgaagctgccccacccccctggggcgcccctggccatgccctgccggaccattgtgccaaatgca

SEQ ID NO: 520142 - DNA, 120 bp, Artificial Sequence
  ENSG00000165238_22 (sequence is synthesized)
ccggccactatccccctgctggccgtagccccaccgggcgtggctgccctgtccattcattctgccgtggcccagctcccaggccaacctgtgtacccagcggccttcccacagatggcg

SEQ ID NO: 520143 - DNA, 120 bp, Artificial Sequence
  ENSG00000165238_23 (sequence is synthesized)
cctactgacgtccctccttccccccatcacacggtgcagaatatgagggccacccctccacagccggcactgcctccacaacccacactgcccccacaacccgtgctgcccccgcaaccc

SEQ ID NO: 520144 - DNA, 120 bp, Artificial Sequence
  ENSG00000165238_24 (sequence is synthesized)
acgctgccccctcaacctgtgttgcccccgcaacccacacggccccctcaacctgtgctgcccccgcaacccatgctgcccccacaacctgtgctgcccccgcagccggcactgcctgtg

SEQ ID NO: 520145 - DNA, 120 bp, Artificial Sequence
  ENSG00000165238_25 (sequence is synthesized)
cgccctgagcccctccagccccaccttcctgaacaagctgctccagctgctacaccagggagccagattctgcttggccacccagctccctatgctgtggacgtcgccgctcaggtcccc

SEQ ID NO: 520146 - DNA, 120 bp, Artificial Sequence
  ENSG00000165238_26 (sequence is synthesized)
accgtgcctgtgccaccggctgcggtcctctcgccgcctctgccggaagtgctgctgcctgccgcccctgagctcctgcctcagttccccagctccctggccacggtgtctgcctctgtg

SEQ ID NO: 520147 - DNA, 120 bp, Artificial Sequence
  ENSG00000165238_27 (sequence is synthesized)
cagagtgtgcccacccagactgccacacttctgccaccagcaaacccaccgctgcctggcgggcccgggatcgccagcccttgcccaactgtccagctgacggtggaaccagtccaagag

SEQ ID NO: 520148 - DNA, 120 bp, Artificial Sequence
  ENSG00000165238_28 (sequence is synthesized)
gagcaggcctcacaggacaagccgcccggcctcccgcagagctgtgagagctatggaggttctgatgtcacttctggaaaagagctgagtgacagctgtgaaggcgcctttggagggggc

SEQ ID NO: 520149 - DNA, 120 bp, Artificial Sequence
  ENSG00000165238_29 (sequence is synthesized)
ggcaggagagggccagccggccccggcttaccatcttgaacgtgtgcaacactggggacaagatggtggagtgccagctggagacgcacaaccacaagatggtgaccttcaagttcgact

SEQ ID NO: 520150 - DNA, 120 bp, Artificial Sequence
  ENSG00000165238_30 (sequence is synthesized)
tggacggggacgcacccgatgaaattgccacgtatatggtggagcatgactttatcctgcaggccgagcgggaaacgttcatcgagcagatgaaggatgtcatggacaaggcagaggaca

SEQ ID NO: 520151 - DNA, 120 bp, Artificial Sequence
  ENSG00000165238_31 (sequence is synthesized)
tgctcagcgaggacacagacgccgaccgtggctccgacccagggaccagcccgccacacctcagcacctgcggcctgggcaccggggaggagagccgacaatcccaagccaacgcccccg

SEQ ID NO: 520152 - DNA, 120 bp, Artificial Sequence
  ENSG00000165238_32 (sequence is synthesized)
tgtatcagcagaacgtcctgcacaccgggaagaggtggttcatcatctgtccggtggctgagcaccccgcccccgaggcccctgaatcttcgcccccacttcctctaagctccctgccgc

SEQ ID NO: 520153 - DNA, 120 bp, Artificial Sequence
  ENSG00000165238_33 (sequence is synthesized)
cagaagccagccaaggtccatgcagggggctcaccctgccctgtctcccatggcgcagagcagcctgtggggctgtgttcctatccttgttttctgctgaatcagctcagtcaaagcagc

SEQ ID NO: 520154 - DNA, 120 bp, Artificial Sequence
  ENSG00000165238_34 (sequence is synthesized)
ctccagattcagcgccctataaagaccagctgtcctcgaaggaacaacccagctttctagccagtcagcagctcctgagccaggcgggccccagcaaccctcctggggcacccccagccc

SEQ ID NO: 520155 - DNA, 120 bp, Artificial Sequence
  ENSG00000165238_35 (sequence is synthesized)
ctttggccccctcctcccctcctgtgactgctctgccccaagatggagcagctccagccaccagcaccatgccagagccagcgtcaggaactgccagccaggcagggggtccagggacac

SEQ ID NO: 520156 - DNA, 120 bp, Artificial Sequence
  ENSG00000165238_36 (sequence is synthesized)
ctcaggggctgaccagtgagctcgagacgtctcagccactagcggagactcacgaggccccgcttgctgtgcagcccctcgtggtgggcctagcaccttgcactccagctccagaggctg

SEQ ID NO: 520157 - DNA, 120 bp, Artificial Sequence
  ENSG00000165238_37 (sequence is synthesized)
cctcaaccagggacgccagtgccccaagggagcccctgccacctcctgcacctgagcccagcccccacagcgggaccccacagcccgccttgggtcaacctgctcccctgcttcctgccg

SEQ ID NO: 520158 - DNA, 120 bp, Artificial Sequence
  ENSG00000165238_38 (sequence is synthesized)
cagtgggggccgtcagcctggccacctcccagctcccaagcccacccctggggcccaccgtccccccacagccaccctcggccctggagtcggatggggaagggccgccccccagggtgg

SEQ ID NO: 520159 - DNA, 120 bp, Artificial Sequence
  ENSG00000165238_39 (sequence is synthesized)
gctttgtggacagcaccatcaagagcctggacgagaagctgcggactctgctctaccaggagcacgtgcccacctcctcagcctcagctgggacccctgtggaggtgggcgacagagact

SEQ ID NO: 520160 - DNA, 120 bp, Artificial Sequence
  ENSG00000165238_40 (sequence is synthesized)
tcaccctggagcccctgagaggggaccagccccgctcagaggtctgcgggggggacctggccctgcccccagtgcctaaggaggcggtctcagggcgtgtccagctgccccagcccttgg

SEQ ID NO: 520161 - DNA, 120 bp, Artificial Sequence
  ENSG00000165238_41 (sequence is synthesized)
tggagaagtcagaactggcccccactcgaggggccgtgatggagcagggcacgtcctcgtcaatgacagcagagtcgtctcccaggagtatgctaggctatgacagagatggaaggcagg

SEQ ID NO: 520162 - DNA, 120 bp, Artificial Sequence
  ENSG00000165238_42 (sequence is synthesized)
tggcctcagactcccatgtggtccccagcgtcccccaggatgtacctgcttttgtgagacctgcacgtgtggagcccacagacagggatggtggagaagctggagaaagctcggcagagc

SEQ ID NO: 520163 - DNA, 120 bp, Artificial Sequence
  ENSG00000165238_43 (sequence is synthesized)
ccccgccgagtgacatgggcacagtggggggccaggctagccacccccagacactcggcgctcgagctttggggtcccctcggaaacgtccagagcagcaggatgtcagctcaccagcca

SEQ ID NO: 520164 - DNA, 120 bp, Artificial Sequence
  ENSG00000165238_44 (sequence is synthesized)
agactgtgggccgtttctcggtggtcagcactcaggacgagtggaccctggcctccccccacagcctgagatactctgccccacccgacgtctacctggacgaggccccctccagccccg

SEQ ID NO: 520165 - DNA, 120 bp, Artificial Sequence
  ENSG00000165238_45 (sequence is synthesized)
acgtgaagctggcagtgcggcgggcgcagacggcctcctccatcgaggtcggcgtgggcgagcccgtgtccagcgactctggggacgagggccctcgggcgagacccccggtgcagaagc

SEQ ID NO: 520166 - DNA, 120 bp, Artificial Sequence
  ENSG00000165238_46 (sequence is synthesized)
aggcgtccctgcccgtgagtggcagcgtggctggcgacttcgtgaagaaggccaccgccttcctgcagaggccttctcgggccggctcgctgggccccgagacacccagcagggtgggca

SEQ ID NO: 520167 - DNA, 120 bp, Artificial Sequence
  ENSG00000165238_47 (sequence is synthesized)
tgaaggtccccacgatcagcgtgacctccttccattcccagtcgtcctacatcagcagcgacaatgattcggagctcgaggatgctgacataaagaaggagctgcagagtctgcgggaga

SEQ ID NO: 520168 - DNA, 120 bp, Artificial Sequence
  ENSG00000165238_48 (sequence is synthesized)
agcacctgaaggagatctcggagctgcagagccagcagaagcaggagatcgaagctctgtaccgccgcctgggcaagccactgccccccaacgtgggcttcttccacacggcacccccca

SEQ ID NO: 520169 - DNA, 120 bp, Artificial Sequence
  ENSG00000165238_49 (sequence is synthesized)
ctggccgccggagaaaaaccagcaagagcaagctgaaggcaggcaagctgctaaatcccctggtgcggcagctcaaggtcgtggcctccagcacaggtcacttggctgactccagcagag

SEQ ID NO: 520170 - DNA, 120 bp, Artificial Sequence
  ENSG00000165238_50 (sequence is synthesized)
gccctcccgctaaggaccctgcccaagccagtgtggggctcactgcagacagcacgggcctgagcgggaaggcagtgcagacccagcagccctgctccgtccgggcctccctgtcttcgg

SEQ ID NO: 520171 - DNA, 120 bp, Artificial Sequence
  ENSG00000165238_51 (sequence is synthesized)
acatctgctccggcttagccagtgatggaggcggagcgcgtggccaaggctggacggtttaccacccaacgtctgagagagtgacctataagtctagtagcaaacctcgtgctcgattcc

SEQ ID NO: 520172 - DNA, 120 bp, Artificial Sequence
  ENSG00000165238_52 (sequence is synthesized)
tcagtggacccgtatctgtgtccatctggtctgccctgaagcgtctctgcctaggcaaagaacacagcagtaggtcctccaccagcagcctggccccaggccctgagccaggcccccagc

SEQ ID NO: 520173 - DNA, 120 bp, Artificial Sequence
  ENSG00000165238_53 (sequence is synthesized)
ccgccctgcacgtccaggcgcaggtgaacaacagcaacaacaagaagggtaccttcacggacgacctgcacaagctggtggacgagtggacgagcaagacggtgggggccgcgcagctga

SEQ ID NO: 520174 - DNA, 120 bp, Artificial Sequence
  ENSG00000165238_54 (sequence is synthesized)
agcccacgctcaaccagctgaagcagacccagaagctgcaagacatggaggcccaggcaggctgggctgcccctggcgaggcgcgggctatgaccgcacctcgagcaggagtggggatgc

SEQ ID NO: 520175 - DNA, 120 bp, Artificial Sequence
  ENSG00000165238_55 (sequence is synthesized)
cacgtctgcccccagcgcccggccctctgtccaccacggtcattcccggagccgccccgaccctgtccgtgcccacaccagatggcgccctcggaaccgcccggagaaaccaggtgtggt

SEQ ID NO: 520176 - DNA, 120 bp, Artificial Sequence
  ENSG00000165238_56 (sequence is synthesized)
ttggcctccgagtcccccccaccgcctgctgtgggcacagcactcagccgcgagggggacagcgggtgggcagcaagactgcttcctttgcggcttcagaccctgttcgctcctaggttc

SEQ ID NO: 520177 - DNA, 120 bp, Artificial Sequence
  ENSG00000165238_57 (sequence is synthesized)
ctgtggtccacgcgccgtctccacacccacttcctatacttgagttgatggttagaaccttgtcgtcaccctgcagaagtacagtgccttgaatgccagcttttccgttccctgatgaaa

SEQ ID NO: 520178 - DNA, 120 bp, Artificial Sequence
  ENSG00000165238_58 (sequence is synthesized)
agatatgttaaaaaaaattatcggaaaaggtttcatttgcaattggcttgtgcattgataatctttatttactgttttaagttgcagagatgtgaatggtttacaaatctgaagctgaag

SEQ ID NO: 520179 - DNA, 120 bp, Artificial Sequence
  ENSG00000165238_59 (sequence is synthesized)
ggagccgccccgaccctgtccgtgcccacaccagatcctgagagtgagaagcctgactgaccccgcctagacgccaggcccacttcacgccgtctaagtggagaagtgacggaccctcag

SEQ ID NO: 520180 - DNA, 120 bp, Artificial Sequence
  ENSG00000165238_60 (sequence is synthesized)
ggccagctgctcctcctgtccagttcacgctgttttgtaaccactttctaagcattttttattcacaattggaaacacaaatgtaatgcaagaataaaaaatattttggggcagaaagga

SEQ ID NO: 520181 - DNA, 120 bp, Artificial Sequence
  ENSG00000165238_61 (sequence is synthesized)
tttctttggggacatggaccctgtaaacttttcagaaagcatcagtgatctcaccattcttccacccaagcttcaccatacatgtgatgttggttcttgcttggcagaattcacgttatt

SEQ ID NO: 520182 - DNA, 120 bp, Artificial Sequence
  ENSG00000165238_62 (sequence is synthesized)
gtgataggggctcttttcaaactgaagtcttctccttcttagtgcctcagactacctcctcttcagacatgctgcaataagttagtacaagtttatttgggtacaaagattttttttgaa

SEQ ID NO: 520183 - DNA, 120 bp, Artificial Sequence
  ENSG00000165238_63 (sequence is synthesized)
gttagtacaagtttatttgggtacaaagattttttttgaaagtcatgcatagttttttcatggtatgtcttttccatgaactttttgaagaccccttgtgtgtgtgtgtgtgtgtgtgtg

SEQ ID NO: 520184 - DNA, 120 bp, Artificial Sequence
  ENSG00000165238_64 (sequence is synthesized)
tctgtggtttgtgttttcactttcttaatggtgaacatgaaatggtaaaaattttaattttttttttcctaaaagctttgcagctttagctattgctttagatcccatgagccatctcaa

SEQ ID NO: 520185 - DNA, 120 bp, Artificial Sequence
  ENSG00000165238_65 (sequence is synthesized)
atgaactcttgagtatattttgatgcagaggtaaatctgtttttttcctctctgcatatctgatcgttccagccccttcctctccatattgaattgcactgaattgagcagacattcgtc

SEQ ID NO: 520186 - DNA, 120 bp, Artificial Sequence
  ENSG00000165238_66 (sequence is synthesized)
aagtggtcgtctgtgtgtaggtccatttctgaatttgctattttgtttgctttagcaattcccttatcattgtggcaacaccacactctcttcatgactgaagttttctaggaagtttaa

SEQ ID NO: 520187 - DNA, 120 bp, Artificial Sequence
  ENSG00000165238_67 (sequence is synthesized)
tctttgctcaggaaagactttcagtgttgatcttcttcaagaagttcttgatttttttcaggtcgttaatatttccatatgttttaggaacagcctgtcactttctgcaggctagcccac

SEQ ID NO: 520188 - DNA, 120 bp, Artificial Sequence
  ENSG00000165238_68 (sequence is synthesized)
tgggatttcggctgggagtggattcagtctgttgattatctgggtgaggtttgacatatgaacaacatgagcgttcctgtgaatgtagtgtccgtttactggcatcttttttgtttctct

SEQ ID NO: 520189 - DNA, 120 bp, Artificial Sequence
  ENSG00000165238_69 (sequence is synthesized)
gcagtgtaaagatgttatacctctttcattaaatttatccctaggtagctgatgttttggaatgctattataaatgttatttttctttaaatctccttttccagcttcctgttgctagaa

SEQ ID NO: 520190 - DNA, 120 bp, Artificial Sequence
  ENSG00000165238_70 (sequence is synthesized)
tagaaattggtttgtccattcttgtgggttttctgcatacacagtcttgtcatctgcatgaggccagttctccttctctctgtccagtctgtgcggttgactccttttcctccccgcctg

SEQ ID NO: 520191 - DNA, 120 bp, Artificial Sequence
  ENSG00000165238_71 (sequence is synthesized)
gagatccccgtggtgtcgactggaagcatggaggcaccttggggaggtattgggcattttgtcgtgggcaggggctcagctgtcggttccatagaggaccttccagataaggaggcccct

SEQ ID NO: 520192 - DNA, 120 bp, Artificial Sequence
  ENSG00000165238_72 (sequence is synthesized)
ccagcccctgactgccgagcttgatttccaggaagggttgtggaagtcaccgagtgccctccatgcacctgtgaagagtgcccagtggggccctccctggagtggagaggagtgactccc

SEQ ID NO: 520193 - DNA, 120 bp, Artificial Sequence
  ENSG00000165238_73 (sequence is synthesized)
cgtggccagcagccttgccttcctggggcacaccccgcatacagcttctccccgggctgggacagtggaagggctgccttgccatcacctccctgcacacttgctttgcccaggtcctgg

SEQ ID NO: 520194 - DNA, 120 bp, Artificial Sequence
  ENSG00000165238_74 (sequence is synthesized)
ggctctgctcctgccagctcctgggtggttcatgctcctgtgagggcactgaccagccaagcaggagggctttgtggtggctgagtagaggcatgtggggtcactcatgcgccctcaggg

SEQ ID NO: 520195 - DNA, 120 bp, Artificial Sequence
  ENSG00000165238_75 (sequence is synthesized)
tccaggccccactagtcctcctccaagtcccattttggctggtggacacccaggtgtgtggcctagaggctatcaggctgcagcttggggaagcaaacaagggagggtgatggttcctgg

SEQ ID NO: 520196 - DNA, 120 bp, Artificial Sequence
  ENSG00000165238_76 (sequence is synthesized)
ccccacaccatcattctggtgtcagccctgagagggtgcctgtcacagcaggttccaggactgctgcctcctgaggatggagaaactgtggcaccctgggggccactaagggaggccagc

SEQ ID NO: 520197 - DNA, 120 bp, Artificial Sequence
  ENSG00000165238_77 (sequence is synthesized)
ctcccaaccccaccctgtgcgctgcctctgggtcagtacagaggcctgctcccagctccagtgtcctgggggccctgggcaggccaggtgggccagctgggggcacagggcagctggaac

SEQ ID NO: 520198 - DNA, 120 bp, Artificial Sequence
  ENSG00000165238_78 (sequence is synthesized)
accccccaggtgcccgtgctgccagtcttcttgcagccacctgtggtcagcatgcctggcccccggctgcggatcacgtagccttctgccctgtcccttgccagatggcgccctcggaac

SEQ ID NO: 520199 - DNA, 120 bp, Artificial Sequence
  ENSG00000165238_79 (sequence is synthesized)
gtcctcagtagagtgccggttccctgggctcatccaggggctgagagacggcgggacgctggggcagggcacactggcggagctgcttgctcagtagggaatgtcagttgttgcgctggg

SEQ ID NO: 520200 - DNA, 120 bp, Artificial Sequence
  ENSG00000165238_80 (sequence is synthesized)
ccatgagaaatccgccagaaaacgttaggtgagcagacatgccccccatgccagtgggctgctgtgagtgaggataaggtgtgtgttgggcatagaaaccctggctgcccgcccaccctg

SEQ ID NO: 520201 - DNA, 120 bp, Artificial Sequence
  ENSG00000165238_81 (sequence is synthesized)
tggagacaagtgcagctcctccagctggagaggctgccctctctcctgcccacttccctcccttctccatgatttccatggagacctgtggctctgctcacccctggcatgcagaccgct

SEQ ID NO: 520202 - DNA, 120 bp, Artificial Sequence
  ENSG00000165238_82 (sequence is synthesized)
ctcccgtccagccctaagcctgctctgcggagggcggggtcattcttctcctggagatttcagtgggactcgtccccagtgggcacaacacagcccttggtgggaggggaaggccccagc

SEQ ID NO: 520203 - DNA, 120 bp, Artificial Sequence
  ENSG00000165238_83 (sequence is synthesized)
ctcctccacctcccactggaaagcagactgcttgggactgcccagctgtgaattgtatagtttctgtacttattagaactgggtaaattattttggttcaaatctattattccatcaatt

SEQ ID NO: 520204 - DNA, 120 bp, Artificial Sequence
  ENSG00000165238_84 (sequence is synthesized)
cagttagaattgaattttctaggtgattatgcagaatcttctgccagggcacgatgctgtcgtaagagatttctgttctctgtactgggcccccttgccctgttccttgagtgaagtggg

SEQ ID NO: 520205 - DNA, 120 bp, Artificial Sequence
  ENSG00000165238_85 (sequence is synthesized)
ggctgccctcacctgtcccccttgcctgtgaatcccttccttgtacatggtggtcagtggcacggaatccccaatagattgtatatctgaaggagaaaaataaacacttttgctcgaaaa

SEQ ID NO: 520206 - DNA, 120 bp, Artificial Sequence
  ENSG00000165238_86 (sequence is synthesized)
cctataagtctagtagcaaacctcgtgctcgattcctcagtggacccgtatctgtgtccatctgtctgtatttgttcttttgtattttatcacctcctggcccttggttttctcccccca

SEQ ID NO: 520207 - DNA, 120 bp, Artificial Sequence
  ENSG00000165238_87 (sequence is synthesized)
ccccctccctgtcttcattacctttcatacatttcataggatgcctcccccaccccatcgaagtcacctatttaatatcaaagtggaaccccatgagccggtcccctggagcggcggccg

SEQ ID NO: 520208 - DNA, 120 bp, Artificial Sequence
  ENSG00000165238_88 (sequence is synthesized)
ggtcggccctctctctgaactgctgcctgtgtctgcccctccctgcacactgacgacttttgcttagtgtggtagcgtgtcccagtgtgtgctgttctgcctaaccctgtggtcttgtgt

SEQ ID NO: 520209 - DNA, 120 bp, Artificial Sequence
  ENSG00000165238_89 (sequence is synthesized)
cgtttctttttcccttgcagggtctgccctgaagcgtctctgcctaggcaaagaacacagcagtagtaattatccgggttttttcccctttgtcctctctcatcgcatgggctttctcgt

SEQ ID NO: 520210 - DNA, 120 bp, Artificial Sequence
  ENSG00000165238_90 (sequence is synthesized)
ggctagcgcacatcagggttcccgcggccgggcgggcgtgggcctgccctgtgcctgccccgcgcctgctccatgcctctcggccgggcactgcttcgcttctgcctggcgggatcgctg

SEQ ID NO: 520211 - DNA, 120 bp, Artificial Sequence
  ENSG00000165238_91 (sequence is synthesized)
tcctcggctcccccgtgtgtctcgtggcgcctagagtttgtgcggtctcgccagttcacatctaacgggcttatccttccccggaacacccgcaaattgccgatcattaattggctcctt

SEQ ID NO: 520212 - DNA, 120 bp, Artificial Sequence
  ENSG00000165238_92 (sequence is synthesized)
ttccaaaaccgtaggaatgagtatttccttgaagtcctaaagatgagtgcctccccacgaggagagatgccaggactgagtgggtattagtctccttgggccactcacctctctctctct

SEQ ID NO: 520213 - DNA, 120 bp, Artificial Sequence
  ENSG00000165238_93 (sequence is synthesized)
ctcatctctctctctcgaaaaaatattttttttcttttctggctgaacttttcatgtaggaatagctccatgtgtgtcaaatctcatcactaatttttaattgtctgtgtctgtgctttt

SEQ ID NO: 520214 - DNA, 120 bp, Artificial Sequence
  ENSG00000165238_94 (sequence is synthesized)
tcattgctagccactaaagtccactacattttgggacagcttgtttgaagagatggtcattagattgtttctctatgcagaaaatttttgaattggcttattcaaaattgccaacgagaa

SEQ ID NO: 520215 - DNA, 120 bp, Artificial Sequence
  ENSG00000165238_95 (sequence is synthesized)
attacatgtgttgcctggaaagggtatgatttaaaatttttaaagtctcattttagtcccttaaaaaacactttgaatgaagcagccgagtgctctggtgtgctaatggtcagcagagcg

SEQ ID NO: 520216 - DNA, 120 bp, Artificial Sequence
  ENSG00000165238_96 (sequence is synthesized)
gctcccagctccctcctgcagcagggcgtttggccgcagcccatggcaggagctggtggggccgcgtcaggcagccccaggcatgggtaccctttatgaataccttcctcgaatgcgaat

SEQ ID NO: 520217 - DNA, 120 bp, Artificial Sequence
  ENSG00000165238_97 (sequence is synthesized)
gtgggccagggggctgcctgcaggccagcccgccgtgtgtgctgagcgctctgcacacggtactccaccgccccgcgtcctcatgttacggctgaggatgcacaggccagagagagcccg

SEQ ID NO: 520218 - DNA, 120 bp, Artificial Sequence
  ENSG00000165238_98 (sequence is synthesized)
aggaacctgactctaggcaccatgactccgaagcccagtgtgtctggctgtgccaggagtttcctgagctctctcacacgtgagtctggggatgggcagcggtgggcacagagtggatgc

SEQ ID NO: 520219 - DNA, 120 bp, Artificial Sequence
  ENSG00000165238_99 (sequence is synthesized)
tgagcagaggctgccggctgctgcagagtcctgtcccctggcctggcttctgaggtgggtgatggccacctggcacagcccatggaaatgccccaccatgtctgaccctgggcagccagg

SEQ ID NO: 520220 - DNA, 120 bp, Artificial Sequence
  ENSG00000165238_100 (sequence is synthesized)
ccccttaatccgaccgcctcttgaagcaaggtgctgcctggcccaagtgagaccattgtctcagctgtcacgtaagaatgaatgcggccagcccactgggggcctgggtgcgtgtgtggc

SEQ ID NO: 520221 - DNA, 120 bp, Artificial Sequence
  ENSG00000165238_101 (sequence is synthesized)
acgctcaaccagctgaagcagacccagaagctgcaagacatggaggcccaggcaggctgggctgcccctggcgaggcgcgggctccccaagaactaggcttgtccactttacagattggg

SEQ ID NO: 520222 - DNA, 120 bp, Artificial Sequence
  ENSG00000165238_102 (sequence is synthesized)
aggtgagcgacgcacccacagctccgcagctggcaggtggaaaggacaggccaggccaggccaggccagggctgtgactccacagctcagatacagcagcagccccagcctgggcagccc

SEQ ID NO: 520223 - DNA, 120 bp, Artificial Sequence
  ENSG00000165238_103 (sequence is synthesized)
ggagaccagggcaggtgtgcatgtcacccaagtgacaccagcgtctggccatagctcacacgcacctgagccaatgtggggcggaagtgaggacctgctgtcctaggttttcacacctaa

SEQ ID NO: 520224 - DNA, 120 bp, Artificial Sequence
  ENSG00000165238_104 (sequence is synthesized)
cttgtttgatgtcagcgcgagttggagaagcatctgctgtttttcagctttctggaggggtttgtggaagactggtgttatttctatctcaaatatttagtaaaggtcatttgtgaatcc

SEQ ID NO: 520225 - DNA, 120 bp, Artificial Sequence
  ENSG00000165238_105 (sequence is synthesized)
gtgtgagcccagggccacatgcccactgtgaaagttggagactgtggacatctcctgagcccctggtctggaggcttcgtggcattcaggctgtggtgtgggacctcccctcagccatga

SEQ ID NO: 520226 - DNA, 120 bp, Artificial Sequence
  ENSG00000165238_106 (sequence is synthesized)
tgaaggtcaaagcctgaggctgggagagcagggggtgcgcagaccgacaggtggagcatgactttatcctgcaggccgagcgggaaacgttcatcgagcagatgaaggatgtcatggaca

SEQ ID NO: 520227 - DNA, 120 bp, Artificial Sequence
  ENSG00000165240_0 (sequence is synthesized)
aggagttgttgctgccgccgccgcagccgcagctactgtgacttctccgattgtgtgagctttgttggagcctgcgtacgtggatttatcgctgccacggtctgcgtagctccagaggtt

SEQ ID NO: 520228 - DNA, 120 bp, Artificial Sequence
  ENSG00000165240_1 (sequence is synthesized)
taaccataggatagagaaaccaggaatgtaatgaggaaatcaaaatggatccaagtatgggtgtgaattctgttaccatttctgttgagggtatgacttgcaattcctgtgtttggacca

SEQ ID NO: 520229 - DNA, 120 bp, Artificial Sequence
  ENSG00000165240_2 (sequence is synthesized)
ttgagcagcagattggaaaagtgaatggtgtgcatcacattaaggtatcactggaagaaaaaaatgcaactattatttatgaccctaaactacagactccaaagaccctacaggaagcta

SEQ ID NO: 520230 - DNA, 120 bp, Artificial Sequence
  ENSG00000165240_3 (sequence is synthesized)
ttgatgacatgggctttgatgctgttatccataatcctgaccctctccctgttttaactgacaccttgtttctgactgttacggcgtcactgactttgccatgggaccatatccaaagca

SEQ ID NO: 520231 - DNA, 120 bp, Artificial Sequence
  ENSG00000165240_4 (sequence is synthesized)
cattgctgaagaccaagggtgtgacagacattaaaatttaccctcagaaaagaactgtagcagtgacaataatcccttctatagtgaatgccaatcagataaaagagctggttccagaac

SEQ ID NO: 520232 - DNA, 120 bp, Artificial Sequence
  ENSG00000165240_5 (sequence is synthesized)
tcagtttagatactgggacactggagaaaaagtcaggagcttgtgaagatcatagtatggctcaagctggtgaagtcgtgctgaagatgaaagtggaagggatgacctgccattcatgta

SEQ ID NO: 520233 - DNA, 120 bp, Artificial Sequence
  ENSG00000165240_6 (sequence is synthesized)
ctagcactattgaaggaaaaattgggaaactgcaaggtgttcagcgaattaaagtctccctggacaatcaagaagctactattgtttatcaacctcatcttatctcagtagaggaaatga

SEQ ID NO: 520234 - DNA, 120 bp, Artificial Sequence
  ENSG00000165240_7 (sequence is synthesized)
aaaagcagattgaagctatgggctttccagcatttgtcaaaaagcagcccaagtacctcaaattgggagctattgatgtagaacgtctaaagaacacaccagttaaatcctcagaagggt

SEQ ID NO: 520235 - DNA, 120 bp, Artificial Sequence
  ENSG00000165240_8 (sequence is synthesized)
cacagcaaaggagtccatcatataccaatgattcaacagccactttcatcattgatggcatgcattgtaaatcatgtgtgtcaaatattgaaagtactttatctgcactccaatatgtaa

SEQ ID NO: 520236 - DNA, 120 bp, Artificial Sequence
  ENSG00000165240_9 (sequence is synthesized)
gcagcatagtagtttctttagagaataggtctgccattgtgaagtataatgcaagctcagtcactccagaatccctgagaaaagcaatagaggctgtatcaccggggctatatagagtta

SEQ ID NO: 520237 - DNA, 120 bp, Artificial Sequence
  ENSG00000165240_10 (sequence is synthesized)
gtatcacaagtgaagttgagagtacctcaaactctccctccagctcatctcttcagaagattcctttgaatgtagttagccagcctctgacacaagaaactgtgataaacattgatggca

SEQ ID NO: 520238 - DNA, 120 bp, Artificial Sequence
  ENSG00000165240_11 (sequence is synthesized)
tgacttgtaattcctgtgtgcagtctattgagggtgtcatatcaaaaaagccaggtgtaaaatccatacgagtctcccttgcaaatagcaatgggactgttgagtatgatcctctactaa

SEQ ID NO: 520239 - DNA, 120 bp, Artificial Sequence
  ENSG00000165240_12 (sequence is synthesized)
cctctccagaaacgttgagaggagcaatagaagacatgggatttgatgctaccttgtcagacacgaatgagccgttggtagtaatagctcagccttcatcggaaatgccgcttttgactt

SEQ ID NO: 520240 - DNA, 120 bp, Artificial Sequence
  ENSG00000165240_13 (sequence is synthesized)
caactaatgaattttatactaaagggatgacaccagttcaagacaaggaggaaggaaagaattcatctaagtgttacatacaggtcactggcatgacttgcgcttcctgtgtagcaaaca

SEQ ID NO: 520241 - DNA, 120 bp, Artificial Sequence
  ENSG00000165240_14 (sequence is synthesized)
ttgaacggaatttaaggcgggaagaaggaatatattctatacttgtggccctgatggctggcaaggcagaagtaaggtataatcctgctgttatacaacccccaatgatagcagagttca

SEQ ID NO: 520242 - DNA, 120 bp, Artificial Sequence
  ENSG00000165240_15 (sequence is synthesized)
tccgagaacttggatttggagccactgtgatagaaaatgctgatgaaggagatggtgttttggaacttgttgtgaggggaatgacgtgtgcctcctgcgtacataaaatagagtctagtc

SEQ ID NO: 520243 - DNA, 120 bp, Artificial Sequence
  ENSG00000165240_16 (sequence is synthesized)
tcacaaaacacagagggatcctatactgctccgtggccctggcaaccaacaaagcacatattaaatatgacccagaaattattggtcctagagatattatccatacaattgaaagcttag

SEQ ID NO: 520244 - DNA, 120 bp, Artificial Sequence
  ENSG00000165240_17 (sequence is synthesized)
gttttgaagcttctttggtcaagaaggatcggtcagcaagtcacttagatcataaacgagaaataagacaatggagacggtcttttcttgtgagtctgtttttctgtattcctgtaatgg

SEQ ID NO: 520245 - DNA, 120 bp, Artificial Sequence
  ENSG00000165240_18 (sequence is synthesized)
ggctgatgatatatatgatggttatggaccaccactttgcaactcttcaccataatcaaaacatgagtaaagaagaaatgatcaaccttcattcttctatgttcctggagcgccagattc

SEQ ID NO: 520246 - DNA, 120 bp, Artificial Sequence
  ENSG00000165240_19 (sequence is synthesized)
ttccaggattgtctgttatgaatttgctgtcctttttattgtgtgtacctgtacagtttttcggaggctggtacttctacattcaggcttataaagcactgaagcataagacagcaaata

SEQ ID NO: 520247 - DNA, 120 bp, Artificial Sequence
  ENSG00000165240_20 (sequence is synthesized)
tggacgtactgattgtgctggcaaccaccattgcatttgcctactctttgattattcttctagttgcaatgtatgagagagccaaagtgaaccctattactttctttgacacacccccta

SEQ ID NO: 520248 - DNA, 120 bp, Artificial Sequence
  ENSG00000165240_21 (sequence is synthesized)
tgctgtttgtgtttattgcactaggccgatggctggaacatatagcaaagggcaaaacatcagaggctcttgcaaagttaatttcactacaagctacagaagcaactattgtaactcttg

SEQ ID NO: 520249 - DNA, 120 bp, Artificial Sequence
  ENSG00000165240_22 (sequence is synthesized)
attctgataatatcctcctcagtgaagaacaagtggatgtggaacttgtacaacgtggagatatcattaaagtagttccaggaggcaaatttccagtggatggtcgtgttattgaaggac

SEQ ID NO: 520250 - DNA, 120 bp, Artificial Sequence
  ENSG00000165240_23 (sequence is synthesized)
attctatggtagatgagtccctcatcacaggggaggcaatgcctgtggctaagaaacctggcagcacagtgattgctggttccattaaccagaacgggtcactgcttatctgcgcaacac

SEQ ID NO: 520251 - DNA, 120 bp, Artificial Sequence
  ENSG00000165240_24 (sequence is synthesized)
atgttggagcagacacaaccctttctcaaattgtcaaacttgtggaagaggcacaaacatcaaaggctcctatccagcagtttgcagacaaactcagtggctattttgttccttttattg

SEQ ID NO: 520252 - DNA, 120 bp, Artificial Sequence
  ENSG00000165240_25 (sequence is synthesized)
tttttgtttccattgccaccctcttggtatggattgtaattggatttctgaattttgaaattgtggaaacctactttcctggctacaatagaagtatctcccgaacagaaacgataatac

SEQ ID NO: 520253 - DNA, 120 bp, Artificial Sequence
  ENSG00000165240_26 (sequence is synthesized)
gatttgctttccaagcctctatcacagttctgtgtattgcatgtccctgttcactgggactggccactccaactgctgtgatggtgggtacaggagtaggtgctcaaaatggcatactaa

SEQ ID NO: 520254 - DNA, 120 bp, Artificial Sequence
  ENSG00000165240_27 (sequence is synthesized)
taaaaggtggagagccattggagatggctcataaggtaaaggtagtggtatttgataagactggaaccattactcacggaaccccagtggtgaatcaagtaaaggttctaactgaaagta

SEQ ID NO: 520255 - DNA, 120 bp, Artificial Sequence
  ENSG00000165240_28 (sequence is synthesized)
acagaatatcacaccataaaatcttggccattgtgggaactgctgaaagtaacagtgaacaccctctaggaacagccataaccaaatattgcaaacaggagctggacactgaaaccttgg

SEQ ID NO: 520256 - DNA, 120 bp, Artificial Sequence
  ENSG00000165240_29 (sequence is synthesized)
gtacctgcatagatttccaggttgtgccaggctgtggtattagctgtaaagtcaccaatattgaaggcttgctacataagaataactggaatatagaggacaataatattaaaaatgcat

SEQ ID NO: 520257 - DNA, 120 bp, Artificial Sequence
  ENSG00000165240_30 (sequence is synthesized)
ccctggttcaaattgatgccagtaatgaacagtcatcaacttcgtcttccatgattattgatgcccagatctcaaatgctcttaatgctcagcagtataaagtcctcattggtaaccggg

SEQ ID NO: 520258 - DNA, 120 bp, Artificial Sequence
  ENSG00000165240_31 (sequence is synthesized)
agtggatgattagaaatggtcttgtcattaataacgatgtaaatgatttcatgactgaacatgagagaaaaggtcggactgctgtattagtagcagttgatgatgagctgtgtggcttga

SEQ ID NO: 520259 - DNA, 120 bp, Artificial Sequence
  ENSG00000165240_32 (sequence is synthesized)
tagccattgcagacacagtgaagcctgaagcagaactggctatccatattctgaaatctatgggcttagaagtagttctgatgactggagacaacagtaaaacagctagatctattgctt

SEQ ID NO: 520260 - DNA, 120 bp, Artificial Sequence
  ENSG00000165240_33 (sequence is synthesized)
ctcaggttggcattactaaggtgtttgctgaagttctaccttctcacaaggttgctaaagtgaagcaacttcaagaggaggggaaacgggtagcaatggtgggagatggaatcaatgact

SEQ ID NO: 520261 - DNA, 120 bp, Artificial Sequence
  ENSG00000165240_34 (sequence is synthesized)
ccccagctctggcaatggctaatgtgggaattgctattggcacaggcacagatgtagccattgaagcagctgatgtggttttgataaggaatgatcttctggatgtagtggcaagtattg

SEQ ID NO: 520262 - DNA, 120 bp, Artificial Sequence
  ENSG00000165240_35 (sequence is synthesized)
tttatgcccattggtttggttttgcagccctggatgggatctgcagcaatggctgcttcatctgtttctgtagtactttcttctctcttccttaaactttacaggaaaccaacttacgag

SEQ ID NO: 520263 - DNA, 120 bp, Artificial Sequence
  ENSG00000165240_36 (sequence is synthesized)
agttatgaactgcctgcccggagccagataggacagaagagtccttcagaaatcagcgttcatgttggaatagatgatacctcaaggaattctcctaaactgggtttgctggaccggatt

SEQ ID NO: 520264 - DNA, 120 bp, Artificial Sequence
  ENSG00000165240_37 (sequence is synthesized)
gttaattatagcagagcctctataaactcactactgtctgataaacgctccctaaacagtgttgttaccagtgaacctgacaagcactcactcctggtgggagacttcagggaagatgat

SEQ ID NO: 520265 - DNA, 120 bp, Artificial Sequence
  ENSG00000165240_38 (sequence is synthesized)
gacactgcattataaaaggccatggagagtgctgccagtttaacttgtcatgcactgacacagcattcatgatgttaccttcacttttcaaaatattgtagaaggatttttctcatgctc

SEQ ID NO: 520266 - DNA, 120 bp, Artificial Sequence
  ENSG00000165240_39 (sequence is synthesized)
ttatattagggattctatttgagttgcgtttatctgttggcaaaaatatctttttcaaggcatcagctctgaacctagctttatttaaactgaatttccagtatatttttgttttcacta

SEQ ID NO: 520267 - DNA, 120 bp, Artificial Sequence
  ENSG00000165240_40 (sequence is synthesized)
acaacagataaggtagagcagtgaggtttacaacaagccctacaattagagattgctgaactgctgctaaagtgattttttttttatttgaccaaaaaaaaaaaggcccaagaagaagaa

SEQ ID NO: 520268 - DNA, 120 bp, Artificial Sequence
  ENSG00000165240_41 (sequence is synthesized)
aatgaaaaatttgaagatttgagagcatgaagatattcatgcttttgaactcaaaatattgaagatactctcaagcctgtatccctgccccactggggagcaatgactttcaaagcactg

SEQ ID NO: 520269 - DNA, 120 bp, Artificial Sequence
  ENSG00000165240_42 (sequence is synthesized)
tgtataaaacatctagttttagaagggaaacagttgaaactgtttaaaaatagatgtgccttatttattgcaggctttctttcccccattctccctgcatccttgtccttgcaggtgctt

SEQ ID NO: 520270 - DNA, 120 bp, Artificial Sequence
  ENSG00000165240_43 (sequence is synthesized)
ttttagatgctccaatatgtcttcttttgttattttctttcgagctaaccaagtttaggtggtttttcattgattaaaaataactgacaactgttctaatattttgctcctttttaaatt

SEQ ID NO: 520271 - DNA, 120 bp, Artificial Sequence
  ENSG00000165240_44 (sequence is synthesized)
ttgtagctcaaaagaccttaaaggtctgtagggttccctgcctcccatctttccactgttgtaaaaagtatatcaaattattccttcaagtttcctagctctgtgctcagtttcagttca

SEQ ID NO: 520272 - DNA, 120 bp, Artificial Sequence
  ENSG00000165240_45 (sequence is synthesized)
ctcctgccaagttggactctaagttattcttcatgtagtctgctgatctcagtctggaaacttaacattatgagccttttctgctcaaaaaattttcaaagattaaaactattatacata

SEQ ID NO: 520273 - DNA, 73 bp, Artificial Sequence
  ENSG00000165240_46 (sequence is synthesized)
caaagattaaaactattatacatatacaggtcatataaaattacctggattcactaaatttgttttgcagccc

SEQ ID NO: 520274 - DNA, 120 bp, Artificial Sequence
  ENSG00000165240_47 (sequence is synthesized)
attttttgaattgagtataatcactttgctagtatatataatttaatagattttatttatcttttagtgtttcagataacctctcaaaaagactttaaaataatgctattacacaaagct

SEQ ID NO: 520275 - DNA, 120 bp, Artificial Sequence
  ENSG00000165240_48 (sequence is synthesized)
agctgcatttaccaaaaaatacagtaaaatcataatacagaaactaaaatttccctaggttatgacgctttttagctaaatatatactcttctctagtttaaaacatttgaacttgccta

SEQ ID NO: 520276 - DNA, 120 bp, Artificial Sequence
  ENSG00000165240_49 (sequence is synthesized)
gttagtgtggttggcaaatttaggagcttgttcccattgccaaatggatttagaaattcccttgtgagtgcctggtagctaatacactggtcagagatctggtacttgtaagactattta

SEQ ID NO: 520277 - DNA, 120 bp, Artificial Sequence
  ENSG00000165240_50 (sequence is synthesized)
aatttctttgttagttgcaagatggatttcatatgcagaatatgtaaatgaagaggactcataagtaaattcctaacattttgttcccattaccagaagcaaagctgctgctaacccaac

SEQ ID NO: 520278 - DNA, 120 bp, Artificial Sequence
  ENSG00000165240_51 (sequence is synthesized)
atctggcacataggatttgtactcggtaaatgttagttcttttctccccttgaggtcagtaataaatacaaaaaaatcatttttctagagcagagtcttaaaatcaggtgggggtagggg

SEQ ID NO: 520279 - DNA, 120 bp, Artificial Sequence
  ENSG00000165240_52 (sequence is synthesized)
atggagttcttcctttcctaccccttttctcttttatcctttcatatatacacatgcaaagtttacaaccttattccatgctgtctttcagatttagaaaagatctaatttctgtctcag

SEQ ID NO: 520280 - DNA, 120 bp, Artificial Sequence
  ENSG00000165240_53 (sequence is synthesized)
ctgtcttaaagagagaactgaagcttttgatgaaggtgctattaatctagaaaggcaaacccatttcactgaaatatcaatgggtttgcatatctaggccctttttttagaccaatgcct

SEQ ID NO: 520281 - DNA, 120 bp, Artificial Sequence
  ENSG00000165240_54 (sequence is synthesized)
atgccatcctccatgctttcagtttgagttttattatttattattttaattccagtggcccatcttataatacaacttgtttcttctagaagacagagctgatagggtaaatgttgaaaa

SEQ ID NO: 520282 - DNA, 120 bp, Artificial Sequence
  ENSG00000165240_55 (sequence is synthesized)
aagaagcatgcctccttctccctcccacccacctcaagcagttgaacacagccagttattcttccattattatgtgtaccttggagtcatcctcttggtcttgtattcatattgtgggac

SEQ ID NO: 520283 - DNA, 120 bp, Artificial Sequence
  ENSG00000165240_56 (sequence is synthesized)
agtgggaatagcagcttgtagtattgaaataatcaaagagataatttcagctcttacaacaagaacagaaaacatgctaattagaaaaagtcctgctttaagtaatatgtagccacattt

SEQ ID NO: 520284 - DNA, 120 bp, Artificial Sequence
  ENSG00000165240_57 (sequence is synthesized)
gaatcctctaccacaagtcttttttgcaatcttgaactttcattagcttcaaagagaagctgtatttacaggagaaagaggtgattatggagggaatcaaaaatactgctttcagttagt

SEQ ID NO: 520285 - DNA, 120 bp, Artificial Sequence
  ENSG00000165240_58 (sequence is synthesized)
agctagctttaagtcaggagttagtaatgagaaattttataaatgtgtatttctgtgtattcacatacatatatatatacacacatatatatgtacatacacatacatacatattaccat

SEQ ID NO: 520286 - DNA, 120 bp, Artificial Sequence
  ENSG00000165240_59 (sequence is synthesized)
actgaagggaaatggatttatatttgaatttgatatttgaatatttgaagttctctatttatatttcatttatcactcttctgtattcactcagcaaccatgcccttagtctgaagataa

SEQ ID NO: 520287 - DNA, 120 bp, Artificial Sequence
  ENSG00000165240_60 (sequence is synthesized)
caaggatactttaatatccagtgccggttcagactcacctatgtggcaccttaaacttaaatatccaaagatgccttttgaatttcaaagattaaaacacagctagagtagtagtattgt

SEQ ID NO: 520288 - DNA, 120 bp, Artificial Sequence
  ENSG00000165240_61 (sequence is synthesized)
agtctcaagatgtatggtgtgtcatttgtgaaaatagaaacgttatttttcctagtttagtatcaacattttagaatgtcaaatttgatgccttgtgaacaagtaattttatattgtgct

SEQ ID NO: 520289 - DNA, 120 bp, Artificial Sequence
  ENSG00000165240_62 (sequence is synthesized)
ttaattttttaaaaagtattctttattcatatgtatagaatgcttaaaatagcactgtagacaagatgtttccaaaactttaagtgcgcatatcttttctgtatacagcttaaaatcaaa

SEQ ID NO: 520290 - DNA, 120 bp, Artificial Sequence
  ENSG00000165240_63 (sequence is synthesized)
aatgtatgttaagagaattttttctattacttatggatcatgctttaaaatgatttttcttgatatttattttactccattttgtttttttctctgggtgaggcatctggttactggtta

SEQ ID NO: 520291 - DNA, 120 bp, Artificial Sequence
  ENSG00000165240_64 (sequence is synthesized)
ttttaaaaagaataaagacattcctggaatcactccttttgggtttttgtttgttttgtttcttttctacatttttaagtattattttacaaaatagaaaaaatatagattcatgccaaa

SEQ ID NO: 520292 - DNA, 120 bp, Artificial Sequence
  ENSG00000165240_65 (sequence is synthesized)
ttattacctatttttacactaactttctgcagtccctccatctggtatgagtaaccagatagagcacaaagcatgagttcttgttcttcagttaaaagagcttctttcacagtgttgata

SEQ ID NO: 520293 - DNA, 120 bp, Artificial Sequence
  ENSG00000165240_66 (sequence is synthesized)
acaaatgccttttgtagccaaaaccaggcgtctcaaccttacgtttttagttaaagaaatgtttagctaaacgttgttgaacattgattgtttggtaccgaaaacagcagtggacgatgt

SEQ ID NO: 520294 - DNA, 120 bp, Artificial Sequence
  ENSG00000165240_67 (sequence is synthesized)
tgtgcaatatccatctactgtagttaagatattcagtagtttgtttttcataagcatgtaattgatcatatttctgccaaggatgtgccttcaactttataattatagtgttgtaaaata

SEQ ID NO: 520295 - DNA, 120 bp, Artificial Sequence
  ENSG00000165240_68 (sequence is synthesized)
cgattgtgtgagctttgttggagcctgcgtacgtggatttatcgctgccacggtctgcgtagctccagaggtttaaccataggatagagaaaccagatgaggaaactgagcatcagaaga

SEQ ID NO: 520296 - DNA, 62 bp, Artificial Sequence
  ENSG00000165240_69 (sequence is synthesized)
tctgttaagatggtgaattacactgattgattttcaaatgttgagccagccatgcattccca

SEQ ID NO: 520297 - DNA, 120 bp, Artificial Sequence
  ENSG00000165240_70 (sequence is synthesized)
tgaatatatctgctgtctcagatgacataatttatgaaagacttattggtaaacaaatatgctatatgaatgtaaagatatgttgttgttattttctgctatattttcatctgcacccta

SEQ ID NO: 520298 - DNA, 120 bp, Artificial Sequence
  ENSG00000165240_71 (sequence is synthesized)
gattctgactaggcaaatgagctttccttctccccatgcacaattttttccctctgttagtataaattggcaattttggctctccatttgtctttttatactgcccatgctctttccact

SEQ ID NO: 520299 - DNA, 120 bp, Artificial Sequence
  ENSG00000165240_72 (sequence is synthesized)
ctttaggaacctgactcataattatgatattaagcttttcagattaatctagccatgtccatcagatttactgttgtgtgtacatgttgagaaaactaattagaaagtatctggccagat

SEQ ID NO: 520300 - DNA, 120 bp, Artificial Sequence
  ENSG00000165240_73 (sequence is synthesized)
tacatgttgagaaaactaattagaaagtatctggccagatacaatttgtttcagtgatgccaaagtatggtaattcctagtttaatgtgtttacctttttctttttttttctttctttct

SEQ ID NO: 520301 - DNA, 120 bp, Artificial Sequence
  ENSG00000165240_74 (sequence is synthesized)
gtgctgatatgtccacatttaatttcctacattcatattcataccgctttcaaaagaaggtgttgtcaatgataaaacattagacagaaatagtttttagacagaggatgttaataagtt

SEQ ID NO: 520302 - DNA, 120 bp, Artificial Sequence
  ENSG00000165240_75 (sequence is synthesized)
cagatagtcaagaggtgttttaataatttatatcacagctacaacagaatatactaaaccaaaatttagaatttgattatagcttgactccctacaattttttcagaattaaaaagatga

SEQ ID NO: 520303 - DNA, 120 bp, Artificial Sequence
  ENSG00000165240_76 (sequence is synthesized)
atcccctttaaagcaaactaactgaagggaagcatctactttgtgaaaattgcctgtctaaaatggggtgggaaataactcccttttaagtaccgcacttttttttattctaccagaacc

SEQ ID NO: 520304 - DNA, 120 bp, Artificial Sequence
  ENSG00000165240_77 (sequence is synthesized)
tggtttctaaagatttcaacctatttttatagtctcagttttgtgagatgacaaagttcatcttagtgatttctaactaagaaagcacaaccacagaaacgaggaatggattctggaaag

SEQ ID NO: 520305 - DNA, 120 bp, Artificial Sequence
  ENSG00000165240_78 (sequence is synthesized)
ggaaacttcctgcaaattatgatgaatttacagaaatagtaaatatttaaattccataaatagttaatattgttgttgataattatttgtcttgatttctgttcaagaagtatacatttg

SEQ ID NO: 520306 - DNA, 120 bp, Artificial Sequence
  ENSG00000165240_79 (sequence is synthesized)
aattagcacacagtttattttattcctagcaatttagtatatttttcatagccatcaatatttgggattctgcttgcttatgattacaaatcacttgaaacctgccagttgaaaattctc

SEQ ID NO: 520307 - DNA, 120 bp, Artificial Sequence
  ENSG00000165240_80 (sequence is synthesized)
aagggtgtgaaatgatatgggccttcagtgaattcattcccctttatctgtataaaatacctggctaaacagttgtctttgacaattttaaattactgtttcctttcttaaaaactcctt

SEQ ID NO: 520308 - DNA, 120 bp, Artificial Sequence
  ENSG00000165240_81 (sequence is synthesized)
tccagaagctgatctcccgtacatttccagtacataatttttcatccttatctgtcctgacagtgattcagctttgaataagagagaatgttaccagagtttcacctttattggcctaag

SEQ ID NO: 520309 - DNA, 80 bp, Artificial Sequence
  ENSG00000165240_82 (sequence is synthesized)
acaattgcttacccttaaacatgtttatttttactgccaggccttaatgagtcagtaatggatatgtcattttagctgag

SEQ ID NO: 520310 - DNA, 120 bp, Artificial Sequence
  ENSG00000165240_83 (sequence is synthesized)
gccttaatgagtcagtaatggatatgtcattttagctgagttgtattctcatttgtgtaatatacttatcattttaatgttatcttatcattaaaacaaccttatattggtggtaattct

SEQ ID NO: 520311 - DNA, 120 bp, Artificial Sequence
  ENSG00000165244_0 (sequence is synthesized)
accgcggcggcaggttgttatttttgggggctcagcgccgcgcgtcctgctttcctgtcaccgcaagggccgggccgcccgctgcttcccacccctgcagcctgcgctgcggagtacaaa

SEQ ID NO: 520312 - DNA, 120 bp, Artificial Sequence
  ENSG00000165244_1 (sequence is synthesized)
gagcggagggcgcgcttgacctggggctggggtccagccctgcccgccggtgccgtctgctcaactagttaggtggctgctgcgcaggattccgggaaacgtcagtctgccatgagccgg

SEQ ID NO: 520313 - DNA, 120 bp, Artificial Sequence
  ENSG00000165244_2 (sequence is synthesized)
caggactgagcctgcgactcggagcagagcgagtgaggggcagagcggtgctcaggagtgcggcccggggccgccggagctgggggtcgggccgggcgatgatccggggcttcgaggcgc

SEQ ID NO: 520314 - DNA, 120 bp, Artificial Sequence
  ENSG00000165244_3 (sequence is synthesized)
ccatggcggagaacccgccgccgccgccgccgcccgtcatcttctgccacgactccccgaagcgggtgctggtgtcggtcatcaggacgaccccgatcaagccaacgtgcggcggtggag

SEQ ID NO: 520315 - DNA, 120 bp, Artificial Sequence
  ENSG00000165244_4 (sequence is synthesized)
gggagccggagccgccgccgccgctcatccccaccagccccggcttcagcgacttcatggtgtacccgtggcgctggggcgagaacgcacacaacgtgacgctcagccctggggccgcgg

SEQ ID NO: 520316 - DNA, 120 bp, Artificial Sequence
  ENSG00000165244_5 (sequence is synthesized)
cgagcactcggggcttcgtggccggggcgcgcccccgcccgccgcctcggcctccgccgccgcctcgggaggtgaggacgaggaggaagcgagcagcccagacagcggccacctcaagga

SEQ ID NO: 520317 - DNA, 120 bp, Artificial Sequence
  ENSG00000165244_6 (sequence is synthesized)
aggaggaagcgagcagcccagacagcggccacctcaaggatggaatccgacgtggtaggcccagagcagatactgtccgcgatttaataaatgaaggagagcattcatccagcagaatcc

SEQ ID NO: 520318 - DNA, 120 bp, Artificial Sequence
  ENSG00000165244_7 (sequence is synthesized)
gttgtaacatctgtaatagggtgtttccacgggagaaatcgctccaggctcacaaaaggactcatacaggtgagaggccctatctgtgtgactatccagactgtggaaaagcctttgttc

SEQ ID NO: 520319 - DNA, 120 bp, Artificial Sequence
  ENSG00000165244_8 (sequence is synthesized)
aaagtggacagctcaaaacacatcagcgtcttcacaccggagagaaaccttttgtttgttcagaaaatggctgcctgagcagattcacccatgcaaaccgccactgtccgaagcacccct

SEQ ID NO: 520320 - DNA, 120 bp, Artificial Sequence
  ENSG00000165244_9 (sequence is synthesized)
acgccaggctgaagagagaggagcccacggacacactcagcaaacatcaggctgccgacaacaaggccgcggccgagtggctggcgaggtattgggaaatgagagagcagcgcaccccca

SEQ ID NO: 520321 - DNA, 120 bp, Artificial Sequence
  ENSG00000165244_10 (sequence is synthesized)
ctttgaaaggcaagctggttcagaaggctgatcaggagcagcaggaccctctggaataccttcagtctgatgaagaggacgacgagaagagaggggcccagcgccggctgcaggagcagc

SEQ ID NO: 520322 - DNA, 120 bp, Artificial Sequence
  ENSG00000165244_11 (sequence is synthesized)
gggagcgcctgcatggagccctcgcgctcatagagcttgccaacctgactggggcgccactccgacagtagcttggacactgactcttccactgtacaaaagtactgcccagcatactta

SEQ ID NO: 520323 - DNA, 120 bp, Artificial Sequence
  ENSG00000165244_12 (sequence is synthesized)
aaaagtagatccttgggcataagctaagcaccttatttgcttatcataggctgctattctgtagaaatttatgaagaatgttattgccccagaatatggggtgagagagaactgcacttt

SEQ ID NO: 520324 - DNA, 120 bp, Artificial Sequence
  ENSG00000165244_13 (sequence is synthesized)
tttaatatggaaatgaattcatcgtaaagtttaaaatattttgtaaatatggactgcacagtacagggtagaaaactacatattgtgggaagctagattttgcaagtttaatgcattcat

SEQ ID NO: 520325 - DNA, 120 bp, Artificial Sequence
  ENSG00000165244_14 (sequence is synthesized)
tggaagcagttctcacaggaagcactttctgaataagacacttgtttgaaaaacagaatggtacaaatagccaaagaagattaaaacagattatttataagatcatttttaacaatatat

SEQ ID NO: 520326 - DNA, 120 bp, Artificial Sequence
  ENSG00000165244_15 (sequence is synthesized)
gtgcccactaaggctagagaaatgggaggctattttggaagatgttctaagtaatggacttagaagaaaatagatatttgaggctcttggtaagatgcacaatagttcagaatttttgaa

SEQ ID NO: 520327 - DNA, 120 bp, Artificial Sequence
  ENSG00000165244_16 (sequence is synthesized)
attggagcaaaatcagtcttattctatctggggctttacaactcagtataatgtttaagtttgaaaagcacttgtcatccctagcatgttaacttgggaacttttgcacatttcatattt

SEQ ID NO: 520328 - DNA, 120 bp, Artificial Sequence
  ENSG00000165244_17 (sequence is synthesized)
ctcatttgctgaaattgagtgattaatcttgcaaagtctaggtaacatagtaattggtaattttaaaaatacatattaagggccctgtaatgagatttggcacttggatttttactaaag

SEQ ID NO: 520329 - DNA, 120 bp, Artificial Sequence
  ENSG00000165244_18 (sequence is synthesized)
ggacacctgcagggttgttttgtagtgaaatgttttagatcttttgttagcaaacactacattttaattgtactgcttgtttagaattattagcaaatggaagcctccatatttatattt

SEQ ID NO: 520330 - DNA, 120 bp, Artificial Sequence
  ENSG00000165244_19 (sequence is synthesized)
tcagtgcataaagccaccttcttgctttacttcagagtaacatgccaagctattttgtgttcactaaatttagctatcagttaaacactgcagaaaatattagctactcaaataagtagg

SEQ ID NO: 520331 - DNA, 120 bp, Artificial Sequence
  ENSG00000165244_20 (sequence is synthesized)
cttctgaaatagttttaactgcaagtgtgttaacttgtgtggtggtttgaagccatttttccaaataaagttattaaacaccactttatgtactgaagcatgaacagaaaaatcaagagc

SEQ ID NO: 520332 - DNA, 120 bp, Artificial Sequence
  ENSG00000165244_21 (sequence is synthesized)
tgagcagaccacctcctttatgtaggcaaaacttccatcattttggcttttgttctaaacagaactaaatgacatgcatagcatggtaacttacagatcgcttaattggagtaaaactca

SEQ ID NO: 520333 - DNA, 120 bp, Artificial Sequence
  ENSG00000165244_22 (sequence is synthesized)
gagtaatagagggaaatatgggctcttcagtgcctttttagcttttttgagttgaagacgttcctacagatgtagtttaaacattacaaagtaggcttctttatccaaaaatcccaatgt

SEQ ID NO: 520334 - DNA, 120 bp, Artificial Sequence
  ENSG00000165244_23 (sequence is synthesized)
gtcatagtacacagatagtttaaaatatgtagccacggggaaggggaggcatgtaaatgtcttgaagaggagaaaaagtatgaaagaagatacgatagttacgaataatgtgtatgatga

SEQ ID NO: 520335 - DNA, 120 bp, Artificial Sequence
  ENSG00000165244_24 (sequence is synthesized)
ggacatactttaaaaatgtaattcctctgtacagtaaattacaaatctttagggatttttttgtaataagagaatttatatttgtaatggtctaagaatttttttgtaatgtggtatata

SEQ ID NO: 520336 - DNA, 120 bp, Artificial Sequence
  ENSG00000165244_25 (sequence is synthesized)
gaattttaatttggagcacttataagctggtaagagagactatagcatctgaattatcttggtttatgtttcagcatttcctctagaatttttgctctcaaatatgtgatttaatgaact

SEQ ID NO: 520337 - DNA, 120 bp, Artificial Sequence
  ENSG00000165244_26 (sequence is synthesized)
aaaaacaacactcatcagtcttgggaaatttgaactttgatcaacttaactaaagaaggaagggtagtaagaatttttcaaatacaaatatttgccaattcacagatgataacatttaag

SEQ ID NO: 520338 - DNA, 120 bp, Artificial Sequence
  ENSG00000165244_27 (sequence is synthesized)
gccttcaaaagtaagggtttttccttgtttctccagtcagcttttgtcaactctaatagttttttcataaacattttttatttgtataattgcaacagtttaagaaattatcacaactat

SEQ ID NO: 520339 - DNA, 120 bp, Artificial Sequence
  ENSG00000165244_28 (sequence is synthesized)
ttagaaacatttaaaatgttctttttgatataagctatatacttggaaaaatacattggtatctaaaatttgaggtgtgttaagactgctttttgttttaaaaaatggtttacattcaaa

SEQ ID NO: 520340 - DNA, 120 bp, Artificial Sequence
  ENSG00000165244_29 (sequence is synthesized)
tttttgaagtgttttatgcttcatatggctaagttgtagtttggcagagttaacagcataagaataaacatgctgtaattttaaaagatgctttgaataaaaatttattttaatttaaaa

SEQ ID NO: 520341 - DNA, 120 bp, Artificial Sequence
  ENSG00000165246_0 (sequence is synthesized)
gagacgaagcagggagagagtgaacttcagccccgtcccctccccactgccacggctggggcaacccaacccgcgcctgaagcggcttggcttgacctgcggaagcgcgggccgggatgg

SEQ ID NO: 520342 - DNA, 120 bp, Artificial Sequence
  ENSG00000165246_1 (sequence is synthesized)
cgtggggagagggaggtaggtgccactgggctgcagatgacgagtgggttgggggcttgctgtgggacaagaggttcaggttccggcctgcgccttccactccgcggtggcgctctctgc

SEQ ID NO: 520343 - DNA, 120 bp, Artificial Sequence
  ENSG00000165246_2 (sequence is synthesized)
ctgcggttttccaggaggccgatctaccccagggacactctcatccttcaggcggtctcctggacgccctttcctccccttgcctcccagcctgacctggctctttcgcccctcggagaa

SEQ ID NO: 520344 - DNA, 120 bp, Artificial Sequence
  ENSG00000165246_3 (sequence is synthesized)
ccggttgcattggagttttcgaaagacttatctttctgcaggctcgcctctgagctttgtctccttggagccacctcacttagacagcttcggatgtggatgcagatttgaaccatgttg

SEQ ID NO: 520345 - DNA, 120 bp, Artificial Sequence
  ENSG00000165246_4 (sequence is synthesized)
cgtccccagggactgctatggctccctttgttgttcacctctgtctgtgtcatgttaaactccaatgttcttctgtggataactgctcttgccatcaagttcaccctcattgacagccaa

SEQ ID NO: 520346 - DNA, 120 bp, Artificial Sequence
  ENSG00000165246_5 (sequence is synthesized)
gcacagtatccagttgtcaacacaaattatggtaaaatccagggcctaagaacaccattacccagtgagatcttgggtccagtggagcagtacttaggggtcccctatgcctcaccccca

SEQ ID NO: 520347 - DNA, 120 bp, Artificial Sequence
  ENSG00000165246_6 (sequence is synthesized)
actggagagaggcggtttcagccaccagaatccccatcctcctggactggcatccgaaatgctactcagttttctgctgtgtgcccccagcacctggatgaaagattcttattgcatgac

SEQ ID NO: 520348 - DNA, 120 bp, Artificial Sequence
  ENSG00000165246_7 (sequence is synthesized)
atgctgcccatctggtttaccaccagtttggatactttgatgacctatgttcaagatcaaaatgaagactgcctttacttaaacatctatgtgcccatggaagatgatattcatgaacag

SEQ ID NO: 520349 - DNA, 120 bp, Artificial Sequence
  ENSG00000165246_8 (sequence is synthesized)
aacagtaagaagcctgttatggtctatatccatgggggatcttacatggagggaaccggtaacatgattgatggcagcattttggccagctatgggaacgtcatcgttatcaccattaac

SEQ ID NO: 520350 - DNA, 120 bp, Artificial Sequence
  ENSG00000165246_9 (sequence is synthesized)
taccgtctgggaatactagggtttttaagtaccggtgaccaggcagcaaaaggcaactatgggctcctggatcagattcaagcactgaggtggattgaggagaatgtcggagcctttggc

SEQ ID NO: 520351 - DNA, 120 bp, Artificial Sequence
  ENSG00000165246_10 (sequence is synthesized)
ggggaccccaagagagtgactatctttggctcgggggctggggcctcctgtgtcagcctgttgaccctgtcccactactcagaaggtctcttccagaaggccatcattcagagcggcact

SEQ ID NO: 520352 - DNA, 120 bp, Artificial Sequence
  ENSG00000165246_11 (sequence is synthesized)
gccctgtccagctgggcagtgaactaccagccggccaagtacactcggatattggcagacaaggtcggctgcaacatgctggacaccacggacatggtagaatgtctgaagaacaagaac

SEQ ID NO: 520353 - DNA, 120 bp, Artificial Sequence
  ENSG00000165246_12 (sequence is synthesized)
tacaaggagctcatccagcagaccatcaccccggccacctaccacatagcctttgggccggtgatcgacggcgacgtcatcccagacgacccccagatcctgatggagcaaggcgagttc

SEQ ID NO: 520354 - DNA, 120 bp, Artificial Sequence
  ENSG00000165246_13 (sequence is synthesized)
ctcaactacgacatcatgctgggcgtcaaccaaggggaaggcctgaagttcgtggacggcatcgtggataacgaggacggtgtgacgcccaacgactttgacttctccgtgtccaacttc

SEQ ID NO: 520355 - DNA, 120 bp, Artificial Sequence
  ENSG00000165246_14 (sequence is synthesized)
gtggacaacctttacggctaccctgaagggaaagacactttgcgggagactatcaagttcatgtacacagactgggccgataaggaaaacccggagacgcggcggaaaaccctggtggct

SEQ ID NO: 520356 - DNA, 120 bp, Artificial Sequence
  ENSG00000165246_15 (sequence is synthesized)
ctctttactgaccatcagtgggtggcccccgccgtggccaccgccgacctgcacgcgcagtacggctcccccacctacttctatgccttctatcatcactgccaaagcgaaatgaagccc

SEQ ID NO: 520357 - DNA, 120 bp, Artificial Sequence
  ENSG00000165246_16 (sequence is synthesized)
agctgggcagattcggcccatggcgatgaagtcccctatgtcttcggcatccccatgatcggtcccacagagctcttcagttgtaatttctccaagaacgacgtcatgctcagtgccgtg

SEQ ID NO: 520358 - DNA, 120 bp, Artificial Sequence
  ENSG00000165246_17 (sequence is synthesized)
gtgatgacctactggacgaacttcgccaaaactggtgatccaaaccaaccagttcctcaggataccaagttcattcatacaaaacccaatcgctttgaagaagtggcctggtccaagtat

SEQ ID NO: 520359 - DNA, 120 bp, Artificial Sequence
  ENSG00000165246_18 (sequence is synthesized)
aatcccaaagaccagctctatctgcatattggcttgaaacccagagtgagagatcactaccgggcaacgaaagtggctttctggttggaattggttcctcatttgcacaacttgaacgag

SEQ ID NO: 520360 - DNA, 120 bp, Artificial Sequence
  ENSG00000165246_19 (sequence is synthesized)
atattccagtatgtttcaacaaccacaaaggttcctccaccagacatgacatcatttccctatggcacccggcgatctcccgccaagatatggccaaccaccaaacgcccagcaatcact

SEQ ID NO: 520361 - DNA, 120 bp, Artificial Sequence
  ENSG00000165246_20 (sequence is synthesized)
cctgccaacaatcccaaacactctaaggaccctcacaaaacagggcccgaggacacaactgtcctcattgaaaccaaacgagattattccaccgaattaagtgtcaccattgccgtcggg

SEQ ID NO: 520362 - DNA, 120 bp, Artificial Sequence
  ENSG00000165246_21 (sequence is synthesized)
gcgtcgctcctcttcctcaacatcttagcctttgcggcgctgtactacaaaaaggacaagaggcgccatgagactcacaggcaccccagtccccagagaaacaccacaaatgatatcact

SEQ ID NO: 520363 - DNA, 120 bp, Artificial Sequence
  ENSG00000165246_22 (sequence is synthesized)
cagatgaagcagctggaacacgatcacgagtgtgagtcgctgcaggcacacgacacgctgaggctcacctgccctccagactacaccctcacgctgcgccggtcgccggatgacatccca

SEQ ID NO: 520364 - DNA, 120 bp, Artificial Sequence
  ENSG00000165246_23 (sequence is synthesized)
tttatgacgccaaacaccatcaccatgattccaaacacattgatggggatgcagcctttacacacttttaaaaccttcagtggaggacaaaacagtacaaatttaccccacggacattcc

SEQ ID NO: 520365 - DNA, 120 bp, Artificial Sequence
  ENSG00000165246_24 (sequence is synthesized)
accactagagtatagcttttccctatttcccctcctatccctctgcccctactgctcagcaatgtaaaagagacaaataaggagaaagaaaatctccaaaccaggaatgtttttgtgcca

SEQ ID NO: 520366 - DNA, 120 bp, Artificial Sequence
  ENSG00000165246_25 (sequence is synthesized)
ctgactttagataaaaatgcaaaagggcagtcatcctgtcccagcagacccttctcattggcattttccagtattgtgagatcaatttctgaccatatgaaatgtgaaaagtatatgttt

SEQ ID NO: 520367 - DNA, 120 bp, Artificial Sequence
  ENSG00000165246_26 (sequence is synthesized)
ctgttacaatactgctttaagatctaaaccatgccaacagatgtttcgtgtgactaggacatcaccatttcaaggaactgtgtgtttccaacatcatggtagcagcacacacttccaaag

SEQ ID NO: 520368 - DNA, 120 bp, Artificial Sequence
  ENSG00000165246_27 (sequence is synthesized)
ctcagccagggacacttaatattttttaattacaatggaaatttaaacatttttatgtgggctacacaatggatggctcttcttaagtgaagaaagactctataggcttttacacagcac

SEQ ID NO: 520369 - DNA, 120 bp, Artificial Sequence
  ENSG00000165246_28 (sequence is synthesized)
atgaagcagtaatccagaaagaaggaaatgcagaattttattatcaaagtaagcgaattgactgtgcagaaaaattgtagggttctgtggaaggaggtattctgccagcctgaactatat

SEQ ID NO: 520370 - DNA, 120 bp, Artificial Sequence
  ENSG00000165246_29 (sequence is synthesized)
ttaagaaactttgtaaaaaataaaaatgtatatagctgtgagctcaaacaaaaactgcagacaaacaaaaaagagaaaagcttttatttgtgttttcagtttgaaagaacttttagcaag

SEQ ID NO: 520371 - DNA, 120 bp, Artificial Sequence
  ENSG00000165246_30 (sequence is synthesized)
gttgtgctttcaaacacatattagtcctaccaccttagttcctctacagcaaaagaggcttttcttcttaattacatgtaaacaaagacatgggattttctgacgtaagattttcatttg

SEQ ID NO: 520372 - DNA, 120 bp, Artificial Sequence
  ENSG00000165246_31 (sequence is synthesized)
taggaatatgtgatgtcaaatggaagactcagaagttttgtgtggcctatttctccctgtcaggttgcacagatgcatgtagagcattcttaggagaccattgttttagaaaactttgat

SEQ ID NO: 520373 - DNA, 120 bp, Artificial Sequence
  ENSG00000165246_32 (sequence is synthesized)
ttgtacatgttagttttcatgaaattgcaacacagagataggtcctaaaagtggaatgtatttaaaacttgttgaattagacacacacacacagacacacacaaagaatcagcagagaaa

SEQ ID NO: 520374 - DNA, 120 bp, Artificial Sequence
  ENSG00000165246_33 (sequence is synthesized)
acaaaatacaagtcctgttctgtagttcttgccctttgaatatatttgggaagagttgcttcctatttcaggaccctgccaaaaaagaagaaagcttgcctttggtggggctatgcccct

SEQ ID NO: 520375 - DNA, 120 bp, Artificial Sequence
  ENSG00000165246_34 (sequence is synthesized)
tggagtaaatacagctctgtgttccctagcagctgccggaggatttggctgatgaagtacctgctcagcttagctaatcagattaaaggaagacatgtatgtcttttgtttaagcaccta

SEQ ID NO: 520376 - DNA, 120 bp, Artificial Sequence
  ENSG00000165246_35 (sequence is synthesized)
gtcccttatgtatcagtaaacaggtttttaaaaatcttttatgtcatttataggataaaacatatgcttgtctgaaaatatcaccttttgtggatttatctgatcaccaaataataaata

SEQ ID NO: 520377 - DNA, 120 bp, Artificial Sequence
  ENSG00000165246_36 (sequence is synthesized)
ttaagaagaatgggggaaaaaggatagaatattaaaactgctttgcataggtttttggggaaattaggatatcttcactgacaagacactgaatggaatttattcacccattttaaattg

SEQ ID NO: 520378 - DNA, 120 bp, Artificial Sequence
  ENSG00000165246_37 (sequence is synthesized)
gttacttggggatcagagatttgtctctccaacagcttgtggttttcttattactcattttcaggaaagtttgtagtattacaaggcagaaggaaacacagtagcaatggttgctctata

SEQ ID NO: 520379 - DNA, 120 bp, Artificial Sequence
  ENSG00000165246_38 (sequence is synthesized)
ttttgtctttcaaagattactgcattaccaagaaacagtagccaaagatgtttgaagatcatgtcccttagctgcattgtgggttattctagaaatccaatgttaaatgcctctactaaa

SEQ ID NO: 520380 - DNA, 120 bp, Artificial Sequence
  ENSG00000165246_39 (sequence is synthesized)
gtggggattccccataaaaattgtccagctacctgactcttttgcaataacaactttgattactgaatccatacactcaaactatagtgatatatcagtgtttgggagtgacctctagaa

SEQ ID NO: 520381 - DNA, 120 bp, Artificial Sequence
  ENSG00000165246_40 (sequence is synthesized)
aaaagaaaactgtttttagaaatacataaaatcacttccaaatcctgttgcttatgttgggttaaatttgaaagcaattctctatatataaatatgtgaaatattatgatctgaacttag

SEQ ID NO: 520382 - DNA, 120 bp, Artificial Sequence
  ENSG00000165246_41 (sequence is synthesized)
cacacatgaagcaacatttctttgctacacagaggtgtcttggaaagatttcattcccaattcatttttcatagatctataatcaggcaatttctgcaagcaatgtatgaccccacctga

SEQ ID NO: 520383 - DNA, 120 bp, Artificial Sequence
  ENSG00000165246_42 (sequence is synthesized)
gcaaccacaaataggctctccatgaaactgcaaaggaactgatgtgtggcatccatgctggttttgtctgtctataatatgaattcaagtatctgttcatatttccaattgtctcctgct

SEQ ID NO: 520384 - DNA, 120 bp, Artificial Sequence
  ENSG00000165246_43 (sequence is synthesized)
agcaatatgtgccacaacatgacagtcttgtgacatcttaaggaaaagaagagttcctgttaaatgaatagctttagcttttacaggggattatgattaaaagtgatttagtacatctta

SEQ ID NO: 520385 - DNA, 120 bp, Artificial Sequence
  ENSG00000165246_44 (sequence is synthesized)
tttttttcccttccttcatctcctggcctcggataagataaggcttgggggatgcacgaaataatccaagtgattgattagacctggcatggcttggttgggctggagaaagatcggggc

SEQ ID NO: 520386 - DNA, 120 bp, Artificial Sequence
  ENSG00000165246_45 (sequence is synthesized)
gccggaagcagaaggacctctctcccctagctctctttttcttgcagagacatctttctcccatctctgtctgttagtacagagctcttattcagccactagctcggcctttcctgcttc

SEQ ID NO: 520387 - DNA, 120 bp, Artificial Sequence
  ENSG00000165246_46 (sequence is synthesized)
aattgtaatgcttgttctgcccggggacacactattgacagcagaaacaatgaatttcctccaaacccggcaatgttggtggctcttgcattcctctggatgagcgaatctagttggggg

SEQ ID NO: 520388 - DNA, 120 bp, Artificial Sequence
  ENSG00000165246_47 (sequence is synthesized)
gttcccgaaggggaaggcgcctgggctttcaatacatcctcctgaatcatactgcgtttcaggttccttagaaaaatttggatgtgtaaaaagaactcttaacggcgatgcaggtcttcc

SEQ ID NO: 520389 - DNA, 120 bp, Artificial Sequence
  ENSG00000165246_48 (sequence is synthesized)
tatttatagaaaacgagaaaaaagaaaaaaatgagaaacaagtaagaaaaaatcctttcctaggcttttccttgatcttcagaggcacacagggtttaatggttccttaggttattattt

SEQ ID NO: 520390 - DNA, 120 bp, Artificial Sequence
  ENSG00000165246_49 (sequence is synthesized)
tgaggttttgttctttcttttgccttaagtaatgacagaagatatatatggccagacacatatgtataaacttttcagcagcattttaataataaaatatcacactattttctaatgctt

SEQ ID NO: 520391 - DNA, 120 bp, Artificial Sequence
  ENSG00000165246_50 (sequence is synthesized)
tgtacaaacaattatgcatctgttctttcttggtaggtggaatattttatttacttttgccattctttgaatgcctttttctttgtaaatgctacatggtagctctcacataggctacaa

SEQ ID NO: 520392 - DNA, 120 bp, Artificial Sequence
  ENSG00000165246_51 (sequence is synthesized)
atggataaatacatttggtaatgggatggtttctttagctttggccagctgcacagttgaggaggctctgctggcctgattttggaaaaccaagccctgtttggtgaagctcctgagatg

SEQ ID NO: 520393 - DNA, 120 bp, Artificial Sequence
  ENSG00000165246_52 (sequence is synthesized)
acactgcctgaaaatgagtatttggttgtgttatttctaccactgttcattcttgtgtctctgtgttttgatttgtgttcaacaaactgatgccttaatggtttcaaatagaaagcctta

SEQ ID NO: 520394 - DNA, 120 bp, Artificial Sequence
  ENSG00000165246_53 (sequence is synthesized)
ggtgagtaaaccttctagtgacagtaagaaattctactgaatgaaactccagaggcagaaaatcattgtcattccaatgggagctcaattgtcaattccttcctgtgcattcagccatca

SEQ ID NO: 520395 - DNA, 120 bp, Artificial Sequence
  ENSG00000165246_54 (sequence is synthesized)
cgaacttatttcacattcacagtagctctaaggggcaggcacctgcattactcccctttcataatggaagatgttctgactttgaaacatgcccccttggacaggaaaatttgatggata

SEQ ID NO: 520396 - DNA, 120 bp, Artificial Sequence
  ENSG00000165246_55 (sequence is synthesized)
acaggatagcatatcctcatatcccaatctttcaccaagaagttatacagcaaacacttgtaagtcaaggtcttgcatgataatctttgctaagtagcaagtaaagaaatatagcaagga

SEQ ID NO: 520397 - DNA, 120 bp, Artificial Sequence
  ENSG00000165246_56 (sequence is synthesized)
cccagactctttggaatatgtgaactaaatccttcagatgttgttggcctcaatcatgttgtgaaggcacacaggagaatacatacacacacatatgcatatatgtatatatgtacatgt

SEQ ID NO: 520398 - DNA, 120 bp, Artificial Sequence
  ENSG00000165246_57 (sequence is synthesized)
atgtgtacattatatatgagtatacatgtacctatcctatatatgtatgtatgtatagagtcacagactgcataatgttttggacaaatatagatcacatatatgatgatagtgtcttga

SEQ ID NO: 520399 - DNA, 120 bp, Artificial Sequence
  ENSG00000165246_58 (sequence is synthesized)
gattaaaataccatgtttttattgtaccttttcagtgttcagatatgtttagacaaacaaatgcttatcattgtgttacagttgcctaaggtcttctctccagtcacatgctgtacaggt

SEQ ID NO: 520400 - DNA, 120 bp, Artificial Sequence
  ENSG00000165246_59 (sequence is synthesized)
ttgtagactggaagaactaggctataccatagagcctaggtgtgctataggctacacatcggttttgtgtaagtatactacatgatgtttgcacaatgatgaaattgcctaacgaaactt

SEQ ID NO: 520401 - DNA, 120 bp, Artificial Sequence
  ENSG00000165246_60 (sequence is synthesized)
ttctcagaaacctattgatacatgactgtgtatgtttacattatatatactgtatatgcacacatgcatatatgcatatatatgttatacatttacatatgtacatggatatcacatact

SEQ ID NO: 520402 - DNA, 120 bp, Artificial Sequence
  ENSG00000165246_61 (sequence is synthesized)
ttaaattcctgaagatgtcattttcattaaatacatatgcacacacactcataaacacacacagactcatatatacacacaaatctataacacatttgtgctcacatatacattcctctg

SEQ ID NO: 520403 - DNA, 120 bp, Artificial Sequence
  ENSG00000165246_62 (sequence is synthesized)
tgtgtgtgtgtgtattacattactgctttttatctgtgaaatcacattctgcagtttcatttactgtgatcaactatgatctaaaaatatatgagtacttcaataagatattttgaaaga

SEQ ID NO: 520404 - DNA, 120 bp, Artificial Sequence
  ENSG00000165246_63 (sequence is synthesized)
aaccacattcacataacatttatgacattataattgttctattttattagctattgttcatctcttactccatctactttataaattaagcttcataataagtgtgtatatttaataaaa

SEQ ID NO: 520405 - DNA, 120 bp, Artificial Sequence
  ENSG00000165246_64 (sequence is synthesized)
acgacgtgggtgggagtggtgaggcaagccgcaaaagtggggtagagctggtggttttgcttcttcggaagcctttgagtgtggcctggaccttagatgggggtgcagggcggtttgccg

SEQ ID NO: 520406 - DNA, 120 bp, Artificial Sequence
  ENSG00000165246_65 (sequence is synthesized)
ctgccaccctcggcaccatctctgaactgcccgcttttccggaggagcggaaaagttggaagccgaaaagacaggcgcccggagccctggtctaggtatcaggtgatccggagccctagt

SEQ ID NO: 520407 - DNA, 120 bp, Artificial Sequence
  ENSG00000165246_66 (sequence is synthesized)
ctcatggaaactgcaagcatcgttgtcagctgcacctgcaggcaccacgggattgcaagtcagcataccctttcagaaatgaggatgaaattagagatggagtgttgctctgtcacccag

SEQ ID NO: 520408 - DNA, 120 bp, Artificial Sequence
  ENSG00000165259_0 (sequence is synthesized)
attgtctgaagcggcactggagacccaggaaaaatctcgctgaatccgcctgccccagcagcggcctgatctgggttccgctgattcctttcgtaaccgcaccacacccgagatgaatct

SEQ ID NO: 520409 - DNA, 120 bp, Artificial Sequence
  ENSG00000165259_1 (sequence is synthesized)
acgttctgtatttactgtagaacaacaaaggattttacagcgttattatgaaaatggaatgacaaatcaaagtaaaaattgctttcagctcatattacagtgtgcacaggagactaagct

SEQ ID NO: 520410 - DNA, 120 bp, Artificial Sequence
  ENSG00000165259_2 (sequence is synthesized)
ggacttcagtgtagtcaggacgtgggttggcaataagagaagaaagatgagtagtaagaactctgaatctggaacagcaacaacaggaacctctttgtcagctccagacatcacagtcag

SEQ ID NO: 520411 - DNA, 120 bp, Artificial Sequence
  ENSG00000165259_3 (sequence is synthesized)
aaatgtggttaatattgctcgaccctcaagccagcagtcttcttggacatctgccaataatgatgtcattgtaactggtatatacagtccagccagttcatcaagtaggcaaggaacaaa

SEQ ID NO: 520412 - DNA, 120 bp, Artificial Sequence
  ENSG00000165259_4 (sequence is synthesized)
caaacatacagacacacaaattacagaagcacataaaatccctattcagaaaacagccactaaaaatgatactgagtttcagttacacattcctgtccaaagacaagtagcacactgtaa

SEQ ID NO: 520413 - DNA, 120 bp, Artificial Sequence
  ENSG00000165259_5 (sequence is synthesized)
aaatgcttccctactcctaggtgaaaaaacaattattttgtcaagacagacaagtgtgctaaatgctggaaactcagtattcaatcacgcaaagaaaaactatggaaactcttcagtaca

SEQ ID NO: 520414 - DNA, 120 bp, Artificial Sequence
  ENSG00000165259_6 (sequence is synthesized)
agcttctgaaatgacagtacctcaaaagccttctgtgtgccaccgaccttgtaaaattgaaccagttgggattcaaaggtcatataagcctgaacacacaggcccagcattacataactt

SEQ ID NO: 520415 - DNA, 120 bp, Artificial Sequence
  ENSG00000165259_7 (sequence is synthesized)
atgtgggcaaaagccaactattagagacccttactgtagaacacaaaacttggaaatccgtgaagtgttttcattggcagttagcgattacccccagagaattctgggaggaaatgcccc

SEQ ID NO: 520416 - DNA, 120 bp, Artificial Sequence
  ENSG00000165259_8 (sequence is synthesized)
acagaagcctagctcagcagaaggaaattgtttgtccattgcaatggagactggagatgctgaggatgaatatgccagagaggaagagctggcatcgatgagagcacagataccaagcta

SEQ ID NO: 520417 - DNA, 120 bp, Artificial Sequence
  ENSG00000165259_9 (sequence is synthesized)
ttcgagattttatgaaagtggcagttcccttcgagctgagaaccaaagtacaaccttgcccggaccaggaagaaatatgccaaattcacaaatggtgaatattagagatatgtcagacaa

SEQ ID NO: 520418 - DNA, 120 bp, Artificial Sequence
  ENSG00000165259_10 (sequence is synthesized)
tgtactgtatcaaaacagaaactaccatttgacaccacggacctcattacatacagcatctagtacaatgtacagtaataccaatccattacggagtaatttttctcctcattttgcatc

SEQ ID NO: 520419 - DNA, 120 bp, Artificial Sequence
  ENSG00000165259_11 (sequence is synthesized)
atcaaaccaattgagattatcacaaaaccaaaacaattaccagatttcaggaaaccttactgtgccttggattacagggtgttctagaaaaagagcactacaggaccgcactcagttcag

SEQ ID NO: 520420 - DNA, 120 bp, Artificial Sequence
  ENSG00000165259_12 (sequence is synthesized)
tgaccgagacttagccacccttaagaagtattgggacaatggcatgaccagcctgggctctgtttgtagagagaaaattgaagctgtggcaactgaattaaatgttgactgtgaaatagt

SEQ ID NO: 520421 - DNA, 120 bp, Artificial Sequence
  ENSG00000165259_13 (sequence is synthesized)
tcggacttggattgggaatcgaagaaggaaatatcgtttaatggggattgaagttccacctccaagaggaggccctgctgatttctctgagcagcctgagtctggttctttatctgcact

SEQ ID NO: 520422 - DNA, 120 bp, Artificial Sequence
  ENSG00000165259_14 (sequence is synthesized)
cacaccaggagaggaagctgggcctgaagtaggagaggataatgacagaaatgatgaagtatccatctgtttgtctgaaggaagctctcaagaagagcccaatgaagttgttccgaatga

SEQ ID NO: 520423 - DNA, 120 bp, Artificial Sequence
  ENSG00000165259_15 (sequence is synthesized)
tgcaagggctcataaggaagaggaccaccatgcagtaaccacagataatgtgaaaatagaaattattgatgatgaagaaagtgacatgataagtaattctgaagtagaacaagtaaactc

SEQ ID NO: 520424 - DNA, 120 bp, Artificial Sequence
  ENSG00000165259_16 (sequence is synthesized)
tttcttggattataagaatgaagaagtcaaattcattgaaaatgagctcgagattcaaaagcaaaaatactttaaacttcagacttttgttagaagcttgatattagcaatgaaagctga

SEQ ID NO: 520425 - DNA, 120 bp, Artificial Sequence
  ENSG00000165259_17 (sequence is synthesized)
tgataaggaacaacagcaggcactgctgtcagatttacctcctgaattagaggaaatggatttcaatcatgcctcactggagcctgatgatacctcattcagtgtatcttctttgtcaga

SEQ ID NO: 520426 - DNA, 120 bp, Artificial Sequence
  ENSG00000165259_18 (sequence is synthesized)
gaaaaatgtctcagaaagtttgtgatttcagttggagggaatatatgatacagtcttttggcttcgtaacaggtgtgcatttcaagataactgcattctgttgccctggtattctttagt

SEQ ID NO: 520427 - DNA, 120 bp, Artificial Sequence
  ENSG00000165259_19 (sequence is synthesized)
tgggaaaacacattgttgaaacggacgtattctgtgaagaatgtacaagatataatggctacagtgcaacaaaaatgtaggtgaaatttaaaagcattgtttgagagagtatttttttaa

SEQ ID NO: 520428 - DNA, 120 bp, Artificial Sequence
  ENSG00000165259_20 (sequence is synthesized)
ctgatggaactctggaaaaaaattatatttaagtttcagcagtttaaccctgaaattcattatgtctaatttctaaccagagacaaaataactaaagacatttcagcattgcttatcaag

SEQ ID NO: 520429 - DNA, 120 bp, Artificial Sequence
  ENSG00000165259_21 (sequence is synthesized)
ttgctacagcttgattagtcttgtttttgtagccattacatcttctttcttcttctctccttttcctatcatccacttacactttttctcaggaaagtggactgaacatttaaaacaaaa

SEQ ID NO: 520430 - DNA, 120 bp, Artificial Sequence
  ENSG00000165259_22 (sequence is synthesized)
ctttaaaaaattatttaactcattatttaatgagttctctgatttagtttttaacccctatgaaaatttgacttaaactaatgactgaaaattaaatgattacaggtatgtaattgtaaa

SEQ ID NO: 520431 - DNA, 120 bp, Artificial Sequence
  ENSG00000165259_23 (sequence is synthesized)
ttgctggtgttcttctattatctaacccaaatatttgtgtgggggtggggaagcacaatggaaaggtaatttaaccaacataacgtcaaataaattacgaagtgtacagaaacaaaatgt

SEQ ID NO: 520432 - DNA, 120 bp, Artificial Sequence
  ENSG00000165259_24 (sequence is synthesized)
tgtcaaaattagtcttgatggggattcttcattactacaaatgacaagtattgatacgattgacattccagtagtaaatttgtatacctgggttagatgaagtgttacacaaatatttta

SEQ ID NO: 520433 - DNA, 120 bp, Artificial Sequence
  ENSG00000165259_25 (sequence is synthesized)
ttaaaaatttagtcattcagctttgccacaaaatttacctcatttccatatgaggcctgtacagagccatcagccaaggatagtattcaaaaagagttatactactttggttgtaaatca

SEQ ID NO: 520434 - DNA, 120 bp, Artificial Sequence
  ENSG00000165259_26 (sequence is synthesized)
cagtcttctgaattccatgaatactattctatgagtacacacctaaaatgggcaagctacccagttttctattattagtaggtaccagatggcaacacactgtagactgttctttgtagt

SEQ ID NO: 520435 - DNA, 120 bp, Artificial Sequence
  ENSG00000165259_27 (sequence is synthesized)
tcttcctttctggagtaccagatggtattaccaagacccatagaagaaaaaatgtcagtttctccctaagcccacagtgtcatatatttgtgacttggcagtgtgcaattgtgttgcatg

SEQ ID NO: 520436 - DNA, 120 bp, Artificial Sequence
  ENSG00000165259_28 (sequence is synthesized)
gttaaattactatctatacctaaaagattaatgaagtagctggatggctgtttcagccatcaagtttctgtttccaatttgtttttaatttttgttggtacctagtaggtattcagatat

SEQ ID NO: 520437 - DNA, 120 bp, Artificial Sequence
  ENSG00000165259_29 (sequence is synthesized)
ttttaaaaatttgtaattagagccaaatttgatcttgaaatttactagtactaacttatgaacacagaaaggcagtcataaatgtctttacccttgaagtgtcccatcctcccacacaca

SEQ ID NO: 520438 - DNA, 120 bp, Artificial Sequence
  ENSG00000165259_30 (sequence is synthesized)
caaataggtaagctcccactgatagtctttcattttgtcacttatttgtttatattgctgccatactactgatatggtccctttgttagtaggaatatttcagtgttcagatatgcttcc

SEQ ID NO: 520439 - DNA, 120 bp, Artificial Sequence
  ENSG00000165259_31 (sequence is synthesized)
ttgagccatatggagttttgcaaacaatagttagtttttcttgctgacaagtcaaattccattcagagaaagcagcagagagtaacagagcctcagatattacgattaaatgtaccagtc

SEQ ID NO: 520440 - DNA, 120 bp, Artificial Sequence
  ENSG00000165259_32 (sequence is synthesized)
acaccaactcctccatgagatgaagagtcgcccccatatacaacgaagttagaaaccacttattaagtagcatgaacaaattccaggccttcaagtctctcctagggtctgcttcatagt

SEQ ID NO: 520441 - DNA, 120 bp, Artificial Sequence
  ENSG00000165259_33 (sequence is synthesized)
cattgagtttatctttcaaatataattacttctgcttcaatttaagccccttcttatttggttctcattgcaaattaactataggtatattctctcctacagcttttaacactatagatt

SEQ ID NO: 520442 - DNA, 120 bp, Artificial Sequence
  ENSG00000165259_34 (sequence is synthesized)
ttatttgtcacgcatcagccattagtcactaaatcgaaaaatacttgttgagctcctgctatagagaagacactgtgctggacattggatttctcagcaagctgtaaacatcacaaataa

SEQ ID NO: 520443 - DNA, 120 bp, Artificial Sequence
  ENSG00000165259_35 (sequence is synthesized)
ttatttctttttaacatcttctatgatattaataaaccatatttaagtagaatttttaatagatttaaggttctgctaggtgtgattcttagaaggattcctagtccacaattttgagag

SEQ ID NO: 520444 - DNA, 120 bp, Artificial Sequence
  ENSG00000165259_36 (sequence is synthesized)
aaagcatagatgatctttttgtctctgtttaacatttcatcaaaatagaaactatataaatcataacaatacatttagaactccttttgtcttgaaatttgtgtttcagcaccagaatat

SEQ ID NO: 520445 - DNA, 120 bp, Artificial Sequence
  ENSG00000165259_37 (sequence is synthesized)
ttttcttcaccatcattggaattaaaacacttctaaaatgaaatgtggctattctgtagcaggaactgaaggaaatacctctatctatagaaaaagaatcataattgccagattgaaatt

SEQ ID NO: 520446 - DNA, 120 bp, Artificial Sequence
  ENSG00000165259_38 (sequence is synthesized)
attcatggtagactttgaaaaagatgtcaaggtcaagctttgaaaagttgttatgaagaaagtatattttttacatatgtagataggagttggttttgagatatgttagagcaggaaaaa

SEQ ID NO: 520447 - DNA, 120 bp, Artificial Sequence
  ENSG00000165259_39 (sequence is synthesized)
ttatcagcttataattactcttgtggacatcttcatggctggggataaaaattaactaactagtgtttctttctttagggctttgagattattaaaacagaccttactatctgaaggctc

SEQ ID NO: 520448 - DNA, 120 bp, Artificial Sequence
  ENSG00000165259_40 (sequence is synthesized)
aaaaacaaaaaacaaaaaacaacaacaagaaaaaacttctttttttctttcaactacatttctatgtctgctttaagcttagaacagccaagcagtttttaagccagaaatgtgtatgta

SEQ ID NO: 520449 - DNA, 120 bp, Artificial Sequence
  ENSG00000165259_41 (sequence is synthesized)
cagtttttaagccagaaatgtgtatgtaagagcacttaccttccaaaatgtgtacatatgaaaaaaaaaggaaggtattttcttcttttcagccaagctaaacttattcacaagaaaatg

SEQ ID NO: 520450 - DNA, 120 bp, Artificial Sequence
  ENSG00000165259_42 (sequence is synthesized)
agaattgcaattgctctggagaataggaaaattagcacatgcaaagaaaaccttaaaagaaaattggcctcttcatggaaactggggatgttttgtcctaaggtcagttatcaacagcag

SEQ ID NO: 520451 - DNA, 120 bp, Artificial Sequence
  ENSG00000165259_43 (sequence is synthesized)
gatttttgtattgccattgcaagcatgtgatagaaatgtttgttattgttggagaagaaaaggctgagacccaattataccctgtactctttattcgaccaagacctcaaaagatgtcaa

SEQ ID NO: 520452 - DNA, 120 bp, Artificial Sequence
  ENSG00000165259_44 (sequence is synthesized)
agaagccatttctccaaagacagcaacatctattgtgaggcactttcatattcagcagtctgtaagtttgtaggagaaaacataagtggttaatttaaaataattttgggctctaaaatg

SEQ ID NO: 520453 - DNA, 120 bp, Artificial Sequence
  ENSG00000165259_45 (sequence is synthesized)
gactttgttgccttttttggtgggggtggtgggaatcggattcagcccatttccaagggatagtttcttcatctcagacaactattttgtgatcctttttaaaagacattctgaaaactt

SEQ ID NO: 520454 - DNA, 120 bp, Artificial Sequence
  ENSG00000165259_46 (sequence is synthesized)
taactcctgcccttcttccgtattacagttgtgttattccagaaatattgtctacttttttaatatattagattttcattcagatcttaaacatgcaaacatgtgataggttagcttttt

SEQ ID NO: 520455 - DNA, 120 bp, Artificial Sequence
  ENSG00000165259_47 (sequence is synthesized)
aagggagttatcagtaccactgtatctaaatgttaggtaaatgggtagatttctctttgaagttggtattttccttggcagacagcactgtatcatgctcttcaccaagctatgctctgt

SEQ ID NO: 520456 - DNA, 120 bp, Artificial Sequence
  ENSG00000165259_48 (sequence is synthesized)
aatgctataatcaaggaggctactaacttgtgaacctacagtcaacacaccattgctgaaaacaaactttgattaagaacagatttgctagggggaaaaaagagtaaagtgatattttca

SEQ ID NO: 520457 - DNA, 120 bp, Artificial Sequence
  ENSG00000165259_49 (sequence is synthesized)
agcaaatataattaaaattgtttcattaaaatatatactgagtgtatattgctccacactgaaattttattttgcattaacttgttaagtaattcattttagcaatcctgcatcccattt

SEQ ID NO: 520458 - DNA, 120 bp, Artificial Sequence
  ENSG00000165259_50 (sequence is synthesized)
tactagtactacctctgaaatatactgtcaccttaaaaccacatcagactgtaatgtgaatttttgtagagtttttatttaaacttttatagaggcaataaatgatttccaactaataga

SEQ ID NO: 520459 - DNA, 120 bp, Artificial Sequence
  ENSG00000165259_51 (sequence is synthesized)
attgtctgaagcggcactggagacccaggaaaaatctcgctgaatccgcctgccccagcagcggcctgatctgggttccgctgattcctttcgtaaccgcaccacacccgagctacaatc

SEQ ID NO: 520460 - DNA, 120 bp, Artificial Sequence
  ENSG00000165259_52 (sequence is synthesized)
aattgatgatcggacacgctgatttcattgtctgaagcggcactggagacccaggaaaaatctcgctgaatccgcctgccccagcagcggcctgatctgggttccgctgattcctttcgt

SEQ ID NO: 520461 - DNA, 120 bp, Artificial Sequence
  ENSG00000165259_53 (sequence is synthesized)
attgtctgaagcggcactggagacccaggaaaaatctcgctgaatccgcctgccccagcagcggcctgatctgggttccgctgattcctttcgtaaccgcaccacacccgaggagctctg

SEQ ID NO: 520462 - DNA, 120 bp, Artificial Sequence
  ENSG00000165259_54 (sequence is synthesized)
agaactgtatacatgtgaaagcttattcatcgttggtcaggcaagagaccctccaatgactaaataaacctgaatttaagtcagaggaaagaaattacacagatctctatttactgggtg

SEQ ID NO: 520463 - DNA, 120 bp, Artificial Sequence
  ENSG00000165259_55 (sequence is synthesized)
gccttcaaatatatcatgtcctcataaacaagatcaagggagggaacactatcccagaagaggttctgtctgtaatcttctcagtttgaaaaatactaaataaagaggtattccactgtt

SEQ ID NO: 520464 - DNA, 120 bp, Artificial Sequence
  ENSG00000165259_56 (sequence is synthesized)
atttgtaaagctggcaaaactgaaccttgataggactacattgtctcaaaggacatttttcaagatcataatatttacatatactgcaaatgtaatcttaattataatgtagtactcagc

SEQ ID NO: 520465 - DNA, 120 bp, Artificial Sequence
  ENSG00000165259_57 (sequence is synthesized)
acaccatataatccatgggcagttttctcagttttaaaagtgactccaaaataattcataaaatatgatttttctacatctaatcaacccaattaatttgatcaattgaattataattta

SEQ ID NO: 520466 - DNA, 120 bp, Artificial Sequence
  ENSG00000165259_58 (sequence is synthesized)
tataaaatatctcaatcagtactgcataatttcatttactattttcttttagtgcaagtcagtatttagaaatgatgagtaattaaggtttaccaatcttattttgtgctctagatttct

SEQ ID NO: 520467 - DNA, 120 bp, Artificial Sequence
  ENSG00000165259_59 (sequence is synthesized)
gatacaactgttgtaatttttaaaatgtcagtataacagaacttcagtaaaattgtgcttcctcaaagaatctcattcatttttgtgtgtaagaccaataaatctgcattttggcaaata

SEQ ID NO: 520468 - DNA, 120 bp, Artificial Sequence
  ENSG00000165264_0 (sequence is synthesized)
gttcccgcaaggtcgctttgcagagcgggagcgcgcttaagtaactagtccgtagttcgagggtgcgccgtgtccttttgcgttggtaccagcggcgacatgacggggtacactccggat

SEQ ID NO: 520469 - DNA, 120 bp, Artificial Sequence
  ENSG00000165264_1 (sequence is synthesized)
gagaaactgcggctgcagcagctgcgagagctgagaaggcgatggctgaaggaccaggagctgagccctcgggagccggtgctgcccccacagaagatggggcctatggagaaattctgg

SEQ ID NO: 520470 - DNA, 120 bp, Artificial Sequence
  ENSG00000165264_2 (sequence is synthesized)
aataaatttttggagaataaatccccttggaggaaaatggtccatggggtatacaaaaagagtatctttgttttcactcatgtacttgtacctgtctggattattcattattacatgaag

SEQ ID NO: 520471 - DNA, 120 bp, Artificial Sequence
  ENSG00000165264_3 (sequence is synthesized)
tatcatgtttctgaaaaaccatatggcatagttgaaaagaagtccagaatattccctggtgatacaattctggagactggagaagtaattccaccaatgaaagaatttcctgatcaacat

SEQ ID NO: 520472 - DNA, 120 bp, Artificial Sequence
  ENSG00000165264_4 (sequence is synthesized)
cattaaagattatgtaaaaagttaaaaggcttatgagcctaagtttgttcctatattaccatatttactgaattttctggaaaagtaactttaataaagtttaatctcagaaattgtcat

SEQ ID NO: 520473 - DNA, 120 bp, Artificial Sequence
  ENSG00000165264_5 (sequence is synthesized)
aacaataagtaaaaagtggacatgctaaacaaatatgagagactacctactttttctggtcattcttgacttggaaaacggtatggaaaagtatttagttacatgtttgtttgttttttt

SEQ ID NO: 520474 - DNA, 120 bp, Artificial Sequence
  ENSG00000165264_6 (sequence is synthesized)
cttacacagtacttacactaatttggtatcagggtatgcaacagtgaaatatcacaataaacaaatgtaagaacagcaattccatgcacttttgttttaaggaaatctttccggccaggc

SEQ ID NO: 520475 - DNA, 120 bp, Artificial Sequence
  ENSG00000165264_7 (sequence is synthesized)
agactccgtctcaaaaaaaaaaaaagctttccgaatcatttttgaagaatttagaaacttgattgaaaagcttattccaactatgatctgacactcaagactgtcagatttaggttgctg

SEQ ID NO: 520476 - DNA, 120 bp, Artificial Sequence
  ENSG00000165264_8 (sequence is synthesized)
cagatttaggttgctgttaattttgtcatgagaatgtaaaatactaaaatctctaagtgaaaaatttgcatactagtgcttgttataaaggataatgcaaaaataaacttgggaactttg

SEQ ID NO: 520477 - DNA, 120 bp, Artificial Sequence
  ENSG00000165269_0 (sequence is synthesized)
ggaggagcaggagcagcgctcgaggccgccctgggagagctgagaggcaggctctggactggggacacagggatagctgagccccagctgggggtggaagctgagccagggacagtcacg

SEQ ID NO: 520478 - DNA, 120 bp, Artificial Sequence
  ENSG00000165269_1 (sequence is synthesized)
gaggaacaagatcaagatgcgctgtaactgagaagcccccaaggcggaggctgagaatcagagacatttcagcagacatctacaaatctgaaagacaaaacatggttcaagcatccgggc

SEQ ID NO: 520479 - DNA, 120 bp, Artificial Sequence
  ENSG00000165269_2 (sequence is synthesized)
acaggcggtccacccgtggctccaaaatggtctcctggtccgtgatagcaaagatccaggaaatactgcagaggaagatggtgcgagagttcctggccgagttcatgagcacatatgtca

SEQ ID NO: 520480 - DNA, 120 bp, Artificial Sequence
  ENSG00000165269_3 (sequence is synthesized)
tgatggtattcggccttggttccgtggcccatatggttctaaataaaaaatatgggagctaccttggtgtcaacttgggttttggcttcggagtcaccatgggagtgcacgtggcaggcc

SEQ ID NO: 520481 - DNA, 120 bp, Artificial Sequence
  ENSG00000165269_4 (sequence is synthesized)
gcatctctggagcccacatgaacgcagctgtgacctttgctaactgtgcgctgggccgcgtgccctggaggaagtttccggtctatgtgctggggcagttcctgggctccttcctggcgg

SEQ ID NO: 520482 - DNA, 120 bp, Artificial Sequence
  ENSG00000165269_5 (sequence is synthesized)
ctgccaccatctacagtctcttctacacggccattctccacttttcgggtggacagctgatggtgaccggtcccgtcgctacagctggcatttttgccacctaccttcctgatcacatga

SEQ ID NO: 520483 - DNA, 120 bp, Artificial Sequence
  ENSG00000165269_6 (sequence is synthesized)
cattgtggcggggcttcctgaatgaggcgtggctgaccgggatgctccagctgtgtctcttcgccatcacggaccaggagaacaacccagcactgccaggaacagaggcgctggtgatag

SEQ ID NO: 520484 - DNA, 120 bp, Artificial Sequence
  ENSG00000165269_7 (sequence is synthesized)
gcatcctcgtggtcatcatcggggtgtcccttggcatgaacacaggatatgccatcaacccgtcccgggacctgcccccccgcatcttcaccttcattgctggttggggcaaacaggtct

SEQ ID NO: 520485 - DNA, 120 bp, Artificial Sequence
  ENSG00000165269_8 (sequence is synthesized)
tcagcaatggggagaactggtggtgggtgccagtggtggcaccacttctgggtgcctatctaggtggcatcatctacctggtcttcattggctccaccatcccacgggagcccctgaaat

SEQ ID NO: 520486 - DNA, 120 bp, Artificial Sequence
  ENSG00000165269_9 (sequence is synthesized)
tggaggattctgtggcgtatgaagaccacgggataaccgtattgcccaagatgggatctcatgaacccacgatctctcccctcacccccgtctctgtgagccctgccaacagatcttcag

SEQ ID NO: 520487 - DNA, 120 bp, Artificial Sequence
  ENSG00000165269_10 (sequence is synthesized)
tccaccctgccccacccttacatgaatccatggccctagagcacttctaagcagagattatttgtgatcccatccattccccaataaagcaaggcttgtccgacagcagtacccccactt

SEQ ID NO: 520488 - DNA, 120 bp, Artificial Sequence
  ENSG00000165269_11 (sequence is synthesized)
cctgggggcctcctgtggttgggcttccctcctgggttcttacaggagctccagggctatgtcttagcccaaggtgtagaggtgaggcacctcaagtctttcatgccctgggaactgggg

SEQ ID NO: 520489 - DNA, 120 bp, Artificial Sequence
  ENSG00000165269_12 (sequence is synthesized)
gaacgacagaatgagggattttcaggcacgggggaaggaagggtggttttggggaacagaccgtagctgactggttgggggccggctttggaaatactttgaggggatcctgagattgga

SEQ ID NO: 520490 - DNA, 120 bp, Artificial Sequence
  ENSG00000165269_13 (sequence is synthesized)
ctctagactctcccctggttcttcccttccctgagttctggccggttcttggaccagacaaggcaaggcccaagaatgtagatcagaattttttagcctttttttcattagttccttccc

SEQ ID NO: 520491 - DNA, 120 bp, Artificial Sequence
  ENSG00000165269_14 (sequence is synthesized)
tagtattcttctagattttttttttcttaatcacatgaaattttaataccacagatgtactatatatctgtttatgttctgtatatgttctgtgctttatacataaaaaagagtaagatt

SEQ ID NO: 520492 - DNA, 120 bp, Artificial Sequence
  ENSG00000165269_15 (sequence is synthesized)
tttttttcacctccccttttaagaatcagttttaattcccttgagaatgcttgttatagattgaaggctgttaaggggttgggctcctctttcttcttcctggtgccagagtgctcccac

SEQ ID NO: 520493 - DNA, 120 bp, Artificial Sequence
  ENSG00000165269_16 (sequence is synthesized)
atgaaggaataggaaaggaagatgcaaagagggaaatccttcgaccacatgaagacacaggaagaggcctcatagggctccaagggctccagggaagcaggtgcagaggttgggtggggt

SEQ ID NO: 520494 - DNA, 120 bp, Artificial Sequence
  ENSG00000165269_17 (sequence is synthesized)
gaggggccaggatccactgaccctggggccaggcaggaatcactctgttgcctggggctcagaaggcagcatcacccatggttcctgtccttgctcatgcattttgcctttcaataatta

SEQ ID NO: 520495 - DNA, 120 bp, Artificial Sequence
  ENSG00000165269_18 (sequence is synthesized)
ttgtgcatctactgtgtgcaggccctgcctggacactggggatgcgcagtggatgcgctgggctctgcctttgagggttgcagtttaatgggggacaggtaattatatggaagaaggtga

SEQ ID NO: 520496 - DNA, 120 bp, Artificial Sequence
  ENSG00000165269_19 (sequence is synthesized)
gtgcagagtgggaggcttggaggctgtggggctcggggtaggggagctcacatccagcctctgggccaaggccaggaggcttcccagaggaggagacagagcagggtatggtggtggggg

SEQ ID NO: 520497 - DNA, 120 bp, Artificial Sequence
  ENSG00000165269_20 (sequence is synthesized)
gtgtcctttttgggggtgggagctgcactttacagtttgaggggatgggcagaggaggctgggcttcgttctggaggtggggacacggtgaggtgaggtttagaaagcacacctgagccg

SEQ ID NO: 520498 - DNA, 120 bp, Artificial Sequence
  ENSG00000165269_21 (sequence is synthesized)
cagtgtgtaggatgctggaaatggtggagatgggcctgcgaaagtgatgacccaggagcagcagccgggcacctaacaatgggtcagcaccgtgggcgtggagacgagagcggggattga

SEQ ID NO: 520499 - DNA, 120 bp, Artificial Sequence
  ENSG00000165269_22 (sequence is synthesized)
tcaataccggagaagtacaatgtacaggacttgggttccatttggatggagtgggtgagggagagggaggagtcagaaatggcttccggtttccagcttgggcctggggattggagatgt

SEQ ID NO: 520500 - DNA, 120 bp, Artificial Sequence
  ENSG00000165269_23 (sequence is synthesized)
ccccactgagagtagggcacaagtgaggaaatggtttggagaggaagataagttacatcatggacatgctgagtctgagttgcctatgggacttggaatggggggtggcaaaatgtgtgt

SEQ ID NO: 520501 - DNA, 120 bp, Artificial Sequence
  ENSG00000165269_24 (sequence is synthesized)
gatcttgagcaagatattcaacccttctgggccttggtcttcttatttgtaaaatggcgataagaatattacttcccatttgtgttgctgtgaatattaaatgcgctaccacatgtaaaa

SEQ ID NO: 520502 - DNA, 120 bp, Artificial Sequence
  ENSG00000165269_25 (sequence is synthesized)
gggggtgatgtgaggggcagcacaggagggtcctgctgagcccccaggtagcctggggagcaggagtgagtcccaacatttccccaggccagtacagatacagatcctgcacctgcactg

SEQ ID NO: 520503 - DNA, 120 bp, Artificial Sequence
  ENSG00000165269_26 (sequence is synthesized)
agtgtcaacgctgtccctgaattgggctgaggctgaccagggccctgggttgggggtgtttcctggggtagcctggggatgactcctctgctcaacctgtcttggcccgaggtggatgag

SEQ ID NO: 520504 - DNA, 120 bp, Artificial Sequence
  ENSG00000165269_27 (sequence is synthesized)
gttgcccttggagctggcctcctggctgtgggggagagttggatgggctgggccacattcactgatcagggagaggaggggctggagccatccgggccctggaaaaccagccatacacga

SEQ ID NO: 520505 - DNA, 120 bp, Artificial Sequence
  ENSG00000165269_28 (sequence is synthesized)
aaagcgccgatgagctgttctggagcacggggcccagcacagggtgagaggtgagatgcctgtggggaaatccaggagatagttaaacacatgcaaggggctggagctcaggagaggctt

SEQ ID NO: 520506 - DNA, 120 bp, Artificial Sequence
  ENSG00000165269_29 (sequence is synthesized)
ggtctggaaggaaaaagttgaagttcatcacaacacaggtggtagttgtcaatactgtccagagacagtgtacagaaagagaaaaggatgggttgaggacagagccctgaggaatgaaga

SEQ ID NO: 520507 - DNA, 120 bp, Artificial Sequence
  ENSG00000165269_30 (sequence is synthesized)
agggcatgcaaaggagcctgagaaggaacggtcagagaggtgggaggagaaccagagcagactgcatgacagaggggggcagtggttccaccaggaagaagccgtcagcggcgtgggcag

SEQ ID NO: 520508 - DNA, 120 bp, Artificial Sequence
  ENSG00000165269_31 (sequence is synthesized)
agagggaactgggctagagaatcaggaggacagacagggtgaggggacttcgggctaccttcatgctgtcagttagagataaagataggagtacaaaggggaatttttgggtgaggtaca

SEQ ID NO: 520509 - DNA, 120 bp, Artificial Sequence
  ENSG00000165269_32 (sequence is synthesized)
cgggtgaaatgagttttcagggcctcatcctgtgtgttcaccttctgtgtgtgtgtgtgtgcatgcgtgcatgtgtgtgtgtgtgcaggtcctggacagtcgcagcttaagttagcagca

SEQ ID NO: 520510 - DNA, 120 bp, Artificial Sequence
  ENSG00000165269_33 (sequence is synthesized)
tggtgtgccatttttactggtccagtcccaactagaaggggcatggcctggccatctaccccagttcctctccatgtccccgtggctctcaagtgtctccaattccagctgtcccagctg

SEQ ID NO: 520511 - DNA, 120 bp, Artificial Sequence
  ENSG00000165269_34 (sequence is synthesized)
ccctgcgcaagaggaggcgtgtgtgggcgaggctgctgggttacctattaactcagctgggagttgaagagccgatgggcagcaggcagacttgagtctcctttctgtccatgggctcgg

SEQ ID NO: 520512 - DNA, 120 bp, Artificial Sequence
  ENSG00000165269_35 (sequence is synthesized)
tctcttctacagtgagtatcctgcccgggtgtccgcctctggcctcagccgcctcctatgaaatatgggcagattggacctcagtgtcctgatttgtaaaaaatagctgggagaaaaaag

SEQ ID NO: 520513 - DNA, 120 bp, Artificial Sequence
  ENSG00000165269_36 (sequence is synthesized)
ccttggagatcccccaccctctaacctataacctcatttctgggaccccggtggggcttagttgggagcaggttcgcatgacagtctgtgtctccgcagcggccattctccacttttcgg

SEQ ID NO: 520514 - DNA, 120 bp, Artificial Sequence
  ENSG00000165269_37 (sequence is synthesized)
aggcggtaagtaccccaccctcttctcaccctccagccccctgtccttcacccagcccacttcagtgccctccctgttccatcctcagcctctcccttggggcagctgtccccactcgac

SEQ ID NO: 520515 - DNA, 120 bp, Artificial Sequence
  ENSG00000165269_38 (sequence is synthesized)
ctcctcctccccacccacccactcgcctctgaggtcccagaagaagagcatcttccacctgttgcctgggctgggtcctggggtgaggggaggctcagaaatacttggatgagggtcaag

SEQ ID NO: 520516 - DNA, 120 bp, Artificial Sequence
  ENSG00000165271_0 (sequence is synthesized)
aggcatttccgcccacgtgggaagctatgaggtatagacccggctagaatctgaagtgcgggagagtgctggaccctgagtgatggggccggcgccagctggagagcagcttcgcggagc

SEQ ID NO: 520517 - DNA, 120 bp, Artificial Sequence
  ENSG00000165271_1 (sequence is synthesized)
gactggagagccagaggtgatggaaccagccctggaaggcacaggcaaagaggggaagaaagcatcctccaggaagcgtacattggctgaacctccagcgaagggcctcctgcagccagt

SEQ ID NO: 520518 - DNA, 120 bp, Artificial Sequence
  ENSG00000165271_2 (sequence is synthesized)
gaagctcagcagggcagaactgtacaaggagcctaccaatgaggagcttaatcgccttcgggagactgagatcttgttccactccagcttgcttcgtttacaggtagaggagctactaaa

SEQ ID NO: 520519 - DNA, 120 bp, Artificial Sequence
  ENSG00000165271_3 (sequence is synthesized)
ggaagtaaggctgtcagagaagaagaaggatcggattgatgccttcctacgggaggtcaaccagcgggttgtgagggtgccctcagtccctgagacagagctcactgaccaggcatggct

SEQ ID NO: 520520 - DNA, 120 bp, Artificial Sequence
  ENSG00000165271_4 (sequence is synthesized)
cccagctggggttcgagtgcccctccaccaagtgccctatgccgtgaagggctgtttccgcttcctgcccccagcccaggttactgttgtgggcagctaccttctgggcacctgcatccg

SEQ ID NO: 520521 - DNA, 120 bp, Artificial Sequence
  ENSG00000165271_5 (sequence is synthesized)
accagacatcaatgtggatgtggcactgaccatgcccagggaaatcctacaggacaaggacgggctgaaccagcgctacttccgcaagcgtgccctctacctggcccacttggctcacca

SEQ ID NO: 520522 - DNA, 120 bp, Artificial Sequence
  ENSG00000165271_6 (sequence is synthesized)
cctggcccaggaccccctctttggcagtgtttgcttctcctacacaaatggctgccacctgaaaccctcactgttgctgcggccgcgtggaaaggatgagcgcctggtcactgtacgtct

SEQ ID NO: 520523 - DNA, 120 bp, Artificial Sequence
  ENSG00000165271_7 (sequence is synthesized)
gcatccgtgccctccacctgacttcttccgcccgtgccgcttgctgccaaccaagaacaatgtgcgctctgcctggtaccgagggcagagtcctgcaggggatggtagcccagagcctcc

SEQ ID NO: 520524 - DNA, 120 bp, Artificial Sequence
  ENSG00000165271_8 (sequence is synthesized)
taccccccgctataacacatgggtcctgcaagatacagttctcgagtcccatttgcagctgctgtcaaccattctgagttcagcccagggcctgaaggatggcgtggcacttctgaaggt

SEQ ID NO: 520525 - DNA, 120 bp, Artificial Sequence
  ENSG00000165271_9 (sequence is synthesized)
ctggctgcggcagcgggagctggacaagggccagggtgggtttactgggttccttgtctccatgctggttgtcttccttgtgtctacacgcaagatccataccaccatgagtggctacca

SEQ ID NO: 520526 - DNA, 120 bp, Artificial Sequence
  ENSG00000165271_10 (sequence is synthesized)
ggtcctgagaagtgtcttgcagtttctggccactacagacctgacagtcaacgggatcagtttatgtctcagctcagatccctctttgccggccctggctgacttccaccaggccttctc

SEQ ID NO: 520527 - DNA, 120 bp, Artificial Sequence
  ENSG00000165271_11 (sequence is synthesized)
cgttgtcttcctggattcctcaggccatctcaacctctgtgctgatgtcactgcctctacttaccaccaggtacagcatgaggcacggctgtctatgatgttgctggacagcagagctga

SEQ ID NO: 520528 - DNA, 120 bp, Artificial Sequence
  ENSG00000165271_12 (sequence is synthesized)
cgacgggttccacctgctgttgatgactcccaaacccatgatccgggcttttgaccatgtcctgcatctccgtccactgagtcgcctgcaggcagcgtgccaccggctgaagctctggcc

SEQ ID NO: 520529 - DNA, 120 bp, Artificial Sequence
  ENSG00000165271_13 (sequence is synthesized)
agagctgcaggacaatggtggggactatgtctcagctgctttgggccccctgaccaccctcctggagcagggcctgggggctcggctgaacctgctggctcactctcgacccccagtccc

SEQ ID NO: 520530 - DNA, 120 bp, Artificial Sequence
  ENSG00000165271_14 (sequence is synthesized)
agagtgggacatcagccaagatccaccaaagcacaaagactctgggaccctgaccctgggactccttctccggcctgagggactgaccagcgtccttgagctgggtccagaggcagacca

SEQ ID NO: 520531 - DNA, 120 bp, Artificial Sequence
  ENSG00000165271_15 (sequence is synthesized)
gcctgaggctgctaaattccgccagttctggggatcccgctcggagcttcggcgtttccaggacggagccattcgggaagctgtggtctgggaggcagcctctatgtcccagaagcgcct

SEQ ID NO: 520532 - DNA, 120 bp, Artificial Sequence
  ENSG00000165271_16 (sequence is synthesized)
tattccccaccaggtggtcacccacctcttggcactccatgctgacatcccagaaacctgtgtccactatgtggggggccccctggatgcacttatccaaggcctgaaagagacctccag

SEQ ID NO: 520533 - DNA, 120 bp, Artificial Sequence
  ENSG00000165271_17 (sequence is synthesized)
cacaggtgaggaggccctggtagcggcggtacgttgctacgacgacctcagtcgcctactgtgggggctagagggtctcccactgaccgtgtctgctgttcagggagctcacccagtgct

SEQ ID NO: 520534 - DNA, 120 bp, Artificial Sequence
  ENSG00000165271_18 (sequence is synthesized)
gcgctacacagaggtgttcccaccaactccagtccgtccagccttctccttctatgagactctgcgggagcggtcctcactgctgccccggctcgataagccctgtccggcctacgtgga

SEQ ID NO: 520535 - DNA, 120 bp, Artificial Sequence
  ENSG00000165271_19 (sequence is synthesized)
gcccatgaccgtggtttgtcacctggagggcagtggccagtggccacaggacgctgaggccgtgcagcgggtccgagctgccttccagctgcgcctggcagagctgttgacacaacagca

SEQ ID NO: 520536 - DNA, 120 bp, Artificial Sequence
  ENSG00000165271_20 (sequence is synthesized)
gatgtccttaaggatggatttgtgtttcggattcgcgtggcctatcagcgggagccccagatcctgaaggaggtgcagagcccagaggggatgatctcgctgagggacacagctgcctcc

SEQ ID NO: 520537 - DNA, 120 bp, Artificial Sequence
  ENSG00000165271_21 (sequence is synthesized)
ctccgccttgagagagacacaaggcagttgccactgctcaccagtgccctgcacggactgcagcagcagcacccagccttctctggtgtggcacggctggccaagcggtgggtgcgtgcc

SEQ ID NO: 520538 - DNA, 120 bp, Artificial Sequence
  ENSG00000165271_22 (sequence is synthesized)
cagcttcttggtgagggtttcgctgatgagagcctggatctggtggccgctgcccttttcctgcaccctgagcccttcacccctccgagttccccccaggttggcttccttcgattcctt

SEQ ID NO: 520539 - DNA, 120 bp, Artificial Sequence
  ENSG00000165271_23 (sequence is synthesized)
ttcttggtatcaacgtttgattggaagaacaaccccctctttgtcaacctcaataatgagctcactgtggaggagcaggtggagatccgcagtggcttcctggcagctcgggcacagctc

SEQ ID NO: 520540 - DNA, 120 bp, Artificial Sequence
  ENSG00000165271_24 (sequence is synthesized)
cccgtcatggtcattgttaccccccaagaccgcaaaaactctgtgtggacacaggatggaccctcagcccagatcctgcagcagcttgtggtcctggcagctgaagccctgcccatgtta

SEQ ID NO: 520541 - DNA, 120 bp, Artificial Sequence
  ENSG00000165271_25 (sequence is synthesized)
gagaagcagctcatggatccccggggacctggggacatcaggacagtgttccggccgcccttggacatttacgacgtgctgattcgcctgtctcctcgccatatcccgcggcaccgccag

SEQ ID NO: 520542 - DNA, 120 bp, Artificial Sequence
  ENSG00000165271_26 (sequence is synthesized)
gctgtggactcgccagctgcctccttctgccggggcctgctcagccagccggggccctcatccctgatgcccgtgctgggctatgatcctcctcagctctatctgacgcagctcagggag

SEQ ID NO: 520543 - DNA, 120 bp, Artificial Sequence
  ENSG00000165271_27 (sequence is synthesized)
gcctttggggatctggcccttttcttctatgaccagcatggtggagaggtgattggtgtcctctggaagcccaccagcttccagccgcagcccttcaaggcctccagcacaaaggggcgc

SEQ ID NO: 520544 - DNA, 120 bp, Artificial Sequence
  ENSG00000165271_28 (sequence is synthesized)
atggtgatgtctcgaggtggggagctagtaatggtgcccaatgttgaagcaatcctggaggactttgctgtgctgggtgaaggcctggtgcagactgtggaggcccgaagtgagaggtgg

SEQ ID NO: 520545 - DNA, 120 bp, Artificial Sequence
  ENSG00000165271_29 (sequence is synthesized)
actgtgtgatcccagctctggagcaagctgtagacggacagcaggacattggacctctagagcaagatgtcagtaggatgacctccaccctccttggacatgaatcctccatggagggcc

SEQ ID NO: 520546 - DNA, 120 bp, Artificial Sequence
  ENSG00000165271_30 (sequence is synthesized)
tgctggctgaacatgctgaatcatctccaacaaaacccagccccaactttctctctgatgctccagcattggggcaggggcatggtggcccatgtagtctcctgggcctcaccatcccag

SEQ ID NO: 520547 - DNA, 120 bp, Artificial Sequence
  ENSG00000165271_31 (sequence is synthesized)
aagaggagtgggagccagctcagagaaggaactgaacccaggagatccatccacctattagccctgggcctggacctccctgcgatttcccactcctttcttagtcttcttccagaaaca

SEQ ID NO: 520548 - DNA, 120 bp, Artificial Sequence
  ENSG00000165271_32 (sequence is synthesized)
gagaaggggatgtgtgcctgggagaggctctgtctccttcctgctgccaggacctgtgcctagacttagcatgcccttcactgcagtgtcaggcctttagatgggacccagcgaaaatgt

SEQ ID NO: 520549 - DNA, 120 bp, Artificial Sequence
  ENSG00000165271_33 (sequence is synthesized)
ggcccttctgagtcacatcaccgacactgagcagtggaaaggggctatatgtgtatgaatagaccacattgaaggagcacaatgccctcctgtgttgatgccacttcccagggtggagac

SEQ ID NO: 520550 - DNA, 120 bp, Artificial Sequence
  ENSG00000165271_34 (sequence is synthesized)
agtggaaaagaaccgaggacaggaaaggattgggtaggtgaaggggtcaggggactggtagtcacccaatcttggagaggtgcaaaaagcactgggggctacccgttagctgcatctgcc

SEQ ID NO: 520551 - DNA, 120 bp, Artificial Sequence
  ENSG00000165271_35 (sequence is synthesized)
ctggctgtttgcccgttcatgtcacaaactgccactactatgtacctgcagtggggttgcagagatgggggagactcaagtcttactccccaggagctcccagggcccaaggaggagaat

SEQ ID NO: 520552 - DNA, 120 bp, Artificial Sequence
  ENSG00000165271_36 (sequence is synthesized)
gctgcctcctttcagtctggtctacacccactttctggtagcctctctgcttcctgtaattctggctgtttttccagactcagctcaaatagtgcccctccttaagcccatccctcgccc

SEQ ID NO: 520553 - DNA, 120 bp, Artificial Sequence
  ENSG00000165271_37 (sequence is synthesized)
ccagcctgaggtgatctttccctcctctgaactattagagcagttactgtctgttcagttcgtttggcaggcacacacagtggcataaattctattgttttgaactctgatttaaaatta

SEQ ID NO: 520554 - DNA, 120 bp, Artificial Sequence
  ENSG00000165271_38 (sequence is synthesized)
aattgcagctgggcgtggtggcttatgcttgtaatcccaacacttagggagtcaggagaatcacttgagctcaggagttctagaccaatctgggcaacagagagaccccatctcttttaa

SEQ ID NO: 520555 - DNA, 120 bp, Artificial Sequence
  ENSG00000165271_39 (sequence is synthesized)
ataaaaagttaaattgcttaatttcccccgtattcctggcctgtctgcccctttcacataattttaacctggtttcttgtatgtaaactccttgagggcaagaacatgtttgaacataga

SEQ ID NO: 520556 - DNA, 120 bp, Artificial Sequence
  ENSG00000165271_40 (sequence is synthesized)
tcagcttctatcactaccaattccaaacagagctccatgcttgtggtgtcaggtagacaggagagctcttaactcaaggaattttcggctcagcgctcagtgatgttcatccaagtaacg

SEQ ID NO: 520557 - DNA, 120 bp, Artificial Sequence
  ENSG00000165271_41 (sequence is synthesized)
gcactgaccatgcccagggtaaggtccagggtttaggggatagaggcccaccacctgactacctacaaatcctggatccctctttcttatctgccgcttgccaggggattgaagtcagaa

SEQ ID NO: 520558 - DNA, 120 bp, Artificial Sequence
  ENSG00000165271_42 (sequence is synthesized)
ttctaaatcagaagagcagaccattgcaggcatcctgaaggcagcttagatccctcgggccagttgctgtccttttggagctttgctctccagatatgagaactgggcctagtgttgcta

SEQ ID NO: 520559 - DNA, 120 bp, Artificial Sequence
  ENSG00000165271_43 (sequence is synthesized)
ggagccctggctctctcaccttggtttcaccttggcccacagctccacaagcacttatgtgcctggccttctcttctcccctggcccctccaggaaatcctacaggacaaggacgggctg

SEQ ID NO: 520560 - DNA, 120 bp, Artificial Sequence
  ENSG00000165271_44 (sequence is synthesized)
tcactgttgctgcggccgcgtggtgagaggcacacattgggctgagggcatagcatgggatggtaaatctggaggagaaggcacagaggcacggaggcctcaagtatggggggacaggat

SEQ ID NO: 520561 - DNA, 120 bp, Artificial Sequence
  ENSG00000165271_45 (sequence is synthesized)
actttttccccagctgagaagtttccttgcggccagccatcatccttcgtgctgcaccctaagtctacatgggaatgggtggttgagcaagtggcagaaggggttctaagatgccctgcc

SEQ ID NO: 520562 - DNA, 120 bp, Artificial Sequence
  ENSG00000165271_46 (sequence is synthesized)
ctgccaatccacaccagggggtctgagctccatagcctgagagaagcctggggatatgtggctgggccctggattctttgcttactccagccctttagttccccccaggttggcttcctt

SEQ ID NO: 520563 - DNA, 120 bp, Artificial Sequence
  ENSG00000165272_0 (sequence is synthesized)
gctcgctgcgccaccgcctcccgccacccctgcccgcccgacagcgccgccgcctgccccgccatgggtcgacagaaggagctggtgtcccgctgcggggagatgctccacatccgctac

SEQ ID NO: 520564 - DNA, 120 bp, Artificial Sequence
  ENSG00000165272_1 (sequence is synthesized)
cggctgctccgacaggcgctggccgagtgcctggggaccctcatcctggtgatgtttggctgtggctccgtggcccaggttgtgctcagccggggcacccacggtggtttcctcaccatc

SEQ ID NO: 520565 - DNA, 120 bp, Artificial Sequence
  ENSG00000165272_2 (sequence is synthesized)
aacctggcctttggctttgctgtcactctgggcatcctcatcgctggccaggtctctggggcccacctgaaccctgccgtgacctttgccatgtgcttcctggctcgtgagccctggatc

SEQ ID NO: 520566 - DNA, 120 bp, Artificial Sequence
  ENSG00000165272_3 (sequence is synthesized)
aagctgcccatctacaccctggcacagacgctgggagccttcttgggtgctggaatagtttttgggctgtattatgatgcaatctggcacttcgccgacaaccagctttttgtttcgggc

SEQ ID NO: 520567 - DNA, 120 bp, Artificial Sequence
  ENSG00000165272_4 (sequence is synthesized)
cccaatggcacagccggcatctttgctacctacccctctggacacttggatatgatcaatggcttctttgaccagttcataggcacagcctcccttatcgtgtgtgtgctggccattgtt

SEQ ID NO: 520568 - DNA, 120 bp, Artificial Sequence
  ENSG00000165272_5 (sequence is synthesized)
gacccctacaacaaccccgtcccccgaggcctggaggccttcaccgtgggcctggtggtcctggtcattggcacctccatgggcttcaactccggctatgccgtcaaccctgcccgggac

SEQ ID NO: 520569 - DNA, 120 bp, Artificial Sequence
  ENSG00000165272_6 (sequence is synthesized)
tttggcccccgcctttttacagcccttgcgggctggggctctgcagtcttcacgaccggccagcattggtggtgggtgcccatcgtgtccccactcctgggctccattgcgggtgtcttc

SEQ ID NO: 520570 - DNA, 120 bp, Artificial Sequence
  ENSG00000165272_7 (sequence is synthesized)
acctggagcagcccccaccctccaacgaggaagagaatgtgaagctggcccatgtgaagcacaaggagcagatctgagtgggcaggggccatctccccactccgctgccctggccttgag

SEQ ID NO: 520571 - DNA, 120 bp, Artificial Sequence
  ENSG00000165272_8 (sequence is synthesized)
catccactgactgtccaagggccactcccaagaagcccccttcacgatccaccctttcaggctaaggagctccctatctaccctcaccccacgagacagccccttcaggatttccactgg

SEQ ID NO: 520572 - DNA, 120 bp, Artificial Sequence
  ENSG00000165272_9 (sequence is synthesized)
accttgcccaaatagcaccttaggccactgcccctaagctggggtggaaccggaatttgggtcaatacatccttttgtctcccaagggaagagaatgggcagcaggtatgtgtgtgtgtg

SEQ ID NO: 520573 - DNA, 120 bp, Artificial Sequence
  ENSG00000165272_10 (sequence is synthesized)
catgtgtgtgcatgtgtgtgcatgtgtgtgcaggggtgtgtgtgtgtggggggggttcccagatattcagggcaagggaccagtcggaagggattctggctattgggggagcccagagac

SEQ ID NO: 520574 - DNA, 120 bp, Artificial Sequence
  ENSG00000165272_11 (sequence is synthesized)
aggggaaggcagcctgtccatctgtgcataaggagaggaaagttccagggtgtgtatgtttcaggggcttcacatggaggagctgcagatagatatgtgtttctgtgtatgtgtatgtct

SEQ ID NO: 520575 - DNA, 120 bp, Artificial Sequence
  ENSG00000165272_12 (sequence is synthesized)
gcctttttttctaagtgggggcttctacaggcttttgggaagtagggtggatgtgggtagggctgggaggagggggccacagcttaggtttggagctctggatgtacatacataagtagg

SEQ ID NO: 520576 - DNA, 120 bp, Artificial Sequence
  ENSG00000165272_13 (sequence is synthesized)
agcagtgggacgtgtttctgtcataatgcaggcatgaagggtggagtgaagtcaggtcataagtttcatgtttgcttttgttttgttttgtttttaatgtatgtagcagatgttacagtc

SEQ ID NO: 520577 - DNA, 120 bp, Artificial Sequence
  ENSG00000165272_14 (sequence is synthesized)
ttagggatccgggatgggagaccccactttagaaagggtcgtcactcctttaatcctctactcaacaatgtactcttttacttttatattaaaaaaaataaaataaatatgtgcctaaaa

SEQ ID NO: 520578 - DNA, 120 bp, Artificial Sequence
  ENSG00000165272_15 (sequence is synthesized)
gccaccccctctgcctgctgcaatacagcagtattgctacttacccataactcatgggagggtggggagggcacacctgagagggaagtctgggctcaggcctctcccccgactcactgt

SEQ ID NO: 520579 - DNA, 120 bp, Artificial Sequence
  ENSG00000165272_16 (sequence is synthesized)
ggctaggacctgcccaggccccgggctcatgactcactcattcacgcacagggtcaaggtagggggcacgaagggaaagaaacaagttgggcaataacagagtctcaggccctccacccc

SEQ ID NO: 520580 - DNA, 120 bp, Artificial Sequence
  ENSG00000165272_17 (sequence is synthesized)
tggcattcctaagggcaggtcacagctgtggcctctgctttggccccttgggaaaggagggtggagaagaaacttgacacttagaactttcgactctcaccttggaatcagagattatca

SEQ ID NO: 520581 - DNA, 120 bp, Artificial Sequence
  ENSG00000165272_18 (sequence is synthesized)
gctgacctgttacatagaccaaccgccatcctgtgcaagaaacccctctctgcaccccttctcaggggaccctagcctgccgactgtggcaggctgcagctaataggtcccttgtcccct

SEQ ID NO: 520582 - DNA, 120 bp, Artificial Sequence
  ENSG00000165272_19 (sequence is synthesized)
ggcttctttgaccaggtatgggctggggacgtgtgaggggaacgcagggaggggaccgagttgccttggtagctcatgggctggttgggggacaggactcctcgactgtagcagggtttc

SEQ ID NO: 520583 - DNA, 120 bp, Artificial Sequence
  ENSG00000165272_20 (sequence is synthesized)
tccaatctgtggggtaacccgcatcagaacatggtggcaagtacttacaaaacatgcggctctccagcgggttcttgtcacgcagacattctagcaccattgctttcaggagaagagcat

SEQ ID NO: 520584 - DNA, 120 bp, Artificial Sequence
  ENSG00000165272_21 (sequence is synthesized)
agggaagacgggggatggaaggaggggtcagagaaagggagggagctgcagctcaccctgttctccccactccccagttcataggcacagcctcccttatcgtgtgtgtgctggccattg

SEQ ID NO: 520585 - DNA, 120 bp, Artificial Sequence
  ENSG00000165275_0 (sequence is synthesized)
ggggatccgatgcgcgccgctgccgctgcgtgggggtgaggggatcagtctggtggaaaggacagaggactaagtccatggactggaaattggaagggagtactcagaaagtagagtcac

SEQ ID NO: 520586 - DNA, 120 bp, Artificial Sequence
  ENSG00000165275_1 (sequence is synthesized)
ctgtgctgcaggggcaagaaggcatcctagaggagacaggtgaagatggacttcctgaaggcttccagcttctgcagatcgatgcggaaggcgagtgccaggagggagagatcctggcca

SEQ ID NO: 520587 - DNA, 120 bp, Artificial Sequence
  ENSG00000165275_2 (sequence is synthesized)
caggcagtacggcatggtgctcgaaaaatgtccagagaaaacagagacactgggaaaagatagttgcagcaaagaagagcaaaagaaagcaagaaaaagaacgaagaaaagccaatcgtg

SEQ ID NO: 520588 - DNA, 120 bp, Artificial Sequence
  ENSG00000165275_3 (sequence is synthesized)
cagaaaatccaggcatttgcccccagcacagcaaacgtttcctgagagctctaaccaaagacaaacttttggaagccaaacactcaggaccaagactatgtatcgatttgagtatgaccc

SEQ ID NO: 520589 - DNA, 120 bp, Artificial Sequence
  ENSG00000165275_4 (sequence is synthesized)
actacatgtcaaagaaggaattaagtagactggctggacagattcgaaggttgtatggttcaaacaaaaaagctgacaggccattttggatctgcctcactggattcacaacagacagtc

SEQ ID NO: 520590 - DNA, 120 bp, Artificial Sequence
  ENSG00000165275_5 (sequence is synthesized)
ccctttatgaagagtgtgtgaggatgaatgatggattttctagttacctgttagacataacagaagaagactgctttagtttatttcccttggaaacccttgtgtacctgactcctgact

SEQ ID NO: 520591 - DNA, 120 bp, Artificial Sequence
  ENSG00000165275_6 (sequence is synthesized)
cagaacacgctcttgaagatgttgatctaaacaaagtttacatcctcggtgggcttgtggatgaaagcattcagaagaaggtgacatttcaaaaggcccgggaatactctgtcaagaccg

SEQ ID NO: 520592 - DNA, 120 bp, Artificial Sequence
  ENSG00000165275_7 (sequence is synthesized)
cacgcttgccaatccaggaatacatggtcagaaaccagaatgggaaaaactatcattcagagatactggccatcaatcaagtgtttgatatcctgtccacttacttagagactcacaact

SEQ ID NO: 520593 - DNA, 120 bp, Artificial Sequence
  ENSG00000165275_8 (sequence is synthesized)
ggcctgaagcattgaagaaaggagtttcttcaggaaaaggctatattcttcggaactcagtggaatgatgggcctaagattgcagctgcgtggccaggtgctcacgccgtaatgccaaca

SEQ ID NO: 520594 - DNA, 61 bp, Artificial Sequence
  ENSG00000165275_9 (sequence is synthesized)
aggcgaaggttgcagtgagccgagatttaaaaaaaaatgcagctgcaggagtgaggcgctt

SEQ ID NO: 520595 - DNA, 120 bp, Artificial Sequence
  ENSG00000165275_10 (sequence is synthesized)
aataaataaaaaaaaatgcagctgcaggagtgaggcgcttggaggtaccttgacccaaagagcagggcagagggtggcagtggcacataggcaagtgtctttgcatgacatcttctcaga

SEQ ID NO: 520596 - DNA, 120 bp, Artificial Sequence
  ENSG00000165275_11 (sequence is synthesized)
gcttcacaataatgtcagggaccacatttaatgctttttaatctcccatagtgcctggctcacaggaagtgctcagatatgttaagtaataaaaagttaatgtggtgggtgcagtggctc

SEQ ID NO: 520597 - DNA, 90 bp, Artificial Sequence
  ENSG00000165275_12 (sequence is synthesized)
cggcggaggttgtagtgagccaagatccagcctgggcgacagagccagactcttgtctcgaggggaaaaaaaaaaaaaattatgtaacaa

SEQ ID NO: 520598 - DNA, 120 bp, Artificial Sequence
  ENSG00000165275_13 (sequence is synthesized)
tcttgtctcgaggggaaaaaaaaaaaaaattatgtaacaaggaattagcctcaaaaccacatggctttggacgtgctaattcaacttttgtacatctatttgtgagagacctcttgaaat

SEQ ID NO: 520599 - DNA, 120 bp, Artificial Sequence
  ENSG00000165275_14 (sequence is synthesized)
tgtttaaatggttacatcaagagtttaatattcactaaactggcatcataaaattgtatgactttctccagccttgtctgatcatgctcgttgttgcccagctcagtaataagctttgca

SEQ ID NO: 520600 - DNA, 120 bp, Artificial Sequence
  ENSG00000165275_15 (sequence is synthesized)
ggatccagcctgttctgacctatccctactgagtccccatagcattttgttccctcctgtggctcttaccttgttctcccttgcagagtatgggcatggagggcttctcttcctaatcct

SEQ ID NO: 520601 - DNA, 120 bp, Artificial Sequence
  ENSG00000165275_16 (sequence is synthesized)
tcctaatggtaggatcctaacaggacaaatctgtgtacctatctttctatcctccctgagcctgtaccaactagattcttcatatgtatttgtaacagattaaattggaaagcaaacaca

SEQ ID NO: 520602 - DNA, 88 bp, Artificial Sequence
  ENSG00000165275_17 (sequence is synthesized)
cctagagccatgcctgatagaaacttgaagcccagtaactagtcgttgaattttgagcggggttttttttttttttttaaagatctgc

SEQ ID NO: 520603 - DNA, 120 bp, Artificial Sequence
  ENSG00000165275_18 (sequence is synthesized)
aagttctgggattacagacgtgagccaccccacccagccgtgagctgttttaacatcagactgtttgcattttccagttagacataacagaagaagactgctttagtttatttcccttgg

SEQ ID NO: 520604 - DNA, 120 bp, Artificial Sequence
  ENSG00000165275_19 (sequence is synthesized)
agaaggtagaacatccactaagcctggaattcctgctcgccatgagggaggcccagaagggtacagctttccgaagaatatggtcaactccagcttctgggattccttagtaaactagaa

SEQ ID NO: 520605 - DNA, 120 bp, Artificial Sequence
  ENSG00000165280_0 (sequence is synthesized)
agtctcagcgaagcgtctgcgaccgtcgtttgagtcgtcgctgccgctgccgctgccactgccactgccacctcgcggatcaggagccagcgttgttcgcccgacgcctcgctgccggtg

SEQ ID NO: 520606 - DNA, 120 bp, Artificial Sequence
  ENSG00000165280_1 (sequence is synthesized)
ggaggaagcgagagggaagccgcttgcgggtttgtcgccgctgctcgcccaccgcctggaagagccgagccccggcccagtcggtcgcttgccaccgctcgtagccgttacccgcgggcc

SEQ ID NO: 520607 - DNA, 120 bp, Artificial Sequence
  ENSG00000165280_2 (sequence is synthesized)
gccacagccgccggccgggagaggcgcgcgccatggcttctggagccgattcaaaaggtgatgacctatcaacagccattctcaaacagaagaaccgtcccaatcggttaattgttgatg

SEQ ID NO: 520608 - DNA, 120 bp, Artificial Sequence
  ENSG00000165280_3 (sequence is synthesized)
aagccatcaatgaggacaacagtgtggtgtccttgtcccagcccaagatggatgaattgcagttgttccgaggtgacacagtgttgctgaaaggaaagaagagacgagaagctgtttgca

SEQ ID NO: 520609 - DNA, 120 bp, Artificial Sequence
  ENSG00000165280_4 (sequence is synthesized)
tcgtcctttctgatgatacttgttctgatgagaagattcggatgaatagagttgttcggaataaccttcgtgtacgcctaggggatgtcatcagcatccagccatgccctgatgtgaagt

SEQ ID NO: 520610 - DNA, 120 bp, Artificial Sequence
  ENSG00000165280_5 (sequence is synthesized)
acggcaaacgtatccatgtgctgcccattgatgacacagtggaaggcattactggtaatctcttcgaggtataccttaagccgtacttcctggaagcgtatcgacccatccggaaaggag

SEQ ID NO: 520611 - DNA, 120 bp, Artificial Sequence
  ENSG00000165280_6 (sequence is synthesized)
acatttttcttgtccgtggtgggatgcgtgctgtggagttcaaagtggtggaaacagatcctagcccttattgcattgttgctccagacacagtgatccactgcgaaggggagcctatca

SEQ ID NO: 520612 - DNA, 120 bp, Artificial Sequence
  ENSG00000165280_7 (sequence is synthesized)
aacgagaggatgaggaagagtccttgaatgaagtagggtatgatgacattggtggctgcaggaagcagctagctcagataaaggagatggtggaactgcccctgagacatcctgccctct

SEQ ID NO: 520613 - DNA, 120 bp, Artificial Sequence
  ENSG00000165280_8 (sequence is synthesized)
ttaaggcaattggtgtgaagcctcctagaggaatcctgctttacggacctcctggaacaggaaagaccctgattgctcgagctgtagcaaatgagactggagccttcttcttcttgatca

SEQ ID NO: 520614 - DNA, 120 bp, Artificial Sequence
  ENSG00000165280_9 (sequence is synthesized)
atggtcctgagatcatgagcaaattggctggtgagtctgagagcaaccttcgtaaagcctttgaggaggctgagaagaatgctcctgccatcatcttcattgatgagctagatgccatcg

SEQ ID NO: 520615 - DNA, 120 bp, Artificial Sequence
  ENSG00000165280_10 (sequence is synthesized)
ctcccaaaagagagaaaactcatggcgaggtggagcggcgcattgtatcacagttgttgaccctcatggatggcctaaagcagagggcacatgtgattgttatggcagcaaccaacagac

SEQ ID NO: 520616 - DNA, 120 bp, Artificial Sequence
  ENSG00000165280_11 (sequence is synthesized)
ccaacagcattgacccagctctacggcgatttggtcgctttgacagggaggtagatattggaattcctgatgctacaggacgcttagagattcttcagatccataccaagaacatgaagc

SEQ ID NO: 520617 - DNA, 120 bp, Artificial Sequence
  ENSG00000165280_12 (sequence is synthesized)
tggcagatgatgtggacctggaacaggtagccaatgagactcacgggcatgtgggtgctgacttagcagccctgtgctcagaggctgctctgcaagccatccgcaagaagatggatctca

SEQ ID NO: 520618 - DNA, 120 bp, Artificial Sequence
  ENSG00000165280_13 (sequence is synthesized)
ttgacctagaggatgagaccattgatgccgaggtcatgaactctctagcagttactatggatgacttccggtgggccttgagccagagtaacccatcagcactgcgggaaaccgtggtag

SEQ ID NO: 520619 - DNA, 120 bp, Artificial Sequence
  ENSG00000165280_14 (sequence is synthesized)
aggtgccacaggtaacctgggaagacatcgggggcctagaggatgtcaaacgtgagctacaggagctggtccagtatcctgtggagcacccagacaaattcctgaagtttggcatgacac

SEQ ID NO: 520620 - DNA, 120 bp, Artificial Sequence
  ENSG00000165280_15 (sequence is synthesized)
cctcctggctgtgggaaaactttgttggccaaagccattgctaatgaatgccaggccaacttcatctccatcaagggtcctgagctgctcaccatgtggtttggggagtctgaggccaat

SEQ ID NO: 520621 - DNA, 120 bp, Artificial Sequence
  ENSG00000165280_16 (sequence is synthesized)
gtcagagaaatctttgacaaggcccgccaagctgccccctgtgtgctattctttgatgagctggattcgattgccaaggctcgtggaggtaacattggagatggtggtggggctgctgac

SEQ ID NO: 520622 - DNA, 120 bp, Artificial Sequence
  ENSG00000165280_17 (sequence is synthesized)
cgagtcatcaaccagatcctgacagaaatggatggcatgtccacaaaaaaaaatgtgttcatcattggcgctaccaaccggcctgacatcattgatcctgccatcctcagacctggccgt

SEQ ID NO: 520623 - DNA, 120 bp, Artificial Sequence
  ENSG00000165280_18 (sequence is synthesized)
cttgatcagctcatctacatcccacttcctgatgagaagtcccgtgttgccatcctcaaggctaacctgcgcaagtccccagttgccaaggatgtggacttggagttcctggctaaaatg

SEQ ID NO: 520624 - DNA, 120 bp, Artificial Sequence
  ENSG00000165280_19 (sequence is synthesized)
actaatggcttctctggagctgacctgacagagatttgccagcgtgcttgcaagctggccatccgtgaatccatcgagagtgagattaggcgagaacgagagaggcagacaaacccatca

SEQ ID NO: 520625 - DNA, 120 bp, Artificial Sequence
  ENSG00000165280_20 (sequence is synthesized)
gccatggaggtagaagaggatgatccagtgcctgagatccgtcgagatcactttgaagaagccatgcgctttgcgcgccgttctgtcagtgacaatgacattcggaagtatgagatgttt

SEQ ID NO: 520626 - DNA, 120 bp, Artificial Sequence
  ENSG00000165280_21 (sequence is synthesized)
gcccagacccttcagcagagtcggggctttggcagcttcagattcccttcagggaaccagggtggagctggccccagtcagggcagtggaggcggcacaggtggcagtgtatacacagaa

SEQ ID NO: 520627 - DNA, 120 bp, Artificial Sequence
  ENSG00000165280_22 (sequence is synthesized)
gacaatgatgatgacctgtatggctaagtggtggtggccagcgtgcagtgagctggcctgcctggaccttgttccctgggggtgggggcgcttgcccaggagagggaccaggggtgcgcc

SEQ ID NO: 520628 - DNA, 120 bp, Artificial Sequence
  ENSG00000165280_23 (sequence is synthesized)
cacagcctgctccattctccagtctgaacagttcagctacagtctgactctggacagggggtttctgttgcaaaaatacaaaacaaaagcgataaaataaaagcgattttcatttggtag

SEQ ID NO: 520629 - DNA, 120 bp, Artificial Sequence
  ENSG00000165280_24 (sequence is synthesized)
gcggagagtgaattaccaacagggaattgggccttgggcctatgccatttctgttgtagtttggggcagtgcaggggacctgtgtggggtgtgaaccaaggcactactgccacctgccac

SEQ ID NO: 520630 - DNA, 120 bp, Artificial Sequence
  ENSG00000165280_25 (sequence is synthesized)
agtaaagcatctgcacttgactcaatgctgcccgagccctcccttccccctatccaacctgggtaggtgggtaggggccacagttgctggatgtttatatagagagtaggttgatttatt

SEQ ID NO: 520631 - DNA, 120 bp, Artificial Sequence
  ENSG00000165280_26 (sequence is synthesized)
ttacatgcttttgagttaatgttggaaaactaatcacaagcagtttctaaaccaaaaaatgacatgttgtaaaaggacaataaacgttgggtcaaaatggagcctgagtcctgggccctg

SEQ ID NO: 520632 - DNA, 120 bp, Artificial Sequence
  ENSG00000165280_27 (sequence is synthesized)
tgcctgcttcttttcctgggaacagccttgggctacccaccactcccaaggcattcttccaaatgtgaaatcctggaagtaagattgcaccttcttcctctcctgatcaacatcggtatg

SEQ ID NO: 520633 - DNA, 120 bp, Artificial Sequence
  ENSG00000165280_28 (sequence is synthesized)
atgtctcctgttgcctcaccctttgtctgcagtatcactggataggactggtggaaagggagcagcctgacagagctccaaatgtggagaatatggcatccctccacctatatttgatgt

SEQ ID NO: 520634 - DNA, 120 bp, Artificial Sequence
  ENSG00000165280_29 (sequence is synthesized)
ggacggtaaggctaggcctgcaggatcccttatcctgaccaaagactgtgttggggtgccatttgaaaatcgcagggttgcaaaagaatacaatcttacttgcaggtggatattctctat

SEQ ID NO: 520635 - DNA, 120 bp, Artificial Sequence
  ENSG00000165280_30 (sequence is synthesized)
actctcttttaatgcatctaaaaatcccaaacatcccctggttggtgatcacttacagttgtgtccacctttattttatgtactttgattaaaaaaaaaaaactttttgttaatataaaa

SEQ ID NO: 520636 - DNA, 120 bp, Artificial Sequence
  ENSG00000165280_31 (sequence is synthesized)
cggggctttggggcgccagtctgccgtccggcctaccacccgccgaaagcctttggtccccggagagagcaggccccgcgagcccgaggccccagccgggcccggtgggcgtggactttg

SEQ ID NO: 520637 - DNA, 120 bp, Artificial Sequence
  ENSG00000165280_32 (sequence is synthesized)
cccggtgggcgtggactttgcgccatgtgaaggcctcaggagctctgccaccgaggcggagcccggggtcggggaaggcccgccgagctcagggaagctcacagccgcctttttggagcc

SEQ ID NO: 520638 - DNA, 120 bp, Artificial Sequence
  ENSG00000165280_33 (sequence is synthesized)
tcagggtgtcaacacatttgctgcaagagttgtgagagcacgacttaggaacctactgttcttaggtttgaggcactaaggagtcttcttctagagaacctggatctgataccattgggt

SEQ ID NO: 520639 - DNA, 120 bp, Artificial Sequence
  ENSG00000165280_34 (sequence is synthesized)
acaccatgaaataatggaggggatgcttctgtttagttaggtttctttcaaaatgtggaggtagccttgaaccctctttccttttcctcctagtatcctgtggagcacccagacaaattc

SEQ ID NO: 520640 - DNA, 120 bp, Artificial Sequence
  ENSG00000165280_35 (sequence is synthesized)
cacagttgagacttaaaatttctactatctcaaaaagtttccttagccacttcagtcaacatctcccctccttaagccccatcactgatgtgatttctgtccctacagttttcccttttc

SEQ ID NO: 520641 - DNA, 120 bp, Artificial Sequence
  ENSG00000165280_36 (sequence is synthesized)
cagagtgcattgacaagtttttaagcagagcagtgactcaattttaggaagcatggcctagcatcttacctcaggttggattggaagggcaaggagaccaataaactgcagtaatgggag

SEQ ID NO: 520642 - DNA, 120 bp, Artificial Sequence
  ENSG00000165282_0 (sequence is synthesized)
gccgccgccgcacttccgggtgccattgcaggtgagccagggtctcccgagaacctcaccccccggtattcccctcaccctgaagtaagggagtctccctcttcccctcagctcctaacc

SEQ ID NO: 520643 - DNA, 120 bp, Artificial Sequence
  ENSG00000165282_1 (sequence is synthesized)
aaggtgctcagtaccgcggctagggtgcccagcgggaggctgggtagttaccggaggaggcagagccggtcgcacgcctgggtcccagcggaggcccagtcgactctcgacccgggcccc

SEQ ID NO: 520644 - DNA, 120 bp, Artificial Sequence
  ENSG00000165282_2 (sequence is synthesized)
agcctccttgcgtggcgaaggtcgtgcctcaggtctcctggcgaacctggccgcccggaagcggagagtgactcctccccttcgtcccctcggtgcccgccaggcggcgccgtcggctgg

SEQ ID NO: 520645 - DNA, 120 bp, Artificial Sequence
  ENSG00000165282_3 (sequence is synthesized)
gcccggattcccctgcggcttcgatccctttccactgggtattgagattggcgaggggagaggcgcagaaacggcgtgatgcagaaagcctcagtgttgctcttcctggcctgggtctgc

SEQ ID NO: 520646 - DNA, 120 bp, Artificial Sequence
  ENSG00000165282_4 (sequence is synthesized)
ttcctcttctacgctggcattgccctcttcaccagtggcttcctgctcacccgtttggagctcaccaaccatagcagctgccaagagcccccaggccctgggtccctgccatgggggagc

SEQ ID NO: 520647 - DNA, 120 bp, Artificial Sequence
  ENSG00000165282_5 (sequence is synthesized)
caagggaaacctggggcctgctggatggcttcccgattttcgcgggttgtgttggtgctgatagatgctctgcgatttgacttcgcccagccccagcattcacacgtgcctagagagcct

SEQ ID NO: 520648 - DNA, 120 bp, Artificial Sequence
  ENSG00000165282_6 (sequence is synthesized)
cctgtctccctacccttcctgggcaaactaagctccttgcagaggatcctggagattcagccccaccatgcccggctctaccgatctcaggttgaccctcctaccaccaccatgcagcgc

SEQ ID NO: 520649 - DNA, 120 bp, Artificial Sequence
  ENSG00000165282_7 (sequence is synthesized)
ctcaaggccctcaccactggctcactgcctacctttattgatgctggtagtaacttcgccagccacgccatagtggaagacaatctcattaagcagctcaccagtgcaggaaggcgtgta

SEQ ID NO: 520650 - DNA, 120 bp, Artificial Sequence
  ENSG00000165282_8 (sequence is synthesized)
gtcttcatgggagatgatacctggaaagaccttttccctggtgctttctccaaagctttcttcttcccatccttcaatgtcagagacctagacacagtggacaatggcatcctggaacac

SEQ ID NO: 520651 - DNA, 120 bp, Artificial Sequence
  ENSG00000165282_9 (sequence is synthesized)
ctctaccccaccatggacagtggtgaatgggacgtgctgattgctcacttcctgggtgtggaccactgtggccacaagcatggccctcaccaccctgaaatggccaagaaacttagccag

SEQ ID NO: 520652 - DNA, 120 bp, Artificial Sequence
  ENSG00000165282_10 (sequence is synthesized)
atggaccaggtgatccagggacttgtggagcgtctggagaatgacacactgctggtagtggctggggaccatgggatgaccacaaatggagaccatggaggggacagtgagctggaggtc

SEQ ID NO: 520653 - DNA, 120 bp, Artificial Sequence
  ENSG00000165282_11 (sequence is synthesized)
tcagctgctctctttctgtatagccccacagcagtcttccccagcaccccaccagaggagccagaggtgattcctcaagttagccttgtgcccacgctggccctgctgctgggcctgccc

SEQ ID NO: 520654 - DNA, 120 bp, Artificial Sequence
  ENSG00000165282_12 (sequence is synthesized)
atcccatttgggaatatcggggaagtgatggctgagctattctcagggggtgaggactcccagccccactcctctgctttagcccaagcctcagctctccatctcaatgctcagcaggtg

SEQ ID NO: 520655 - DNA, 120 bp, Artificial Sequence
  ENSG00000165282_13 (sequence is synthesized)
tcccgatttcttcatacctactcagctgctactcaggaccttcaagctaaggagcttcatcagctgcagaacctcttctccaaggcctctgctgactaccagtggcttctccagagcccc

SEQ ID NO: 520656 - DNA, 120 bp, Artificial Sequence
  ENSG00000165282_14 (sequence is synthesized)
aagggggctgaggcgacactgccgactgtgattgctgagctgcagcagttcctgcggggagctcgggccatgtgcatcgagtcttgggctcgtttctctctggtccgcatggcggggggt

SEQ ID NO: 520657 - DNA, 120 bp, Artificial Sequence
  ENSG00000165282_15 (sequence is synthesized)
actgctctcttggctgcttcctgctttatctgcctgctggcatctcagtgggcaatatccccaggctttccattctgccctctactcctgacacctgtggcctggggcctggttggggcc

SEQ ID NO: 520658 - DNA, 120 bp, Artificial Sequence
  ENSG00000165282_16 (sequence is synthesized)
atagcgtatgctggactcctgggaactattgagctgaagctagatctagtgcttctaggggctgtggctgcagtgagctcattcctcccttttctgtggaaagcctgggctggctggggg

SEQ ID NO: 520659 - DNA, 120 bp, Artificial Sequence
  ENSG00000165282_17 (sequence is synthesized)
ccctgggcccgtcctgttactcctgctgtttcgcttggctgtgttcttctctgatagttttgttgtagctgaggccagggccacccccttccttttgggctcattcatcctgctcctggt

SEQ ID NO: 520660 - DNA, 120 bp, Artificial Sequence
  ENSG00000165282_18 (sequence is synthesized)
tgtccagcttcactgggagggccagctgcttccacctaagctactcacaatgccccgccttggcacttcagccacaacaaaccccccacggcacaatggtgcatatgccctgaggcttgg

SEQ ID NO: 520661 - DNA, 120 bp, Artificial Sequence
  ENSG00000165282_19 (sequence is synthesized)
aattgggttgcttttatgtacaaggctagctgggctttttcatcgttgccctgaagagacacctgtttgccactcctctccctggctgagtcctctggcatccatggtgggtggtcgagc

SEQ ID NO: 520662 - DNA, 120 bp, Artificial Sequence
  ENSG00000165282_20 (sequence is synthesized)
caagaatttgtggtatggagcttgtgtggcggcgctggtggccctgttagctgccgtgcgcttgtggcttcgccgctatggtaatctcaagagccccgagccacccatgctctttgtgcg

SEQ ID NO: 520663 - DNA, 120 bp, Artificial Sequence
  ENSG00000165282_21 (sequence is synthesized)
ctggggactgcccctaatggcattgggtactgctgcctactgggcattggcgtcgggggcagatgaggctcccccccgtctccgggtcctggtctctggggcatccatggtgctgcctcg

SEQ ID NO: 520664 - DNA, 120 bp, Artificial Sequence
  ENSG00000165282_22 (sequence is synthesized)
ggctgtagcagggctggctgcttcagggctcgcgctgctgctctggaagcctgtgacagtgctggtgaaggctggggcaggcgctccaaggaccaggactgtcctcactcccttctcagg

SEQ ID NO: 520665 - DNA, 120 bp, Artificial Sequence
  ENSG00000165282_23 (sequence is synthesized)
cccccccacttctcaagctgacttggattatgtggtccctcaaatctaccgacacatgcaggaggagttccggggccggttagagaggaccaaatctcagggtcccctgactgtggctgc

SEQ ID NO: 520666 - DNA, 120 bp, Artificial Sequence
  ENSG00000165282_24 (sequence is synthesized)
ttatcagttggggagtgtctactcagctgctatggtcacagccctcaccctgttggccttcccacttctgctgttgcatgcggagcgcatcagccttgtgttcctgcttctgtttctgca

SEQ ID NO: 520667 - DNA, 120 bp, Artificial Sequence
  ENSG00000165282_25 (sequence is synthesized)
gagcttccttctcctacatctgcttgctgctgggatacccgtcaccacccctggtccttttactgtgccatggcaggcagtctcggcttgggccctcatggccacacagaccttctactc

SEQ ID NO: 520668 - DNA, 120 bp, Artificial Sequence
  ENSG00000165282_26 (sequence is synthesized)
cacaggccaccagcctgtctttccagccatccattggcatgcagccttcgtgggattcccagagggtcatggctcctgtacttggctgcctgctttgctagtgggagccaacacctttgc

SEQ ID NO: 520669 - DNA, 120 bp, Artificial Sequence
  ENSG00000165282_27 (sequence is synthesized)
ctcccacctcctctttgcagtaggttgcccactgctcctgctctggcctttcctgtgtgagagtcaagggctgcggaagagacagcagcccccagggaatgaagctgatgccagagtcag

SEQ ID NO: 520670 - DNA, 120 bp, Artificial Sequence
  ENSG00000165282_28 (sequence is synthesized)
acccgaggaggaagaggagccactgatggagatgcggctccgggatgcgcctcagcacttctatgcagcactgctgcagctgggcctcaagtacctctttatccttggtattcagattct

SEQ ID NO: 520671 - DNA, 120 bp, Artificial Sequence
  ENSG00000165282_29 (sequence is synthesized)
ggcctgtgccttggcagcctccatccttcgcaggcatctcatggtctggaaagtgtttgcccctaagttcatatttgaggctgtgggcttcattgtgagcagcgtgggacttctcctggg

SEQ ID NO: 520672 - DNA, 120 bp, Artificial Sequence
  ENSG00000165282_30 (sequence is synthesized)
catagctttggtgatgagagtggatggtgctgtgagctcctggttcaggcagctatttctggcccagcagaggtagcctagtctgtgattactggcacttggctacagagagtgcttgag

SEQ ID NO: 520673 - DNA, 120 bp, Artificial Sequence
  ENSG00000165282_31 (sequence is synthesized)
aacagtgtagcctggcctgtacaggtactggatgatctgcaagacaggctcagccatactcttactatcatgcagccaggggccgctgacatctaggacttcattattctataattcagg

SEQ ID NO: 520674 - DNA, 120 bp, Artificial Sequence
  ENSG00000165282_32 (sequence is synthesized)
accacagtggagtatgatccctaactcctgatttggatgcatctgagggacaaggggggcggtctccgaagtggaataaaataggccgggcgtggtgacttgcacctataatcccagcac

SEQ ID NO: 520675 - DNA, 90 bp, Artificial Sequence
  ENSG00000165282_33 (sequence is synthesized)
gtcccaggagttcaagaccagcctgtggaacataacaagaccccgtctctactatttaaaaaaaagtgtaataaaatgataatataatta

SEQ ID NO: 520676 - DNA, 85 bp, Artificial Sequence
  ENSG00000165282_34 (sequence is synthesized)
cctgcggcttcgatccctttccactgggtattgagattggcgaggggagaggcgcagaaacggcgtactctagtgcagtggattc

SEQ ID NO: 520677 - DNA, 120 bp, Artificial Sequence
  ENSG00000165282_35 (sequence is synthesized)
ttgagattggcgaggggagaggcgcagaaacggcgtgtaagagagcctgactaccaattggaataagtttccctcctgactgttcacatgtacaggcagcattagcatttcctgcctgta

SEQ ID NO: 520678 - DNA, 120 bp, Artificial Sequence
  ENSG00000165282_36 (sequence is synthesized)
catgtgaacgttcctatgctctacccctcgaagatcctgattcagtagatctggggtgggacctcatgaaacggcgtctccctctgttgtccagactctagtgcagtggttcaatctcgg

SEQ ID NO: 520679 - DNA, 89 bp, Artificial Sequence
  ENSG00000165282_37 (sequence is synthesized)
tcggctcactgcaacctccgcctccccgattcaagcgattctcctgcgtcagcctccccagtagctgagactacaggtgcccgccaccc

SEQ ID NO: 520680 - DNA, 120 bp, Artificial Sequence
  ENSG00000165282_38 (sequence is synthesized)
attgcgaggggttggctgtgaaatggtttatctccaggaaggtttccgggaggaagtgattctagctgggcttgtattcagggaccagaatatccactggttctttgccccacagtaatg

SEQ ID NO: 520681 - DNA, 120 bp, Artificial Sequence
  ENSG00000165282_39 (sequence is synthesized)
agaggtgaggcctgggatgttcctcatctgttctcccagtaatcagcccatgttaccattacagcatcctcatgaatacctctattttaggcccccaaatccatgatcctgggtatcctc

SEQ ID NO: 520682 - DNA, 120 bp, Artificial Sequence
  ENSG00000165282_40 (sequence is synthesized)
cactctcatttcttacctaggcccctatgtctgccatcccaaacattgacttcagctttgtgatgaatctgttgaccactgtcattttcctttaggagccagaggtgattcctcaagtta

SEQ ID NO: 520683 - DNA, 120 bp, Artificial Sequence
  ENSG00000165282_41 (sequence is synthesized)
agtcttagtcccaccttccatacctatccctcttccgttatccctcccttccccgattctggacagagtttgggtccttgacttccaggtacccccttttgtaatacctattcttgcctc

SEQ ID NO: 520684 - DNA, 120 bp, Artificial Sequence
  ENSG00000165282_42 (sequence is synthesized)
acaatagtgatgtgagttcggcccctcttgttttcaaggaggtgttgctcctcatgttcctgagcttgacagagggtcccatgccccacacaactaggaaggtcttcttggtgtcctctc

SEQ ID NO: 520685 - DNA, 120 bp, Artificial Sequence
  ENSG00000165282_43 (sequence is synthesized)
tcttacctgccatagccaagcaaattgatccctcctgttggttcccagggttcatggagaggagagacaaggagtcctctaagactccctgtggaaatgctgcatcctcatgagcacatt

SEQ ID NO: 520686 - DNA, 120 bp, Artificial Sequence
  ENSG00000165282_44 (sequence is synthesized)
tcttgattttccagtgatggaagtagtaaattgtgaatatataatggcactgagctgtatgtgtttgagagaaagaaagagattggccatagcaggattcagataagcctgatggcgctt

SEQ ID NO: 520687 - DNA, 120 bp, Artificial Sequence
  ENSG00000165282_45 (sequence is synthesized)
ttgtaccacagagagaattagaataacagaatgttgactgtaaggaggttgggctgataggcatttgagtgtgtatgagaattgatactgaagtagtaggagtatatgattgtggagcag

SEQ ID NO: 520688 - DNA, 120 bp, Artificial Sequence
  ENSG00000165282_46 (sequence is synthesized)
ttctttcagaccttcaaaaccgtgggagagagccttgactgagtttcacataagtgaagtggttgcccaagcccagtggcctcaaatggcagttctgagacttgaacctgggtctcctta

SEQ ID NO: 520689 - DNA, 120 bp, Artificial Sequence
  ENSG00000165282_47 (sequence is synthesized)
atcctagtcctggatcatttcccctctacaacctagatctggaccccgctagttgcatttgaggattactctatcagtggacagactggaaaaactgaggtgatagccaggattttcttc

SEQ ID NO: 520690 - DNA, 120 bp, Artificial Sequence
  ENSG00000165282_48 (sequence is synthesized)
ccaaactgtggtcatggatcctcttcctttcctccagaggcagatgtggcactgatatcttcctccatcctgggggcacagcctgagtgttagcattgcagatggatactgacttgccca

SEQ ID NO: 520691 - DNA, 120 bp, Artificial Sequence
  ENSG00000165282_49 (sequence is synthesized)
aagtcacatagtgagtcagtgcttggggcagggcaggaagtaggtctcctaactcctagcccaggacatgcaatattttttccactgacatgcactattctcctgcttccattttttaca

SEQ ID NO: 520692 - DNA, 120 bp, Artificial Sequence
  ENSG00000165282_50 (sequence is synthesized)
ggggcctatagaaactctccttttgctccgcttcctcctctccttcacaagtaacgtggcccctcctctcctcctctagattctggcctgtgccttggcagcctccatccttcgcaggca

SEQ ID NO: 520693 - DNA, 120 bp, Artificial Sequence
  ENSG00000165282_51 (sequence is synthesized)
tctcatggtctggaaagtgtttgcccctaagtgagtagatttgcttgagaagtagaggtggtggggagggagaaacttggaacaaagtatgaagatcctaaacatccaggatggccaagg

SEQ ID NO: 520694 - DNA, 120 bp, Artificial Sequence
  ENSG00000165282_52 (sequence is synthesized)
ttttgcctctacagggaaaaggcagtagacctactctgttgcctgagattctccgcctttctttgcaggttcatatttgaggctgtgggcttcattgtgagcagcgtgggacttctcctg

SEQ ID NO: 520695 - DNA, 120 bp, Artificial Sequence
  ENSG00000165282_53 (sequence is synthesized)
aactgctttagtccacaaattctgagccacctatgggtgtaacagcctgggcttgtatccctggacatagaggagtgtcaaagcctggctggggttgaggagtgggtcttagtcttctgt

SEQ ID NO: 520696 - DNA, 120 bp, Artificial Sequence
  ENSG00000165282_54 (sequence is synthesized)
cttctctaggccttctgctgaagctagaggctccatccatcttgattaactcaatgtgtagctttgggcatcaggatcatggccgaagacatgtctctttgccaaaggtctaggccttac

SEQ ID NO: 520697 - DNA, 120 bp, Artificial Sequence
  ENSG00000165282_55 (sequence is synthesized)
taatggagttatagctggggatgaataggcccctggagaaaaatcttttttctttttgagaaaaatatttatccgtttctactcctgacacatttattggcccccaggggacttgtggag

SEQ ID NO: 520698 - DNA, 120 bp, Artificial Sequence
  ENSG00000165283_0 (sequence is synthesized)
gtctcgttggttccggaggtcgctgcggcggtgggaaatgctggcgcgcgcggcgcggggcactggggcccttttgctgaggggctctctactggcttctggccgcgctccgcgccgcgc

SEQ ID NO: 520699 - DNA, 120 bp, Artificial Sequence
  ENSG00000165283_1 (sequence is synthesized)
ctcctctggattgccccgaaacaccgtggtactgttcgtgccgcagcaggaggcctgggtggtggagcgaatgggccgattccaccggatcctggagcctggtttgaacatcctcatccc

SEQ ID NO: 520700 - DNA, 120 bp, Artificial Sequence
  ENSG00000165283_2 (sequence is synthesized)
tgtgttagaccggatccgatatgtgcagagtctcaaggaaattgtcatcaacgtgcctgagcagtcggctgtgactctcgacaatgtaactctgcaaatcgatggagtcctttacctgcg

SEQ ID NO: 520701 - DNA, 120 bp, Artificial Sequence
  ENSG00000165283_3 (sequence is synthesized)
catcatggacccttacaaggcaagctacggtgtggaggaccctgagtatgccgtcacccagctagctcaaacaaccatgagatcagagctcggcaaactctctctggacaaagtcttccg

SEQ ID NO: 520702 - DNA, 120 bp, Artificial Sequence
  ENSG00000165283_4 (sequence is synthesized)
ggaacgggagtccctgaatgccagcattgtggatgccatcaaccaagctgctgactgctggggtatccgctgcctccgttatgagatcaaggatatccatgtgccaccccgggtgaaaga

SEQ ID NO: 520703 - DNA, 120 bp, Artificial Sequence
  ENSG00000165283_5 (sequence is synthesized)
agttctagagtctgaggggacccgagagtcggccatcaatgtggcagaagggaagaaacaggcccagatcctggcctccgaagcagaaaaggctgaacagataaatcaggcagcaggaga

SEQ ID NO: 520704 - DNA, 120 bp, Artificial Sequence
  ENSG00000165283_6 (sequence is synthesized)
ggccagtgcagttctggcgaaggccaaggctaaagctgaagctattcgaatcctggctgcagctctgacacaacataatggagatgcagcagcttcactgactgtggccgagcagtatgt

SEQ ID NO: 520705 - DNA, 120 bp, Artificial Sequence
  ENSG00000165283_7 (sequence is synthesized)
cagcgcgttctccaaactggccaaggactccaacactatcctactgccctccaaccctggcgatgtcaccagcatggtggctcaggccatgggtgtatatggagccctcaccaaagcccc

SEQ ID NO: 520706 - DNA, 120 bp, Artificial Sequence
  ENSG00000165283_8 (sequence is synthesized)
agtgccagggactccagactcactctccagtgggagcagcagagatgtccagggtacagatgcaagtcttgatgaggaacttgatcgagtcaagatgagttagtggagctgggcttggcc

SEQ ID NO: 520707 - DNA, 120 bp, Artificial Sequence
  ENSG00000165283_9 (sequence is synthesized)
agggagtctgggaacaaggaagcagattttcctgattctggctctagcttccctgccaagattttggtttttatttttttatttgaactttagtcgtgtaataaactcaccagtggcaaa

SEQ ID NO: 520708 - DNA, 120 bp, Artificial Sequence
  ENSG00000165283_10 (sequence is synthesized)
ccagaaactgtcctctttgattggggaatgaagttgggaaagtcactagcattttccttggatccagtcctgtcagcatgatgcctccatgaataagagtgaacttcttgtaaagtgaaa

SEQ ID NO: 520709 - DNA, 120 bp, Artificial Sequence
  ENSG00000165283_11 (sequence is synthesized)
tgggttttcttaccagtgacacctcagccttctgaggacttatttcttggtaggagctgctgcttttctgggcatgttccatgtgttgactccctacatactccaggactagcttaggtc

SEQ ID NO: 520710 - DNA, 70 bp, Artificial Sequence
  ENSG00000165288_0 (sequence is synthesized)
acttcggctcctccctcttctcgctccgtctatctctctctctctctctctctccgcccccccacccccc

SEQ ID NO: 520711 - DNA, 120 bp, Artificial Sequence
  ENSG00000165288_1 (sequence is synthesized)
ttcctctctctctctctctcttctctctctctctctcactcactcactctctctctccctctccctctcctctccttcctcctccgcctcctcagctcttgggctagaatatctatgggt

SEQ ID NO: 520712 - DNA, 120 bp, Artificial Sequence
  ENSG00000165288_2 (sequence is synthesized)
cgaaacgtgatgcgatgaattcgagagagagcgaaactaggacgaggagtgcggcggaagcggcgggactcccgggcatgggggcttcaccacaatagaggcagcgcccccacccgcccc

SEQ ID NO: 520713 - DNA, 120 bp, Artificial Sequence
  ENSG00000165288_3 (sequence is synthesized)
cgccagcccctccggagcgaagcccccaaaccccctcgggaaaaggatggcggcagcacctacccagatcgaagccgagctgtattacctgatcgctaggttcttgcagtctggaccctg

SEQ ID NO: 520714 - DNA, 120 bp, Artificial Sequence
  ENSG00000165288_4 (sequence is synthesized)
caacaaatccgctcaggtgctagtgcaggagctcgaggagcatcagctgattccgcgccgcttagattgggaggggaaagagcaccgaagaagcttcgaggatctggtggcagcaaatgc

SEQ ID NO: 520715 - DNA, 120 bp, Artificial Sequence
  ENSG00000165288_5 (sequence is synthesized)
acacattcctccagactacctccttaaaatttgtgagagaattggtcctttactagataaagagatccctcagagtgttcctggggtacagacattattaggtgttggtcggcagtctct

SEQ ID NO: 520716 - DNA, 120 bp, Artificial Sequence
  ENSG00000165288_6 (sequence is synthesized)
gctacgggatgccaaagactgtaagagtacactatggaatgggtctgcttttgcggctctgcatagaggcagacctccagaactacctgtaaattatgtgaaacctccaaatgtggtgaa

SEQ ID NO: 520717 - DNA, 120 bp, Artificial Sequence
  ENSG00000165288_7 (sequence is synthesized)
tatcacctctgccaggcaattaaccggctgtagtcgctttggtcatattttcccttcatctgcttaccagcacattaagatgcataagagaattctggggcacttgtcatctgtctactg

SEQ ID NO: 520718 - DNA, 120 bp, Artificial Sequence
  ENSG00000165288_8 (sequence is synthesized)
tgtagcatttgaccgaagcgggagaagaatttttacaggttcagatgactgtttagtaaaaatttgggctacagatgatggacgccttcttgctacacttcgtggacactctgctgaaat

SEQ ID NO: 520719 - DNA, 120 bp, Artificial Sequence
  ENSG00000165288_9 (sequence is synthesized)
ttctgacatggctgttaactatgaaaacactcttattgctgcaggcagctgtgataaggtagtaagagtatggtgtcttcgaacttgtgcacccgttgcagtccttcagggccattcagc

SEQ ID NO: 520720 - DNA, 120 bp, Artificial Sequence
  ENSG00000165288_10 (sequence is synthesized)
ttctattacttccatacagttttgtccatcaactaaaggcacaaacagatacctcacttctactggtgctgatggaacaatctgtttctggcaatggcatgtaaaaacaatgaagtttag

SEQ ID NO: 520721 - DNA, 120 bp, Artificial Sequence
  ENSG00000165288_11 (sequence is synthesized)
agatcgcccggtgaaatttactgagagatccagacctggagtccagatatcttgttcatctttcagttctggtggtatgttcattacaactggtagtactgaccatgtgattagaatata

SEQ ID NO: 520722 - DNA, 120 bp, Artificial Sequence
  ENSG00000165288_12 (sequence is synthesized)
ttatttgggttctgaggttcctgagaaaattgctgaattagagtcacatacggataaagttgttgctgttcagttctgtaacaatggagacagtttaagatttgttagtggaagtcgaga

SEQ ID NO: 520723 - DNA, 120 bp, Artificial Sequence
  ENSG00000165288_13 (sequence is synthesized)
tggaacggcaagaatttggcagtatcagcaacaagaatggaagagtatagtgctagacatggctactaaaatgactggcaataatttgccatctggagaagacaagatcactaaacttaa

SEQ ID NO: 520724 - DNA, 120 bp, Artificial Sequence
  ENSG00000165288_14 (sequence is synthesized)
ggtgactatggtggcctgggatcgctatgataccacagttattactgcagtgaacaattttcttttgaaagtgtggaattctatcacaggacagcttcttcatacattatctggacatga

SEQ ID NO: 520725 - DNA, 120 bp, Artificial Sequence
  ENSG00000165288_15 (sequence is synthesized)
tgatgaagtattcgttctagaagcccatccatttgatcaaaggatcatactttcagcaggtcatgatgggaacatttttatttgggaccttgaccgggggaccaaaattcggaattactt

SEQ ID NO: 520726 - DNA, 120 bp, Artificial Sequence
  ENSG00000165288_16 (sequence is synthesized)
taacatgattgaaggccaaggccatggtgcggtgtttgattgtaaattttcaccagatggaaaccattttgcctgcacagattctcatggacatttgctgctttttggttttggatgcag

SEQ ID NO: 520727 - DNA, 120 bp, Artificial Sequence
  ENSG00000165288_17 (sequence is synthesized)
taaatactacgaaaagattccagatcagatgttcttccacacggattatcgtcctcttattcgtgatgccaataactatgtattggatgaacaaacccaacaagctcctcacctcatgcc

SEQ ID NO: 520728 - DNA, 120 bp, Artificial Sequence
  ENSG00000165288_18 (sequence is synthesized)
tcctccatttttggtggatgttgatggaaatcctcatcccacaaaattccaacggttggtaccaggacgggaaaattgtaaagatgaacagcttataccacagctgggatatgtggctaa

SEQ ID NO: 520729 - DNA, 120 bp, Artificial Sequence
  ENSG00000165288_19 (sequence is synthesized)
tggtgatggtgaggtagtagaacaggtaattgggcagcaaaccaatgaccaagatgagagcattcttgatggaataatcagggagctgcagagagaacaagacctgagactaattaatga

SEQ ID NO: 520730 - DNA, 120 bp, Artificial Sequence
  ENSG00000165288_20 (sequence is synthesized)
aggagatgttccacatttaccagttaatagagcatactctgttaatggtgctctgagaagtccaaacatggacatatcttcttccccaaacatcaggcttcgaagacatagtagtcaaat

SEQ ID NO: 520731 - DNA, 120 bp, Artificial Sequence
  ENSG00000165288_21 (sequence is synthesized)
tgaaggtgttagacaaatgcataacaatgctcctcggagccagatggccactgaaagagatctcatggcgtggagcagaagagtggtggtcaatgaactaaataatggggttagtagggt

SEQ ID NO: 520732 - DNA, 120 bp, Artificial Sequence
  ENSG00000165288_22 (sequence is synthesized)
acaggaagaatgtcgaactgcaaaaggtgacatagaaatcagtctttatacagttgaaaagaagaaaaagccatcttacactactcaaaggaatgattatgagcctagctgtgggcgttc

SEQ ID NO: 520733 - DNA, 120 bp, Artificial Sequence
  ENSG00000165288_23 (sequence is synthesized)
tttacgcaggacacagcgcaaacgtcagcatacttaccaaacacggtccaacatagagcataattcacaggcatcatgtcaaaattcaggtgtacaggaagactcagacagttcttcaga

SEQ ID NO: 520734 - DNA, 120 bp, Artificial Sequence
  ENSG00000165288_24 (sequence is synthesized)
ggaagatgaaactgttggcacaagtgacgcttcggtagaggatcctgttgttgaatggcaaagtgaaagttcttccagtgactcatcaagtgaatattctgattggacagcagatgctgg

SEQ ID NO: 520735 - DNA, 120 bp, Artificial Sequence
  ENSG00000165288_25 (sequence is synthesized)
aataaatttacaacccccaaaaagacaaaccagacagacaacacgtaaaatatgcagcagctctgatgaggaaaatttgaagtccctagaagaaaggcagaagaaacctaagcagactag

SEQ ID NO: 520736 - DNA, 120 bp, Artificial Sequence
  ENSG00000165288_26 (sequence is synthesized)
aaagaagaaaggaggactggtttctatagcaggtgagcctaatgaagaatggtttgcccctcagtggatcttggatactataccccgacgttccccatttgtcccacaaatgggagatga

SEQ ID NO: 520737 - DNA, 120 bp, Artificial Sequence
  ENSG00000165288_27 (sequence is synthesized)
gcttatctattttaggcaaggacatgaagcttatgttcgggctgtaaggaaatcgaaaatatacagtgttaatttacaaaaacagccatggaacaaaatggatctcagggagcaagagtt

SEQ ID NO: 520738 - DNA, 120 bp, Artificial Sequence
  ENSG00000165288_28 (sequence is synthesized)
tgttaagattgtaggaatcaaatatgaggttggcccacccacactgtgctgcttgaagcttgcatttctggacccaatttcaggcaaaatgactggagaatctttttccattaagtatca

SEQ ID NO: 520739 - DNA, 120 bp, Artificial Sequence
  ENSG00000165288_29 (sequence is synthesized)
tgacatgccggatgtcattgacttccttgtgctacatcagttttataatgaagccaaagaaaggaactggcagattggtgatagattccgcagtataatagatgacgcctggtggtttgg

SEQ ID NO: 520740 - DNA, 120 bp, Artificial Sequence
  ENSG00000165288_30 (sequence is synthesized)
gactgtggagagtcagcagccttttcaaccagagtatcctgatagttctttccagtgttacagtgttcactgggacaataatgagagagaaaagatgagcccatgggatatggagccaat

SEQ ID NO: 520741 - DNA, 120 bp, Artificial Sequence
  ENSG00000165288_31 (sequence is synthesized)
tccagaaggaactgcctttccagatgaagttggtgctggtgttcctgtctcccaggaagaattgactgctttgctatacaaaccccaggaaggagagtggggggctcattccagagacga

SEQ ID NO: 520742 - DNA, 120 bp, Artificial Sequence
  ENSG00000165288_32 (sequence is synthesized)
agaatgtgaacgggttattcagggcatcaaccaccttctttccctggattttgccagcccttttgctgttccagtggatctcagtgcctaccccttgtattgtactgtagttgcttatcc

SEQ ID NO: 520743 - DNA, 120 bp, Artificial Sequence
  ENSG00000165288_33 (sequence is synthesized)
aactgacctcaataccatcaggcggagacttgaaaatcgcttttacaggagaatatcagcattaatgtgggaggtacgctatattgaacataatgccaggactttcaatgagccagacag

SEQ ID NO: 520744 - DNA, 120 bp, Artificial Sequence
  ENSG00000165288_34 (sequence is synthesized)
tcctatagttaaagcagctaaaattgtaactgatgtcttacttcgatttattggggatcagagctgtactgatatactggatacttataataaaattaaagcagaagaacgaaacagtac

SEQ ID NO: 520745 - DNA, 120 bp, Artificial Sequence
  ENSG00000165288_35 (sequence is synthesized)
tgatgcagaggaggatacagaaattgttgatttagattcagacggtcctggtacttcatctggaagaaaggtcaaatgccgaggcagaagacagtctttaaagtgtaatcctgatgcttg

SEQ ID NO: 520746 - DNA, 120 bp, Artificial Sequence
  ENSG00000165288_36 (sequence is synthesized)
gaaaaaacaatgcaaggaactattgagcctcatttatgaacgtgaagactcggagccatttcgacagccagctgatcttctttcttacccaggtcatcaggagcaagagggagaatcctc

SEQ ID NO: 520747 - DNA, 120 bp, Artificial Sequence
  ENSG00000165288_37 (sequence is synthesized)
agagtctgttgttccagaaagacaacaagattcatctctttctgaggattatcaagatgttatagatactcctgtggacttcagcactgtgaaagaaactttggaagcaggaaactatgg

SEQ ID NO: 520748 - DNA, 120 bp, Artificial Sequence
  ENSG00000165288_38 (sequence is synthesized)
tagtcctctggaattttataaggatgttcgccaaatattcaacaactccaaagcttatacctctaataaaaagtcaaggatctatagcatgatgctgcgattatctgccttatttgaaag

SEQ ID NO: 520749 - DNA, 120 bp, Artificial Sequence
  ENSG00000165288_39 (sequence is synthesized)
tcatatcaaaaatatcatctctgaatataagtcagcaatccagagtcagaagaggagaaggccacggtacagaaaacgtctaagaagcagcagcagttcattatctagtagtggagcacc

SEQ ID NO: 520750 - DNA, 120 bp, Artificial Sequence
  ENSG00000165288_40 (sequence is synthesized)
tagtccaaaagggaagcagaaacaaatgaagttgcagcctaaaaatgaccagaatacctcagtatctcatgccaggactagctctcctttctcatctcctgtttcagatgctgctgaagg

SEQ ID NO: 520751 - DNA, 120 bp, Artificial Sequence
  ENSG00000165288_41 (sequence is synthesized)
gctttcactatatctacttgatgatgagccagatgggccattttcttcatcgagcttcggtggatatagccgaagtggaaatagccatgacccagggaaagccaaatcatttcggaatag

SEQ ID NO: 520752 - DNA, 120 bp, Artificial Sequence
  ENSG00000165288_42 (sequence is synthesized)
agttttgccagttaaacaagatcactcccttgatggaccccttacaaatggtgatggcagagagccccggacaggaatcaagagaaaactacttagtgcatcagaagaagatgaaaacat

SEQ ID NO: 520753 - DNA, 120 bp, Artificial Sequence
  ENSG00000165288_43 (sequence is synthesized)
gggaggagaagataaagagaaaaaagaaacaaaagagaaatctcatttatccacctcagagagtggagagttaggatccagtttaagttctgaaagtacctgtggttctgactctgactc

SEQ ID NO: 520754 - DNA, 120 bp, Artificial Sequence
  ENSG00000165288_44 (sequence is synthesized)
tgaatcaacttccagaacagatcaagattacgtagatggagaccatgattatagcaaattcatacaaaccagacctaaaagaaaactcagaaagcaacatggcaatggaaaaagaaattg

SEQ ID NO: 520755 - DNA, 120 bp, Artificial Sequence
  ENSG00000165288_45 (sequence is synthesized)
gaagaccagaggcacaggaggaagaggcagatggggaagatggggtagatggagtagaggaggcagaggaagaggaggcaggggacgagggagtcgaggaagaggtggaggtggcactag

SEQ ID NO: 520756 - DNA, 120 bp, Artificial Sequence
  ENSG00000165288_46 (sequence is synthesized)
ggggaggggaagagggagaggaggaagaggtgcttctagaggagctaccagagccaaacgagcacgtattgcagatgatgaatttgataccatgttttcaggacgtttcagtagactgcc

SEQ ID NO: 520757 - DNA, 120 bp, Artificial Sequence
  ENSG00000165288_47 (sequence is synthesized)
tcgaattaaaacaagaaaccaaggcaggaggactgttttatataatgatgattctgataatgacaattttgtgtccactgaggatcctctgaatcttggtacatccagatcaggcagagt

SEQ ID NO: 520758 - DNA, 120 bp, Artificial Sequence
  ENSG00000165288_48 (sequence is synthesized)
gcgtaaaatgacagaaaaagccagggttagccatctcatgggatggaattattaacagttaataaatttagaataacttaaaaaattcaatggccttctactgcagggaatttaccagga

SEQ ID NO: 520759 - DNA, 120 bp, Artificial Sequence
  ENSG00000165288_49 (sequence is synthesized)
aatctacaaagcaagttgtgtggggacttctgcttcctttcacattggtgcttttccatttatgccagtatacatttgtttcaagacttttgatctccacacttcatttgttcaaataag

SEQ ID NO: 520760 - DNA, 120 bp, Artificial Sequence
  ENSG00000165288_50 (sequence is synthesized)
ccttactcattaggccttaaattaaaagaaattctgcccacacacacacaaacacatacacacacatacacacacacagacacacacacacgaaacacaacacagacactacagatttac

SEQ ID NO: 520761 - DNA, 120 bp, Artificial Sequence
  ENSG00000165288_51 (sequence is synthesized)
tacattaaaggagcattcagcttcttaagagtagcatgacatttttatctcaatagaatagccctcttttgcttttgtatcacagaagtatagcaccttcttacagagttttatatagtt

SEQ ID NO: 520762 - DNA, 120 bp, Artificial Sequence
  ENSG00000165288_52 (sequence is synthesized)
tgtttttgccattttgattcctatacccagtaataataacttttgcacaatacaccaatcctaaaggcagctattaaatgtttacagtttctatattgtaagagcgatctggattatttt

SEQ ID NO: 520763 - DNA, 120 bp, Artificial Sequence
  ENSG00000165288_53 (sequence is synthesized)
tcttgatatgcttttcattgatttgcataattcacgttaaaggtgagaaagggttggtgccttgtaaatatgtagcagatcttcgtggtgtgttctgatgtgtgcattaactttattaaa

SEQ ID NO: 520764 - DNA, 120 bp, Artificial Sequence
  ENSG00000165288_54 (sequence is synthesized)
aaagaatacttgaggtatcaatctagacaaggtgccaaatgcaaaagtttcccgcatcaatttttttcctatcacattttattgcattaatagaatttgtgtagcttaaataacttaaac

SEQ ID NO: 520765 - DNA, 120 bp, Artificial Sequence
  ENSG00000165288_55 (sequence is synthesized)
atttgaaaaatcctcatccacaaagaacaacttctttgaacagtagctcagctacctcttaactacaactactggaaacattaaggaaaatagatgctgttattccttactgactaagga

SEQ ID NO: 520766 - DNA, 120 bp, Artificial Sequence
  ENSG00000165288_56 (sequence is synthesized)
gaaatagaacaagcttagtaggaatgaataccccataagttataagctgagaggttgttaataattgtattggctctcaaattaataattgtaattaacaaagtttcataaatatagtat

SEQ ID NO: 520767 - DNA, 120 bp, Artificial Sequence
  ENSG00000165288_57 (sequence is synthesized)
gctctaccaccttaggctttcttagaacatatttgtgtaagtagacttgggctactgcttatatatttctgctccacttaccatttaacagctgtgagttgctggttttcatttgaatct

SEQ ID NO: 520768 - DNA, 120 bp, Artificial Sequence
  ENSG00000165288_58 (sequence is synthesized)
taaaatttaacaaagcacctggtttgatttggaatgttttggctagctagtattatgaatcaacttatagattctgctcatatcattccaaagggttcttctgttctagtctttcaggaa

SEQ ID NO: 520769 - DNA, 120 bp, Artificial Sequence
  ENSG00000165288_59 (sequence is synthesized)
agaaccttattgcactgcacactcatgttgtgaatcattattttatagataaaaaacatctttaaaaacccttattgtcttgtttacagcagtagagtgcacatggttccataagtgagc

SEQ ID NO: 520770 - DNA, 120 bp, Artificial Sequence
  ENSG00000165288_60 (sequence is synthesized)
ttgagttccaaggtcagttttactccccaaatttaatattacagatttgttcatttgttagatacttacatttctgaggtaagagggataatagcaatttctgtttctgtaacagcaaat

SEQ ID NO: 520771 - DNA, 120 bp, Artificial Sequence
  ENSG00000165288_61 (sequence is synthesized)
ttgttgcacttagatcaggctcatgggataaaacagacttcttagtatatacctagctatcccaggatatttcttaagctaatgtgtttgtctcatgctttcaatcatttcatgcatctg

SEQ ID NO: 520772 - DNA, 120 bp, Artificial Sequence
  ENSG00000165288_62 (sequence is synthesized)
aaaacccttaagtgcagaggaaggcgtacacacataaaactttgcttttttggtagggtcggcagtagggttattcttggactaacatctttaagcagttttcacttgcagtggaaatga

SEQ ID NO: 520773 - DNA, 120 bp, Artificial Sequence
  ENSG00000165288_63 (sequence is synthesized)
tgttcaggctttaagagaaagtattgtgaattgttaatggcactaacttctgttactagacagcagaccaagctatttttttgttgtagtctttttttcactaaaccaaaactacttctg

SEQ ID NO: 520774 - DNA, 120 bp, Artificial Sequence
  ENSG00000165288_64 (sequence is synthesized)
gttgtaactcagctgccactttaaaccatagtagagattcaaaacgttcctatttgaaactacatttgatttttgctaaaatgtgctgtttcggttatttatctcttgggcatttagact

SEQ ID NO: 520775 - DNA, 120 bp, Artificial Sequence
  ENSG00000165288_65 (sequence is synthesized)
aaattgtgcctgtattcctgaaatcaataatactttggcttatcctgatctaagtaacatagttacttaaattcctggatatacccaaatatggatcacatgtatcattttagtttgaaa

SEQ ID NO: 520776 - DNA, 120 bp, Artificial Sequence
  ENSG00000165288_66 (sequence is synthesized)
ttttttgttgacattcttctatgaagagctgacctcttgaaatgtagaagaattgacatttgtgtgattttggctatctggagctttatttataatttattttgaaaaataaaaatgcca

SEQ ID NO: 520777 - DNA, 120 bp, Artificial Sequence
  ENSG00000165288_67 (sequence is synthesized)
catttatttcccaaatgtcaagattttctagaattagataattagaataataaggctgaagacattttaaagcatattttatatgtagtgaaatactgtgaaaatattagtgaacagcat

SEQ ID NO: 520778 - DNA, 120 bp, Artificial Sequence
  ENSG00000165288_68 (sequence is synthesized)
tttgctgtaatgtttatttcagttattaagatttaaagagttagtcatcagggtatgttagataaacatagttatcatttattaaacaaacagataattttctgtttgcatgcaaattat

SEQ ID NO: 520779 - DNA, 120 bp, Artificial Sequence
  ENSG00000165288_69 (sequence is synthesized)
tttaataagtgtgaaaataaaagtttggaagatagtatttttacttttatatctggacttttttttcccccaatttacactttgctttcttgtaataccacctcctgtgaatgtgttgta

SEQ ID NO: 520780 - DNA, 120 bp, Artificial Sequence
  ENSG00000165288_70 (sequence is synthesized)
attagtatcacattgattactttatcattttaatttctttgaggccctttaaacctacgtaaaatctgggtccagccatagcaaagcaagtacaaaatgaacaaagaattttgaagaaaa

SEQ ID NO: 520781 - DNA, 120 bp, Artificial Sequence
  ENSG00000165288_71 (sequence is synthesized)
gcctaaatcttaaattgctaagaaaaaacactgttatatttaggcccgtgagagcatatacatgtataaacctaatcctatgctagatatgaatagtcagtgagctgtaatatttctcat

SEQ ID NO: 520782 - DNA, 120 bp, Artificial Sequence
  ENSG00000165288_72 (sequence is synthesized)
aaatgctaataatgtttaaattcccagctttaagatcttagtgtgtgtatatatttataaaatctgaattgtgtgtttcttctatggcttactgtgtgtttctctttcagcaataggatg

SEQ ID NO: 520783 - DNA, 120 bp, Artificial Sequence
  ENSG00000165288_73 (sequence is synthesized)
ctctctaaaacattcactagcctactagcctacttactaaatttttgtatatgtgtgtttgtgcacttgtatgtgtgtaaagttttttccccaacttgacacaccttatctcagacattc

SEQ ID NO: 520784 - DNA, 120 bp, Artificial Sequence
  ENSG00000165288_74 (sequence is synthesized)
aaaaaaagagaacattttgtatggaggacagtctgccaactttttgcctctctacagctcttagcctgtatatttactgcttgatcattcattatgccttctagataaccagtccaggtt

SEQ ID NO: 520785 - DNA, 120 bp, Artificial Sequence
  ENSG00000165288_75 (sequence is synthesized)
ttgtcatatacctgtgtccctctattctttttatttccctttttaattttttttcttttttttccctccccagaaatcaggcttgtgttggaattcttctctataatactttgtttcccg

SEQ ID NO: 520786 - DNA, 120 bp, Artificial Sequence
  ENSG00000165288_76 (sequence is synthesized)
cagatgcaaagtaacaaagtaactgagtaaaattagaaatctcattctgcacaactgtgcgctcagatatttaactcagccttctaatacttttaagtacgtttctgttatttatctttt

SEQ ID NO: 520787 - DNA, 120 bp, Artificial Sequence
  ENSG00000165288_77 (sequence is synthesized)
tgttgtttttgttttaatcccatagattgtcatcagacaataatagagtgattgagagagaaagatataaatgccacttctaactttttgataaaacttttttgagcatttttcaaaaat

SEQ ID NO: 520788 - DNA, 120 bp, Artificial Sequence
  ENSG00000165288_78 (sequence is synthesized)
ttgtatgtttgtggtaatggggaattaaacaccttttacagctgatgtatgttggaaatcattttatgtacatttaccaactggtacttatcttcaagttggaattttcacatccataaa

SEQ ID NO: 520789 - DNA, 120 bp, Artificial Sequence
  ENSG00000165288_79 (sequence is synthesized)
agggagacttgcatcatatataattttcagtatactttgctgtccagccttttaaacaattacagtaacattttgagttctgtgatgaatagttctaggggaagggatggaactttcgac

SEQ ID NO: 520790 - DNA, 120 bp, Artificial Sequence
  ENSG00000165288_80 (sequence is synthesized)
atgtaaagtccattgttttaaatgctaaccccatccccaatatttttgtggaacgtgaggctttatgaaaggtttatcagaaatagaatattctaaagtcacttttatggcttatttcaa

SEQ ID NO: 520791 - DNA, 120 bp, Artificial Sequence
  ENSG00000165288_81 (sequence is synthesized)
aaactagtgtgaaagtattttcatgcttttttgtttctcatcttttagcaaagcttctttaccaagttttgattaaattgcaatataaaattaagttttttcacggtgctatattttgtg

SEQ ID NO: 520792 - DNA, 120 bp, Artificial Sequence
  ENSG00000165288_82 (sequence is synthesized)
gaatatgggtagcactcaggtttctttcttttttcttttctccttccttcttccttcattccttcattcctccctcccccctccctccctccctctcttccttccctccttccttccttc

SEQ ID NO: 520793 - DNA, 120 bp, Artificial Sequence
  ENSG00000165288_83 (sequence is synthesized)
aggcatgagccaccgtgcccggcctatatacccttattcttgattatttcttttttcatcttttcaatcctgcttacttttatcctcacttttctttctgccatgaaaactgcacctaat

SEQ ID NO: 520794 - DNA, 120 bp, Artificial Sequence
  ENSG00000165288_84 (sequence is synthesized)
cttttctttctgccatgaaaactgcacctaatttaccacacttaagattggcaatttttgattcattgatgggagaagtacagtagaaaggccctgcagtttagaattaagttgtgtttg

SEQ ID NO: 520795 - DNA, 120 bp, Artificial Sequence
  ENSG00000165288_85 (sequence is synthesized)
tttatttacatgtatgcccatttcttctaaattaaatctagaatgtgagactttgacatataaaagcatgataagtattttcttaaaaaataagactattgatacataatgaaaccacca

SEQ ID NO: 520796 - DNA, 120 bp, Artificial Sequence
  ENSG00000165288_86 (sequence is synthesized)
ttggtaattgaattttaaaatgatatgcaaaaatatttagaaatccagttgggaaatgtgtttttgcatatgtcaccagatacacattaggcagtactacaaatgttaattcttaaacaa

SEQ ID NO: 520797 - DNA, 120 bp, Artificial Sequence
  ENSG00000165288_87 (sequence is synthesized)
tactgtggtgatggcaatcagtaatttatttctttgtcctgtaacttatcattcttgtcttttgtaatgtcttacacagtattaacataactgtaccttttttttgttcttggtatccat

SEQ ID NO: 520798 - DNA, 120 bp, Artificial Sequence
  ENSG00000165288_88 (sequence is synthesized)
acattttaagatggaaaatcagttcatagttgatatgatattgtatatgggcaaaatgtccgttaaactaaaattcagtaaaaaaggtaatataaactggcttgatttataaaagatgtt

SEQ ID NO: 520799 - DNA, 120 bp, Artificial Sequence
  ENSG00000165288_89 (sequence is synthesized)
ttgtttggcagttatcagtcattataagcaattatcttcaaagacaaaaaaactggactaatttgttgccattctttatgggatgtttacaataaaattccaagttgtttggaatcaatt

SEQ ID NO: 520800 - DNA, 120 bp, Artificial Sequence
  ENSG00000165288_90 (sequence is synthesized)
gcactcttgctgctttatgccttaatttatgtaccagagaaaaattaaccagaagaaagaaatatggagttacctattcagctttagagattgtaacatgtaactcttaggtctttcttg

SEQ ID NO: 520801 - DNA, 120 bp, Artificial Sequence
  ENSG00000165288_91 (sequence is synthesized)
tttctttgtcatagaatattttattactattactttttaatctgagaaactaggatgcttcttcctatcaaagaaaaggttttgttttttgttttcatcttagacattgcaaatattctt

SEQ ID NO: 520802 - DNA, 120 bp, Artificial Sequence
  ENSG00000165288_92 (sequence is synthesized)
tgggtcacttttaggataataaatatgatgtttacactttaaatgtgggctgcttggtgcattcaataacagcctgcaaagcatttgtcaacattttgttttgcagagcttttcaaaatg

SEQ ID NO: 520803 - DNA, 120 bp, Artificial Sequence
  ENSG00000165288_93 (sequence is synthesized)
aatagatctctaacatatttatgacttacaacttttaacagctgagttatatgtacctgacattttaaaatgtatagtaagattacctacattgtaaatggtgctttaattcagtgtaag

SEQ ID NO: 520804 - DNA, 120 bp, Artificial Sequence
  ENSG00000165288_94 (sequence is synthesized)
tgtaggagagagagaagtgaggtgagatgatctgaatgctctaacaggaacattcataactatatagttacccagaatttgtctcccagtggcaaacattccactaggttcaagataaat

SEQ ID NO: 520805 - DNA, 120 bp, Artificial Sequence
  ENSG00000165288_95 (sequence is synthesized)
aagctggccaaagactggactgtatctttgatatatatatactgtgtattttgtgtatttagaataaaaaaaatgcatttaggaaaaaagtagactgattttttacaatattcagagatt

SEQ ID NO: 520806 - DNA, 120 bp, Artificial Sequence
  ENSG00000165288_96 (sequence is synthesized)
gaagtggagataagttgtttggtatttttgtttagttgcttaattggttagagatagccctctttaaggatataaaaatcttacattaaaaatttttggttaaggccaggcacagtgact

SEQ ID NO: 520807 - DNA, 85 bp, Artificial Sequence
  ENSG00000165288_97 (sequence is synthesized)
ttacattaaaaatttttggttaaggccaggcacagtgactcacgtttataatctcagcattttgggaagccatggtgggaggatt

SEQ ID NO: 520808 - DNA, 120 bp, Artificial Sequence
  ENSG00000165288_98 (sequence is synthesized)
atctacaaaacaattttttttttaattagctgggcatggttgtgtgtgcctgtaagtcccaggtacttgggagacaggtgggaggatcactcgagcctgggaggtcaaggctgcagtgag

SEQ ID NO: 520809 - DNA, 120 bp, Artificial Sequence
  ENSG00000165288_99 (sequence is synthesized)
gcctggggatccattttttttccaagttgagaaggtcaagaaaaaggtgctctccatcctctctcaattatatgttcttgacaatttaaagctactttaccaaaatgtgcaaaataaaac

SEQ ID NO: 520810 - DNA, 120 bp, Artificial Sequence
  ENSG00000165288_100 (sequence is synthesized)
caatatattgagcctgtgagttgatcttttgaatgagatttttggtgggatagttaagcctatacgcttacagttgctttctcaggtcatttatataaatacttaagggctttttaatgc

SEQ ID NO: 520811 - DNA, 120 bp, Artificial Sequence
  ENSG00000165288_101 (sequence is synthesized)
tacaaaacacaggtagatcaaacaataatattaaatgaagtaaactttttacggtatcgatttttcccccaaagttctagggaaacattttcctttcctttctatgtaactttaatagat

SEQ ID NO: 520812 - DNA, 120 bp, Artificial Sequence
  ENSG00000165288_102 (sequence is synthesized)
ttttctttgccatctgtgacaattgccttaatgaagttcttatctacagattataaacatctaattataattataaaatcttataattttaattattctagacatctagttttaacagtt

SEQ ID NO: 520813 - DNA, 120 bp, Artificial Sequence
  ENSG00000165288_103 (sequence is synthesized)
attaattaacaaattgatatttaatttgatgttggagacctaaaagtctttctgaatctagtattaattttgaattgccaccttgcctggtcagcatctttgcagttctcttcaatttta

SEQ ID NO: 520814 - DNA, 120 bp, Artificial Sequence
  ENSG00000165288_104 (sequence is synthesized)
taagttttgtaagtaaatatatgaagaaataaaaacattttaaattctttaatttaggtgactaatattaattgatggagcttattcatttttaaggatttttgtggttgatttttgtca

SEQ ID NO: 520815 - DNA, 120 bp, Artificial Sequence
  ENSG00000165288_105 (sequence is synthesized)
tgttgcaattctagttagaatttgtataacaacatgttaatttgtattggcaattttgtatagtctgttaagtaatttaagtcaaggaaactgctaacgtgttccctcctcccttggctt

SEQ ID NO: 520816 - DNA, 120 bp, Artificial Sequence
  ENSG00000165288_106 (sequence is synthesized)
ttaaaaaaaagcttacaatatgtttaaatgaaatttgcataacaaattgtgtaatagatcatttgaaaagtactgttttgttacccttgagtattattcatctaaaatattaataatgaa

SEQ ID NO: 520817 - DNA, 120 bp, Artificial Sequence
  ENSG00000165288_107 (sequence is synthesized)
tgcaaaacattatctctgttctgagtttatagcctagattagaagaaaagaatacaagtagtattaagaactcatgaggtcttacataattaaatatgtgagtgatatatggaccctaac

SEQ ID NO: 520818 - DNA, 120 bp, Artificial Sequence
  ENSG00000165288_108 (sequence is synthesized)
attggagcagcctgggagtacaattatttgttagatgctagtgcttagagtatctttagaaatgtcatttaggtaggcttcattgggtgaaagaatttcattaggattaatttcaaactt

SEQ ID NO: 520819 - DNA, 120 bp, Artificial Sequence
  ENSG00000165288_109 (sequence is synthesized)
ataatccctattcatatttgtaaaccctgacatttgctgtaataataactttcagatactccacagcaactggaaatagatttagaaaagagaaaggacatttacagagaatatgtacaa

SEQ ID NO: 520820 - DNA, 120 bp, Artificial Sequence
  ENSG00000165288_110 (sequence is synthesized)
ttcattttaatcaagtatcttcctaaccaagccttttaccagatcaaccaacaaatagcaaaattaatttggtttctccttttcttctgctttctgctataagaaggcagcagtgataag

SEQ ID NO: 520821 - DNA, 120 bp, Artificial Sequence
  ENSG00000165288_111 (sequence is synthesized)
gaaaattgctgaattagagtcacatacggataaagttgttgctgttcagttctgtaacaatggagacaggtaattatgtaatacatatttgtgtaaacaaatgtttgatatattttacta

SEQ ID NO: 520822 - DNA, 120 bp, Artificial Sequence
  ENSG00000165288_112 (sequence is synthesized)
ctcagatgcagctacttctatgatagataccttatttctgtccagttatttaggttcaaagcccttgtttgtctttgatgacatccttagccatcacttccacaatctcatccaagtagt

SEQ ID NO: 520823 - DNA, 120 bp, Artificial Sequence
  ENSG00000165288_113 (sequence is synthesized)
aaccatagcctatcaggtcgtcctttctgagtgctttcttctttgtttattttgctctatttctgttagcacccacgtcagtcaagtgttccattatttgacctgtccatctctgccagt

SEQ ID NO: 520824 - DNA, 120 bp, Artificial Sequence
  ENSG00000165288_114 (sequence is synthesized)
cccaaagaataacaagagaaaaatgctctcttctggactttgctcctaccctgcagcaagatatttttttaagttcctttttcatatgattatcttttttaataaataactaaaaagatg

SEQ ID NO: 520825 - DNA, 120 bp, Artificial Sequence
  ENSG00000165288_115 (sequence is synthesized)
atttaaaaagttctataaatagagtgagatatcttatttgtatttgttaagaagggagaaaacctgtaaatgccttaagagcacactctttcctattaggatataaatgagttctaccat

SEQ ID NO: 520826 - DNA, 120 bp, Artificial Sequence
  ENSG00000165300_0 (sequence is synthesized)
cccggaacccgcggtcgccaccgcggcggcggccccaggctggaggcgtccgggcgcctctttcctccagcctctgggactgcgctgctcgcagtctcctcgccctgcctgggcttgaga

SEQ ID NO: 520827 - DNA, 120 bp, Artificial Sequence
  ENSG00000165300_1 (sequence is synthesized)
aacctagtgcataccccaaagagggtttttgtgtatgtgtgtgtttttaaagggtggctatgatgactgggccttggagatgtgagactgggaggtaaaatgcacacttgctgcccccca

SEQ ID NO: 520828 - DNA, 120 bp, Artificial Sequence
  ENSG00000165300_2 (sequence is synthesized)
gtaactttggaacaggaccttcacagaaaaatgcatagctggatgctgcagactctagcgtttgctgtaacatctctcgtcctttcgtgtgcagaaaccatcgattattatggggaaatc

SEQ ID NO: 520829 - DNA, 120 bp, Artificial Sequence
  ENSG00000165300_3 (sequence is synthesized)
tgtgacaatgcatgtccttgtgaggaaaaggacggcattttaactgtgagctgtgaaaaccgggggatcatcagtctctctgaaattagccctccccgtttcccaatctaccacctcttg

SEQ ID NO: 520830 - DNA, 120 bp, Artificial Sequence
  ENSG00000165300_4 (sequence is synthesized)
ttgtccggaaaccttttgaaccgtctctatcccaatgagtttgtcaattacactggggcttcaattttgcatctaggtagcaatgttatccaggacattgagaccggggctttccatggg

SEQ ID NO: 520831 - DNA, 120 bp, Artificial Sequence
  ENSG00000165300_5 (sequence is synthesized)
ctacggggtttgaggagattgcatctaaacaataataaactggaacttctgcgagatgataccttccttggcttggagaacctggagtacctacaggtcgattacaactacatcagcgtc

SEQ ID NO: 520832 - DNA, 120 bp, Artificial Sequence
  ENSG00000165300_6 (sequence is synthesized)
attgaacccaatgcttttgggaaactgcatttgttgcaggtgcttatcctcaatgacaatcttttgtccagtttacccaacaatcttttccgttttgtgcccttaacgcacttggacctc

SEQ ID NO: 520833 - DNA, 120 bp, Artificial Sequence
  ENSG00000165300_7 (sequence is synthesized)
cgggggaaccggctgaaacttctgccctacgtggggctcttgcagcacatggataaagttgtggagctacagctggaggaaaacccttggaattgttcttgtgagctgatctctctaaag

SEQ ID NO: 520834 - DNA, 120 bp, Artificial Sequence
  ENSG00000165300_8 (sequence is synthesized)
gattggttggacagcatctcctattcagccctggtgggggatgtagtttgtgagacccccttccgcttacacggaagggacttggacgaggtatccaagcaggaactttgcccaaggaga

SEQ ID NO: 520835 - DNA, 120 bp, Artificial Sequence
  ENSG00000165300_9 (sequence is synthesized)
cttatttctgactacgagatgaggccgcagacgcctttgagcaccacggggtatttacacaccaccccggcgtcagtgaattctgtggccacttcttcctctgctgtttacaaaccccct

SEQ ID NO: 520836 - DNA, 120 bp, Artificial Sequence
  ENSG00000165300_10 (sequence is synthesized)
ttgaagccccctaaggggactcgccaacccaacaagcccagggtgcgccccacctctcggcagccctctaaggacttgggctacagcaactatggccccagcatcgcctatcagaccaaa

SEQ ID NO: 520837 - DNA, 120 bp, Artificial Sequence
  ENSG00000165300_11 (sequence is synthesized)
tccccggtgcctttggagtgtcccaccgcgtgctcttgcaacctgcagatctctgatctgggcctcaacgtaaactgccaggagcgaaagatcgagagcatcgctgaactgcagcccaag

SEQ ID NO: 520838 - DNA, 120 bp, Artificial Sequence
  ENSG00000165300_12 (sequence is synthesized)
ccctacaatcccaagaaaatgtatctgacagagaactacatcgctgtcgtgcgcaggacagacttcctggaggccacggggctggacctcctgcacctggggaataaccgcatctcgatg

SEQ ID NO: 520839 - DNA, 120 bp, Artificial Sequence
  ENSG00000165300_13 (sequence is synthesized)
atccaggaccgcgctttcggggatctcaccaacctgaggcgcctctacctgaatggcaacaggatcgagaggctgagcccggagttattctatggcctgcagagcctgcagtatctcttc

SEQ ID NO: 520840 - DNA, 120 bp, Artificial Sequence
  ENSG00000165300_14 (sequence is synthesized)
ctccagtacaatctcatccgcgagattcagtctggaacttttgacccggtcccaaacctccagctgctattcttgaataacaacctcctgcaggccatgccctcaggcgtcttctctggc

SEQ ID NO: 520841 - DNA, 120 bp, Artificial Sequence
  ENSG00000165300_15 (sequence is synthesized)
ttgaccctcctcaggctaaacctgaggagtaaccacttcacctccttgccagtgagtggagttttggaccagctgaagtcactcatccaaatcgacctgcatgacaatccttgggattgt

SEQ ID NO: 520842 - DNA, 120 bp, Artificial Sequence
  ENSG00000165300_16 (sequence is synthesized)
acctgtgacattgtgggcatgaagctgtgggtggagcagctcaaagtgggcgtcctagtggacgaggtgatctgtaaggcgcccaaaaaattcgctgagaccgacatgcgctccattaag

SEQ ID NO: 520843 - DNA, 120 bp, Artificial Sequence
  ENSG00000165300_17 (sequence is synthesized)
tcggagctgctgtgccctgactattcagatgtagtagtttccacgcccacaccctcctctatccaggtccctgcgaggaccagcgccgtgactcctgcggtccggttgaatagcaccggg

SEQ ID NO: 520844 - DNA, 120 bp, Artificial Sequence
  ENSG00000165300_18 (sequence is synthesized)
gcccccgcgagcttgggcgcaggcggaggggcgtcgtcggtgcccttgtctgtgttaattctcagcctcctgctggttttcatcatgtccgtcttcgtggccgccgggctcttcgtgctg

SEQ ID NO: 520845 - DNA, 120 bp, Artificial Sequence
  ENSG00000165300_19 (sequence is synthesized)
gtcatgaagcgcaggaagaagaaccagagcgaccacaccagcaccaacaactccgacgtgagctcctttaacatgcagtacagcgtgtacggcggcggcggcggcacgggcggccaccca

SEQ ID NO: 520846 - DNA, 120 bp, Artificial Sequence
  ENSG00000165300_20 (sequence is synthesized)
cacgcgcacgtgcatcaccgcgggcccgcgctgcccaaggtgaagacgcccgcgggccacgtgtatgaatacatcccccacccactgggccacatgtgcaaaaaccccatctaccgctcc

SEQ ID NO: 520847 - DNA, 120 bp, Artificial Sequence
  ENSG00000165300_21 (sequence is synthesized)
cgagagggcaactccgtagaggattacaaagacctgcacgagctcaaggtcacctacagcagcaaccaccacctgcagcagcagcagcagccgccgccgccaccgcagcagccacagcag

SEQ ID NO: 520848 - DNA, 120 bp, Artificial Sequence
  ENSG00000165300_22 (sequence is synthesized)
cagcccccgccgcagctgcagctgcagcccggggaggaggagaggcgggaaagccaccacttgcggagccccgcctacagcgtcagcaccatcgagccccgggaggacctgctgtcgccg

SEQ ID NO: 520849 - DNA, 120 bp, Artificial Sequence
  ENSG00000165300_23 (sequence is synthesized)
gtgcaggacgccgaccgcttttacaggggcattttagaaccagacaaacactgctccaccacccccgccggcaatagcctcccggaatatcccaaattcccgtgcagccccgctgcttac

SEQ ID NO: 520850 - DNA, 120 bp, Artificial Sequence
  ENSG00000165300_24 (sequence is synthesized)
actttctcccccaactatgacctgagacgcccccatcagtatttgcacccgggggcaggggacagcaggctacgggaaccggtgctctacagccccccgagtgctgtctttgtagaaccc

SEQ ID NO: 520851 - DNA, 120 bp, Artificial Sequence
  ENSG00000165300_25 (sequence is synthesized)
aaccggaacgaatatctggagttaaaagcaaaactaaacgttgagccggactacctcgaagtgctggaaaaacagaccacgtttagccagttctaaaagcaaagaaactctcttggagct

SEQ ID NO: 520852 - DNA, 120 bp, Artificial Sequence
  ENSG00000165300_26 (sequence is synthesized)
tttgcatttaaaacaaacaagcaagcagacacacacagtgaacacatttgattaattgtgttgtttcaacgtttagggtgaagtgccttggcacgggatttctcagcttcggtggaagat

SEQ ID NO: 520853 - DNA, 120 bp, Artificial Sequence
  ENSG00000165300_27 (sequence is synthesized)
acgaaaagggtgtgcaatttcctttaaaatttacacgtgggaaacatttgtgtaaactgggcacatcactttctcttcttgcgtgtggggcaggtgtggagaagggctttaaggaggcca

SEQ ID NO: 520854 - DNA, 120 bp, Artificial Sequence
  ENSG00000165300_28 (sequence is synthesized)
atttgctgcgcgggtgacctgtgaaaggtcacagtcatttttgtagtggttggaagtgctaagaatggtggatgatggcagagcatagattctactcttcctcttttgcttcctccccct

SEQ ID NO: 520855 - DNA, 120 bp, Artificial Sequence
  ENSG00000165300_29 (sequence is synthesized)
cccccgcccctgccccacctctctttctccccttttaagccatgggtgggtctaactggcttttgtggagaaattagcacaccccaactttaataggaaatttgttctctttttccgccc

SEQ ID NO: 520856 - DNA, 120 bp, Artificial Sequence
  ENSG00000165300_30 (sequence is synthesized)
ctctccttctctcctcccctcccctcccttctcattccttttctttgtttttaaaggatgtgtttgtatgcattctggacatttgaattaaaaaaaaagtattgtgatcctgtaaaggat

SEQ ID NO: 520857 - DNA, 120 bp, Artificial Sequence
  ENSG00000165300_31 (sequence is synthesized)
caccatagatgtggacaaatcattaaaattacagagctatatgatccataattgattagtcaaaataacttattgatgaaatatacaaatattttattgtagcacctatttttatatgca

SEQ ID NO: 520858 - DNA, 120 bp, Artificial Sequence
  ENSG00000165300_32 (sequence is synthesized)
catttagcattcctctttccttcactatttagcctatgattttgcagaggtgtcacactgtattaggatctgcatttctaaaactgacgtggtatcaggaaggcattttcaatcattcaa

SEQ ID NO: 520859 - DNA, 120 bp, Artificial Sequence
  ENSG00000165300_33 (sequence is synthesized)
aatgtggagaatttaatggctaaatctttaaaagccaatgcaacccacccaattgaatctgcattttcttttaagaaaacagagctgattgtatcccaatgtattttaaaaaatagggca

SEQ ID NO: 520860 - DNA, 120 bp, Artificial Sequence
  ENSG00000165300_34 (sequence is synthesized)
attgattgggccattccgagagaattgtttgcaagttttgggttttattagaaaatatttgaaagtatttttattaatgaaccaaaatgacatgttcatttgactactattgtagccgat

SEQ ID NO: 520861 - DNA, 120 bp, Artificial Sequence
  ENSG00000165300_35 (sequence is synthesized)
tttcgattgtttaaccaaacccagttgcatttgtacagatccacgtgtactggcacctcagaagaccaaatcatggactgtacaagtctctatacaatgtctttatccctgtgggcagca

SEQ ID NO: 520862 - DNA, 120 bp, Artificial Sequence
  ENSG00000165300_36 (sequence is synthesized)
agcaatgatgataatgacaaacaggatatctgtaagatggggctactgttgttacagtctcatatgtatcccagcacatgtaattttttaaatagtttctgaataaacacttgataacta

SEQ ID NO: 520863 - DNA, 120 bp, Artificial Sequence
  ENSG00000165300_37 (sequence is synthesized)
tgtcaaatatgagggatggaagtaatgattacttaaggtgcaaaagacttaactatgtgtgattgatagaatctccatcattaacaatttaggaaatagttcctaaactttattcctaat

SEQ ID NO: 520864 - DNA, 80 bp, Artificial Sequence
  ENSG00000165300_38 (sequence is synthesized)
ttaacaatttaggaaatagttcctaaactttattcctaatacaaaatgtgtttcccctaattagcaaaattgtaaagtat

SEQ ID NO: 520865 - DNA, 120 bp, Artificial Sequence
  ENSG00000165300_39 (sequence is synthesized)
ataagtaatttattcctttgttggttcagggaagtatgattttctaaatgtgtcgcttaatgtgtttattaatgcagtttcaattatatacactctttccttactgaagtattcatctac

SEQ ID NO: 520866 - DNA, 120 bp, Artificial Sequence
  ENSG00000165300_40 (sequence is synthesized)
tacgtggagcatggtaagtaatatatcgcatattcacttttctcttaatacaatgtaattgtcatatcagtattatttattcagtctacagttttccatagttttcatatttttaatttg

SEQ ID NO: 520867 - DNA, 120 bp, Artificial Sequence
  ENSG00000165300_41 (sequence is synthesized)
tgtaaaactaccttcaacagttatgatggattccttatctaaagttgatcagtattctaaatgctcaaaatggtgtatatgagctcgtcatctttgaataaggttttctagtgagtttag

SEQ ID NO: 520868 - DNA, 120 bp, Artificial Sequence
  ENSG00000165300_42 (sequence is synthesized)
acacaatttaaggataagaaatgtttcaattatgtgcttcattgctataggtggatctccccatagtttcacctggaatttgtacaatatcaagggctgttcatgaactttgtgtttaaa

SEQ ID NO: 520869 - DNA, 120 bp, Artificial Sequence
  ENSG00000165300_43 (sequence is synthesized)
gaacaatttccatggcattctgccacaaagaggcagcattcacccatgagaaaattgacagtaactacttgaattcaggttgaacaggtggtaccagtttcccggaggattaaaaaaaaa

SEQ ID NO: 520870 - DNA, 120 bp, Artificial Sequence
  ENSG00000165300_44 (sequence is synthesized)
acaaattgtaatgctacattgaccaagtacagtaagctgttcatattctttgcaacattttcctttctaatttttttttcaaaggggaaaggaataagcttaataatgtcatggtattat

SEQ ID NO: 520871 - DNA, 120 bp, Artificial Sequence
  ENSG00000165300_45 (sequence is synthesized)
catgaagaaaagtgcattgcttgctcttcatctacctcctctatattagatccaagattagaaaagaaaaaaaaaatactagcatttgacttcaaaattgagattggtattattcttcac

SEQ ID NO: 520872 - DNA, 120 bp, Artificial Sequence
  ENSG00000165300_46 (sequence is synthesized)
agcagcaggaagttatttttttaatgtcagtatcacttcctcaaccttattatatatagatatgacagttttataaattataaaatataaatgtaaagtggaatcctccatgtaacttag

SEQ ID NO: 520873 - DNA, 120 bp, Artificial Sequence
  ENSG00000165300_47 (sequence is synthesized)
ttttatttcttaattggtgcataaaataaaaagataagaattacataaaattaatgacttagttctgggcaatataagtaactttcaaagaaagtttagtgatgtatttttcaaagattt

SEQ ID NO: 520874 - DNA, 120 bp, Artificial Sequence
  ENSG00000165300_48 (sequence is synthesized)
acaaaattttattgtaaaaccagcattattttacatcattttgtcacatatactccctttaggtggttcatttctatcttactcttcctaagatgtccaatattttattttaatcttcaa

SEQ ID NO: 520875 - DNA, 120 bp, Artificial Sequence
  ENSG00000165300_49 (sequence is synthesized)
aataacatttatagattgatttttagaagttccccttaatttttatattatattttcccactgtgttaagaaaataaaagtaaattcatcctgactttcataaatgtgaaaaatttttta

SEQ ID NO: 520876 - DNA, 120 bp, Artificial Sequence
  ENSG00000165300_50 (sequence is synthesized)
tcatctcagaatcatgaaactgcacagaattaaaaaatgaatcatttttctcctaccaacgtcttcctgctaatacattaactcataaattagaatataggttgtatagtgttgaatatt

SEQ ID NO: 520877 - DNA, 120 bp, Artificial Sequence
  ENSG00000165300_51 (sequence is synthesized)
tgatttttgttgatttaagttgctcactgagtagataattggaatgggcatatcagtagtatatgactggagtaagaaaattctcttcacagaattttgaggaagaaaatatgtaatgtt

SEQ ID NO: 520878 - DNA, 120 bp, Artificial Sequence
  ENSG00000165300_52 (sequence is synthesized)
tcaggcaccaattaaatttggatgcacactaagcttactctttgtgcttgttcgatttaatatgttgcataaatctcatatatttagaggtagatattacaaaatattatttctatgtct

SEQ ID NO: 520879 - DNA, 120 bp, Artificial Sequence
  ENSG00000165300_53 (sequence is synthesized)
cttaaattatataagaaaaaataaacatattccaagaaaatgtagataatttgaatgctaatataaaaaatcatttacagctaaactattgattgaagttgtaagttaaaccaccttagc

SEQ ID NO: 520880 - DNA, 120 bp, Artificial Sequence
  ENSG00000165300_54 (sequence is synthesized)
gtaagttaaaccaccttagcatagatagccgacttggaacatgtcttctgtttagtgaagattatcacctttacacatgaaaagtggaaatttttgacaaatttcctgggaactcaagtc

SEQ ID NO: 520881 - DNA, 120 bp, Artificial Sequence
  ENSG00000165300_55 (sequence is synthesized)
tgttcctcaccactgtttcctcaatactagtaagaaaatcaaactagtttgtaatgagaacatccacacgtactgtgaaaaaagttaccatttaagaatttaatccaagatcgcagtttc

SEQ ID NO: 520882 - DNA, 120 bp, Artificial Sequence
  ENSG00000165300_56 (sequence is synthesized)
tggccttaggtattagttatatttgtgttactaccttgttttgttggcaaaatattcaaattaatattcattattttctttttctattctattatttcttgtttccttacatctgctcct

SEQ ID NO: 520883 - DNA, 120 bp, Artificial Sequence
  ENSG00000165300_57 (sequence is synthesized)
tccctcctttctcttttttatcttttttcttcattatttttcaataaggcaagggaaagagtgaacatagtttagtcctagtttgaaatgccaaaatctggctatttaatttgaagagtt

SEQ ID NO: 520884 - DNA, 120 bp, Artificial Sequence
  ENSG00000165300_58 (sequence is synthesized)
ccatcgatggttcccaaagtcacatgactccagattaatgataacatagcaaatcacaaatattctgtcaattcatttggaaatgtgctcttcttgcacttttcagatggctccaattta

SEQ ID NO: 520885 - DNA, 120 bp, Artificial Sequence
  ENSG00000165300_59 (sequence is synthesized)
agatatttgcaggcatggcaagatacctggaatgactacttttaagaataaattttacactaagaaaaaggaactaggaacatcaaagcaacagatttaaatactagaaccaggcacagt

SEQ ID NO: 520886 - DNA, 120 bp, Artificial Sequence
  ENSG00000165300_60 (sequence is synthesized)
taattaattaattttcaaagagaataaaatgttgcaaaagtataaactgtaccatattaacagttttatttatgcataagtttctacaaaccctttgagattctccactattgcaaataa

SEQ ID NO: 520887 - DNA, 120 bp, Artificial Sequence
  ENSG00000165300_61 (sequence is synthesized)
atatgtgagaataaaattaaagtagttggatagacattagtcatgtgcctaaaaataattgtctaacatctatatcctcataaactttatatccattgatattgcagctgtacattataa

SEQ ID NO: 520888 - DNA, 120 bp, Artificial Sequence
  ENSG00000165300_62 (sequence is synthesized)
ttattaatttcaattcaatgtaatgcctttctatgactaaccatatatatttccatgaatatatgtagcatgtatatgacatacaaaaatagatggattatcaaggagttattacacaca

SEQ ID NO: 520889 - DNA, 120 bp, Artificial Sequence
  ENSG00000165300_63 (sequence is synthesized)
catttttcccaagtttttttacattttaatattttcaaggatttcaaattatactcttattttaatgttttaggaatgttagattggggacagaaaatttgatgcagtaaaatttttgaa

SEQ ID NO: 520890 - DNA, 120 bp, Artificial Sequence
  ENSG00000165300_64 (sequence is synthesized)
tgtgacaataatacagtacttttcttttcttcctccggttttagcagaccatggcttactagcacaggtcaaatacttctggtgttaattgtactagcattataaaaactgtactagtat

SEQ ID NO: 520891 - DNA, 120 bp, Artificial Sequence
  ENSG00000165300_65 (sequence is synthesized)
ctgtactagtattaaaagaacaacatttaactccaagtttgagagatttagactatttcctaaaataatttctgaagattaaaatagaaatattttatagaaagttgatgtaatgcaaat

SEQ ID NO: 520892 - DNA, 120 bp, Artificial Sequence
  ENSG00000165300_66 (sequence is synthesized)
gattttttagagatctaaacaaaatgttatgatatattgcacaatgctaagtatgtcagatccatttttattagatgttagtagagtcattttatacaagaaagtaatagtcaagtaata

SEQ ID NO: 520893 - DNA, 90 bp, Artificial Sequence
  ENSG00000165300_67 (sequence is synthesized)
gtagagtcattttatacaagaaagtaatagtcaagtaatagtcatagagatatgttgaatggaaatcttccactgaggattagtaatcat

SEQ ID NO: 520894 - DNA, 120 bp, Artificial Sequence
  ENSG00000165300_68 (sequence is synthesized)
tatactttaaaatttcatgtttctaaaagtagaagttatgaaccattgttttgaaggatatttttcatttttgttgtttttaattttagtttaacatatgcacagatgacattgtggctt

SEQ ID NO: 520895 - DNA, 120 bp, Artificial Sequence
  ENSG00000165300_69 (sequence is synthesized)
tattttgaagactcatttatacctggtccacattgacaaacttatttgcgatttgtatatttaaataattttttcaagatattaacatacaagttcaattctttcttgattgtaatactt

SEQ ID NO: 520896 - DNA, 120 bp, Artificial Sequence
  ENSG00000165300_70 (sequence is synthesized)
caatatttaatcatatttatattcatatatatttatgcgagcagcaaaattctgtggtttttggtgttctggagtgtacatattttagatttttactgacaaattaatttctactactag

SEQ ID NO: 520897 - DNA, 120 bp, Artificial Sequence
  ENSG00000165300_71 (sequence is synthesized)
tgatcatttctagcattctcaactaacacacttttcaaaaatcttattgtatacttcattaaaaacaatacataataatggatattgaaaccaaaatttctgcatattttcaatttagta

SEQ ID NO: 520898 - DNA, 120 bp, Artificial Sequence
  ENSG00000165300_72 (sequence is synthesized)
cctgcctattgaaacaaaatctgaagggtgtcagtaatcctaggttaactgattagcaaatttcttttaggatactataatactctgactagcatgtttcatgcatgaaaagttcatcgg

SEQ ID NO: 520899 - DNA, 120 bp, Artificial Sequence
  ENSG00000165300_73 (sequence is synthesized)
atgcatgaaaagttcatcggtgatatgcagactacagttttaaatattaaatttaaaaattgatatataaaaatgaaaacttgaccaataaatatatctcacctgtaataatatatttac

SEQ ID NO: 520900 - DNA, 120 bp, Artificial Sequence
  ENSG00000165300_74 (sequence is synthesized)
atatgccttttaactttataaacatagaatattttttgctatattaacatccaaagtcaaaagggtgtatcactctgaaaattctaataatagtgaaagacttatagctatcaaatttat

SEQ ID NO: 520901 - DNA, 120 bp, Artificial Sequence
  ENSG00000165300_75 (sequence is synthesized)
ttaaatcctctgttttaatatctactttaaattttcacttcaaaatataaagttaatggtatatatttttttttatatagctgaaatctgcccttgctaaagtttcataagatatacaat

SEQ ID NO: 520902 - DNA, 120 bp, Artificial Sequence
  ENSG00000165300_76 (sequence is synthesized)
acacataatagggttccttcacagttttatttttgtttagcatttaggtaccatatattaaaatatgaagctataaatttccactagttaagttataattatgttttttcaaacaatata

SEQ ID NO: 520903 - DNA, 120 bp, Artificial Sequence
  ENSG00000165300_77 (sequence is synthesized)
cctcaattatataatcatcccaattttttaaagctagtgaccatgagcatatatatgggtgcatccaaatgagaatattgagatccagaaattactaattttagagaatattcaaaatca

SEQ ID NO: 520904 - DNA, 120 bp, Artificial Sequence
  ENSG00000165300_78 (sequence is synthesized)
ttcaccagactgtcatttaaacccattcaatcagtataatgatatatttgttacccaattatgatgaaagatccctaattcttagatgaaaatgtagtatttcactggaaattcgttttt

SEQ ID NO: 520905 - DNA, 80 bp, Artificial Sequence
  ENSG00000165300_79 (sequence is synthesized)
ttcactggaaattcgttttttgaatgttaaaccataattattgagtatccagattataaattttaaatatcctctccaag

SEQ ID NO: 520906 - DNA, 120 bp, Artificial Sequence
  ENSG00000165300_80 (sequence is synthesized)
taagcattttaggaaatcactaatttcatatggctttcactatgtttgacttgtaatttaacaacaaatttcatcttcctttaagaatttttaccccagagaaggtatttgtttgcatag

SEQ ID NO: 520907 - DNA, 120 bp, Artificial Sequence
  ENSG00000165300_81 (sequence is synthesized)
catgtacttgagtcatccgttgtcctattattggttttggcctagtctcttcatttagaagctctgtgcccaaggtcagacacatggaaaatggtctctatcattgcctttaattctcac

SEQ ID NO: 520908 - DNA, 120 bp, Artificial Sequence
  ENSG00000165300_82 (sequence is synthesized)
aactgaatcattctaccactgtcccctacctctctgttattttttgaaagaaaaaaaaaagaaggtgatatatctctttattttgctaacaaaagaattttaagaatatcctaaggcaaa

SEQ ID NO: 520909 - DNA, 120 bp, Artificial Sequence
  ENSG00000165300_83 (sequence is synthesized)
ttcatgacatcccccacattattaaaataaaaatatgactcaatttctaacatggcaatcaagaactatgtaagcaggacttagtgtgaataaggggatggggattttaaattgttacta

SEQ ID NO: 520910 - DNA, 120 bp, Artificial Sequence
  ENSG00000165300_84 (sequence is synthesized)
tgaatttgtgattcattagtaattttaaatacacaacatctaaaacataaaggtggcaatttcttttttagtatattttaaattacacacttttgttgacagggtaggtaatatagttta

SEQ ID NO: 520911 - DNA, 120 bp, Artificial Sequence
  ENSG00000165300_85 (sequence is synthesized)
caaaatgccactattgcctgcttacaaacattaagaaacttggttgccgactgatgactcatgtggtaactcctgaacaatctgttttatttgatcagatcagctttatttcctttaaaa

SEQ ID NO: 520912 - DNA, 120 bp, Artificial Sequence
  ENSG00000165300_86 (sequence is synthesized)
ataagtgtattttaactttcaatcatgattaaataaaatttgttcctctaatattaaaatgtatctatcataatcatggatttttagatattgttcttggggagctcagagtttatcaaa

SEQ ID NO: 520913 - DNA, 120 bp, Artificial Sequence
  ENSG00000165300_87 (sequence is synthesized)
gctttatatgtgatatacgaggtagtaaatactatgtaggtttatattaaggaaataaaacaaatataataaacacgagaatgaataattttacatgaaaagggggagctggtatgctgt

SEQ ID NO: 520914 - DNA, 120 bp, Artificial Sequence
  ENSG00000165300_88 (sequence is synthesized)
atattaatattgtatttgaaatataaatatatgtgttaaagttaaccatttacagtgacttggagtctcccagagatgaaattactcctgtttaggtgattttgtaaaatgcactatctc

SEQ ID NO: 520915 - DNA, 120 bp, Artificial Sequence
  ENSG00000165300_89 (sequence is synthesized)
tcacagcccctggacatcataagggaagtggcagcagtaatttaagaggtatgtgaatacagaagggaaattataattgcagcatacacagaagcttttcctaaactgttcaactgctca

SEQ ID NO: 520916 - DNA, 120 bp, Artificial Sequence
  ENSG00000165300_90 (sequence is synthesized)
tatacttgacaagagtgtaaatggccaattcattggaaatatgtgaaacatcaaatatgagaatcacttttaggatgacaggtataatttggaaaatctgatccgatagaattaagacca

SEQ ID NO: 520917 - DNA, 120 bp, Artificial Sequence
  ENSG00000165300_91 (sequence is synthesized)
aaacttttttaaatgggagaagacagaatggccatttttttttcaatgtctttgaacaaaataatgagtagaagtaatatattcttcaccattgcttactgtgtccatgagaggttgttt

SEQ ID NO: 520918 - DNA, 120 bp, Artificial Sequence
  ENSG00000165300_92 (sequence is synthesized)
gtaaatagatatatacctacaggaagtaaaagataatgtaatgaaattctcaaactctccaaatatgtttgtttccttttaagattgtttttcttgagacaaaaaactgaaatactatct

SEQ ID NO: 520919 - DNA, 120 bp, Artificial Sequence
  ENSG00000165300_93 (sequence is synthesized)
ttcctctatcctttttataacaaaatgttacttagctttatatattgctattatgtatgtttctatataaatatataataagttggattttttttcactgttgatttggtttagtcatca

SEQ ID NO: 520920 - DNA, 120 bp, Artificial Sequence
  ENSG00000165300_94 (sequence is synthesized)
ttgatttggtttagtcatcatcttagctttttgcctcactgaaagtataggttgtgcttcaaatgagaaaataagaggtgcgaagtatttgctgttatttttatcaaatgatagccaatg

SEQ ID NO: 520921 - DNA, 120 bp, Artificial Sequence
  ENSG00000165300_95 (sequence is synthesized)
gctaaacattaaaatggtgattctgttattccgaattaagtttctttgtccaccacagattgatggtgtgtctttggcaactttctttgtgtctctgctttaatttcaattgtaaaaatg

SEQ ID NO: 520922 - DNA, 120 bp, Artificial Sequence
  ENSG00000165300_96 (sequence is synthesized)
aatccaatgaacttggtttatgaacagctgaaagaaatttagattttaagttttctctactaggtgtatgacaactgtgactctaaaatcagcaacatgataattaactattactgttat

SEQ ID NO: 520923 - DNA, 120 bp, Artificial Sequence
  ENSG00000165300_97 (sequence is synthesized)
ttacattatgcacctatgaaagggatgattatatcttttagagaaaacatctttctcttactgcgtatgtgtctaatatttgtaaaataattagttcaaaacatttaatttctccattaa

SEQ ID NO: 520924 - DNA, 120 bp, Artificial Sequence
  ENSG00000165300_98 (sequence is synthesized)
cttttattttacaaaatgaaataattgtttgtagataattaatggcaactttaaaagtatgacacccttgaaaaagaaagaacttactagtttagttttcttgactttcttacatatttt

SEQ ID NO: 520925 - DNA, 120 bp, Artificial Sequence
  ENSG00000165300_99 (sequence is synthesized)
taccttttgaaataacattgagctttcagtacatttaataagatgtatcatcagtatttatttctcaaaaaattgagtaacctttctaaattagataagttttatttgcttattttattt

SEQ ID NO: 520926 - DNA, 120 bp, Artificial Sequence
  ENSG00000165300_100 (sequence is synthesized)
gcttttaacacattttgaagttatgtgtgaggtaatttccattgttccagttttaattcaaacaatactgaacatacttacaatatctaaagatctttggcctttctttgcagaattaat

SEQ ID NO: 520927 - DNA, 120 bp, Artificial Sequence
  ENSG00000165300_101 (sequence is synthesized)
tggaaaaggtacaataaatatgcaatatgtcactcaccattttaatattctaaatttagcaattgctcttatacctaatgattaataatataagttgttctagtttcctttatctgctgt

SEQ ID NO: 520928 - DNA, 120 bp, Artificial Sequence
  ENSG00000165300_102 (sequence is synthesized)
ggtataaatttggctgttaatccaataataaaactatttatatttttaacattttcaaatatcattactactgctatttactagtctcagtgacaatctgagatcctccttagatgctta

SEQ ID NO: 520929 - DNA, 120 bp, Artificial Sequence
  ENSG00000165300_103 (sequence is synthesized)
gaggaacctttatacagggttataaatagagaattctaatgattaaaatttaaaatggtagcaatgacaagtccactataaacataataaataaatcattaccttctctattaatgaaca

SEQ ID NO: 520930 - DNA, 120 bp, Artificial Sequence
  ENSG00000165300_104 (sequence is synthesized)
gaaacttcagtactttaaagctaatatcttgaaagattttagaagtgcagcaagctggtactcacacctaatgaaaaggtcttagtgaaaatcattttacaatttacaacatttgcattg

SEQ ID NO: 520931 - DNA, 120 bp, Artificial Sequence
  ENSG00000165300_105 (sequence is synthesized)
ttctttacaaatgttgtttccattccatgcaagacaattaaaccagaattattttgaccacaaatttttcttcctaattaattggccaaacacaatgtaaataaaataggaaatgcttca

SEQ ID NO: 520932 - DNA, 120 bp, Artificial Sequence
  ENSG00000165300_106 (sequence is synthesized)
gttaatatttactatataaacaaacaaacagatagtgggataatggttttatctatcaccatattctagaattgtgcctggcattcagtaagcacctaatggattaacaaatatgtactt

SEQ ID NO: 520933 - DNA, 120 bp, Artificial Sequence
  ENSG00000165300_107 (sequence is synthesized)
gtagatgtctgcagaccaaggtgaatttagtgaatatcaaaaacttcttgagtgctccatcgtaacgccatttatcttgacataaactgcaaagatggctcaaatgtcgataaggatatc

SEQ ID NO: 520934 - DNA, 120 bp, Artificial Sequence
  ENSG00000165300_108 (sequence is synthesized)
aggtgagtgtttagtactttggcatgaaagtttttggaaaaccattgggatgctactagtgatatttaaatatatttatgctaaacacagaaaatattttccaaatggctcccttttagt

SEQ ID NO: 520935 - DNA, 120 bp, Artificial Sequence
  ENSG00000165300_109 (sequence is synthesized)
ctatgtttgttttaattaagttcagatagttaagaaaaaaatggaaataggactagagaactttggcataaaactcatttcccagtctttaattgtaattatttattttgctttgatagt

SEQ ID NO: 520936 - DNA, 120 bp, Artificial Sequence
  ENSG00000165300_110 (sequence is synthesized)
ataattggttacatttttcaaaaataataagaaaagtaattgttgctgctctgcacttacattactgttttaaagttcagggtatgccctaatggagatgctggtgaaattttcaggcat

SEQ ID NO: 520937 - DNA, 120 bp, Artificial Sequence
  ENSG00000165300_111 (sequence is synthesized)
tttcaacgaatatgatcccggtttttttaagtctggtgaggtgtttatctatttagaaagcttttctgggcaccatgtattttcccctgggagtagaaaatcagttcatctttttaatga

SEQ ID NO: 520938 - DNA, 120 bp, Artificial Sequence
  ENSG00000165300_112 (sequence is synthesized)
caatattacctcgagggaaaaaagtaatccagaaggaataatacattcctcagggcagttgcctacacagggacacatttttctctggggctgactgcacgtatatttcagtggaagagt

SEQ ID NO: 520939 - DNA, 120 bp, Artificial Sequence
  ENSG00000165300_113 (sequence is synthesized)
atattttaagatatgattgcattttgtcataaggcaccatgactaaaggatacagtattttttgaatatatagtaacatatttttataagcttttatacatcaattataatttaggaaat

SEQ ID NO: 520940 - DNA, 120 bp, Artificial Sequence
  ENSG00000165300_114 (sequence is synthesized)
aaattttatttgctatgaaaattttagctgtattcatatttgaggtaaaataaaataattttaactttcaatttgcatgttttgttaaacataacatcagaagaaaggaggcataagtaa

SEQ ID NO: 520941 - DNA, 120 bp, Artificial Sequence
  ENSG00000165300_115 (sequence is synthesized)
agagatatttgagtttcacttatgaacaccaaacagcacaattttagaagtcttttagctattttgatagcaaaatatatattcttcattctttctatccaaactttaaccttgatgagt

SEQ ID NO: 520942 - DNA, 120 bp, Artificial Sequence
  ENSG00000165300_116 (sequence is synthesized)
acttagatgatgaagtatttacttactgtcatcactttgaatactttggagaatgtataatttgagattgtgaaggagtttgactttgtagccacatcttttaattccttaacattatat

SEQ ID NO: 520943 - DNA, 120 bp, Artificial Sequence
  ENSG00000165300_117 (sequence is synthesized)
ttaagattcatgtacttcaaagttctgttttcacttcttttgcccattaaaaatattggaatactactaaaaaacctttgtactttaaatacctatttttttattttacaaactcttgta

SEQ ID NO: 520944 - DNA, 120 bp, Artificial Sequence
  ENSG00000165300_118 (sequence is synthesized)
ataattttccttccaaaataagaataaattttatattgaatatataatgttaatacattaagatacattgatattgtgtttgcattataaaatgtatgctcgcagaactacacctataga

SEQ ID NO: 520945 - DNA, 120 bp, Artificial Sequence
  ENSG00000165300_119 (sequence is synthesized)
cgcagaactacacctatagaaaatagttttgtttcatgagatattaatattatcaaagcatttcaatagcaatctgatgataaatataaaatatagattacatttaagaatactatactt

SEQ ID NO: 520946 - DNA, 120 bp, Artificial Sequence
  ENSG00000165300_120 (sequence is synthesized)
aatattaagcatcttttcaaagtaactaatataatcagaatgaaaattagatttttttgaatttaggaaagatctttttttcctgttattttctctaatttcttcataccaaatcagttt

SEQ ID NO: 520947 - DNA, 120 bp, Artificial Sequence
  ENSG00000165300_121 (sequence is synthesized)
atttcattgagcatttaaataacatttaaactaaaatcaatcaaaaacacgtcatttaaacaatgaattttctaaattagaactgcaaaaccaattataatgttgggtactaaagatgtt

SEQ ID NO: 520948 - DNA, 120 bp, Artificial Sequence
  ENSG00000165300_122 (sequence is synthesized)
ttataatatgctgattcatagtaaatacttttaaaaagaaaaatacatagctttttttcctaaaatttgaatctctttttaatacatgaaacatgattttatgaatagtgctaacatgag

SEQ ID NO: 520949 - DNA, 120 bp, Artificial Sequence
  ENSG00000165300_123 (sequence is synthesized)
aacatcagtgtgtctgtctttttaagtgggaatgtggatattcttgtgcatgagtacccacatttatagttgaaattacatttttgtttgttaaattgaaaaatagacaacataacatct

SEQ ID NO: 520950 - DNA, 120 bp, Artificial Sequence
  ENSG00000165300_124 (sequence is synthesized)
agacaactgtgtgaaaaagtaagctctacatattgataatatattacatcataatatattatatcctattataaatagttttgtaaagtgacttggaaaaatacagttccatgtgtattt

SEQ ID NO: 520951 - DNA, 120 bp, Artificial Sequence
  ENSG00000165300_125 (sequence is synthesized)
tcagaaatttaaattatttttgttaaaattgaataatgtgtacatctttaacgcaaattttatatggctaaatttctatttggaatgtcttaaagtaaaatcacatcaaaatttagtcat

SEQ ID NO: 520952 - DNA, 120 bp, Artificial Sequence
  ENSG00000165300_126 (sequence is synthesized)
tgtattatgaataatactataggcaatattacttccagtaccagagaaagaagaaaatattagtttaaagaagtagttttttatttataaataattagaaaaaaacacttgtgtgggttt

SEQ ID NO: 520953 - DNA, 120 bp, Artificial Sequence
  ENSG00000165300_127 (sequence is synthesized)
gtttttcacatggtaaccaagagtagtatgaattttcatactcttccatgtgtactctgggccatagctatgaaaaatttgtaaccatcataataggaacagtgatgtttggtttaattt

SEQ ID NO: 520954 - DNA, 120 bp, Artificial Sequence
  ENSG00000165300_128 (sequence is synthesized)
tgctctctattgcatgtactacaaataaagattcttttccatttgaaaatctttctataaaacaagaaatttcccatgcagatgaaatgaggttacagtgaagcaaaggaaactaagatt

SEQ ID NO: 520955 - DNA, 120 bp, Artificial Sequence
  ENSG00000165300_129 (sequence is synthesized)
gatgaaatgaggttacagtgaagcaaaggaaactaagattgtaggtattaccaaactaagacaatttataaaattatctatatatctatatataggtgtgtgtgtgtatatatatatata

SEQ ID NO: 520956 - DNA, 88 bp, Artificial Sequence
  ENSG00000165300_130 (sequence is synthesized)
tttttttatccaggctggagtgcagtggtgcaatttctgctcaccacagcccccacctcctgagttcaagtaattctcctgcctcagc

SEQ ID NO: 520957 - DNA, 120 bp, Artificial Sequence
  ENSG00000165300_131 (sequence is synthesized)
aaagtgctgaaattacaggcatgtgccactgtgtctggccaaaataataaatcttatgttagctttaaggagttctgaacttagtatctgtcatgtagtaaataaataaacatgataatc

SEQ ID NO: 520958 - DNA, 120 bp, Artificial Sequence
  ENSG00000165300_132 (sequence is synthesized)
ttctaggaattttgggtaaataattttaaacaaattcttaatctcactacactataatctgcctcaacgttgttgttagacgtgtataatgaatattagaagtactggacaaaattccat

SEQ ID NO: 520959 - DNA, 120 bp, Artificial Sequence
  ENSG00000165300_133 (sequence is synthesized)
ttgatctcattttcttgaaatgagttaagttattgttgttgccacatttttcatctagaagtcattctgtaataaaactctttgtagttgttatcatctggaactgttacactggaccta

SEQ ID NO: 520960 - DNA, 120 bp, Artificial Sequence
  ENSG00000165300_134 (sequence is synthesized)
tggtgctataaagaaaatctctattaaaaaatgaaagtcatttcttttaccaaatatttattcagtcgtaaaaaatgtatatccttatattttgactgagtatctctattgatttatagc

SEQ ID NO: 520961 - DNA, 120 bp, Artificial Sequence
  ENSG00000165300_135 (sequence is synthesized)
tgaaatgctggaatgagattgtgtattaactaggattagacgcttggagtctcacatttttctcattaaatttttatttattctggatatggaatgttggtacaaacgttcctatatagt

SEQ ID NO: 520962 - DNA, 120 bp, Artificial Sequence
  ENSG00000165300_136 (sequence is synthesized)
gattattcacatgatccatattaacatttttacattattgttggactacatttcatgacatattattacagcgtcaattactataattatatgtgattcaggaatgttaaaatatttatc

SEQ ID NO: 520963 - DNA, 120 bp, Artificial Sequence
  ENSG00000165300_137 (sequence is synthesized)
tctgtatctagattgtcctattcctttcatgcactgtatgtaacatagcatgtttatctggtaactcttgtattgcaacaagccagaaggggttggaaactaaagtaaatagagtaaata

SEQ ID NO: 520964 - DNA, 120 bp, Artificial Sequence
  ENSG00000165300_138 (sequence is synthesized)
ctcactcaaagttattgaaaggctcttggaaactgcgactctaagcaaaaaaaacatataaggaaagcaattttaccataggttaatgatgtaaacaagagttaagttcctagggcatat

SEQ ID NO: 520965 - DNA, 120 bp, Artificial Sequence
  ENSG00000165300_139 (sequence is synthesized)
gggcatatttctggtcacgaaaacatcaccaaatttctaaataaagagcaaaacacttctaatactaaacattgaaatgtatgtgaaatatatatatatacatatatatatgaatgatta

SEQ ID NO: 520966 - DNA, 120 bp, Artificial Sequence
  ENSG00000165300_140 (sequence is synthesized)
aagtaaaattattttttacccaattatttcagttcagggtctccagtggctgcagcctatcccagaagctcagggtgcaaggcaagaagtaatcgtgggaccaggcgccgtggctctcgc

SEQ ID NO: 520967 - DNA, 75 bp, Artificial Sequence
  ENSG00000165300_141 (sequence is synthesized)
ccagcactttgggaggcagaggctggtgaatcacttgaggtcaggggttccagacttattaattggatgtagtgg

SEQ ID NO: 520968 - DNA, 120 bp, Artificial Sequence
  ENSG00000165300_142 (sequence is synthesized)
atcccagctactcgggaggctgaagcttgaacccggaggcagcggttgcagtgagctgagatcgtgatactgcactccagcctgggtgagggagtgagactctaaaaaaaaaaaaaaaaa

SEQ ID NO: 520969 - DNA, 120 bp, Artificial Sequence
  ENSG00000165300_143 (sequence is synthesized)
aaaaaaaaaaaaaaaaaagactaaccatgggcaagacatcgtcccattgcagggtgcactcacacacacccacactcactcacactgggacagtgtagacacaccgatgaacccaacatg

SEQ ID NO: 520970 - DNA, 120 bp, Artificial Sequence
  ENSG00000165300_144 (sequence is synthesized)
acaccgatgaacccaacatgcacatctttgggatactagagtaaactggagtgcttagagaaaacccatgagaacataggaagaacttgcataccccacacagacagtggtccctgcagg

SEQ ID NO: 520971 - DNA, 120 bp, Artificial Sequence
  ENSG00000165300_145 (sequence is synthesized)
gtttttctgtttgttggttgtttttccttcatcaagtttgtaatgaaacgatgttgaatgataaaatattatttgaggaattgttgtacaaggattttggcatttgtctgtatatggaaa

SEQ ID NO: 520972 - DNA, 120 bp, Artificial Sequence
  ENSG00000165300_146 (sequence is synthesized)
tcaaagacattttaaagtgattataaatctttgtacatgttgacaatattcaattcagttaaaggctttatcacggtacattgtgacctctctttaaatggttacattactttgagctct

SEQ ID NO: 520973 - DNA, 120 bp, Artificial Sequence
  ENSG00000165300_147 (sequence is synthesized)
gaaaatttgttatacttacattgttctaattgttcataactaggaattcactgactttgctttaatgtatgctaggaaaactgaagtagataaatcatacttcccctttcagtctccttc

SEQ ID NO: 520974 - DNA, 120 bp, Artificial Sequence
  ENSG00000165300_148 (sequence is synthesized)
tctcttttggatttaattttaactcgaggtttattaattacagaagttacactcatgttgctgcaaatgtattttttctagttgttaatttgttcatgacattctgcttgatgatagtaa

SEQ ID NO: 520975 - DNA, 120 bp, Artificial Sequence
  ENSG00000165300_149 (sequence is synthesized)
tattatgatgaaggtgcctcagatatcaaaaaagatttcaagtctatagaacgtacctctagctacagagtcacaggatatgtgacagcaatgatattaggggatgctgagctggaaacc

SEQ ID NO: 520976 - DNA, 120 bp, Artificial Sequence
  ENSG00000165300_150 (sequence is synthesized)
caattcagcaccagagacagaaatactgtattttgactcattcatcttacatggaagatgaagcctgccaatcaagtagaaaatgtaggcctccaagacaataactcacctgcctttttg

SEQ ID NO: 520977 - DNA, 120 bp, Artificial Sequence
  ENSG00000165300_151 (sequence is synthesized)
tggtttatatttttcatcttggttaaaaagtgtccattgataggggatttaatcaaaacattaaagaagacataatatagccaccaaatctaattatttccaactactagatatcagagc

SEQ ID NO: 520978 - DNA, 120 bp, Artificial Sequence
  ENSG00000165300_152 (sequence is synthesized)
tttaaaaaaattgtttttaactgcatttgcttcatttttcttatgggatattaatagaaaaatggagtgcatttctaacagttgcattttttcatatgtgtggctatgtttatgctgata

SEQ ID NO: 520979 - DNA, 120 bp, Artificial Sequence
  ENSG00000165300_153 (sequence is synthesized)
tgctgatattagttaaaagttctaaaaacaagcaaagaaaatatacacagttttttggcattgattggttgatataataattatgtatatttacttaatatgcataatttaaaaatgtat

SEQ ID NO: 520980 - DNA, 120 bp, Artificial Sequence
  ENSG00000165300_154 (sequence is synthesized)
gtatatatatttatacgtatataattacgtatatttacttaatatacataattattactatgagcttgggcaaaaaatgtattttggcattccactgttcagttttaagtcatttattgg

SEQ ID NO: 520981 - DNA, 120 bp, Artificial Sequence
  ENSG00000165300_155 (sequence is synthesized)
ttggtacataattcttttatttctacttcaataaatataattaagttttgtgaaagccgtgttctaatgaacaagtaattctttcttttaaaatattccttttaattctaatttaaagtt

SEQ ID NO: 520982 - DNA, 120 bp, Artificial Sequence
  ENSG00000165300_156 (sequence is synthesized)
atatagctcttcaataataatattataatgtgtttctcttctaaaataaacagattttatactcattattttaaaatgtgatcaaaaccacataattgtttttagtcttctgattgggat

SEQ ID NO: 520983 - DNA, 120 bp, Artificial Sequence
  ENSG00000165300_157 (sequence is synthesized)
attgggatttttaaaaagaaaattcaaagtttggcattaaatatattttctgtaagataatataactacatatgataaaatgattaagtactctgatagtgtcactatttcaataccatt

SEQ ID NO: 520984 - DNA, 120 bp, Artificial Sequence
  ENSG00000165300_158 (sequence is synthesized)
attatctttaacatatgttaaaacactccagtacataactaataaagaggaattcacatggccagcaattttaaactggtgcagcaaacttatcttttgtgtttgcaaacataagagaac

SEQ ID NO: 520985 - DNA, 120 bp, Artificial Sequence
  ENSG00000165300_159 (sequence is synthesized)
tgaagaagcaagatgcaaacaatgtctccgttgttcagcatgtgttttatgatataatacattcgttcatgttgtgttatacaaattttgcagggagggttgctcgttttatcaatttgt

SEQ ID NO: 520986 - DNA, 120 bp, Artificial Sequence
  ENSG00000165300_160 (sequence is synthesized)
gtattttttatttcatattttgtacgcaatcatgagcatttttcttataaattgtacacaacaagaacctgttgaagattagaaggaaggagcagcacatacttttagcaatccttttat

SEQ ID NO: 520987 - DNA, 120 bp, Artificial Sequence
  ENSG00000165300_161 (sequence is synthesized)
cttaccaatcactggaagaaaatgatgccaagaagccatgtgagatatcatctctgtctgtcatgttttcagaacagagtgtggcttactaatgttgccattgcaggctatgctttgtca

SEQ ID NO: 520988 - DNA, 120 bp, Artificial Sequence
  ENSG00000165300_162 (sequence is synthesized)
agtgaatacggttttcatcttaaggggatagtaagcaagatgttagcaatactcactcatcttcagatttcattgtcaaatatactaatatttcaaaaatatggttttcatctagaaaaa

SEQ ID NO: 520989 - DNA, 120 bp, Artificial Sequence
  ENSG00000165300_163 (sequence is synthesized)
catctagaaaaaaatggagattttgagtgtacaaatatagccaatgcaggttaaatttaaacagagatttttttttaatctctcccttttttatactttttttttttttttttgagacag

SEQ ID NO: 520990 - DNA, 120 bp, Artificial Sequence
  ENSG00000165300_164 (sequence is synthesized)
ataagccaccacacctggcccccttttttatactttttacaagtaatctgacactaggtgccacataattaagataaagacaaaagtgcaaaaccatgtaaaatattgacttctaattgt

SEQ ID NO: 520991 - DNA, 120 bp, Artificial Sequence
  ENSG00000165300_165 (sequence is synthesized)
gaattagtttcccttttctacttgttttgccttgttggatatgaaacatttcaagtatgtcattgtaggattatttttgacattttattcttagaatggtgatttagttgcataattctc

SEQ ID NO: 520992 - DNA, 120 bp, Artificial Sequence
  ENSG00000165300_166 (sequence is synthesized)
atttgctataccacttttctaaaaaataaatgtttgaattattgaaatatcccaagatactccttgttatataattgtagatcattactttattttcagacaaattatgctattgtggat

SEQ ID NO: 520993 - DNA, 120 bp, Artificial Sequence
  ENSG00000165300_167 (sequence is synthesized)
aaatattcaatgtataaaatacaggacttcttttttcctgttttacaaaactccagtgccctttcttatctactattttaatattcctttgctatagtatattgcataatgtggagtcaa

SEQ ID NO: 520994 - DNA, 120 bp, Artificial Sequence
  ENSG00000165300_168 (sequence is synthesized)
ctattttttacaatatgtacgtgttgatctgaaagttcctattgagttaaataatgaaaaataatttggtggaccatgaattttaaatttgttaaaaattgttttatttgtgtatgtgta

SEQ ID NO: 520995 - DNA, 120 bp, Artificial Sequence
  ENSG00000165300_169 (sequence is synthesized)
taaaattaaattttgcaaattggtaaatttattcttcatttaaccttgttgctttgagtactcctaaagcttgtaataattctttggggagtaatataaaatatatcattcataagtgaa

SEQ ID NO: 520996 - DNA, 120 bp, Artificial Sequence
  ENSG00000165304_0 (sequence is synthesized)
acaacccggcgatcgaaaagattcttaggaacgccgtaccagccgcgtctctcaggacagcaggcccctgtccttctgtcgggcgccgctcagccgtgccctccgcccctcaggttcttt

SEQ ID NO: 520997 - DNA, 120 bp, Artificial Sequence
  ENSG00000165304_1 (sequence is synthesized)
ttctaattccaaataaacttgcaagaggactatgaaagattatgatgaacttctcaaatattatgaattacatgaaactattgggacaggtggctttgcaaaggtcaaacttgcctgcca

SEQ ID NO: 520998 - DNA, 120 bp, Artificial Sequence
  ENSG00000165304_2 (sequence is synthesized)
tatccttactggagagatggtagctataaaaatcatggataaaaacacactagggagtgatttgccccggatcaaaacggagattgaggccttgaagaacctgagacatcagcatatatg

SEQ ID NO: 520999 - DNA, 120 bp, Artificial Sequence
  ENSG00000165304_3 (sequence is synthesized)
tcaactctaccatgtgctagagacagccaacaaaatattcatggttcttgagtactgccctggaggagagctgtttgactatataatttcccaggatcgcctgtcagaagaggagacccg

SEQ ID NO: 521000 - DNA, 120 bp, Artificial Sequence
  ENSG00000165304_4 (sequence is synthesized)
ggttgtcttccgtcagatagtatctgctgttgcttatgtgcacagccagggctatgctcacagggacctcaagccagaaaatttgctgtttgatgaatatcataaattaaagctgattga

SEQ ID NO: 521001 - DNA, 120 bp, Artificial Sequence
  ENSG00000165304_5 (sequence is synthesized)
ctttggtctctgtgcaaaacccaagggtaacaaggattaccatctacagacatgctgtgggagtctggcttatgcagcacctgagttaatacaaggcaaatcatatcttggatcagaggc

SEQ ID NO: 521002 - DNA, 120 bp, Artificial Sequence
  ENSG00000165304_6 (sequence is synthesized)
agatgtttggagcatgggcatactgttatatgttcttatgtgtggatttctaccatttgatgatgataatgtaatggctttatacaagaagattatgagaggaaaatatgatgttcccaa

SEQ ID NO: 521003 - DNA, 120 bp, Artificial Sequence
  ENSG00000165304_7 (sequence is synthesized)
gtggctctctcccagtagcattctgcttcttcaacaaatgctgcaggtggacccaaagaaacggatttctatgaaaaatctattgaaccatccctggatcatgcaagattacaactatcc

SEQ ID NO: 521004 - DNA, 120 bp, Artificial Sequence
  ENSG00000165304_8 (sequence is synthesized)
tgttgagtggcaaagcaagaatccttttattcacctcgatgatgattgcgtaacagaactttctgtacatcacagaaacaacaggcaaacaatggaggatttaatttcactgtggcagta

SEQ ID NO: 521005 - DNA, 120 bp, Artificial Sequence
  ENSG00000165304_9 (sequence is synthesized)
tgatcacctcacggctacctatcttctgcttctagccaagaaggctcggggaaaaccagttcgtttaaggctttcttctttctcctgtggacaagccagtgctaccccattcacagacat

SEQ ID NO: 521006 - DNA, 120 bp, Artificial Sequence
  ENSG00000165304_10 (sequence is synthesized)
gtggcgggattaatagactatgattggtgtgaagatgatttatcaacaggtgctgctactccccgaacatcacagtttaccaagtactggacagaatcaaatggggtggaatctaaatca

SEQ ID NO: 521007 - DNA, 120 bp, Artificial Sequence
  ENSG00000165304_11 (sequence is synthesized)
ttaactccagccttatgcagaacacctgcaaataaattaaagaacaaagaaaatgtatatactcctaagtctgctgtaaagaatgaagagtactttatgtttcctgagccaaagactcca

SEQ ID NO: 521008 - DNA, 120 bp, Artificial Sequence
  ENSG00000165304_12 (sequence is synthesized)
gttaataagaaccagcataagagagaaatactcactacgccaaatcgttacactacaccctcaaaagctagaaaccagtgcctgaaagaaactccaattaaaataccagtaaattcaaca

SEQ ID NO: 521009 - DNA, 120 bp, Artificial Sequence
  ENSG00000165304_13 (sequence is synthesized)
ggaacagacaagttaatgacaggtgtcattagccctgagaggcggtgccgctcagtggaattggatctcaaccaagcacatatggaggagactccaaaaagaaagggagccaaagtgttt

SEQ ID NO: 521010 - DNA, 120 bp, Artificial Sequence
  ENSG00000165304_14 (sequence is synthesized)
gggagccttgaaagggggttggataaggttatcactgtgctcaccaggagcaaaaggaagggttctgccagagacgggcccagaagactaaagcttcactataacgtgactacaactaga

SEQ ID NO: 521011 - DNA, 120 bp, Artificial Sequence
  ENSG00000165304_15 (sequence is synthesized)
ttagtgaatccagatcaactgttgaatgaaataatgtctattcttccaaagaagcatgttgactttgtacaaaagggttatacactgaagtgtcaaacacagtcagattttgggaaagtg

SEQ ID NO: 521012 - DNA, 120 bp, Artificial Sequence
  ENSG00000165304_16 (sequence is synthesized)
acaatgcaatttgaattagaagtgtgccagcttcaaaaacccgatgtggtgggtatcaggaggcagcggcttaagggcgatgcctgggtttacaaaagattagtggaagacatcctatct

SEQ ID NO: 521013 - DNA, 120 bp, Artificial Sequence
  ENSG00000165304_17 (sequence is synthesized)
agctgcaaggtataattgatggattcttccatcctgccggatgagtgtgggtgtgatacagcctacataaagactgttatgatcgctttgattttaaagttcattggaactaccaacttg

SEQ ID NO: 521014 - DNA, 120 bp, Artificial Sequence
  ENSG00000165304_18 (sequence is synthesized)
tttctaaagagctatcttaagaccaatatctctttgtttttaaacaaaagatattattttgtgtatgaatctaaatcaagcccatctgtcattatgttactgtcttttttaatcatgtgg

SEQ ID NO: 521015 - DNA, 120 bp, Artificial Sequence
  ENSG00000165304_19 (sequence is synthesized)
ttttgtatattaataattgttgactttcttagattcacttccatatgtgaatgtaagctcttaactatgtctctttgtaatgtgtaatttctttctgaaataaaaccatttgtgaatata

SEQ ID NO: 521016 - DNA, 120 bp, Artificial Sequence
  ENSG00000165304_20 (sequence is synthesized)
aacgccgtaccagccgcgtctctcaggacagcaggcccctgtccttctgtcgggcgccgctcagccgtgccctccgcccctcaggtcagttctcccgcctgcccgccgcagtcgcagttg

SEQ ID NO: 521017 - DNA, 120 bp, Artificial Sequence
  ENSG00000165304_21 (sequence is synthesized)
atggctggggtctgggctgtgcggggcgcagcggcccaaacccagtttgctcctggctctcgggagactggaggatttcatcggagccccgcgctttaccagccctgttccctggataag

SEQ ID NO: 521018 - DNA, 73 bp, Artificial Sequence
  ENSG00000165304_22 (sequence is synthesized)
tttgacctcccaaagtgctgggacttcaggtgtgagccaccacgcccagccaagaaattgattttttttagtt

SEQ ID NO: 521019 - DNA, 120 bp, Artificial Sequence
  ENSG00000165304_23 (sequence is synthesized)
gatcgaaaagattcttaggaacgccgtaccagccgcgtctctcaggacagcaggcccctgtccttctgtcgggcgccgctcagccgtgccctccgcccctcagagtgatttgccccggat

SEQ ID NO: 521020 - DNA, 120 bp, Artificial Sequence
  ENSG00000165309_0 (sequence is synthesized)
caacaagggactgggggttcgtctgctgggtttgcggagcagctagctactcggcgggatctcccggcaggatgggtaaaaagataaagaaggaagtagagcctcctcctaaggatgtgt

SEQ ID NO: 521021 - DNA, 120 bp, Artificial Sequence
  ENSG00000165309_1 (sequence is synthesized)
ttgacccattaatgattgaaagcaaaaaagcagcaactgtggtgttaatgcttaattctccagaagaggaaattttggctaaagcatgtgaagccatttataaatttgctttaaaaggtg

SEQ ID NO: 521022 - DNA, 120 bp, Artificial Sequence
  ENSG00000165309_2 (sequence is synthesized)
aggaaaataaaacaaccctccttgaacttggagctgtggaacctttaactaagctactcacccatgaagacaaaattgtaagaagaaatgctactatgatatttggaatcctggcttcta

SEQ ID NO: 521023 - DNA, 120 bp, Artificial Sequence
  ENSG00000165309_3 (sequence is synthesized)
ataatgatgttaaaaaattgttaagggagttagatgtcatgaattctgtcattgcccagctcgctccagaagaagaagtagttatccatgagtttgctagtctttgtctagcaaacatgt

SEQ ID NO: 521024 - DNA, 120 bp, Artificial Sequence
  ENSG00000165309_4 (sequence is synthesized)
ctgcagagtacaccagtaaagtgcaaatatttgaacatgggggattagagccactcatcagactactgagtagccctgacccggatgtaaagaagaactctatggaatgcatttacaact

SEQ ID NO: 521025 - DNA, 120 bp, Artificial Sequence
  ENSG00000165309_5 (sequence is synthesized)
tggtgcaggattttcagtgtcgagctaaacttcaagaactaaatgcaatacctcctatcttagatctcttgaagtcagaatatccagtgattcagttgttggctctcaaaaccttaggtg

SEQ ID NO: 521026 - DNA, 120 bp, Artificial Sequence
  ENSG00000165309_6 (sequence is synthesized)
ttattgcaaatgataaggagtctcgaacaatgctaagagacaatcaaggattggaccatcttattaagatcctagaaactaaggaattgaatgaccttcatatagaagcacttgcagtga

SEQ ID NO: 521027 - DNA, 120 bp, Artificial Sequence
  ENSG00000165309_7 (sequence is synthesized)
tagccaattgccttgaagacatggatactatggtgcagattcagcagacagggggtcttaaaaagctcctgtcatttgcagaaaactctacaattcctgatattcagaagaatgcagcaa

SEQ ID NO: 521028 - DNA, 120 bp, Artificial Sequence
  ENSG00000165309_8 (sequence is synthesized)
aagccattactaaagcagcttatgatcctgaaaatagaaaactttttcatgaacaagaggttgaaaagtgccttgtagcccttttgggttctgaaaatgatggaactaaaattgctgctt

SEQ ID NO: 521029 - DNA, 120 bp, Artificial Sequence
  ENSG00000165309_9 (sequence is synthesized)
cccaagctatttcagcaatgtgtgagaattcaggcagcaaagattttttcaataatcaggggattccacagttaattcagttgctaaaaagtgacaatgaagaggtacgggaagcagcag

SEQ ID NO: 521030 - DNA, 120 bp, Artificial Sequence
  ENSG00000165309_10 (sequence is synthesized)
ctctagccctggcaaacctaaccacttgcaaccctgctaatgcaaacgctgctgctgaagctgatggtattgatccattaataaacctcctgtctagtaaacgagatggagccattgcca

SEQ ID NO: 521031 - DNA, 120 bp, Artificial Sequence
  ENSG00000165309_11 (sequence is synthesized)
aaacatggccatgcaggagcccctgcgcctgaacatacagaatcacgacatcatgcatgccatcatcagcccactgcgttctgcaaacacagtcgtgcagagcaaagctgctctcgctgt

SEQ ID NO: 521032 - DNA, 120 bp, Artificial Sequence
  ENSG00000165309_12 (sequence is synthesized)
caccgcaactgcgtgtgacgttgaagcccggactgagttaagaaattctggtggattggagcccctggtagagctgctacgctccaagaatgatgaagtgaggaagcacgccagttgggc

SEQ ID NO: 521033 - DNA, 120 bp, Artificial Sequence
  ENSG00000165309_13 (sequence is synthesized)
agtgatggtctgtgctggtgacgagctgacggccaatgaattatgcaggctcggggctttagatatccttgaagaagttaacgtatcaggaactcggaaaaataaattcagtgaggcagc

SEQ ID NO: 521034 - DNA, 120 bp, Artificial Sequence
  ENSG00000165309_14 (sequence is synthesized)
ttataataagttgctcaataacaatctttccctgaaatacagccagactggctatttgtcatcaagtaacataattaacgatggattctatgattatggtcggataaatcccggcaccaa

SEQ ID NO: 521035 - DNA, 120 bp, Artificial Sequence
  ENSG00000165309_15 (sequence is synthesized)
actgttgcctttgaaggagctctgcttacaagaaccaagtgacctacgggctgtactcttaatcaacagtaaatcttacgtttctccaccttcatctatggaagataaatcagatgttgg

SEQ ID NO: 521036 - DNA, 120 bp, Artificial Sequence
  ENSG00000165309_16 (sequence is synthesized)
ttatggacgaagtatttcttcttcatcttccttaagaagatcaagtaaagaaaagaacaatgctggatttggatctcccatagaagacaaatcagagccagcttctggacgaaatactgt

SEQ ID NO: 521037 - DNA, 120 bp, Artificial Sequence
  ENSG00000165309_17 (sequence is synthesized)
tctcagcaaaagcgccaccaaagaaaaaggatggaggaaaagcaaaggaaaaaaagaagaggaaaaagtgaaagaggaggaagaggttatggtggtaccaaaatttgttggtgaaggaag

SEQ ID NO: 521038 - DNA, 120 bp, Artificial Sequence
  ENSG00000165309_18 (sequence is synthesized)
ctctgacaaagaatggtgtcctccctctgaccctgatttctctatgtatgtgtatgaggtgaccaaatcaatactgccaataaccaatattaaggaacagattgaggatctggcaaagta

SEQ ID NO: 521039 - DNA, 120 bp, Artificial Sequence
  ENSG00000165309_19 (sequence is synthesized)
tgtagcagaaaaaatgggtggtaagattccaaaagagaaactacctgatttcagctgggaacttcacataagtgaactgaaatttcaacttaaatccaatgttataccgattggacatgt

SEQ ID NO: 521040 - DNA, 120 bp, Artificial Sequence
  ENSG00000165309_20 (sequence is synthesized)
caaaaaaggaatcttctaccatcgagctttgcttttcaaggctctggctgatagaattggcattggttgctccctagttcgcggagagtacggtagagcgtggaatgaagtcatgctgca

SEQ ID NO: 521041 - DNA, 120 bp, Artificial Sequence
  ENSG00000165309_21 (sequence is synthesized)
gaatgactctcggaagggagtgattgggggcctccccgctcctgagatgtacgtgattgacctcatgttccatccaggtggactgatgaagttgagaagtcgagaggctgatctttacag

SEQ ID NO: 521042 - DNA, 120 bp, Artificial Sequence
  ENSG00000165309_22 (sequence is synthesized)
attcatttaagccatcagacgaacacaagagaggctcaaacaagaaattcactgtgtacactctctaagacattctccaaattgattttatctctttaaataaaaactttaaataaaagt

SEQ ID NO: 521043 - DNA, 120 bp, Artificial Sequence
  ENSG00000165309_23 (sequence is synthesized)
tagcaacgaggcacaacaagggactgggggttcgtctgctgggtttgcggagcagctagctactcggcgggatctcccggcaggatgggtaaaaagataaagaaggaagtagagcctcct

SEQ ID NO: 521044 - DNA, 120 bp, Artificial Sequence
  ENSG00000165309_24 (sequence is synthesized)
taggtcattttccgctcactgaccctcacataaagctgattgttgtcgaaattcatccagcccactgtgtcctgaggagcgtctctgtcatttaggaatcacatgtagcactcagctgct

SEQ ID NO: 521045 - DNA, 120 bp, Artificial Sequence
  ENSG00000165309_25 (sequence is synthesized)
gcacccaggacaacactgtggcctcatgactgtcatctttcatgcccagaatgcttcaggcatgctcagttaagcaaactaagtgaatttttagtatttgcaatcaccttgtctcagttt

SEQ ID NO: 521046 - DNA, 120 bp, Artificial Sequence
  ENSG00000165309_26 (sequence is synthesized)
ctcagtttcatttaagattttgatagtttagatagaataaacacagatctgagtgttacaaattcctttctaaaaatttttgtttctatttttaaaaattcatcattaaaaacactttaa

SEQ ID NO: 521047 - DNA, 120 bp, Artificial Sequence
  ENSG00000165309_27 (sequence is synthesized)
attaaaaatatttctaaagtatatttccataaaatggttttggtttcatcttgtctgtgttagcttggaaacataccttcagctaaaaacaattctgatttgctcttccacattttaatg

SEQ ID NO: 521048 - DNA, 120 bp, Artificial Sequence
  ENSG00000165309_28 (sequence is synthesized)
ctgggccattaatatattattttcaatttatagaactaaaaaatttttattttttggaaaactttgaagcataaaggtagagcaaatctttgctgaggaattgtgttttagtattgagca

SEQ ID NO: 521049 - DNA, 120 bp, Artificial Sequence
  ENSG00000165309_29 (sequence is synthesized)
caaaatggggagtaaattcacatttcaaatgataagacaaaaactactaatgtggttaatctcgtgaagtacatattgcctagtcacgcttaaagtccagtgttgacctgtatagtcatt

SEQ ID NO: 521050 - DNA, 120 bp, Artificial Sequence
  ENSG00000165309_30 (sequence is synthesized)
ccagtgttgacctgtatagtcattttcctagaagacgttttaaagtgaatttgattttagaaattaaagctaagattattttgtattaatttgtaatttcaaataatataattctttatt

SEQ ID NO: 521051 - DNA, 120 bp, Artificial Sequence
  ENSG00000165309_31 (sequence is synthesized)
gcactcctaggatttaagaggattgttggcatgaggagaacacagagactttggattcagacacaactgggccttggtcttctgaattgtaaatgaaaatgatgatccctgcctcaaaga

SEQ ID NO: 521052 - DNA, 120 bp, Artificial Sequence
  ENSG00000165309_32 (sequence is synthesized)
gctgctgtaagaggagagatggtgtcaggaaagtgcctgaccatcacctagcacacttaggggctcaatgtgcgtcccttctctcttcccttcttagcctttggtccattgaggggtaga

SEQ ID NO: 521053 - DNA, 120 bp, Artificial Sequence
  ENSG00000165309_33 (sequence is synthesized)
ttagccatagccctgttgtcctgttgcctgtcttttggtcaacccttcttgtcttatgactattaaaactttggactcctggaaatagaataaaatattttaactgcattcgtctgaaaa

SEQ ID NO: 521054 - DNA, 120 bp, Artificial Sequence
  ENSG00000165309_34 (sequence is synthesized)
ctaattttatatatgtatattgtacatgtgtgtgtttgtgtgtgtgaaatgagacaccgcaaacagctgagaatatattctatctgtattcattttcgaaaatatgacccctgcagatac

SEQ ID NO: 521055 - DNA, 120 bp, Artificial Sequence
  ENSG00000165309_35 (sequence is synthesized)
actgaaccctggtggtctaagcacattggatgacactaattgcacaaggacaccactaagggcccaccttactccaggatgacctcatcttaactaactgcatctgcaatgaccctgttt

SEQ ID NO: 521056 - DNA, 120 bp, Artificial Sequence
  ENSG00000165309_36 (sequence is synthesized)
agacacacccagaaacgttttagtagctatttgtgcatcccttagctcagtcgctttggcacataaaattaatgtgatgacatctatagacaattctaacaaatccacaaaaaagggcta

SEQ ID NO: 521057 - DNA, 120 bp, Artificial Sequence
  ENSG00000165309_37 (sequence is synthesized)
gactgaaccctggtggtctaagcacattggatgtaatatataccctattcaatgtactgagattttggtttaggcttatttgttgctaaaaatctagtgatttttcatttttgagtatgc

SEQ ID NO: 521058 - DNA, 120 bp, Artificial Sequence
  ENSG00000165309_38 (sequence is synthesized)
aggacagaattcattgtccacaatagcaagatgctacctcactgtgctgttttcctttgtcacggaaagaaactgccaaccttcccctcccctgcagtcctgtcctttgcaccccaaccc

SEQ ID NO: 521059 - DNA, 120 bp, Artificial Sequence
  ENSG00000165309_39 (sequence is synthesized)
ccagaatacacacacatacacacacacacacaccctcacgcccacagcaggtcagcttcctgacactttgaacagccttctctgctgcttagattccttaacaattagcatgcacatttg

SEQ ID NO: 521060 - DNA, 120 bp, Artificial Sequence
  ENSG00000165309_40 (sequence is synthesized)
atgagctttagatcacctgaaattggaaagacacaaattttaaatggccattaatagagtagggaatgaggagataccaaaacgagagtgaagaagaggattaatgcagaggcaatgtat

SEQ ID NO: 521061 - DNA, 120 bp, Artificial Sequence
  ENSG00000165309_41 (sequence is synthesized)
tcaggcaaagagggacaaataggctcatgtcaaaatgcagcaaaagcaaaattcctggcccagtatgccattgctactcgacaggactggtttcaccctcacccctccctccctaaaaaa

SEQ ID NO: 521062 - DNA, 120 bp, Artificial Sequence
  ENSG00000165309_42 (sequence is synthesized)
tcccttctccggtcactttggctttacctcatttgattaaatattcctgtgtgtttgtgttttaaatcccaagactccttagagcagtatttctctattgtcttaagaagaaatcaaaat

SEQ ID NO: 521063 - DNA, 120 bp, Artificial Sequence
  ENSG00000165309_43 (sequence is synthesized)
gattacctcacaattcttaacagcagtactggctaaaaactgtgtattagtttcctagggctgttgtaacaaagtactacaaactaggtggcttaaaactacagacagtcacagttctgg

SEQ ID NO: 521064 - DNA, 120 bp, Artificial Sequence
  ENSG00000165309_44 (sequence is synthesized)
aggccagaagtccaaaatcaaggtgtcagtaggaccgcgtccccactgagaccagataggacccttcctctcctcttcccagcttcatgtagtggccatccattggtggcatcccttggc

SEQ ID NO: 521065 - DNA, 120 bp, Artificial Sequence
  ENSG00000165309_45 (sequence is synthesized)
ttgtggctgcatcccagcaagctctccctctgttgtctctctctcctaaggacactaattgcacaaggacaccactaagggcccaccttactccaggatgacctcatcttaactaactgc

SEQ ID NO: 521066 - DNA, 120 bp, Artificial Sequence
  ENSG00000165309_46 (sequence is synthesized)
atctgcaatgaccctgttttcagtaaggtcacattatgaggtactggggttaggacttcagcatatattttgggggaacacaattcaacccatgacaaaaagcaatctacaattgtgtct

SEQ ID NO: 521067 - DNA, 120 bp, Artificial Sequence
  ENSG00000165309_47 (sequence is synthesized)
aaaggaagctgaatattagcaatcaattgaaggatggacaggggaaagctaagctataattggagccttttccacctttagtactattttatatttaccatgttttgatcaaaggtgtca

SEQ ID NO: 521068 - DNA, 120 bp, Artificial Sequence
  ENSG00000165309_48 (sequence is synthesized)
tgtcttaaaagagtttgggagcttttcatggcttcttggcttgttttcttaaactcccccaaccacccacttcttcactcacacagaatcatagacatagaggcacaacaattgtctaga

SEQ ID NO: 521069 - DNA, 120 bp, Artificial Sequence
  ENSG00000165309_49 (sequence is synthesized)
ttacaatgaccccttgattgtgtaaatgtcttaaataaaggtcacgtatctgaataaacccgctgtaaatttgcatgcagagggcctgtcaacagtactgcatgctaataggtatttcat

SEQ ID NO: 521070 - DNA, 120 bp, Artificial Sequence
  ENSG00000165309_50 (sequence is synthesized)
aaacaatccatttgaatgagagaataaggaatcaatgccatttcattgcattaattactatttgaagcagtatatccaagtgtgagaagaatttcattatgcatagattttattatactg

SEQ ID NO: 521071 - DNA, 120 bp, Artificial Sequence
  ENSG00000165309_51 (sequence is synthesized)
ctgtttaatcaggatttgctgtataataaacaatagataaaagtcatagatcatgtatattttctgttgtagacaatgtctacatattacagttaaaataaattttgatgttgtcaattg

SEQ ID NO: 521072 - DNA, 120 bp, Artificial Sequence
  ENSG00000165309_52 (sequence is synthesized)
gaagttatgaatgaatcaaaagtttgaagattaaatcatcccttaggtggatggggtgttcataagttaaaggaatcctactgtgaattatttgtaaactgataaattttctaatacaaa

SEQ ID NO: 521073 - DNA, 120 bp, Artificial Sequence
  ENSG00000165309_53 (sequence is synthesized)
cttaaggagtaatttagtcactgggtagaacagtcattctgaaagtttcattgtagttttagaaattgtaaatgtcacagaagctaaaagaactcccaatagtcaaggctggaacaatta

SEQ ID NO: 521074 - DNA, 120 bp, Artificial Sequence
  ENSG00000165309_54 (sequence is synthesized)
gaacaacaaagtaaagcagtattggcttatcatccaagtggaaaataagtatccatgagtccatactgatataaataaaatgggtgaataaatggaagagaagagacaaatctcctatgc

SEQ ID NO: 521075 - DNA, 80 bp, Artificial Sequence
  ENSG00000165312_0 (sequence is synthesized)
atgcagctctacagcagcgtctgcacccactaccccgccggggccccgggtcccacggccgccgcccccgcgccacccgc

SEQ ID NO: 521076 - DNA, 120 bp, Artificial Sequence
  ENSG00000165312_1 (sequence is synthesized)
ccggcgccgcgcccgagcccgagaccggtgagtgccagcccgccgcggccgccgagcaccgggaagccgccgctgtccccgccgccaagatgcccgccttctcctcctgcttcgaggtgg

SEQ ID NO: 521077 - DNA, 120 bp, Artificial Sequence
  ENSG00000165312_2 (sequence is synthesized)
ctcctcctgcttcgaggtggtgtccggggccgccgcgcccgcctccgccgccgccggcccgcccggcgcgtcctgcaagccgccgctgccgccgcactacacgtccaccgcacagatcac

SEQ ID NO: 521078 - DNA, 80 bp, Artificial Sequence
  ENSG00000165312_3 (sequence is synthesized)
cagatcaccgtgcgggccctgggcgccgacaggctcctgctgcacgggcccgatcccgttcccggcgccgcgggctccgc

SEQ ID NO: 521079 - DNA, 120 bp, Artificial Sequence
  ENSG00000165312_4 (sequence is synthesized)
cggggctcctcggcctggctcctggaggagctgctgcggcccgactgccccgagcccgcgggcttggacgcgacacgggaggggcccgatcggaacttccgactgagcgagcaccgccag

SEQ ID NO: 521080 - DNA, 120 bp, Artificial Sequence
  ENSG00000165312_5 (sequence is synthesized)
gaacttccgactgagcgagcaccgccaggccctggccgccgccaagcaccgaggccccgcggcgaccccggggagccccgatcccggccccggtccgtggggcgaagagcacttggcgga

SEQ ID NO: 521081 - DNA, 120 bp, Artificial Sequence
  ENSG00000165312_6 (sequence is synthesized)
ggcgatcgctgcgacgcgcccggtggggacgcggcgcggaggcccgacccagaggccgaggcaccccccgccgggagcatcgaggccgccccgagtagtgcggcggagccggtgatcgtc

SEQ ID NO: 521082 - DNA, 120 bp, Artificial Sequence
  ENSG00000165312_7 (sequence is synthesized)
tccaggtcggatcccagagacgagaagctggccctatacctggccgaggtggagaagcaggacaagtatctgcggcagaggaataagtaccgattccacatcattccagacggcaactgc

SEQ ID NO: 521083 - DNA, 120 bp, Artificial Sequence
  ENSG00000165312_8 (sequence is synthesized)
ctctaccgagctgtcagcaagacggtgtatggggaccagagcctgcaccgggagttgagggagcagacggtgcactacatcgccgaccatctcgaccacttcagccccctgattgagggc

SEQ ID NO: 521084 - DNA, 120 bp, Artificial Sequence
  ENSG00000165312_9 (sequence is synthesized)
gacgtgggggagtttatcatcgctgctgcccaagacggggcatgggccgggtacccggagttgctggccatggggcagatgctgaatgtgaatatccatttaactactggagggaggctg

SEQ ID NO: 521085 - DNA, 120 bp, Artificial Sequence
  ENSG00000165312_10 (sequence is synthesized)
gagagtcccacggtgtctaccatgattcattatttgggcccagaggattccctgaggcctagtatttggctcagttggctcagtaacggacactatgatgctgtatttgatcactcctat

SEQ ID NO: 521086 - DNA, 120 bp, Artificial Sequence
  ENSG00000165312_11 (sequence is synthesized)
cctaacccagagtacgacaactggtgcaaacaaactcaagtgcaaaggaaacgcgacgaagaacttgccaaatctatggccatatccttgtctaaaatgtatattgaacaaaatgcatgc

SEQ ID NO: 521087 - DNA, 120 bp, Artificial Sequence
  ENSG00000165312_12 (sequence is synthesized)
tgtttggagaatcacatgaactttaatcagggtaatagcactttcaaacttgctagtagattttactgtaggtgtaatgccttaatcatctttttgaatgttttctcagagctggaggtt

SEQ ID NO: 521088 - DNA, 120 bp, Artificial Sequence
  ENSG00000165312_13 (sequence is synthesized)
gctgggcacctaaatgatgtttcatgatagctttgggtgattttactgctatttataatttgctgtataaagtgagcattacttaatttgcaagctgatttctcacagtgtaaatttgtt

SEQ ID NO: 521089 - DNA, 120 bp, Artificial Sequence
  ENSG00000165312_14 (sequence is synthesized)
cattcctggtagtctattttctataaaaatgtatttttgcacaacatttttaaaaactggtgtaccttcatctatgacgtgttccattttgacaaacagctttcaggcgtaaatccagag

SEQ ID NO: 521090 - DNA, 120 bp, Artificial Sequence
  ENSG00000165312_15 (sequence is synthesized)
aagtgctttatatgaaatgtattattttgaacagagtttgtgatttggtagttattttatgttgttgaaatttgaatttcacaattcttagataattatttcaaatggatattgatgcat

SEQ ID NO: 521091 - DNA, 120 bp, Artificial Sequence
  ENSG00000165312_16 (sequence is synthesized)
tcttgttaccagatgtttggcccattccattttgatgaaacagagctgttgttttggaagtcattatttttctagaaatggcgaatcttttaaagaaaattacttaatggaaggttgtgg

SEQ ID NO: 521092 - DNA, 120 bp, Artificial Sequence
  ENSG00000165312_17 (sequence is synthesized)
gttttttttttggtttttgttttgtttttcctcttttaagggatagtagcaggtcttacttgaatgaaagtctgatatttgctgatggcagaatgattattctgtaccctggttgatgtg

SEQ ID NO: 521093 - DNA, 120 bp, Artificial Sequence
  ENSG00000165312_18 (sequence is synthesized)
taccctggttgatgtgtagagtagattgtctggtgctctcagttgtttttatttacatttgtcacgttgttgtaagagaatgttaacatggtataaaactctgtgacaagataagcctcc

SEQ ID NO: 521094 - DNA, 120 bp, Artificial Sequence
  ENSG00000165312_19 (sequence is synthesized)
tgctttatataacttcttgaatccagctaagagatttataaactaatggcataaatgtctggagccaaccttggcagttatagcaggagaacactgtcttaatatttctttacattcttt

SEQ ID NO: 521095 - DNA, 120 bp, Artificial Sequence
  ENSG00000165312_20 (sequence is synthesized)
caaaaggcaaaataggattgccctgtattgatgtagaaatgtctgtaaacagagcttgtatggtttgctgggtcaaacaatgtttccaacttaaaatcaatctcattgccactttaacta

SEQ ID NO: 521096 - DNA, 120 bp, Artificial Sequence
  ENSG00000165312_21 (sequence is synthesized)
cttttagtcatatttattaagtaatgcagtttgtactttttttattttgtaacattttgtgatttttttgtacaaaactgtatttgtacaatagagcaattcccagctgatggaatgaat

SEQ ID NO: 521097 - DNA, 120 bp, Artificial Sequence
  ENSG00000165312_22 (sequence is synthesized)
gaataaaatgcaaaattatacttttacaatgcctttttggatagagtggtttttaaattgtgatgtttgtaggaaactttcttgcatgtatgcatgtacacaattttttttttccataaa

SEQ ID NO: 521098 - DNA, 120 bp, Artificial Sequence
  ENSG00000165312_23 (sequence is synthesized)
gatgccacagcaatagagaggtttcctaaattatcacatgaagaggataggctaatcatgagtaatttcaaaggataagtctgaataaaatataatttaaaagtggagtaatccaagaaa

SEQ ID NO: 521099 - DNA, 120 bp, Artificial Sequence
  ENSG00000165322_0 (sequence is synthesized)
gtaacttaccctccctcagaggccagcctgcggggacgggccggccgcggccgtagccgtgtgaacgctcttcgggctcgcgtcgtcgacccgcagccgcggggcggactaagaagggag

SEQ ID NO: 521100 - DNA, 120 bp, Artificial Sequence
  ENSG00000165322_1 (sequence is synthesized)
ccgcctgctgcgaggccgccgggctcccggtttaaatgtgatactggtgtagatctccttgttctaagctatattcatccaacaagccataaagccataatgtggtataacatccttttt

SEQ ID NO: 521101 - DNA, 120 bp, Artificial Sequence
  ENSG00000165322_2 (sequence is synthesized)
gagaggtgaatattattgaatgaaaatggctgacagaagtgggaagattattccaggacaagtgtatattgaggtggaatatgattatgaatatgaagcaaaggacagaaagattgtgat

SEQ ID NO: 521102 - DNA, 120 bp, Artificial Sequence
  ENSG00000165322_3 (sequence is synthesized)
aaaacaaggggagaggtacatcttggtgaaaaagaccaatgatgactggtggcaagtcaagccagatgaaaactccaaagcgttttatgtgccagcccagtatgtgaaggaggtcacgcg

SEQ ID NO: 521103 - DNA, 120 bp, Artificial Sequence
  ENSG00000165322_4 (sequence is synthesized)
caaagctctcatgccacctgttaagcaggtagctggtctgccaaataactccacgaaaataatgcagagtttgcatcttcagagatcaacagaaaatgtgaacaaattgcctgagctttc

SEQ ID NO: 521104 - DNA, 120 bp, Artificial Sequence
  ENSG00000165322_5 (sequence is synthesized)
aagtttcggaaagccatcgtcatctgttcaaggaacaggtcttattcgtgatgccaatcagaattttggacccagttataatcaaggtcagactgtcaacctaagcctggacctgaccca

SEQ ID NO: 521105 - DNA, 120 bp, Artificial Sequence
  ENSG00000165322_6 (sequence is synthesized)
taataacggaaagtttaacaatgactcacattctcctaaagtttccagccagaataggacacgctcatttggtcattttcccggtccagagttcttggatgtagagaaaactagcttctc

SEQ ID NO: 521106 - DNA, 120 bp, Artificial Sequence
  ENSG00000165322_7 (sequence is synthesized)
ccaggaacaatcttgtgattccgcaggagaaggctctgaaagaatacatcaagattctgaatctggtgatgaacttagcagcagctccactgaacagataagggcaaccacacctccaaa

SEQ ID NO: 521107 - DNA, 120 bp, Artificial Sequence
  ENSG00000165322_8 (sequence is synthesized)
tcaaggaaggccagattctcctgtctatgctaaccttcaagaactgaaaatatcccagtctgctcttcccccacttcctgggagcccggcaattcagattaatggagaatgggaaactca

SEQ ID NO: 521108 - DNA, 120 bp, Artificial Sequence
  ENSG00000165322_9 (sequence is synthesized)
taaagacagctcagggcgttgctattactataacagagggacacaggaaagaacttggaaacctcctcgttggactcgggatgcaagcatcagcaaaggagatttccaaaatccagggga

SEQ ID NO: 521109 - DNA, 120 bp, Artificial Sequence
  ENSG00000165322_10 (sequence is synthesized)
tcaagagcttctttcatcggaagaaaactactacagcacttcttacagccagtcagatagtcagtgtggttctcctccaaggggttggtcagaagagttggatgaacgtgggcatacctt

SEQ ID NO: 521110 - DNA, 120 bp, Artificial Sequence
  ENSG00000165322_11 (sequence is synthesized)
atataccagtgactatactaatgaaaagtggctcaagcatgttgatgatcaaggtagacaatattactacagtgcagacggatctcggtcagaatgggaattgccaaagtataatgcttc

SEQ ID NO: 521111 - DNA, 120 bp, Artificial Sequence
  ENSG00000165322_12 (sequence is synthesized)
atcccagcagcaaagagaaataattaaaagtaggagcctggacaggcggctgcaagaaccaatagtattaacaaagtggagacatagcaccattgtattggacactaatgataaggaatc

SEQ ID NO: 521112 - DNA, 120 bp, Artificial Sequence
  ENSG00000165322_13 (sequence is synthesized)
tccaactgcctcaaaaccctgctttcctgaaaatgagtcttctccctcctcaccaaagcaccaagatacagccagcagtccaaaggatcaagagaaatatggattattaaatgtaacaaa

SEQ ID NO: 521113 - DNA, 120 bp, Artificial Sequence
  ENSG00000165322_14 (sequence is synthesized)
aattgctgaaaatgggaaaaaggttcgaaagaactggttgtcttcttgggcggtgttgcagggttcatctttactttttaccaaaactcaaggaagtagcacaagttggtttggcagtaa

SEQ ID NO: 521114 - DNA, 120 bp, Artificial Sequence
  ENSG00000165322_15 (sequence is synthesized)
tcagtccaaaccagagttcacagtggacctcaagggggcaacaattgagatggcttcaaaggataaatccagcaaaaagaatgtatttgagctgaaaactcgtcaaggaacagaactgct

SEQ ID NO: 521115 - DNA, 120 bp, Artificial Sequence
  ENSG00000165322_16 (sequence is synthesized)
aattcagtctgacaatgacactgttattaatgattggtttaaagttcttagtagtacaatcaataatcaggcagtagaaactgatgaaggaattgaagaggagataccggattcaccagg

SEQ ID NO: 521116 - DNA, 120 bp, Artificial Sequence
  ENSG00000165322_17 (sequence is synthesized)
aatagaaaagcatgataaagaaaaggaacaaaaggatcccaaaaagcttcgttcctttaaagtatctagcatagattcttcagaacagaaaaaaaccaagaaaaacttaaagaagtttct

SEQ ID NO: 521117 - DNA, 120 bp, Artificial Sequence
  ENSG00000165322_18 (sequence is synthesized)
tacacgacgccccactttgcaagctgttcgtgaaaaaggttatattaaagatcaggtatttggatccaatctcgctaatctgtgtcagagagagaatggcacagtaccaaagtttgtgaa

SEQ ID NO: 521118 - DNA, 120 bp, Artificial Sequence
  ENSG00000165322_19 (sequence is synthesized)
gttatgtattgaacatgttgaagaacatggtttggatattgatgggatatacagagtaagtggcaacctcgcagtgatccagaaactaaggtttgcagtcaatcatgatgagaaattgga

SEQ ID NO: 521119 - DNA, 120 bp, Artificial Sequence
  ENSG00000165322_20 (sequence is synthesized)
cttgaatgacagtaaatgggaagatattcatgtcattactggagccctcaaaatgttttttcgagaattaccagaacctctttttacatttaatcattttaatgattttgttaatgcaat

SEQ ID NO: 521120 - DNA, 120 bp, Artificial Sequence
  ENSG00000165322_21 (sequence is synthesized)
gagtcgctgctgttaaggacctaatcagacagttgccaaagccaaaccaagacacaatgcagattcttttccgacatctcagaagagttatagaaaatggagagaaaaatcgaatgacct

SEQ ID NO: 521121 - DNA, 120 bp, Artificial Sequence
  ENSG00000165322_22 (sequence is synthesized)
atcagagtatagcaattgtttttggtcccactctattaaaaccagaaaaagagactggtaatatagcagttcatactgtgtaccagaatcagattgtagaattaattcttctggaactga

SEQ ID NO: 521122 - DNA, 120 bp, Artificial Sequence
  ENSG00000165322_23 (sequence is synthesized)
gttccatcttcggacgttgattcttactgaagacaacctgtggaatagaagctggattccatcagatttcaaatgtttatacacaatgtattttattttttggaccaagcagtgactctt

SEQ ID NO: 521123 - DNA, 120 bp, Artificial Sequence
  ENSG00000165322_24 (sequence is synthesized)
tgattttgcactttttttttgagggatcagaagggaaggggagagtcgagatgtgtgttaggccctcatatttgctgctttgttgcaagttgatataactgcgtgtaattatgaattcat

SEQ ID NO: 521124 - DNA, 120 bp, Artificial Sequence
  ENSG00000165322_25 (sequence is synthesized)
tttatcctgaatgtttgcatttcatactctgaatttcagtaaaaatcaaaacttaaaattctaaccagtcatatacactggataatttggtaagaaaactgtattttttttccctgaaat

SEQ ID NO: 521125 - DNA, 120 bp, Artificial Sequence
  ENSG00000165322_26 (sequence is synthesized)
tggataatgtactttcttctcaagattcatgacttgatagaacaatactttcagttatgttgcaaaggctcttgggcattttaaacaaaatgaagtatatccattttgaaacctgtgtat

SEQ ID NO: 521126 - DNA, 120 bp, Artificial Sequence
  ENSG00000165322_27 (sequence is synthesized)
ttctttttcggggtttctgcatgcagtggcagtcttaagtgccaaaattcattataaccccaaaataaccccttgatgaaggcttgctgtcttttactgtgttacacagcatccttactg

SEQ ID NO: 521127 - DNA, 120 bp, Artificial Sequence
  ENSG00000165322_28 (sequence is synthesized)
gatatcttagttgcttgtttgggcagcacactaatattacttaaaacactgtgatatactggagttttagttagcggaagtcagttcagggcattttagggctgtcttgctatactgaat

SEQ ID NO: 521128 - DNA, 120 bp, Artificial Sequence
  ENSG00000165322_29 (sequence is synthesized)
tgtagctaacaatcctaattatatctagtaccatactgagttattggtatgaccctgtggaaacacacattattttatgtaaatataggctaaagacttaatgtcctttagcttgtgtat

SEQ ID NO: 521129 - DNA, 120 bp, Artificial Sequence
  ENSG00000165322_30 (sequence is synthesized)
ataattgtgttgtatagtctcagagtacattctaaccctacatttctaatcattgttattggtaatcttttctgtgaatattaggtttcctccagaaatagtccgttatttgggaaagtt

SEQ ID NO: 521130 - DNA, 120 bp, Artificial Sequence
  ENSG00000165322_31 (sequence is synthesized)
aactgtgtgcacttttagatattaactacatttacaggcaaatcactgtaatgagaatggtactggaaaaatactgaatagacttgctaaatggcacatgcactacaagaggaacctttt

SEQ ID NO: 521131 - DNA, 120 bp, Artificial Sequence
  ENSG00000165322_32 (sequence is synthesized)
gggttatttaatatgtacagaaaacattagaaaaaatttattacagaattctaattccagtatgaatagtggaaacccatctgtaaattagatggatgttggatggaaaatgacattgct

SEQ ID NO: 521132 - DNA, 120 bp, Artificial Sequence
  ENSG00000165322_33 (sequence is synthesized)
aaatttgagaatttctttttacctactaatgtagattgctttgtataataaaacacagggtttggaaggttttgttacagggagcatggtctgttgaagatttttaaaatgtatttttct

SEQ ID NO: 521133 - DNA, 120 bp, Artificial Sequence
  ENSG00000165322_34 (sequence is synthesized)
agattaacttctgtacatgaaatgtctaataaaactataagaggtttagagatttttccattggaaatgtgcattttggtttctaatttttttgttttttcatttactggcatactgtta

SEQ ID NO: 521134 - DNA, 120 bp, Artificial Sequence
  ENSG00000165322_35 (sequence is synthesized)
tacctcatttttaaaaatcaactgaatccaatatttcctgtggcaaataacactttcctcatttcataccttttctcctctcttccatgccaacatttctccacccacaacgtacacttt

SEQ ID NO: 521135 - DNA, 120 bp, Artificial Sequence
  ENSG00000165322_36 (sequence is synthesized)
ttatttctccatcaatatttgaaagcgagtgatttgtgaccaggatttttttttcttagggttgcatttataatttacagattgccttccttgggaacaagtatttttttgtatgatctg

SEQ ID NO: 521136 - DNA, 120 bp, Artificial Sequence
  ENSG00000165322_37 (sequence is synthesized)
tctaaaaacctctcacctgaattttgtggtagaaagtctgtatttgttgttgtgagcgtgttaaattgataacaaaccaaactacttgatagctaaagcagattgtttcgggtggggaga

SEQ ID NO: 521137 - DNA, 120 bp, Artificial Sequence
  ENSG00000165322_38 (sequence is synthesized)
aaaagccctaaatcagaatgtttatatttgcctaaagatgtccttaataatacaatatgctttagatcttgcttatttagtgattgtataccaggaaaacaattagactcaaatcagtga

SEQ ID NO: 521138 - DNA, 120 bp, Artificial Sequence
  ENSG00000165322_39 (sequence is synthesized)
aaacaattagactcaaatcagtgatgttcttgttcttggtgttcatgaacatatatcaaagattaaaattgtcctgtgtttcttgtttcaaggtacgtgtgtgtgtgtgtgtgtgtgtgt

SEQ ID NO: 521139 - DNA, 120 bp, Artificial Sequence
  ENSG00000165322_40 (sequence is synthesized)
gttttattagtctacagctaatcagtttattgtaatattgtatgtacagtgagattaatgtcttgcgttttcatcctttgtgaattaaaaattctcacttgttttgtaataacaaagcta

SEQ ID NO: 521140 - DNA, 120 bp, Artificial Sequence
  ENSG00000165322_41 (sequence is synthesized)
gtaatattttcctgtcttgacagcttggttttatagtagaaaatatattaaaagctgaaataaattatcagtggaattttatttgttagtaagtcttccttcataatgtcattgaaaaag

SEQ ID NO: 521141 - DNA, 120 bp, Artificial Sequence
  ENSG00000165322_42 (sequence is synthesized)
acacgacgccccactttgcaagctgttcgtgaaaaaggttatattaaaggttggtaggagaagtattgttgataataatgaatgttggcctacgtcataaataaaatgtttcaaattaaa

SEQ ID NO: 521142 - DNA, 120 bp, Artificial Sequence
  ENSG00000165322_43 (sequence is synthesized)
ctatgctacttgctgtctttgtaacttgaaaaagttactcaactccttttagtatcagtctgtcatgggtaaatgatttgctatgaagaatacagtaaaagttatagaaaatggagagaa

SEQ ID NO: 521143 - DNA, 120 bp, Artificial Sequence
  ENSG00000165322_44 (sequence is synthesized)
tttttgcataccgtatatgtgttgcttttgtgatggaggaaacattttgtttttaaatgtcgtgtggtctatcagtgtacaattcattgtatgcctgtaatgcacctagtacctactacc

SEQ ID NO: 521144 - DNA, 120 bp, Artificial Sequence
  ENSG00000165322_45 (sequence is synthesized)
tataaaatggtatgcaaaatatgcatgggctgattttacctgctgacttcctttaattttgaattatccccagatgttttcagaaatttgaaattgttagtgttttaagattaatgaaac

SEQ ID NO: 521145 - DNA, 120 bp, Artificial Sequence
  ENSG00000165322_46 (sequence is synthesized)
catttccttgagctgattcacagtctatatgatgagcagagtagaattactgctgtttattaaacagaattcagagcgaatctccatctctctcccctgccaagcatctaccagaagcca

SEQ ID NO: 521146 - DNA, 120 bp, Artificial Sequence
  ENSG00000165322_47 (sequence is synthesized)
tttagagaaaaagaatatttgcccatttgattttaggctaatgcaaatgagtgggaattctgacacatgcaaacgtgttcagaagaggcaaagaagtactttaaacacacacacacacaa

SEQ ID NO: 521147 - DNA, 120 bp, Artificial Sequence
  ENSG00000165322_48 (sequence is synthesized)
attattattgtctcttaggtttggatattgatgggatatacagagtaagtggcaacctcgcagtgatccagaaactaaggtttgcagtcaatcatggtaagattatatttactgttgtta

SEQ ID NO: 521148 - DNA, 120 bp, Artificial Sequence
  ENSG00000165323_0 (sequence is synthesized)
gatggaagtatgatgtgatggatataattatgggacactgtgtgggcacacggcctcctgcttgttgcctcatcctcctgcttttcaagcttttggccactgtctcccaggggctgccag

SEQ ID NO: 521149 - DNA, 120 bp, Artificial Sequence
  ENSG00000165323_1 (sequence is synthesized)
ggactggacccctgggcttccacttcacacattccatttataatgctaccgtgtatgagaactcagcagcaaggacctacgtcaacagccagagtagaatgggcatcaccttaatagatc

SEQ ID NO: 521150 - DNA, 120 bp, Artificial Sequence
  ENSG00000165323_2 (sequence is synthesized)
tatcctgggatatcaaatacagaatagtgtccggagacgaggaaggctttttcaaagcagaggaagtcatcattgcagatttctgttttctcagaataagaactaaaggtggcaattctg

SEQ ID NO: 521151 - DNA, 120 bp, Artificial Sequence
  ENSG00000165323_3 (sequence is synthesized)
ccatattaaatagggaaatccaggataattatttattgatagtaaaaggttctgtcagaggagaggatttggaagcatggaccaaagtgaatatacaggttttagatatgaatgatctga

SEQ ID NO: 521152 - DNA, 120 bp, Artificial Sequence
  ENSG00000165323_4 (sequence is synthesized)
gacctttgttttcacccacaacatactctgttaccatagcagaaagcacacctctaaggactagtgttgcccaggtgactgcaacagacgcagatattggttccaatggagaattctact

SEQ ID NO: 521153 - DNA, 120 bp, Artificial Sequence
  ENSG00000165323_5 (sequence is synthesized)
actactttaaaaataaagttgatctcttttcagttcaccccacgagtggtgtcatctccttaagtggtcgattaaattatgatgaaaagaataggtatgatctggaaattttggctgtgg

SEQ ID NO: 521154 - DNA, 120 bp, Artificial Sequence
  ENSG00000165323_6 (sequence is synthesized)
accggggaatgaaactgtatgggaacaatggagtgagcagtactgcaaagctttatgttcacattgagcgcataaatgaacatgccccaacaatccatgtagtcactcatgttcctttct

SEQ ID NO: 521155 - DNA, 120 bp, Artificial Sequence
  ENSG00000165323_7 (sequence is synthesized)
cgttggaaaaagagccaacatatgcagtggtgacagttgatgacttagatgatggagcgaatggagagatcgaatctgtttccattgtggctggggatcctttagatcagttcttcctgg

SEQ ID NO: 521156 - DNA, 120 bp, Artificial Sequence
  ENSG00000165323_8 (sequence is synthesized)
ctaaggaaggaaagtggttgaatgagtacaagattaaggagaggaagcagattgactgggagagctttccctatggctacaatctcactcttcaagcaaaagacaagggatctcctcaaa

SEQ ID NO: 521157 - DNA, 120 bp, Artificial Sequence
  ENSG00000165323_9 (sequence is synthesized)
aatgttcagcattaaaggcagtctacattggcaaccccacaagagacactgtccccattagatttgaaaaagaagtgtacgatgtgagcataagtgaattttcccctcctggtgtcgtgg

SEQ ID NO: 521158 - DNA, 120 bp, Artificial Sequence
  ENSG00000165323_10 (sequence is synthesized)
ttgctatagtaaaattaagtcctgaaccgatagatgtggaatacaaattatctcctggtgaggatgcagtgtactttaaaattaatcctcggtcgggtctgattgttacagcacggccac

SEQ ID NO: 521159 - DNA, 120 bp, Artificial Sequence
  ENSG00000165323_11 (sequence is synthesized)
tgaatactgttaagaaggaggtttataaactggaggtgacaaacaaggaaggagatttaaaagcacaggtcaccatcagcatagaagatgcaaatgaccacaccccagaatttcagcaac

SEQ ID NO: 521160 - DNA, 120 bp, Artificial Sequence
  ENSG00000165323_12 (sequence is synthesized)
cactgtatgatgcttatgtgaatgaaagtgtcccagtgggaaccagcgttctaacagtttcagcttctgataaggataaaggagaaaatgggtacatcacctatagtatcgctagcctga

SEQ ID NO: 521161 - DNA, 120 bp, Artificial Sequence
  ENSG00000165323_13 (sequence is synthesized)
atttgttaccatttgtcattaatcagtttacaggtgttattagcacaactgaagaactggattttgaatcctccccagaaatttacagattcattgttagagcctctgactggggttcac

SEQ ID NO: 521162 - DNA, 120 bp, Artificial Sequence
  ENSG00000165323_14 (sequence is synthesized)
cataccgccatgaaagtgaggtcaatgtgactattcgaataggaaatgtcaacgacaacagccctctctttgaaaaagtggcttgccagggagttatttcatatgactttccagttggtg

SEQ ID NO: 521163 - DNA, 120 bp, Artificial Sequence
  ENSG00000165323_15 (sequence is synthesized)
gtcacatcacagcagtctcagcgatcgatatcgatgaacttgaacttgtaaagtacaaaatcatttctggaaatgaacttggcttcttttatttaaacccagattctggtgttttacagc

SEQ ID NO: 521164 - DNA, 120 bp, Artificial Sequence
  ENSG00000165323_16 (sequence is synthesized)
ttaaaaaatcactgacaaattctggcattaaaaatggcaattttgccctcagaattacagcaactgatggagagaatcttgcagaccccatgtctattaacatttcagtcctacatggga

SEQ ID NO: 521165 - DNA, 120 bp, Artificial Sequence
  ENSG00000165323_17 (sequence is synthesized)
aagtgtcttcaaagagcttcagttgcagagaaactcgtgtggctcaaaagctggcagagaaactactcattaaggcaaaagcaaatgggaaactgaatctggaagatggatttcttgact

SEQ ID NO: 521166 - DNA, 120 bp, Artificial Sequence
  ENSG00000165323_18 (sequence is synthesized)
tttattcaattaatagacagggaccatattttgacaagtcttttccttctgatgtggctgtaaaggaggatctgccagttggtgctaacattctgaagattaaagcctatgatgccgact

SEQ ID NO: 521167 - DNA, 120 bp, Artificial Sequence
  ENSG00000165323_19 (sequence is synthesized)
ctggcttcaatggaaaagtgctatttacaatatcagatggaaatacggatagttgctttaatattgatatggagactgggcagcttaaagtccttatgcccatggatcgagaacacacag

SEQ ID NO: 521168 - DNA, 120 bp, Artificial Sequence
  ENSG00000165323_20 (sequence is synthesized)
acctctatctccttaatatcaccatctatgacttaggtaatccacagaaatcgtcatggagactgctgaccatcaatgtggaggatgctaatgacaatagcccagtttttattcaagaca

SEQ ID NO: 521169 - DNA, 120 bp, Artificial Sequence
  ENSG00000165323_21 (sequence is synthesized)
gttactcagttaacattcttgaaagttcaggcattggtactgaaatcattcaagtggaagccagagacaaagacttaggttctaatggtgaagtgacttactcagtcttgacagatacac

SEQ ID NO: 521170 - DNA, 120 bp, Artificial Sequence
  ENSG00000165323_22 (sequence is synthesized)
agcagtttgccatcaatagctcaactggaatcgtttatgtagccgaccagttggaccgggaatccaaagccaattattctttgaaaatagaagccagggacaaggcagagagtggtcagc

SEQ ID NO: 521171 - DNA, 120 bp, Artificial Sequence
  ENSG00000165323_23 (sequence is synthesized)
agctgttttcagttgtcactcttaaagtttttttagatgatgtcaatgactgctccccagctttcattcccagtagctatagtgtgaaggttcttgaagatctccctgttggcactgtca

SEQ ID NO: 521172 - DNA, 120 bp, Artificial Sequence
  ENSG00000165323_24 (sequence is synthesized)
ttgcttggcttgagacccatgatccagatcttggactggggggtcaagtgcgctattctttggtcaatgactataatgggagatttgaaatagataaagcaagtggtgccatccgcttga

SEQ ID NO: 521173 - DNA, 120 bp, Artificial Sequence
  ENSG00000165323_25 (sequence is synthesized)
gcaaagagcttgattatgagaaacagcagttctataaccttactgtgcgggccaaagacaaagggcggcctgtctctctgtcatctgtttcctttgttgaggtggaagtggtggatgtca

SEQ ID NO: 521174 - DNA, 120 bp, Artificial Sequence
  ENSG00000165323_26 (sequence is synthesized)
atgaaaacctccacactccctatttcccagactttgctgttgttggatctgtaaaggaaaactcacgcattggaacaagcgtgctgcaggtgactgctcgagatgaagactccggaaggg

SEQ ID NO: 521175 - DNA, 120 bp, Artificial Sequence
  ENSG00000165323_27 (sequence is synthesized)
atggagagatccagtactccatcagggatggcagtggtcttggaaggttcagtatagacgacgagagtggggtcatcactgccgcagacattcttgatcgggagacaatggggtcatact

SEQ ID NO: 521176 - DNA, 120 bp, Artificial Sequence
  ENSG00000165323_28 (sequence is synthesized)
ggctaacagtgtatgccacagacaggggcgttgttccactctactccaccattgaggtctacattgaagttgaagatgtgaatgacaatgccccgctgacctcagaacctatatattatc

SEQ ID NO: 521177 - DNA, 120 bp, Artificial Sequence
  ENSG00000165323_29 (sequence is synthesized)
ctgttgtcatggaaaactctccaaaggacgtatctgtcattcagatccaggctgaagatcctgactccagttccaatgaaaaactgacatacaggattacaagtggaaatcctcagaatt

SEQ ID NO: 521178 - DNA, 120 bp, Artificial Sequence
  ENSG00000165323_30 (sequence is synthesized)
tttttgccatcaatatcaaaacaggtctgattacaacaacttcaaggaaattggatcgagaacagcaggcagaacattttctggaggtgactgtgacagatggtggtccctctccaaaac

SEQ ID NO: 521179 - DNA, 120 bp, Artificial Sequence
  ENSG00000165323_31 (sequence is synthesized)
agtcaaccatttgggtggtggttcaggttctagatgaaaatgacaacaagccccagttcccagagaaggtctaccagatcaagctgccagaacgtgaccgaaagaagagaggagaaccga

SEQ ID NO: 521180 - DNA, 120 bp, Artificial Sequence
  ENSG00000165323_32 (sequence is synthesized)
tttacagggcttttgcatttgatagagatgagggccccaacgcagaaatctcctacagtattgtggatgggaatgatgacggaaagttctttattgaccctaaaactgggatggtttctt

SEQ ID NO: 521181 - DNA, 120 bp, Artificial Sequence
  ENSG00000165323_33 (sequence is synthesized)
ctagaaagcagtttacagcaggcagttatgacatcctaacgataaaggcagtggacaatgggcgcccacagaaatcctccacggcccgcctccacattgaatggattaagaaaccacccc

SEQ ID NO: 521182 - DNA, 120 bp, Artificial Sequence
  ENSG00000165323_34 (sequence is synthesized)
cttcacctataccattgaccttcgatgagccgttttataacttcacagtcatggaaagtgatagagtgactgaaattgtaggggtggtgtctgtgcagccagctaacacccctctgtggt

SEQ ID NO: 521183 - DNA, 120 bp, Artificial Sequence
  ENSG00000165323_35 (sequence is synthesized)
ttgacatagttggggggaattttgacagcgcttttgatgcagagaagggtgttgggacaattgtcatcgcaaaacctttggatgcagagcagaggtccatctataatatgagtgtggaag

SEQ ID NO: 521184 - DNA, 120 bp, Artificial Sequence
  ENSG00000165323_36 (sequence is synthesized)
tcaccgatgggacaaatgttgctgttactcaggtatttatcaaagtgctggataataatgataatggcccagaattctctcagccgaattacgatgtgacaatttccgaggatgtgcttc

SEQ ID NO: 521185 - DNA, 120 bp, Artificial Sequence
  ENSG00000165323_37 (sequence is synthesized)
cagacacggagatcctgcagattgaagccacagatagagatgagaagcacaagctgagctacactgttcatagcagcatcgactccatcagcatgagaaaattccggattgaccctagca

SEQ ID NO: 521186 - DNA, 120 bp, Artificial Sequence
  ENSG00000165323_38 (sequence is synthesized)
ctggcgtgctctatactgccgagaggctggaccatgaggcccaggacaagcacattctcaacataatggtcagagatcaggagtttccttatcgaagaaacttggcccgagtcattgtga

SEQ ID NO: 521187 - DNA, 120 bp, Artificial Sequence
  ENSG00000165323_39 (sequence is synthesized)
atgtggaggatgctaatgatcacagtccttattttaccaacccactgtatgaagcgtctgtgtttgaatctgctgctctgggatcagctgttctgcaagtgacggctctggacaaagaca

SEQ ID NO: 521188 - DNA, 120 bp, Artificial Sequence
  ENSG00000165323_40 (sequence is synthesized)
aaggagaaaatgcagaactcatatataccatagaagcagggaacactgggaacatgtttaagatcgaaccggtcctaggcatcatcaccatttgcaaagaaccagacatgacgacgatgg

SEQ ID NO: 521189 - DNA, 120 bp, Artificial Sequence
  ENSG00000165323_41 (sequence is synthesized)
gtcagtttgtcctatccatcaaagtcacagatcagggatccccgccaatgtctgctactgcaattgtgcgcatttccgtcaccatgtctgacaattctcaccccaagttcattcacaaag

SEQ ID NO: 521190 - DNA, 120 bp, Artificial Sequence
  ENSG00000165323_42 (sequence is synthesized)
actaccaagcagaagtaaatgaaaatgttgacattggaacatcagtcattctaatctctgccatcagtcaatctaccctcatttatgaagtcaaagatggagacattaatgggatcttta

SEQ ID NO: 521191 - DNA, 120 bp, Artificial Sequence
  ENSG00000165323_43 (sequence is synthesized)
ccataaatccatattctggagtcatcaccactcagaaggccctggattatgagcgcacatcctcttatcaactcatcattcaggccaccaatatggcaggaatggcttccaatgctacag

SEQ ID NO: 521192 - DNA, 120 bp, Artificial Sequence
  ENSG00000165323_44 (sequence is synthesized)
tcaatattcagattgttgatgaaaatgataatgccccagtttttctcttttctcaatactcaggcagcctaagtgaggctgccccaattaatagcattgtcaggagcttggataacagcc

SEQ ID NO: 521193 - DNA, 120 bp, Artificial Sequence
  ENSG00000165323_45 (sequence is synthesized)
cactggtgattcgagccacagatgctgacagcaaccggaatgctctgcttgtgtatcagattgtggagtcaacagcaaaaaagtttttcacggtggactccagtacaggtgcaatcagaa

SEQ ID NO: 521194 - DNA, 120 bp, Artificial Sequence
  ENSG00000165323_46 (sequence is synthesized)
caattgccaacctggaccatgaaaccattgcccatttccattttcatgtgcatgtgagagacagtggtagcccccaactgactgcagagagtcccgttgaagtcaacattgaggtgacag

SEQ ID NO: 521195 - DNA, 120 bp, Artificial Sequence
  ENSG00000165323_47 (sequence is synthesized)
atgtgaatgataacccacctgtttttactcaggctgtgtttgagactatcttacttctacctacctatgttggagtggaggttctgaaagttagtgccacagatcctgactctgaggtac

SEQ ID NO: 521196 - DNA, 120 bp, Artificial Sequence
  ENSG00000165323_48 (sequence is synthesized)
cccctgaactgacatacagcctaatggaaggcagtttggatcattttttaattgactcaaacagtggagtacttaccataaaaaacaacaacctctccaaggatcactacatgctgatag

SEQ ID NO: 521197 - DNA, 120 bp, Artificial Sequence
  ENSG00000165323_49 (sequence is synthesized)
ttaaggtgtctgatggaaagttctacagtacctccatggtcaccatcatggttaaagaagccatggacagcggcctccactttacacaaagcttctattccacctcaatctcagagaaca

SEQ ID NO: 521198 - DNA, 120 bp, Artificial Sequence
  ENSG00000165323_50 (sequence is synthesized)
acactaacataaccaaagttgctattgtcaatgcagttggaaatcgccttaatgagcccttaaaatacagcatcttaaacccaggaaataagttcaagataaaatctacctcaggggtca

SEQ ID NO: 521199 - DNA, 120 bp, Artificial Sequence
  ENSG00000165323_51 (sequence is synthesized)
ttcagacgactggagtcccctttgaccgtgaagaacaagagttatatgagctggtggtagaagccagccgtgagctggaccatctgcgtgtggccagagtggtggtcagggttaacattg

SEQ ID NO: 521200 - DNA, 120 bp, Artificial Sequence
  ENSG00000165323_52 (sequence is synthesized)
aagacataaatgacaattctccagtctttgtgggcctcccatactatgctgctgttcaagtggatgcggaacccgggactctgatttatcaggtgacagccattgacaaagataaaggtc

SEQ ID NO: 521201 - DNA, 120 bp, Artificial Sequence
  ENSG00000165323_53 (sequence is synthesized)
caaatggagaagtgacctatgtcctgcaggatgactatggccactttgaaattaaccctaattcagggaatgttattttaaaggaagcattcaactctgacttgtccaacattgagtatg

SEQ ID NO: 521202 - DNA, 120 bp, Artificial Sequence
  ENSG00000165323_54 (sequence is synthesized)
gagtcaccatcctagccaaggatggcggaaaaccttctttgtctacatctgtggagcttcccatcactattgtcaacaaagcaatgcctgtgtttgataagcccttttatacagcatctg

SEQ ID NO: 521203 - DNA, 120 bp, Artificial Sequence
  ENSG00000165323_55 (sequence is synthesized)
tcaatgaagacatcagaatgaacacacccatcctaagcatcaatgccaccagtccagaaggccaaggcatcatatatatcattatcgatggggacccttttaaacagtttaacattgact

SEQ ID NO: 521204 - DNA, 120 bp, Artificial Sequence
  ENSG00000165323_56 (sequence is synthesized)
ttgacactggggtcctgaaagttgttagccctttggattatgaagttacatctgcttacaagctgacaataagagccagcgacgcccttactggtgctagggctgaagtcactgttgact

SEQ ID NO: 521205 - DNA, 120 bp, Artificial Sequence
  ENSG00000165323_57 (sequence is synthesized)
tgctagttaatgatgtaaatgacaacccccctattttcgatcagcctacatacaatacaacactatcagaagcatctcttattgggacacctgttttacaagttgtctctattgatgcag

SEQ ID NO: 521206 - DNA, 120 bp, Artificial Sequence
  ENSG00000165323_58 (sequence is synthesized)
actcagaaaacaataaaatggtacattatcagattgtccaggatacctacaatagcacagattattttcacatagatagctcaagtggcttaatcctgacagcacgaatgctggaccatg

SEQ ID NO: 521207 - DNA, 120 bp, Artificial Sequence
  ENSG00000165323_59 (sequence is synthesized)
agttagtacaacactgcactttgaaagtcagatcaatagatagtggcttcccatcactgagcagtgaggttctcgttcatatctacatctctgatgtaaatgacaaccctccagttttta

SEQ ID NO: 521208 - DNA, 120 bp, Artificial Sequence
  ENSG00000165323_60 (sequence is synthesized)
atcagctcatttatgagtcatatgtgagtgaattagccccccggggccattttgtaacctgtgtacaagcctctgatgcagacagctctgattttgaccggttggaatatagcattttat

SEQ ID NO: 521209 - DNA, 120 bp, Artificial Sequence
  ENSG00000165323_61 (sequence is synthesized)
ctgggaatgaccggacgagctttctgatggacagcaagagtggagttatcacattgtccaaccatcggaagcagcggatggagcctctgtacagtctcaatgtgtctgtctctgatgggt

SEQ ID NO: 521210 - DNA, 120 bp, Artificial Sequence
  ENSG00000165323_62 (sequence is synthesized)
tgttcaccagcactgcacaggtgcatattagggtacttggggctaacttgtacagccctgccttttcacaaagcacatacgtagctgaggtgagagagaacgtggctgcaggaacaaagg

SEQ ID NO: 521211 - DNA, 120 bp, Artificial Sequence
  ENSG00000165323_63 (sequence is synthesized)
taattcatgttcgagccacagatggtgatccagggacttatgggcagatcagctatgccatcatcaatgactttgccaaggatcgattcctcatagacagcaatgggcaggtcatcacca

SEQ ID NO: 521212 - DNA, 120 bp, Artificial Sequence
  ENSG00000165323_64 (sequence is synthesized)
cagaaaggctagaccgggaaaaccctctagaaggggatgttagtatttttgtgagggcccttgatggtggagggagaacaactttctgcactgtgagagtgattgttgtggatgaaaatg

SEQ ID NO: 521213 - DNA, 120 bp, Artificial Sequence
  ENSG00000165323_65 (sequence is synthesized)
acaatgctccccagttcatgacagtggaatatagagccagtgtcagggcagatgttggaaggggccacttggtcactcaagttcaagccatagatcccgatgatggagcaaattcaagga

SEQ ID NO: 521214 - DNA, 120 bp, Artificial Sequence
  ENSG00000165323_66 (sequence is synthesized)
ttacttattccctctatagcgaggcctctgtttcagtggccgacctcctggaaatcgatcctgacaatggctggatggtcacaaagggtaattttaaccagctgaaaaatacagtgcttt

SEQ ID NO: 521215 - DNA, 120 bp, Artificial Sequence
  ENSG00000165323_67 (sequence is synthesized)
cgttctttgtcaaagcagtagatgggggcatcccagtaaagcactccctcattcctgtctatatccacgtcttgccccctgaaacgttcttgccatcattcacccagtctcagtattcct

SEQ ID NO: 521216 - DNA, 120 bp, Artificial Sequence
  ENSG00000165323_68 (sequence is synthesized)
ttaccattgcagaagatacagccattgggagtacagtggacaccctgaggattttgcccagtcagaatgtctggttcagcacagttaatggggaacggccagaaaataacaaagggggca

SEQ ID NO: 521217 - DNA, 120 bp, Artificial Sequence
  ENSG00000165323_69 (sequence is synthesized)
tattcgtcatagaacaggaaacaggcactattaagcttgacaaacgccttgaccgtgaaaccagcccagctttccactttaaagtagcagccactatacccctggacaaagtagacattg

SEQ ID NO: 521218 - DNA, 120 bp, Artificial Sequence
  ENSG00000165323_70 (sequence is synthesized)
tgtttactgtggatgtagatatcaaggtattggatttgaatgacaacaagccagtctttgaaacttcaagctatgacaccattataatggaagggatgcctgttggcaccaaactcacac

SEQ ID NO: 521219 - DNA, 120 bp, Artificial Sequence
  ENSG00000165323_71 (sequence is synthesized)
aagtgagagctattgatatggactggggagccaatggacaagtcacttactccctccactcggattcccagcccgaaaaggtaatggaagcattcaatattgacagcaacacgggctgga

SEQ ID NO: 521220 - DNA, 120 bp, Artificial Sequence
  ENSG00000165323_72 (sequence is synthesized)
tcagtaccttgaaggacctagatcacgagacagaccccacattcaccttctctgtggtggcctctgaccttggagaggcattctctctttcctccacggccttggtctctgtcagagtga

SEQ ID NO: 521221 - DNA, 120 bp, Artificial Sequence
  ENSG00000165323_73 (sequence is synthesized)
cagatataaatgacaatgcaccagtcttcgcgcaggaagtgtaccgagggaatgtgaaggagagcgacccaccgggcgaggtggtagccgtcctcagcacctgggacagagacacatccg

SEQ ID NO: 521222 - DNA, 120 bp, Artificial Sequence
  ENSG00000165323_74 (sequence is synthesized)
acgttaatcgccaagtgagctaccatattacaggaggaaaccctcgaggaaggtttgctctgggcctggtgcaaagtgagtggaaggtctatgtgaagaggcctctagacagagaagaac

SEQ ID NO: 521223 - DNA, 120 bp, Artificial Sequence
  ENSG00000165323_75 (sequence is synthesized)
aggacatttactttctcaatatcactgccactgatgggctttttgtcacacaggccatggtggaagtgagcgtcagtgatgtgaatgacaatagcccagtgtgtgatcaggttgcatata

SEQ ID NO: 521224 - DNA, 120 bp, Artificial Sequence
  ENSG00000165323_76 (sequence is synthesized)
cagcattacttcctgaagacattccatcaaataaaatcatcctgaaagtcagtgcaaaggatgctgatattggatccaatggatatatacgatactcactctatggatctggaaacagtg

SEQ ID NO: 521225 - DNA, 120 bp, Artificial Sequence
  ENSG00000165323_77 (sequence is synthesized)
aattttttctagatccagaaagtggcgagttaaaaaccttggctctgttggaccgggagaggatccccgtgtacagcctgatggccaaggccactgacgggggtggcaggttctgccagt

SEQ ID NO: 521226 - DNA, 120 bp, Artificial Sequence
  ENSG00000165323_78 (sequence is synthesized)
ccaacatccacctaatcctggaggatgtgaatgataacccccctgtgttttcttctgaccactacaacacctgtgtctatgagaacacagccaccaaggctctgttgaccagagttcaag

SEQ ID NO: 521227 - DNA, 120 bp, Artificial Sequence
  ENSG00000165323_79 (sequence is synthesized)
ctccattgacagctcatctggcatcatcatcctggagcagccactggaccgtgagcagcagtcttcgtacaacatcagcgtgcgggccactgaccagagtcctggacagtccctgtcctc

SEQ ID NO: 521228 - DNA, 120 bp, Artificial Sequence
  ENSG00000165323_80 (sequence is synthesized)
tctcactactgtcaccatcaccgttctggacattaatgacaacccccctgtgtttgagaggagggactacctggtgacggtgcctgaggacacctcccctggcacccaagtccttgctgt

SEQ ID NO: 521229 - DNA, 120 bp, Artificial Sequence
  ENSG00000165323_81 (sequence is synthesized)
ttttgccaccagcaaagatattggcacaaatgctgagatcacttatctcatccggtctgggaacgaacaagggaaatttaagatcaaccccaagacagggggtatttctgtctctgaagt

SEQ ID NO: 521230 - DNA, 120 bp, Artificial Sequence
  ENSG00000165323_82 (sequence is synthesized)
cctggactatgaattatgcaaaaggttttacctggtagtggaagccaaagatgggggcaccccagctctcagcgctgtggccactgtcaacatcaacctcacagatgttaatgacaaccc

SEQ ID NO: 521231 - DNA, 120 bp, Artificial Sequence
  ENSG00000165323_83 (sequence is synthesized)
tcccaagttcagccaagacgtctacagtgcggttatcagtgaagacgccttggtgggagactctgtcattttgctaatagcagaagatgtagacagccagcccaacggacagattcattt

SEQ ID NO: 521232 - DNA, 120 bp, Artificial Sequence
  ENSG00000165323_84 (sequence is synthesized)
ttccattgtgaatggagatcgggacaatgaatttactgtagatcctgtcttgggacttgtgaaagttaagaagaaattggaccgggaacgggtgtctggatactctctgcttgtccaggc

SEQ ID NO: 521233 - DNA, 120 bp, Artificial Sequence
  ENSG00000165323_85 (sequence is synthesized)
cgtagacagtggcattcctgcaatgtcatcaactgcaactgtcaacattgatatttctgatgtgaatgacaacagcccggtgtttacacctgccaactatactgctgtgattcaggaaaa

SEQ ID NO: 521234 - DNA, 120 bp, Artificial Sequence
  ENSG00000165323_86 (sequence is synthesized)
taagccagtgggcaccagcatcttgcagctggtggtgacagacagagactcctttcacaatgggcctcccttttcattctctattttgtcgggaaatgaagaggaggagtttgtgttgga

SEQ ID NO: 521235 - DNA, 120 bp, Artificial Sequence
  ENSG00000165323_87 (sequence is synthesized)
ccctcatgggatcttgcggtcggctgtggtcttccagcacacagagtctctggaatacgtgttgtgtgtccaggcaaaggattcaggcaaaccccagcaagtttctcacacttacatccg

SEQ ID NO: 521236 - DNA, 120 bp, Artificial Sequence
  ENSG00000165323_88 (sequence is synthesized)
cgtgcgagtcattgaggaaagcacccacaagcccacagccattcccctggaaattttcattgtcaccatggaggatgactttcctggtggggtcattgggaagattcatgccacagatca

SEQ ID NO: 521237 - DNA, 120 bp, Artificial Sequence
  ENSG00000165323_89 (sequence is synthesized)
agacatgtatgatgtgctcacatttgccctgaaatcggagcagaaaagcttatttaaagtgaacagtcacgatgggaaaatcatcgccctgggaggcctggacagcggcaagtatgtcct

SEQ ID NO: 521238 - DNA, 120 bp, Artificial Sequence
  ENSG00000165323_90 (sequence is synthesized)
gaatgtgtctgtgagtgatggtcgcttccaggtacccattgatgtggtcgtgcatgtggagcagttggtgcatgagatgctgcagaacactgtcaccatccgctttgaaaatgtgtcccc

SEQ ID NO: 521239 - DNA, 120 bp, Artificial Sequence
  ENSG00000165323_91 (sequence is synthesized)
tgaggacttcgtggggctgcacatgcatgggttccggcgcaccctgcggaatgcagtcctcacccagaagcaggacagcctgcgcatcatcagcatccagcccgtggcaggcaccaacca

SEQ ID NO: 521240 - DNA, 120 bp, Artificial Sequence
  ENSG00000165323_92 (sequence is synthesized)
actggacatgctgtttgcggtggagatgcacagcagcgagttctacaagccagcctacctgatccagaagctgtccaatgctagaagacacctggagaatatcatgcgcatctcagccat

SEQ ID NO: 521241 - DNA, 120 bp, Artificial Sequence
  ENSG00000165323_93 (sequence is synthesized)
cttggagaagaactgctcagggctggactgtcaggaacagcattgtgagcaaggcttgtcactcgattcccacgcgctcatgacctacagcacggctcgcatcagctttgtgtgtccgcg

SEQ ID NO: 521242 - DNA, 120 bp, Artificial Sequence
  ENSG00000165323_94 (sequence is synthesized)
tttctacaggaacgtgcgttgcacctgcaatggaggactgtgtccggggtccaacgatccttgtgtggagaagccgtgtccaggggacatgcagtgtgtcagttatgaagccagcaggag

SEQ ID NO: 521243 - DNA, 120 bp, Artificial Sequence
  ENSG00000165323_95 (sequence is synthesized)
accgttcctctgccagtgtccaccagggaagctcggagagtgctcagggcacacttctctcagctttgctggaaacagttacatcaaatatcggctttctgaaaatagcaaagaagagga

SEQ ID NO: 521244 - DNA, 120 bp, Artificial Sequence
  ENSG00000165323_96 (sequence is synthesized)
tttcaaactagctctgcgtcttcgaacactgcaaagcaatgggattataatgtacaccagagcaaatccctgcataattctgaagattgtggatggcaagctgtggttccagctggactg

SEQ ID NO: 521245 - DNA, 120 bp, Artificial Sequence
  ENSG00000165323_97 (sequence is synthesized)
cggcagcggccctggaatcttgggcatctcgggccgtgctgtcaacgacgggagctggcactcggtcttcctggagctcaaccgcaatttcacgagcctgtccctggatgacagctacgt

SEQ ID NO: 521246 - DNA, 120 bp, Artificial Sequence
  ENSG00000165323_98 (sequence is synthesized)
ggagcggcgccgggcgcccctctacttccagacgctgagcactgagagtagcatctacttcggcgccctggtgcaagcggataacatccgcagcctgactgacacgcgggtcacgcaggt

SEQ ID NO: 521247 - DNA, 120 bp, Artificial Sequence
  ENSG00000165323_99 (sequence is synthesized)
gctcagcggcttccagggctgcctggactcggtgatactgaataacaatgagctgccgctgcagaacaagcgcagcagcttcgcggaggtggtgggcctgacggagctgaagctgggctg

SEQ ID NO: 521248 - DNA, 120 bp, Artificial Sequence
  ENSG00000165323_100 (sequence is synthesized)
cgtgctctatcccgacgcctgcaagcgcagcccgtgccagcacgggggcagctgcactggcctgccatcggggggctatcagtgtacctgtctctcacagtttacggggagaaactgtga

SEQ ID NO: 521249 - DNA, 120 bp, Artificial Sequence
  ENSG00000165323_101 (sequence is synthesized)
atctgagattacagcctgcttcccaaacccctgccggaatggaggatcctgcgatccaataggaaacactttcatctgcaattgtaaagctgggctcactggagtcacgtgtgaggagga

SEQ ID NO: 521250 - DNA, 120 bp, Artificial Sequence
  ENSG00000165323_102 (sequence is synthesized)
catcaatgagtgcgaacgagaggagtgtgagaacggaggctcctgcgtgaacgtgttcggctccttcctctgcaactgcacgccgggctacgtgggccagtactgcgggctgcgccccgt

SEQ ID NO: 521251 - DNA, 120 bp, Artificial Sequence
  ENSG00000165323_103 (sequence is synthesized)
ggtggtacccaatatccaggctggccactcctacgtggggaaggaggagctcatcggcatcgccgtggtcctcttcgtcatcttcatcctggtggttctcttcatagtcttccgcaagaa

SEQ ID NO: 521252 - DNA, 120 bp, Artificial Sequence
  ENSG00000165323_104 (sequence is synthesized)
ggtcttccgcaagaactactcccgcaacaacatcacgctagtgcaggacccggccaccgccgccctgcttaacaagagcaatggcatcccgttccggaacctgcgcggcagtggggacgg

SEQ ID NO: 521253 - DNA, 120 bp, Artificial Sequence
  ENSG00000165323_105 (sequence is synthesized)
ccgcaacgtctaccaggaggtggggcccccgcaggtccccgtgcgccccatggcctacacaccctgcttccagagtgactccaggagcaacctggataagatcgtggacgggctgggagg

SEQ ID NO: 521254 - DNA, 120 bp, Artificial Sequence
  ENSG00000165323_106 (sequence is synthesized)
cgagcaccaggaaatgaccacgtttcaccctgagtcgccccgcatcctgacagcccggcggggcgtggtcgtgtgcagtgtggcccccaacctccccgccgtgtcaccctgccgctccga

SEQ ID NO: 521255 - DNA, 120 bp, Artificial Sequence
  ENSG00000165323_107 (sequence is synthesized)
ctgcgactccatccggaagaatggctgggacgcgggaactgagaacaaaggggttgatgacccgggagaagtgacctgctttgcaggtagtaataaaggcagcaactctgaagttcagtc

SEQ ID NO: 521256 - DNA, 120 bp, Artificial Sequence
  ENSG00000165323_108 (sequence is synthesized)
cctcagctccttccagtcagattctggtgacgacaatgcctatcactgggacacctctgattggatgccaggggcccgcctgtcggacatagaggaagtgcccaactatgagaaccagga

SEQ ID NO: 521257 - DNA, 120 bp, Artificial Sequence
  ENSG00000165323_109 (sequence is synthesized)
tggagggtctgcacaccaggggagcacacgggagctggagagcgattactacctgggtggttatgacattgacagtgaatacccaccccctcatgaagaggagttcttgagtcaggacca

SEQ ID NO: 521258 - DNA, 120 bp, Artificial Sequence
  ENSG00000165323_110 (sequence is synthesized)
gctgcctcctcctctcccggaggacttcccagaccaatatgaggccctgccaccctcccagcctgtctccctggccagcacactgagcccagactgcaggagaaggccccagtttcatcc

SEQ ID NO: 521259 - DNA, 120 bp, Artificial Sequence
  ENSG00000165323_111 (sequence is synthesized)
tagccagtatctccctcctcacccattccccaacgaaacggatttggtgggcccgcctgccagctgtgaatttagtacttttgctgtgagcatgaaccagggcacagagcccacaggccc

SEQ ID NO: 521260 - DNA, 120 bp, Artificial Sequence
  ENSG00000165323_112 (sequence is synthesized)
agcagacagcgtgtctctgtccttgcacaattccagaggcacctcatcctcggatgtgtctgccaactgcggctttgacgattccgaagtagccatgagtgactacgagagcgtgggaga

SEQ ID NO: 521261 - DNA, 120 bp, Artificial Sequence
  ENSG00000165323_113 (sequence is synthesized)
gctcagcctcgccagccttcacattccctttgtggagactcagcatcagactcaagtgtagacatcacatcttgggtacttcaccctgtttgttacagaaaagtggaagcagattggctg

SEQ ID NO: 521262 - DNA, 120 bp, Artificial Sequence
  ENSG00000165323_114 (sequence is synthesized)
ggcttctgtcccagtggagcattgtctgtggaatgagaagggaatactgtatttttccactagaaacttcttcacaagtcatactgtcccaacaagcaagcttgattccagttgggtgaa

SEQ ID NO: 521263 - DNA, 120 bp, Artificial Sequence
  ENSG00000165323_115 (sequence is synthesized)
aatgaaaggctcagaaattgtttttgagaggtgactggtaatccttgatgtaggtacctatgttcacagctaaaaatgcaaagagggaaaaattatttcacccactaagttatacagcca

SEQ ID NO: 521264 - DNA, 120 bp, Artificial Sequence
  ENSG00000165323_116 (sequence is synthesized)
gtcttgtatggctttgtgcagtattgtgccctggaaagtgttacagcatcagtccttgcagtattaaaaactggcaacaatcaaagaggcattgttgcatgtaattttgagccaatgaaa

SEQ ID NO: 521265 - DNA, 120 bp, Artificial Sequence
  ENSG00000165323_117 (sequence is synthesized)
tgaaaatagtagtaatgattgttggaaaagttagtctcttaggcgaaagagaagagaaacaaatattattaaacaaaccagaaaatgggctgaagccttttaaatcaactctattttttt

SEQ ID NO: 521266 - DNA, 120 bp, Artificial Sequence
  ENSG00000165323_118 (sequence is synthesized)
gataagctgcccaattttcagctataaaattaggcttgaataacatgtttagtatgctcagttatttctgtttgtttgtgttaagcatccaatctaatatagttgggttttatgatcttc

SEQ ID NO: 521267 - DNA, 120 bp, Artificial Sequence
  ENSG00000165323_119 (sequence is synthesized)
aagaaaggtatcaatgaagagcaacatgaggctttttgggttccatttggtgggtgggggaggaagttaaagttgtttgaacattagaaagaatgtgattatctggttggttttgtgttt

SEQ ID NO: 521268 - DNA, 120 bp, Artificial Sequence
  ENSG00000165323_120 (sequence is synthesized)
tctggtaaatattccagttggtaaatctaacattgctacagaagttggctttgttcatatagcttctctacaattagatatttttagaagtttaagcaaaactcacaaattcagggggga

SEQ ID NO: 521269 - DNA, 120 bp, Artificial Sequence
  ENSG00000165323_121 (sequence is synthesized)
aaaaagaaaaaacgataccttcaaagtttgcggcctagataatcacaattcttcataatgcagaggaaaggtgtctgttattctaaatcggtagcatcaccattataaatacaattatgt

SEQ ID NO: 521270 - DNA, 120 bp, Artificial Sequence
  ENSG00000165323_122 (sequence is synthesized)
taagaaaagaggaaagtagactagttattgtgtataaattataatagtgtgtgtgtgtctgggcctatgtacaaatatgtgcttgcactcagtaaggctgctcttgaggaaagctaatgt

SEQ ID NO: 521271 - DNA, 120 bp, Artificial Sequence
  ENSG00000165323_123 (sequence is synthesized)
gaaggttttgggaaatggaccatgttgaaaattctgccggcgagcatggcatacctttcaatttctctgatctctatggtgttagagaaacatcaaatgccatattttactctggttcag

SEQ ID NO: 521272 - DNA, 120 bp, Artificial Sequence
  ENSG00000165323_124 (sequence is synthesized)
gagaaacatcaaatgccatattttactctggttcagttaactttattttggtactgccaataaagcaaaattgtgcttttttttttttttctcaagacagagtcttgctctgtcacccag

SEQ ID NO: 521273 - DNA, 120 bp, Artificial Sequence
  ENSG00000165323_125 (sequence is synthesized)
agtattttgttataattttccagaacttacctctgttttaaaagtgtgtaatgtttgattacaccctgggattcccttctcatctgtgggctttggccatgatttccaaaattaacagga

SEQ ID NO: 521274 - DNA, 120 bp, Artificial Sequence
  ENSG00000165323_126 (sequence is synthesized)
gaatcattccactggaaatataacaatccagtcctcaaaactgaaagttgacaggttgagggactttccttttttgcttcaatcagattacggccgcctgtgcagtggccatggtaaata

SEQ ID NO: 521275 - DNA, 120 bp, Artificial Sequence
  ENSG00000165323_127 (sequence is synthesized)
tatgcatatttgcactatctgcttaatgagcaaatctgtgtccacagtttctgatgacatatggcattggtgtgtaaattgtactgtccctagtctgtgcattattcactcagacatatt

SEQ ID NO: 521276 - DNA, 120 bp, Artificial Sequence
  ENSG00000165323_128 (sequence is synthesized)
tttagttatttcaattgcgtttaatccacttcttttttatgagtcagtgtttctgaatgtttatgcaaaaaaaaaaatcctttttcattcccaaactttctaagtaagtggatacactac

SEQ ID NO: 521277 - DNA, 120 bp, Artificial Sequence
  ENSG00000165323_129 (sequence is synthesized)
acttcacaagttttccagcctttctcttcctgtctcttggtcagacctactcatggaggtattatccacactgtgatcttgaaataaatgaatttcactaaggctgctttcgagaacaaa

SEQ ID NO: 521278 - DNA, 120 bp, Artificial Sequence
  ENSG00000165323_130 (sequence is synthesized)
gtctttggtatttttcttatgtaagaagcacatttgcaagaatcatggaaaaaaatgacaaactaatggcctagaatagagtgactgctacactttaagtaatgcaatgacataaaaacc

SEQ ID NO: 521279 - DNA, 120 bp, Artificial Sequence
  ENSG00000165323_131 (sequence is synthesized)
atcaaagtaaaaccaacatgtcatttcctgcccccaggaaatattagaatgagattaatgctgatgagtccctactgcttacacagcatctctttgagggagaatgcctgactgacacag

SEQ ID NO: 521280 - DNA, 120 bp, Artificial Sequence
  ENSG00000165323_132 (sequence is synthesized)
taatgaaagaataaatagatcctaatgcagtcatgaagccactgaagaaaattgtgcccaccctttgctgtgacctatataaaatatctctttctttgggatatcatcccctgattttct

SEQ ID NO: 521281 - DNA, 120 bp, Artificial Sequence
  ENSG00000165323_133 (sequence is synthesized)
gcagaatagctctgcagctaaatatataccaggcaagcatgtattgtgttttgatttattatctttaaacacatgatatctcttcactttttggaaagttagatttctctgtagattatg

SEQ ID NO: 521282 - DNA, 120 bp, Artificial Sequence
  ENSG00000165323_134 (sequence is synthesized)
aaatgctttgcagtcaggccaagatgctactaggtggggatgatcactaattcaaaaaagctggaagaatcctatttgctagtccaaactccttattttatcaaagaggaaacataccca

SEQ ID NO: 521283 - DNA, 120 bp, Artificial Sequence
  ENSG00000165323_135 (sequence is synthesized)
gagtgggaaagagacttgcccaagcccacagaggaagttaattcgcttaacaaggagtagaacccatccatctagccaatattctttttacatcatattgttcacccctacactgccttg

SEQ ID NO: 521284 - DNA, 120 bp, Artificial Sequence
  ENSG00000165323_136 (sequence is synthesized)
agcatgggagtcacctggttctgatggaccctctgacttccaccattccttctttggaatatgctataaaagaaaattcatggagaatatttttctgaaagcctcatgatcttatgtttc

SEQ ID NO: 521285 - DNA, 120 bp, Artificial Sequence
  ENSG00000165323_137 (sequence is synthesized)
cttgcagtccccctagggagaggggttatagaattcatacatttctgtagacattcatcgaaatgctgcttttgccaaatgaatgtttgtataatagggatgaaatgataattacagagt

SEQ ID NO: 521286 - DNA, 120 bp, Artificial Sequence
  ENSG00000165323_138 (sequence is synthesized)
tcagctcagaccagtcatcagttgtagtgaaactttgattatactgttacctactggttgcatttttggttttggttttgcatttttttcttcccacaaacactggctactctttgtcct

SEQ ID NO: 521287 - DNA, 120 bp, Artificial Sequence
  ENSG00000165323_139 (sequence is synthesized)
accccctccaccatgatgaaccatgtggaaactatttaaatcaattaatgtctttctcatttttcgaacatgtatgtgccacctcctggaagccatttcccataatctgttgtaggcact

SEQ ID NO: 521288 - DNA, 120 bp, Artificial Sequence
  ENSG00000165323_140 (sequence is synthesized)
ttactagtattgcacacattctggttaggttgagaatagctagactcttggtgctcgtcatatagtaagcaagaacttgggagtaataaaaggtgaataaaatgcatgcttcatttattc

SEQ ID NO: 521289 - DNA, 120 bp, Artificial Sequence
  ENSG00000165323_141 (sequence is synthesized)
cctttcctctatgaatattttgctgctgcattctagtctatgccagctttccatgtacccttggcctgcctattcatgaaatgccatataaaagacttaggaacatgagtaggtggtcca

SEQ ID NO: 521290 - DNA, 120 bp, Artificial Sequence
  ENSG00000165323_142 (sequence is synthesized)
tgctttgaggttcatccaattagggaataaatgtgaaaggctggaaagggaactagtttctgggatttgcctggaacttcccttggacattactagcacattctggaaaaaaagcaagtt

SEQ ID NO: 521291 - DNA, 120 bp, Artificial Sequence
  ENSG00000165323_143 (sequence is synthesized)
gaacatatctaccatcagtcctctcctacttacttcccaccccaccctatccactacccccactgatgctatgtttgcatcatcaaagtcaggggaattgagaaaagagattatcaaaat

SEQ ID NO: 521292 - DNA, 120 bp, Artificial Sequence
  ENSG00000165323_144 (sequence is synthesized)
aaattattaaaatccagaaaacagttttatgtgaagtaattcaggaagatctagtgttcattttgcatggattgtccagataattggctcttcactccgctgccttcccagtgcacaggt

SEQ ID NO: 521293 - DNA, 120 bp, Artificial Sequence
  ENSG00000165323_145 (sequence is synthesized)
attgctaaagtggttaggctttaatgttttatgtttttagtttcaaactatgggaaatggagatttgaagaggcatttattccttgtcatcattttgtgtgctctgtgagaaggtggtta

SEQ ID NO: 521294 - DNA, 120 bp, Artificial Sequence
  ENSG00000165323_146 (sequence is synthesized)
tatgtttttgctggtttgtgtcccacagtgttcaactgcacattattctgatgaaaatccacaatgtctttgagcttctggttgtgtaatgctggggtttaaagtcaccatttgtgggtt

SEQ ID NO: 521295 - DNA, 120 bp, Artificial Sequence
  ENSG00000165323_147 (sequence is synthesized)
tggcatcaattaatatttagccagctggctaagagataggaaaagaatatgatatttctttccttatgtaataatgaaaagcaataattacaagtaggtaataatacacaaaggccataa

SEQ ID NO: 521296 - DNA, 120 bp, Artificial Sequence
  ENSG00000165323_148 (sequence is synthesized)
ttagtctcttctagtgtttagaatgcacttgagaatcgtagagtcatttggagcgtgtttggaccaattagtatgtactgtagtacccttctggcaaacaaataactgaattgctactat

SEQ ID NO: 521297 - DNA, 120 bp, Artificial Sequence
  ENSG00000165323_149 (sequence is synthesized)
ttaacaatcttatgagcccacactactgcattttgggagtggcaaatgtgtttggaaatggaagcagttctttttaagcactgtatcagagagattgtcttgtacgtttgcctgttgcaa

SEQ ID NO: 521298 - DNA, 120 bp, Artificial Sequence
  ENSG00000165323_150 (sequence is synthesized)
acaggctggtttgtaaaagatgtatgttttggtgtttgaaatgtttataaaattgtatataaatggtttcaattttccaggcttttgtagatactatatttgatgcctatcaggatgctt

SEQ ID NO: 521299 - DNA, 120 bp, Artificial Sequence
  ENSG00000165323_151 (sequence is synthesized)
taatttggggggtcgaatataattgtaagtcatccacgctgttggtctgcaaacttttgaggtaactacacacacacacacacacacaaggattttagatttgaaaatgatgttttttac

SEQ ID NO: 521300 - DNA, 120 bp, Artificial Sequence
  ENSG00000165323_152 (sequence is synthesized)
tcatttcaaaatgtactgtaacctttctttggttcttactgttttcatttaactttctctgttttcaagaaaaattgtctttattgacatttgtaaaaaagaatgtgttttgcccagtta

SEQ ID NO: 521301 - DNA, 120 bp, Artificial Sequence
  ENSG00000165323_153 (sequence is synthesized)
ttaagtattttatttttatgcaatttcagaatcacaatgaggtatgccatttcttcatatacatgcacattcacctcaacttgcacacacatcacacaccaaaccttatgcaaaggggaa

SEQ ID NO: 521302 - DNA, 120 bp, Artificial Sequence
  ENSG00000165323_154 (sequence is synthesized)
agctaacacttagagtggattttgtcccttaaggaaatggattgttcctgcatatattgctggtggcagtattcagtcttgtgttctttttctaaaaaaaaagaaaagaaaagaaaaaaa

SEQ ID NO: 521303 - DNA, 89 bp, Artificial Sequence
  ENSG00000165323_155 (sequence is synthesized)
aaacaaaagcaaacaaaaaaaaagacagcccacaacagtgtacaggtttgtaactgccaaaatttgatggttaaaacaagttttcaagt

SEQ ID NO: 521304 - DNA, 120 bp, Artificial Sequence
  ENSG00000165323_156 (sequence is synthesized)
tgtggagctaaattattttctctaagcaaatgaaagtgcctcgagaagtgaactagctgagaggggtgggtgggactggaaataggcacaaggtaaccagtgtaatttctgctttctctt

SEQ ID NO: 521305 - DNA, 120 bp, Artificial Sequence
  ENSG00000165323_157 (sequence is synthesized)
cgacaatgcctccatagtgactgtcattcagcttgtcaacaatgtagttgacactatagagaatgaagtgtctgtcatggaccaaggacagaactacaaccgagcctatcactgggacac

SEQ ID NO: 521306 - DNA, 120 bp, Artificial Sequence
  ENSG00000165325_0 (sequence is synthesized)
atacgcggtcctgcgccctcgcctcagacctctcgggcgagcgcggcgcagcgcagattaaaaatcaagaaatataaaccagatgtagcagtttcttgacatggagaaccaagcccataa

SEQ ID NO: 521307 - DNA, 120 bp, Artificial Sequence
  ENSG00000165325_1 (sequence is synthesized)
tacgatgggaacttctccttgtgaggctgagcttcaggaattaatggaacaaattgacatcatggtaagcaacaagaaaatggattgggaaagaaagatgcgggctttggagacacgatt

SEQ ID NO: 521308 - DNA, 120 bp, Artificial Sequence
  ENSG00000165325_2 (sequence is synthesized)
agatcttcgggatcaagaattggcaaatgcacaaacttgtttggatcagaaaggtcaagaggtagggttacttcgacagaaattggacagtctggaaaaatgtaatttagcaatgactca

SEQ ID NO: 521309 - DNA, 120 bp, Artificial Sequence
  ENSG00000165325_3 (sequence is synthesized)
gaattatgaaggacaactacaaagcctaaaggctcaattttccaaactaacaaataactttgaaaaactgagattacatcagatgaaacaaaacaaagttccacgaaaagaattaccaca

SEQ ID NO: 521310 - DNA, 120 bp, Artificial Sequence
  ENSG00000165325_4 (sequence is synthesized)
ccttaaagaagaaataccctttgaactgagcaatttgaaccagaaattagaggaatttagagcaaagtcaagagaatgggacaagcaagagatattatatcagactcatctgatttcttt

SEQ ID NO: 521311 - DNA, 120 bp, Artificial Sequence
  ENSG00000165325_5 (sequence is synthesized)
agatgctcaacaaaaattattatctgagaagtgtaatcagtttcagaaacaggcacaaagttaccaaactcaactaaatggtaaaaaacagtgcttagaagacagcagctctgaaattcc

SEQ ID NO: 521312 - DNA, 120 bp, Artificial Sequence
  ENSG00000165325_6 (sequence is synthesized)
tcgtttgatatgtgacccagatcccaattgtgaaatcaatgaaagagatgagttcattattgaaaaactgaaatcagctgtaaatgagatagcactaagcaggaataaattacaagatga

SEQ ID NO: 521313 - DNA, 120 bp, Artificial Sequence
  ENSG00000165325_7 (sequence is synthesized)
aaatcagaagctcttgcaagaactgaaaatgtaccaaagacagtgccaggccatggaagcaggtctctcagaggtaaaaagtgagttacagtcacgtgatgatctcttgagaattataga

SEQ ID NO: 521314 - DNA, 120 bp, Artificial Sequence
  ENSG00000165325_8 (sequence is synthesized)
aatggaacgattgcaattacacagagaattattaaaaataggagagtgccaaaatgctcaaggaaataaaacaagacttgaatcatcttatttgccttctattaaagaaccagaaaggaa

SEQ ID NO: 521315 - DNA, 120 bp, Artificial Sequence
  ENSG00000165325_9 (sequence is synthesized)
aataaaagagctgttttcagtgatgcaagatcaaccaaatcatgaaaaagaattgaacaagataagaagccaactccaacaggtggaagagtaccataactctgagcaggaaagaatgag

SEQ ID NO: 521316 - DNA, 120 bp, Artificial Sequence
  ENSG00000165325_10 (sequence is synthesized)
gaatgaaatctctgacctaacagaagagcttcatcagaaggagatcactatagcaactgtcacaaagaaagctgcccttctggaaaaacagttaaaaatggaattagaaataaaagaaaa

SEQ ID NO: 521317 - DNA, 120 bp, Artificial Sequence
  ENSG00000165325_11 (sequence is synthesized)
agatatgaaatataaagctgtcagaactgaaaacacacatctaaaaggaatgatgggagatttagaccccggagaatacatgagtatggacttcactaacagggaacagtcaaggcatac

SEQ ID NO: 521318 - DNA, 120 bp, Artificial Sequence
  ENSG00000165325_12 (sequence is synthesized)
atctattaataaactgcaatatgagaatgaaaggctccgaaatgatcttgcaaaacttcatgtcaatggaaaatcaacctggactaatcaaaacacctatgaagaaacaggaagatatgc

SEQ ID NO: 521319 - DNA, 120 bp, Artificial Sequence
  ENSG00000165325_13 (sequence is synthesized)
ctatcaaagccaaataaaagtggaacaaaatgaagagagacttagtcatgactgtgagccaaacagaagtacaatgcctcccttgccaccttcgacatttcaagccaaagaaatgacaag

SEQ ID NO: 521320 - DNA, 120 bp, Artificial Sequence
  ENSG00000165325_14 (sequence is synthesized)
tcctttggttagtgatgatgatgtattcccactgtctcccccagatatgtccttcccagcatctttggctgcacagcatttccttctggaagaagagaaacgagcaaaagaacttgaaaa

SEQ ID NO: 521321 - DNA, 120 bp, Artificial Sequence
  ENSG00000165325_15 (sequence is synthesized)
acttctaaatacacatattgatgaactgcaaagacacacagaatttactcttaataaatactccaagctaaaacaaaatagacacatatgagcttttaaacttttttatttgcttccccc

SEQ ID NO: 521322 - DNA, 120 bp, Artificial Sequence
  ENSG00000165325_16 (sequence is synthesized)
ccccacccccgccaagaaaaaaagctctggcaaaatatttacaaagctgattaatgaaaccaagaaattctgttctgtttccttgagtaaataatttccgtaaggcagctagaaaatagt

SEQ ID NO: 521323 - DNA, 120 bp, Artificial Sequence
  ENSG00000165325_17 (sequence is synthesized)
aagtattttgttctataaagctgttcacatttctgcattaacatgctaaattgtcctgctgtagagttactataaaataaacatgactattccaaaagagatttttttccagtctaagga

SEQ ID NO: 521324 - DNA, 120 bp, Artificial Sequence
  ENSG00000165325_18 (sequence is synthesized)
atattttggaatcaaatatgcagttttttttccccacttgaatcatgtatactgaaaacccatttcctcagcaactacacaaaataagagaaagggaagtgctatattccagatacaaat

SEQ ID NO: 521325 - DNA, 120 bp, Artificial Sequence
  ENSG00000165325_19 (sequence is synthesized)
gactcaaaggcagctcagttgtactggttttgaaaactcaaggattttataaataaaaatatttaagtatttccagttatgtaaacactctaaaattctataattttttggaaaaaaaaa

SEQ ID NO: 521326 - DNA, 120 bp, Artificial Sequence
  ENSG00000165325_20 (sequence is synthesized)
gctatagctttattgtttttacattcacctttataatgtctgtctgtttcaacacaatgaaggtatatggaatgtgcaatttacaaacctaaaatatatgtgccaaaaattaacgctttt

SEQ ID NO: 521327 - DNA, 120 bp, Artificial Sequence
  ENSG00000165325_21 (sequence is synthesized)
ttgttagtactaattacttcatggacacaaacaagataaaggaaatataaagcattactgttgctacattttcctttgtaatcacttctgtttttaatacaataaaggaatgtaaaattc

SEQ ID NO: 521328 - DNA, 120 bp, Artificial Sequence
  ENSG00000165325_22 (sequence is synthesized)
ctcctcttagaagctattctcttctccctgaagggaggcaacactgtccgttcgcctgactggcagtgttttaaggacccatcgcgcttgacgggaaagtcagattaaaaatcaagaaat

SEQ ID NO: 521329 - DNA, 120 bp, Artificial Sequence
  ENSG00000165325_23 (sequence is synthesized)
tcctttggttagtgatgatgatgtattcccactggtgagttgctggttgtgggctttttttttctttaatgggttattgctttactcttacactgatgtcaataaactgacgtacatagt

SEQ ID NO: 521330 - DNA, 120 bp, Artificial Sequence
  ENSG00000165325_24 (sequence is synthesized)
ggaaaatggggagtgactgttaatgagtatcaggtttcctttggggatgatgaaaatgctctggaataaagtagtggtgatgttcaactttgtgactaaattgaaaactgctggattgta

SEQ ID NO: 521331 - DNA, 120 bp, Artificial Sequence
  ENSG00000165325_25 (sequence is synthesized)
agaagctattctcttctccctgaagggaggcaacactgtccgttcgcctgactggcagtgttttaaggacccatcgcgcttgacgggaaagtcaggtacaagctgatgctgttatcacca

SEQ ID NO: 521332 - DNA, 120 bp, Artificial Sequence
  ENSG00000165325_26 (sequence is synthesized)
caggaaccaggggctgagcggtgaaatccagctcctcccagctggaagacgctagggtgaacggagataaaagcagttctctttacccgaagtttatttctttttcatgccacttcaaat

SEQ ID NO: 521333 - DNA, 120 bp, Artificial Sequence
  ENSG00000165325_27 (sequence is synthesized)
atcctactgtggggaaagagttgttgagatgcaaggacactgtgaactcaccagtgaagagctgcaaagcagatatctctctgttaatgctagcaactgaaaaatgaaatcatctttttt

SEQ ID NO: 521334 - DNA, 120 bp, Artificial Sequence
  ENSG00000165325_28 (sequence is synthesized)
tttaaactgttttcagtataaacaaatgtcttgtattttaattataagcttggtcatgtctttccctgttttatatgcattgattttgtctcttactagattgttgtcttgctatatttt

SEQ ID NO: 521335 - DNA, 120 bp, Artificial Sequence
  ENSG00000165325_29 (sequence is synthesized)
ctgtgcctctgttagcacagtagtagacaaatggctttctatttctcaagagacttgttgatgaattaaataataattagctcacaaaaaataattctgtgagcaacaacaaaaaacaat

SEQ ID NO: 521336 - DNA, 120 bp, Artificial Sequence
  ENSG00000165325_30 (sequence is synthesized)
tattttttgtggttattactatctaataaagatgttctcaattctgtgataatttaaaatgtggaagtttgctgttatgaaatagataattgaaataataaaactggtctttattacctt

SEQ ID NO: 521337 - DNA, 120 bp, Artificial Sequence
  ENSG00000165325_31 (sequence is synthesized)
tgaaaaagaactctgtagtgagagcacttaccaatctgtcttaacaacagttgctatagtcctagctgttatactaagcattttgtttgaaactcaataaaccctcctggacccaagata

SEQ ID NO: 521338 - DNA, 120 bp, Artificial Sequence
  ENSG00000165338_0 (sequence is synthesized)
cggcagcagcagcgccagccccagcaacactgaggccgccgccgccgcctggcgctcccgccgcccggcccgacatgagtgaggcggttcgggtaccctcgcccgccactccgctggtgg

SEQ ID NO: 521339 - DNA, 120 bp, Artificial Sequence
  ENSG00000165338_1 (sequence is synthesized)
gcccgccactccgctggtggtggcggcgcccgcgcctgaggagaggaaagggaaggagtcagagcgcgagaagctgccgcccatcgtatcggcgggcgccggcgcgaccgcgggtttgga

SEQ ID NO: 521340 - DNA, 120 bp, Artificial Sequence
  ENSG00000165338_2 (sequence is synthesized)
cagaggagccaaaggccaaatttccactttcagcagttttatttcagctgttagcccgaagaaagaagctgctgaaaacagaagttcacctgcacatcttgttttccctaacatcaagaa

SEQ ID NO: 521341 - DNA, 120 bp, Artificial Sequence
  ENSG00000165338_3 (sequence is synthesized)
tgtgagagaaccaccaccaatttgccttgatgttagacaaaaacagcgtacatctatggatgcatcatcatccgaaatgaaggccccagtccttccagaacctattcttcctatccagcc

SEQ ID NO: 521342 - DNA, 120 bp, Artificial Sequence
  ENSG00000165338_4 (sequence is synthesized)
caaaactgtgaaagactttcaggaagatgtagaaaaagttaagtcatcaggagattggaaagcagtacatgatttttatctaacaacgtttgattctttcccagaattaaatgctgcatt

SEQ ID NO: 521343 - DNA, 120 bp, Artificial Sequence
  ENSG00000165338_5 (sequence is synthesized)
taagaaagatgccactgcctcatttaacaccattgaagactctgggattaatgctaaatttgtgaatgctgtgtatgataccttacttaatactcctcaagacgttcagaagacagtatt

SEQ ID NO: 521344 - DNA, 120 bp, Artificial Sequence
  ENSG00000165338_6 (sequence is synthesized)
aaagggaatcattaacagcctgttacgagaatggaaaggtccacgaacaaaagatgatcttagagcatattttatacttttacagaatcctcagtttaataacacatctacgtatgtcat

SEQ ID NO: 521345 - DNA, 120 bp, Artificial Sequence
  ENSG00000165338_7 (sequence is synthesized)
ctatgctcacttgctacgacagatagctaccttagtggaagctgaccatcatttcctagttcactggtttaaaaaattgtcccagaagaggttcaaacaattggtagagagattgctgca

SEQ ID NO: 521346 - DNA, 120 bp, Artificial Sequence
  ENSG00000165338_8 (sequence is synthesized)
atttatttctttacgcctgtttcctgcaaagcctgaagaatttccacctataacaaagtgttcctggtggattccatcagccgctaaagtgttggctttacttaatactgcaaacaattt

SEQ ID NO: 521347 - DNA, 120 bp, Artificial Sequence
  ENSG00000165338_9 (sequence is synthesized)
agttcaccctccccttattccttatactgatttctataattctacattggatcacattgatctcatggaagaatatcatacttggcaaaactttggaaactctcacaggttttccttctg

SEQ ID NO: 521348 - DNA, 120 bp, Artificial Sequence
  ENSG00000165338_10 (sequence is synthesized)
tcagtacccattcgttatttctgtagctgcaaaaaaaatcattattcagagagactcagagcaacagatgataaacatcgcaaggcaaagtctggtggataaagtatctcgaagacagag

SEQ ID NO: 521349 - DNA, 120 bp, Artificial Sequence
  ENSG00000165338_11 (sequence is synthesized)
acctgatatgaatatattatttctaaatatgaaagtaagacggacacatctggttagcgattcacttgatgagctaacccggaaaagagccgatttgaaaaagaagttaaaagttacatt

SEQ ID NO: 521350 - DNA, 120 bp, Artificial Sequence
  ENSG00000165338_12 (sequence is synthesized)
tgtaggggaagctggtttggatatgggtggtttgactaaagaatggttccttcttctaattcgccaaatttttcatccagattatggcatgtttacatatcacaaggattcacactgcca

SEQ ID NO: 521351 - DNA, 120 bp, Artificial Sequence
  ENSG00000165338_13 (sequence is synthesized)
ttggtttagcagctttaaatgtgataactattctgaattccgattggttggaattcttatgggactagctgtttataacagcatcaccttggatattcgtttccctccctgctgttacaa

SEQ ID NO: 521352 - DNA, 120 bp, Artificial Sequence
  ENSG00000165338_14 (sequence is synthesized)
gaaattattgagccctcccatcattcctagtgatcaaaatataccagtaggcatctgcaatgttaccgtggacgacttatgtcaaattatgcctgagttggcccatggattaagtgaact

SEQ ID NO: 521353 - DNA, 120 bp, Artificial Sequence
  ENSG00000165338_15 (sequence is synthesized)
cttatcacatgaaggcaatgttgaagaagatttctattcaacatttcaggtttttcaagaagaatttggaataatcaagtcctataatttaaagcccggtggtgataaaatttcagttac

SEQ ID NO: 521354 - DNA, 120 bp, Artificial Sequence
  ENSG00000165338_16 (sequence is synthesized)
caatcaaaatagaaaagaatatgtacagctttatactgacttccttctgaacaaatccatctataagcagtttgctgcattttattatggatttcatagtgtgtgtgcttcaaatgccct

SEQ ID NO: 521355 - DNA, 120 bp, Artificial Sequence
  ENSG00000165338_17 (sequence is synthesized)
aatgctgcttcgtccagaagaggttgaaattttggtctgtggaagtcctgacctggatatgcatgctctgcagagaagtactcagtatgatggctatgcaaaaacggacttaactataaa

SEQ ID NO: 521356 - DNA, 120 bp, Artificial Sequence
  ENSG00000165338_18 (sequence is synthesized)
atacttttgggatgttgtgcttggatttcctcttgatcttcaaaagaagttgctacattttactacagggagtgacagagtacctgtaggagggatggctgatttgaactttaaaatctc

SEQ ID NO: 521357 - DNA, 120 bp, Artificial Sequence
  ENSG00000165338_19 (sequence is synthesized)
aaagaatgaaacttctactaactgcttacctgtggcccatacctgcttcaatcaactttgccttcccccctacaagagcaaaaaggatctgaaacagaaattgatcattggaatttcaaa

SEQ ID NO: 521358 - DNA, 120 bp, Artificial Sequence
  ENSG00000165338_20 (sequence is synthesized)
cagaaggttttggacttgagtaacctagaagacttgaaatataatcttttatatgtagcattcacttccctcttactgtgcctttagccttttcatgtttctgtctcaaaacactttgac

SEQ ID NO: 521359 - DNA, 120 bp, Artificial Sequence
  ENSG00000165338_21 (sequence is synthesized)
aaagctcaccaactttaaaatattaagtttttaaaaaatcaaatatgaagtatgttcagcaaaggcataattttctaaaaacacacacagaaatcgcttgagtgaggaaaagtccacatg

SEQ ID NO: 521360 - DNA, 120 bp, Artificial Sequence
  ENSG00000165338_22 (sequence is synthesized)
gcagagacaggtatggtccagttcctcttttatatagcactttatcattctccacaagtagtttgtcacaggcattccactgggaaagcaaagtacagtgaagaatgaatttatggtata

SEQ ID NO: 521361 - DNA, 120 bp, Artificial Sequence
  ENSG00000165338_23 (sequence is synthesized)
gttgaacccagtggcagattgtacactgctagcactgctagcacacagtagcaaagcaaacagctacattatctttaacataaggcatgtagccatattttcatatagtggtatacaaca

SEQ ID NO: 521362 - DNA, 120 bp, Artificial Sequence
  ENSG00000165338_24 (sequence is synthesized)
cagtatcattgcaaatgcagtttacagggatttttgatatactggcttgggacctataagattcttctcagcagttgctgaaaagcatgtaaataactacataatagcctgagaataatg

SEQ ID NO: 521363 - DNA, 120 bp, Artificial Sequence
  ENSG00000165338_25 (sequence is synthesized)
ggattttgatagtgccatttattgttaaagatttatttttacaaagtaaattcagggttttagatgtgtacacagcttttacaaatcaataaagatgattgtacaagagtattttcagac

SEQ ID NO: 521364 - DNA, 120 bp, Artificial Sequence
  ENSG00000165338_26 (sequence is synthesized)
taattggattcaaggttatattcttttaagtgttgttagtctgcatgcacattggcagtaaactagttacttgtgtactctgtaatatttgtataatgatcatttcttcttaaggctcaa

SEQ ID NO: 521365 - DNA, 120 bp, Artificial Sequence
  ENSG00000165338_27 (sequence is synthesized)
gatattagaaaagaaatcagacctaaataatcattgatgaagtatgtcagttacaagcacaaaagaatataactgcttttataaatcttttgaatcatgtacaagacttatatctacatt

SEQ ID NO: 521366 - DNA, 120 bp, Artificial Sequence
  ENSG00000165338_28 (sequence is synthesized)
ttttgatcaccagttgtaccaaaacactaatttttgaaaaagataggttaaagtatttgacaaaagtgaatacaataataacacttgtgtcaaaatgatatagcttagtataaaaataaa

SEQ ID NO: 521367 - DNA, 120 bp, Artificial Sequence
  ENSG00000165338_29 (sequence is synthesized)
attcaacgttttggccaaaatgtttgtttttcactggattctgaatataataaattcaaagtaccctttttttagagtttctaataaagtagtatgtaaaaagaaactgcattttaagtc

SEQ ID NO: 521368 - DNA, 120 bp, Artificial Sequence
  ENSG00000165338_30 (sequence is synthesized)
agacagtaaatgttttttttaatttacagcaaatgaagcagttttattagcatgttacaaatattgccaaaccaagacttctctaccatactttaacagctttccttcagaaaactctga

SEQ ID NO: 521369 - DNA, 120 bp, Artificial Sequence
  ENSG00000165338_31 (sequence is synthesized)
agttatatttgcaataataatgaaaccagcatttagtaccagcatatggttcatatgcaaataatactttccccaaaatctttctgggctaggctattttcttgctatgcttcctgcacc

SEQ ID NO: 521370 - DNA, 120 bp, Artificial Sequence
  ENSG00000165338_32 (sequence is synthesized)
caaccagcagaattcttccagggtggaggaactaatcagcttgttctccaacagttctgaagccaacccacaaatctttgaggaaaaggggtcactttgtttactattctcttggagatg

SEQ ID NO: 521371 - DNA, 120 bp, Artificial Sequence
  ENSG00000165338_33 (sequence is synthesized)
gaagtgattctgctcttccatttgggtatattatttcaagggtatttcttcttaaaaatcttggaaagcctaagagagttaaaggcatcctggttttgtttcattttgctctgttttaaa

SEQ ID NO: 521372 - DNA, 120 bp, Artificial Sequence
  ENSG00000165338_34 (sequence is synthesized)
tccatatgcaaataaaactgcttctctcttacactgcttgaactagaaaatcagctttttaatgtaggttaccacttataagcacaaaagaaacatgtataagaaaccagatttaagtgt

SEQ ID NO: 521373 - DNA, 120 bp, Artificial Sequence
  ENSG00000165338_35 (sequence is synthesized)
tttaaataaaatgtaaacagtttttatttggtagagatgactcatggaaaaattgtgttggcttggtctgcatgtttaatgatgtgcttgtatatcgattagctgtgtcacttttaaata

SEQ ID NO: 521374 - DNA, 120 bp, Artificial Sequence
  ENSG00000165338_36 (sequence is synthesized)
agaagtccacacaagcaagccaaatttttagatgacgaagtccataaataactagagaatttttgttatctgttgttaagttgaaatgtataatcatttatcactaaattgcacattgcc

SEQ ID NO: 521375 - DNA, 120 bp, Artificial Sequence
  ENSG00000165338_37 (sequence is synthesized)
tttatttatttgtgctctgtttttggtttacagtgtaataatacctcatttaaaaaataaaaaccactactgttacattttattaatttaaaaagctagaaaattcatgtagttactttt

SEQ ID NO: 521376 - DNA, 120 bp, Artificial Sequence
  ENSG00000165338_38 (sequence is synthesized)
tttacatatataatctgttaatgaattattgatttttgtatctgccacagtaaattaaagcattacacagtatttatcagtattttttaaacatcctgtccttttttaaaatctttgctt

SEQ ID NO: 521377 - DNA, 120 bp, Artificial Sequence
  ENSG00000165338_39 (sequence is synthesized)
agtcagtcatatttttgtctgtatgattagaagtttttacgtccttccttttttgtacaaatctgtattgtattaatttctggatgcaatttttcaaatattaaaattatacagtcagtc

SEQ ID NO: 521378 - DNA, 120 bp, Artificial Sequence
  ENSG00000165338_40 (sequence is synthesized)
aaggcagaacatcactttgacctcagctggaaatgtgcatgtcaggagactaacatctttcacatgtccccaaatgaccatgaaaacacaagtattgatttggggattaacaattaaatt

SEQ ID NO: 521379 - DNA, 120 bp, Artificial Sequence
  ENSG00000165338_41 (sequence is synthesized)
ttaccaagtaggcaaatttggaaatatagaatctgtgaataatgaagactgaatattgaaagtctttaaaatgtttgttactaactttatagtaattttggtgtttatttctcatttaac

SEQ ID NO: 521380 - DNA, 120 bp, Artificial Sequence
  ENSG00000165338_42 (sequence is synthesized)
gaagacagtattcaaggtaagattttgtatcttttcaaatgtttggcaatttaagaaatagaatttgggggaatagtctaaaattttgtggcttaggatgtagtttaatatctaacagat

SEQ ID NO: 521381 - DNA, 120 bp, Artificial Sequence
  ENSG00000165338_43 (sequence is synthesized)
ccacctaaatgaaatactattcaaaagaatgactagagtttaagtttatatgaagtttacacatacgtttacatataaatgtataaatatagttcagatagccttgaaatatcatattta

SEQ ID NO: 521382 - DNA, 120 bp, Artificial Sequence
  ENSG00000165338_44 (sequence is synthesized)
agtattttctttttctgctacattttgaatttatgtacatgttaatttggttttggtttggttaatagcatcttttcaagaagggagaggttctatcttaatatgcagtctcttatctct

SEQ ID NO: 521383 - DNA, 120 bp, Artificial Sequence
  ENSG00000165338_45 (sequence is synthesized)
tactattctatgcacaggggtcagcaaaactttttctgtaaagaactagatggtgaatattttcaacactataggttacacaggttctattttgctattttagcacaaaagtagccttag

SEQ ID NO: 521384 - DNA, 120 bp, Artificial Sequence
  ENSG00000165338_46 (sequence is synthesized)
acaggatgtaaatgaatagatatgtctgtgtcccaaatgactttatttacaaaaacaggttgtaggccatatttgtcttaggcccatggtttgcagatgcatgatctaatatattgatca

SEQ ID NO: 521385 - DNA, 120 bp, Artificial Sequence
  ENSG00000165338_47 (sequence is synthesized)
cacacagacacacacatacattcatttctcatttcttttgtaagaaaaagtggttgtccattaggtgcaatataaaaagagtagatgttacagagaaagggccttaccacagcttattta

SEQ ID NO: 521386 - DNA, 120 bp, Artificial Sequence
  ENSG00000165338_48 (sequence is synthesized)
ttataataattaatagatttgtaaaacagtcaccaaattatttaatacactgcactttatatccacacttctagtttggattaaactagcaagactattccaaacataatttatcctcag

SEQ ID NO: 521387 - DNA, 120 bp, Artificial Sequence
  ENSG00000165338_49 (sequence is synthesized)
gtcatgagatgttcaggagattgcatttaattgtagaggaatctgagtaaagagatacagtgtggatataagtaacctcaaaaccccagattagtttgtaaattggttaaactttccagg

SEQ ID NO: 521388 - DNA, 120 bp, Artificial Sequence
  ENSG00000165338_50 (sequence is synthesized)
gaccctctttatcagaattggcctgaaacatagaatgggcttctggacacatctcatttcacatctgaacactcagaactgaataagaataagaatttaagttctgggcaccctagtccc

SEQ ID NO: 521389 - DNA, 120 bp, Artificial Sequence
  ENSG00000165338_51 (sequence is synthesized)
agatggatattttcttggcaatgtttactttacaaagatactttttccttccattttaatataattgtaatgtgttgtagatacaaccacaaaacagcgccaagaattattatgcatatt

SEQ ID NO: 521390 - DNA, 120 bp, Artificial Sequence
  ENSG00000165338_52 (sequence is synthesized)
tcactgacaacaacatcttttaatatagagcttcctctaacaactgtgccacaacactggtgtaccaagaatgagttacattagggttttaatcctaggatcctgtcaacccttgggtag

SEQ ID NO: 521391 - DNA, 120 bp, Artificial Sequence
  ENSG00000165338_53 (sequence is synthesized)
ccagcctgaacctagaggggaacaggagccctatggcaagtgatctctggccatgagcagcttcatctgttcatttcagtgtatcattcacaaagtatcatttctcttgtgcataacaag

SEQ ID NO: 521392 - DNA, 120 bp, Artificial Sequence
  ENSG00000165338_54 (sequence is synthesized)
ggaaaggttgagaacccctgtcctaaagtacatagtaaaactaatatatatcttactgagttcattgcattttctttttatttccaattttttgttagcattaatgattcaaaataatta

SEQ ID NO: 521393 - DNA, 120 bp, Artificial Sequence
  ENSG00000165338_55 (sequence is synthesized)
tataccagtactgaagaactctcaacttttattaacaattttgtcccatggtaaaagccatctcactttcagtttacactaaggctatatccattttcctaataatgccttttttctcag

SEQ ID NO: 521394 - DNA, 120 bp, Artificial Sequence
  ENSG00000165338_56 (sequence is synthesized)
tggtcacagttgtaccacctgactatgctcagagggattccagctgtaactgatagattcactgtagtcactttgaatggcaatctaactccagaagtgtcattgctgccatattcattc

SEQ ID NO: 521395 - DNA, 120 bp, Artificial Sequence
  ENSG00000165338_57 (sequence is synthesized)
tttctaaatgcatttatctctgtgtagtttgtggcttttgtgcatagcatagaatgttctagcccaggaggggttattttcataacctttttataatgtgtaattacaaatacataccat

SEQ ID NO: 521396 - DNA, 120 bp, Artificial Sequence
  ENSG00000165338_58 (sequence is synthesized)
taatactaaatgtaacatacatttctgatttatttttattggtcttaaatatattactttactttttacatactgtagttattgttagattttttcatttctggaactcacacatcagaa

SEQ ID NO: 521397 - DNA, 120 bp, Artificial Sequence
  ENSG00000165338_59 (sequence is synthesized)
caacacttctccctcctggttctggtattggccatgttgttcacaggtgatgatatacaatgaaattatttgtatagacaatgtaagtggttagcacacattcagaacctttgatgtagc

SEQ ID NO: 521398 - DNA, 120 bp, Artificial Sequence
  ENSG00000165338_60 (sequence is synthesized)
ttctgcagagaataaaggcattgcacatctagtaatgatacattcttcacatggctgtgagaattaaaagaaattatacacatacaatcattttgtatatggtaaaacacaatccaaaag

SEQ ID NO: 521399 - DNA, 120 bp, Artificial Sequence
  ENSG00000165338_61 (sequence is synthesized)
taatgttttatattgctacaaggggtaccttagattcccttagtataattttgttaaaaatacaccattttgctttttctttttttcacttgttgagcaggttttccttctgtcagtacc

SEQ ID NO: 521400 - DNA, 120 bp, Artificial Sequence
  ENSG00000165338_62 (sequence is synthesized)
cattcgttatttctgtagctgcaaaaaaaatcattattcagagagactcagagcaacagatgataaacatcgcaagggtaagtcagctataaaaacatatttatgctgactataatcagt

SEQ ID NO: 521401 - DNA, 120 bp, Artificial Sequence
  ENSG00000165338_63 (sequence is synthesized)
atagtaaataatttaataaataatttaaatgtcttgtgaattgttctagcataatcaggaatgttaaaagcaaaattcgtgttatactcacccaaaaagtgcttaaaaactatttacaat

SEQ ID NO: 521402 - DNA, 120 bp, Artificial Sequence
  ENSG00000165338_64 (sequence is synthesized)
ttgggagacaagataactctcatctcttctgatcaacttctcattatattataaatatagtaggaagagtaaatgcttctcacagattcaaattactgagagcttgttggacctcgtttt

SEQ ID NO: 521403 - DNA, 120 bp, Artificial Sequence
  ENSG00000165338_65 (sequence is synthesized)
gcagataccataccaccaaccttagataaccagcagagcattgagaactgcggtgaggcagagtgtcattaggcaaaccactcaaactactgaaacattttctaggttttatgaaaatca

SEQ ID NO: 521404 - DNA, 120 bp, Artificial Sequence
  ENSG00000165338_66 (sequence is synthesized)
gaaacaaccgaaaaattagaaaatgtaacaaaaagtgtgtcttggagaactgagaaatatgcccaaagaaggtgaaagatgttttattggttcttaggaaaccaaaatgcatggagaccc

SEQ ID NO: 521405 - DNA, 120 bp, Artificial Sequence
  ENSG00000165338_67 (sequence is synthesized)
aaagaggctggggatagcaagcagactgagtttaggcaaattgtagagcagtatgaagttatctctcagtctgtccttaccacttcctatcccttgtgtttcagctcagcacagtaatgt

SEQ ID NO: 521406 - DNA, 120 bp, Artificial Sequence
  ENSG00000165338_68 (sequence is synthesized)
actttatctaataaatatcagattcagtgaggtttttctgttagagctctaaactatttgtttaagtgcttatgtatttcaaacatctgcttgtgttacatgattgctcacaattttaaa

SEQ ID NO: 521407 - DNA, 120 bp, Artificial Sequence
  ENSG00000165338_69 (sequence is synthesized)
agagggaagcttggctgtggtcttcttaattgaaaaaggaatatagagtaaaaagaaatgatttccatcttgttcaagagtataaaaagaatcctaaagcataaattgtaatacttcaaa

SEQ ID NO: 521408 - DNA, 120 bp, Artificial Sequence
  ENSG00000165338_70 (sequence is synthesized)
atgctataaaaaataagaatgtttattcttcagtaattcagttcccagaaggtgagtatttctttctatcacagagaaggacaaaagatttgagtaactggtgacatcccaaagtcatct

SEQ ID NO: 521409 - DNA, 120 bp, Artificial Sequence
  ENSG00000165338_71 (sequence is synthesized)
tatactgaatatgggaatattagaagaaattttattgcctatgcccatcaagggaattccaaagccacactacccccctgaagaatgagtttaaacaggtatattcagcaccagaattgt

SEQ ID NO: 521410 - DNA, 120 bp, Artificial Sequence
  ENSG00000165338_72 (sequence is synthesized)
tacttgatcttgggtagatattggctcaatgattagctgtatagctactcattctgacattttctgttagttgtactcgtacaatgtcatgtgcctttttagtattttttcaccttggtc

SEQ ID NO: 521411 - DNA, 120 bp, Artificial Sequence
  ENSG00000165338_73 (sequence is synthesized)
tatgatttttttatatttgtaagaaaatctacagtgcttttgtacgtaacagaatgagctagtttgtgttaaactagcaagactaaacagttttttctgtgtcactcacaggatatcaaa

SEQ ID NO: 521412 - DNA, 120 bp, Artificial Sequence
  ENSG00000165338_74 (sequence is synthesized)
tatctttttgtggaatttttcttctactttaaagaaggagaatggcaggtgtagactctgtgacaggctaagttttctacagagcatgcaaacgaatgagtagacacttgacattgagag

SEQ ID NO: 521413 - DNA, 120 bp, Artificial Sequence
  ENSG00000165338_75 (sequence is synthesized)
ctaagtggcattatcagttttttatgggtgtttcccaacattttatctcataaattgccatatcacttggaattaatgactgatgactattttgacacaaggacaatcttacaaatagtc

SEQ ID NO: 521414 - DNA, 120 bp, Artificial Sequence
  ENSG00000165338_76 (sequence is synthesized)
agtgtaagcaagagcttatatggtacaatctaaatatacaaaattggtttcctaacctaaaataagttcctcagtcacagtgtcaagaattgtatcattgttgggttattttttcatttg

SEQ ID NO: 521415 - DNA, 120 bp, Artificial Sequence
  ENSG00000165338_77 (sequence is synthesized)
gagcattttccagtaaatatgaattcctgatgggaggagtagctactaatcttgtttgccattagcatcctagcataaatttgtttattagttatttccaatgtgacagctgcccaagag

SEQ ID NO: 521416 - DNA, 120 bp, Artificial Sequence
  ENSG00000165338_78 (sequence is synthesized)
ctagactgggaacagaagataggaaaaggtaggaaaaaacggtctgtaacacaggacactatgctaggaatgcagacttccttgataagtgaggacacagaaataaaaggctgttaatag

SEQ ID NO: 521417 - DNA, 120 bp, Artificial Sequence
  ENSG00000165338_79 (sequence is synthesized)
catttagcgttgtatataggagaaatggagaaagctccaaattagtgttttattatagtaatcttcaaaattgtaagtagccttaaattgtagatttgtgatactaaaattttatctatt

SEQ ID NO: 521418 - DNA, 120 bp, Artificial Sequence
  ENSG00000165338_80 (sequence is synthesized)
aaagcaaattgctgcatgtatttaaaatgtctgaaatgtttatctttaatctgcacaatagttttcattgttaccaaaaaaagatatagtctaataaagactatttagataaatatataa

SEQ ID NO: 521419 - DNA, 120 bp, Artificial Sequence
  ENSG00000165338_81 (sequence is synthesized)
aaaggaaaggaaattgtctaggtgtcctggtggtggaggtggggggtattttaatttcataattaaaagctctcttcttcggctttcaagtttttactcctatttgtaatgatttgattg

SEQ ID NO: 521420 - DNA, 120 bp, Artificial Sequence
  ENSG00000165338_82 (sequence is synthesized)
attattctgtgtctcttctgtatatcaaaagcagccatacaaatattgtaaaaatcaccttataattaccttagaaactctgatacaattttatagtaaatgtagctggaattctcataa

SEQ ID NO: 521421 - DNA, 120 bp, Artificial Sequence
  ENSG00000165338_83 (sequence is synthesized)
agttagattattttattcttttattttttaattatgaattaagcagcaaatacttttatatccaatccttttttagaaagacttgctaaaatcatgctttacttactcagcaaaaggagg

SEQ ID NO: 521422 - DNA, 120 bp, Artificial Sequence
  ENSG00000165338_84 (sequence is synthesized)
taagttatttaattatattggaattacactgaatctgtagatcagtggttcttaaacattagcctgtatcagaatcacaagaagggcttgttaaaatacagaatttcagattcagtaggt

SEQ ID NO: 521423 - DNA, 120 bp, Artificial Sequence
  ENSG00000165338_85 (sequence is synthesized)
agaattttcatttgtaacaagttcccaggatatgttgatttatgagttcatttatgatgtgacacatactataaaaattatgtcaccattcaaaaaatccagatgcatatttgaaggact

SEQ ID NO: 521424 - DNA, 120 bp, Artificial Sequence
  ENSG00000165338_86 (sequence is synthesized)
aagtgggaatgataaagacagaatgtaaacaaagtctccagaagtttagctatgaagtgaaagacatgttaagaatgaccacattttgagaaccatactgctatagatcaatttgtgaaa

SEQ ID NO: 521425 - DNA, 120 bp, Artificial Sequence
  ENSG00000165338_87 (sequence is synthesized)
aattgacatcttttcaatccataagcatactgtatccttttaggtacctaggtcttctttaatttctcttggtaatgttttgtagttttctggatagaggtgttacacatttctcattac

SEQ ID NO: 521426 - DNA, 120 bp, Artificial Sequence
  ENSG00000165338_88 (sequence is synthesized)
atgtatttctaggtacttcattttttttatcctattataattttattttccaattgtgactaatatatggaaatactttcatatatttatctttatctaaatacagttgacccttgaaca

SEQ ID NO: 521427 - DNA, 120 bp, Artificial Sequence
  ENSG00000165338_89 (sequence is synthesized)
atgcgagggttaggggcgctaaccccctatgcagtaaaaaaaaaaatctgtgtataacttttgactccccagaagcttaactactaataacctattgttgaccagaagtcttactgataa

SEQ ID NO: 521428 - DNA, 120 bp, Artificial Sequence
  ENSG00000165338_90 (sequence is synthesized)
tcttactgataacataaacagtcaattaacgtatattttatgttatatgtattctatactatattgttacaataaagtaagctaaggaaaaggcaatgttattaagaaaaaataaggaag

SEQ ID NO: 521429 - DNA, 120 bp, Artificial Sequence
  ENSG00000165338_91 (sequence is synthesized)
tactatatattaagtggaagtggactatcataaaggtcttcatccttattgagtaggctgaggaagaggaggggttggtcttgctgtctcaggtggcagaggtgaaagaaaataatgtat

SEQ ID NO: 521430 - DNA, 120 bp, Artificial Sequence
  ENSG00000165338_92 (sequence is synthesized)
ataagcagacttgcacaattcaagcctgtattcaagagtcaactgtactttgctatattcatccattaattctaatagtacatcagtaaattaacttggattttctgtgtacacaatctt

SEQ ID NO: 521431 - DNA, 120 bp, Artificial Sequence
  ENSG00000165338_93 (sequence is synthesized)
gtcatttgtgaaaaaggagagttttatctccttctaatcctgtatcttatatggatatatgtatgtgtttgcattgactgggacctctttcacaattgtgaataaaagaagtaatagcag

SEQ ID NO: 521432 - DNA, 120 bp, Artificial Sequence
  ENSG00000165349_0 (sequence is synthesized)
ataaggggcgcttggcgcgcaacgaccccaagccgcagctttgaagcctgagcggccgaactcggcagctccaacccaactcggcttaactccgcctcaccgagcccagtccaagactct

SEQ ID NO: 521433 - DNA, 120 bp, Artificial Sequence
  ENSG00000165349_1 (sequence is synthesized)
gtgctccctaggtttgcaacagctctctggatgccgtggcaagcatttcgcagatttggtcaaaagctggtacgcagacgtacactggagtcaggcatggctgagactcgccttgccaga

SEQ ID NO: 521434 - DNA, 120 bp, Artificial Sequence
  ENSG00000165349_2 (sequence is synthesized)
tgcctaagcaccctggatttagtggccctgggtgtgggcagcacattgggtgcaggcgtgtatgtcctagctggcgaggtggccaaagataaagcagggccatccattgtgatctgcttt

SEQ ID NO: 521435 - DNA, 120 bp, Artificial Sequence
  ENSG00000165349_3 (sequence is synthesized)
ttggtggctgccctgtcttctgtgttggctgggctgtgctatgcggagtttggtgcccgggttccccgttctggttcggcatatctctacagctatgtcactgtgggtgaactctgggcc

SEQ ID NO: 521436 - DNA, 120 bp, Artificial Sequence
  ENSG00000165349_4 (sequence is synthesized)
ttcaccactggctggaacctcatcctctcctatgtcattggtacagccagtgtggcccgggcctggagctctgcttttgacaacctgattgggaaccacatctctaagactctgcagggg

SEQ ID NO: 521437 - DNA, 120 bp, Artificial Sequence
  ENSG00000165349_5 (sequence is synthesized)
tccattgcactgcacgtgccccatgtccttgcagaatatccagatttctttgctttgggcctcgtgttgctgctcactggattgttggctctcggggctagtgagtcggccctggttacc

SEQ ID NO: 521438 - DNA, 120 bp, Artificial Sequence
  ENSG00000165349_6 (sequence is synthesized)
aaagtgttcacaggcgtgaaccttttggttcttgggttcgtcatgatctctggcttcgttaagggggacgtgcacaactggaagctcacagaagaggactacgaattggccatggctgaa

SEQ ID NO: 521439 - DNA, 120 bp, Artificial Sequence
  ENSG00000165349_7 (sequence is synthesized)
ctcaatgacacctatagcttgggtcctctgggctctggaggatttgtgcctttcggcttcgagggaattctccgtggagcagcgacctgtttctatgcatttgttggtttcgactgtatt

SEQ ID NO: 521440 - DNA, 120 bp, Artificial Sequence
  ENSG00000165349_8 (sequence is synthesized)
gctaccactggagaagaagcccagaatccccagcgttccatcccgatgggcattgtgatctcactgtctgtctgctttttggcgtattttgctgtctcttctgcactcaccctgatgatg

SEQ ID NO: 521441 - DNA, 120 bp, Artificial Sequence
  ENSG00000165349_9 (sequence is synthesized)
gttgtggctgttggctccctctgtgctctttctaccagcctcctgggctccatgttccccatgcctcgggtgatctacgcgatggcagaggatggcctcctgttccgtgtacttgctcgg

SEQ ID NO: 521442 - DNA, 120 bp, Artificial Sequence
  ENSG00000165349_10 (sequence is synthesized)
atccacaccggcacacgcaccccaatcatagccaccgtggtctctggcattattgcagcattcatggcattcctcttcaaactcactgatcttgtggacctcatgtcaattgggaccctg

SEQ ID NO: 521443 - DNA, 120 bp, Artificial Sequence
  ENSG00000165349_11 (sequence is synthesized)
cttgcttactccctggtgtcgatttgtgttctcatcctcaggtatcaacctgatcaggagacaaagactggggaagaagtggagttgcaggaggaggcaataactactgaatcagagaag

SEQ ID NO: 521444 - DNA, 120 bp, Artificial Sequence
  ENSG00000165349_12 (sequence is synthesized)
ttgaccctatggggactatttttcccactcaactccatccccactccactctctggccaaattgtctatgtttgttcctcattgcttgctgtcctgctgactgctctttgcctggtgctg

SEQ ID NO: 521445 - DNA, 120 bp, Artificial Sequence
  ENSG00000165349_13 (sequence is synthesized)
gcccagtggtcagttccattgctttctggagacctgctgtggactgcagtggttgtgctgctcctgctgctcattattgggatcattgtggtcatctggagacagccacagagttccact

SEQ ID NO: 521446 - DNA, 120 bp, Artificial Sequence
  ENSG00000165349_14 (sequence is synthesized)
ccccttcactttaaggtgcctgctttgcctctcctcccactaatgagcatctttgtgaatatttaccttatgatgcagatgacagctggtacctgggcccgatttggggtctggatgctg

SEQ ID NO: 521447 - DNA, 120 bp, Artificial Sequence
  ENSG00000165349_15 (sequence is synthesized)
attggctttgctatctacttcggctatgggatccagcacagcctggaagagattaagagtaaccaaccctcacgcaagtctagagccaaaactgtagaccttgatcccggcactctctat

SEQ ID NO: 521448 - DNA, 120 bp, Artificial Sequence
  ENSG00000165349_16 (sequence is synthesized)
gtccactcagtttgacatcgtcacacctaaatgctgtctggtcccctgcacaataatggagagtactcctgaccccagtgacagctagccctcccctgtgatggtggtggtggatactaa

SEQ ID NO: 521449 - DNA, 120 bp, Artificial Sequence
  ENSG00000165349_17 (sequence is synthesized)
tacagttctgtacgatgtgaaggatgtgtctttgctatttcttgtctattttaacccgtctgcttctaaatgatgtctagctgcttaccaactttaaaaaatgatattaaaagaaagtag

SEQ ID NO: 521450 - DNA, 120 bp, Artificial Sequence
  ENSG00000165355_0 (sequence is synthesized)
tcttccggaagtcgcgccggtgcgcgccggactcctcccaccagcggcgacgtcaaactcagctcctaccacttctctgtctctgccgaccggcgcagggagggctgccttttccttaca

SEQ ID NO: 521451 - DNA, 120 bp, Artificial Sequence
  ENSG00000165355_1 (sequence is synthesized)
gtacgccttgaggcttccgggccgctgaagtttacgagcgagggcagtgcagttactcagtgtgccggcctcggacgcacgtgagtagagtttgagaagacagaggctggctcccggcag

SEQ ID NO: 521452 - DNA, 120 bp, Artificial Sequence
  ENSG00000165355_2 (sequence is synthesized)
gccacgcccgcagaggcctttccccctctccacaacttgtgttctacttggttccgccgagacccacgacggttccgcccccttcttcctagtcattgatgttgttgttcttgtcagtgc

SEQ ID NO: 521453 - DNA, 120 bp, Artificial Sequence
  ENSG00000165355_3 (sequence is synthesized)
gttgttgttcttgtcagtgccgcagccccgaccgccgggagctcgaacccgagccggggccgcccgggtggcgcggtggcggcggctgcggctgcagcagctgcgacggctgcgggggct

SEQ ID NO: 521454 - DNA, 120 bp, Artificial Sequence
  ENSG00000165355_4 (sequence is synthesized)
ggccgggagccggcagccggcggcggggccggatggctctgtgcgggcaggcggcgggcgctgcgtcgctgcccagcgagctgatcgtgcacatcttctcttttctgccggcgcccgacc

SEQ ID NO: 521455 - DNA, 120 bp, Artificial Sequence
  ENSG00000165355_5 (sequence is synthesized)
ggctgcgggcctcggcctcctgctcgcactggcgtgagtgcctcttctatccggccctgtggccccagctccgcatctgcctccgcgtctcgcccgcggagcagcctcggctggaattcc

SEQ ID NO: 521456 - DNA, 120 bp, Artificial Sequence
  ENSG00000165355_6 (sequence is synthesized)
tcatgcgcaagtgcggctggttcgtgcgagagctgcgtgttgaattcgccgccgagaactatctgagcggcggtggcccaggggacggaggtggcgcggacaccgggactggaggggagg

SEQ ID NO: 521457 - DNA, 120 bp, Artificial Sequence
  ENSG00000165355_7 (sequence is synthesized)
aagtcgaggccctgcagctctcagctcgttggctggaagtgctgcgcacctacttggagctggtgctttgcgtgctggtcagcatccggaacaacaggaaccttcagaagtttagtcttt

SEQ ID NO: 521458 - DNA, 120 bp, Artificial Sequence
  ENSG00000165355_8 (sequence is synthesized)
ttggagacataagtgttctacaacagcaaggaagtttgtcaaatacatacctcagcaaggtggaccctgatggcaaaaaaattaaacaaattcagcaactgtttgaagaaatcctgagta

SEQ ID NO: 521459 - DNA, 120 bp, Artificial Sequence
  ENSG00000165355_9 (sequence is synthesized)
atagtaggcaactgaaatggctgtcctgtgggtttatgctggaaatagtaaccccaacatcactgtcatctctctctaatgctgttgccaacaccatggagcacctcagtttactggaca

SEQ ID NO: 521460 - DNA, 120 bp, Artificial Sequence
  ENSG00000165355_10 (sequence is synthesized)
ataatattcctggtaacagcactcttattactgcagttgaactggagcgatttgtgaatctgcactcacttgccttggatttttgtgactttacagctgagatggcaagagtcttaactg

SEQ ID NO: 521461 - DNA, 120 bp, Artificial Sequence
  ENSG00000165355_11 (sequence is synthesized)
atagcaaccatgtgcctttgcaacgactgtctcttctggttcacaatgtttctgtaatgcacaagtctctggacaacatgccaaatgatgagcattggaaagccctgtcacgaaagagca

SEQ ID NO: 521462 - DNA, 120 bp, Artificial Sequence
  ENSG00000165355_12 (sequence is synthesized)
ccagctttcgggtctatataatggcttttgatatcaagagtgaagatatgttaaagattctgaaacccagtataccactagagaggattcattttgatagctatatcacttgtgtttcag

SEQ ID NO: 521463 - DNA, 120 bp, Artificial Sequence
  ENSG00000165355_13 (sequence is synthesized)
gggctattgttgatcttatatccaggcaatatgacaagttcctcactcattttattttaatgaatgatgtgattgacacatctggttttccagatcttagtgacaaccgaaatgaagatc

SEQ ID NO: 521464 - DNA, 120 bp, Artificial Sequence
  ENSG00000165355_14 (sequence is synthesized)
cgttggttttattagcatggaggtgcacaaagctctctcttctggcaattcatggttacacggtgtgggcacacaacctcattgccattgctcgtcttcggggctctgatctgaaagtgc

SEQ ID NO: 521465 - DNA, 120 bp, Artificial Sequence
  ENSG00000165355_15 (sequence is synthesized)
ttgaagtcaccgaagaaagcattgattttgaccaaggtgaactggccgaccaggatgtagatccagtgcataaccttattgagcaggtatccctgggcctgggtcaaccttggcatgcag

SEQ ID NO: 521466 - DNA, 120 bp, Artificial Sequence
  ENSG00000165355_16 (sequence is synthesized)
atcactcagtgtcttcactgaaccaaatcgtcatttttacagagagatgcaaagcttcagtgaagacatttagcttttttttaatgtagaattcctgtggttacatatgcaagtagggtc

SEQ ID NO: 521467 - DNA, 120 bp, Artificial Sequence
  ENSG00000165355_17 (sequence is synthesized)
ctattatgtttttttttcagtagtgtgaattaatccttttgtgctgtgtttaatcagtattagctttatagaattatatatgtatattctacttcttgatcaaagaacgtagtcgggtat

SEQ ID NO: 521468 - DNA, 120 bp, Artificial Sequence
  ENSG00000165355_18 (sequence is synthesized)
tggtttagaagttcaaagtgacaatgtatagggctttcacggttaatggacttgttaccaaaccttaaggatatacagccgaagattgtctgaggttgctggctaactttatttttcact

SEQ ID NO: 521469 - DNA, 120 bp, Artificial Sequence
  ENSG00000165355_19 (sequence is synthesized)
gagttactctgcctttttgacgtttttattctttgtgtgtcagagttcagagctcaggagccaaaatatttttatacatatatagatatatatccatagcctggtagatttatatgcaat

SEQ ID NO: 521470 - DNA, 120 bp, Artificial Sequence
  ENSG00000165355_20 (sequence is synthesized)
gcactgcatccatgcattctgatagcatttcattaattttgatttcaaatggaagataaataatatcccaaatgaattatctgtaacagaaaagccaagactttaactttcattacatat

SEQ ID NO: 521471 - DNA, 120 bp, Artificial Sequence
  ENSG00000165355_21 (sequence is synthesized)
ctaatagttgatatcaccagttaccattttgaattttgtatagtactaggttagaacattgcttaatccttttaaaaaaaatgcatttacgtaaacacgaatactgaaattgttggattt

SEQ ID NO: 521472 - DNA, 120 bp, Artificial Sequence
  ENSG00000165355_22 (sequence is synthesized)
tttaactatatctgacataattttattcatcaattacattacacattcatttagcccagatttcaaatagtgggggaagaaagaaactgtatttcagagtaaaatctcctaaaggaaata

SEQ ID NO: 521473 - DNA, 120 bp, Artificial Sequence
  ENSG00000165355_23 (sequence is synthesized)
aaaacacagagttgtaaatacacatgcttgcaaaaacattagtcgtgaaatccctagcaacaagtcactggatttttctctgtcagcacgcgtgtcagctgccaaagaatagacttaatg

SEQ ID NO: 521474 - DNA, 120 bp, Artificial Sequence
  ENSG00000165355_24 (sequence is synthesized)
aagaagtgcccacatgctggcaggggccggcccactctggccagccagatactgctagattgtaatatttaaggtcgaatttcgacctgtggtacacagctgtgctgtggctcagtcagc

SEQ ID NO: 521475 - DNA, 120 bp, Artificial Sequence
  ENSG00000165355_25 (sequence is synthesized)
aaaaaaaaaaagaaaaaaaaaacatgcacctgtttcactgtgaatagtgaatgtaaaggaaagaaaggaaaaactgaaagcttgttctatcacaggtatgagctgctatgatacatgaag

SEQ ID NO: 521476 - DNA, 120 bp, Artificial Sequence
  ENSG00000165355_26 (sequence is synthesized)
atcacaggtatgagctgctatgatacatgaagaacattccatgaagtatgttttaaaaccttgttatatctgagaggctttaaaagcctattaactgtttcagggcaaccgcggtacaga

SEQ ID NO: 521477 - DNA, 120 bp, Artificial Sequence
  ENSG00000165355_27 (sequence is synthesized)
cgtggtctctgtgagacttccacctgaccccagttttaagtggtacgaatgttgtgcatttaatgttaaaggacagtctgcaataataaagtaagtagccaacctgggtgcccagcagtg

SEQ ID NO: 521478 - DNA, 120 bp, Artificial Sequence
  ENSG00000165355_28 (sequence is synthesized)
ctgagacctggctgctctattgtaagctttggaaacacaatttatgcaacagatgtccagatatgattctatttatggaaaaaagtttatatgtgttttacaaatggttttaccatctta

SEQ ID NO: 521479 - DNA, 120 bp, Artificial Sequence
  ENSG00000165355_29 (sequence is synthesized)
tattaaaatgaccttttgacaggtgtgcactgttttgtctccagtgagcacataccatgcggattttatatgtacatcagtagtgtgaatccactggcacagtgtgtgtaaatgccagat

SEQ ID NO: 521480 - DNA, 120 bp, Artificial Sequence
  ENSG00000165355_30 (sequence is synthesized)
gtggtgagattttatcttataaatgtgatcagataaaataactcctgacagaaactgtaaggaaaccagctgaatgtttgacctgatgactgatgttgtatggtttatgttaaatgtata

SEQ ID NO: 521481 - DNA, 120 bp, Artificial Sequence
  ENSG00000165355_31 (sequence is synthesized)
gatgactgatgttgtatggtttatgttaaatgtatattcttttaatcaatgaataaagcattaaaaatgatcattgtaatatattttattgtatatgaagcatgactacttttagtgtta

SEQ ID NO: 521482 - DNA, 120 bp, Artificial Sequence
  ENSG00000165359_0 (sequence is synthesized)
cagtctggggcgagcgctctagtgagcgcggacggatgcttaggcagtagtcctggcagcggcagtagtggtggcagcagaagagaggaagggggagggccccgagggctacacacgctc

SEQ ID NO: 521483 - DNA, 120 bp, Artificial Sequence
  ENSG00000165359_1 (sequence is synthesized)
acactttcaagttcccttggagggagaggaggtggggctgcagaaagaggaggccaggagcggtcccatccgtcccgtcccgtcccgtctccccctcttcctcttgctccttgctccccg

SEQ ID NO: 521484 - DNA, 120 bp, Artificial Sequence
  ENSG00000165359_2 (sequence is synthesized)
gctctgcgagagttgagggttcaggtggccgtacgcggcagtgagggcaagagggccgggagagtggggagcggaggcaggagtgcgggggaagatgcccatcctgctgttcctcataga

SEQ ID NO: 521485 - DNA, 120 bp, Artificial Sequence
  ENSG00000165359_3 (sequence is synthesized)
cacgtccgcctctatgaaccagcgcactgacctgggcacctcttatttggacattgccaaaggcgctgtggagttattcttgaagctgcgcgcccgggacccggccagccgtggagacag

SEQ ID NO: 521486 - DNA, 120 bp, Artificial Sequence
  ENSG00000165359_4 (sequence is synthesized)
gtacatgctggtcacctacgacgaacccccgtactgcatcaaggctggttggaaggaaaatcatgcaacattcatgagcgaactaaaaaatcttcaggcttctggactgactactctcgg

SEQ ID NO: 521487 - DNA, 120 bp, Artificial Sequence
  ENSG00000165359_5 (sequence is synthesized)
tcaggctctaagatcctcatttgatttgttaaatctcaatagattaatatctggaatagacaattatggacaggggagaaatccattttttttagaaccatctattttaattaccatcac

SEQ ID NO: 521488 - DNA, 120 bp, Artificial Sequence
  ENSG00000165359_6 (sequence is synthesized)
agatggaaacaagttaacaagtactgctggtgttcaagaagagctccatcttcctttgaattcccctctgcctggaagtgaactaaccaaagaaccttttcgttgggatcaaaggttatt

SEQ ID NO: 521489 - DNA, 120 bp, Artificial Sequence
  ENSG00000165359_7 (sequence is synthesized)
tgccctggtgttgcgtttgcctggagtggcttctaccgaaccagagcaactagggagcgtaccaactgatgaatctgccatcacacagatgtgtgaagtcacaggaggtcgctcctactg

SEQ ID NO: 521490 - DNA, 120 bp, Artificial Sequence
  ENSG00000165359_8 (sequence is synthesized)
tgtgagaacacaaagaatgttgaatcaatgtttagaatctctagttcaaaaagttcagagtggtgtagttattaattttgaaaaaacaggaccagatccacttcctattggagaagatgg

SEQ ID NO: 521491 - DNA, 120 bp, Artificial Sequence
  ENSG00000165359_9 (sequence is synthesized)
acttatggattcatccaggccaagcaattcatttgctgctcagccatggcatagttgtcataaactcatttatgtacgacctaactctaaaactggtgttcctgttggacattggccaat

SEQ ID NO: 521492 - DNA, 120 bp, Artificial Sequence
  ENSG00000165359_10 (sequence is synthesized)
tccagaatctttttggccagatcagaatttaccttcactacctccacgaacatctcatcctgttgtgaggttctcctgtgtagattgtgagccaatggtaatagacaaacttccttttga

SEQ ID NO: 521493 - DNA, 120 bp, Artificial Sequence
  ENSG00000165359_11 (sequence is synthesized)
caaatatgaacttgaaccttcgcccttaactcagtatatcttggaacgaaagtctccccatacctgctggcaggtatttgttactagcagtggaaagtacaatgaacttggatatccatt

SEQ ID NO: 521494 - DNA, 120 bp, Artificial Sequence
  ENSG00000165359_12 (sequence is synthesized)
tggttatttaaaagccagtacaactttaacttgtgtaaacctctttgtgatgccttacaactacccagttttacttcctcttttagatgacttgtttaaagttcacaagcttaagccaaa

SEQ ID NO: 521495 - DNA, 120 bp, Artificial Sequence
  ENSG00000165359_13 (sequence is synthesized)
tctgaagtggcgacaggcttttgacagctacttaaaaactctgcctccatactacctattaaccaaactagagtcagaacgaatactagcatcagtggggaagaaacctccccaggaaat

SEQ ID NO: 521496 - DNA, 120 bp, Artificial Sequence
  ENSG00000165359_14 (sequence is synthesized)
tggaattaaagtgaaaaatcattctggaggtggcatgtccttgactcacaataaaaattttagaaaactattgaaagaaatcacaggggaaactgcacttagactgacagaattgaacac

SEQ ID NO: 521497 - DNA, 120 bp, Artificial Sequence
  ENSG00000165359_15 (sequence is synthesized)
gatattccccgtagaggtcttttagaccagctgaccagaatgagatccaatctgctgaaaacgcacaagtttattgttggacaagatgaagattcccttcatagtgttccagttgcacaa

SEQ ID NO: 521498 - DNA, 120 bp, Artificial Sequence
  ENSG00000165359_16 (sequence is synthesized)
atgggtaactatcaggaatatctgaagacattggcttctccactgcgagagattgatccagaccaacccaaaagactgcatacttttggcaatccgtttaaacaagataagaagggaatg

SEQ ID NO: 521499 - DNA, 120 bp, Artificial Sequence
  ENSG00000165359_17 (sequence is synthesized)
atgattgatgaagcagatgagtttgtagcagggccacaaaacaaagtgaaacgtccaggggaacccaacagtcctatgtcatctaagagaaggcggagtatgtccctgctgttgaggaaa

SEQ ID NO: 521500 - DNA, 120 bp, Artificial Sequence
  ENSG00000165359_18 (sequence is synthesized)
ccacaaacaccacctactgtaactaaccatgtgggcggaaagggaccaccctcagcctcgtggttcccatcttatccaaacctcataaaacccacccttgtacatacagatgctactatc

SEQ ID NO: 521501 - DNA, 120 bp, Artificial Sequence
  ENSG00000165359_19 (sequence is synthesized)
attcacgatggccatgaggagaagatggaaaatggtcagatcacacctgatggcttcctgtcaaaatctgctccatcagagcttataaatatgacaggagatcttatgccacccaaccaa

SEQ ID NO: 521502 - DNA, 120 bp, Artificial Sequence
  ENSG00000165359_20 (sequence is synthesized)
gtggattctctgtctgacgacttcacaagtctcagcaaagatgggctgattcaaaaacctggtagtaacgcatttgtaggaggagccaaaaactgcagtctctccgtagatgaccaaaaa

SEQ ID NO: 521503 - DNA, 120 bp, Artificial Sequence
  ENSG00000165359_21 (sequence is synthesized)
gacccagtagcatctactttgggagctatgccaaatacattacaaatcactcctgctatggcacaaggaatcaatgctgatataaaacatcaattaatgaaggaagttcgaaagtttggt

SEQ ID NO: 521504 - DNA, 120 bp, Artificial Sequence
  ENSG00000165359_22 (sequence is synthesized)
cgaaaatatgaaagaattttcattttgcttgaagaagtgcaaggacctctggagatgaagaaacagtttgttgaatttaccatcaaggaagccgcaaggtttaaaagacgagtcctaatt

SEQ ID NO: 521505 - DNA, 120 bp, Artificial Sequence
  ENSG00000165359_23 (sequence is synthesized)
cagtaccttgagaaggtactagaaaaaataaattcccaccaccttcacaacaacattagtcacatcaacagcagatcatcatgttagtgcaaagaccagtgagaaaaaaatgacaagttt

SEQ ID NO: 521506 - DNA, 120 bp, Artificial Sequence
  ENSG00000165359_24 (sequence is synthesized)
tctgtgctgtaggatggaacaggatattgttgaagcctcctggaatgtttgagtcaagggaattgctttccagatgctaagaagcagcagtggggcttttgaattttatgattatctggc

SEQ ID NO: 521507 - DNA, 120 bp, Artificial Sequence
  ENSG00000165359_25 (sequence is synthesized)
agtgaaagctgggcttttgccttaataattttttaaagtatgaattgttttgttttgttttcctcaattgaggaagctgatgttattaattcacaggctaaattcggtaaacaccactgc

SEQ ID NO: 521508 - DNA, 120 bp, Artificial Sequence
  ENSG00000165359_26 (sequence is synthesized)
ccctaccacgggtaatgagaggtcactcacttgaactttgccattccaggcattctcagagtggcgaggggccacctgcaagtggagcacaacttggtgctcttactgtgtccttcagaa

SEQ ID NO: 521509 - DNA, 120 bp, Artificial Sequence
  ENSG00000165359_27 (sequence is synthesized)
agaataggtgtacagaaaggaaatggcaatcttatgtgtgctgaacaaagttttcaacaattcctagttgtgccttttaaaccatgcaatattcaggatagtttgaatcaaagaagtaag

SEQ ID NO: 521510 - DNA, 120 bp, Artificial Sequence
  ENSG00000165359_28 (sequence is synthesized)
aagctgctatttgggtaacttatttctctgtgggaaggggcagggagagtcaccaaacaatctacctccaactctcttctcttttgtctagagacattacaaagtgcacttgaggctgcc

SEQ ID NO: 521511 - DNA, 120 bp, Artificial Sequence
  ENSG00000165359_29 (sequence is synthesized)
cccaacctctgacatttgttcttgcatgtgatgatagaaagtcttcagatggacttatacattctgtgctttggaagcacaagaagaacaaaatatgtgtatatttcctttaatgtttat

SEQ ID NO: 521512 - DNA, 120 bp, Artificial Sequence
  ENSG00000165359_30 (sequence is synthesized)
acaaaagtttatatggagcagtattgttatgtttgtatgaatttgcaaaaattaaagtgtacaaagagattttgattttgcatatataaaataaatcattttattgattttcacaagttc

SEQ ID NO: 521513 - DNA, 120 bp, Artificial Sequence
  ENSG00000165359_31 (sequence is synthesized)
tatcagataatttagattgtggacttagttacagtgttatctcttaccttaaaaaactcagccaacagaccaaactagagtcagaacgaatactagcatcagtggggaagaaacctcccc

SEQ ID NO: 521514 - DNA, 120 bp, Artificial Sequence
  ENSG00000165359_32 (sequence is synthesized)
atcaatgataattcttgtcacaagaaatgttagtgatcaaaagcttttactgttgcaataagagagatatctttttattttacagatatttgtgtcgtcactgtcttctcaaatcatgtg

SEQ ID NO: 521515 - DNA, 120 bp, Artificial Sequence
  ENSG00000165359_33 (sequence is synthesized)
taagagtttggagatgtcatggcggcacaaaagagagctgttttctctattttattcctttaactgccatggttatttttataaaacacatctatgtttctcttattaaaagtaacctta

SEQ ID NO: 521516 - DNA, 120 bp, Artificial Sequence
  ENSG00000165359_34 (sequence is synthesized)
atttcattggaatttaagaataaatagatctggattcatatattacatcaacttccctttttaactctagaaattctcagtatggggtttccctctggaaaaagaaaatctgaagacatt

SEQ ID NO: 521517 - DNA, 120 bp, Artificial Sequence
  ENSG00000165359_35 (sequence is synthesized)
acagttgcctattgcctcttaaatgtgtcctagacacagcatgaagttggggcactggtggtgagaggcggaatccaaaaaaattcagaaatgacttggcctcattttggatttcataat

SEQ ID NO: 521518 - DNA, 120 bp, Artificial Sequence
  ENSG00000165359_36 (sequence is synthesized)
gtgaagtattcatgattttgaactggtaatataatctaaatcaagattaccaaaataatttcagaggttgatgtggtaacctttaagcgaagtttctagaggtgaaaaggcagaatctta

SEQ ID NO: 521519 - DNA, 120 bp, Artificial Sequence
  ENSG00000165359_37 (sequence is synthesized)
aatggtaccattggtgtcactgggaggagaaattggggtgtgttactgtttaccatggcagtaatggggcaaacaataaaatgcaatgtgaaatgatttgatgatttgggaaataagatt

SEQ ID NO: 521520 - DNA, 120 bp, Artificial Sequence
  ENSG00000165359_38 (sequence is synthesized)
gaacgcaatttacttgtttgaatttgctgttacttgctcttcttatcccactctcttctgatttttttttactttctgctccttacttctctgctattttcattgccactttttaatgtt

SEQ ID NO: 521521 - DNA, 120 bp, Artificial Sequence
  ENSG00000165359_39 (sequence is synthesized)
ccatgtttggttttatgtgcagcaccttgacttctaagaaatgaatcatgtccctttgccccttataactgaactttgagtattttaagatttattctattcttactgttgtgtattttg

SEQ ID NO: 521522 - DNA, 120 bp, Artificial Sequence
  ENSG00000165359_40 (sequence is synthesized)
tttccttatagccattaaagaaagcactaaggatgatgggagctccaaatctgatatcagataatttagattgtggacttagttacagtgttatctcttaccttaaaaaactcagccaac

SEQ ID NO: 521523 - DNA, 120 bp, Artificial Sequence
  ENSG00000165359_41 (sequence is synthesized)
aggtagtattggtaaaaacaaacaaacaaaaatcctttgccctcagaagtgcatttccttattctttagtgtaattgtaatttttcaaattaaatgtgtatatatctctacactttatgg

SEQ ID NO: 521524 - DNA, 120 bp, Artificial Sequence
  ENSG00000165359_42 (sequence is synthesized)
attagtaataatgtgattctctatggcttctagcttcaccattaagctgcagttaagggtctgtcagtatcatttgatgctgtgccatttctccttttgcctgccagtttgtcctacccg

SEQ ID NO: 521525 - DNA, 120 bp, Artificial Sequence
  ENSG00000165359_43 (sequence is synthesized)
caagctggttgatatggggcagaggtttaatagacttctctcatgggtcacattttgtctatcttcaacctagttcctcctcagatcactctgggctacagcatccctcctgtttagatc

SEQ ID NO: 521526 - DNA, 120 bp, Artificial Sequence
  ENSG00000165359_44 (sequence is synthesized)
agcacactgaggcgtggtgtgattaaatgacttgtctgagattagttttcaggcatgtgaaggacttatactcacatgctagcccttggataaagagctatatgcttttccctggagagt

SEQ ID NO: 521527 - DNA, 120 bp, Artificial Sequence
  ENSG00000165359_45 (sequence is synthesized)
ggggagatgagaccagtgttcctcacactggagggtgatagaccccaaggggaactgaagagtggagctcagtttcctctcttctcaccctccacctgttcctcatttgccattattcac

SEQ ID NO: 521528 - DNA, 120 bp, Artificial Sequence
  ENSG00000165359_46 (sequence is synthesized)
cttgtcccttgcctgcccctctctattagtacctcatcctccactcaccgttccttatcatacttctcacctctacttagcccattcttgtaggatggaaatatttgagaactactgagt

SEQ ID NO: 521529 - DNA, 120 bp, Artificial Sequence
  ENSG00000165359_47 (sequence is synthesized)
tagaactttactatcatatgaatgtgttatgttatatgacaaattaatgcagcagttttacttaccttatgcacaaaggtattcccaggtaggggacaatagtagcattcgcagtggtga

SEQ ID NO: 521530 - DNA, 120 bp, Artificial Sequence
  ENSG00000165359_48 (sequence is synthesized)
cgacacaccttgctaggaactgacaacaacttcagtatggtctggagcttaccagctcctaccagtccagtgtgcttataagtgcaaaagaaagtaaaggcaaccccagatttctaatct

SEQ ID NO: 521531 - DNA, 120 bp, Artificial Sequence
  ENSG00000165359_49 (sequence is synthesized)
accaagtgtccccctaacctcctttcctctctgctaatagattttttgtggttgttgtaaatgttttggtttggttatttatttatttatctatctattgatctatcgattttttttaat

SEQ ID NO: 521532 - DNA, 120 bp, Artificial Sequence
  ENSG00000165359_50 (sequence is synthesized)
ttgatgtttacctaagcctttaaggctgtgtcaccaaggtatggccacaaggaagaatagtgtacagagattttaattaatgcaagttctgggaccttttggggcacatgtatcatttta

SEQ ID NO: 521533 - DNA, 120 bp, Artificial Sequence
  ENSG00000165359_51 (sequence is synthesized)
caaatgagctttcaagaccatttaaggaaacagatgcttcatttgctcttatctcatatttcatgacttaagaattttttagtgataataaacatagacttaattccaataattagggaa

SEQ ID NO: 521534 - DNA, 120 bp, Artificial Sequence
  ENSG00000165359_52 (sequence is synthesized)
aattgataaatatctgtcaccaaaccacaagaaatccaaaatcattttaggtttaccaaacattggtggaattccatctttctgagaaaaagggaagatcatagctaatttataatagct

SEQ ID NO: 521535 - DNA, 120 bp, Artificial Sequence
  ENSG00000165359_53 (sequence is synthesized)
caaattactaatttaataactgggtcaccagtgtttcttgagccatttcagatgtatgtaaaacacaaaatatgccaaatatatattgctataatacactcaagcagtattaatcaatat

SEQ ID NO: 521536 - DNA, 120 bp, Artificial Sequence
  ENSG00000165359_54 (sequence is synthesized)
ggtatcacaatgcctattaagaggctttttacaaattacttacttagtaatatctgttaaattaagcattatcttctaagaccttttttggatagtcaaatataagagataaatagttta

SEQ ID NO: 521537 - DNA, 120 bp, Artificial Sequence
  ENSG00000165359_55 (sequence is synthesized)
attttttcagaccttttttggatagtccaatattagagataaatagtttaattttttcagatataatgccagtcgatgtgatctgaattttagtactagtttacacgtataaatacagtc

SEQ ID NO: 521538 - DNA, 120 bp, Artificial Sequence
  ENSG00000165359_56 (sequence is synthesized)
ttaaacctttatgtctgagtctgaaatgaacctgttcacttagactagattttatagtaacaaaatgtgcttttaaatgtctatgaatgaaattcttattcatggtttttattctctcca

SEQ ID NO: 521539 - DNA, 120 bp, Artificial Sequence
  ENSG00000165359_57 (sequence is synthesized)
tgattttattataattttgacactagacaagaaaaaaaaatattatttgtctttcctgccccctatctgtttgctgtgatagtgcaaagaagcacaggaaaatgtttaattatccatttt

SEQ ID NO: 521540 - DNA, 120 bp, Artificial Sequence
  ENSG00000165359_58 (sequence is synthesized)
tctgtgatttgtaattgaaaattgttctgtggggttctgaaagtattatctttcttaagtagtaaaaatgacagtggtaatgtagatgtttttataacatactatgtactttcattttag

SEQ ID NO: 521541 - DNA, 120 bp, Artificial Sequence
  ENSG00000165370_0 (sequence is synthesized)
atgacgtccacctgcaccaacagcacgcgcgagagtaacagcagccacacgtgcatgcccctctccaaaatgcccatcagcctggcccacggcatcatccgctcaaccgtgctggttatc

SEQ ID NO: 521542 - DNA, 120 bp, Artificial Sequence
  ENSG00000165370_1 (sequence is synthesized)
ttcctcgccgcctctttcgtcggcaacatagtgctggcgctagtgttgcagcgcaagccgcagctgctgcaggtgaccaaccgttttatctttaacctcctcgtcaccgacctgctgcag

SEQ ID NO: 521543 - DNA, 120 bp, Artificial Sequence
  ENSG00000165370_2 (sequence is synthesized)
atttcgctcgtggccccctgggtggtggccacctctgtgcctctcttctggcccctcaacagccacttctgcacggccctggttagcctcacccacctgttcgccttcgccagcgtcaac

SEQ ID NO: 521544 - DNA, 120 bp, Artificial Sequence
  ENSG00000165370_3 (sequence is synthesized)
accattgtcgtggtgtcagtggatcgctacttgtccatcatccaccctctctcctacccgtccaagatgacccagcgccgcggttacctgctcctctatggcacctggattgtggccatc

SEQ ID NO: 521545 - DNA, 120 bp, Artificial Sequence
  ENSG00000165370_4 (sequence is synthesized)
ctgcagagcactcctccactctacggctggggccaggctgcctttgatgagcgcaatgctctctgctccatgatctggggggccagccccagctacactattctcagcgtggtgtccttc

SEQ ID NO: 521546 - DNA, 120 bp, Artificial Sequence
  ENSG00000165370_5 (sequence is synthesized)
atcgtcattccactgattgtcatgattgcctgctactccgtggtgttctgtgcagcccggaggcagcatgctctgctgtacaatgtcaagagacacagcttggaagtgcgagtcaaggac

SEQ ID NO: 521547 - DNA, 120 bp, Artificial Sequence
  ENSG00000165370_6 (sequence is synthesized)
gtcaaggccaaggagggcagaatggaagccaaggacggcagcctgaaggccaaggaaggaagcacggggaccagtgagagtagtgtagaggccaggggcagcgaggaggtcagagagagc

SEQ ID NO: 521548 - DNA, 120 bp, Artificial Sequence
  ENSG00000165370_7 (sequence is synthesized)
agcacggtggccagcgacggcagcatggagggtaaggaaggcagcaccaaagttgaggagaacagcatgaaggcagacaagggtcgcacagaggtcaaccagtgcagcattgacttgggt

SEQ ID NO: 521549 - DNA, 120 bp, Artificial Sequence
  ENSG00000165370_8 (sequence is synthesized)
gaagatgacatggagtttggtgaagacgacatcaatttcagtgaggatgacgtcgaggcagtgaacatcccggagagcctcccacccagtcgtcgtaacagcaacagcaaccctcctctg

SEQ ID NO: 521550 - DNA, 120 bp, Artificial Sequence
  ENSG00000165370_9 (sequence is synthesized)
cccaggtgctaccagtgcaaagctgctaaagtgatcttcatcatcattttctcctatgtgctatccctggggccctactgctttttagcagtcctggccgtgtgggtggatgtcgaaacc

SEQ ID NO: 521551 - DNA, 120 bp, Artificial Sequence
  ENSG00000165370_10 (sequence is synthesized)
caggtaccccagtgggtgatcaccataatcatctggcttttcttcctgcagtgctgcatccacccctatgtctatggctacatgcacaagaccattaagaaggaaatccaggacatgctg

SEQ ID NO: 521552 - DNA, 120 bp, Artificial Sequence
  ENSG00000165370_11 (sequence is synthesized)
aagaagttcttctgcaaggaaaagcccccgaaagaagatagccacccagacctgcccggaacagagggtgggactgaaggcaagattgtcccttcctacgattctgctacttttccttga

SEQ ID NO: 521553 - DNA, 120 bp, Artificial Sequence
  ENSG00000165370_12 (sequence is synthesized)
ggacctgcacgcggcgcccgcgacgccacgtctgcagcagcaacagcataggcactgagtgcggtctgtgcacccctttgccacccaccggtgccggcactgagcctgcaacctgtctca

SEQ ID NO: 521554 - DNA, 120 bp, Artificial Sequence
  ENSG00000165370_13 (sequence is synthesized)
aaaccttgaactgtccataacacgagaaacaagaggagatttcttttcaatggacccacaattcattaatgccaaaccataccatttcaggcaaaggtgttgcacacacatgctcttcac

SEQ ID NO: 521555 - DNA, 120 bp, Artificial Sequence
  ENSG00000165370_14 (sequence is synthesized)
cacaaggtagataaatatatagaagaggcaggaactggggtctttccgtaaaagcatggacttgaggattctgactgaaattttccccccaaagattattaggctctacatttcttaaag

SEQ ID NO: 521556 - DNA, 120 bp, Artificial Sequence
  ENSG00000165370_15 (sequence is synthesized)
caacaagggctatccattttggacttgtagttggtattctatcttttccagagctacaacatgccaactttagctctgaaggaaagggaagatgatgcttgtgaacttaaggacttttcg

SEQ ID NO: 521557 - DNA, 120 bp, Artificial Sequence
  ENSG00000165370_16 (sequence is synthesized)
gccctcgggtcgggagctcatgggccagagctacagcttgtgttcaactgaaagaaaggcaatggaccaaatcattcatggagcccaagaaacagaacctaatggactgatcaacatatg

SEQ ID NO: 521558 - DNA, 120 bp, Artificial Sequence
  ENSG00000165370_17 (sequence is synthesized)
ttacacaaactaaaacaaagggcctcctacagttagaatctcaagaaggtttctagatcccctaaagggatccagaaaagtagaaggacatgtatgaaatgggaagctagtccaagggaa

SEQ ID NO: 521559 - DNA, 120 bp, Artificial Sequence
  ENSG00000165370_18 (sequence is synthesized)
aagattgagaaataacacacatctggagagctaaacagttgactttttttcctataaaatcttgggtttatgcatgggctggaactgaggtcattaagtgtaaattgtcaattgacacaa

SEQ ID NO: 521560 - DNA, 120 bp, Artificial Sequence
  ENSG00000165370_19 (sequence is synthesized)
atattttctgtctcctgtttgaataatagtggggcagaaatcatgccactattttacaacttcccttatgtgactgaattgagatgctggtgggaattcttcagatctctgccaacactt

SEQ ID NO: 521561 - DNA, 120 bp, Artificial Sequence
  ENSG00000165370_20 (sequence is synthesized)
ctgttttcttttggtttgtttttgtcaaataagccttttttagtcaaacagtatttacagaaaaaaagaaattcaactagaagtggcctaagtcctacaaaattcatgatgtcactgagg

SEQ ID NO: 521562 - DNA, 120 bp, Artificial Sequence
  ENSG00000165370_21 (sequence is synthesized)
aataatttgttcatcagaaatatattttgtgtccatgagatcatagacaataaatgtgatctccacatggggagcaaggaaggcagaatgaacatttttcttcctccaggcacacccatg

SEQ ID NO: 521563 - DNA, 120 bp, Artificial Sequence
  ENSG00000165370_22 (sequence is synthesized)
tgtcttttccacctgtggctctctttaaagcttttaagctctctgcagatgtgaaagagaaatatcagagagtcagaaatgacaaagaggatgatttcacaatacctagaaaacatgtaa

SEQ ID NO: 521564 - DNA, 120 bp, Artificial Sequence
  ENSG00000165370_23 (sequence is synthesized)
cctattccaaacagtcctaaaatcagagcattcagatcagacatatcctaattaatgctgttgaaataaatcacgttgggaaaactttaacaatatctaaattatccctagggtcaattc

SEQ ID NO: 521565 - DNA, 120 bp, Artificial Sequence
  ENSG00000165370_24 (sequence is synthesized)
acaggaacattcctcaaatcccaaaccgcaaaataactttgggcagggatatacatatacatttctgagggcatgggccgtatgtatgtgaccaagtaacatggaaccaaaaaaacagtc

SEQ ID NO: 521566 - DNA, 120 bp, Artificial Sequence
  ENSG00000165370_25 (sequence is synthesized)
aagccagtgtttttgatcctcctacagaacaagttaaagcaactccagagtcaaccaactgttcatgcagaaatccactgtcaatatgggtggagggagtgtttggttgaaaatggttaa

SEQ ID NO: 521567 - DNA, 120 bp, Artificial Sequence
  ENSG00000165370_26 (sequence is synthesized)
tcaggtagttgtatgatgtaagatgaccatcttcagagtttagcctcattcttgtgtgattgtcatgcctttattagaactcaagtttcatttaaataaatgcccagctcatttattttt

SEQ ID NO: 521568 - DNA, 120 bp, Artificial Sequence
  ENSG00000165370_27 (sequence is synthesized)
ttttatctcttcctcctcacagatttcaacatgaacttctcaaggggtaaacagcaatgtatttggactgtgaataactctgcatgggaatttgggattgccatgttcagaatttaggaa

SEQ ID NO: 521569 - DNA, 120 bp, Artificial Sequence
  ENSG00000165370_28 (sequence is synthesized)
agtagagggaatagaaccaaataatatagagctgacccatccaataaaaataccatgataaccttattaattccaactccattaatttggaacttgtagttattcagacaaggcatgggg

SEQ ID NO: 521570 - DNA, 120 bp, Artificial Sequence
  ENSG00000165370_29 (sequence is synthesized)
gctaaagtttacccttacactatcatttatttttctaccaaaatgcataaagtgaattaacagtcataaatttgttctaccaatttattgccaaactcttgaactgacctttccttaaag

SEQ ID NO: 521571 - DNA, 120 bp, Artificial Sequence
  ENSG00000165370_30 (sequence is synthesized)
gatatctgggtgaagaaatggcctatgtgatcaatcctcctacaggggaggggcagtgccttcaggtctgttcaaattgtcaaaggagttcaaggtagctatagcctatcctttgagtag

SEQ ID NO: 521572 - DNA, 120 bp, Artificial Sequence
  ENSG00000165370_31 (sequence is synthesized)
aaatgcttacttgggtaggaaacaggatttcaaacataaatgtctccaaacattgtgttaaaactgaacttcttgttttatttttaaagctcacccccttcaaagtgtatcagagaaaat

SEQ ID NO: 521573 - DNA, 120 bp, Artificial Sequence
  ENSG00000165370_32 (sequence is synthesized)
tgtttgccaaaatctcaaatcaaaatggaaccagaacctgtacaagtatggtaagtccatttaacagcacacacaacattctcaagggcactgagattccctttcctttttgaagttcct

SEQ ID NO: 521574 - DNA, 120 bp, Artificial Sequence
  ENSG00000165370_33 (sequence is synthesized)
cttttccctattttagtcattgtccattattttggtaaattggattcctcaaaagtgaagaccttttgaaactatgagcctggaaaagaggaccttttaattaagagcattctgctttga

SEQ ID NO: 521575 - DNA, 120 bp, Artificial Sequence
  ENSG00000165370_34 (sequence is synthesized)
tgacattttcttctaaatgaacaataaggcctatggttagcttggagatagcaagtactcgaaattttttgctattttgaataaagcactatcaacttaatgaggttttactgcacatac

SEQ ID NO: 521576 - DNA, 120 bp, Artificial Sequence
  ENSG00000165376_0 (sequence is synthesized)
agatggattttgcaaagctgtggttaacgattagaaatcctttatcacctcagcccgtggccccttgtacttcgctcccctccctcaggatccctttctccctctccaggggcatctccc

SEQ ID NO: 521577 - DNA, 120 bp, Artificial Sequence
  ENSG00000165376_1 (sequence is synthesized)
cctccaaggctctgcaaagaactgccctgtcttctagatgccttcttgaggctgcttgtggccacccacagacacttgtaaggaggagagaagtcagcctggcagagagactctgaaatg

SEQ ID NO: 521578 - DNA, 120 bp, Artificial Sequence
  ENSG00000165376_2 (sequence is synthesized)
agggattagaggtgttcaaggagcaagagcttcagcctgaagacaagggagcagtccctgaagacgcttctactgagaggtctgccatggcctctcttggcctccaacttgtgggctaca

SEQ ID NO: 521579 - DNA, 120 bp, Artificial Sequence
  ENSG00000165376_3 (sequence is synthesized)
tcctaggccttctggggcttttgggcacactggttgccatgctgctccccagctggaaaacaagttcttatgtcggtgccagcattgtgacagcagttggcttctccaagggcctctgga

SEQ ID NO: 521580 - DNA, 120 bp, Artificial Sequence
  ENSG00000165376_4 (sequence is synthesized)
tggaatgtgccacacacagcacaggcatcacccagtgtgacatctatagcacccttctgggcctgcccgctgacatccaggctgcccaggccatgatggtgacatccagtgcaatctcct

SEQ ID NO: 521581 - DNA, 120 bp, Artificial Sequence
  ENSG00000165376_5 (sequence is synthesized)
ccctggcctgcattatctctgtggtgggcatgagatgcacagtcttctgccaggaatcccgagccaaagacagagtggcggtagcaggtggagtctttttcatccttggaggcctcctgg

SEQ ID NO: 521582 - DNA, 120 bp, Artificial Sequence
  ENSG00000165376_6 (sequence is synthesized)
gattcattcctgttgcctggaatcttcatgggatcctacgggacttctactcaccactggtgcctgacagcatgaaatttgagattggagaggctctttacttgggcattatttcttccc

SEQ ID NO: 521583 - DNA, 120 bp, Artificial Sequence
  ENSG00000165376_7 (sequence is synthesized)
tgttctccctgatagctggaatcatcctctgcttttcctgctcatcccagagaaatcgctccaactactacgatgcctaccaagcccaacctcttgccacaaggagctctccaaggcctg

SEQ ID NO: 521584 - DNA, 120 bp, Artificial Sequence
  ENSG00000165376_8 (sequence is synthesized)
gtcaacctcccaaagtcaagagtgagttcaattcctacagcctgacagggtatgtgtgaagaaccaggggccagagctggggggtggctgggtctgtgaaaaacagtggacagcaccccg

SEQ ID NO: 521585 - DNA, 120 bp, Artificial Sequence
  ENSG00000165376_9 (sequence is synthesized)
agggccacaggtgagggacactaccactggatcgtgtcagaaggtgctgctgaggatagactgactttggccattggattgagcaaaggcagaaatgggggctagtgtaacagcatgcag

SEQ ID NO: 521586 - DNA, 120 bp, Artificial Sequence
  ENSG00000165376_10 (sequence is synthesized)
gttgaattgccaaggatgctcgccatgccagcctttctgttttcctcaccttgctgctcccctgccctaagtccccaaccctcaacttgaaaccccattcccttaagccaggactcagag

SEQ ID NO: 521587 - DNA, 120 bp, Artificial Sequence
  ENSG00000165376_11 (sequence is synthesized)
gatccctttgccctctggtttacctgggactccatccccaaacccactaatcacatcccactgactgaccctctgtgatcaaagaccctctctctggctgaggttggctcttagctcatt

SEQ ID NO: 521588 - DNA, 120 bp, Artificial Sequence
  ENSG00000165376_12 (sequence is synthesized)
gattggccctggaacctccatcccactcttgttatgactccacagtgtccagactaatttgtgcatgaactgaaataaaaccatcctacggtatccagggaacagaaagcaggatgcagg

SEQ ID NO: 521589 - DNA, 120 bp, Artificial Sequence
  ENSG00000165376_13 (sequence is synthesized)
atgggaggacaggaaggcagcctgggacatttaaaaaaataaaaatgaaaaaaaaacccagaacccatttctcagggcactttccagaattctctcatatttgtgggctgggatcaagcc

SEQ ID NO: 521590 - DNA, 120 bp, Artificial Sequence
  ENSG00000165376_14 (sequence is synthesized)
tgcagcttgaggaaagcacaaggaaaggaaagaagatctggtggaaagctcaggtggcagcggactctgactccactgaggaactgcctcagaagctgcgatcacaactttggctgaagc

SEQ ID NO: 521591 - DNA, 120 bp, Artificial Sequence
  ENSG00000165376_15 (sequence is synthesized)
ccctgcctcactctagggcacctgacctggcctcttgcctaaaccacaaggctaagggctatagacaatggtttccttaggaacagtaaaccagtttttctagggatggcccttggctgg

SEQ ID NO: 521592 - DNA, 120 bp, Artificial Sequence
  ENSG00000165376_16 (sequence is synthesized)
gggatgacagtgtgggagctgtggggtactgaggaagacaccattccttgacggtgtctaagaagccaggtggatgtgtgtggtggctccagtgggtgtttctactctgccagtgagagg

SEQ ID NO: 521593 - DNA, 120 bp, Artificial Sequence
  ENSG00000165376_17 (sequence is synthesized)
cagccccctagaaactcttcaggcgtaatggaaaatcagctcaaatgagatcaggcccccccagggtccacccacagagcactacagagcctctgaaagaccatagcaccaagcgagccc

SEQ ID NO: 521594 - DNA, 120 bp, Artificial Sequence
  ENSG00000165376_18 (sequence is synthesized)
cttcagattcccccactgtccatcggaagatgctccagagtggctagagggcatctaagggctccagcatggcatatccatgcccacggtgctgtgtccatgatctgagtgatagctgca

SEQ ID NO: 521595 - DNA, 120 bp, Artificial Sequence
  ENSG00000165376_19 (sequence is synthesized)
ctgctgcctgggattgcagctgaggtgggagtggagaatggttcccaggaagacagttccacctctaaggtccgaaaatgttccctttaccctggagtgggagtgaggggtcatacacca

SEQ ID NO: 521596 - DNA, 120 bp, Artificial Sequence
  ENSG00000165376_20 (sequence is synthesized)
aaggtattttccctcaccagtctaggcatgactggcttctgaaaaattccagcacacctcctcgaacctcattgtcagcagagagggcccatctgttgtctgtaacatgcctttcacatg

SEQ ID NO: 521597 - DNA, 120 bp, Artificial Sequence
  ENSG00000165376_21 (sequence is synthesized)
tccaccttcttgccatgttccagctgctctcccaacctggaaggccgtctccccttagccaagtcctcctcaggcttggagaacttcctcagcgtcacctccttcattgagccttctctg

SEQ ID NO: 521598 - DNA, 120 bp, Artificial Sequence
  ENSG00000165376_22 (sequence is synthesized)
atcactccatccctctcctacccctccctcccccaaccctcaatgtataaattgcttcttgatgcttagcattcacaatttttgattgatcgttatttgtgtgtgtgtgtccgatctcac

SEQ ID NO: 521599 - DNA, 120 bp, Artificial Sequence
  ENSG00000165376_23 (sequence is synthesized)
aagtatattgtaaacccttcggtgggtgggggccatatcctagacctctctgtatcccccagactatctgtaacagtgccaggcacacagtaggtgatcaataaacacttgttgattgag

SEQ ID NO: 521600 - DNA, 120 bp, Artificial Sequence
  ENSG00000165376_24 (sequence is synthesized)
aggcatggctgcccttttagcgtgtcccagcctgccaagagggagtgccctggagagacccttgctcaggagcactgccaggggatcagtgccccatttgtacctgcaaggtcttctaga

SEQ ID NO: 521601 - DNA, 120 bp, Artificial Sequence
  ENSG00000165376_25 (sequence is synthesized)
cccagagcaagccgattctctacacactgccttcccttcctgtaagactcatcaaaaaggcaccccaaccttgcatggatctgctgttggtattccttggggtgaagccagaagtcaggc

SEQ ID NO: 521602 - DNA, 120 bp, Artificial Sequence
  ENSG00000165376_26 (sequence is synthesized)
tttccacagagagacgggactacatggccacctgggaaggctagggagtcaaagggcctgaggaatgactacttccctccacaagggcattccctgccctgctctgcttcctgggggctt

SEQ ID NO: 521603 - DNA, 120 bp, Artificial Sequence
  ENSG00000165376_27 (sequence is synthesized)
cagcaagccttccttctagagctcctagaaccctcccatggtcaacacaacagcagcccagacaatgagatgcaagaggcctgagctcacaggccattcaggtcttctagatgccttctt

SEQ ID NO: 521604 - DNA, 120 bp, Artificial Sequence
  ENSG00000165379_0 (sequence is synthesized)
atttgactgtcttttatccaactgcccagaagcaaatgtgttaactcggcgatgccccttcatgcccgggttcttgcagagctctgaggacgcccagacccattttcctggctggatttg

SEQ ID NO: 521605 - DNA, 120 bp, Artificial Sequence
  ENSG00000165379_1 (sequence is synthesized)
gagcggctgctgggctgtggacccaggtgtgtggatcgctttacccagaagcttggaaagcgccaatattaacctgcttccaggtacatcacaaggtcaagagagtgtcttgcagccctc

SEQ ID NO: 521606 - DNA, 120 bp, Artificial Sequence
  ENSG00000165379_2 (sequence is synthesized)
ttgtttccgtgtatctacaccttcttctcttggccagaaggatatttacgttttggttcacagcatttgaagccaaaagttcagcccttcgaactggtttgctatacaaaacaaaacaaa

SEQ ID NO: 521607 - DNA, 120 bp, Artificial Sequence
  ENSG00000165379_3 (sequence is synthesized)
acaaataaggtaatgaggattgcttattaaactgcttaacaaaatccccgactcttcctcagccctttctcggctccctcctccccaccaaaatgtcaccagctcttgaattacgtggat

SEQ ID NO: 521608 - DNA, 120 bp, Artificial Sequence
  ENSG00000165379_4 (sequence is synthesized)
tcgggttggaggagaacttgaaggaaacgtgattaaagggctatgcgagaacgctctctttgctgcccgcggtccggtgggcttcgaagccaatcgtgagaaggaccggttccctccgtg

SEQ ID NO: 521609 - DNA, 120 bp, Artificial Sequence
  ENSG00000165379_5 (sequence is synthesized)
ctgcttcctccccgtgcagtgctgggtgtgcgtgtgcgagtgtgagtgcaagtgcgcgcgcgcccgggtgcgagtgtgtgtgagtgtgagcgtgtgtctgtgtgtgcgtgcgcggccgcc

SEQ ID NO: 521610 - DNA, 120 bp, Artificial Sequence
  ENSG00000165379_6 (sequence is synthesized)
ctgcctctgcccgctccccgggcgcggagccgcgggtttcatggggcgattgcagcgattcccccacccagagcgacctgcgggcagcggcggcagtggcaggagccgcctttccgattc

SEQ ID NO: 521611 - DNA, 120 bp, Artificial Sequence
  ENSG00000165379_7 (sequence is synthesized)
cctacgatgcgggtgctgagctatggcaaagggcagcgaagtgacgagcgagacccgcgtacgactgtgaaagccacctggagccaccttgccgggattgtacctgcaggcagaaagtct

SEQ ID NO: 521612 - DNA, 120 bp, Artificial Sequence
  ENSG00000165379_8 (sequence is synthesized)
tcctacgaccgtcttttcccttagaggcaccagaatccctgtaaccattcatccaggtgttgagaagatatgtagcagccgagcacccatcttttgacaccgtcctctgaaatcagcttt

SEQ ID NO: 521613 - DNA, 120 bp, Artificial Sequence
  ENSG00000165379_9 (sequence is synthesized)
ggagatgctttcactctgtccgtcttctgcagcagccaggcagagtgccgactccttcacagccgtgaggaactcttcaggctccagaagctcttaaacctgatctacaatggaaaaaat

SEQ ID NO: 521614 - DNA, 120 bp, Artificial Sequence
  ENSG00000165379_10 (sequence is synthesized)
tcttttttatctgtttctcattggcatagcagtgaaagctcagatctgtccaaagcgttgtgtctgtcagattttgtctcctaatcttgcaaccctttgtgccaagaaagggcttttatt

SEQ ID NO: 521615 - DNA, 120 bp, Artificial Sequence
  ENSG00000165379_11 (sequence is synthesized)
tgttccaccaaacattgacagaagaactgtggaactgcggttggcagacaattttgttacaaatattaaaaggaaagattttgccaatatgaccagcttggtggacctgactctatccag

SEQ ID NO: 521616 - DNA, 120 bp, Artificial Sequence
  ENSG00000165379_12 (sequence is synthesized)
gaatacaataagttttattacacctcatgctttcgctgacctacgaaatttgagggctttgcatttgaatagcaacagattgactaaaattacaaatgatatgttcagtggtctttccaa

SEQ ID NO: 521617 - DNA, 120 bp, Artificial Sequence
  ENSG00000165379_13 (sequence is synthesized)
tcttcatcatttgatactgaacaacaatcagctgactttaatttcctctacagcgtttgatgatgtcttcgcccttgaggagctggatctgtcctataataatctagaaaccattccttg

SEQ ID NO: 521618 - DNA, 120 bp, Artificial Sequence
  ENSG00000165379_14 (sequence is synthesized)
ggatgctgttgagaagatggttagcttgcatacccttagtttggatcacaatatgattgataacattcctaaggggaccttctcccatttgcacaagatgactcggttagatgtgacatc

SEQ ID NO: 521619 - DNA, 120 bp, Artificial Sequence
  ENSG00000165379_15 (sequence is synthesized)
taaattgcagaagctaccacctgaccctctctttcagcgagctcaggtactagcaacctcaggaatcataagcccatctacttttgcattaagttttggtggaaaccccttgcattgcaa

SEQ ID NO: 521620 - DNA, 120 bp, Artificial Sequence
  ENSG00000165379_16 (sequence is synthesized)
ttgtgaattgttgtggttgaggcgtctgtccagagaagatgacttagagacctgtgcttctcctccacttttaactggccgctacttttggtcaattcctgaagaagagtttttgtgtga

SEQ ID NO: 521621 - DNA, 120 bp, Artificial Sequence
  ENSG00000165379_17 (sequence is synthesized)
gcctcctctcattactcgtcatacacatgagatgagagtcctggagggacaaagggcaacactgaggtgcaaagccaggggagaccctgagcctgcaattcactggatttctcctgaagg

SEQ ID NO: 521622 - DNA, 120 bp, Artificial Sequence
  ENSG00000165379_18 (sequence is synthesized)
gaagcttatttcaaatgcaacaagatctctggtgtatgataacggaacacttgacattcttatcacaactgtaaaggatacaggtgcttttacctgcattgcttccaatcctgctgggga

SEQ ID NO: 521623 - DNA, 120 bp, Artificial Sequence
  ENSG00000165379_19 (sequence is synthesized)
agcaacacaaatagtggatcttcatataattaagctccctcacttactaaatagtacaaaccatatccatgagcctgatcctggttcttcagatatctcaacttctaccaagtcaggttc

SEQ ID NO: 521624 - DNA, 120 bp, Artificial Sequence
  ENSG00000165379_20 (sequence is synthesized)
taatacaagcagtagtaatggtgatactaaattgagtcaagataaaattgtggtggcagaagctacatcatcaacggcactacttaaatttaattttcaaagaaatatccctggaatacg

SEQ ID NO: 521625 - DNA, 120 bp, Artificial Sequence
  ENSG00000165379_21 (sequence is synthesized)
tatgtttcaaatccagtacaatggtacttatgatgacacccttgtttacagaatgatacctcctacgagcaaaacttttctggtcaataatctggctgctggaactatgtatgacttgtg

SEQ ID NO: 521626 - DNA, 120 bp, Artificial Sequence
  ENSG00000165379_22 (sequence is synthesized)
tgtcttggccatatatgatgatggcatcacttccctcactgccacaagagtcgtgggttgcatccagtttactacggaacaggattatgtgcgttgccatttcatgcagtctcagttttt

SEQ ID NO: 521627 - DNA, 120 bp, Artificial Sequence
  ENSG00000165379_23 (sequence is synthesized)
gggaggcaccatgattattattattggtggaatcattgtagcatctgtgctggtattcatcattattctgatgatccggtataaggtttgcaacaataatgggcaacacaaggtcaccaa

SEQ ID NO: 521628 - DNA, 120 bp, Artificial Sequence
  ENSG00000165379_24 (sequence is synthesized)
ggttagcaatgtttattcccaaactaacggggctcaaatacaaggctgtagtgtaacgctgccccagtccgtgtccaaacaagctgtgggacacgaagagaatgcccagtgttgtaaagc

SEQ ID NO: 521629 - DNA, 120 bp, Artificial Sequence
  ENSG00000165379_25 (sequence is synthesized)
taccagtgacaatgtgattcaatcttcagaaacttgttcgagtcaggactcctctaccactacctctgctttgcctccttcctggacttcaagcacttctgtgtcccaaaagcagaaaag

SEQ ID NO: 521630 - DNA, 120 bp, Artificial Sequence
  ENSG00000165379_26 (sequence is synthesized)
aaagactggcacaaagccaagtacagaaccacagaatgaagccgtcacaaatgttgaatcccaaaacactaacaggaacaactcaactgccttgcagttagctagccgtcctcccgattc

SEQ ID NO: 521631 - DNA, 120 bp, Artificial Sequence
  ENSG00000165379_27 (sequence is synthesized)
tgtcacagaggggcccacgtctaaaagagcacatataaagccaaatgctttgctgactaatgttgaccagattgtccaggaaacacagaggctggagttaatctgaagagcaccacttct

SEQ ID NO: 521632 - DNA, 120 bp, Artificial Sequence
  ENSG00000165379_28 (sequence is synthesized)
cctctctctcctgaaaaaatttgccactgatatttttactggataaaattcaaaaatgtttcaattcacaaaggctaattgttgaactggtgtcgtagaagaaattgtctacaggagcca

SEQ ID NO: 521633 - DNA, 120 bp, Artificial Sequence
  ENSG00000165379_29 (sequence is synthesized)
aggtgaaagtctctgatgacggcggaactggctccattagaccatggttcatcctcttttaaaaccaaatttttttttcttctggcctacaagtattttttttttaaaaaagaaaaaaag

SEQ ID NO: 521634 - DNA, 120 bp, Artificial Sequence
  ENSG00000165379_30 (sequence is synthesized)
cctacattggcatcaagttctgtatcaatccatcttacattgccatccatgatttaacagactgtagaatcttgaataatctatatcactttaacaaataaatgttttactatgacagaa

SEQ ID NO: 521635 - DNA, 120 bp, Artificial Sequence
  ENSG00000165379_31 (sequence is synthesized)
gaaaagctgaagtagttattaccagtagacctgccttaaaataaatgttaaggagagttctgcagatcaaaataagaagacatcaaacagtaggtctcaatcagtaagaagaaataaaga

SEQ ID NO: 521636 - DNA, 120 bp, Artificial Sequence
  ENSG00000165379_32 (sequence is synthesized)
tctcagtaaagaatccctgtaaccattcatccaggtgttgagaagatatgtagcagccgagcacccatcttttgacaccgtcctctgaaatcagctttggagatgctttcactctgtccg

SEQ ID NO: 521637 - DNA, 120 bp, Artificial Sequence
  ENSG00000165379_33 (sequence is synthesized)
aacttcagtgagagatagaacaacatgttaaaggattatgtggaaggagttttgggggaggaattcctgaagttcataaagatgagactacttgaagaagaatttgattcctctctaaaa

SEQ ID NO: 521638 - DNA, 120 bp, Artificial Sequence
  ENSG00000165379_34 (sequence is synthesized)
agattaatagaacttacgagcttaggaacttagaagttcagcaggactgttttatctgcagctgtctttggtcatagtcaatataaaactccacatgcttcacaaatgcgtttactcatc

SEQ ID NO: 521639 - DNA, 120 bp, Artificial Sequence
  ENSG00000165379_35 (sequence is synthesized)
tgtttatgtgacactaacactccgtggaagagattgttacaggagatagagttattgagtcaaccccagacactaatcaggaactgactccactttacatggagatatcatcaacagaac

SEQ ID NO: 521640 - DNA, 120 bp, Artificial Sequence
  ENSG00000165379_36 (sequence is synthesized)
atttgaaagtgtaggtattcagggagcactgaaggaaatacaataacattagagttggaagtaaaccatgcagggagaaaaagaccattttttctctttcaaggatgaacaactaaaact

SEQ ID NO: 521641 - DNA, 120 bp, Artificial Sequence
  ENSG00000165379_37 (sequence is synthesized)
ggtcgaggaaagtgtgtcagagggctcctccatcttgagagaataggaggaggggatatctgccaagaatgagaaaaagaaatgaagatttacaactcaggaaaaaatgatcagtaaaac

SEQ ID NO: 521642 - DNA, 120 bp, Artificial Sequence
  ENSG00000165379_38 (sequence is synthesized)
attacaaagccttttaaagcaacgtgaagatcttgtttgctactagaaacatgaatttgtggcgggcaaggtacatgttattgtgctgcagcccagggaaggtaatggagaagtaggtga

SEQ ID NO: 521643 - DNA, 120 bp, Artificial Sequence
  ENSG00000165379_39 (sequence is synthesized)
ttttgtgtagtgagggacttgtgaccactgttggtaatagcacagaacataattatggaggggcagtaagggttacatgataatagttgactattaatattaggagaagcgcaggtagct

SEQ ID NO: 521644 - DNA, 120 bp, Artificial Sequence
  ENSG00000165379_40 (sequence is synthesized)
agaaaggaacaaatgagttgagtcaattagaaagaaatttagtttgaagtttttgatgaatgtaaagaggcaaaaatgaattactttgtgagacatgggggcaaaaaaatatctgaaact

SEQ ID NO: 521645 - DNA, 120 bp, Artificial Sequence
  ENSG00000165379_41 (sequence is synthesized)
ttgggtttgaaatatgctatgtgatgacaagttacaaggcatggttatatgaagcgtaaacgagtgatagagagtgaatatgatcatcaatagcatgaaggagagaagcttttccttttt

SEQ ID NO: 521646 - DNA, 120 bp, Artificial Sequence
  ENSG00000165379_42 (sequence is synthesized)
taaaaacaggatgatatggggtttcacaatgtattattagaggtagtatagatgtctgcatgtgtaagacagaaaagaaaagagaagagaagaaaagaaaagaaaaacaaaacatgcaaa

SEQ ID NO: 521647 - DNA, 120 bp, Artificial Sequence
  ENSG00000165379_43 (sequence is synthesized)
ccggtttttgaacttgtcgagtagggagaaagtggatcctagctttgaggatttgaaaagagggatataatcataaaatcatagagtaataggtttgggaagaaacttagaactaatatt

SEQ ID NO: 521648 - DNA, 120 bp, Artificial Sequence
  ENSG00000165379_44 (sequence is synthesized)
gtacaatactataacttatagatgaggaagatcataaccaagagaggaaatttcttgtccagaaacagctatctcttagataatggttgggactagaatgcaaggtagttaacctccctt

SEQ ID NO: 521649 - DNA, 120 bp, Artificial Sequence
  ENSG00000165379_45 (sequence is synthesized)
gttcttggtaacagtaaagatgatggctgtggtggtagtgattttgaacatagtggtgtaggcatacataccaagagcttattaaataagaaaacttcgttcctagctaatacaaaatgg

SEQ ID NO: 521650 - DNA, 120 bp, Artificial Sequence
  ENSG00000165379_46 (sequence is synthesized)
aaaggtaaattaatgtttggctttaatgctccctccaaaatgttagctctgtaaggacaggggtttttcatctcttatttcttggtaacatatctgattgagttaatactcattatatat

SEQ ID NO: 521651 - DNA, 120 bp, Artificial Sequence
  ENSG00000165379_47 (sequence is synthesized)
ttgcagaatacatgaataaacacacctttttaaaatttagaatatgttgatcaattagatgctattgtagaactatgagtctgctaaagggaatgttattttatgaagcatttatcactc

SEQ ID NO: 521652 - DNA, 120 bp, Artificial Sequence
  ENSG00000165379_48 (sequence is synthesized)
caagtattcactaagtattgatggaccatcagaatacataacacttactcagctcataatatgaaccacatgctgtacatacattattttttagtcctcgtaataactcttgaaagtaat

SEQ ID NO: 521653 - DNA, 120 bp, Artificial Sequence
  ENSG00000165379_49 (sequence is synthesized)
tattataccaatggggacctaagcttgtatttaaactgtcaatttcttactgctagagctcagaccaaaaatatatagtgaacttattgggcagatgttacaaaagataatttgtgtgat

SEQ ID NO: 521654 - DNA, 120 bp, Artificial Sequence
  ENSG00000165379_50 (sequence is synthesized)
agtgggttcatcacaaagcattaattgatttgatattttcaaagatatttgagctaaatttacatgataaggagttagctaggcaaagaagaggaattaggatattccaaattggtggtg

SEQ ID NO: 521655 - DNA, 120 bp, Artificial Sequence
  ENSG00000165383_0 (sequence is synthesized)
tttttcatgatttttcctcacactgatcactatccaatcagaacaataaacttctaacactcccttactaaaagaacatggttaagggtgagaaaggccccaagggcaagaagatcaccc

SEQ ID NO: 521656 - DNA, 120 bp, Artificial Sequence
  ENSG00000165383_1 (sequence is synthesized)
tcaaggtggccaggaattgcatcaaaatcacttttgatgggaaaaagcgccttgacttgagcaagatgggaattaccaccttccccaagtgtattctgcgccttagtgacatggacgagc

SEQ ID NO: 521657 - DNA, 120 bp, Artificial Sequence
  ENSG00000165383_2 (sequence is synthesized)
tggaccttagccggaatcttatcaggaagatccctgactccatctccaagttccagaacctccggtggctggacctgcacagcaactacatagacaagctgcctgagtccattggccaga

SEQ ID NO: 521658 - DNA, 120 bp, Artificial Sequence
  ENSG00000165383_3 (sequence is synthesized)
tgaccagcctgctctacctcaacgtcagcaacaaccggctgaccagcaacgggctgcccgtggagctgaagcaactcaagaacatccgcgctgtgaacctaggcttgaaccacctggaca

SEQ ID NO: 521659 - DNA, 120 bp, Artificial Sequence
  ENSG00000165383_4 (sequence is synthesized)
gcgtgcccaccacactgggggccctgaaggagctccacgaggtagggctccatgacaacctactgaacaacatccccgtgagcatctccaagctccccaagctgaaaaagctcaacataa

SEQ ID NO: 521660 - DNA, 120 bp, Artificial Sequence
  ENSG00000165383_5 (sequence is synthesized)
agcggaacccctttccaaagccaggtgagtcggaaatattcatagactccatcaggaggctggagaacttgtatgttgtggaggagaaggatctgtgtgcggcttgcctgagaaaatgcc

SEQ ID NO: 521661 - DNA, 120 bp, Artificial Sequence
  ENSG00000165383_6 (sequence is synthesized)
agaccatctttcccaatctgatctcacccaattccatggccaaggactcctgggaagactggagaatacgcttgacatcttcctagagtagctgtggcaaaatcttgaagactactcagc

SEQ ID NO: 521662 - DNA, 120 bp, Artificial Sequence
  ENSG00000165383_7 (sequence is synthesized)
taacagaataaacgactctgaagaggagaagcccccagttaggagaagacagagtggcaagtgagatgttctggaaaccaggctcgccggagctggccaagccaccgacttgcttctcaa

SEQ ID NO: 521663 - DNA, 120 bp, Artificial Sequence
  ENSG00000165383_8 (sequence is synthesized)
attcacttcacctcccttagctttagcccacctgtgtgtgaaaatgactttgggaaatatttgatgtggtttttaaaatgtatatagaaaaaaatttaagaaaattacagattatatatt

SEQ ID NO: 521664 - DNA, 120 bp, Artificial Sequence
  ENSG00000165383_9 (sequence is synthesized)
atagacaactaaatatttaagactttaagacttaaaaggcttactgcctctacatttcactcagactagtacatctcaatgccagtagtctgtgataaatttatgtaggtataatgagat

SEQ ID NO: 521665 - DNA, 90 bp, Artificial Sequence
  ENSG00000165383_10 (sequence is synthesized)
gccagtagtctgtgataaatttatgtaggtataatgagatactgatatggtttgggcatttgtctcctccaaacctcatgttgagaatgg

SEQ ID NO: 521666 - DNA, 120 bp, Artificial Sequence
  ENSG00000165383_11 (sequence is synthesized)
atccttttggtaatgagtgagttctcactgtattagatcctgttgaaaattgattgttaaaaagaccttggcacctccctctcctctctctctcttcctctcactatgtgatgcctgctc

SEQ ID NO: 521667 - DNA, 120 bp, Artificial Sequence
  ENSG00000165383_12 (sequence is synthesized)
cccttcaccttccaccatgagtggaagcacctataccccaaagccctcaccagaaggaggtgccggcacctgtacagcttgtaagaaccatgactcaaataaacttcttttctttataaa

SEQ ID NO: 521668 - DNA, 120 bp, Artificial Sequence
  ENSG00000165389_0 (sequence is synthesized)
agactgacgtgtgagctgcatcgcgggaggcgcatggcggggatggcgctggcgcgggcctggaagcagatgtcctggttctactaccagtacctgctggtcacggcgctctacatgctg

SEQ ID NO: 521669 - DNA, 120 bp, Artificial Sequence
  ENSG00000165389_1 (sequence is synthesized)
gagccctgggagcggacggtgttcaattccatgctggtttccattgtggggatggcactatacacaggatacgtcttcatgccccagcacatcatggcgatattgcactactttgaaatc

SEQ ID NO: 521670 - DNA, 120 bp, Artificial Sequence
  ENSG00000165389_2 (sequence is synthesized)
gtacaatgaccaagatgcgaccaggatcagaggttccttggggaagacccaccctacgaagttggaatgagaccatcagatgtgataagaaactcttctagatgtcaacataaccaacct

SEQ ID NO: 521671 - DNA, 120 bp, Artificial Sequence
  ENSG00000165389_3 (sequence is synthesized)
tataaagactaaaattcatgagtagaacaggaaaatcatcctgactcatgtgttgtgttctttatttttaattttcaaagaggctcttgtatagcagtttttgtctattttaacattgta

SEQ ID NO: 521672 - DNA, 120 bp, Artificial Sequence
  ENSG00000165389_4 (sequence is synthesized)
gtcatttgtactttgatatcagtattttcttaacctttgtgactgtttcaatattacccccgtgaaagcttttcttaatgtaactttgagtacattttaattgccttctatttttaaaac

SEQ ID NO: 521673 - DNA, 120 bp, Artificial Sequence
  ENSG00000165389_5 (sequence is synthesized)
tcaaaatcattagttgggctttactgttcttgctattgtatggcatatacatctgcctggatatatttctactcttgaccaaagttttgtaaagaacaatataagatttcgggtaggggt

SEQ ID NO: 521674 - DNA, 120 bp, Artificial Sequence
  ENSG00000165389_6 (sequence is synthesized)
atggggagggaagatattttattgagaactacttaacaaaagatttatctgtaagcttgaactcaggagtacagttttagctatctagactctaacagcttttgctttaaaattattaaa

SEQ ID NO: 521675 - DNA, 120 bp, Artificial Sequence
  ENSG00000165389_7 (sequence is synthesized)
gtgtttcttaatgaaaaagaaaagatcttgctaaagttaaaataaggaacatttcaccttttaaatatttaattcttatgtggacttatttccagaaaactttggtgataattcttgaga

SEQ ID NO: 521676 - DNA, 120 bp, Artificial Sequence
  ENSG00000165389_8 (sequence is synthesized)
caaaaggtggttaagtagcattattatgtaatgcttatataccatagagtttttaatagaagagaaatccatttcctccgagggtcactattaacaatgtacttccttaaatttagttta

SEQ ID NO: 521677 - DNA, 120 bp, Artificial Sequence
  ENSG00000165389_9 (sequence is synthesized)
atgattgtaatgggtgctgcatttgcacattgcattaagttatgatgagacgaattgttgttaaaaattatagcaaaaagaaatgtaaacttggttaaaatcctttcactctttgtattg

SEQ ID NO: 521678 - DNA, 120 bp, Artificial Sequence
  ENSG00000165389_10 (sequence is synthesized)
ttttttttaaggtttttattccttaaatgtaaaatgactacctaattttttgatgtaaatacattaaattcaaagagaaaaaaaatcagctgatgtagcagtatatcttttccttgatgg

SEQ ID NO: 521679 - DNA, 120 bp, Artificial Sequence
  ENSG00000165389_11 (sequence is synthesized)
tattgctgaattattttctgtggaggaccagataagcagtaagtatgtcttatcctatatgttttgcaacataaaaatattgctaattgaaaagaattaggcaattatgtgtgttgctgg

SEQ ID NO: 521680 - DNA, 70 bp, Artificial Sequence
  ENSG00000165389_12 (sequence is synthesized)
tgagacggagtcttgccctgtcgcccaggatggagtgcaacagcatgatctcggttcactgcaacctcca

SEQ ID NO: 521681 - DNA, 89 bp, Artificial Sequence
  ENSG00000165389_13 (sequence is synthesized)
tgaggtattttttgccctacgttttaaggactagacttttgaagtattttatagtctagaggtctcaagtaatatatatgtgtttaata

SEQ ID NO: 521682 - DNA, 120 bp, Artificial Sequence
  ENSG00000165389_14 (sequence is synthesized)
tatagtctagaggtctcaagtaatatatatgtgtttaatatttttagagccaattgataccacaattagataggagtagtgagaataatatggaattacttggtttgaagtagttaaaaa

SEQ ID NO: 521683 - DNA, 120 bp, Artificial Sequence
  ENSG00000165389_15 (sequence is synthesized)
ttggatatggttatatctgagctgtagtcatattatctcaagaaaaataatacgaggatttaacataagatttgttctattaatgcccaaatttggctttcctctactatcccccataga

SEQ ID NO: 521684 - DNA, 120 bp, Artificial Sequence
  ENSG00000165389_16 (sequence is synthesized)
gaaccactaacaagtggatgtctaatattcctctggtgagttgaaggcaggagaagttgagaatcattagtttcaatgagtatccaggtgacctatcctggccctctactcagaaaccgg

SEQ ID NO: 521685 - DNA, 120 bp, Artificial Sequence
  ENSG00000165389_17 (sequence is synthesized)
caatttgtcttcactctgagattcattaaattgctgttgtataactgatggttattatgaacactgacctgtgagacatatggaagataaagtttggtcttacaggaaatcttgaggaga

SEQ ID NO: 521686 - DNA, 120 bp, Artificial Sequence
  ENSG00000165389_18 (sequence is synthesized)
gtcaaaagagaaatgggagatgtctcttgagaggtgatcagagaagtttatgctcactgtctgatgcaaatgtctggtctatttgttagtaaataacagggaaatcattttcactttttg

SEQ ID NO: 521687 - DNA, 120 bp, Artificial Sequence
  ENSG00000165389_19 (sequence is synthesized)
ttaaaaataaggtatttacaagcataccttgtagttattgtgggttcagtttcagaccactgcaataaagtgaatatctcaataaagtgagtcacatgaagttttttggttttcccctgc

SEQ ID NO: 521688 - DNA, 120 bp, Artificial Sequence
  ENSG00000165389_20 (sequence is synthesized)
atataaaagttacatttacaccatcctgtagtctattaagtgtgcagtagcattatggctaaaaaaaaaaaacacccaatatacctatcttaattaaagaattatttattgctgaaaaaa

SEQ ID NO: 521689 - DNA, 120 bp, Artificial Sequence
  ENSG00000165392_0 (sequence is synthesized)
gtgtactgtgtgcgccggggaggcgccggcttgtactcggcagcgcgggaataaagtttgctgatttggtgtctagcctggatgcctgggttgcaggccctgcttgtggtggcgctccac

SEQ ID NO: 521690 - DNA, 120 bp, Artificial Sequence
  ENSG00000165392_1 (sequence is synthesized)
agtcatccggctgaagaagacctgttggactggatcttctcgggttttctttcagatattgttttgtatttacccatgaagacattgttttttggactctgcaaataggacatttcaaag

SEQ ID NO: 521691 - DNA, 120 bp, Artificial Sequence
  ENSG00000165392_2 (sequence is synthesized)
atgagtgaaaaaaaattggaaacaactgcacagcagcggaaatgtcctgaatggatgaatgtgcagaataaaagatgtgctgtagaagaaagaaaggcatgtgttcggaagagtgttttt

SEQ ID NO: 521692 - DNA, 120 bp, Artificial Sequence
  ENSG00000165392_3 (sequence is synthesized)
gaagatgacctccccttcttagaattcactggatccattgtgtatagttacgatgctagtgattgctctttcctgtcagaagatattagcatgagtctatcagatggggatgtggtggga

SEQ ID NO: 521693 - DNA, 120 bp, Artificial Sequence
  ENSG00000165392_4 (sequence is synthesized)
tttgacatggagtggccaccattatacaatagagggaaacttggcaaagttgcactaattcagttgtgtgtttctgagagcaaatgttacttgttccacgtttcttccatgtcagttttt

SEQ ID NO: 521694 - DNA, 120 bp, Artificial Sequence
  ENSG00000165392_5 (sequence is synthesized)
ccccagggattaaaaatgttgcttgaaaataaagcagttaaaaaggcaggtgtaggaattgaaggagatcagtggaaacttctacgtgactttgatatcaaattgaagaattttgtggag

SEQ ID NO: 521695 - DNA, 120 bp, Artificial Sequence
  ENSG00000165392_6 (sequence is synthesized)
ttgacagatgttgccaataaaaagctgaaatgcacagagacctggagccttaacagtctggttaaacacctcttaggtaaacagctcctgaaagacaagtctatccgctgtagcaattgg

SEQ ID NO: 521696 - DNA, 120 bp, Artificial Sequence
  ENSG00000165392_7 (sequence is synthesized)
agtaaatttcctctcactgaggaccagaaactgtatgcagccactgatgcttatgctggttttattatttaccgaaatttagagattttggatgatactgtgcaaaggtttgctataaat

SEQ ID NO: 521697 - DNA, 120 bp, Artificial Sequence
  ENSG00000165392_8 (sequence is synthesized)
aaagaggaagaaatcctacttagcgacatgaacaaacagttgacttcaatctctgaggaagtgatggatctggctaagcatcttcctcatgctttcagtaaattggaaaacccacggagg

SEQ ID NO: 521698 - DNA, 120 bp, Artificial Sequence
  ENSG00000165392_9 (sequence is synthesized)
gtttctatcttactaaaggatatttcagaaaatctatattcactgaggaggatgataattgggtctactaacattgagactgaactgaggcccagcaataatttaaacttattatccttt

SEQ ID NO: 521699 - DNA, 120 bp, Artificial Sequence
  ENSG00000165392_10 (sequence is synthesized)
gaagattcaactactgggggagtacaacagaaacaaattagagaacatgaagttttaattcacgttgaagatgaaacatgggacccaacacttgatcatttagctaaacatgatggagaa

SEQ ID NO: 521700 - DNA, 120 bp, Artificial Sequence
  ENSG00000165392_11 (sequence is synthesized)
gatgtacttggaaataaagtggaacgaaaagaagatggatttgaagatggagtagaagacaacaaattgaaagagaatatggaaagagcttgtttgatgtcgttagatattacagaacat

SEQ ID NO: 521701 - DNA, 120 bp, Artificial Sequence
  ENSG00000165392_12 (sequence is synthesized)
gaactccaaattttggaacagcagtctcaggaagaatatcttagtgatattgcttataaatctactgagcatttatctcccaatgataatgaaaacgatacgtcctatgtaattgagagt

SEQ ID NO: 521702 - DNA, 120 bp, Artificial Sequence
  ENSG00000165392_13 (sequence is synthesized)
gatgaagatttagaaatggagatgcttaagcatttatctcccaatgataatgaaaacgatacgtcctatgtaattgagagtgatgaagatttagaaatggagatgcttaagtctttagaa

SEQ ID NO: 521703 - DNA, 120 bp, Artificial Sequence
  ENSG00000165392_14 (sequence is synthesized)
aacctcaatagtggcacggtagaaccaactcattctaaatgcttaaaaatggaaagaaatctgggtcttcctactaaagaagaagaagaagatgatgaaaatgaagctaatgaaggggaa

SEQ ID NO: 521704 - DNA, 120 bp, Artificial Sequence
  ENSG00000165392_15 (sequence is synthesized)
gaagatgatgataaggactttttgtggccagcacccaatgaagagcaagttacttgcctcaagatgtactttggccattccagttttaaaccagttcagtggaaagtgattcattcagta

SEQ ID NO: 521705 - DNA, 120 bp, Artificial Sequence
  ENSG00000165392_16 (sequence is synthesized)
ttagaagaaagaagagataatgttgctgtcatggcaactggatatggaaagagtttgtgcttccagtatccacctgtttatgtaggcaagattggccttgttatctctccccttatttct

SEQ ID NO: 521706 - DNA, 120 bp, Artificial Sequence
  ENSG00000165392_17 (sequence is synthesized)
ctgatggaagaccaagtgctacagcttaaaatgtccaacatcccagcttgcttccttggatcagcacagtcagaaaatgttctaacagatattaaattaggtaaataccggattgtatac

SEQ ID NO: 521707 - DNA, 120 bp, Artificial Sequence
  ENSG00000165392_18 (sequence is synthesized)
gtaactccagaatactgttcaggtaacatgggcctgctccagcaacttgaggctgatattggtatcacgctcattgctgtggatgaggctcactgtatttctgagtgggggcatgatttt

SEQ ID NO: 521708 - DNA, 120 bp, Artificial Sequence
  ENSG00000165392_19 (sequence is synthesized)
agggattcattcaggaagttgggctccctaaagacagcactgccaatggttccaatcgttgcacttactgctactgcaagttcttcaatccgggaagacattgtacgttgcttaaatctg

SEQ ID NO: 521709 - DNA, 120 bp, Artificial Sequence
  ENSG00000165392_20 (sequence is synthesized)
agaaatcctcagatcacctgtactggttttgatcgaccaaacctgtatttagaagttaggcgaaaaacagggaatatccttcaggatctgcagccatttcttgtcaaaacaagttcccac

SEQ ID NO: 521710 - DNA, 120 bp, Artificial Sequence
  ENSG00000165392_21 (sequence is synthesized)
tgggaatttgaaggtccaacaatcatctactgtccttctagaaaaatgacacaacaagttacaggtgaacttaggaaactgaatctatcctgtggaacataccatgcgggcatgagtttt

SEQ ID NO: 521711 - DNA, 120 bp, Artificial Sequence
  ENSG00000165392_22 (sequence is synthesized)
agcacaaggaaagacattcatcataggtttgtaagagatgaaattcagtgtgtcatagctaccatagcttttggaatgggcattaataaagctgacattcgccaagtcattcattacggt

SEQ ID NO: 521712 - DNA, 120 bp, Artificial Sequence
  ENSG00000165392_23 (sequence is synthesized)
gctcctaaggacatggaatcatattatcaggagattggtagagctggtcgtgatggacttcaaagttcttgtcacgtcctctgggctcctgcagacattaacttaaataggcaccttctt

SEQ ID NO: 521713 - DNA, 120 bp, Artificial Sequence
  ENSG00000165392_24 (sequence is synthesized)
actgagatacgtaatgagaagtttcgattatacaaattaaagatgatggcaaagatggaaaaatatcttcattctagcagatgtaggagacaaatcatcttgtctcattttgaggacaaa

SEQ ID NO: 521714 - DNA, 120 bp, Artificial Sequence
  ENSG00000165392_25 (sequence is synthesized)
caagtacaaaaagcctccttgggaattatgggaactgaaaaatgctgtgataattgcaggtccagattggatcattgctattccatggatgactcagaggatacatcctgggactttggt

SEQ ID NO: 521715 - DNA, 120 bp, Artificial Sequence
  ENSG00000165392_26 (sequence is synthesized)
ccacaagcatttaagcttttgtctgctgtggacatcttaggcgaaaaatttggaattgggcttccaattttatttctccgaggatctaattctcagcgtcttgccgatcaatatcgcagg

SEQ ID NO: 521716 - DNA, 120 bp, Artificial Sequence
  ENSG00000165392_27 (sequence is synthesized)
cacagtttatttggcactggcaaggatcaaacagagagttggtggaaggctttttcccgtcagctgatcactgagggattcttggtagaagtttctcggtataacaaatttatgaagatt

SEQ ID NO: 521717 - DNA, 120 bp, Artificial Sequence
  ENSG00000165392_28 (sequence is synthesized)
tgcgcccttacgaaaaagggtagaaattggcttcataaagctaatacagaatctcagagcctcatccttcaagctaatgaagaattgtgtccaaagaagttgcttctgcctagttcgaaa

SEQ ID NO: 521718 - DNA, 120 bp, Artificial Sequence
  ENSG00000165392_29 (sequence is synthesized)
actgtatcttcgggcaccaaagagcattgttataatcaagtaccagttgaattaagtacagagaagaagtctaacttggagaagttatattcttataaaccatgtgataagatttcttct

SEQ ID NO: 521719 - DNA, 120 bp, Artificial Sequence
  ENSG00000165392_30 (sequence is synthesized)
cagtcaccagaaaaagcttacagttcctcacagcctgttatttcggcacaagagcaggagactcagattgtgttatatggcaaattggtagaagctaggcagaaacatgccaataaaatg

SEQ ID NO: 521720 - DNA, 120 bp, Artificial Sequence
  ENSG00000165392_31 (sequence is synthesized)
gatgttcccccagctattctggcaacaaacaagatactggtggatatggccaaaatgagaccaactacggttgaaaacgtaaaaaggattgatggtgtttctgaaggcaaagctgccatg

SEQ ID NO: 521721 - DNA, 120 bp, Artificial Sequence
  ENSG00000165392_32 (sequence is synthesized)
ttggcccctctgttggaagtcatcaaacatttctgccaaacaaatagtgttcagacagacctcttttcaagtacaaaacctcaagaagaacagaagacgagtctggtagcaaaaaataaa

SEQ ID NO: 521722 - DNA, 120 bp, Artificial Sequence
  ENSG00000165392_33 (sequence is synthesized)
atatgcacactttcacagtctatggccatcacatactctttattccaagaaaagaagatgcctttgaagagcatagctgagagcaggattctgcctctcatgacaattggcatgcactta

SEQ ID NO: 521723 - DNA, 120 bp, Artificial Sequence
  ENSG00000165392_34 (sequence is synthesized)
tcccaagcggtgaaagctggctgcccccttgatttggagcgagcaggcctgactccagaggttcagaagattattgctgatgttatccgaaaccctcccgtcaactcagatatgagtaaa

SEQ ID NO: 521724 - DNA, 120 bp, Artificial Sequence
  ENSG00000165392_35 (sequence is synthesized)
attagcctaatcagaatgttagttcctgaaaacattgacacgtaccttatccacatggcaattgagatccttaaacatggtcctgacagcggacttcaaccttcatgtgatgtcaacaaa

SEQ ID NO: 521725 - DNA, 120 bp, Artificial Sequence
  ENSG00000165392_36 (sequence is synthesized)
aggagatgttttcccggttctgaagagatctgttcaagttctaagagaagcaaggaagaagtaggcatcaatactgagacttcatctgcagagagaaagagacgattacctgtgtggttt

SEQ ID NO: 521726 - DNA, 120 bp, Artificial Sequence
  ENSG00000165392_37 (sequence is synthesized)
gccaaaggaagtgataccagcaagaaattaatggacaaaacgaaaaggggaggtctttttagttaagctggcaattaccagaacaattatgtttcttgctgtattataagaggatagcta

SEQ ID NO: 521727 - DNA, 120 bp, Artificial Sequence
  ENSG00000165392_38 (sequence is synthesized)
tattttatttctgaagagtaaggagtagtattttggcttaaaaatcattctaattacaaagttcactgtttattgaagaactggcatcttaaatcagccttccgcaattcatgtagtttc

SEQ ID NO: 521728 - DNA, 120 bp, Artificial Sequence
  ENSG00000165392_39 (sequence is synthesized)
tgggtcttctgggagcctacgtgagtacatcacctaacagaatattaaattagacttcctgtaagattgctttaagaaactgttactgtcctgttttctaatctctttattaaaacagtg

SEQ ID NO: 521729 - DNA, 120 bp, Artificial Sequence
  ENSG00000165392_40 (sequence is synthesized)
agtgtatttggaaaatgttatgtgctctgatttgatatagataacagattagtagttacatggtaattatgtgatataaaatattcatatattatcaaaattctgttttgtaaatgtaag

SEQ ID NO: 521730 - DNA, 120 bp, Artificial Sequence
  ENSG00000165392_41 (sequence is synthesized)
catagttattttacaaattgtttttactgtcttttgaagaagttcttaaatacgttgttaaatggtattagttgaccagggcagtgaaaatgaaaccgcattttgggtgccattaaatag

SEQ ID NO: 521731 - DNA, 120 bp, Artificial Sequence
  ENSG00000165392_42 (sequence is synthesized)
ggaaaaaacatgtaaaaaatgtaaaatggagaccaattgcactaggcaagtgtatattttgtattttatatacaatttctattatttttcaagtaataaaacaatgtttttcatactgaa

SEQ ID NO: 521732 - DNA, 120 bp, Artificial Sequence
  ENSG00000165392_43 (sequence is synthesized)
tgaatattatatatatattttttagctttcatttacttaattattttaagtacctttatttttccaggatgtcagaatttgattctaatctctcttatgtagcacatgtgacttaattta

SEQ ID NO: 521733 - DNA, 120 bp, Artificial Sequence
  ENSG00000165392_44 (sequence is synthesized)
ctatactgtgacacagagttgggtaaacgatgattatttaactttaagcagttcaccatccatttcaaagcctttgattggcttttttgtaaataaaaataacttgttaagaaacaaata

SEQ ID NO: 521734 - DNA, 120 bp, Artificial Sequence
  ENSG00000165392_45 (sequence is synthesized)
tatctgtcatagaagaactagaaaatccagggaagtgagaaaaatgaaaataaaaatcattcatagttttactagtagctaatcacagtcaacctcttttgtgtatcccaccagactttt

SEQ ID NO: 521735 - DNA, 120 bp, Artificial Sequence
  ENSG00000165392_46 (sequence is synthesized)
ttatattcatttgtttttagttaaaatataaaagtctcgtatattcccatttttctgcattgcattaccagaaggtagtggcgcctattaaatatgtgatatgttgttgtccagccatgg

SEQ ID NO: 521736 - DNA, 120 bp, Artificial Sequence
  ENSG00000165392_47 (sequence is synthesized)
cttctgcatttgcatgcttttgtgtgtgcatctgcaataccctgtgaatatcctgtgtgatggagtggcaagtacgcacagacacgtctgctgcatgcctaggtacgaggctgtctccag

SEQ ID NO: 521737 - DNA, 120 bp, Artificial Sequence
  ENSG00000165392_48 (sequence is synthesized)
gagaagcacttgtttgattatttgagttgccaattgaatttgctgctttttttcatggcttgccattttcactgaaaagaatgactaatgaaaaacgatgattggttattagatttggat

SEQ ID NO: 521738 - DNA, 120 bp, Artificial Sequence
  ENSG00000165392_49 (sequence is synthesized)
gtttggcagacattttctcaaaattgaactaagttggcctcttcacggaaaacaactggtatttgttgtgccaatgataaaattggagatttctagcaaaatgtataattttggaaaagt

SEQ ID NO: 521739 - DNA, 120 bp, Artificial Sequence
  ENSG00000165392_50 (sequence is synthesized)
tgtgttcctccactggaagcttgacagctttccttaacataaagacttctctttctcttcgctttcactactactactactaattcttcttctgattcttcttcttctccttcttccttc

SEQ ID NO: 521740 - DNA, 120 bp, Artificial Sequence
  ENSG00000165392_51 (sequence is synthesized)
tgattcttcttcttctccttcttccttcttccttccttcctcctcctcctccttcttcttcctcttcctcttcttctttctctctttccttccttcccttcccttccccttccttccttc

SEQ ID NO: 521741 - DNA, 87 bp, Artificial Sequence
  ENSG00000165392_52 (sequence is synthesized)
ttctttctctttttctttctttcaagcagtcctcccgcctcagtcccccaaaatagtgggattacaggtgtgagccaccatgcacag

SEQ ID NO: 521742 - DNA, 120 bp, Artificial Sequence
  ENSG00000165392_53 (sequence is synthesized)
ccaaaatagtgggattacaggtgtgagccaccatgcacagccttacataaagccttttctaatgagatggatagtaattaacaaatgtgagtttttgatattatataaagattttttctg

SEQ ID NO: 521743 - DNA, 120 bp, Artificial Sequence
  ENSG00000165392_54 (sequence is synthesized)
ttatataaagattttttctgtgtttcgaagatccgtataactcagtgaatcagtatgttctggatgactaatatgtgatgttaagaaatcatgactgaggccgggcgcggtggctcacgc

SEQ ID NO: 521744 - DNA, 120 bp, Artificial Sequence
  ENSG00000165392_55 (sequence is synthesized)
aataaaaaaagaaatcatgactgggtaaaagatctgttcagagtacaagatggaccaatggatttgatatatttgaatataacagagtatgaaaaagtttattgatatagtttcagatta

SEQ ID NO: 521745 - DNA, 120 bp, Artificial Sequence
  ENSG00000165392_56 (sequence is synthesized)
cacactgcaactaatctttaagaaactattacttgtccactttttggtaaaatttcagagaacaatgtccaccattatctgaacaggctattaaaatactcttctcttttccaactacgt

SEQ ID NO: 521746 - DNA, 120 bp, Artificial Sequence
  ENSG00000165392_57 (sequence is synthesized)
gcctgtgcaaagtcagatttttttcatatacttcagccaaaacagcatatcaaaatggattgaatgcagaagtagatctgagaatacagccacttttgttaagccagacaatgagatttg

SEQ ID NO: 521747 - DNA, 120 bp, Artificial Sequence
  ENSG00000165392_58 (sequence is synthesized)
caaaatgtaaacaatgctgctgttctcagtttttaaaaatatgttttttaaaagtatttatgttaatgtgtacttggtttactactgctatttttaaataaaacaagaaacatttttaaa

SEQ ID NO: 521748 - DNA, 120 bp, Artificial Sequence
  ENSG00000165392_59 (sequence is synthesized)
aataaatattttgaaccccttttgtgtcttgtattcataggagttcagatagaccactttatttactattttttatagagagtgaacagaaatcccatttctagtcaccagtccttaatc

SEQ ID NO: 521749 - DNA, 120 bp, Artificial Sequence
  ENSG00000165392_60 (sequence is synthesized)
tgtaaatcaggcagataatctgtaaatgattggttgaaatcacattgaattccactttgtgccagggacttaagttaacgaacaaattattcttacaaaaaggtataaatgtaaggtttt

SEQ ID NO: 521750 - DNA, 120 bp, Artificial Sequence
  ENSG00000165392_61 (sequence is synthesized)
gtagtatggcttgcacatctgccagctttcgacaaaattgtaggccctgttaataatagtccttttgtgtttggtgaaaaagatacgacactgtcagtggttttgcttttaagatttctt

SEQ ID NO: 521751 - DNA, 120 bp, Artificial Sequence
  ENSG00000165392_62 (sequence is synthesized)
gatgtcactaggtggtaggaacttttcagctccatgataatctaatggatacttgttcctgttggctgcccgtcgttgactgcaacatcattatgtggtgcatgactgtaaattagatac

SEQ ID NO: 521752 - DNA, 120 bp, Artificial Sequence
  ENSG00000165406_0 (sequence is synthesized)
ctcggtgtcctcccgcggaggggcgtagggtgtaaacaggcgacgcgctgggggaggtgcggccttgctgcgtccacgtctcgggcatgctcgaggcgggccagggcggtagcgccgcca

SEQ ID NO: 521753 - DNA, 120 bp, Artificial Sequence
  ENSG00000165406_1 (sequence is synthesized)
gctcagagcccacctgaggtaactcctgcggcctctaggatcggagtcccccacgccgcgcgcagccgccgccgctggccgccaataagggcggccgagcccccggcccgggcagggggt

SEQ ID NO: 521754 - DNA, 80 bp, Artificial Sequence
  ENSG00000165406_2 (sequence is synthesized)
gtggctgccggcagcgcgtcggctacaggtgggctgggctgggctgggctgggctgggctgggtgggggcggccgccaag

SEQ ID NO: 521755 - DNA, 120 bp, Artificial Sequence
  ENSG00000165406_3 (sequence is synthesized)
agaggcagcgcgactccaggcagtgggtctctctgccccggtgctcgcgtctgcccctggggccgggccgagcggaaccaggaatcgcagaaacggtcagcgcccagggctctaggccgg

SEQ ID NO: 521756 - DNA, 120 bp, Artificial Sequence
  ENSG00000165406_4 (sequence is synthesized)
ccgccccgggtgccaggtgaattcctttccctgaccggctgtgagacgttggcccgtcagccgtcgtctttggcctgagtgtgcacatctgtaaaatggaagctcggactagtgatccgt

SEQ ID NO: 521757 - DNA, 120 bp, Artificial Sequence
  ENSG00000165406_5 (sequence is synthesized)
gaggaccttccacgtctgacgtgtgatctcgagagacctgcgtacattcggggtgccagaaggaaagcatagcttgaaatccatggcccaaaatgactctaccagtggagactctcttct

SEQ ID NO: 521758 - DNA, 120 bp, Artificial Sequence
  ENSG00000165406_6 (sequence is synthesized)
gtgaagaagacgaccagataagaggttgggatgagcatgccactgcatcagatctctgccattccatcccaggatgccatctctgctagagtctacagaagtaagaccaaagaaaaggag

SEQ ID NO: 521759 - DNA, 120 bp, Artificial Sequence
  ENSG00000165406_7 (sequence is synthesized)
agggaagaacagaatgagaagactttgggacatttcatgagtcattcaagcaacatttctaaggctgggagtcctccgtcagcatcagctccggctccggtgtcctccttctctcgcact

SEQ ID NO: 521760 - DNA, 120 bp, Artificial Sequence
  ENSG00000165406_8 (sequence is synthesized)
tctatcacgccatccagccaggacatctgcaggatctgccactgtgaaggagatgatgagagccccctgatcaccccctgccactgcacaggaagcctccacttcgtgcaccaggcctgc

SEQ ID NO: 521761 - DNA, 120 bp, Artificial Sequence
  ENSG00000165406_9 (sequence is synthesized)
ctgcagcagtggatcaagagctccgacacgcgctgctgcgagctctgcaagtatgagttcatcatggagaccaagctgaagccactgagaaaatgggagaagttgcagatgacgtccagc

SEQ ID NO: 521762 - DNA, 120 bp, Artificial Sequence
  ENSG00000165406_10 (sequence is synthesized)
gagcgcaggaagatcatgtgctcagtgacattccacgtcattgccatcacatgtgtggtctggtccttgtatgtgctcattgaccgtactgctgaggagatcaagcaggggcaggcaaca

SEQ ID NO: 521763 - DNA, 120 bp, Artificial Sequence
  ENSG00000165406_11 (sequence is synthesized)
ggaatcctagaatggcccttttggactaaattggtggttgtggccatcggcttcaccggaggacttctttttatgtatgttcagtgtaaagtgtatgtgcaattgtggaagagactcaag

SEQ ID NO: 521764 - DNA, 120 bp, Artificial Sequence
  ENSG00000165406_12 (sequence is synthesized)
gcctataatagagtgatctatgttcaaaactgtccagaaacaagcaaaaagaatatttttgaaaaatctccactaacagagcccaactttgaaaataaacatggatatggaatctgtcat

SEQ ID NO: 521765 - DNA, 120 bp, Artificial Sequence
  ENSG00000165406_13 (sequence is synthesized)
tccgacacaaactcttcttgttgcacagagcctgaagacactggagcagaaatcattcacgtctgattgtgtgcgggttgtcattttcctggacatccatgaagagctgaaggaaattgt

SEQ ID NO: 521766 - DNA, 120 bp, Artificial Sequence
  ENSG00000165406_14 (sequence is synthesized)
ttactgccaattgtatacctttcttatgtcctttaatagcatagactggacaggtgactatttatagtggcttctctttttctaaaccctccttagtctcctagaaaaccttcctgtggg

SEQ ID NO: 521767 - DNA, 120 bp, Artificial Sequence
  ENSG00000165406_15 (sequence is synthesized)
ccaggcatgcctgggtcctgcctctgcctggcagctctgtgggaaagtggaagaccccatgatgacatcatggggagccagcagagttcctgcccatggtcttgagctgaatgagagaat

SEQ ID NO: 521768 - DNA, 120 bp, Artificial Sequence
  ENSG00000165406_16 (sequence is synthesized)
aaaatgccaatcccaagggaagaggaggagcaggggtgcccaggccctgatacccagccgcctccagcttgcagtggtccccagcctggagcagagcattggggagtgtctagccatgac

SEQ ID NO: 521769 - DNA, 120 bp, Artificial Sequence
  ENSG00000165406_17 (sequence is synthesized)
gagaagattccctctgcatcacggcgaaccccaggagatggtattgaaacagacccccaaacacagactcctgcctgccctctgccgatgctgcctcctccatgctcttgagcaggtgga

SEQ ID NO: 521770 - DNA, 120 bp, Artificial Sequence
  ENSG00000165406_18 (sequence is synthesized)
gccatggtgctctgtggtggcgcatgattcactgagcaaacagcactttacagaagaaaatctttattttgtaatatgtgtgtccagcgggattgacactcaaaaaaagtctcacttaga

SEQ ID NO: 521771 - DNA, 120 bp, Artificial Sequence
  ENSG00000165406_19 (sequence is synthesized)
aatcttcccttccttacctttgtatctcctttacatcatgagagatcaaaaatccattttgccttacatatgctaagaagcgtggcattctttctgttcataaaacagactcatgacttt

SEQ ID NO: 521772 - DNA, 120 bp, Artificial Sequence
  ENSG00000165406_20 (sequence is synthesized)
taagacaggacaagcaggccagaggctttttttttaatcacagatctcatgggaattagtggatgctaaatggcaattaaagcatgattcctatgcttttgagcctgttttatgacaagg

SEQ ID NO: 521773 - DNA, 120 bp, Artificial Sequence
  ENSG00000165406_21 (sequence is synthesized)
atttaaaaaatattcctttatagttaaatctctccagttggtgttggcttcacattgaaagagcagccatgtgccaccctggccggggtgtgtgcactgcatgcaggttctcccttgcat

SEQ ID NO: 521774 - DNA, 120 bp, Artificial Sequence
  ENSG00000165406_22 (sequence is synthesized)
gcaagatgggtgctggcccactgtgaggcttctgctcggggaagttctgtggagtcactaccagggccaagaggcaggtgggctggctctgggacgagggccaggtgtgagcaaactgcc

SEQ ID NO: 521775 - DNA, 120 bp, Artificial Sequence
  ENSG00000165406_23 (sequence is synthesized)
agggtccgctgtgccactgctccccggccacatgcccgcccagctgtcgccttaaccagactgaacagacaggatccttcagggcccttggccccactctcagtgcattctgtcatcagg

SEQ ID NO: 521776 - DNA, 120 bp, Artificial Sequence
  ENSG00000165406_24 (sequence is synthesized)
gattaccacctgtaccattttcataaaacaaaaccaaaatcactaccatcaaatggccttgtccctctaaaaagtctgcttaaaattctgtttttaaaacccagtttcctagttttccag

SEQ ID NO: 521777 - DNA, 120 bp, Artificial Sequence
  ENSG00000165406_25 (sequence is synthesized)
gcaaatagttacctccgggaaagttgctgggggggcctgaagcacaatgtagcgcagatgcttcctttccaggccattctctcacccagcctgcacggaggagatgggagatgctggggg

SEQ ID NO: 521778 - DNA, 120 bp, Artificial Sequence
  ENSG00000165406_26 (sequence is synthesized)
tcctgccctcagtctttttgggccttaggcgtttcgttcatcctgctaaggggatgaagcaaacacgaggtgattcctttgcctttcagagtggaagccctggagtttgttttgaaggcc

SEQ ID NO: 521779 - DNA, 120 bp, Artificial Sequence
  ENSG00000165406_27 (sequence is synthesized)
aggaggctgaaggatctctaagctacggtgtgggcttaatagcagcaggctttgtcctcctgtctcctccaagccagtgtctgattccttggcaacacaggtcttagtctgtggagtggc

SEQ ID NO: 521780 - DNA, 120 bp, Artificial Sequence
  ENSG00000165406_28 (sequence is synthesized)
tctgctgtggccttcctctggccgggcaggcactgtccagccatagccagctcctgagaataggtcagcctctcctttctgtctcccagggcacatccagcccgtgcctgtgttcactgt

SEQ ID NO: 521781 - DNA, 120 bp, Artificial Sequence
  ENSG00000165406_29 (sequence is synthesized)
gccccgaagtgcaattacccataccccttctcagcctggggaccccaggcaaccacagactgtccactcaggggagctgaatcccaggtcagccctgccaatgtcccttaggaactgccc

SEQ ID NO: 521782 - DNA, 120 bp, Artificial Sequence
  ENSG00000165406_30 (sequence is synthesized)
aggcaaggcccctggttttgtatacttgttcctgccacccagcagtagatgagtgtttcaggtgaagaccaggatagattttctaagtgtgaatccccacttcacatatggaacccctta

SEQ ID NO: 521783 - DNA, 120 bp, Artificial Sequence
  ENSG00000165406_31 (sequence is synthesized)
tgctgaacttgaaaagcaccaagacttcctgtagacaagaaagtgcttaggtagggacagcccctgggcatcccacccaatgtagctggcaccccactatggcaaaggtgccttgataac

SEQ ID NO: 521784 - DNA, 120 bp, Artificial Sequence
  ENSG00000165406_32 (sequence is synthesized)
tgagccctgtatccctcccatgcccagccagattctcatgggaagccctctcccttcttttctgcctaacaccatctcatcgtttctggcctcactgtggacaatccacacacattcttc

SEQ ID NO: 521785 - DNA, 120 bp, Artificial Sequence
  ENSG00000165406_33 (sequence is synthesized)
tttcctctcctggcggggcacagagccacccccttgccttttcttttcttgaaggttctagttcagctcctgattcatcagacccttctagccccctgcatctagcagtgaagcatgaag

SEQ ID NO: 521786 - DNA, 120 bp, Artificial Sequence
  ENSG00000165406_34 (sequence is synthesized)
cctggtggggatgtggtactcccatctggtgtggccaccagctctgccaatgttcctgtagccttggaaaacttgctctctcggttcttttgggtgctgtgtactccccagcttcccccc

SEQ ID NO: 521787 - DNA, 120 bp, Artificial Sequence
  ENSG00000165406_35 (sequence is synthesized)
ttccccccccattttgcacctgggtttagtgaaaggatggcatttggttgacccatatagaaacccagaatgaggtctcagggccaggaggcctggtatttgtaggccagggaaggggaa

SEQ ID NO: 521788 - DNA, 120 bp, Artificial Sequence
  ENSG00000165406_36 (sequence is synthesized)
gaggcaagtggtctggggtatcaccagccagccctctctgatttggcctctactccccataagtcacagtaccataagcaggcttctggcctcagcaatttggtctttgtgcccaagttt

SEQ ID NO: 521789 - DNA, 120 bp, Artificial Sequence
  ENSG00000165406_37 (sequence is synthesized)
attgtgagaatttcctgaaaactctataaaaggtctcttcctactgtaggcctctaatgtttctcccctttttgcttcagtccactcttcagtcttgtaggcctagttttcaaacctgca

SEQ ID NO: 521790 - DNA, 120 bp, Artificial Sequence
  ENSG00000165406_38 (sequence is synthesized)
catgtgtcctacctggccacaggcatgcaggcctcaggcagctgggccagtttgggagcctcgggtgatgtctgcacgatctggggctgcctctgcacccctgctgtgggcttcagggtt

SEQ ID NO: 521791 - DNA, 120 bp, Artificial Sequence
  ENSG00000165406_39 (sequence is synthesized)
ggagaagggctgggaccaaccgggtgagatccacaagtctctggatgtggctgaaggcaaatacacaattgaagtactttctgttttgaagtgctttcccttttgaatctggtttgaaac

SEQ ID NO: 521792 - DNA, 120 bp, Artificial Sequence
  ENSG00000165406_40 (sequence is synthesized)
atgcagcttctgtctctagcccaaggaaagaccaaaacatagggaaataaaagcatttatctttgtcttggaagtaattgttgaagttgtgcagttgatcagtgcacagttagatgcaat

SEQ ID NO: 521793 - DNA, 120 bp, Artificial Sequence
  ENSG00000165406_41 (sequence is synthesized)
gtttatagaaattgattgttaaaccaaatttacactggcatgtgtggtgtagtttctaaaaggcacttcacatttgaaatttttcttaccttagaaagtttctagtgatctaaatgtcta

SEQ ID NO: 521794 - DNA, 120 bp, Artificial Sequence
  ENSG00000165406_42 (sequence is synthesized)
gttttgtattcttttgtgtgtgttcactgtttctcagtattaccacttgaataattctctgtacaggggggtttgtgctatacactgggatgtctaattgcagcaataaagcctttcttt

SEQ ID NO: 521795 - DNA, 120 bp, Artificial Sequence
  ENSG00000165406_43 (sequence is synthesized)
atggtaggtatagggctgtggatatcgtcagtttgaccaagtattccaagaggccccatggagtttgtcatctgtaatagaggacgttagtgcattagtgatgaaaaaactgcttaccac

SEQ ID NO: 521796 - DNA, 120 bp, Artificial Sequence
  ENSG00000165406_44 (sequence is synthesized)
gttccagtgcagtgttttctgagtgttgtcaccacagttccgtgcagtctgctgttgtctcgaaagctcctcactgccagagttctctgacacaagggctcactgtgacagttatctgta

SEQ ID NO: 521797 - DNA, 120 bp, Artificial Sequence
  ENSG00000165406_45 (sequence is synthesized)
aggacacattacaggcgtcaaagagaaattcctttggttcagaatgggcccaggccttgaagcctgctaagaataccaaagccagaagaacactaaagttctcaaggtccctcaatgatg

SEQ ID NO: 521798 - DNA, 120 bp, Artificial Sequence
  ENSG00000165406_46 (sequence is synthesized)
tgggtgagaaggcgcaggatacttcagaaagttttgcctatgtggaaagaacttgttctgaagggaaattaatactccctcaagatacgtgtctcagaactaacaggtttcatcataaag

SEQ ID NO: 521799 - DNA, 120 bp, Artificial Sequence
  ENSG00000165406_47 (sequence is synthesized)
aaaaaagaaccctgaaccacaaacctcttggcaattccaaacattcttgtgtttcatgcctttctgccggtcgctcaactgcctcagaggtggaagctggcaaggggggcaggcccggcc

SEQ ID NO: 521800 - DNA, 120 bp, Artificial Sequence
  ENSG00000165406_48 (sequence is synthesized)
tgctgctggaagagaaggcggatggtgaggccacgtcccgaagccggcaactgctccagtacctgttctcactctcgcacggcttgagcgccagcagcctgcacaggttccatgagctgg

SEQ ID NO: 521801 - DNA, 120 bp, Artificial Sequence
  ENSG00000165406_49 (sequence is synthesized)
agagctgcgctgctcgcctgcacactgccaagtcctccagcgggctggcagggagtatgggcttctgctctgacgagatgggagacgacgatgtctttgaggacagcacatctgcaaaac

SEQ ID NO: 521802 - DNA, 120 bp, Artificial Sequence
  ENSG00000165406_50 (sequence is synthesized)
tgaagagtagggttctgcgggcgcccctctgctccacggaaaaggacagcgacctggattgtccttctcccttctctgaaaaattaccccccatatctcccgtgtccacgtcaggggatg

SEQ ID NO: 521803 - DNA, 120 bp, Artificial Sequence
  ENSG00000165406_51 (sequence is synthesized)
ctcgagagacctgcgtacattcggggtgccagaaggaaagcatagttgctccgatacagaatgggaatgggagacttttgaggccaaccgaatgggttaggacatatctgaaaaacatga

SEQ ID NO: 521804 - DNA, 120 bp, Artificial Sequence
  ENSG00000165406_52 (sequence is synthesized)
aaacgctaaaaagcatgaaaactgaaggagtatacgaactcaagtcgttgagagtcatgaaataatgtgaacatgctcttgtgtgaaatcttgagaccctggagcaagagaattttggat

SEQ ID NO: 521805 - DNA, 120 bp, Artificial Sequence
  ENSG00000165406_53 (sequence is synthesized)
ttcctgaaaccagtgacccccagaaagctggtgtctcagatcatgaggtcatggcttgcctgcgttcatttccttaaaaagctggggctggtgcttacatttgcattgtagagattgttg

SEQ ID NO: 521806 - DNA, 120 bp, Artificial Sequence
  ENSG00000165406_54 (sequence is synthesized)
ctaacatttggatcagagatcccctcactaaaacagcctgagagcctggctccttccaggacgagtgccccaacctgttctctagctgctggaaaagacccctctgtttcttaaaagcct

SEQ ID NO: 521807 - DNA, 120 bp, Artificial Sequence
  ENSG00000165406_55 (sequence is synthesized)
gttaagttccttcaggctagtagctacaccttgttgcatacttccttggaaatagagagtgctttcaaattaatttctcacttattgctattagtggtcccaagaaaaagagatgaaatt

SEQ ID NO: 521808 - DNA, 120 bp, Artificial Sequence
  ENSG00000165406_56 (sequence is synthesized)
gcagcatcttgtaatggtgagttttttaggtctaggagagaggtactgtcatctttgtttacttgctgagagacgacagaaatgtgtagttgtggggtatgaaggtaaagtcagtgatta

SEQ ID NO: 521809 - DNA, 120 bp, Artificial Sequence
  ENSG00000165406_57 (sequence is synthesized)
tagctaaaaagcaaacgtcatttaaggtcactggtatttttggatgttggaatgcaggttttgttttacatagaaattttccctctaattattttaccatcttatgttctggaaaatgat

SEQ ID NO: 521810 - DNA, 120 bp, Artificial Sequence
  ENSG00000165406_58 (sequence is synthesized)
tccatgttgctttaaattcatctttcagtgaagttcttatttcttaccaaaaaatgacagctttgtcatttcttacatcgttttttcctttctgttgccaaatgccctccagactttcca

SEQ ID NO: 521811 - DNA, 120 bp, Artificial Sequence
  ENSG00000165406_59 (sequence is synthesized)
tgttggtgcggtaagctagacatttttagtttgtagtgattgttttcgtttgtgtttgtatgtttttgtgcccatagtcacttctgtaatgttcgtttctgagtttcctttggggggatt

SEQ ID NO: 521812 - DNA, 120 bp, Artificial Sequence
  ENSG00000165409_0 (sequence is synthesized)
cctcctccacagtggtgaggtcacagccccttggagccctccctcttcccacccctcccgctcccgggtctcctttggcctggggtaacccgaggtgcagagctgagaatgaggcgattt

SEQ ID NO: 521813 - DNA, 120 bp, Artificial Sequence
  ENSG00000165409_1 (sequence is synthesized)
cggaggatggagaaatagccccgagtcccgtggaaaatgaggccggcggacttgctgcagctggtgctgctgctcgacctgcccagggacctgggcggaatggggtgttcgtctccaccc

SEQ ID NO: 521814 - DNA, 120 bp, Artificial Sequence
  ENSG00000165409_2 (sequence is synthesized)
tgcgagtgccatcaggaggaggacttcagagtcacctgcaaggatattcaacgcatccccagcttaccgcccagtacgcagactctgaagcttattgagactcacctgagaactattcca

SEQ ID NO: 521815 - DNA, 120 bp, Artificial Sequence
  ENSG00000165409_3 (sequence is synthesized)
agtcatgcattttctaatctgcccaatatttccagaatctacgtatctatagatgtgactctgcagcagctggaatcacactccttctacaatttgagtaaagtgactcacatagaaatt

SEQ ID NO: 521816 - DNA, 120 bp, Artificial Sequence
  ENSG00000165409_4 (sequence is synthesized)
cggaataccaggaacttaacttacatagaccctgatgccctcaaagagctccccctcctaaagttccttggcattttcaacactggacttaaaatgttccctgacctgaccaaagtttat

SEQ ID NO: 521817 - DNA, 120 bp, Artificial Sequence
  ENSG00000165409_5 (sequence is synthesized)
tccactgatatattctttatacttgaaattacagacaacccttacatgacgtcaatccctgtgaatgcttttcagggactatgcaatgaaaccttgacactgaagctgtacaacaatggc

SEQ ID NO: 521818 - DNA, 120 bp, Artificial Sequence
  ENSG00000165409_6 (sequence is synthesized)
tttacttcagtccaaggatatgctttcaatgggacaaagctggatgctgtttacctaaacaagaataaatacctgacagttattgacaaagatgcatttggaggagtatacagtggacca

SEQ ID NO: 521819 - DNA, 120 bp, Artificial Sequence
  ENSG00000165409_7 (sequence is synthesized)
agcttgctggacgtgtctcaaaccagtgtcactgcccttccatccaaaggcctggagcacctgaaggaactgatagcaagaaacacctggactcttaagaaacttccactttccttgagt

SEQ ID NO: 521820 - DNA, 120 bp, Artificial Sequence
  ENSG00000165409_8 (sequence is synthesized)
ttccttcacctcacacgggctgacctttcttacccaagccactgctgtgcttttaagaatcagaagaaaatcagaggaatccttgagtccttgatgtgtaatgagagcagtatgcagagc

SEQ ID NO: 521821 - DNA, 120 bp, Artificial Sequence
  ENSG00000165409_9 (sequence is synthesized)
ttgcgccagagaaaatctgtgaatgccttgaatagccccctccaccaggaatatgaagagaatctgggtgacagcattgttgggtacaaggaaaagtccaagttccaggatactcataac

SEQ ID NO: 521822 - DNA, 120 bp, Artificial Sequence
  ENSG00000165409_10 (sequence is synthesized)
aacgctcattattacgtcttctttgaagaacaagaggatgagatcattggttttggccaggagctcaaaaacccccaggaagagactctacaagcttttgacagccattatgactacacc

SEQ ID NO: 521823 - DNA, 120 bp, Artificial Sequence
  ENSG00000165409_11 (sequence is synthesized)
atatgtggggacagtgaagacatggtgtgtacccccaagtccgatgagttcaacccgtgtgaagacataatgggctacaagttcctgagaattgtggtgtggttcgttagtctgctggct

SEQ ID NO: 521824 - DNA, 120 bp, Artificial Sequence
  ENSG00000165409_12 (sequence is synthesized)
ctcctgggcaatgtctttgtcctgcttattctcctcaccagccactacaaactgaacgtcccccgctttctcatgtgcaacctggcctttgcggatttctgcatggggatgtacctgctc

SEQ ID NO: 521825 - DNA, 120 bp, Artificial Sequence
  ENSG00000165409_13 (sequence is synthesized)
ctcatcgcctctgtagacctctacactcactctgagtactacaaccatgccatcgactggcagacaggccctgggtgcaacacggctggtttcttcactgtctttgcaagcgagttatcg

SEQ ID NO: 521826 - DNA, 120 bp, Artificial Sequence
  ENSG00000165409_14 (sequence is synthesized)
gtgtatacgctgacggtcatcaccctggagcgctggtatgccatcaccttcgccatgcgcctggaccggaagatccgcctcaggcacgcatgtgccatcatggttgggggctgggtttgc

SEQ ID NO: 521827 - DNA, 120 bp, Artificial Sequence
  ENSG00000165409_15 (sequence is synthesized)
tgcttccttctcgccctgcttcctttggtgggaataagtagctatgccaaagtcagtatctgcctgcccatggacaccgagacccctcttgctctggcatatattgtttttgttctgacg

SEQ ID NO: 521828 - DNA, 120 bp, Artificial Sequence
  ENSG00000165409_16 (sequence is synthesized)
ctcaacatagttgccttcgtcatcgtctgctgctgttatgtgaagatctacatcacagtccgaaatccgcagtacaacccaggggacaaagataccaaaattgccaagaggatggctgtg

SEQ ID NO: 521829 - DNA, 120 bp, Artificial Sequence
  ENSG00000165409_17 (sequence is synthesized)
ttgatcttcaccgacttcatatgcatggccccaatctcattctatgctctgtcagcaattctgaacaagcctctcatcactgttagcaactccaaaatcttgctggtactcttctatcca

SEQ ID NO: 521830 - DNA, 120 bp, Artificial Sequence
  ENSG00000165409_18 (sequence is synthesized)
gtttggcatctgtaaacgccaggctcaggcataccgggggcagagggttcctccaaagaacagcactgatattcaggttcaaaaggttacccacgagatgaggcagggtctccacaacat

SEQ ID NO: 521831 - DNA, 120 bp, Artificial Sequence
  ENSG00000165409_19 (sequence is synthesized)
ggaagatgtctatgaactgattgaaaactcccatctaaccccaaagaagcaaggccaaatctcagaagagtatatgcaaacggttttgtaagttaacactacactactcacaatggtagg

SEQ ID NO: 521832 - DNA, 120 bp, Artificial Sequence
  ENSG00000165409_20 (sequence is synthesized)
ggaacttacaaaataatagtttcttgaatatgcattccaatcccatgacacccccaacacatagctgccctcactcttgtgcaggcgatgtttcaatgtttcatggggcaagagtttatc

SEQ ID NO: 521833 - DNA, 120 bp, Artificial Sequence
  ENSG00000165409_21 (sequence is synthesized)
tctggagagtgattagtattaacctaatcattgcccccaagaaggaagttaggctaccagcatatttgaatgccaggtgaaatcaaaataatctacactatctagaagactttcttgatg

SEQ ID NO: 521834 - DNA, 120 bp, Artificial Sequence
  ENSG00000165409_22 (sequence is synthesized)
ccaagtccagagatgtcattgtgtaggatgttcagtaaatattaactgagctatgtcaatatagagcttctcagttttgtataacatttcatactaaagattcagcaaatggaaaatgct

SEQ ID NO: 521835 - DNA, 120 bp, Artificial Sequence
  ENSG00000165409_23 (sequence is synthesized)
attaatttggttggtgaccacaagataaaatcagtcccacgttggctcagttcaactagatgttccctgatacaaagagaacttgatttccttaaaactgaaaagccaaacacagctagc

SEQ ID NO: 521836 - DNA, 120 bp, Artificial Sequence
  ENSG00000165409_24 (sequence is synthesized)
tgtcatacaagaaacagctattatgagacatgaaggagggtaagaattagctttaagttttgttttgctttgttttgttttttaactcaacctattaatcatctcttcacaagaatccac

SEQ ID NO: 521837 - DNA, 120 bp, Artificial Sequence
  ENSG00000165409_25 (sequence is synthesized)
ctgatgtgaccaagctattatgtgttgcctggaaaaactggcaagatttcagcttatgtggcctagcaaactaagaattgctcttcttggccagcctcatagcataaaagatgtgaactc

SEQ ID NO: 521838 - DNA, 120 bp, Artificial Sequence
  ENSG00000165409_26 (sequence is synthesized)
taggaagtctttctgagtagcaataagtgggaattatgggcagagcacactcaatcccctgttgattaataaaacaggctggacactaattaactatgggacttaaatctgtagaaatga

SEQ ID NO: 521839 - DNA, 120 bp, Artificial Sequence
  ENSG00000165409_27 (sequence is synthesized)
aggagtccaatagcttcttccaattttaaaactctagtacatccctttccctcaaatatatatttctaagataaagagaaagaagagcactaagtaagtagaatctgtttttcctatttt

SEQ ID NO: 521840 - DNA, 120 bp, Artificial Sequence
  ENSG00000165409_28 (sequence is synthesized)
gtagggctgctgactcctagtccttgaagcctagacacatgacccaggaaatttttcctttgtttcacttttgattatgatgtctgagccaaaaattcaattaagtaaacatactcgcct

SEQ ID NO: 521841 - DNA, 120 bp, Artificial Sequence
  ENSG00000165409_29 (sequence is synthesized)
ggatctgaatcattcatttaattactagatctacccagctgttatatcaggccaaaaacagattcgtgtttatataaaagagtaaacgatggttgcaaattttggctatttagagttgct

SEQ ID NO: 521842 - DNA, 120 bp, Artificial Sequence
  ENSG00000165409_30 (sequence is synthesized)
acttcactatgaagagtcacttcaaaacacttcgcttgtctttagggatgatttttgccatttccagtccacggtatgatactaaagctgtcaagagaggtttcttcttttctgaaactg

SEQ ID NO: 521843 - DNA, 120 bp, Artificial Sequence
  ENSG00000165409_31 (sequence is synthesized)
ccagctctttccagccctgttgatcactggacataaagcttcttttccccaataattcttctttacttaaaatagtcaggatctttatctacagatgtactctccaggttacctgtgatg

SEQ ID NO: 521844 - DNA, 120 bp, Artificial Sequence
  ENSG00000165409_32 (sequence is synthesized)
atagccccctaatgtcctgctagaaaagtctccaagcagagatgacattacttctgaatgctcataaaccacaccatgaaataaaagctctttgttgttttaagattgtgaagtgtcgtt

SEQ ID NO: 521845 - DNA, 120 bp, Artificial Sequence
  ENSG00000165409_33 (sequence is synthesized)
aatgggtccccacagatggtccctgctggactcacctggaatctctccacagccatacccactcatcactatcattgagacctgcacatcttaatagaaatattataaacatcgaaaatc

SEQ ID NO: 521846 - DNA, 120 bp, Artificial Sequence
  ENSG00000165409_34 (sequence is synthesized)
atgacttacctagaagttcgcttgtaactaatgaaattaaacaaatgtgttgccttttgtcatgtgtttctctcctgtgacatttcaaaatatcacatcttgataaataatgtgtttcat

SEQ ID NO: 521847 - DNA, 120 bp, Artificial Sequence
  ENSG00000165409_35 (sequence is synthesized)
cttgaatagctgaactaattgctttggaaacagagtcctagaaaagtgacttcaacagaattgttactaaaatttgcactcacaacatgaaataaattttcttcctatggaataatcgtg

SEQ ID NO: 521848 - DNA, 120 bp, Artificial Sequence
  ENSG00000165409_36 (sequence is synthesized)
caggggtgcagggcgacggcttcggccgcaccgcgggctagccagggctgcgtgcccgcctctgaccctcagcagaggtgtctctggccaggaggagctgaagttctgcaggacattggt

SEQ ID NO: 521849 - DNA, 120 bp, Artificial Sequence
  ENSG00000165409_37 (sequence is synthesized)
ttaccgcccagtacgcagactctatattggagaagagagaggaaaaaagtctgggaattggagataaaattcaacattgaaggagacattttaaatcccagtcaagaggaaagaaagagt

SEQ ID NO: 521850 - DNA, 120 bp, Artificial Sequence
  ENSG00000165409_38 (sequence is synthesized)
tgatggctaagctgactgccaaaagacattgtaaagttaccagataacaacaagtgataatagaagggcctagggaagttctgctcatagacttcaaacttggaaaggtgtcctgcagac

SEQ ID NO: 521851 - DNA, 120 bp, Artificial Sequence
  ENSG00000165409_39 (sequence is synthesized)
caaaacctgctgacctagcagtggcaaagttgccttaaatgaattcacaccgacaagcctggagggattgtctcttgatgctaaagtgattcggtcatacatatctgagggcactaggtg

SEQ ID NO: 521852 - DNA, 120 bp, Artificial Sequence
  ENSG00000165409_40 (sequence is synthesized)
aaatttctggagaatcttggaaaataagtgtgggaccagaaagatagaatcactttgttctggtttactttaaaaggataaaaggtgcttttcatttgctggatcacttaaatgctctaa

SEQ ID NO: 521853 - DNA, 120 bp, Artificial Sequence
  ENSG00000165409_41 (sequence is synthesized)
gtctctggttctcctataaactggggactatttactagccccatttatttaccagaattgttttgataatttaaaaaaaagatatgcaagctaatcataaattctaaatcaatataaaaa

SEQ ID NO: 521854 - DNA, 120 bp, Artificial Sequence
  ENSG00000165409_42 (sequence is synthesized)
tctatctcaaaaaaaaaaaaaaaaaaaataagctagtgagtgactatttaagtctccttcttctttccattttcattgcactttacacatactactgttgtagatcttactgtgttgcat

SEQ ID NO: 521855 - DNA, 120 bp, Artificial Sequence
  ENSG00000165409_43 (sequence is synthesized)
atactactgttgtagatcttactgtgttgcatgatggagaggtttatgtccagtttcccaactggaatgtgagatactcaagaggacagacgtcaacttatttttcatatgaccccccca

SEQ ID NO: 521856 - DNA, 120 bp, Artificial Sequence
  ENSG00000165409_44 (sequence is synthesized)
aacccaaaacaaggattagcatttaatgagtgcttaacaaatgcttgctgaatgcagcaagattaaaaaataatctcagcagactgtgctgcaaaacagaattgcaagatgataacctaa

SEQ ID NO: 521857 - DNA, 120 bp, Artificial Sequence
  ENSG00000165409_45 (sequence is synthesized)
ctaagataaatataaaccctacatttgactctaaataataaattgcacaattattggattgtaaagtcctagtccagaggtcatggtaaaaacatctgggagctgcagttaactataaaa

SEQ ID NO: 521858 - DNA, 120 bp, Artificial Sequence
  ENSG00000165409_46 (sequence is synthesized)
acaggaaagagaccgatgaagcttctaaaaatattaacttattaatactagcatagaatcatgggaaatgatgggaaccaagagaaatgatagtctcactgcgttccttgtgggtcgaat

SEQ ID NO: 521859 - DNA, 120 bp, Artificial Sequence
  ENSG00000165409_47 (sequence is synthesized)
cacattttaagaggaattgataaactagagtaaattcaggtgactccatctaataggatagacagtaccccatgctataccaaaacgagttaaaagagctcaagtagggctctggggaag

SEQ ID NO: 521860 - DNA, 120 bp, Artificial Sequence
  ENSG00000165409_48 (sequence is synthesized)
agaaaaataaaatatagatttgagctgtcttcagttatttgaaggagatccagtgttgtcccagtaggcaaaacttagaccaaaaaaattgtactcccaaatttgattatcacatatcag

SEQ ID NO: 521861 - DNA, 120 bp, Artificial Sequence
  ENSG00000165409_49 (sequence is synthesized)
atttggattcagtaagaagaactgttctaaagatcacagctgttcaacaatggaatggactcctctggacggtagagagattgtgtcacacaatacctggggcttagacatttcttgtaa

SEQ ID NO: 521862 - DNA, 120 bp, Artificial Sequence
  ENSG00000165409_50 (sequence is synthesized)
tcctgtctgtacttagcatagctctggacacacaatccatagtcactaaatattttttcacagattgatactagggaaaataataatatttaactatgagtatatgcctactctgcccag

SEQ ID NO: 521863 - DNA, 120 bp, Artificial Sequence
  ENSG00000165409_51 (sequence is synthesized)
aaattctatactatactactctactaatcgtcatatcaaatacatgtttataaaacaaaaataatgtaagggcaaaaatatgagataaagaaaaataaatgttaatgtgttttctttctg

SEQ ID NO: 521864 - DNA, 120 bp, Artificial Sequence
  ENSG00000165409_52 (sequence is synthesized)
atgtgttttctttctgcacaccaatggatcatcatggccaccccactttgcagagaactggtctataattaagggacttaacatctgcctcaaatacctggatattttaggcccttctga

SEQ ID NO: 521865 - DNA, 120 bp, Artificial Sequence
  ENSG00000165409_53 (sequence is synthesized)
gtctgaatgatctacatatcaatcttaattttttcatttctcttttcccatgtagacaaaaacaggattaaaaaaaaaaaggttaagcgatgttctaccatttctatacagttgaccctt

SEQ ID NO: 521866 - DNA, 120 bp, Artificial Sequence
  ENSG00000165409_54 (sequence is synthesized)
gagcaacacaagtttgaacttcacaggtccacttatatgaggattttttttcaataaaagtaacactgagtatgctgcctcttctgcatccccttgcacatcctccatctcttccatctc

SEQ ID NO: 521867 - DNA, 120 bp, Artificial Sequence
  ENSG00000165409_55 (sequence is synthesized)
tgacacagtgagacagcaagaccaacccctcctcttccttttcctccttcttcaacatgaagataacaaggatggggacctttatgatgagtcacttccacttaatgaatagtaaatata

SEQ ID NO: 521868 - DNA, 120 bp, Artificial Sequence
  ENSG00000165409_56 (sequence is synthesized)
gtttctcttccttatgattttcttaataacgttttctttttttttctagcttactttattgtaaaagtacagtttgcaatatatatgcaaaaaaagtcttcactgactgtttatgttatc

SEQ ID NO: 521869 - DNA, 120 bp, Artificial Sequence
  ENSG00000165409_57 (sequence is synthesized)
agtaaggtctctagtcagcagtaggctattagtaatcattttaaaaagccacttatagattcaatgctattcccattaaactacctttgacattcttcacagaactagtgaaaaaaaaaa

SEQ ID NO: 521870 - DNA, 120 bp, Artificial Sequence
  ENSG00000165409_58 (sequence is synthesized)
taaccaaaacagcctgatactcgtacaagaaccaacacatagaccaatggaacagaataaagaacctagaaataagaccacacacatacaactatttgatctttgacaaaccaagcaaaa

SEQ ID NO: 521871 - DNA, 89 bp, Artificial Sequence
  ENSG00000165409_59 (sequence is synthesized)
cacacatacaactatttgatctttgacaaaccaagcaaaagcaagcaatgaagaaaggattccctgttcaataaatggtgctgagatat

SEQ ID NO: 521872 - DNA, 120 bp, Artificial Sequence
  ENSG00000165409_60 (sequence is synthesized)
taaatgtaaaacccaaaactgtaaaaaccttggaagacaacctagccagtaccattcaggacgtaggcacgggcaaagatttcatgacaaacatgccaaaagcaattgcaacaaaagaga

SEQ ID NO: 521873 - DNA, 120 bp, Artificial Sequence
  ENSG00000165409_61 (sequence is synthesized)
atgccaaaagcaattgcaacaaaagagaaaattgacaaatagaatctaattaaactaatgtgcttcaatttactttgttgagagtataaaaaacactatcaacagagtaaacaggcaacc

SEQ ID NO: 521874 - DNA, 120 bp, Artificial Sequence
  ENSG00000165409_62 (sequence is synthesized)
aaattcgcaaactatgcatctgacaaagatctaatatccagcatatataatggacttaaatttacaaagaaaaaataaataaccccattaaaaggtgggcaaaggacacgaagacataca

SEQ ID NO: 521875 - DNA, 86 bp, Artificial Sequence
  ENSG00000165409_63 (sequence is synthesized)
aaccccattaaaaggtgggcaaaggacacgaagacatacatgtggccaaaaatcacatgaaaaaaggtgccatatcactgattatt

SEQ ID NO: 521876 - DNA, 120 bp, Artificial Sequence
  ENSG00000165409_64 (sequence is synthesized)
atctcatgccagtcagaatggctattaaaagttaaaagaaatgcttttaccctgttgggagtgtaaattaatgcagccattgtggaagacaacgtggtgattcctcaaagacctaaagac

SEQ ID NO: 521877 - DNA, 120 bp, Artificial Sequence
  ENSG00000165409_65 (sequence is synthesized)
tacccacaggaatataaataattctattataaagacacatgtgtatgtttatttcagcactattcagaatagcaaagacatggagtcaacctaaatgtccatcagtgatagactggatta

SEQ ID NO: 521878 - DNA, 120 bp, Artificial Sequence
  ENSG00000165409_66 (sequence is synthesized)
aacagaaaatcaaatcccatatattctcacttataagtgggagttaaattatgagaacacatgggtgcatagagggaacagtacacattggggcattttagaggctgggggatgggagga

SEQ ID NO: 521879 - DNA, 120 bp, Artificial Sequence
  ENSG00000165409_67 (sequence is synthesized)
gttgctgtctcgggtaaaggcttctgcaagtccctcttttcctggctgtataggctacctcttggaagaaagtccttgtcctttgagactcagaaggccccacgctccagtatgccatca

SEQ ID NO: 521880 - DNA, 120 bp, Artificial Sequence
  ENSG00000165409_68 (sequence is synthesized)
tgatgcctgctaaggcagccaccttggtgtacatgctcacagaggctctgttcatggagcagctgctgtttgaaaaattttgaaatgcaagatccacaactagatggaaggcactctagt

SEQ ID NO: 521881 - DNA, 120 bp, Artificial Sequence
  ENSG00000165409_69 (sequence is synthesized)
ctttgcagaaaaaaatgtacctgaatgtacattgcacaatgcctggcacaaagaaggaagaatataaatgatagttcgactcgtctgtggaagaacttacaatcatggggaaagatggaa

SEQ ID NO: 521882 - DNA, 120 bp, Artificial Sequence
  ENSG00000165409_70 (sequence is synthesized)
agacctaagccacaaccactcttgactgataatcttggggctccagatggcaatgggagctggtttcttgattgtgagtcaaaacttctgtttatgattaaattattaacctgttctcat

SEQ ID NO: 521883 - DNA, 120 bp, Artificial Sequence
  ENSG00000165409_71 (sequence is synthesized)
gcactgatggagagaccgtgtgggaagatcctgagatcctgggatggagaaaagcctagctgagcctaaccttctagcaattcccatcaaaaagccaggcatgtaagcacacccttttgg

SEQ ID NO: 521884 - DNA, 120 bp, Artificial Sequence
  ENSG00000165409_72 (sequence is synthesized)
accctccaaattgttccagacaccagctgaataacacccagtgatcctggtggaggctacagagagcagaaaatcacccagctcagcactgtctggcatcctgatccacaaaattagaaa

SEQ ID NO: 521885 - DNA, 120 bp, Artificial Sequence
  ENSG00000165410_0 (sequence is synthesized)
agtgccacagagccgaagcccgagctgccgccgcagccacagccgagggcactatggcttctggagttacagtgaatgatgaagtcatcaaagtttttaatgatatgaaagtaaggaaat

SEQ ID NO: 521886 - DNA, 120 bp, Artificial Sequence
  ENSG00000165410_1 (sequence is synthesized)
cttctacacaagaggagatcaaaaagagaaagaaagcagttctcttctgtttaagcgatgacaaaagacaaataattgtagaggaagcaaagcagatcttggtgggtgacattggtgata

SEQ ID NO: 521887 - DNA, 120 bp, Artificial Sequence
  ENSG00000165410_2 (sequence is synthesized)
ctgtagaggacccctacacatcttttgtgaagttgctacctctgaatgattgccgatatgctttgtacgatgccacatacgaaacaaaagagtctaagaaagaagacctagtatttatat

SEQ ID NO: 521888 - DNA, 120 bp, Artificial Sequence
  ENSG00000165410_3 (sequence is synthesized)
tctgggctcctgaaagtgcacctttaaaaagcaagatgatttatgctagctctaaagatgccattaaaaagaaatttacaggtattaaacatgagtggcaagtaaatggcttggatgata

SEQ ID NO: 521889 - DNA, 120 bp, Artificial Sequence
  ENSG00000165410_4 (sequence is synthesized)
ttaaggaccgttcgacacttggagagaaattgggaggcaatgtagtagtttcacttgaaggaaaaccattataaaatgacagtcaagtgccatctggatcttaaggagcttccatttctc

SEQ ID NO: 521890 - DNA, 120 bp, Artificial Sequence
  ENSG00000165410_5 (sequence is synthesized)
cagctcagtccattggaatagtattaggttttggttttttgttgtatttccccctttccactgggcccttccaacacaatgaatgaaggaaatatcatttatttaagcagcctatcagtg

SEQ ID NO: 521891 - DNA, 120 bp, Artificial Sequence
  ENSG00000165410_6 (sequence is synthesized)
attgccattagactgttgaatactgttacttttatatagaacccaaggaatgccttcctgtcatattttagccaaaacaactggttatatgcctcccttgcagcaagcactacaatgtat

SEQ ID NO: 521892 - DNA, 120 bp, Artificial Sequence
  ENSG00000165410_7 (sequence is synthesized)
gtgatcgtcaatgtgaatagcttagaatactgcaaaggataagctaattgaatgccttgaaagtattatccactggtcagatggtcaacttttttcagtattatttatagttggcacttg

SEQ ID NO: 521893 - DNA, 120 bp, Artificial Sequence
  ENSG00000165410_8 (sequence is synthesized)
attgcagttctgtgaggcttgagcattcatacacctcacctgccttggcaagcctattttagtgatatggcagcacggatataacactatgcattaaaagcactttttgtaataagttta

SEQ ID NO: 521894 - DNA, 120 bp, Artificial Sequence
  ENSG00000165410_9 (sequence is synthesized)
atatcctaaaaggaatgccaattaagttttgttaactgtgtcatcaacttatcctagtacctcagtgttcattcctgttacctgcatatcttcttaaaagaaatagctgttattaatgcc

SEQ ID NO: 521895 - DNA, 120 bp, Artificial Sequence
  ENSG00000165410_10 (sequence is synthesized)
tttttgttttccattgagtgtacactactgaataagtgtaggagttttatgtttaccatgtgagtcctgcaacactaaagatattttgaatatcagtcatgatggcaatttctgtataaa

SEQ ID NO: 521896 - DNA, 120 bp, Artificial Sequence
  ENSG00000165410_11 (sequence is synthesized)
agagccttaaatggaacattgttttgagatcaaactccccaccctcacaaaaatggccacgttgcaataaaaattgtggcatattacagaacgttgccttgttttccttggaaattttgc

SEQ ID NO: 521897 - DNA, 120 bp, Artificial Sequence
  ENSG00000165410_12 (sequence is synthesized)
aaaatgttatgtgaaacaacttctagggtaaaaacagctattactaatctctgcactggtcatttgagaattttttttgtacagcattcatgtgtgatattttccagatttgttggatct

SEQ ID NO: 521898 - DNA, 120 bp, Artificial Sequence
  ENSG00000165410_13 (sequence is synthesized)
atttggtttaaaaagtattctatcttaaggccaactaatataaaataccattgttaaagaatggtacttttataaacattagtgtatttatttcctatgtgttaatatgaagatcagaaa

SEQ ID NO: 521899 - DNA, 120 bp, Artificial Sequence
  ENSG00000165410_14 (sequence is synthesized)
ttattttttgcactttggcataaatacttttcaatatctgatttgttctctggataaattagcatagttatttttttattcacatttacatttctaagtagttgtatagtagaagcagga

SEQ ID NO: 521900 - DNA, 120 bp, Artificial Sequence
  ENSG00000165410_15 (sequence is synthesized)
agctcttattgcttatttggtcgtaatgaaaataatttgtaaaatgtcctttaaaagtttaatgatacttctgatgtttcggaacagtcatttcacctactatttctgaatatattttgc

SEQ ID NO: 521901 - DNA, 120 bp, Artificial Sequence
  ENSG00000165410_16 (sequence is synthesized)
aaattgaattggaataggaattgataatagcagtcttaaacattagtagtgggatttggctatggtccagactgtgctccttatagagaatttgatctgctcagtgtgagcggtttgctg

SEQ ID NO: 521902 - DNA, 120 bp, Artificial Sequence
  ENSG00000165410_17 (sequence is synthesized)
agtaagcagtcagtcgtggctcagaacttaaccccatagctcagaggaatgcttttagcagaaaacaggaaagaaaatatcccttaaaaattttttttgaatgtgtggaagtaattttag

SEQ ID NO: 521903 - DNA, 120 bp, Artificial Sequence
  ENSG00000165410_18 (sequence is synthesized)
tataattagattttttccatatttttgaaagatttttcagatgtgaacattaaaaatagggattaaatgtctaggcttccatttaaaattatatgaatggtttgggatctttttgcactg

SEQ ID NO: 521904 - DNA, 120 bp, Artificial Sequence
  ENSG00000165410_19 (sequence is synthesized)
agcaattttatttcaggcttccagctgtccctgtgagttatcctggacatttcgatggtttttggtaaggccaaactctgataagcaaaacagagaatactgacgtatacttaaccatat

SEQ ID NO: 521905 - DNA, 120 bp, Artificial Sequence
  ENSG00000165410_20 (sequence is synthesized)
gtgtaactgatacttggcaccatggaatttttcattgagttatttcctcattcttttaaaaaataagggactataaatcagttatgtagtatcttttgtttttgtagctgattccttaac

SEQ ID NO: 521906 - DNA, 120 bp, Artificial Sequence
  ENSG00000165410_21 (sequence is synthesized)
tttcttgtatgcctctagtaatttcagagattaaatattgctttaaactgtgatactttgatttgctagattgacaaaactgatactaatataattaagttcatctttgaaatacatctt

SEQ ID NO: 521907 - DNA, 120 bp, Artificial Sequence
  ENSG00000165410_22 (sequence is synthesized)
tgtgcgtagagccaaaaaaagagataaaattaataatagttcacttgttatttgagattaatttggcatttgaaatgatcattttattttacaatcatttataatgaatcaatgttccag

SEQ ID NO: 521908 - DNA, 120 bp, Artificial Sequence
  ENSG00000165410_23 (sequence is synthesized)
ttagctttaaaaggtatacggtgctaattagtaaaatattgaaggcaatattttactgctagcttgcaaagttatgagagtttaaaaaataaaatatatgaaaatatgtaaagctgttga

SEQ ID NO: 521909 - DNA, 120 bp, Artificial Sequence
  ENSG00000165410_24 (sequence is synthesized)
gatgtgtttacttatacttcagaacattaaaagtttaaaaactggtatttcagatcaaagaggcatcattatctttattctgtttttcaggattttagttggtaatactttctcatttat

SEQ ID NO: 521910 - DNA, 120 bp, Artificial Sequence
  ENSG00000165410_25 (sequence is synthesized)
caataacaattttctttaaaaactgagtgttacagcaattaattttagcattttcagacaaatgggaacagttggcatgtgtcccaaactggctatcagctgttgttttccatcattatc

SEQ ID NO: 521911 - DNA, 120 bp, Artificial Sequence
  ENSG00000165410_26 (sequence is synthesized)
taaaatagtgtggccagcattgtgtattgaaatgtgcctttttcgtacattggaagagaagcctcttactgggtttgagtttctctgatacagaacatttgtagcagctaatttatggaa

SEQ ID NO: 521912 - DNA, 120 bp, Artificial Sequence
  ENSG00000165410_27 (sequence is synthesized)
tctggcaaataagctttgggaggaaattcttttaaaagtgttttcttgttaaggaataatctcaacaatggtaaatcatcaagaggttgagaagactcttaggtttgccactcagaaaaa

SEQ ID NO: 521913 - DNA, 120 bp, Artificial Sequence
  ENSG00000165410_28 (sequence is synthesized)
acagtctcattttgctcttcataggtcctgtttttgcttgcacatttaatagtaggtggagatgcaaaacaacgtgaatgttcatttttttatgaatagtattaaagctactagaggtgg

SEQ ID NO: 521914 - DNA, 63 bp, Artificial Sequence
  ENSG00000165410_29 (sequence is synthesized)
ttcatttttttatgaatagtattaaagctactagaggtgggcaggcaggtcccagtaaatgtt

SEQ ID NO: 521915 - DNA, 86 bp, Artificial Sequence
  ENSG00000165410_30 (sequence is synthesized)
gggactacaggcatgcaccaccatgcctaagagactgagtttggccatgttgcctaggctgatctccaactcctgggctcaagctg

SEQ ID NO: 521916 - DNA, 120 bp, Artificial Sequence
  ENSG00000165410_31 (sequence is synthesized)
atgttgcctaggctgatctccaactcctgggctcaagctgtcctctgacctccgcctcccaaaagtgctaggattgcatgcatgagccaccacttcaaaagctcaaatactgcttttgaa

SEQ ID NO: 521917 - DNA, 120 bp, Artificial Sequence
  ENSG00000165410_32 (sequence is synthesized)
gacagcatgagtttatggatgttctgtctcctttcagcccataaagaagtctgaggcttttcttttgctctggaacatccaactaattgctttatttccatgtagaagtagaggaatcat

SEQ ID NO: 521918 - DNA, 120 bp, Artificial Sequence
  ENSG00000165410_33 (sequence is synthesized)
ccctccacttaaatttcctctcataatgcaatttggcaaattaaatctctaaatctcagttttttaacccatagtatgggaacggtaatatctgtttaccatgtttcctgagtactaaat

SEQ ID NO: 521919 - DNA, 120 bp, Artificial Sequence
  ENSG00000165410_34 (sequence is synthesized)
atggaaatggtttttgaaaacaggaaaatgctatgtaaatgcaataatctgtttaaactattcattcttaattactgtatgtaagtagataaatattaaatgtttttgttaaaagatgta

SEQ ID NO: 521920 - DNA, 120 bp, Artificial Sequence
  ENSG00000165410_35 (sequence is synthesized)
ggatgggacaacttgtatttgtccctttcgcttccacgtccaaacccctttaagaaggatgaatgggcaggatgagttagactccttcgctgtatcgtctactgattcttaaaatgtgac

SEQ ID NO: 521921 - DNA, 80 bp, Artificial Sequence
  ENSG00000165410_36 (sequence is synthesized)
cgcgctctgaggtcaggccgaggacgcggacagccggggagccggggccgcgagacagaagggccggcctgggagcgggt

SEQ ID NO: 521922 - DNA, 120 bp, Artificial Sequence
  ENSG00000165410_37 (sequence is synthesized)
cctgcggcccgccgagccccgccacctccctcgggctgcagctcccggcgtgccccgcactctccgctgcccacccgctcgcccgcccctccttctcctcccagtgccacagagccgaag

SEQ ID NO: 521923 - DNA, 120 bp, Artificial Sequence
  ENSG00000165410_38 (sequence is synthesized)
aagaaggatgaatgggcaggatgagttagactccttcgctgtatcgtctactgattcttaaaatgtgacaaatctgattggacgacttacatggtacggtgcaatttttgatgtccagac

SEQ ID NO: 521924 - DNA, 120 bp, Artificial Sequence
  ENSG00000165410_39 (sequence is synthesized)
atggtaagacgagcgcgctggccgggaggccgcggcgaggcgagaaaagccccccgcacggccccgggagtgaggccgccattttaacctgattttggcctccaaggccagccgagttga

SEQ ID NO: 521925 - DNA, 120 bp, Artificial Sequence
  ENSG00000165410_40 (sequence is synthesized)
acagccgagggcactatggtaagacgagcgcgctggccgggaggccgcggcgaggcgagaaaagccccccgcacggccccgggagtgaggccgccattttaacctgattttggcctccaa

SEQ ID NO: 521926 - DNA, 120 bp, Artificial Sequence
  ENSG00000165416_0 (sequence is synthesized)
gaggtggtaaccgtgatagtagcagctccggcggcagcaacagcgactacgagggatggcggcggctgcagcaggaactgcaacatcccagaggtttttccagagcttctcggatgccct

SEQ ID NO: 521927 - DNA, 120 bp, Artificial Sequence
  ENSG00000165416_1 (sequence is synthesized)
aatcgacgaggacccccaggcggcgttagaggagctgactaaggctttggaacagaaaccagatgatgcacagtattattgtcaaagagcttattgtcacattcttcttgggaattactg

SEQ ID NO: 521928 - DNA, 120 bp, Artificial Sequence
  ENSG00000165416_2 (sequence is synthesized)
tgttgctgttgctgatgcaaagaagtctctagaactcaatccaaataattccactgctatgctgagaaaaggaatatgtgaataccatgaaaaaaactatgctgctgccctagaaacttt

SEQ ID NO: 521929 - DNA, 120 bp, Artificial Sequence
  ENSG00000165416_3 (sequence is synthesized)
tacagaaggacaaaaattagatagtgcagatgctaatttcagtgtctggattaaaaggtgtcaagaagctcagaatggctcagaatctgaggtgtggactcatcagtcaaaaatcaagta

SEQ ID NO: 521930 - DNA, 120 bp, Artificial Sequence
  ENSG00000165416_4 (sequence is synthesized)
tgactggtatcaaacagaatctcaagtagtcattacacttatgatcaagaatgttcagaagaatgatgtaaatgtggaattttcagaaaaagagttgtctgctttggttaaacttccttc

SEQ ID NO: 521931 - DNA, 120 bp, Artificial Sequence
  ENSG00000165416_5 (sequence is synthesized)
tggagaggattacaatttgaaactggaacttcttcatcctataataccagaacagagcacgtttaaagtactttcaacaaagattgaaattaaactgaaaaagccagaggctgtgagatg

SEQ ID NO: 521932 - DNA, 120 bp, Artificial Sequence
  ENSG00000165416_6 (sequence is synthesized)
ggaaaagctagaggggcaaggagatgtgcctacgccaaaacaattcgtagcagatgtaaagaacctatatccatcatcatctccttatacaagaaattgggataaattggttggtgagat

SEQ ID NO: 521933 - DNA, 120 bp, Artificial Sequence
  ENSG00000165416_7 (sequence is synthesized)
caaagaagaagaaaagaatgaaaagttggagggagatgcagctttaaacagattatttcagcagatctattcagatggttctgatgaagtgaaacgtgccatgaacaaatcctttatgga

SEQ ID NO: 521934 - DNA, 120 bp, Artificial Sequence
  ENSG00000165416_8 (sequence is synthesized)
gtcgggtggtacagttttgagtaccaactggtctgatgtaggtaaaaggaaagttgaaatcaatcctcctgatgatatggaatggaaaaagtactaaataaattaatttgctctcatcgt

SEQ ID NO: 521935 - DNA, 120 bp, Artificial Sequence
  ENSG00000165416_9 (sequence is synthesized)
attgtgtatattcacctaatgcccattgtgtattgatattgcattcttgaattttgaacactgaatatctttttgaaagattatacttctttacctctttgtgctttagaaattattttc

SEQ ID NO: 521936 - DNA, 120 bp, Artificial Sequence
  ENSG00000165416_10 (sequence is synthesized)
cttcaagtgttcaagtctaatgaagaatgaagataacattttatcacttctgtccttaaaggtttcagacatggtgaaactgaataaagcatgtcatttgctcctagatagattcattct

SEQ ID NO: 521937 - DNA, 120 bp, Artificial Sequence
  ENSG00000165416_11 (sequence is synthesized)
atctagttgtggggatggagaaatctttaatggtatattttcggttattgccttatttttgatacagtattctgtcagtaatttattagacctggcagctttgggtgagcttagattttt

SEQ ID NO: 521938 - DNA, 120 bp, Artificial Sequence
  ENSG00000165416_12 (sequence is synthesized)
caccttcagtgttacattgtgtttgcttttaaaaactgcttttgaatggagttgtaaatacaatttttctatgaagatgtttggtttatttacctttttcttaagtttttaatgagaact

SEQ ID NO: 521939 - DNA, 120 bp, Artificial Sequence
  ENSG00000165416_13 (sequence is synthesized)
ttgagaaattatcacagggaattcccatgtagttcttttaatgggaagaatttgtaaatttaattgcactgagatattttggtcgttaccttgcaagtttctgtataaaacatagatacc

SEQ ID NO: 521940 - DNA, 120 bp, Artificial Sequence
  ENSG00000165416_14 (sequence is synthesized)
tgagttttaacacactgcaagtttatactaaggataatctgtgaaggtagggcaaagaaggttctaggaaagcccaactccacttgcttcttttatcacgacaggattcttgaaattaca

SEQ ID NO: 521941 - DNA, 120 bp, Artificial Sequence
  ENSG00000165416_15 (sequence is synthesized)
gcattggtgggttttttggtattttttttctttattagaaaatctctgttgtcacgtccccatgattactttggtttcattggtttatggtaactgctgtgagagtaaattaatgtgtat

SEQ ID NO: 521942 - DNA, 120 bp, Artificial Sequence
  ENSG00000165416_16 (sequence is synthesized)
atgtttagtatttactctgtgcctagaatatatagatatcatgagaatacaaaaaattaaagacatgattattaacttcaaagagcttataaatgtagcagggaaaaaaaataacattca

SEQ ID NO: 521943 - DNA, 120 bp, Artificial Sequence
  ENSG00000165416_17 (sequence is synthesized)
tgaaggaactgtggaaagattgaatgctgaactcggtataaatacactttagagacaggaaaatgttctgtgattaaaattgtttacagtctaggctgttataaagtatagactatggat

SEQ ID NO: 521944 - DNA, 120 bp, Artificial Sequence
  ENSG00000165416_18 (sequence is synthesized)
gacctgtagatctgactttgttttctcaccatgattttctcaactgtaataccccagatgttggtctcagctctgttaggtgtcactaacatttttatggcaaagcactactctataccc

SEQ ID NO: 521945 - DNA, 120 bp, Artificial Sequence
  ENSG00000165416_19 (sequence is synthesized)
tcagagcagggggagtgggaggcaaacgggtcatcatttcagcctccaaaacagtaggaattcagctccttccttctcgtcctttgttgtggggtgtaggggagttactaaggaaagttt

SEQ ID NO: 521946 - DNA, 120 bp, Artificial Sequence
  ENSG00000165416_20 (sequence is synthesized)
cagtaaggtgataccagatggtgcccaaacctgttgttatagcttgtttaagcattctagagttttcacttgtccttctgtccacttagagctactagatacatttttttcttcttgaac

SEQ ID NO: 521947 - DNA, 120 bp, Artificial Sequence
  ENSG00000165416_21 (sequence is synthesized)
actgaaggaaaaggcaaaattaagttttggttggatggatttctaaagttttcttcttaggaaaataggatagtgacttttgtattctgtatgttaaattttctcagtaccattaatcct

SEQ ID NO: 521948 - DNA, 120 bp, Artificial Sequence
  ENSG00000165416_22 (sequence is synthesized)
aagatgaagaggaaggctattgctgcagaggcatagttgaggacgtatagcactataccagagacaagaatgcttagctctagcaagtcttctgtcattgactaccttcataatcttcag

SEQ ID NO: 521949 - DNA, 120 bp, Artificial Sequence
  ENSG00000165416_23 (sequence is synthesized)
caggtttaggcctttcttagttcctttgtaaataatccatagagtcttagagttataattaaaggtccatggttctaaatacagaagcatatttttgccgcttaactttttctttcttaa

SEQ ID NO: 521950 - DNA, 87 bp, Artificial Sequence
  ENSG00000165416_24 (sequence is synthesized)
acagaagcatatttttgccgcttaactttttctttcttaaagatgacactattaaaatagctgtttctgaccaggtgcagtaggagg

SEQ ID NO: 521951 - DNA, 69 bp, Artificial Sequence
  ENSG00000165416_25 (sequence is synthesized)
atgcaaaaattagctggagaattgcttgaaccgggaggcagggggtgcagtgagccaagatcatgccac

SEQ ID NO: 521952 - DNA, 120 bp, Artificial Sequence
  ENSG00000165416_26 (sequence is synthesized)
catgccactgcactccagcctgggcgactccatctcaaaaaaaataaatagctgtttaaaaaaaaaaaatctggtactatctttagttggttttaaaggatatattatctagaatatgct

SEQ ID NO: 521953 - DNA, 120 bp, Artificial Sequence
  ENSG00000165416_27 (sequence is synthesized)
aggatatattatctagaatatgcttacccattggctagatttgctaagtgttgtgggatttgggattttgctggtctgaagggagtttgtaaaacacatgactgaaagcattataaaaca

SEQ ID NO: 521954 - DNA, 120 bp, Artificial Sequence
  ENSG00000165416_28 (sequence is synthesized)
taccttgtcaaatacattagattcattataggtcaagggaattttgaaaagtaggctagattgctgcctaagaatcccactctaaagtactgctttgtttaatcattctagataatggaa

SEQ ID NO: 521955 - DNA, 120 bp, Artificial Sequence
  ENSG00000165416_29 (sequence is synthesized)
gcttgtaagcctccagaaagttaaaacaaaaaacttctttctgattaagagcctcttaactctatccttatcctctgctatctcaatgtagctattaattgttccctctttgtttctaga

SEQ ID NO: 521956 - DNA, 120 bp, Artificial Sequence
  ENSG00000165416_30 (sequence is synthesized)
ctccaattttcatttctcaaattttggttctcagtgctgttagtattagtagccttttgtttcttcagaatgtatgtatttttcctcttaaatgtttcctttcccttttaaggttagtcc

SEQ ID NO: 521957 - DNA, 120 bp, Artificial Sequence
  ENSG00000165416_31 (sequence is synthesized)
tggaatacatgtttttcttggtcttgtagacttcatctcttctgatttccataataatttgcaccttgatgaatccagaattctcccactgtcttcaaagaatcttgaatagaataatct

SEQ ID NO: 521958 - DNA, 120 bp, Artificial Sequence
  ENSG00000165416_32 (sequence is synthesized)
gctttttgaactctgctatctagtaatctctttagatatctataccacaagtttgaaacatcaaggtcaattttgataatttcctgtcttatgtcttaatacccattcagagttgactgc

SEQ ID NO: 521959 - DNA, 120 bp, Artificial Sequence
  ENSG00000165416_33 (sequence is synthesized)
caactaacaagctcagcctttagcactggcacttactggccaatctgttttctgtctatagggagtgaaatggaatggagaaagaggatggcttgcattaataactctagtttttaaaaa

SEQ ID NO: 521960 - DNA, 90 bp, Artificial Sequence
  ENSG00000165416_34 (sequence is synthesized)
aaagaggatggcttgcattaataactctagtttttaaaaacatttttattccttttttaaaaatttgtttagagacacggtcttcttcta

SEQ ID NO: 521961 - DNA, 74 bp, Artificial Sequence
  ENSG00000165416_35 (sequence is synthesized)
cacattttcattcttggctcactgtagccttaatctttcaggctcaaatgattctcccatctcagcctcccaag

SEQ ID NO: 521962 - DNA, 86 bp, Artificial Sequence
  ENSG00000165416_36 (sequence is synthesized)
tagctgggaccacaggcatgcatcaccacgactggctaatttttgtattttttttgtagaaccgggtttcaccatgtatctacctg

SEQ ID NO: 521963 - DNA, 120 bp, Artificial Sequence
  ENSG00000165416_37 (sequence is synthesized)
attacaggagtgagccaccatgcccagttatgaacttcaagtaaatatttaaaatggagatacatcacaatgctattatgaataatttagatagaaattttaatttagttcagtacttaa

SEQ ID NO: 521964 - DNA, 120 bp, Artificial Sequence
  ENSG00000165416_38 (sequence is synthesized)
atttagatagaaattttaatttagttcagtacttaaatattttttggctcttctttcccactttacctttctctattccttcctcagttatctacatatcagattagattattgatatct

SEQ ID NO: 521965 - DNA, 120 bp, Artificial Sequence
  ENSG00000165416_39 (sequence is synthesized)
gagatatatcactgacccagagcaaaattgcatattagtttaccatctaatcagcctaatgcacttaaattcccttggaatctttcctgttcagattggtgtgcatctctctgaacttgt

SEQ ID NO: 521966 - DNA, 120 bp, Artificial Sequence
  ENSG00000165416_40 (sequence is synthesized)
agctttactgacatttccaaaaaaaggtagacggtttctaggtggtgtgtgtttttgttagttactagagccacttaccctttgtaactagctctaaagaagtacatcttttgctcatac

SEQ ID NO: 521967 - DNA, 120 bp, Artificial Sequence
  ENSG00000165416_41 (sequence is synthesized)
ctgctactgtaaccatatgacagtatggatttaagttatttctgcctagaggaattagatgataaaagctaaaaggacaaaatactggtttctgtgcagggaagggtcatatgtagtttt

SEQ ID NO: 521968 - DNA, 120 bp, Artificial Sequence
  ENSG00000165416_42 (sequence is synthesized)
aaataaaagggttcatctcttttgatgtggtttccctttctccatctgtgcattttttaaatcgtaagatcattttacacacaccaagagattttattttgggaacttgtggggaaaata

SEQ ID NO: 521969 - DNA, 120 bp, Artificial Sequence
  ENSG00000165416_43 (sequence is synthesized)
ttgatttacctacaaatgttactatttggagccatccttgtgattggtttctgagattaatttaactcttagcctcacttcctaccttagtaaagttgctcctccaaatcagctaaaatc

SEQ ID NO: 521970 - DNA, 120 bp, Artificial Sequence
  ENSG00000165416_44 (sequence is synthesized)
atatacaatgaatgctgactcattactgcaaatagtggtagttactgtgtactagcatttcttatggattgggtggcattatctcatttttaatcgcccttcaatagcatcccattattg

SEQ ID NO: 521971 - DNA, 120 bp, Artificial Sequence
  ENSG00000165416_45 (sequence is synthesized)
caaatcagaaagatgatggggccaaagtaaagttctttgcccaggtcactctactagtaagtaattgcaatagctgggatttgaacccaggcctatcagactccattacccatacttctg

SEQ ID NO: 521972 - DNA, 120 bp, Artificial Sequence
  ENSG00000165416_46 (sequence is synthesized)
acaactgcaatcctctcatcaggttaataagctagatgtggaatgaatgatttttattaccaaatcagctgactggaaatgaagcagagaatattcaagttaaagaactaattctttttt

SEQ ID NO: 521973 - DNA, 120 bp, Artificial Sequence
  ENSG00000165416_47 (sequence is synthesized)
ataggcgtgagccactgtgcccagccaagaactaattcttatataggagctgggaagataaattcctagagatcctcactttcttaagtaggaaagcttattaggaatccaaatcttttg

SEQ ID NO: 521974 - DNA, 120 bp, Artificial Sequence
  ENSG00000165416_48 (sequence is synthesized)
cttattaggaatccaaatcttttgcctcatactggaagtaatgcaaagaagtagtctgatttttgagagggtgctgtttttctcaaatctagatcattacagagaaacagtgtactttta

SEQ ID NO: 521975 - DNA, 120 bp, Artificial Sequence
  ENSG00000165416_49 (sequence is synthesized)
acaactgttgcatgtgtaagaagactggtacatgatgccaatgaaattctttttttcctttaacttgggagctctcataccagttccgttgtacaaatgctgagattgtttcaaggtttt

SEQ ID NO: 521976 - DNA, 120 bp, Artificial Sequence
  ENSG00000165416_50 (sequence is synthesized)
attcctacagacatgttaggatttgtgtatcactgatttctccaataaaatttgaatatttcaggttatttcctttttcctaacttatgttagcattttgtatatatatatatatttgaa

SEQ ID NO: 521977 - DNA, 120 bp, Artificial Sequence
  ENSG00000165416_51 (sequence is synthesized)
ttttggcttgtctggagtcttaaatatttggtatgccttcacatttggatttttagttttatttttacattgagacttctacctatatcattgactttattttttcctatgattaaagga

SEQ ID NO: 521978 - DNA, 120 bp, Artificial Sequence
  ENSG00000165416_52 (sequence is synthesized)
ttcagttatacaaaaagatgtttcagaaacactgctatttacctaaaggtaattttcagtttctttagaaggagttaggaaaatggtccttaatacctatatagggttttttaaaaaact

SEQ ID NO: 521979 - DNA, 120 bp, Artificial Sequence
  ENSG00000165416_53 (sequence is synthesized)
gtaccctataatgcagccacagaagatctaaataataaacaattgcgcatactattaatatatatttagagcttttgttaagtacatgaaaagacagtattgcatagtggttaaatgcat

SEQ ID NO: 521980 - DNA, 120 bp, Artificial Sequence
  ENSG00000165416_54 (sequence is synthesized)
ggactctgaagccatcctgtttgggatcatcctggctacattgcttactagctgtgtgacaatggatataggtgcttaatgtctctgtgcctcagtttttgtgtctatgtaaaggagata

SEQ ID NO: 521981 - DNA, 120 bp, Artificial Sequence
  ENSG00000165416_55 (sequence is synthesized)
ataggatccccctcatgcctcatggtcttagttgaatgaattcatgtaactccacaggtatcttaatccagaaggctcaaaatactaatgttttgtgtgtgtgtgtgtgtgtgcatgtgc

SEQ ID NO: 521982 - DNA, 120 bp, Artificial Sequence
  ENSG00000165416_56 (sequence is synthesized)
atgctagcactgatcctgctgaaattgttacaaaatacagcagttgccccttaactgtggcagatacattccaagacccccagtactgaatgctgtatgtacattttttatacatgtata

SEQ ID NO: 521983 - DNA, 120 bp, Artificial Sequence
  ENSG00000165416_57 (sequence is synthesized)
cttatgataaagtttataaattaggcacagtaagatattaataatagaatatacaatataccgcaataaaacttatgtgaacagttatttttggacagcagttgactgtgggtcactgaa

SEQ ID NO: 521984 - DNA, 120 bp, Artificial Sequence
  ENSG00000165416_58 (sequence is synthesized)
attgtggaaagcaaaaccatggataaaggggaactattaatagtctatctgtattgcattatcttctaaaatccaaaattctgacttcaaaaactcatctgagggttttggaattgtgta

SEQ ID NO: 521985 - DNA, 120 bp, Artificial Sequence
  ENSG00000165416_59 (sequence is synthesized)
tctatgtgtgtgaagtgcaaagagcagtgcttcatgtgacagataacatcagatgatcctaggctggaaggtggaaatcctagagaagatttttttgtgttgtaagttcagtctttcaag

SEQ ID NO: 521986 - DNA, 120 bp, Artificial Sequence
  ENSG00000165416_60 (sequence is synthesized)
atgtggaattctgtctgaggaaagtatatcacctagttaacaattgttactgtaatttataaaatttgtactttggagagcataagaattcatgaaaagtttttaataattttacttaaa

SEQ ID NO: 521987 - DNA, 120 bp, Artificial Sequence
  ENSG00000165416_61 (sequence is synthesized)
cagagcttaattatgtaagtattgtcagcactttataaagaatcgtaaaataaaatagtggcagaaaatataaactagatgtagaatgttaaggaactttcggaagttctctggttttca

SEQ ID NO: 521988 - DNA, 120 bp, Artificial Sequence
  ENSG00000165416_62 (sequence is synthesized)
tttcaatttcaaagctcaaaacagaaggtaaaactattaggatttgtgaaaaatacaaggtacaaaatcacgcagtttataaaccacagattgtcttgttattcccatcagtgaaaagaa

SEQ ID NO: 521989 - DNA, 79 bp, Artificial Sequence
  ENSG00000165416_63 (sequence is synthesized)
tggtagatgtttttatgagttaattcatcaatcttattattcttgccccaaatgaatcagtgtggagcatatacaagtg

SEQ ID NO: 521990 - DNA, 120 bp, Artificial Sequence
  ENSG00000165416_64 (sequence is synthesized)
ttcttgccccaaatgaatcagtgtggagcatatacaagtgtgtagacattaatatgggctcactgtcagctgggagttctcacaactaccactttttactgattatctgttttctaaact

SEQ ID NO: 521991 - DNA, 120 bp, Artificial Sequence
  ENSG00000165416_65 (sequence is synthesized)
ttttctgtggcttgaagtgactgaaagtgaacacattcataagtaatgagcttaggctgaggatatatatccagtgggggatgaaacatgcttaagaaattgagtgcatttcctttatta

SEQ ID NO: 521992 - DNA, 120 bp, Artificial Sequence
  ENSG00000165416_66 (sequence is synthesized)
ttgttattattttgctatttcaaaacaattgactttaaaaaattatacttcaccacagagacaggtgttgttttgtaatggaaggagtagtaacttatgaatctagactcttaaaatccc

SEQ ID NO: 521993 - DNA, 120 bp, Artificial Sequence
  ENSG00000165416_67 (sequence is synthesized)
agttctgatactttcataattgtgtgttttgagggcaagtgacttatctgaacttttttcttttttataacactggatgataattaaccctcaggattgtgaggatttaataactaagtc

SEQ ID NO: 521994 - DNA, 120 bp, Artificial Sequence
  ENSG00000165416_68 (sequence is synthesized)
ctgactcaaattatgttaccaataaatgctacttaaatgtaaagtccttgatttattttttcccctcagtcctgtttagtgttgaaattcttcaaaggagggtgagtctggcatttacct

SEQ ID NO: 521995 - DNA, 120 bp, Artificial Sequence
  ENSG00000165416_69 (sequence is synthesized)
gctattcaagagttttcagaattcaaccccagccaaaatttttggccacatctcttgtcactgctttgctgtgtactaaagctcccagacacacaagaatcttctagtcatggtcaaact

SEQ ID NO: 521996 - DNA, 120 bp, Artificial Sequence
  ENSG00000165416_70 (sequence is synthesized)
ttttctgcaaagggcacttacagtctattgcatattctttgtttttagtgttcagacatctgctgtttctgaatatgtcgtgtattttcattcctttttctgcccctcctgggcatctcc

SEQ ID NO: 521997 - DNA, 120 bp, Artificial Sequence
  ENSG00000165416_71 (sequence is synthesized)
agtttcctactgatgtgtcaaaactgagtttgtatgctacctccaggaaagcagtctaatcttttgcaactctgttactgacttttgtggcattggattgggttatttgcttatggttga

SEQ ID NO: 521998 - DNA, 120 bp, Artificial Sequence
  ENSG00000165416_72 (sequence is synthesized)
gacatcactggatcctttgatggagtcataccaaaaccacaacatgtcatgagcatgcttgagagtgctaatctattccttgtttgtcagaccagtacattacagttggttcatttcttc

SEQ ID NO: 521999 - DNA, 120 bp, Artificial Sequence
  ENSG00000165416_73 (sequence is synthesized)
ccccgtgtgactgagtttcttgagggcgcggtctagcttccatctttgtatgtgtagcacctggtacatagagaacaggctcccagaattggatggatttgctcatggtcttatcactgc

SEQ ID NO: 522000 - DNA, 120 bp, Artificial Sequence
  ENSG00000165416_74 (sequence is synthesized)
acagaatgcccttattttcttccattcattctatgagatctcaattaaaatgtcagtactcttgtggaactcccctctccatgccctctactgaaatgcattgccactctagttgtgatg

SEQ ID NO: 522001 - DNA, 120 bp, Artificial Sequence
  ENSG00000165416_75 (sequence is synthesized)
tgggagtgccttgtttatgcctctatttatgacaccttcatggtgtcacatgttatagggttagttgcggctgtgtctgttttaccttgtgtgtcttggtcagttagtgttatttactta

SEQ ID NO: 522002 - DNA, 120 bp, Artificial Sequence
  ENSG00000165416_76 (sequence is synthesized)
agctttggatctttgatacatagcgtagtgcctttcacatagtatgtactcaaatattggaagttactcatcccaaaccatagtgtttaaaattggggttttttaaaaatgtcaagccct

SEQ ID NO: 522003 - DNA, 120 bp, Artificial Sequence
  ENSG00000165416_77 (sequence is synthesized)
taaagttgatcatttatttgtcaatgtaaatagaatagtaatttgttttcaaaaagatgaggtcttgctgtggtgctcaggctggagtgcagtggctgttcacaggcgtgataattgtgt

SEQ ID NO: 522004 - DNA, 120 bp, Artificial Sequence
  ENSG00000165416_78 (sequence is synthesized)
gttacagcctcaaagtccagggctcgagtgatcttctcacttcagcctcctgagtagctgagactaggcgtgcaccaccgtttctgacaggattttaatttttaagtaggtttttaaccc

SEQ ID NO: 522005 - DNA, 120 bp, Artificial Sequence
  ENSG00000165416_79 (sequence is synthesized)
ggtttttaacccacagccacgagagctaattttaactacattgttagaggtagtaacagttatataactaatcaaaaccagtgtgatatccaagtacttttttttttttttttttttgct

SEQ ID NO: 522006 - DNA, 87 bp, Artificial Sequence
  ENSG00000165416_80 (sequence is synthesized)
aagataaggtcttgctcttgcccaggctggaatgtaatggcatggtcgcagctcactgcagcctccgtcttctgggctcaagcaatc

SEQ ID NO: 522007 - DNA, 76 bp, Artificial Sequence
  ENSG00000165416_81 (sequence is synthesized)
ggtcttgctcttgcccaggctggaatgtaatggcatggtcgcagctcactgcagcctccgtcttctgggctcaagc

SEQ ID NO: 522008 - DNA, 86 bp, Artificial Sequence
  ENSG00000165416_82 (sequence is synthesized)
gtgccaccactcccagctaatttttaaattttgtgtagagatggggtctccctgcattgcccaggttggtctctcaaactcctggg

SEQ ID NO: 522009 - DNA, 120 bp, Artificial Sequence
  ENSG00000165416_83 (sequence is synthesized)
ttgttttgttttgttttgtgttttaattgaacggactgaagtttactttctaactaggttagccctccattcatacaaaattatgagcccaaatgtcttggggagagtacaggagaggcc

SEQ ID NO: 522010 - DNA, 120 bp, Artificial Sequence
  ENSG00000165416_84 (sequence is synthesized)
agatcttaaaagccaggagtggaattaggtttgagcatatgtagcaatatggaaacaaagagtgagtcaatttataagcataccaatcttcttggagacaaaagtttgaattgctcacgt

SEQ ID NO: 522011 - DNA, 120 bp, Artificial Sequence
  ENSG00000165416_85 (sequence is synthesized)
gtccattttttttctggaatccctgaagaaattttgagatactgagtactagaaaaccctctttgatgagggttgtatactttatttttaaacagtatcaacaccgttgaggcccttcaa

SEQ ID NO: 522012 - DNA, 120 bp, Artificial Sequence
  ENSG00000165416_86 (sequence is synthesized)
gtctttgcagtcaaaagccatacactttttctttgagtgagcctttactttaaggtatgtagtagaataatataggtatctgaaaaagaacttggttcatgacatccactcattcattta

SEQ ID NO: 522013 - DNA, 120 bp, Artificial Sequence
  ENSG00000165416_87 (sequence is synthesized)
tgcacttagcaaatattcattgattgccaaatacgcatcagacactgagctaggtgctaggtactaggtaaacaaaattccctgccttcatggagcttagcttgtggtggtggaaagaag

SEQ ID NO: 522014 - DNA, 120 bp, Artificial Sequence
  ENSG00000165416_88 (sequence is synthesized)
ccctcagcctgaatactcaacttatgtctgccgtttattccttaacacattaaactataggtaatagcatatgttagtctaatctttgtttagcaaagctatttcttgttctggaatata

SEQ ID NO: 522015 - DNA, 120 bp, Artificial Sequence
  ENSG00000165416_89 (sequence is synthesized)
agtacagttacagcagaataagtaccaaggcaagattggagaatgaccggttgtgaacagggacttaggaatatgtgtagcataggattttattttagagttgttaaaatcagatcaaca

SEQ ID NO: 522016 - DNA, 120 bp, Artificial Sequence
  ENSG00000165416_90 (sequence is synthesized)
gagcatgtttttatgggccatctgacaagactagaggtagctttggaacctcttattccctggaatgcaaacatgtatttgcatttcatccactgtcagtatgaggagacaaaaacgaag

SEQ ID NO: 522017 - DNA, 120 bp, Artificial Sequence
  ENSG00000165416_91 (sequence is synthesized)
tcaggattttggagctggaatggatcttaaatactatgtagtccaaacgtttggttttacagatgcactttttccagagtgctgtcatctcatatacttttttcttcatacaggttttta

SEQ ID NO: 522018 - DNA, 120 bp, Artificial Sequence
  ENSG00000165416_92 (sequence is synthesized)
ctcatatacttttttcttcatacaggtttttaatgtaactcactcagatcgttggtgatagactctctcttaaaacttatttatcctaatcttttttttttttttttttttaagagacag

SEQ ID NO: 522019 - DNA, 120 bp, Artificial Sequence
  ENSG00000165416_93 (sequence is synthesized)
tcctgcctcagcctctcaggtagctgggactgcactactagtgcactaagctaatttttaaattttttttgtagagacagggtcttgctgtgttgcccgggctgctctcttaactcctgg

SEQ ID NO: 522020 - DNA, 84 bp, Artificial Sequence
  ENSG00000165416_94 (sequence is synthesized)
actaagctaatttttaaattttttttgtagagacagggtcttgctgtgttgcccgggctgctctcttaactcctggcctcaagt

SEQ ID NO: 522021 - DNA, 120 bp, Artificial Sequence
  ENSG00000165416_95 (sequence is synthesized)
ctctgctgacattctgatatcggacaactaaaattataacattgggcagctattttgtatgatatatagggtagtggttcttaagcttattggtgagtaaccttcacttgggaagcttat

SEQ ID NO: 522022 - DNA, 120 bp, Artificial Sequence
  ENSG00000165416_96 (sequence is synthesized)
ttttaaaaatgtagaccttcattactttcctcctgagattttgaatcagtacctttgagagagggtccagtaaatctttgttttgaatgaactgatggttttgaagcaggtgacctggag

SEQ ID NO: 522023 - DNA, 120 bp, Artificial Sequence
  ENSG00000165416_97 (sequence is synthesized)
gactgcatgtagaacacagtgatgtcaaggagtaaaggagagaacagaagtgagattagcactaatcacctctaatgccttatttccagtaaagtttagagaagaggaaaagctacttgg

SEQ ID NO: 522024 - DNA, 120 bp, Artificial Sequence
  ENSG00000165416_98 (sequence is synthesized)
cttgctcctttgaaggttttgtttccctcttaacacagaaattaaaaggtagaggagagatgctgaatgatgctttttttcttcttaatcttggggggtcattatgattaagttattgaa

SEQ ID NO: 522025 - DNA, 120 bp, Artificial Sequence
  ENSG00000165416_99 (sequence is synthesized)
tccatatcaccgtatgacagcacatgatgaaagaaaatcaaatgtttgtttcaatcaaagtgaaacaaaatgagaataactatttgggcaaaacacttttatcactgctaagatattact

SEQ ID NO: 522026 - DNA, 120 bp, Artificial Sequence
  ENSG00000165416_100 (sequence is synthesized)
agaactgagcagagaaatactcagagagagccatggcatagtactaattaataatggggtaccatttagcaactggaatattctccgatgatgcctgtttaattacccataggtgctaag

SEQ ID NO: 522027 - DNA, 120 bp, Artificial Sequence
  ENSG00000165416_101 (sequence is synthesized)
tgaatgttaaaaattacggtgctggttgagtaggccgagtagaatttgtgttagggcacatcccatggagatcttttttactgcttaattttttggagttacctcagtaacttaacaggc

SEQ ID NO: 522028 - DNA, 120 bp, Artificial Sequence
  ENSG00000165416_102 (sequence is synthesized)
aggaatatggttttaatggaaaggaaaccatttgcctttaacagcattagtcccgctaagagaaagtttttgcttgtctagtttattacaggtctttgactttgtcagtatatggcaaat

SEQ ID NO: 522029 - DNA, 120 bp, Artificial Sequence
  ENSG00000165416_103 (sequence is synthesized)
ttagtataaaagatgattaattatcaaggctgatgaaatataggcagctgaaaagaaaattcttagcaattcataccttagaaggaaccctgaaggacaggacgccatagaaatcctgtt

SEQ ID NO: 522030 - DNA, 120 bp, Artificial Sequence
  ENSG00000165416_104 (sequence is synthesized)
tttttaaaaaagtaatttcaagtaagtttgcaaatgcaatgctagtaaaaagtatatagaggtatgtctttcacactatcttgttactattagaatttttgtagccatgtgcagaggaga

SEQ ID NO: 522031 - DNA, 120 bp, Artificial Sequence
  ENSG00000165416_105 (sequence is synthesized)
gaaaaggtgttggattttctgcagttctgattcagttctaagaatttggtgtgaaaagaatgtttgcaaaggagcaggcacaaaggtgagaacaggaatacgaaacacaacatctgtaaa

SEQ ID NO: 522032 - DNA, 120 bp, Artificial Sequence
  ENSG00000165416_106 (sequence is synthesized)
tgactaaattcagagggaatttagtggggcatatctcttaaatggttttgaataatttggtgttttaaccaatgacttaatttaacttagtgggtatactgttcccagtcccattactga

SEQ ID NO: 522033 - DNA, 120 bp, Artificial Sequence
  ENSG00000165416_107 (sequence is synthesized)
tttttattcctctgtgataacatacacccaaataaagactgctatgtatttgactttaaaactataaagatgtaaaaaaggttcactaagccaaacaccttagaaaatagcctcagctat

SEQ ID NO: 522034 - DNA, 120 bp, Artificial Sequence
  ENSG00000165416_108 (sequence is synthesized)
ttgctatgtttatattatacctgcataaaagtatttatgtatagatgtacttaccttacacagtaagtacctaaaatttgtaaattgaatacttttgaatgtaagcagttgaagtaaaac

SEQ ID NO: 522035 - DNA, 120 bp, Artificial Sequence
  ENSG00000165416_109 (sequence is synthesized)
ctgtagtgagttcttcagtcagtcaacactaaacctgttttgtaaatttgatgctagtattatactggactttctcaaaatgaagtacacctatatatgcatatagtatatgagcatgtg

SEQ ID NO: 522036 - DNA, 120 bp, Artificial Sequence
  ENSG00000165416_110 (sequence is synthesized)
tatttgtacaaaagcccttcaaaaggagttcagcttttataaacaccaaaacactctctgcctgtaaaatgtttttgctgaaatttgtatcattaactctcaaatttacatcttcatgtt

SEQ ID NO: 522037 - DNA, 120 bp, Artificial Sequence
  ENSG00000165416_111 (sequence is synthesized)
tgagatacgcttttaggactgtctatgcatgtagactttggtcaactctctcctcctccctcaataaatcagttaacttaaaaaatatattgtgaccatttttataaaatacatgttcat

SEQ ID NO: 522038 - DNA, 120 bp, Artificial Sequence
  ENSG00000165416_112 (sequence is synthesized)
aaaacagatcaacatatttagcttatacagaaataaaattaagtcaatccactcacaaagaatttctattttgtaaaaatgtagcttgtatttcagtataataaaatctgatgtaagaaa

SEQ ID NO: 522039 - DNA, 120 bp, Artificial Sequence
  ENSG00000165416_113 (sequence is synthesized)
cggctgggaggaatcggtcctccactgtcccagccggccccgcgccggcgtgtcgcctcccgtccccctagcagcacgctgcgtggctgctcgctggctatttaggacggaagctcggtt

SEQ ID NO: 522040 - DNA, 120 bp, Artificial Sequence
  ENSG00000165416_114 (sequence is synthesized)
tggtaggtggtatattcagtagatggtaaataaatgaccaattcttcagtgagacactgactttctatacctgcatttatgtaccttgatttttaaaaatttttggataaacttgcatgt

SEQ ID NO: 522041 - DNA, 120 bp, Artificial Sequence
  ENSG00000165416_115 (sequence is synthesized)
gtttggcacaaagagagcacaaagtagaggcccttcaagttctcttcagctggtacaagaagagattattttgactggtctttacggtcttcagcaaaagagattataataatcattttt

SEQ ID NO: 522042 - DNA, 120 bp, Artificial Sequence
  ENSG00000165416_116 (sequence is synthesized)
tttgggagctaataatattttcaattgaaggtagtttttccacatgcacatctatgctcattagcaaaggatgtagtgcacctccctgactactttaggatttccttttcagattttatg

SEQ ID NO: 522043 - DNA, 120 bp, Artificial Sequence
  ENSG00000165416_117 (sequence is synthesized)
ttgttaacctctggaatgcctaagtttaaataaaaatattgttttgagtttatattgagctatatattttatctgtataatctattatatatgtattgcatagagtttatattgagctgt

SEQ ID NO: 522044 - DNA, 120 bp, Artificial Sequence
  ENSG00000165417_0 (sequence is synthesized)
gtctctcggcggcggcggcggcggcggtggtggctcgcgcagcttgttggctcgctatataaaggagagaagcgggcggaccggacggctggagctgcagccggtggcggcagcggcggc

SEQ ID NO: 522045 - DNA, 120 bp, Artificial Sequence
  ENSG00000165417_1 (sequence is synthesized)
gcagggagcggtgaccggtggtggtttccctccttggcgcggggtggggagcgggcaacgccccccggacccctgaagggtcgtggctttttttttttttttaaggcgattctcgaggtt

SEQ ID NO: 522046 - DNA, 120 bp, Artificial Sequence
  ENSG00000165417_2 (sequence is synthesized)
ttcagctgcgggaggagtgcccccctcctcctcctctctccgctctcccctactccttcaggattgattttgtttaaaattttttccccaatcttgcggtgatttgggtcaccctccggg

SEQ ID NO: 522047 - DNA, 120 bp, Artificial Sequence
  ENSG00000165417_3 (sequence is synthesized)
tttttttttggttttgtttttatcttgttttcttggggttgccccctcttgtttgtgttgtgtgtggaaatggcgaactcggcaaatacaaacaccgtgcctaaattatacagatctgtg

SEQ ID NO: 522048 - DNA, 120 bp, Artificial Sequence
  ENSG00000165417_4 (sequence is synthesized)
tacagatctgtgattgaagatgtcattaatgatgtgagagacatctttctggatgatggagtggatgaacaagtactgatggaactaaaaactttatgggaaaacaaactaatgcagtcc

SEQ ID NO: 522049 - DNA, 120 bp, Artificial Sequence
  ENSG00000165417_5 (sequence is synthesized)
agggcagtagatggatttcattcagaagagcagcagcttctactgcaagttcaacagcagcatcaaccccagcagcagcagcatcaccaccatcaccatcatcagcaagctcagcctcag

SEQ ID NO: 522050 - DNA, 120 bp, Artificial Sequence
  ENSG00000165417_6 (sequence is synthesized)
cagacagtacctcagcaagcgcagacccagcaggttcttattcctgcatcacagcaagccacagcaccacaagttattgttccagattctaagttgatacagcatatgaatgcatcaaac

SEQ ID NO: 522051 - DNA, 120 bp, Artificial Sequence
  ENSG00000165417_7 (sequence is synthesized)
atgagtgctgctgctacagctgctaccttagcactccctgcaggtgtgactcctgttcagcagatattaacaaattcaggccagcttcttcaggtggtcagagcagccaatggtgcccaa

SEQ ID NO: 522052 - DNA, 120 bp, Artificial Sequence
  ENSG00000165417_8 (sequence is synthesized)
tatatctttcagcctcagcagtcagtggttctacaacaacaggttataccacaaatgcagcctggtggagtacaagctcctgttatacagcaggtgctggctcctcttcctggagggatt

SEQ ID NO: 522053 - DNA, 120 bp, Artificial Sequence
  ENSG00000165417_9 (sequence is synthesized)
tcaccacagacaggtgtcatcatccagcctcagcaaatcttatttacaggaaataagactcaagttatacctacgacagtggcagcacctacaccagcccaagcacagataactgcaact

SEQ ID NO: 522054 - DNA, 120 bp, Artificial Sequence
  ENSG00000165417_10 (sequence is synthesized)
ggccagcagcaaccgcaggcccagcctgctcaaacacaagctccattggtcttacaagttgatggaactggggatacatcatctgaagaagatgaagatgaagaagaagactatgatgat

SEQ ID NO: 522055 - DNA, 120 bp, Artificial Sequence
  ENSG00000165417_11 (sequence is synthesized)
gatgaggaggaagacaaagagaaagatggagctgaagatgggcaggtggaagaagagcccctcaatagtgaagatgatgtgagtgatgaggaaggacaggaactctttgacacagaaaat

SEQ ID NO: 522056 - DNA, 120 bp, Artificial Sequence
  ENSG00000165417_12 (sequence is synthesized)
gttgttgtatgccaatatgataagatacacagaagtaaaaacaaatggaaatttcatctcaaggatggcattatgaatcttaatggaagagattatatattttccaaagccattggagat

SEQ ID NO: 522057 - DNA, 120 bp, Artificial Sequence
  ENSG00000165417_13 (sequence is synthesized)
gcagaatggtgaagagttgctttttttcttttataaataaaagaaacttaaaaaaaatgtaaagcggacagtttgaaacttggggcatatgccaaccaaaacttcgtttctgcatgtcag

SEQ ID NO: 522058 - DNA, 120 bp, Artificial Sequence
  ENSG00000165417_14 (sequence is synthesized)
aaaagtgcagtagaagcaaagctactggaacaaagatagaccttgacaacatagacactacttactggcaagccatggaactgtagcacctagggtttttgggtgggagggttggggttt

SEQ ID NO: 522059 - DNA, 120 bp, Artificial Sequence
  ENSG00000165417_15 (sequence is synthesized)
tgtgtaggaaaaccataattgttgattttaaatacaggtacctgccaccggtaattagcatgtaaagctttgtctatattccttcctccaacttgggttcaatcagaagatacttgttgg

SEQ ID NO: 522060 - DNA, 120 bp, Artificial Sequence
  ENSG00000165417_16 (sequence is synthesized)
aatgaactgaagaaacttcccttttgatagattgaactgaaactgcttattgtatgtggttatatttggtaaaagttgcgtgtgagctttttacaaaagggtaagaattgtgttgaattt

SEQ ID NO: 522061 - DNA, 120 bp, Artificial Sequence
  ENSG00000165417_17 (sequence is synthesized)
taattcacttgtataagaaaacaatttaaaactctcataataggtcttaaatatttttacttgctattctccctcagtgatatatacctcttcctttccagctttatgaaacatctattt

SEQ ID NO: 522062 - DNA, 120 bp, Artificial Sequence
  ENSG00000165417_18 (sequence is synthesized)
aagatttaaagttatcagtgatcatagtttggagataaaatttgacccaggaatgaatatttattttaattaggttttcatacttattaaatgtaattaaagacttgggtcttgtctgag

SEQ ID NO: 522063 - DNA, 120 bp, Artificial Sequence
  ENSG00000165417_19 (sequence is synthesized)
ttcagtggaattgaaaccacaactttaatttccttacagaaaaacttaatttgtttcttttagtgccacaccttaaaaagaaaccccaaactagctcctcaggaatatagttttattttg

SEQ ID NO: 522064 - DNA, 120 bp, Artificial Sequence
  ENSG00000165417_20 (sequence is synthesized)
caagcataccatctagctgaaattgtatacacatgaatatatgtagacttttcctgttgggctgaagtgtgtgcttataaatgtgtttagtttttaagctaaacattcagttaacagtct

SEQ ID NO: 522065 - DNA, 120 bp, Artificial Sequence
  ENSG00000165417_21 (sequence is synthesized)
gtgcattgattagcatagggcaggtggtgaggacctggatttttattaaacagtttagtaattataaaagtttcttgtgtttactagtaaagaattttaaaaatctattctaattcaaca

SEQ ID NO: 522066 - DNA, 120 bp, Artificial Sequence
  ENSG00000165417_22 (sequence is synthesized)
agtttttaaaatcaactttgtaatttgaggggaaaatttggggggaagaggtgggtgggccactaagttacctctctttcatttggtggcccttccaggccattgaaaataaagacgttg

SEQ ID NO: 522067 - DNA, 120 bp, Artificial Sequence
  ENSG00000165417_23 (sequence is synthesized)
gctccagtttgcacattgggaagaaagcatagaaatttgacttgtatattaaaaataatagaaatgtaatatgtatattaagaatgcataggtctgtattctgtaaggggctctgaagaa

SEQ ID NO: 522068 - DNA, 120 bp, Artificial Sequence
  ENSG00000165417_24 (sequence is synthesized)
caatatggcactgctgtgttcagtgtgaattcactgcctgggagaactgcaggaatgcttgtcttcaccattgtgttcttacaacgaattcaactttccatggtttatcttgacaaaatt

SEQ ID NO: 522069 - DNA, 120 bp, Artificial Sequence
  ENSG00000165417_25 (sequence is synthesized)
tacatgtgtttaggttacttgtatattgatatatttttttaatcttcagtttttgtcttccttttgcctttgtgttttcagaagtaacacatgaacactttttaaagtacattacagaga

SEQ ID NO: 522070 - DNA, 120 bp, Artificial Sequence
  ENSG00000165417_26 (sequence is synthesized)
ccttgatctctttaacttatgttctaaactttggtgttaatggtggtgtctagcatgctagtagttagattttatttagatgccataactggtaatacagcttttattttgactatatta

SEQ ID NO: 522071 - DNA, 120 bp, Artificial Sequence
  ENSG00000165417_27 (sequence is synthesized)
atttagttttttgaggggaagtttgtttattctgtgactctcaaagcacacagaggttttaaaatatatattattaagactgagagaagaggaaatgggagggagtaacatcacagaagt

SEQ ID NO: 522072 - DNA, 120 bp, Artificial Sequence
  ENSG00000165417_28 (sequence is synthesized)
gctgttgttcaactgttcttcaatatagttgctagtaggtttgtatttactcagtaaggaagtcagtgacctgaactacctataaaaattcagcagtgctgcagtgttgcttaagtgaaa

SEQ ID NO: 522073 - DNA, 120 bp, Artificial Sequence
  ENSG00000165417_29 (sequence is synthesized)
ccctttggctatctagtagtttttatgctactgaaacttggattactgtatgatattcagcttgtcttgggccctctatgtagacaaacattcatattcatagtagtgttgtatactggc

SEQ ID NO: 522074 - DNA, 120 bp, Artificial Sequence
  ENSG00000165417_30 (sequence is synthesized)
ctgtttttataactttatttttcaaatattaacaaccactgctttcagagtggttattttgttatttttgaagcaggaaataaccatttgtatttgcacctgcgtattgcatatgaatta

SEQ ID NO: 522075 - DNA, 120 bp, Artificial Sequence
  ENSG00000165417_31 (sequence is synthesized)
tggtatacttggcaaatgcttttcttttacctgtgaaaattctgaaagctggtccaagctacattgcataccaaattgtgctcttatatattatttgcatcgtgtcctttttaatcaaat

SEQ ID NO: 522076 - DNA, 120 bp, Artificial Sequence
  ENSG00000165417_32 (sequence is synthesized)
agcatgttttagttttattatagtagcttttgctgtaagaatgtcacttgcttatcttttattgtacttgaattcttaatcatgcttttaacattgtatttaacaaatcatttcgtatta

SEQ ID NO: 522077 - DNA, 120 bp, Artificial Sequence
  ENSG00000165417_33 (sequence is synthesized)
ggttccattaaaatgtcattcctttgaaaaggcaagggatttccactttcagaatttgaaaatgaaagtagcatgtttatctaaaggcagaaaatagttcggacttggtattatgaaaat

SEQ ID NO: 522078 - DNA, 120 bp, Artificial Sequence
  ENSG00000165417_34 (sequence is synthesized)
aagtaatggtttctggagaggatttgtttagatttgcacagatggcgatggcaccttttacttaaattaacattaatcaacagtgctaaggaaaatttacacaaaattacaagataaaac

SEQ ID NO: 522079 - DNA, 120 bp, Artificial Sequence
  ENSG00000165417_35 (sequence is synthesized)
atggaaatgtgtgcctttcagtatacaaactcttgcttggtggccatttgggtaatcagaccatttgaatgcctgagagcatgtttaatttctgtggagtgccacatatggctaaaacaa

SEQ ID NO: 522080 - DNA, 120 bp, Artificial Sequence
  ENSG00000165417_36 (sequence is synthesized)
ctctttaatgtgcaattaatttctagagtaaaatgtctgttatgtgagggggatctttatgttgggcttttctattttttaaatgttcacatttctttctgttaattaaaatgccatcat

SEQ ID NO: 522081 - DNA, 120 bp, Artificial Sequence
  ENSG00000165417_37 (sequence is synthesized)
aatgtcacatttacactgttgcctcttttaaaagcaaagccactttcttgttctaagattacatcaagacttgagcagtgtgtagtaattaaaatgtgtgcttaatgagcataatagatt

SEQ ID NO: 522082 - DNA, 120 bp, Artificial Sequence
  ENSG00000165417_38 (sequence is synthesized)
ctggttttaggaaataacatatagcttttatatgaatattttcttttgctataatgaaagtcacagattttttttttcctggcttttatggaggaatgaaaagagttgtctccctctaag

SEQ ID NO: 522083 - DNA, 120 bp, Artificial Sequence
  ENSG00000165417_39 (sequence is synthesized)
agtatactatttttgattctcatagcaataatgtcaccattcttatcagagggtaaataccccttgtataggaaaacagacataatttcctcttgggagttctctttatgacttagcatt

SEQ ID NO: 522084 - DNA, 120 bp, Artificial Sequence
  ENSG00000165417_40 (sequence is synthesized)
ttcttctacttgagaaaattcctgtttttccgattatttcatcttgaactttcttttttttaagcttttgtgcaatgtaatagtttgttgatccatctttgtacattttcattttatttc

SEQ ID NO: 522085 - DNA, 120 bp, Artificial Sequence
  ENSG00000165417_41 (sequence is synthesized)
atgtctttctctcacctacctgtcagaatcagctatagcagattttgaattctttagttaaaaaatagttgctttacttgtttcctcatgagtttgttaaatagctttgcattttagtcc

SEQ ID NO: 522086 - DNA, 120 bp, Artificial Sequence
  ENSG00000165417_42 (sequence is synthesized)
tctattatgctatgaaaattattacgaagtttatattgttccctttttaagcctgccttactcttgtcttttgtcattgtctatggtttaatgaagaacacaccaaactaacatttttgt

SEQ ID NO: 522087 - DNA, 120 bp, Artificial Sequence
  ENSG00000165417_43 (sequence is synthesized)
ttattttgaggaacaaaaaaacttttctcttttaagggaagttactacacattgagttagtaactactctttcagtcaaggttccttaatcagtccagtctacatcaggactatgacttg

SEQ ID NO: 522088 - DNA, 120 bp, Artificial Sequence
  ENSG00000165417_44 (sequence is synthesized)
gggggcggggctaatcctttttgctgttctgagctactattgtcaactgctgttgtacatactgttatgtgtaatggcgtaaatatatttattatgtttgtaaaattcattgcagatcaa

SEQ ID NO: 522089 - DNA, 120 bp, Artificial Sequence
  ENSG00000165417_45 (sequence is synthesized)
ggttgctcttctgtgatatatgggatattatgttttaaagaccatcttggaatacaattagagaacttagtattttgatgtactaagacctattttaagtttaatattctactttgcaaa

SEQ ID NO: 522090 - DNA, 120 bp, Artificial Sequence
  ENSG00000165417_46 (sequence is synthesized)
aactttaattaaagatgttatttaaaaaaaaatgttgcttgctttgcttactagtatatggcattgttatagataattgaataaaatacaatttagaaaggaaaatgctttacattgtta

SEQ ID NO: 522091 - DNA, 120 bp, Artificial Sequence
  ENSG00000165417_47 (sequence is synthesized)
atgagaattccatttaacaacaacaaaaagatgctaaattctgtaccttaaagataagtagattgagatgtcaatttgaattagtaaactgtgttacaaatgattaatactagcttttaa

SEQ ID NO: 522092 - DNA, 120 bp, Artificial Sequence
  ENSG00000165417_48 (sequence is synthesized)
aaagttgtattttccaggcacacaggaatttaggttgggcgaattcacactaacaaattataactaaaaattggtataattaacattgtttttcaaaataaagattactccttgtgaaat

SEQ ID NO: 522093 - DNA, 120 bp, Artificial Sequence
  ENSG00000165417_49 (sequence is synthesized)
attaataattaacatattgtattaaataagtatttctactccaaagtatagattacttaggataaaaacattgttatttctctgtttagtcaaaccacttcctcttagttcagaggttat

SEQ ID NO: 522094 - DNA, 120 bp, Artificial Sequence
  ENSG00000165417_50 (sequence is synthesized)
aaataattgcatattaggagaattggattactgaggtttgtattgcgtattgaatatattttgtgttattttagaagataataattagcaggtattttaattttatagttaattcagctg

SEQ ID NO: 522095 - DNA, 120 bp, Artificial Sequence
  ENSG00000165417_51 (sequence is synthesized)
aatcattaagaagctcgcctttttgtatttttttatcctgttaacagactatctagaaaacatgcaaattttaactattaacataatcataataaagatatcttatttattgccagcaaa

SEQ ID NO: 522096 - DNA, 120 bp, Artificial Sequence
  ENSG00000165417_52 (sequence is synthesized)
ggccattcctagcgaggcagtaggcaccgcctctgtcacatttcctagctcctaaagcgcgggaccaggcggaaacgtgcgacaggaggcggtcccacctagctttggactggagtgtca

SEQ ID NO: 522097 - DNA, 120 bp, Artificial Sequence
  ENSG00000165417_53 (sequence is synthesized)
gtagaactcccgtcttttccagcaacgctttgcaagttcttcaccgcaaagaactgccgcagacttccgcctgggtgccaaccacgtgatcacgcgagcgttggagaggcgtagcctaaa

SEQ ID NO: 522098 - DNA, 120 bp, Artificial Sequence
  ENSG00000165417_54 (sequence is synthesized)
aggttttgtcttctttgaaagacagaaaatactaatatttcttttaccatttggtttaggttattaaaataactttatttgagggctgtaacacatataactgtaatcgttgttgaggat

SEQ ID NO: 522099 - DNA, 80 bp, Artificial Sequence
  ENSG00000165424_0 (sequence is synthesized)
cagggcgcggggcgatcaccgtcggggctcgggaggcgggcagtgggcacaggctccccggtgcccgcccctccgctgcg

SEQ ID NO: 522100 - DNA, 120 bp, Artificial Sequence
  ENSG00000165424_1 (sequence is synthesized)
ccgctgcggaggggggccgcgagcgggcggccggggaggggccggcaccgccgccacaaaatgagcctgctgtcggccatcgacacgagcgccgcctcggtgtaccagcccgcccagctg

SEQ ID NO: 522101 - DNA, 120 bp, Artificial Sequence
  ENSG00000165424_2 (sequence is synthesized)
gctgctcaactgggtctacctgtcgctgcaggacacgcaccaggctagcgccttcgatgccttccggcccgagccgaccgccggcgccgcacccccggagctggccttcggcaagggccg

SEQ ID NO: 522102 - DNA, 120 bp, Artificial Sequence
  ENSG00000165424_3 (sequence is synthesized)
ccccgagcagctgggctcgcccctgcactccagctatctcaacagcttcttccagctgcagcgcggagaggcgctgagcaacagtgtgtacaagggcgcctcaccctatggctccctcaa

SEQ ID NO: 522103 - DNA, 120 bp, Artificial Sequence
  ENSG00000165424_4 (sequence is synthesized)
caacatcgccgatggcctcagctccctcaccgagcacttctcagacctgaccctcacctccgaggctcgcaagcccagcaagcggcccccacccaactacctgtgccacctgtgcttcaa

SEQ ID NO: 522104 - DNA, 120 bp, Artificial Sequence
  ENSG00000165424_5 (sequence is synthesized)
caaaggacactacatcaaggactgcccccaggcacgccccaaaggcgagggcctgactccataccagggcaaaaagcgctgcttcggcgagtacaagtgtcccaagtgcaagagaaaatg

SEQ ID NO: 522105 - DNA, 120 bp, Artificial Sequence
  ENSG00000165424_6 (sequence is synthesized)
gatgagcgggaactcctgggccaacatggggcaggagtgcatcaagtgccacatcaacgtgtatccacacaagcagagacccctggagaagcccgacggcctggacgtgtccgaccagag

SEQ ID NO: 522106 - DNA, 120 bp, Artificial Sequence
  ENSG00000165424_7 (sequence is synthesized)
caaggagcacccgcagcacctctgcgagaagtgcaaggtcctgggctactactgccgtcgcgtgcagtgacgggctgcccgcccgcacccagagccaccccccgccagcccgaggagacg

SEQ ID NO: 522107 - DNA, 120 bp, Artificial Sequence
  ENSG00000165424_8 (sequence is synthesized)
ctgcttccctgtgctactccgaggggctgcgtgtcgccctgtgcatggggtgccctcgcaggcctgcggggctgggccgggggctcttagcgtccttgtcttgtgtgtgttgacaaacag

SEQ ID NO: 522108 - DNA, 120 bp, Artificial Sequence
  ENSG00000165424_9 (sequence is synthesized)
tgttactgacattgctgccccccacaggccagggaaagcagggagtctggggctttttgcaggcgggcctggggtctcagtggaggggacaaaggcaagcaaaagcccatgtccaggagc

SEQ ID NO: 522109 - DNA, 120 bp, Artificial Sequence
  ENSG00000165424_10 (sequence is synthesized)
cctgggtgtccccacaggctcgcctctgagagcctctttggggtgagcagccttgtattggccacaggtgcactaaattgactgtgaatcccaaacctccccagaccagccaggccgcct

SEQ ID NO: 522110 - DNA, 120 bp, Artificial Sequence
  ENSG00000165424_11 (sequence is synthesized)
gcccccacccagaaccttccggtttgccctgtatggaaagccactctcagaaatccctctttcctgagtcagcaatcgtggcaaggggacatgtgttccaacagcggctggggagtggac

SEQ ID NO: 522111 - DNA, 120 bp, Artificial Sequence
  ENSG00000165424_12 (sequence is synthesized)
ctctctgtcccttgcccaccttaagccccaaatccagaccccctctgacatcactggcattgcacctgggtgtgcccccctccccacgctatggacccagataggaggggttaggcatgg

SEQ ID NO: 522112 - DNA, 120 bp, Artificial Sequence
  ENSG00000165424_13 (sequence is synthesized)
gggaggcacagaatgctggagagatgcgtcctggtgaacgtggggcagcccctcccacgacccccaccagactgccttaggttttgtcagccccactccctttccttcccctctgcctcc

SEQ ID NO: 522113 - DNA, 120 bp, Artificial Sequence
  ENSG00000165424_14 (sequence is synthesized)
cacccactctgggggtccacatcaagatagctgggcccagtgtggaagcccagcgtgtctgttccagcagaaaggacacaagcctggtgttctggagacctcggctcaagtctttgccct

SEQ ID NO: 522114 - DNA, 120 bp, Artificial Sequence
  ENSG00000165424_15 (sequence is synthesized)
gctgccgacgcattgtgtcaccttgggcaaggacttcgcatctccaggcctcagtttccccattagttaaatgacagcataacactagagagcagagggcccatttcagctctgttgttc

SEQ ID NO: 522115 - DNA, 120 bp, Artificial Sequence
  ENSG00000165424_16 (sequence is synthesized)
tgggattcaggctggccggtgctgtgtcctggagctttatttggggagtttcacccagaatggtgggagaaacctcccaggtgccaggtaccccgcatcgtgacccttcacttggtgtct

SEQ ID NO: 522116 - DNA, 120 bp, Artificial Sequence
  ENSG00000165424_17 (sequence is synthesized)
taggaagtcaagctgagggatgctgagtcctcccctgctggcccctgcagccccagccctgcttttcatcccccacccctgcaaacatggaggagccccctccttctcacctcggtctcc

SEQ ID NO: 522117 - DNA, 120 bp, Artificial Sequence
  ENSG00000165424_18 (sequence is synthesized)
tagcccctgacatggagaaccctgagacaagccacagaacccctcttttctaaaatggagacaataatttcctacctcccaagggagcagagaggcctcgtggcacgtccgtggccaggg

SEQ ID NO: 522118 - DNA, 120 bp, Artificial Sequence
  ENSG00000165424_19 (sequence is synthesized)
agcccactgtcctggctggcggcgggatcgtgcgctcctctgtctcccggatgagaagccccgtttccatggtcttgacccttcctttctcccggctgtcagaactgggtctcttgattt

SEQ ID NO: 522119 - DNA, 120 bp, Artificial Sequence
  ENSG00000165424_20 (sequence is synthesized)
ttatgcctctgtgggaaaaaaaaaaaatcagaccaagaaatgagcctgaaattcagtgtttaccatggctcaaggatgcccatctggtgtccagttgccttttgtattcaaatgaaaatg

SEQ ID NO: 522120 - DNA, 120 bp, Artificial Sequence
  ENSG00000165424_21 (sequence is synthesized)
ctttgtacaactgaggagttacagtgaagtgttaaccaggggtccagggagcgagttgaaaagatggagtgagtgtatttgcagccagggagctgcagggtggatttgaggggccatacc

SEQ ID NO: 522121 - DNA, 120 bp, Artificial Sequence
  ENSG00000165424_22 (sequence is synthesized)
ctctgagcacttaaaaaaggtatttgctccaggccaggcagcaggctgtggacacccttgccaccactggggactgccactgaggactccccgagcacgttgttccccgtcttctccaag

SEQ ID NO: 522122 - DNA, 120 bp, Artificial Sequence
  ENSG00000165424_23 (sequence is synthesized)
gtgttgaggtgagctggggttggccccggcccaggcttctgtcccaaggagaagctgccactgacagtcatcctaccgcactgctaaagagaatgttcgcagtggtgggcggcgtgcctg

SEQ ID NO: 522123 - DNA, 120 bp, Artificial Sequence
  ENSG00000165424_24 (sequence is synthesized)
tgccaacccttccagggacccggccatgggggaccttggcccaaggatgcctggggcctgccagctgtgctgcaaaggtggggggcccacaccctaaaactaacccaggccccagaccac

SEQ ID NO: 522124 - DNA, 120 bp, Artificial Sequence
  ENSG00000165424_25 (sequence is synthesized)
tggaggccagggcttccctgcacgggctaaggggagttgggatatcaccccaaagtgaccttgccagtgagctgttcagcaggtagccactgccctgccatctgtgcagagccagccacc

SEQ ID NO: 522125 - DNA, 120 bp, Artificial Sequence
  ENSG00000165424_26 (sequence is synthesized)
ttgggggctggggttcccgctttgaggcccaccttccatactccccttgactcggctctggctgaactggggaactctcttgtggtcagcaaagcccctgccatgcaggccaggtgccat

SEQ ID NO: 522126 - DNA, 120 bp, Artificial Sequence
  ENSG00000165424_27 (sequence is synthesized)
tgagaattaagtgctcagagggccaggagcccaggggatgggaaagtgtgtggttttagtacgttcaaaagggacaatcgcttgcagttggtagatctagcgatctagttgggagataat

SEQ ID NO: 522127 - DNA, 120 bp, Artificial Sequence
  ENSG00000165424_28 (sequence is synthesized)
ggtgtttaccccatatgaagtattcaatagttctacttgtgaatttgtatttattttgagttatacttgacacagaattccttttttaaaaaaatatgtgtgtattttggaaaaaaaatt

SEQ ID NO: 522128 - DNA, 120 bp, Artificial Sequence
  ENSG00000165424_29 (sequence is synthesized)
catagatgttaaaatttctgcatggttaccagtttttctcacaacactgaatttggtagcttttcccgaaaaaatcttcacagtaattttttgtctgtatatatttgagggccttttttt

SEQ ID NO: 522129 - DNA, 120 bp, Artificial Sequence
  ENSG00000165424_30 (sequence is synthesized)
aaaaaaaaagaaaagaaaaatataattgtttgatttttgagattaaaacaaacaaaaagagaggcattttcaaaatttcagaactttcaggagggcaagagaatatcaaacaaagatttc

SEQ ID NO: 522130 - DNA, 120 bp, Artificial Sequence
  ENSG00000165424_31 (sequence is synthesized)
tttctggaagtattttgccaaccttctggttgagctgcaagaaaatatttatggtgagaacttttctgtttcccgttattgggtttttggttggtttttgtttgttttttactatgcttt

SEQ ID NO: 522131 - DNA, 120 bp, Artificial Sequence
  ENSG00000165424_32 (sequence is synthesized)
ggtctgtaaaaatatgcaactgaactacattcagaaggaaatattgtctacatagaatattatatgaagttggtacataattctgatgaggaaaaaaaatctttgcaattctttaagcca

SEQ ID NO: 522132 - DNA, 120 bp, Artificial Sequence
  ENSG00000165424_33 (sequence is synthesized)
tattgttgtttttctgtgttgttttccctggatgaaaatatcagtattaagtagacagcatattattcaagtgtttagacttattaatatgttcttgtcctgtatttatacatatgtgta

SEQ ID NO: 522133 - DNA, 120 bp, Artificial Sequence
  ENSG00000165424_34 (sequence is synthesized)
ttttggaaagtattgccttttttaagggaagctataattcgatacatagtgaaaaagggaatggtgacccctttgtgcctcttccactgaggataacaaacagcattgtaatccattctc

SEQ ID NO: 522134 - DNA, 120 bp, Artificial Sequence
  ENSG00000165424_35 (sequence is synthesized)
ttgcaccttcttcttcttatcttgttattacggttttattaattttgtagagggacagggagtgggcaaggggaagaagcagcttatttgactaaccagcccctctgtggtccaccagcg

SEQ ID NO: 522135 - DNA, 120 bp, Artificial Sequence
  ENSG00000165424_36 (sequence is synthesized)
tcttggcttggtgggagggctctcaatcagcagggccccaggagggaagaagaagtggggcaaagcctggcctcgccgctcgggagctttgccatctgagccacgcctcctccaggccat

SEQ ID NO: 522136 - DNA, 120 bp, Artificial Sequence
  ENSG00000165424_37 (sequence is synthesized)
gctccttgaacttggaaatgtcaaccggagcccttacaccagccctccagcatctaatagacttgaatctactctaaacgaatatttaatccaacctcactacattgtagctcagtccaa

SEQ ID NO: 522137 - DNA, 120 bp, Artificial Sequence
  ENSG00000165424_38 (sequence is synthesized)
cgactaaccctgaaatgggggtgttccagccttcagcgagatggccaagcggtcccctgggggctgtggcagcgggcttatccttctctgttgccaaccttgccgtccgacctcctccgc

SEQ ID NO: 522138 - DNA, 120 bp, Artificial Sequence
  ENSG00000165424_39 (sequence is synthesized)
ccccatgcggtgaccccgtccgtgtctgtgtctgtccatacgtgtgagtccagctaaaaagacaaaacagaacccgtgggcccagctcggaaggtgcgtggagaaggctccgacgtctcc

SEQ ID NO: 522139 - DNA, 120 bp, Artificial Sequence
  ENSG00000165424_40 (sequence is synthesized)
gaagtgcagcccttgggatggcattccgttgtgtgccttattcctggagaatctgtatacggctcgcctatagaaatatagcctcttcatgctgtattaaaaggacttttaaaagcaaaa

SEQ ID NO: 522140 - DNA, 120 bp, Artificial Sequence
  ENSG00000165424_41 (sequence is synthesized)
acccatctgtggccttcacttcctccccttgtgggggttttctctgcaaagatgcaagaggtgtgttcgggggaggacacacatgggggtcactttccttccagacctgggcacaccggc

SEQ ID NO: 522141 - DNA, 120 bp, Artificial Sequence
  ENSG00000165434_0 (sequence is synthesized)
atctgggactgttgttctctcgcggcgcgaccgcctcagtcacttcgcccagagacccggacctggtccgctggggagcaggcggccataaaccccctctctcccggttccctgacgccg

SEQ ID NO: 522142 - DNA, 120 bp, Artificial Sequence
  ENSG00000165434_1 (sequence is synthesized)
cggcaggagctgttacgaacaccctgcggttggtctccgatgcccttcagtgaggtggggacgcctggaccctggtgagcgaaccccaagccaccccccaccccaactcagtgtcttcgc

SEQ ID NO: 522143 - DNA, 120 bp, Artificial Sequence
  ENSG00000165434_2 (sequence is synthesized)
cggcccccggcccgtacgcctgtctggtcgccatggctgaaaacacagagggggatctgaactccaacctgctccacgccccctaccacaccggggaccctcagctggacacggccatcg

SEQ ID NO: 522144 - DNA, 120 bp, Artificial Sequence
  ENSG00000165434_3 (sequence is synthesized)
ggcagtggctccgctgggataagaatcccaaaacaaaagagcagattgaaaacctgttacggaatgggatgaacaaggagctgcgagatcgtctttgttgccgaatgacttttgggactg

SEQ ID NO: 522145 - DNA, 120 bp, Artificial Sequence
  ENSG00000165434_4 (sequence is synthesized)
caggacttcgttctgccatgggggcagggttttgctatattaatgaccttacagtaatacagtcaacacaggggatgtacaaataccttgagagatgtttctcagacttcaagcagagag

SEQ ID NO: 522146 - DNA, 120 bp, Artificial Sequence
  ENSG00000165434_5 (sequence is synthesized)
gctttgtggttgggtatgacactcggggtcaagtaactagcagctgcagcagccagaggcttgctaaactcactgctgcagtcttgctggccaaagatgttcctgtgtaccttttttcaa

SEQ ID NO: 522147 - DNA, 120 bp, Artificial Sequence
  ENSG00000165434_6 (sequence is synthesized)
gatatgttcctacaccttttgtaccatatgcagttcagaagctcaaagcagttgcaggtgtgatgattactgcctctcacaaccgcaaggaagacaatggatacaaggtttactgggaaa

SEQ ID NO: 522148 - DNA, 120 bp, Artificial Sequence
  ENSG00000165434_7 (sequence is synthesized)
ctggtgctcagatcacatctcctcatgataaagaaattctaaaatgtatagaagaatgtgtggaaccctggaatggttcctggaatgataatttagtggataccagcccgctgaagagag

SEQ ID NO: 522149 - DNA, 120 bp, Artificial Sequence
  ENSG00000165434_8 (sequence is synthesized)
accctctgcaggacatttgcaggagatacatggaagatctgaaaaagatctgtttttacagggagttaaactcgaagaccaccttgaaatttgtgcacacatcttttcatggggtcggac

SEQ ID NO: 522150 - DNA, 120 bp, Artificial Sequence
  ENSG00000165434_9 (sequence is synthesized)
atgactatgtgcagttggcttttaaagtgtttggttttaagcctccaattccagtaccagaacaaaaagatcctgatccagacttttctaccgttaaatgtccaaatcctgaagaaggag

SEQ ID NO: 522151 - DNA, 120 bp, Artificial Sequence
  ENSG00000165434_10 (sequence is synthesized)
aatctgtgctggaactttccttgagactggcagagaaagaaaatgcccgggtagtgctagccacagatcctgatgcagacagactggcagcagcagaacttcaggagaatggttgttgga

SEQ ID NO: 522152 - DNA, 120 bp, Artificial Sequence
  ENSG00000165434_11 (sequence is synthesized)
aagttttcacagggaatgagttggcagctttgtttggatggtggatgtttgattgctggaagaaaaataaatcaagaaatgctgatgtgaagaacgtttatatgttagccaccacagtct

SEQ ID NO: 522153 - DNA, 120 bp, Artificial Sequence
  ENSG00000165434_12 (sequence is synthesized)
cttctaaaattctgaaggcaattgcacttaaagaaggatttcattttgaagaaacattaccaggttttaaatggattggaagtaggataatagacctcctggaaaatgggaaagaagtcc

SEQ ID NO: 522154 - DNA, 120 bp, Artificial Sequence
  ENSG00000165434_13 (sequence is synthesized)
tttttgcatttgaagagtctattggttttctctgtggaacttcagttttggataaagatggggtgagtgcagctgttgtggttgctgagatggcatcttacctggaaaccatgaatataa

SEQ ID NO: 522155 - DNA, 120 bp, Artificial Sequence
  ENSG00000165434_14 (sequence is synthesized)
cattgaaacagcaactggttaaggtttatgaaaaatatggttatcatatttcaaaaacttcctatttcttgtgttatgaaccacctaccatcaaaagtatatttgaaaggcttcgtaatt

SEQ ID NO: 522156 - DNA, 120 bp, Artificial Sequence
  ENSG00000165434_15 (sequence is synthesized)
ttgattctccaaaagaatatccaaaattttgtggaacatttgctatattgcatgtacgggacgttaccactggatatgacagtagccagcctaataagaaatcagtgctgcctgtgagta

SEQ ID NO: 522157 - DNA, 120 bp, Artificial Sequence
  ENSG00000165434_16 (sequence is synthesized)
aaaacagccaaatgattacatttacttttcaaaatggctgtgttgctacccttcggacaagtggaacagaaccaaagataaagtattatgcagagatgtgtgcgtcacctgaccagagtg

SEQ ID NO: 522158 - DNA, 120 bp, Artificial Sequence
  ENSG00000165434_17 (sequence is synthesized)
acactgctttactggaggaagaactgaagaaactcattgatgctctgatagagaattttcttcagcctagtaagaatggactgatctggcgttctgtttaggggtacaccaatatgtcat

SEQ ID NO: 522159 - DNA, 120 bp, Artificial Sequence
  ENSG00000165434_18 (sequence is synthesized)
gacactgtgtgggcatatggaacagagcaaccgagaactgcatacattgaaccttgtgttagcattctctctctatctcatctggccgagtatctttttccttttattttctttcttttt

SEQ ID NO: 522160 - DNA, 120 bp, Artificial Sequence
  ENSG00000165434_19 (sequence is synthesized)
ggtcaactggctagactaaacaaagtataagtttgaaatgaaatggtctagagggaaatgattcaaattttttcataattcaaacaaaagttattacactaaaagtattatagtaacgta

SEQ ID NO: 522161 - DNA, 120 bp, Artificial Sequence
  ENSG00000165434_20 (sequence is synthesized)
ttgtccttccgttaacagaaacatcacaattcaaaagtgagttttcttattatagtgtgattaagcctagttctgtatctcgtaattgtgtatagcatggtaaaagaaaaaaaaaaagac

SEQ ID NO: 522162 - DNA, 120 bp, Artificial Sequence
  ENSG00000165434_21 (sequence is synthesized)
aggtaaatgttatataattgtagggttagttaaggaaattagtccataaaattggcaagaaaatggtactttccttgattgttatgaaaaagtgtcattgtgacatcacaggtattaatt

SEQ ID NO: 522163 - DNA, 120 bp, Artificial Sequence
  ENSG00000165434_22 (sequence is synthesized)
tacaaattagagtatttgaaataggatatttagcatttctgtagtttagaacagatgttacagtgtgtggttttggcatgtctgtttcaggtgcccttggtgcagtataaatttactgta

SEQ ID NO: 522164 - DNA, 120 bp, Artificial Sequence
  ENSG00000165434_23 (sequence is synthesized)
tgtatttaaaattctgatgtttactgaacataaaacaatagtggcaacactcctattggctttgttcttatcaaatttctcagtgccttctcagggtctggtgtgaacagaaaaaacagt

SEQ ID NO: 522165 - DNA, 120 bp, Artificial Sequence
  ENSG00000165434_24 (sequence is synthesized)
gttcctgcatttaccataatttaatcagtcaatttgcagatagctaaggaaaatcttccaaaatctgtaggtgcttcctctatatcaagtgagtttgctgattttaaaatcttaggaata

SEQ ID NO: 522166 - DNA, 120 bp, Artificial Sequence
  ENSG00000165434_25 (sequence is synthesized)
taaataaagatcttaataaaagcaagcttaatgtagttaaggatcttcatattagaattgtgtcatttatcaaaccttttattacagaaaaaaatctgaactgagaaaggagctctgaat

SEQ ID NO: 522167 - DNA, 120 bp, Artificial Sequence
  ENSG00000165434_26 (sequence is synthesized)
gaaaggagctctgaatttatttgacagtctaacttttgaattacatttttgtaagtagatttattcttttattttatgaagtaatgttaattttactaagaataaaacatccaaatttta

SEQ ID NO: 522168 - DNA, 120 bp, Artificial Sequence
  ENSG00000165434_27 (sequence is synthesized)
aaaactacatgttttaaaacagaggtccagtttattctaacatcttgctgacttctgtagaatttctgattgcatgactattatttatcttcttttagtgtagaaaataattttttacaa

SEQ ID NO: 522169 - DNA, 120 bp, Artificial Sequence
  ENSG00000165434_28 (sequence is synthesized)
gagactccatctcaaaaaaaaaaaaagtcacttttggctaatcatgcagtcttctgaaaaggtttaatagagaaatgctgtttaggctgggcttggtggctcacatctgtaataccagcg

SEQ ID NO: 522170 - DNA, 73 bp, Artificial Sequence
  ENSG00000165434_29 (sequence is synthesized)
atcatgcagtcttctgaaaaggtttaatagagaaatgctgtttaggctgggcttggtggctcacatctgtaat

SEQ ID NO: 522171 - DNA, 120 bp, Artificial Sequence
  ENSG00000165434_30 (sequence is synthesized)
aaaaaaaaaaaaagagagagagagagaaaaagaaatgctgtgtttaatcttcttaaaatgtatcttgtcctacatagttctcagaatacatatggggtatagttaggagataacaataac

SEQ ID NO: 522172 - DNA, 120 bp, Artificial Sequence
  ENSG00000165434_31 (sequence is synthesized)
catatggggtatagttaggagataacaataacaagacctaaacaaattgcttatgggagatagcactgtaattagagaatttatttcatataaaataataatataaagtttgaactgatt

SEQ ID NO: 522173 - DNA, 120 bp, Artificial Sequence
  ENSG00000165434_32 (sequence is synthesized)
agaatgttccttaaatcatggtttcgtttgttgcagctgtcagctaacatttggttgagctcatataatccaaacctaattgtccaactattgtattgccactattgttaatttgttcct

SEQ ID NO: 522174 - DNA, 120 bp, Artificial Sequence
  ENSG00000165434_33 (sequence is synthesized)
atttttctcaatgagtttgttttcaaaggctttgcactggagaagatatgtgtagaatttttgttttatttttaaaatgtgtaaaacatcttttgttttatatgcttttaagaatgtaga

SEQ ID NO: 522175 - DNA, 120 bp, Artificial Sequence
  ENSG00000165434_34 (sequence is synthesized)
ttgtaatttaggaaatggcatatattctgcaaagtggtataatgttgtatatatgaaaaacaggtatatttggtttagttctgtgtttcagtgactgataaacaaaaatgaagctaaaat

SEQ ID NO: 522176 - DNA, 120 bp, Artificial Sequence
  ENSG00000165434_35 (sequence is synthesized)
gaatcaacggctcattcatagttactaaagccatgtcatgactgtcattctattatgaagaaaacagttttatttgagtgctttaatataatgcaacatttaagtcatcttaaggtgaaa

SEQ ID NO: 522177 - DNA, 120 bp, Artificial Sequence
  ENSG00000165434_36 (sequence is synthesized)
agttattgaagtgttcttctctcaagttaacaaaattttacaaatgttcctgaagtgtatcgattgagggaattattttattctagcctgtcatgagtctgtctgagcatgatacttaac

SEQ ID NO: 522178 - DNA, 120 bp, Artificial Sequence
  ENSG00000165434_37 (sequence is synthesized)
atgaacttgatgtagtaggtgcacatttgcctaacaggataaattcagtgatagcccaagctggtcaggagagacagaagtgctggctaggaggtctcagcctcgggcactacaatgttt

SEQ ID NO: 522179 - DNA, 120 bp, Artificial Sequence
  ENSG00000165434_38 (sequence is synthesized)
atctttttctttttgaacaatattgtgaaaatgattgcattctcattgagcatgaaagtcaaaactggaattttctaaagctttggagaaaaggagagaattagtagggcaagatcaaag

SEQ ID NO: 522180 - DNA, 120 bp, Artificial Sequence
  ENSG00000165434_39 (sequence is synthesized)
catacattggaaataaacagtagaaataagcaaacaatataaagagacacgggaaatgcttctcgtgaagggcaaatgtaacaccataacagtagggaataaactgtgtcccacctgttt

SEQ ID NO: 522181 - DNA, 120 bp, Artificial Sequence
  ENSG00000165434_40 (sequence is synthesized)
acttgtgtttatttgttgttatgatgagtatgcacctaccattttcctttattgtgatcactaaaatgaggccaaggtttaggaggtgagaaaaagtatcccttttacggattcagttcc

SEQ ID NO: 522182 - DNA, 120 bp, Artificial Sequence
  ENSG00000165434_41 (sequence is synthesized)
tgctaggatgttgtatcagaatcatgtgagaactcaggaagaggtagagcagaaataaaaaggaagaaaatgtagattagaaaataagacttctgagaaaaagttcaaggaataaagatt

SEQ ID NO: 522183 - DNA, 120 bp, Artificial Sequence
  ENSG00000165434_42 (sequence is synthesized)
gtttgactctggagaggagaaagctgttgagatagtttgctaagtttgctaataaagctttattgagtcttttattgaagggttcaaagtaagaaatactatgccatagtgttctccatc

SEQ ID NO: 522184 - DNA, 120 bp, Artificial Sequence
  ENSG00000165434_43 (sequence is synthesized)
tctagtgaagacagaaccagagggaataaggatcttttttttaaagacagcatggaaagtttaagatttaggaacttcttgagaaatcttcataatatcttctattcaaaatcttttttt

SEQ ID NO: 522185 - DNA, 120 bp, Artificial Sequence
  ENSG00000165434_44 (sequence is synthesized)
tatttttaagggaataaaaattttaaaaattaagagatatacagatgactttttaagggtccttctttccagcacattttttttaaaaactcaggttagaacaaaaatgtcataaagggc

SEQ ID NO: 522186 - DNA, 120 bp, Artificial Sequence
  ENSG00000165434_45 (sequence is synthesized)
actaaaagtaacatttgggtttcactccatatctagaagaatttagctcacaaaacaatttttgtgtgttttgagtaactgatgcataagtgcaatgaataattttcctgcttcactgtt

SEQ ID NO: 522187 - DNA, 120 bp, Artificial Sequence
  ENSG00000165434_46 (sequence is synthesized)
atttttaatttaacctggcaaattaagtgagacttgaacaaaattttgttcatcttgaagaatgtatagtggcttaggttatttgaggttttcgttttgaatatatatgttgttattttg

SEQ ID NO: 522188 - DNA, 120 bp, Artificial Sequence
  ENSG00000165434_47 (sequence is synthesized)
atgtagatacgttagcagatggagaggttctaagagattggatactttggaatgtctttatataggaaatagacctcccatttcttaagcaagttgcttctggaattgatgcaacaggga

SEQ ID NO: 522189 - DNA, 120 bp, Artificial Sequence
  ENSG00000165434_48 (sequence is synthesized)
tattagctgtagtttaatggataagttgttctatgagctgctgctatcagtacttttttccacattttccattgatatttgtgatgcttgaaaaatccaaacttcacttggatacattta

SEQ ID NO: 522190 - DNA, 120 bp, Artificial Sequence
  ENSG00000165434_49 (sequence is synthesized)
attttatgcctttttctctctacctcccacttttcctaggcacccttgcacattttgttactgtgaaggactattgccctgttacctcactgataagaaatctcaactgtattcattcag

SEQ ID NO: 522191 - DNA, 120 bp, Artificial Sequence
  ENSG00000165434_50 (sequence is synthesized)
aatgctttaagcttagtcataaactacatttgcctatggacctttggttattttgttaatgttgtcattatatttaagacttattgtaggaagtaattttaaatctatttcataacctgt

SEQ ID NO: 522192 - DNA, 120 bp, Artificial Sequence
  ENSG00000165434_51 (sequence is synthesized)
tttgatctgtctgcatactgctatatgttaatttattacggccttttacaattcacttgtcatctgagattgttctagaaactgatgaggaaagagtcgtactaaccaaaatgaatgggc

SEQ ID NO: 522193 - DNA, 120 bp, Artificial Sequence
  ENSG00000165434_52 (sequence is synthesized)
aattgacataacattctatttcaggtttccttgtacttggggagccaaagcacaagatctaaggaaatcttattcacatttgtccctcagagcatcttaccctaagccatagaggtataa

SEQ ID NO: 522194 - DNA, 120 bp, Artificial Sequence
  ENSG00000165434_53 (sequence is synthesized)
atagtaagatgagaattgctcattgtctgactccttgcacagcatgaatttaattctagttggaaacaaagttagtgttgactactggttaccttaaagtattcaccatactatatattt

SEQ ID NO: 522195 - DNA, 120 bp, Artificial Sequence
  ENSG00000165434_54 (sequence is synthesized)
attagaccatctttcctctttgtttattcaagactatgtacttataaaagagaacctataagaatgtgtagagtgaccaaatagggacaaagtgacatacctagagtttgctgctcaaat

SEQ ID NO: 522196 - DNA, 120 bp, Artificial Sequence
  ENSG00000165434_55 (sequence is synthesized)
ttttccactagcgtaaccctaaagcagaggggcatgatgaagggggaaggggttctgagagcaaaatcagaatcagcctaccactgacatgaagtgtgttctgtctttaaaatgtaagtg

SEQ ID NO: 522197 - DNA, 120 bp, Artificial Sequence
  ENSG00000165434_56 (sequence is synthesized)
aattttgcattctttataataaaacttttaatataaaaatgatatgtttaatctttactgaaacttatgccaccacaaaggagcaccatgttcatcacgtggctgctcagttttctcccc

SEQ ID NO: 522198 - DNA, 120 bp, Artificial Sequence
  ENSG00000165434_57 (sequence is synthesized)
agttttctcccccagtgccctcacccccagtggaggcaagtccttgagctacacacactggctgtagtgcaagatatataaacataggccgggctcggtggctcatgcctgtaatcctag

SEQ ID NO: 522199 - DNA, 82 bp, Artificial Sequence
  ENSG00000165434_58 (sequence is synthesized)
ctgaggtcgggagattgagactagcctgaccgacatggagaaaccctgtgtccactaaaaatacaaaattagccgggtgtgg

SEQ ID NO: 522200 - DNA, 120 bp, Artificial Sequence
  ENSG00000165434_59 (sequence is synthesized)
aaaaaaaaaaaagatatataaacatagaacatatccagactatttcctgcccttggaatctgaccttcagaaggattaatgccaaactaaactgacctgaaacagttttgttactattgg

SEQ ID NO: 522201 - DNA, 120 bp, Artificial Sequence
  ENSG00000165434_60 (sequence is synthesized)
cattccttgactaaaaaggaccacctgatgctcagtcccgagagtaggaatcgtggtttattatttttcatatccataccacctagttcagtacctgttatagagtgtttaattgctgat

SEQ ID NO: 522202 - DNA, 120 bp, Artificial Sequence
  ENSG00000165434_61 (sequence is synthesized)
actaggaattaagggattttttaaaagtagcaaatagtttaaggaacaatcaaaaaatgaattttctaattcagttttttcaatgaagtcccatcactgaactttataatgtaatgttta

SEQ ID NO: 522203 - DNA, 120 bp, Artificial Sequence
  ENSG00000165434_62 (sequence is synthesized)
ttaagcagacatccccttaaatactcagtttctttggagagagcaaagcatatctctctgtggaaattatatataatgcctggtattttacactcaaagcaaggtgttggccaggaaggt

SEQ ID NO: 522204 - DNA, 120 bp, Artificial Sequence
  ENSG00000165434_63 (sequence is synthesized)
aaagaaatggtgtctatgtagacttaatatcactagtctaagtgtcattttgagcctagtagcactaccttccaagtgagtcacaacaaatttgatcctatttggtatgtttttgtccac

SEQ ID NO: 522205 - DNA, 120 bp, Artificial Sequence
  ENSG00000165434_64 (sequence is synthesized)
tgttatgattcatcatgtatcttacaagagccactcaagcaagactctgcttctatgtatggtgaggccttgttgttctaggctagaataaactctttgtatgcctcattgaatatgcca

SEQ ID NO: 522206 - DNA, 120 bp, Artificial Sequence
  ENSG00000165434_65 (sequence is synthesized)
ggtaaaatttatgcagtcaagaatgaattatttttctgactaaagtgtgtagcagtagttcaaaattgtgcccttgttttaacagtttctgtcaacatcttctcatttttccctacaaaa

SEQ ID NO: 522207 - DNA, 120 bp, Artificial Sequence
  ENSG00000165434_66 (sequence is synthesized)
acaccagggtgtattataagtactgcctgtgagaatttgcactttatgtatttgtgtgtggatttcttgtggttttagccaaatgaagtgttatcagtaataaacaggtctcttcatagg

SEQ ID NO: 522208 - DNA, 120 bp, Artificial Sequence
  ENSG00000165434_67 (sequence is synthesized)
cacccagcgccccgcgggctgcagaggagatggctcgggacaccgagcggggggcagcggagcagggcgttgccacccacctatgcgtggggttgctccttcggactgccagagccgggc

SEQ ID NO: 522209 - DNA, 120 bp, Artificial Sequence
  ENSG00000165434_68 (sequence is synthesized)
ggcaacatctgcatcgcttccttctgcagtgctctcaattgtaacctcccttcctcttctttaccctctttcctttcaagtgctgtcttccctctttcttcaaaaaaaaaaaaaaaaaaa

SEQ ID NO: 522210 - DNA, 120 bp, Artificial Sequence
  ENSG00000165443_0 (sequence is synthesized)
agagccgcacactccgcggagctcctgccacagccgtcgccttcgcggcggctctccagccccgcgcctcagcctcggcgccgcatcaccgcgtcccaggcctccttccctccctctgcc

SEQ ID NO: 522211 - DNA, 120 bp, Artificial Sequence
  ENSG00000165443_1 (sequence is synthesized)
actccccctccctttcccgctcttcttgcccacccggccggcagagagagcctggatacgaagcaggcgggcttcagagtgggttggaaaaatggaggtgccgcgcctggatcatgccct

SEQ ID NO: 522212 - DNA, 120 bp, Artificial Sequence
  ENSG00000165443_2 (sequence is synthesized)
caacagccccaccagcccctgtgaggaggtgatcaaaaacctcagcctggaggccattcagctgtgcgaccgggacgggaacaaatcacaagacagtggcatagcagagatggaagaact

SEQ ID NO: 522213 - DNA, 120 bp, Artificial Sequence
  ENSG00000165443_3 (sequence is synthesized)
tcctgtaccacataacatcaaaataagcaatataacgtgtgactcattcaagatttcatgggaaatggattcaaaatcaaaggatcgcattacacactattttattgacctcaacaagaa

SEQ ID NO: 522214 - DNA, 120 bp, Artificial Sequence
  ENSG00000165443_4 (sequence is synthesized)
agagaacaagaactccaataaatttaaacacaaggatgttcccacaaaattggtggcaaaagctgttcccttgcctatgactgtccgtggacactggtttttaagcccaagaactgaata

SEQ ID NO: 522215 - DNA, 120 bp, Artificial Sequence
  ENSG00000165443_5 (sequence is synthesized)
tacagtagcagtgcagactgcctcaaaacaagttgatggtgattatgttgtgtctgaatggagtgaaattatagaattctgcaccgcagactattcaaaagttcatctaacacaattgtt

SEQ ID NO: 522216 - DNA, 120 bp, Artificial Sequence
  ENSG00000165443_6 (sequence is synthesized)
ggagaaggctgaagtgattgcaggacgcatgcttaagttttctgttttttatcgtaatcagcacaaagaatattttgactatgttcgagaacatcatgggaatgctatgcagccatctgt

SEQ ID NO: 522217 - DNA, 120 bp, Artificial Sequence
  ENSG00000165443_7 (sequence is synthesized)
caaggataacagtggtagccatggctctcctatcagtggaaaattagaaggcatcttcttcagctgcagcactgaattcaatactggaaagccaccccaggattcaccttatggaagata

SEQ ID NO: 522218 - DNA, 120 bp, Artificial Sequence
  ENSG00000165443_8 (sequence is synthesized)
caggtttgagattgccgcagaaaaactttttaaccccaatactaacttatactttggggacttctactgtatgtacactgcttatcattatgtgattcttgttattgctcctgtgggatc

SEQ ID NO: 522219 - DNA, 120 bp, Artificial Sequence
  ENSG00000165443_9 (sequence is synthesized)
accaggagatgaattttgtaagcagcgccttcctcaactaaattctaaggataataaatttttgacctgtacagaagaagatggggtgctggtttaccaccatgcccaggatgtcatttt

SEQ ID NO: 522220 - DNA, 120 bp, Artificial Sequence
  ENSG00000165443_10 (sequence is synthesized)
agaagtcatttacactgaccctgtggatctttctgtgggcaccgtggcagaaatcactggtcatcagctcatgagtttgtctactgcaaatgcaaagaaagatcccagctgcaaaacctg

SEQ ID NO: 522221 - DNA, 120 bp, Artificial Sequence
  ENSG00000165443_11 (sequence is synthesized)
taatatcagtgttggacgttaatgcccacttttcttattcttactcagccccttttcctcccttaggagcattggtcctctgttgtccatttttatcaccagatgttttccactgaagca

SEQ ID NO: 522222 - DNA, 120 bp, Artificial Sequence
  ENSG00000165443_12 (sequence is synthesized)
tgcacatgccactgtcaccaaaacaaacaactaccactttccaaatttcattcagaaccattttagtgttttcctattccctacccctcccactactttcaatgatgaaataccctaagt

SEQ ID NO: 522223 - DNA, 120 bp, Artificial Sequence
  ENSG00000165443_13 (sequence is synthesized)
taagttctccttttgacactttattgcctagatgctgcaatgtttttatgtttcctttatgccaaacataacaaaacagttatatagactgctttagcaaagtacacaataatggcttat

SEQ ID NO: 522224 - DNA, 120 bp, Artificial Sequence
  ENSG00000165443_14 (sequence is synthesized)
aatattgggataactccaaaccgcatgaaagggtgtaattgcagcatgagttaaatcttgaagcctagaattgtcagcacttccaacttcttgtttgacagtgttatttatgttatttat

SEQ ID NO: 522225 - DNA, 120 bp, Artificial Sequence
  ENSG00000165443_15 (sequence is synthesized)
ttccaacttcttgtttgacagtgttatttatgttatttatattagctaacaggaaacaactactgtgtttcaacataataaatataatagaaaaatattttatttgtattgttgtataaa

SEQ ID NO: 522226 - DNA, 120 bp, Artificial Sequence
  ENSG00000165443_16 (sequence is synthesized)
tagcaactgtgtacatgtcacgaaaccatttcccttatcaaagatgtaatttgtaaacctcaaatagttgtgtatctgtcctgttagaagtagatgacttcaattaaacaaatttatgaa

SEQ ID NO: 522227 - DNA, 120 bp, Artificial Sequence
  ENSG00000165443_17 (sequence is synthesized)
ggacattattctgattcataaaagttataaaatattaggtaaatacagagaaaacaataagcctctgaaataagtctgtttctgaaatagtcaatagtcttcccatccaaactataagag

SEQ ID NO: 522228 - DNA, 120 bp, Artificial Sequence
  ENSG00000165443_18 (sequence is synthesized)
aatgtgaatttcttcaacatcatacttaaacattacagaaaatagaaatacaaacaaggttggtacatgagagaaaatgttgaccttttacttccttttacaaaaatgaaaataataaac

SEQ ID NO: 522229 - DNA, 120 bp, Artificial Sequence
  ENSG00000165443_19 (sequence is synthesized)
atgttttcgtataaaataacacaaaatgatatacactgaagttgatgaagcaaataaatattctggcttctttttcaaggtatcagggcaaacaatttccaaacttttcattttgtacag

SEQ ID NO: 522230 - DNA, 120 bp, Artificial Sequence
  ENSG00000165443_20 (sequence is synthesized)
aaggatgaataactacagctcatgggaaatgttttgactttacaaagtatagatgttggaacattaagaaaaatgtatattcccaatgaaaaaatagttatatcatcttatagtaaacca

SEQ ID NO: 522231 - DNA, 120 bp, Artificial Sequence
  ENSG00000165443_21 (sequence is synthesized)
tcccaatgaaaaaatagttatatcatcttatagtaaaccaaaagattagcaataatactatggacacattagattatatactacagacacatatctatccaaaatacctattttaaattt

SEQ ID NO: 522232 - DNA, 120 bp, Artificial Sequence
  ENSG00000165443_22 (sequence is synthesized)
atagacaaagataataattcacaaagtacatgctatcagaatgaactttggtaaccagaaatgtaaaatttcaaataacggataaaataatgtgttatttttatagagaaagaaaaaaat

SEQ ID NO: 522233 - DNA, 120 bp, Artificial Sequence
  ENSG00000165443_23 (sequence is synthesized)
agcaacacaatctagtttattttagggtactgagagcctagcagacttaaaggacaaggtagtaaatgttttatcactcaaaaatccattagaagtttcaaataaattgctttcttgcta

SEQ ID NO: 522234 - DNA, 120 bp, Artificial Sequence
  ENSG00000165443_24 (sequence is synthesized)
gctgtattccttcctacttgaaaagcgaatttcttttcctcctatgattgattttttaaaatcatgctcttttccatacatcaacataaacagtctttggatactaaataaactttccct

SEQ ID NO: 522235 - DNA, 120 bp, Artificial Sequence
  ENSG00000165443_25 (sequence is synthesized)
aacaagtgtcctagctatgttatttagatttgataaaatattagacatttttaaaaatacttgtattgactatgagttttctgcttggcatggaggacactgaattttttcccaattata

SEQ ID NO: 522236 - DNA, 120 bp, Artificial Sequence
  ENSG00000165443_26 (sequence is synthesized)
tggctacctgttgtattcttccccccgtttaaatcccttctccttgtatataattaaacttgctattccttcttaaaaacagctaatactaccactaaagtgcttccattttcattgtgt

SEQ ID NO: 522237 - DNA, 120 bp, Artificial Sequence
  ENSG00000165443_27 (sequence is synthesized)
caaaactacttagcaaggatggcagaggaaaataaactttactttatatcatgggtgaaagtgatcataacatttcctgaacctcaaatagttttggccacatcttgcttgctgatgagg

SEQ ID NO: 522238 - DNA, 120 bp, Artificial Sequence
  ENSG00000165443_28 (sequence is synthesized)
acctctaatagtctcagtttggcttttatgtgcttatattcataatactcatctgccattggtatcctatcttccttttgtggacttctgcaaaacaaaaatacatttgttagttcacaa

SEQ ID NO: 522239 - DNA, 120 bp, Artificial Sequence
  ENSG00000165443_29 (sequence is synthesized)
gacgaggcgtttccgatctttgccgcagtccggatttcctgggtctctgggcactgaaggggaaatgccctcgggatgtttctagcaacccccttcccccaacacacacacactagttgg

SEQ ID NO: 522240 - DNA, 120 bp, Artificial Sequence
  ENSG00000165443_30 (sequence is synthesized)
cattctcttccagaaacttatcattttcttttttaaacctcccatcctcagactccccaaattaacaagtctttttagcctcttggattgggattaggatgacagtttttcagtgagggc

SEQ ID NO: 522241 - DNA, 120 bp, Artificial Sequence
  ENSG00000165443_31 (sequence is synthesized)
gcagaaaaacagtgcatttcagcaccaaggacagacacaatcttcatggttcctgggctctgagtcagactgtcgaaaatattggcctaatatatgtgctgtgattcagactttgtggcg

SEQ ID NO: 522242 - DNA, 120 bp, Artificial Sequence
  ENSG00000165449_0 (sequence is synthesized)
agtttgaggccaacactaggaagtgtctggaaccggatccggaggcttcacaatctatatgttgcctccaaaggacctgcagagaaacgcctcctgattttgtcttacaatggaacttaa

SEQ ID NO: 522243 - DNA, 120 bp, Artificial Sequence
  ENSG00000165449_1 (sequence is synthesized)
aaagtcgcctgacggtggatggggctgggtgattgtgtttgtctccttccttactcagtttttgtgttacggatccccactagctgttggagtcctgtacatagaatggctggatgcctt

SEQ ID NO: 522244 - DNA, 120 bp, Artificial Sequence
  ENSG00000165449_2 (sequence is synthesized)
tggtgaaggaaaaggaaaaacagcctgggttggatccctggcaagtggagttggcttgcttgcaagtcctgtctgcagtctctgtgtctcatcttttggagcaagacctgtcacaatctt

SEQ ID NO: 522245 - DNA, 120 bp, Artificial Sequence
  ENSG00000165449_3 (sequence is synthesized)
cagtggcttcatggtggctggaggcctgatgttgagcagttttgctcccaatatctactttctgtttttttcctatggcattgttgtaggtcttggatgtggtttattatacactgcaac

SEQ ID NO: 522246 - DNA, 120 bp, Artificial Sequence
  ENSG00000165449_4 (sequence is synthesized)
agtgaccattacgtgccagtattttgacgatcgccgaggcctagcgcttggcctgatttcaacaggttcaagcgttggccttttcatatatgctgctctgcagaggatgctggttgagtt

SEQ ID NO: 522247 - DNA, 120 bp, Artificial Sequence
  ENSG00000165449_5 (sequence is synthesized)
ctatggactggatggatgcttgctgattgtgggtgctttagctttaaatatattagcctgtggcagtctgatgagacccctccaatcttctgattgtcctttgcctaaaaaaatagctcc

SEQ ID NO: 522248 - DNA, 120 bp, Artificial Sequence
  ENSG00000165449_6 (sequence is synthesized)
agaagatctaccagataaatactccatttacaatgaaaaaggaaagaatctggaagaaaacataaacattcttgacaagagctacagtagtgaggaaaaatgcaggatcacgttagccaa

SEQ ID NO: 522249 - DNA, 120 bp, Artificial Sequence
  ENSG00000165449_7 (sequence is synthesized)
tggtgactggaaacaagacagcctacttcataaaaaccccacagtgacacacacaaaagagcctgaaacgtacaaaaagaaagttgcagaacagacatatttttgcaaacagcttgccaa

SEQ ID NO: 522250 - DNA, 120 bp, Artificial Sequence
  ENSG00000165449_8 (sequence is synthesized)
gaggaagtggcagttatataaaaactactgtggtgaaactgtggctctttttaaaaacaaagtattttcagcccttttcattgctatcttactctttgacatcggagggtttccaccttc

SEQ ID NO: 522251 - DNA, 120 bp, Artificial Sequence
  ENSG00000165449_9 (sequence is synthesized)
attacttatggaagatgtagcaagaagttcaaacgtgaaagaagaagagtttattatgccacttatttccattataggcattatgacagcagttggtaaactgcttttagggatactggc

SEQ ID NO: 522252 - DNA, 120 bp, Artificial Sequence
  ENSG00000165449_10 (sequence is synthesized)
tgacttcaagtggattaataccttgtatctttatgttgctaccttaatcatcatgggcctagccttgtgtgcaattccatttgccaaaagctatgtcacattggcgttgctttctgggat

SEQ ID NO: 522253 - DNA, 120 bp, Artificial Sequence
  ENSG00000165449_11 (sequence is synthesized)
cctagggtttcttactggtaattggtccatctttccatatgtgaccacgaagactgtgggaattgaaaaattagcccatgcctatgggatattaatgttctttgctggacttggaaatag

SEQ ID NO: 522254 - DNA, 120 bp, Artificial Sequence
  ENSG00000165449_12 (sequence is synthesized)
cctaggaccacccatcgttggttggttttatgactggacccagacctatgatattgcattttattttagtggcttctgcgtcctgctgggaggttttattctgctgctggcagccttgcc

SEQ ID NO: 522255 - DNA, 120 bp, Artificial Sequence
  ENSG00000165449_13 (sequence is synthesized)
ctcttgggatacatgcaacaagcaactccccaagccagctccaacaactttcttgtacaaagttgcctctaatgtttagaagaatattggaagacactatttttgctattttataccata

SEQ ID NO: 522256 - DNA, 120 bp, Artificial Sequence
  ENSG00000165449_14 (sequence is synthesized)
tagcaacgatattttaacagattctcaagcaaattttctagagtcaagactattttctcatagcaaaatttcacaatgactgactctgaatgaattatttttttttatatatcctatttt

SEQ ID NO: 522257 - DNA, 120 bp, Artificial Sequence
  ENSG00000165449_15 (sequence is synthesized)
tcctccccacaccatcaatgggactattctgttttgctgttattcactagttcttaacattgtaaaaagtttgaccagcctcagaaggctttctctgtgtaaagaagtataatttctctg

SEQ ID NO: 522258 - DNA, 120 bp, Artificial Sequence
  ENSG00000165449_16 (sequence is synthesized)
ccgactccatttaatccactgcaaggcacctagagagactgctcctattttaaaagtgatgcaagcatcatgataagatatgtgtgaagcccactaggaaataaatcattctcttctcta

SEQ ID NO: 522259 - DNA, 120 bp, Artificial Sequence
  ENSG00000165449_17 (sequence is synthesized)
tgtttgacttgctagtaaacagaagacttcaagccagccaggaaattaaagtggcgactaaaacagccttaagaattgcagtggagcaaattggtcattttttaaaaaaatatattttaa

SEQ ID NO: 522260 - DNA, 120 bp, Artificial Sequence
  ENSG00000165449_18 (sequence is synthesized)
cctacagtcaccagttttcattattctatttacctcactgaagtactcgcatgttgtttggtacccactgagcaactgtttcagttcctaaggtatttgctgagatgtgggtgaactcca

SEQ ID NO: 522261 - DNA, 120 bp, Artificial Sequence
  ENSG00000165449_19 (sequence is synthesized)
aatggagaagtagtcactgtagactttcttcatggttgaccactccaaccttgctcacttttgcttcttggccatccactcagctgatgtttcctgggaagtgctaattttacctgtttc

SEQ ID NO: 522262 - DNA, 120 bp, Artificial Sequence
  ENSG00000165449_20 (sequence is synthesized)
caaattggaaacacatttctcaatcattccgttctggcaaatgggaaacatccatttgctttgggcacagtggggatgggctgcaagttcttgcatatcctcccagtgaagcatttattt

SEQ ID NO: 522263 - DNA, 120 bp, Artificial Sequence
  ENSG00000165449_21 (sequence is synthesized)
gctactatcagattttaccactatcaaatataattcaagggcagaattaaacgtgagtgtgtgtgtgtgtgtgtgtgtgtgctatgcatgctctaagtctgcatgggatatgggaatgga

SEQ ID NO: 522264 - DNA, 120 bp, Artificial Sequence
  ENSG00000165449_22 (sequence is synthesized)
aaagggcaataagaaattaatacccttatgcagttgcatttaaccttaagaaaaatgtccttgggataaactccaatgtttaatacattgattttttttctaaagaaatgggttttaaac

SEQ ID NO: 522265 - DNA, 120 bp, Artificial Sequence
  ENSG00000165449_23 (sequence is synthesized)
tttggtatgcatcagaattccctatagatctttttgaaaatataggtacctgggtatcacacatagaacttttaattctgctggtgtaggctgttgcccaaacatctataattttactga

SEQ ID NO: 522266 - DNA, 120 bp, Artificial Sequence
  ENSG00000165449_24 (sequence is synthesized)
gctcttcaagtgattctgataacacagcctggattgagaatttttataagattggcaatggaaaaacatttattcttttaaataataatttttttaaaacccaagaggtcaggggatttt

SEQ ID NO: 522267 - DNA, 120 bp, Artificial Sequence
  ENSG00000165449_25 (sequence is synthesized)
ataaaccaatagccaagtgttctttaaataggaggcacccttcccattgtgccaaaatcatcttttcatttattttgaaatttgtatgattattttatacttgtatgttgcctttcttcg

SEQ ID NO: 522268 - DNA, 120 bp, Artificial Sequence
  ENSG00000165449_26 (sequence is synthesized)
aaggcgcctgaagcactttataaacacaaatcctcacaatacctctgtgaggtaggtaaatagtacttttctatgtagtaaacctggaatatggagaatttcataacagttcattctact

SEQ ID NO: 522269 - DNA, 120 bp, Artificial Sequence
  ENSG00000165449_27 (sequence is synthesized)
taataatgcaataatggagctccaagttgtcttggacttctacaccacactcagacttctggaaagttttctgtacctcattctttagtccctgtcaaggttagtaaataaaataagtga

SEQ ID NO: 522270 - DNA, 120 bp, Artificial Sequence
  ENSG00000165449_28 (sequence is synthesized)
cataaaaaaaaaaaaaactaaactacttgttgtgttgaaagttcctttttgccagttatgttcaggaaacccaataacctgaaaaagtttgactttgatgtgacatcttcatattcatca

SEQ ID NO: 522271 - DNA, 120 bp, Artificial Sequence
  ENSG00000165449_29 (sequence is synthesized)
atgctgataattgtccaaaggcatcttcactatgtctgctaaataacatccaatgtgggcgttatctgttgtctaggggatgaattttaagttacaataaaatatttttctttgttttgc

SEQ ID NO: 522272 - DNA, 120 bp, Artificial Sequence
  ENSG00000165449_30 (sequence is synthesized)
gtgcgcaccgagagggcgcctggccgacggcgcccacctctctcgtggctttggtggctccaggcctggtagggccggggccgcggctcgggcagtgccctccctactcctggccgggcc

SEQ ID NO: 522273 - DNA, 120 bp, Artificial Sequence
  ENSG00000165449_31 (sequence is synthesized)
gggagcagcgggagcaggcgcagcgcccctaccgcccgcttttccgcctccatctcctccgcctcctcctcctccttcccccaaccacccgcgcagtcacaaccggttcagactggccgg

SEQ ID NO: 522274 - DNA, 120 bp, Artificial Sequence
  ENSG00000165449_32 (sequence is synthesized)
ggtgccccgcaaagagagacaagggagaaaaagacagcagggaaaaccccggggaggagaaggcgaaagagaaggtggagctcagagaagggggccggctccccagctccatgtggccgc

SEQ ID NO: 522275 - DNA, 120 bp, Artificial Sequence
  ENSG00000165449_33 (sequence is synthesized)
cgccgctgcgggtctgtgggggcagagggcggcggctcccggggcagcgcgtagcgggaccgattgcctaatactccggcaggggccggggccgcagctggctcggataaatagccgccc

SEQ ID NO: 522276 - DNA, 120 bp, Artificial Sequence
  ENSG00000165449_34 (sequence is synthesized)
cggagctgcaggggagagcggcggccgcgatccccaccacaccaccagcccggccgcacggggcactgagccgggtgctgagcaccggaggccccgccgaggccgggactcaggacctgc

SEQ ID NO: 522277 - DNA, 120 bp, Artificial Sequence
  ENSG00000165449_35 (sequence is synthesized)
gccgggtgctgagcaccggaggccccgccgaggccgggactcaggtaacctgctctggcttcagcagcgcccagaggctttccagagagctgataaccacgaacaaacttggctgtcaaa

SEQ ID NO: 522278 - DNA, 120 bp, Artificial Sequence
  ENSG00000165457_0 (sequence is synthesized)
agagcgcgttgtctaccctgtaccgaagacagaggctgtggggacagcctaggggcctggatctattgcctacttagagagaggccaactcagacacagccgtgtatgctcccagcagca

SEQ ID NO: 522279 - DNA, 120 bp, Artificial Sequence
  ENSG00000165457_1 (sequence is synthesized)
acggaggttcagctccgcctgcagggacagaaagacatggtctggaaatggatgccacttctgctgcttctggtctgtgtagccaccatgtgcagtgcccaggacaggactgatctcctc

SEQ ID NO: 522280 - DNA, 120 bp, Artificial Sequence
  ENSG00000165457_2 (sequence is synthesized)
aatgtctgtatggatgccaagcaccacaagacaaagccaggtcctgaggacaagctgcatgaccaatgcagtccctggaagaagaatgcctgctgcacagccagcaccagccaggagctg

SEQ ID NO: 522281 - DNA, 120 bp, Artificial Sequence
  ENSG00000165457_3 (sequence is synthesized)
cacaaggacacctcccgcctgtacaactttaactgggaccactgcggcaagatggagcccgcctgcaagcgccacttcatccaggacacctgtctctatgagtgctcacccaacctgggg

SEQ ID NO: 522282 - DNA, 120 bp, Artificial Sequence
  ENSG00000165457_4 (sequence is synthesized)
caaagaacgcttcctggatgtgcccttatgcaaagaggactgtcagcgctggtgggaggattgtcacacctcccacacgtgcaagagcaactggcacagaggatgggactggacctcagg

SEQ ID NO: 522283 - DNA, 120 bp, Artificial Sequence
  ENSG00000165457_5 (sequence is synthesized)
agttaacaagtgcccagctggggctctctgccgcacctttgagtcctacttccccactccagctgccctttgtgaaggcctctggagtcactcatacaaggtcagcaactacagccgagg

SEQ ID NO: 522284 - DNA, 120 bp, Artificial Sequence
  ENSG00000165457_6 (sequence is synthesized)
gagcggccgctgcatccagatgtggtttgattcagcccagggcaaccccaacgaggaagtggcgaggttctatgctgcagccatgcatgtgaatgctggtgagatgcttcatgggactgg

SEQ ID NO: 522285 - DNA, 120 bp, Artificial Sequence
  ENSG00000165457_7 (sequence is synthesized)
gggtctcctgctcagtctggccctgatgctgcaactctggctccttggctgagttcagtcctcccagactacctgccctcagcttggataaccaggctgggctcagctcagctcccacaa

SEQ ID NO: 522286 - DNA, 120 bp, Artificial Sequence
  ENSG00000165457_8 (sequence is synthesized)
atgacagccccttaagcatgcttctattagtcacctaaccctctgtcacccagtctgttgctgctccatggtggggccaagagtcacttctaataaacagactgttttctaataattcca

SEQ ID NO: 522287 - DNA, 120 bp, Artificial Sequence
  ENSG00000165457_9 (sequence is synthesized)
agcaattctctagattttgatgaaagttgaatgtgtggatgctggaatgagtaaattaacaagtaaggagatgaatgcaagcaggaatgactaaatggacagactcagggagccttgaag

SEQ ID NO: 522288 - DNA, 120 bp, Artificial Sequence
  ENSG00000165458_0 (sequence is synthesized)
ctttctcttcaagttgaggccggcgctgcaggcagcggcggctgcgcggtgaacgaggcggcctgcgcggcggagtgctgagtcccgatccccggctctgtccggcccacggatcctcaa

SEQ ID NO: 522289 - DNA, 80 bp, Artificial Sequence
  ENSG00000165458_1 (sequence is synthesized)
gcccacggatcctcaagcccgggccccgggcccggccccagcctcagccctgagcgtctcggggcggatggcgcggggcg

SEQ ID NO: 522290 - DNA, 120 bp, Artificial Sequence
  ENSG00000165458_2 (sequence is synthesized)
gcgccctgggcagccaggccccctcctggtaccaccgcgacctgagccgggcggccgcggaggagctgctggcccgggcgggccgcgatggcagcttcctggtccgagacagcgagagcg

SEQ ID NO: 522291 - DNA, 120 bp, Artificial Sequence
  ENSG00000165458_3 (sequence is synthesized)
acagcgagagcgtggcgggggccttcgcgctctgcgtcctgtatcagaagcatgtgcacacgtatcgcattctgcctgatggagaagatttcttggctgtgcagacctcgcagggtgtgc

SEQ ID NO: 522292 - DNA, 120 bp, Artificial Sequence
  ENSG00000165458_4 (sequence is synthesized)
ctgtgcgccgcttccagaccctgggtgagctcatcggcctgtacgcccagcccaaccagggccttgtgtgcgccctgcttcttcctgtagagggtgagcgagagccggacccaccggatg

SEQ ID NO: 522293 - DNA, 120 bp, Artificial Sequence
  ENSG00000165458_5 (sequence is synthesized)
accgggatgcctcagatggggaggatgagaagcccccgctgcccccgcgctctggctccaccagcatttctgcccccactgggcccagcagtcccctgccagctcctgagactcccacag

SEQ ID NO: 522294 - DNA, 120 bp, Artificial Sequence
  ENSG00000165458_6 (sequence is synthesized)
ctccagctgctgagagtgctcccaatgggctgagcaccgtctcgcacgactacctgaaaggcagctatgggctggacctggaagctgtgaggggtggagccagccacctgccccacctca

SEQ ID NO: 522295 - DNA, 120 bp, Artificial Sequence
  ENSG00000165458_7 (sequence is synthesized)
cccgtaccctcgctacctcatgccggaggctgcacagtgaggtggacaaggtcctgtcaggcctggagatcctgtccaaggtgtttgaccagcagagctcgcccatggtgacccgccttt

SEQ ID NO: 522296 - DNA, 120 bp, Artificial Sequence
  ENSG00000165458_8 (sequence is synthesized)
tgcagcagcagaacctgccacagacaggggagcaggaactagagagcctggtgctgaagctgtcagtgctaaaggacttcctgtcaggcatccagaagaaggccctgaaggccctacagg

SEQ ID NO: 522297 - DNA, 120 bp, Artificial Sequence
  ENSG00000165458_9 (sequence is synthesized)
acatgagctccacagcacccccagctccgcagccatccacacgtaaggccaagaccatccccgtgcaggcctttgaggtgaagctagatgtgaccctgggtgacctgaccaagattggga

SEQ ID NO: 522298 - DNA, 120 bp, Artificial Sequence
  ENSG00000165458_10 (sequence is synthesized)
agtcacagaagttcacgctgagcgtggatgtggagggtgggcggctggtgctgctgcggagacagcgggactcccaggaggactggaccaccttcacgcacgaccgcatccgccagctca

SEQ ID NO: 522299 - DNA, 120 bp, Artificial Sequence
  ENSG00000165458_11 (sequence is synthesized)
ttaagtcccagcgtgtccagaacaagctgggtgttgtgtttgagaaggagaaggaccggactcagcgcaaggacttcatctttgtcagtgcccggaagcgggaggccttctgccagctgt

SEQ ID NO: 522300 - DNA, 120 bp, Artificial Sequence
  ENSG00000165458_12 (sequence is synthesized)
tgcagctcatgaagaacaagcactccaagcaggacgagcccgacatgatctcagtcttcataggcacctggaacatgggaagtgtaccacctccaaaaaacgtgacatcctggttcacat

SEQ ID NO: 522301 - DNA, 120 bp, Artificial Sequence
  ENSG00000165458_13 (sequence is synthesized)
cgaagggtctggggaagaccctggacgaggtcacagtgaccataccccatgacatctatgtctttgggacccaggagaactcagtgggcgaccgcgagtggctggacctactgcgcgggg

SEQ ID NO: 522302 - DNA, 120 bp, Artificial Sequence
  ENSG00000165458_14 (sequence is synthesized)
gcctcaaggagcttacggatctggattaccgcccgattgccatgcaatcactgtggaatatcaaggtggcagtgctggtcaagccagagcacgagaaccgtatcagccatgtcagtacgt

SEQ ID NO: 522303 - DNA, 120 bp, Artificial Sequence
  ENSG00000165458_15 (sequence is synthesized)
ccagtgtgaagactggcatcgccaacaccctggggaacaagggggctgtgggcgtctccttcatgtttaatggcacctcatttggctttgtgaattgtcacctcacctcgggaaatgaga

SEQ ID NO: 522304 - DNA, 120 bp, Artificial Sequence
  ENSG00000165458_16 (sequence is synthesized)
agacggctcggaggaaccaaaactacttggacatcctgcggctgctctcgctgggcgaccggcagctcaatgcctttgacatctctctgcgtttcacacacctcttctggtttggggacc

SEQ ID NO: 522305 - DNA, 120 bp, Artificial Sequence
  ENSG00000165458_17 (sequence is synthesized)
tcaactaccgcctggacatggatatccaggagatcctgaactacatcagcaggaaagagtttgagcccctcctcagggtggaccagctcaacctggagcgggagaagcacaaggtcttcc

SEQ ID NO: 522306 - DNA, 120 bp, Artificial Sequence
  ENSG00000165458_18 (sequence is synthesized)
ttcgattcagtgaggaggagatctccttcccacccacctaccgctatgagcggggttcccgggacacatatgcctggcacaagcagaagccaactggggtccggaccaatgtgccctcat

SEQ ID NO: 522307 - DNA, 120 bp, Artificial Sequence
  ENSG00000165458_19 (sequence is synthesized)
atttgaggttggagttacctcccagttcatctccaagaaagggctctcaaagacttcagaccaggcctacattgagtttgagagcatcgaggccattgtgaagacagccagccgcaccaa

SEQ ID NO: 522308 - DNA, 120 bp, Artificial Sequence
  ENSG00000165458_20 (sequence is synthesized)
gttcttcatcgagttctactctacctgcctggaggaatacaagaagagctttgagaatgatgcccagagcagtgacaacatcaacttcctcaaagtgcagtggtcttcacgccagctgcc

SEQ ID NO: 522309 - DNA, 120 bp, Artificial Sequence
  ENSG00000165458_21 (sequence is synthesized)
cacgctcaaaccaattctggctgatatcgagtacctgcaggaccagcacctcctgctcacagtcaagtccatggatggctatgaatcctatggggagtgtgtggttgcactcaaatccat

SEQ ID NO: 522310 - DNA, 120 bp, Artificial Sequence
  ENSG00000165458_22 (sequence is synthesized)
gatcggcagcacggcccaacagttcctgaccttcctatcccaccgtggcgaggagacaggcaatatcagaggctccatgaaggtgcgggtgcccacggagcgcctgggcacccgtgagcg

SEQ ID NO: 522311 - DNA, 120 bp, Artificial Sequence
  ENSG00000165458_23 (sequence is synthesized)
gctctacgagtggatcagcattgataaggatgaggcaggagcaaagagcaaagccccctctgtgtcccgagggagccaggagcccaggtcagggagccgcaagccagccttcacagaggc

SEQ ID NO: 522312 - DNA, 120 bp, Artificial Sequence
  ENSG00000165458_24 (sequence is synthesized)
ctcctgcccgctctccaggttatttgaagaaccagagaaaccgccaccaacggggaggcccccagccccaccccgagcagctccccgggaggagcccttgacccccaggttgaagccaga

SEQ ID NO: 522313 - DNA, 120 bp, Artificial Sequence
  ENSG00000165458_25 (sequence is synthesized)
gggagctcctgaaccagaaggggtggcggcccccccacccaagaacagcttcaataaccctgcctactacgtccttgaaggggtcccgcaccagctgctgcccccggagccaccctcgcc

SEQ ID NO: 522314 - DNA, 120 bp, Artificial Sequence
  ENSG00000165458_26 (sequence is synthesized)
tgccagggcccctgtcccatctgccaccaagaacaaagtggccattacagtgcctgctccacagcttgggcaccaccggcaccctcgtgtgggagaggggagttcttcagatgaggagtc

SEQ ID NO: 522315 - DNA, 120 bp, Artificial Sequence
  ENSG00000165458_27 (sequence is synthesized)
tggaggcacactgccccctccagactttccacctccaccactgccggactcagccatcttcctgccccccagcctggatcctttaccagggccagtggtccggggccgtggtggggctga

SEQ ID NO: 522316 - DNA, 120 bp, Artificial Sequence
  ENSG00000165458_28 (sequence is synthesized)
ggcccgtggcccaccacctcccaaggcccatccaaggcctccactgcccccaggcccctcaccagccagcactttcctgggggaagtggccagtggggatgaccggtcctgctcggtgct

SEQ ID NO: 522317 - DNA, 120 bp, Artificial Sequence
  ENSG00000165458_29 (sequence is synthesized)
gcagatggccaagacgctgagcgaggtggactatgcccctgctgggcctgcacgctcagcgctcctcccaggccccctggagctgcagcccccccggggactgccctcggactatggccg

SEQ ID NO: 522318 - DNA, 120 bp, Artificial Sequence
  ENSG00000165458_30 (sequence is synthesized)
gcccctcagcttccctccaccccgcatccgggagagcatccaggaagacctggcagaggaggctccgtgcctgcagggcgggcgggccagcgggctgggcgaggcaggcatgagtgcctg

SEQ ID NO: 522319 - DNA, 120 bp, Artificial Sequence
  ENSG00000165458_31 (sequence is synthesized)
gctgcgggccatcggcttggagcgctatgaggagggcctggtgcataatggctgggacgacctggagtttctcagtgacatcaccgaggaggacttggaggaggctggggtgcaggaccc

SEQ ID NO: 522320 - DNA, 120 bp, Artificial Sequence
  ENSG00000165458_32 (sequence is synthesized)
ggctcacaagcgcctccttctggacaccctgcagctcagcaagtgatagcggaggcaccacgaagctgtgaactcagagcccctccctgctaccaaggcccagctatggccccagggttg

SEQ ID NO: 522321 - DNA, 120 bp, Artificial Sequence
  ENSG00000165458_33 (sequence is synthesized)
aaaagttatgagggtcagggcagtatctctctgcctatttattggggtgcctatttattggggatctgcattccccgctgcccaatcatttgcaatgccctaattagggcatcctgcccc

SEQ ID NO: 522322 - DNA, 120 bp, Artificial Sequence
  ENSG00000165458_34 (sequence is synthesized)
tcgccttttaggctcaggacggaaggtcagttgccatggttaccgaggaccctggttactctggtgctgtcctgttttactggaccccgcctcccagccccaggggtgcctgtgggggtc

SEQ ID NO: 522323 - DNA, 120 bp, Artificial Sequence
  ENSG00000165458_35 (sequence is synthesized)
catttgggtacgtctgggcccccactttcaccagtttctgcggccttccaccgggcctgaaccacagcggaggagctccgctaagacctccccacccccgctgggggtgggggcgggtgt

SEQ ID NO: 522324 - DNA, 120 bp, Artificial Sequence
  ENSG00000165458_36 (sequence is synthesized)
ccgtccggaaatgaaggaatagcccgaggaccgggctggggtttatttaaactgttctgtgtgggtctggggagggagagcaccttaatattattggggttggttggggtggggcaggat

SEQ ID NO: 522325 - DNA, 120 bp, Artificial Sequence
  ENSG00000165458_37 (sequence is synthesized)
ctcagccataaagtgccagtttgcttagttctcactgtctcctggtctgtgctgccctgctctggggatgcacggcggcagggtgggggagggaggttcctcgcaggtctcagcccggga

SEQ ID NO: 522326 - DNA, 120 bp, Artificial Sequence
  ENSG00000165458_38 (sequence is synthesized)
cagggtcttgcaagcagcctcctgggcagtcgtaagggttgcggcgtgatgtcttcaataaattaagttttatttggattgagtaaaacttcaataaattacaagtttttcaaagaaaaa

SEQ ID NO: 522327 - DNA, 120 bp, Artificial Sequence
  ENSG00000165458_39 (sequence is synthesized)
ggggtcatcttgtccaggaccctgtcctcacacaccacctccaaactagcctacttgacttcatgggcaaccctgggagcacagcttcactggctttttctctggtccctgagcatatcc

SEQ ID NO: 522328 - DNA, 120 bp, Artificial Sequence
  ENSG00000165458_40 (sequence is synthesized)
acccatcccattcacctgaggcctgttcccgctcccataccctagcccatgaccctcccgcaggcctgtctccagagaccccctgctctcttatcccaattcaagacccttctgttcctg

SEQ ID NO: 522329 - DNA, 120 bp, Artificial Sequence
  ENSG00000165458_41 (sequence is synthesized)
accctaaccttgtccccaggggcccggatctttaccccatccctgactcctgagacttcttccctttatgcctatccctgacttctggccctgaccctggggatctacccctccccacca

SEQ ID NO: 522330 - DNA, 120 bp, Artificial Sequence
  ENSG00000165458_42 (sequence is synthesized)
tttagacagctgtggaggccacaaaagagctccctgttgcttctcaggccctgccctgtggtgggtgtggagtctgtgtaggtctggtggggagacgggggtgttctggtcattcctgcc

SEQ ID NO: 522331 - DNA, 120 bp, Artificial Sequence
  ENSG00000165458_43 (sequence is synthesized)
caataggcaacaccaggagggtggaagtggaccggccacatcattaaccctgtgcagcctgggcaggtggttttagggaaaccaagctgagggggttggggtgctgagcttgctggcagg

SEQ ID NO: 522332 - DNA, 120 bp, Artificial Sequence
  ENSG00000165458_44 (sequence is synthesized)
tgagcgagagccggacccaccggatgaccgggatgcctcagatggggaggatgagaagcccccgctgcccccgcgctctggctccaccagcatttctgcccactgggcccagcagtcccc

SEQ ID NO: 522333 - DNA, 120 bp, Artificial Sequence
  ENSG00000165458_45 (sequence is synthesized)
cttgacttcatgggcaaccctgggagcacagcttcactggctttttctctggtccctgagcatatcctttgggagatctgacctgagtccttcatgccacgagaggaaccatttctctcc

SEQ ID NO: 522334 - DNA, 120 bp, Artificial Sequence
  ENSG00000165458_46 (sequence is synthesized)
agtccgtcaggaagaggggtggcaagccttcctaccctgtgatggacacaaaagtctatttatagtgcagggggaaatgcaggcagtgggtgcagcagggcagtggtgaccatgcactct

SEQ ID NO: 522335 - DNA, 120 bp, Artificial Sequence
  ENSG00000165458_47 (sequence is synthesized)
cctttcccttggccatgatgccggggccctttaaccctctttccatggaagtcactttacagctgcatcgtgcctcctactccactgagtgtgggaggcccaaacggctgcccactgacc

SEQ ID NO: 522336 - DNA, 120 bp, Artificial Sequence
  ENSG00000165458_48 (sequence is synthesized)
tgagacccccatcccatccactgaacaggagaccctttctcctctgagaactatttccctaccaaaggtggggaggccttctaagaccccaccagggacccccaccccacctcagcccag

SEQ ID NO: 522337 - DNA, 120 bp, Artificial Sequence
  ENSG00000165458_49 (sequence is synthesized)
aggcagataacctgatccatcccgccctggttgccacaggtactatctcctctagggatggggcagaggtgctgggacaggtcagcaggacctccactgacttcttaacccctccccaaa

SEQ ID NO: 522338 - DNA, 120 bp, Artificial Sequence
  ENSG00000165458_50 (sequence is synthesized)
ctaccctgaaactcacatcatctgcaattcttatggtcagagcctcccggacagagtgatgggagatctggggtggtcaccatctggactctgccctaaccttgggaggtgggagccgag

SEQ ID NO: 522339 - DNA, 120 bp, Artificial Sequence
  ENSG00000165462_0 (sequence is synthesized)
acttgcgttgcacccgggctgagtgcggccgcgacggggcgggcggactctcgggcgctcagagctggcctcgggtcctcggagcctggcgctcgaacctcccttccgacctccacccgg

SEQ ID NO: 522340 - DNA, 120 bp, Artificial Sequence
  ENSG00000165462_1 (sequence is synthesized)
accccgaccccgacccggcctggcccggcccccgcccccgccccccgggccgatggactactcctacctcaattcgtacgactcgtgcgtggcggccatggaggcgtccgcctacggcga

SEQ ID NO: 522341 - DNA, 120 bp, Artificial Sequence
  ENSG00000165462_2 (sequence is synthesized)
ctttggcgcctgcagccagcccggcggcttccaatacagccccctgcggcccgctttccccgcggcagggccgccctgccccgcgctcggctcctccaactgcgcacttggcgccctacg

SEQ ID NO: 522342 - DNA, 120 bp, Artificial Sequence
  ENSG00000165462_3 (sequence is synthesized)
cgaccaccagcccgcgccctactcggcagtgccctacaagttcttcccagagccatccggcctgcacgagaagcgcaagcagcggcgcatccgcaccacgttcaccagcgcgcagctcaa

SEQ ID NO: 522343 - DNA, 120 bp, Artificial Sequence
  ENSG00000165462_4 (sequence is synthesized)
ggagctggagcgcgttttcgctgagacccactaccccgacatttacacgcgtgaggagctggcgctcaagatcgacctcactgaggctcgcgtgcaggtctggttccagaaccgccgggc

SEQ ID NO: 522344 - DNA, 120 bp, Artificial Sequence
  ENSG00000165462_5 (sequence is synthesized)
caagttccgcaaacaggagcgcgcggccagcgccaagggcgcggcgggcgcggcgggcgccaaaaagggcgaggcgcgctgctcctccgaggacgacgattccaaggagtccacgtgcag

SEQ ID NO: 522345 - DNA, 120 bp, Artificial Sequence
  ENSG00000165462_6 (sequence is synthesized)
cgattccaaggagtccacgtgcagccccacgcccgatagcaccgcctcgctgccgccgccgcctgcgcccggcctggccagcccgcgcctgagccccagcccgctgcccgtcgcactggg

SEQ ID NO: 522346 - DNA, 120 bp, Artificial Sequence
  ENSG00000165462_7 (sequence is synthesized)
gcactgtgggccggtgtggcgggcggtgggggcggcgggcctggcgcgggagcggccgaactacttaaggcttggcagccggcggagtccggccccgggcccttctccggggttctgtcc

SEQ ID NO: 522347 - DNA, 120 bp, Artificial Sequence
  ENSG00000165462_8 (sequence is synthesized)
tcctttcaccggaagcccggccccgccctgaagaccaatctcttctagctgccggcctctggaggctccgagcctgcccccagagacgtccctgcccctccaggacctgacagcccctcc

SEQ ID NO: 522348 - DNA, 120 bp, Artificial Sequence
  ENSG00000165462_9 (sequence is synthesized)
catcctggccacccgcctggaagtccccatccgtctccactccctactgtctcacccctcggtgtgtcctccccaactttggagaccaagtcagggccactctcgtcctcacccaccctc

SEQ ID NO: 522349 - DNA, 120 bp, Artificial Sequence
  ENSG00000165462_10 (sequence is synthesized)
taccagcagagcggagttctttataccgggacctcctccaggagaaccccggagctccttctagcttggccttctttggatgcggtatcacatgaggcctgtccctaacagtgccctcaa

SEQ ID NO: 522350 - DNA, 120 bp, Artificial Sequence
  ENSG00000165462_11 (sequence is synthesized)
agtgaaggtcctcaaggaggatcggcacagcccccttccctggctctgcagcggctgggtcaccccttacgctggtgatcaggaaagcccgctgccccacccctcgggcccacccgtaca

SEQ ID NO: 522351 - DNA, 120 bp, Artificial Sequence
  ENSG00000165462_12 (sequence is synthesized)
gaggctggtggtcgccgggataattaatgaccaccgccaattcatccctcacgtgtctcctctcttccctagcccgtctggcacagagggtggacctgttagaggagtggaggggctgcc

SEQ ID NO: 522352 - DNA, 120 bp, Artificial Sequence
  ENSG00000165462_13 (sequence is synthesized)
tggggaatgggacagagggattctctttccctaatttttttggttgtcctttttctttgaaaaacttgtaatttattgaagttttactcaatccaaataaaacttaatttattgaagaca

SEQ ID NO: 522353 - DNA, 120 bp, Artificial Sequence
  ENSG00000165471_0 (sequence is synthesized)
ggtaaatatgtgttcattaactgagattaaccttccctgagttttctcacaccaaggtgaggaccatgtccctgtttccatcactccctctccttctcctgagtatggtggcagcgtctt

SEQ ID NO: 522354 - DNA, 120 bp, Artificial Sequence
  ENSG00000165471_1 (sequence is synthesized)
actcagaaactgtgacctgtgaggatgcccaaaagacctgccctgcagtgattgcctgtagctctccaggcatcaacggcttcccaggcaaagatgggcgtgatggcaccaagggagaaa

SEQ ID NO: 522355 - DNA, 120 bp, Artificial Sequence
  ENSG00000165471_2 (sequence is synthesized)
agggggaaccaggccaagggctcagaggcttacagggcccccctggaaagttggggcctccaggaaatccagggccttctgggtcaccaggaccaaagggccaaaaaggagaccctggaa

SEQ ID NO: 522356 - DNA, 120 bp, Artificial Sequence
  ENSG00000165471_3 (sequence is synthesized)
aaagtccggatggtgatagtagcctggctgcctcagaaagaaaagctctgcaaacagaaatggcacgtatcaaaaagtggctcaccttctctctgggcaaacaagttgggaacaagttct

SEQ ID NO: 522357 - DNA, 120 bp, Artificial Sequence
  ENSG00000165471_4 (sequence is synthesized)
tcctgaccaatggtgaaataatgacctttgaaaaagtgaaggccttgtgtgtcaagttccaggcctctgtggccacccccaggaatgctgcagagaatggagccattcagaatctcatca

SEQ ID NO: 522358 - DNA, 120 bp, Artificial Sequence
  ENSG00000165471_5 (sequence is synthesized)
aggaggaagccttcctgggcatcactgatgagaagacagaagggcagtttgtggatctgacaggaaatagactgacctacacaaactggaacgagggtgaacccaacaatgctggttctg

SEQ ID NO: 522359 - DNA, 120 bp, Artificial Sequence
  ENSG00000165471_6 (sequence is synthesized)
atgaagattgtgtattgctactgaaaaatggccagtggaatgacgtcccctgctccacctcccatctggccgtctgtgagttccctatctgaagggtcatatcactcaggccctccttgt

SEQ ID NO: 522360 - DNA, 120 bp, Artificial Sequence
  ENSG00000165471_7 (sequence is synthesized)
ctttttactgcaacccacaggcccacagtatgcttgaaaagataaattatatcaatttcctcatatccagtattgttccttttgtgggcaatcactaaaaatgatcactaacagcaccaa

SEQ ID NO: 522361 - DNA, 120 bp, Artificial Sequence
  ENSG00000165471_8 (sequence is synthesized)
caaagcaataatagtagtagtagtagttagcagcagcagtagtagtcatgctaattatataatatttttaatatatactatgaggccctatcttttgcatcctacattaattatctagtt

SEQ ID NO: 522362 - DNA, 120 bp, Artificial Sequence
  ENSG00000165471_9 (sequence is synthesized)
taattaatctgtaatgctttcgatagtgttaacttgctgcagtatgaaaataagacggatttatttttccatttacaacaaacacctgtgctctgttgagccttcctttctgtttgggta

SEQ ID NO: 522363 - DNA, 120 bp, Artificial Sequence
  ENSG00000165471_10 (sequence is synthesized)
gagggctcccctaatgacatcaccacagtttaataccacagctttttaccaagtttcaggtattaagaaaatctattttgtaactttctctatgaactctgttttctttctaatgagata

SEQ ID NO: 522364 - DNA, 120 bp, Artificial Sequence
  ENSG00000165471_11 (sequence is synthesized)
ttaaaccatgtaaagaacataaataacaaatctcaagcaaacagcttcacaaattctcacacacatacatacctatatactcactttctagattaagatatgggacatttttgactccct

SEQ ID NO: 522365 - DNA, 120 bp, Artificial Sequence
  ENSG00000165471_12 (sequence is synthesized)
agaagccccgttataactcctcctagtactaactcctaggaaaatactattctgacctccatgactgcacagtaatttcgtctgtttataaacattgtatagttggaatcatattgtgtg

SEQ ID NO: 522366 - DNA, 120 bp, Artificial Sequence
  ENSG00000165471_13 (sequence is synthesized)
taatgttgtatgtcttgtttactcagaattaagtctgtgagattcattcatgtcatgtgtacaaaagtttcatccttttcattgccatgtagggttcccttatattaatattcctcagtt

SEQ ID NO: 522367 - DNA, 120 bp, Artificial Sequence
  ENSG00000165471_14 (sequence is synthesized)
tggtggacatggtgcactaatttcactacctatccaggagtggaactggtagaggatgaggaaagcatgtattcagctttagtagatattaccagttttcctaagtgattgtatgaattt

SEQ ID NO: 522368 - DNA, 120 bp, Artificial Sequence
  ENSG00000165471_15 (sequence is synthesized)
atgctcctaccggcaatgtgtggcagtcctagatgctctatgtgcttgtaaaaagtcaatgttttcagttctcttgattttcattattcctgtggatgtaaagtgatatttccccatggt

SEQ ID NO: 522369 - DNA, 120 bp, Artificial Sequence
  ENSG00000165471_16 (sequence is synthesized)
tttaatctgtatttccccaacatgtaataaggttgaacacttttttatatgcttattgggcacttgggtatcttcttttgtgaagtacccgttcacatttttgtattttgtttaaattag

SEQ ID NO: 522370 - DNA, 120 bp, Artificial Sequence
  ENSG00000165471_17 (sequence is synthesized)
ttagccaatatttttcttactgatttttaagttatttttacattctgaatatgtcctttttaatgtgtattacaaatattttgctagtttttgacttgctcctaatgttgaattttgatg

SEQ ID NO: 522371 - DNA, 120 bp, Artificial Sequence
  ENSG00000165471_18 (sequence is synthesized)
aacaaaatttcctaattttgagaaagtcttatttattcatattttctttcaaaattagtgctttttgtgtcatgtttaagaaatttttgcccatcccaaaatcataagatatttttcatg

SEQ ID NO: 522372 - DNA, 120 bp, Artificial Sequence
  ENSG00000165471_19 (sequence is synthesized)
attttgaaaccatgaagagatttttcatgattttgaaatcatgaagatatttttccatttttttctaatagttttattaataaacattctatctattcctggtagaatagatatccactt

SEQ ID NO: 522373 - DNA, 120 bp, Artificial Sequence
  ENSG00000165471_20 (sequence is synthesized)
gagacagcactatgtaggaaagaccatttttcctccactgaactagggtggtgcatttttgtaagttaggtaactgtatgtgtgtgtgtctgtttctgggctgtctattctagtctattt

SEQ ID NO: 522374 - DNA, 120 bp, Artificial Sequence
  ENSG00000165471_21 (sequence is synthesized)
gttgatgcttgtgtcaaacagtacactatcttaattattgtacatttatagttgtaactatagtccagctttgttcttcttaaagtcaagatttccatataaatattagaaacagcttct

SEQ ID NO: 522375 - DNA, 120 bp, Artificial Sequence
  ENSG00000165471_22 (sequence is synthesized)
caatttctacaaaatcctgatgaggtttctactgggaccacattgagtctatcaatcaacttatgcagaactggcaacttactactgaatctctaatcaatgttcatcatgtatcgcttc

SEQ ID NO: 522376 - DNA, 120 bp, Artificial Sequence
  ENSG00000165471_23 (sequence is synthesized)
atcgcttcatgtaactagaatttctttaacttaattgctatgttttgacatttttagtttaaaaaccttgtatatcttgttttggtggttttagtgattttaataatatattttaaatat

SEQ ID NO: 522377 - DNA, 120 bp, Artificial Sequence
  ENSG00000165471_24 (sequence is synthesized)
ttctattgttgtacacagaaatacagttaagttttgtgtgtagtcttacgatgtttagtaaactcaataagtttatttcttaaatctagtaatttgtagattcctctggattttgtatat

SEQ ID NO: 522378 - DNA, 120 bp, Artificial Sequence
  ENSG00000165471_25 (sequence is synthesized)
gcatagtcatgtaagctgaaaatatggcaatacttgcttcttcccaattgctttaccttttttcttaccttattgcactggttagcaaccccaatacagagaccaccagatcaggtatag

SEQ ID NO: 522379 - DNA, 120 bp, Artificial Sequence
  ENSG00000165471_26 (sequence is synthesized)
actcctgaaagacaatataatgaagtgctccagtcaggcctatctaaactggattcacagctctgtcacttaattgctacatgatctagagccagttactttgtgtttcagccatgtatt

SEQ ID NO: 522380 - DNA, 120 bp, Artificial Sequence
  ENSG00000165471_27 (sequence is synthesized)
tgcagctgagagaaaataatcattcttatttcatgaaaattgtggggatgatgaaataagttaacacctttaaagtgtgtagtaaagtatcaggatactatattttaggtcttaatacac

SEQ ID NO: 522381 - DNA, 120 bp, Artificial Sequence
  ENSG00000165471_28 (sequence is synthesized)
acagttatgccgctagatacatgctttttaatgagataatgtgatattatacataacacatatcgatttttaaaaattaaatcaaccttgctttgatggaataaactccatttagtcaca

SEQ ID NO: 522382 - DNA, 120 bp, Artificial Sequence
  ENSG00000165474_0 (sequence is synthesized)
atttaatcctatgacaaactaagttggttctgtcttcacctgttttggtgaggttgtgtaagagttggtgtttgctcaggaagagatttaagcatgcttgcttacccagactcagagaag

SEQ ID NO: 522383 - DNA, 120 bp, Artificial Sequence
  ENSG00000165474_1 (sequence is synthesized)
tctccctgttctgtcctagctagtgattcctgtgttgtgtgcattcgtcttttccagagcaaaccgcccagagtagaagatggattggggcacgctgcagacgatcctggggggtgtgaa

SEQ ID NO: 522384 - DNA, 120 bp, Artificial Sequence
  ENSG00000165474_2 (sequence is synthesized)
caaacactccaccagcattggaaagatctggctcaccgtcctcttcatttttcgcattatgatcctcgttgtggctgcaaaggaggtgtggggagatgagcaggccgactttgtctgcaa

SEQ ID NO: 522385 - DNA, 120 bp, Artificial Sequence
  ENSG00000165474_3 (sequence is synthesized)
caccctgcagccaggctgcaagaacgtgtgctacgatcactacttccccatctcccacatccggctatgggccctgcagctgatcttcgtgtccacgccagcgctcctagtggccatgca

SEQ ID NO: 522386 - DNA, 120 bp, Artificial Sequence
  ENSG00000165474_4 (sequence is synthesized)
cgtggcctaccggagacatgagaagaagaggaagttcatcaagggggagataaagagtgaatttaaggacatcgaggagatcaaaacccagaaggtccgcatcgaaggctccctgtggtg

SEQ ID NO: 522387 - DNA, 120 bp, Artificial Sequence
  ENSG00000165474_5 (sequence is synthesized)
gacctacacaagcagcatcttcttccgggtcatcttcgaagccgccttcatgtacgtcttctatgtcatgtacgacggcttctccatgcagcggctggtgaagtgcaacgcctggccttg

SEQ ID NO: 522388 - DNA, 120 bp, Artificial Sequence
  ENSG00000165474_6 (sequence is synthesized)
tcccaacactgtggactgctttgtgtcccggcccacggagaagactgtcttcacagtgttcatgattgcagtgtctggaatttgcatcctgctgaatgtcactgaattgtgttatttgct

SEQ ID NO: 522389 - DNA, 120 bp, Artificial Sequence
  ENSG00000165474_7 (sequence is synthesized)
aattagatattgttctgggaagtcaaaaaagccagtttaacgcattgcccagttgttagattaagaaatagacagcatgagagggatgaggcaacccgtgctcagctgtcaaggctcagt

SEQ ID NO: 522390 - DNA, 120 bp, Artificial Sequence
  ENSG00000165474_8 (sequence is synthesized)
cgctagcatttcccaacacaaagattctgaccttaaatgcaaccatttgaaacccctgtaggcctcaggtgaaactccagatgccacaatggagctctgctcccctaaagcctcaaaaca

SEQ ID NO: 522391 - DNA, 120 bp, Artificial Sequence
  ENSG00000165474_9 (sequence is synthesized)
taagttagttccactgagaccccaggctgttaggggttattggtgtaaggtactttcatattttaaacagaggatatcggcatttgtttctttctctgaggacaagagaaaaaagccagg

SEQ ID NO: 522392 - DNA, 120 bp, Artificial Sequence
  ENSG00000165474_10 (sequence is synthesized)
ttccacagaggacacagagaaggtttgggtgtcctcctggggttctttttgccaactttccccacgttaaaggtgaacattggttctttcatttgctttggaagttttaatctctaacag

SEQ ID NO: 522393 - DNA, 120 bp, Artificial Sequence
  ENSG00000165474_11 (sequence is synthesized)
tggacaaagttaccagtgccttaaactctgttacactttttggaagtgaaaactttgtagtatgataggttattttgatgtaaagatgttctggataccattatatgttccccctgtttc

SEQ ID NO: 522394 - DNA, 120 bp, Artificial Sequence
  ENSG00000165474_12 (sequence is synthesized)
agaggctcagattgtaatatgtaaatggtatgtcattcgctactatgatttaatttgaaatatggtcttttggttatgaatactttgcagcacagctgagaggctgtctgttgtattcat

SEQ ID NO: 522395 - DNA, 120 bp, Artificial Sequence
  ENSG00000165474_13 (sequence is synthesized)
tgtggtcatagcacctaacaacattgtagcctcaatcgagtgagacagactagaagttcctagtgatggcttatgatagcaaatggcctcatgtcaaatatttagatgtaattttgtgta

SEQ ID NO: 522396 - DNA, 120 bp, Artificial Sequence
  ENSG00000165474_14 (sequence is synthesized)
agaaatacagactggatgtaccaccaactactacctgtaatgacaggcctgtccaacacatctcccttttccatgactgtggtagccagcatcggaaagaacgctgatttaaagaggtcg

SEQ ID NO: 522397 - DNA, 120 bp, Artificial Sequence
  ENSG00000165474_15 (sequence is synthesized)
cttgggaattttattgacacagtaccatttaatggggaggacaaaatggggcaggggagggagaagtttctgtcgttaaaaacagatttggaaagactggactctaaagtctgttgatta

SEQ ID NO: 522398 - DNA, 120 bp, Artificial Sequence
  ENSG00000165474_16 (sequence is synthesized)
aagatgagctttgtctacttcaaaagtttgtttgcttaccccttcagcctccaattttttaagtgaaaatatagctaataacatgtgaaaagaatagaagctaaggtttagataaatatt

SEQ ID NO: 522399 - DNA, 120 bp, Artificial Sequence
  ENSG00000165474_17 (sequence is synthesized)
gagcagatctataggaagattgaacctgaatattgccattatgcttgacatggtttccaaaaaatggtactccacatatttcagtgagggtaagtattttcctgttgtcaagaatagcat

SEQ ID NO: 522400 - DNA, 120 bp, Artificial Sequence
  ENSG00000165474_18 (sequence is synthesized)
ttttcctgttgtcaagaatagcattgtaaaagcattttgtaataataaagaatagctttaatgatatgcttgtaactaaaataattttgtaatgtatcaaatacatttaaaacattaaaa

SEQ ID NO: 522401 - DNA, 80 bp, Artificial Sequence
  ENSG00000165474_19 (sequence is synthesized)
gttgcggccccgcagcgcccgcgcgctcctctccccgactcggagcccctcggcggcgcccggcccaggacccgcctagg

SEQ ID NO: 522402 - DNA, 120 bp, Artificial Sequence
  ENSG00000165475_0 (sequence is synthesized)
agagctcgcagctccgccggcgcctggtcccagcgcccgcggcgccgcgtccccggcccaaccatggcgtcctccgcggccggctgcgtggtgatcgttggcagtggagtcattgggcga

SEQ ID NO: 522403 - DNA, 120 bp, Artificial Sequence
  ENSG00000165475_1 (sequence is synthesized)
agctgggccatgctgtttgccagtggaggcttccaggtgaaactctatgacattgagcaacagcagataaggaacgccctggaaaacatcagaaaggagatgaagttgctggagcaggca

SEQ ID NO: 522404 - DNA, 120 bp, Artificial Sequence
  ENSG00000165475_2 (sequence is synthesized)
ggttctctgaaaggctccctgagtgtggaagagcagctgtcactcatcagtggttgtcccaatatccaagaagcagtagagggtgccatgcacattcaggaatgtgttccagaagatcta

SEQ ID NO: 522405 - DNA, 120 bp, Artificial Sequence
  ENSG00000165475_3 (sequence is synthesized)
gaactgaagaagaagatttttgctcagttagattccatcattgatgatcgagtgatcttaagcagttccacttcttgtctcatgccttccaagttgtttgctggcttggtccatgtgaag

SEQ ID NO: 522406 - DNA, 120 bp, Artificial Sequence
  ENSG00000165475_4 (sequence is synthesized)
caatgcatcgtggctcatcctgtgaatccgccatactacatcccgctggttgagctggtcccccacccggagacggcccctacgacagtggacagaacccacgccctgatgaagaagatt

SEQ ID NO: 522407 - DNA, 120 bp, Artificial Sequence
  ENSG00000165475_5 (sequence is synthesized)
ggacagtgccccatgcgagtccagaaggaggtggccggcttcgttctgaaccgcctgcaatatgcaatcatcagcgaggcctggcggctagtggaggaaggaatcgtgtctcctagtgac

SEQ ID NO: 522408 - DNA, 120 bp, Artificial Sequence
  ENSG00000165475_6 (sequence is synthesized)
tcattggacccctggaaaccatgcatctcaatgcagaaggtatgttaagctactgcgacagatacagcgaaggcataaaacatgtcctacagacttttggacccattccagagttttcca

SEQ ID NO: 522409 - DNA, 120 bp, Artificial Sequence
  ENSG00000165475_7 (sequence is synthesized)
gggccactgctgagaaggttaaccaggacatgtgcatgaaggtccctgatgacccggagcacttagctgccaggaggcagtggagggacgagtgcctcatgagactcgccaagttgaaga

SEQ ID NO: 522410 - DNA, 120 bp, Artificial Sequence
  ENSG00000165475_8 (sequence is synthesized)
gtcaagtgcagccccagtgaatttcttgtaatgcagcttccactcctctcattggaggccctatttgggaacactgcaagcccttaatcagccctctgtgacataggtagcagcccacgg

SEQ ID NO: 522411 - DNA, 120 bp, Artificial Sequence
  ENSG00000165475_9 (sequence is synthesized)
agatcctaagctggctgtcttgtgtgcagcctgagtggggtggtgcaggccggtagtctgcccgtcactttggatcatagccctgggcctggcggcacagcagcacttgcgttctcgggg

SEQ ID NO: 522412 - DNA, 120 bp, Artificial Sequence
  ENSG00000165475_10 (sequence is synthesized)
ctgtcgatttcctgccacctgggcagataacctggagattttcaccttttcttttcagcttgattgcatttgactatattttacagccagtgattgtagtttcatgttaatatgtggcaa

SEQ ID NO: 522413 - DNA, 120 bp, Artificial Sequence
  ENSG00000165475_11 (sequence is synthesized)
aatatttttgtaattattttctaatccctttctgagtactctggggccctgcatttatgaggcacctaccttcattttgctaacgcttattctgaataaaagtttttgattccttaaaga

SEQ ID NO: 522414 - DNA, 120 bp, Artificial Sequence
  ENSG00000165475_12 (sequence is synthesized)
tgcagaaggcggactgaccagctgctgagcctttaagggtttgaaagatgtgggaaatgagtcagggtcgcagcagtagcccagcctatgtcctccatggcgcccaggactagaaacgcc

SEQ ID NO: 522415 - DNA, 120 bp, Artificial Sequence
  ENSG00000165475_13 (sequence is synthesized)
tcctcctcctcttccaggatcccggccctggcttctgacttgacttgctaagcacaggccggcaccagcccgttcgcctcccggcagcagggaggggaggaatgtgagggagagtatgtt

SEQ ID NO: 522416 - DNA, 120 bp, Artificial Sequence
  ENSG00000165475_14 (sequence is synthesized)
agatgccaagttgccatattttgggataacacgtcttgaacctcatcattttcaaagtggttcatttgaggaatgaaacaaacatgaaatgctttgcttggggcctgagtcgagtggtca

SEQ ID NO: 522417 - DNA, 120 bp, Artificial Sequence
  ENSG00000165475_15 (sequence is synthesized)
gtgtgcccgtcctctctccctccctcccttcctttctccctccttcttccctccctctcaaagttgagcaggacagtgaaagttgttccttgggcagcctggaagctgggaaagtcagag

SEQ ID NO: 522418 - DNA, 120 bp, Artificial Sequence
  ENSG00000165475_16 (sequence is synthesized)
gctgcttgcttcttcttgctctattctggagaccaagggccagctttagaaccaaaataaaatgcagcgattcactgtctgcctgagaggttcttcttacagtcacctgataccaggaca

SEQ ID NO: 522419 - DNA, 120 bp, Artificial Sequence
  ENSG00000165475_17 (sequence is synthesized)
cgatgacaggcttctctccttcctgccctttcatagcattagacataataacctatgtggcccactgcattttcccacagaggcagcttttacccctcagtgttataatttttcaaaagg

SEQ ID NO: 522420 - DNA, 120 bp, Artificial Sequence
  ENSG00000165475_18 (sequence is synthesized)
aaaaaaattatattttgtgtaaacttctgtctcctgaaggaacctaattgtttcaagagcttgaggaagaagtgatgaatagacttgttagagtaaatgcttgtcttacctataaagagg

SEQ ID NO: 522421 - DNA, 120 bp, Artificial Sequence
  ENSG00000165475_19 (sequence is synthesized)
cggagcccagagctcgcagctccgccggcgcctggtcccagcgcccgcggcgccgcgtccccggcccaaccatggcgtcctccgcggccggctgcgtggtgatcgttggcaggaagtctg

SEQ ID NO: 522422 - DNA, 120 bp, Artificial Sequence
  ENSG00000165475_20 (sequence is synthesized)
gaagtctgaaacagcagttggagtgtagtggttaagaggaaggactcaggagtcagattgcttggcttcatctcatagatccataacttatcacccttgtggacttaattcctccatgcc

SEQ ID NO: 522423 - DNA, 120 bp, Artificial Sequence
  ENSG00000165475_21 (sequence is synthesized)
tcagtttatcacttatgtaggcttaattcctccatgcctcagtttccctacatataaaatggaaatactaataacacctaccttgtagggttgttgtaaagattaacatagtggagtcat

SEQ ID NO: 522424 - DNA, 120 bp, Artificial Sequence
  ENSG00000165475_22 (sequence is synthesized)
cctcgtagggctgaaggtggcagagtactctacttctcgctgttgcgtttctttatttgacactcacctaagataaaaccttttgtgactcctgactcttaatttttctcctgtttctca

SEQ ID NO: 522425 - DNA, 120 bp, Artificial Sequence
  ENSG00000165475_23 (sequence is synthesized)
gttgacagtggacttatgcccaaactctagctgaggagtggaagaacttgaatagaacctcatccaaattcctgggtagcaagtctgtgttcctgctggtgatagtagtagtaaagttat

SEQ ID NO: 522426 - DNA, 120 bp, Artificial Sequence
  ENSG00000165475_24 (sequence is synthesized)
caggaccaagtttgggggaaaagtagagcaaaacaaaatagaagatcaaaagctgggaattagtaaaaaagaagtggatgaggaagaatggtatgaagaaaaatgagaaaagcaaatgaa

SEQ ID NO: 522427 - DNA, 120 bp, Artificial Sequence
  ENSG00000165475_25 (sequence is synthesized)
aatgaggccatgcaaaaaatacatgaatcagaaaattaaatctaggaatgggatgattatagagaaggaaagatggttcggtgtagctggtgatcagtagaggagatagtcacggaggag

SEQ ID NO: 522428 - DNA, 120 bp, Artificial Sequence
  ENSG00000165475_26 (sequence is synthesized)
gatttatccatcaaatatcgtgtgcctccaccacacaagtttctctcctgccttcctcttcttctgggactgtccgaaggaccagagaaggaatcgtgtctcctagtgacctggaccttg

SEQ ID NO: 522429 - DNA, 120 bp, Artificial Sequence
  ENSG00000165475_27 (sequence is synthesized)
gcgtgagccaccgcacccggcctacacccagtacgggcactcgagtttgctccactggccactccacccccgttccaccaaagagactggatcttggacccccaaatcctaacatcccga

SEQ ID NO: 522430 - DNA, 120 bp, Artificial Sequence
  ENSG00000165475_28 (sequence is synthesized)
agagctcgcagctccgccggcgcctggtcccagcgcccgcggcgccgcgtccccggcccaaccatggcgtcctccgcggccggctgcgtggtgatcgttggcagaattaaaactctgtac

SEQ ID NO: 522431 - DNA, 120 bp, Artificial Sequence
  ENSG00000165475_29 (sequence is synthesized)
gggatgtcatttcaagtctacatttttaaggcattagcataatgaaggacattgtgttgtgacaatagacttttggctggacagtagctaagtttgttgcctgtaaattctttcccatga

SEQ ID NO: 522432 - DNA, 120 bp, Artificial Sequence
  ENSG00000165475_30 (sequence is synthesized)
gggcagggtatgtggaggtgcctgggaatgaatctgcaaccctcggcaggttctcagcctgctggtgtgagttggtggtgatgagcttcggaaattgctgaccttgggttctgcctgtcc

SEQ ID NO: 522433 - DNA, 120 bp, Artificial Sequence
  ENSG00000165475_31 (sequence is synthesized)
ttcggaatgatgtcatccctgtgctggactgctgtccttagggcctgggccgcagagattgagttcttggtctcttgatttgtcagggtgggtgtggtctggggcatctggatggggccc

SEQ ID NO: 522434 - DNA, 120 bp, Artificial Sequence
  ENSG00000165475_32 (sequence is synthesized)
tgagattccagaacttcatcgttgagctttacttcagacatgtctgccaactgttaggagacattgttttagttaatgaagtgtatctcaaagatcatgtagtaaaattgacagatgagg

SEQ ID NO: 522435 - DNA, 72 bp, Artificial Sequence
  ENSG00000165475_33 (sequence is synthesized)
ggatggacttgatctcctgaaggagatgaagttgctggagcaggcaggttctctgaaaggctccctgagtgt

SEQ ID NO: 522436 - DNA, 120 bp, Artificial Sequence
  ENSG00000165476_0 (sequence is synthesized)
ggggagcgcgaggagccggcgaagcgcgcggcctgccgttggcggcctggtccgcagcgccctgcgcccacccgccccggacgtggggcccaagcccccgtgaagatggtgtcctggatg

SEQ ID NO: 522437 - DNA, 120 bp, Artificial Sequence
  ENSG00000165476_1 (sequence is synthesized)
acgtggggcccaagcccccgtgaagatggtgtcctggatgatctccagagccgtggtgctggtgtttggaatgctttatcctgcatattattcatacaaagctgtgaaaacaaaaaacgt

SEQ ID NO: 522438 - DNA, 120 bp, Artificial Sequence
  ENSG00000165476_2 (sequence is synthesized)
gaaggaatatgttcgatggatgatgtactggattgtttttgctctctatactgtgattgaaacagtagccgatcaaacagttgcttggtttcccctgtactatgagctgaagattgcttt

SEQ ID NO: 522439 - DNA, 120 bp, Artificial Sequence
  ENSG00000165476_3 (sequence is synthesized)
tgtcatatggctgctttctccctataccaaaggagcaagtttaatatatagaaaattccttcatccacttctttcttcaaaggaaagggagattgatgattatattgtacaagcaaagga

SEQ ID NO: 522440 - DNA, 120 bp, Artificial Sequence
  ENSG00000165476_4 (sequence is synthesized)
acgaggctatgaaaccatggtaaactttggacggcaaggtttaaaccttgcagctactgctgctgttactgcagcagtaaagagccaaggagcaataactgaacgtttaagaagcttcag

SEQ ID NO: 522441 - DNA, 120 bp, Artificial Sequence
  ENSG00000165476_5 (sequence is synthesized)
tatgcatgatttaacaactatccaaggtgatgagcctgtgggacaaagaccataccaacctctaccagaagcaaaaaagaaaagtaaaccagcccccagtgaatcagcaggttatggaat

SEQ ID NO: 522442 - DNA, 120 bp, Artificial Sequence
  ENSG00000165476_6 (sequence is synthesized)
tccactgaaagacggagatgagaaaacagatgaagaagcagaggggccatattcagataatgagatgttaacacacaaagggcttcgaagatcgcaaagcatgaaatctgtgaaaaccac

SEQ ID NO: 522443 - DNA, 120 bp, Artificial Sequence
  ENSG00000165476_7 (sequence is synthesized)
caaaggccgcaaagaggtgcggtacgggtcactaaaatacaaagtgaagaaacgaccacaagtgtatttttagtcatctacacgtcaaatatcccaagacagattatgctaaatacatcg

SEQ ID NO: 522444 - DNA, 120 bp, Artificial Sequence
  ENSG00000165476_8 (sequence is synthesized)
acttcatcttctaacatgatatattcaggatttacacattaaaatgattatttaaattgtggcagtgatggggtttactttcatgaatttaaattgtttttatttctgtaacaattgctt

SEQ ID NO: 522445 - DNA, 120 bp, Artificial Sequence
  ENSG00000165476_9 (sequence is synthesized)
ccaaatattgactactaaaggcagttctgcaagatgtactaaatatgtatattagaaattatagaaaatcatgttgtccgttttcaaattcatcaacagcctagagtgcctgagatataa

SEQ ID NO: 522446 - DNA, 120 bp, Artificial Sequence
  ENSG00000165476_10 (sequence is synthesized)
gatgaaacacaaatccacagtatacttgaaaggagcctttttacggttcaggataaatcagcctttgtgatgtactgtgtttacctccttttgtgttgtatctggtaattaaataggcct

SEQ ID NO: 522447 - DNA, 120 bp, Artificial Sequence
  ENSG00000165476_11 (sequence is synthesized)
cagattcagcagtgacataacaaggacataatgtaagataataaagtaggttttatatattctttaaatttttacttatataatactttctagtttttccaccatcagctgaaagttttt

SEQ ID NO: 522448 - DNA, 120 bp, Artificial Sequence
  ENSG00000165476_12 (sequence is synthesized)
gaaacaaatatttgaaaaccaggtatccacacatagcacttttattcctgactagttttgcacacttgaaaattgtttacttattttacaactgttttactgatgctatctttattgttt

SEQ ID NO: 522449 - DNA, 120 bp, Artificial Sequence
  ENSG00000165476_13 (sequence is synthesized)
ttgccgtattctgacatgtcaaatctatgccttgaattatatcatctcttttcctgtgggtttcatttgttaaattcattggattttaataatataaaagtatagctaattgttcagttt

SEQ ID NO: 522450 - DNA, 120 bp, Artificial Sequence
  ENSG00000165476_14 (sequence is synthesized)
taactatttttaattatcttcttaacaaataagaagttgctttaaacattaaccaattttctatatttagctatacagagtaattgaacttaacatgtttttgtcaacaccaattacatt

SEQ ID NO: 522451 - DNA, 120 bp, Artificial Sequence
  ENSG00000165476_15 (sequence is synthesized)
ttcagcttttaaaaatggtagcttttgtgaaatagaatcagtgaccagtatagcacttagatcccttctaactcatataatttttctcagccaatccattcacaagcttggcattgacat

SEQ ID NO: 522452 - DNA, 120 bp, Artificial Sequence
  ENSG00000165476_16 (sequence is synthesized)
gtgctgctagtttataaactggcattgacgaaaatcatttgaatctcttctggctgagataatttgccaatgcaaaatacagttgtcattaatcctgcacattagaaattattagaaaca

SEQ ID NO: 522453 - DNA, 120 bp, Artificial Sequence
  ENSG00000165476_17 (sequence is synthesized)
tattactttttaactttaaatctcaaagagattttgagttattgaattcttaaggctttcttagcttgaactgataactatgcattatgaaccctaagtcaatatatttttggtggtttt

SEQ ID NO: 522454 - DNA, 120 bp, Artificial Sequence
  ENSG00000165476_18 (sequence is synthesized)
agtgatcagtaatcaaatttgtacttattatgcttgttcaggtaatttacttgactgttctatttgtttgtccaaaagataaaatgatgagagagattcgagaggtctttgatctgtctc

SEQ ID NO: 522455 - DNA, 120 bp, Artificial Sequence
  ENSG00000165476_19 (sequence is synthesized)
ccttttaagaaatgaagccagctggtaatgtatattcaggacttcctcagagtattggccaagaacataatgtttacacaggagtaccttggtataatgcatacattgtctcatgatact

SEQ ID NO: 522456 - DNA, 120 bp, Artificial Sequence
  ENSG00000165476_20 (sequence is synthesized)
agtcataaaatattttatggattatttcacattcttcatatataacaagtaaaattaattcagttttcttctcccaacgtttaattctgaataactctatctactttaccctaattttta

SEQ ID NO: 522457 - DNA, 120 bp, Artificial Sequence
  ENSG00000165476_21 (sequence is synthesized)
ctggaaggactctaatttctattccaaatttctatgaattctaattgtaaattatcggaacagagttttatttatatgacctggtactagacttcttaatataactgttacactgtcctt

SEQ ID NO: 522458 - DNA, 120 bp, Artificial Sequence
  ENSG00000165476_22 (sequence is synthesized)
gtctttcctactcaaagacagtatcatctgaagttgcctaataaggtcatgtgagtcaagaactttatctgtgggagctgatttgcaccattttaccttttttttttttttttttttgag

SEQ ID NO: 522459 - DNA, 70 bp, Artificial Sequence
  ENSG00000165476_23 (sequence is synthesized)
cgattctcctgcctcggcctcccgagtaactgggtctacaggcccgtgctaccacccaggatggtctcca

SEQ ID NO: 522460 - DNA, 120 bp, Artificial Sequence
  ENSG00000165476_24 (sequence is synthesized)
aggcgtgagccaccgcacccagccaccattttatctctctaaagtctggtcccagtattaaacctattctttagtaaactcatattactgttctaaattgaagaaattatttattactct

SEQ ID NO: 522461 - DNA, 120 bp, Artificial Sequence
  ENSG00000165476_25 (sequence is synthesized)
atttattactctgtacttctagactcaaaattctttatcaaagatagtctcaaagaggtagtacaagtcctgtttaactgcactttttcacattcacagtgcttcctctgatatctttcc

SEQ ID NO: 522462 - DNA, 120 bp, Artificial Sequence
  ENSG00000165476_26 (sequence is synthesized)
ttacatcattatacactgttgatatcattttactcttctttctcttctacatttcttaaattttggttcttttcctgtacatgtgttttagcggggcccttttctttgaactttgtctaa

SEQ ID NO: 522463 - DNA, 120 bp, Artificial Sequence
  ENSG00000165476_27 (sequence is synthesized)
ttagcctgtacatttttgtttcttttaaggtagaacagatctttttttgtttctccttttaagtctactggttttaaaagaggtaaatgtatccatagaccacagtgccttgctttttcc

SEQ ID NO: 522464 - DNA, 120 bp, Artificial Sequence
  ENSG00000165476_28 (sequence is synthesized)
tctgccagcacatggagcacgggattagatgcacaaacctatttagggaactattttggtagatgtttgagtttatacagaaattgcagctggtattttattttgctgtacatttactca

SEQ ID NO: 522465 - DNA, 120 bp, Artificial Sequence
  ENSG00000165476_29 (sequence is synthesized)
acttgtccattagtatttaactatttccagagtttgtttaggagtaagaattgacccattcgttagtttaccatattttttcctggtataaaaaggagccagaaataagccttattgcta

SEQ ID NO: 522466 - DNA, 120 bp, Artificial Sequence
  ENSG00000165476_30 (sequence is synthesized)
ggtataaaaaggagccagaaataagccttattgctaaataattaattatgtaagcccacctaggtcctgcataagatccccctcacatacttcacaatatatatgtgtgtgtgtgtgtgt

SEQ ID NO: 522467 - DNA, 120 bp, Artificial Sequence
  ENSG00000165476_31 (sequence is synthesized)
aaaattatactgccaaaattactgattataaatacttgactacactgattgatgggacaaaatgattaaagtattttcagggatcttattccatatgtcaccaccaaagatttctacagt

SEQ ID NO: 522468 - DNA, 120 bp, Artificial Sequence
  ENSG00000165476_32 (sequence is synthesized)
gttataaagtatataaatattccaaatttctgtggttaaatatttttttcttttttttccttttttagaataacacagtctgtgctttccaaaaatgcttgaacttttatgttgttaaga

SEQ ID NO: 522469 - DNA, 120 bp, Artificial Sequence
  ENSG00000165476_33 (sequence is synthesized)
aatatataatgatatcttacattaagcatgagtctaatttgtattaattgggatggactaaattttcatttgattatcaggaaaattaaggagttatatatttaaaagcaattttctgtg

SEQ ID NO: 522470 - DNA, 120 bp, Artificial Sequence
  ENSG00000165476_34 (sequence is synthesized)
ttttcttctttgtaagttgactcatttgtgaagcaattaggcaaattttgagaagatcattgttattgtggtttgcagtatatatttcttagtaaatatcacttaagattaaatttttca

SEQ ID NO: 522471 - DNA, 120 bp, Artificial Sequence
  ENSG00000165476_35 (sequence is synthesized)
gaaagaaaattatagcttttttcccaaaatatttttaagatttaatctttttgtagtatgctacagatttaattatattaactcttttttaagacattgaccatgacttaacattttgcc

SEQ ID NO: 522472 - DNA, 120 bp, Artificial Sequence
  ENSG00000165476_36 (sequence is synthesized)
ttctaacaccttttaaatctatgtactttaatagttaagagaaaataagtttgcagatttttaataatctgtttgtaaaaggctatctctaagcctagtatgtgggtaattttacaggtg

SEQ ID NO: 522473 - DNA, 120 bp, Artificial Sequence
  ENSG00000165476_37 (sequence is synthesized)
tgttttttgataactttaatataaaataaactcattttatttgtggcaattcgcgtttctttttttatgccagagtacatatgttggattccatgaattggtattacttattattatgtg

SEQ ID NO: 522474 - DNA, 120 bp, Artificial Sequence
  ENSG00000165476_38 (sequence is synthesized)
ttgattaaatatatgcacacacttaggattacagatcacagagcaaattatgaaaatcataaacattctggtatggtcatccataggattatgaaaaagaaatactgaattgttaaattt

SEQ ID NO: 522475 - DNA, 120 bp, Artificial Sequence
  ENSG00000165476_39 (sequence is synthesized)
ggatgttagaaaggaaagataggaaaaacaatgagtacagaaatcctcaccatcaatttggatgggttagctgtctcaggcataaaatgtaacacaaaattcagatttatgtatcctgga

SEQ ID NO: 522476 - DNA, 120 bp, Artificial Sequence
  ENSG00000165476_40 (sequence is synthesized)
aatgttctggggttccatctgttttaaagttagacgtctgtctgcctcacatttaagctttagagagaaatcctatgttttaagaagtttctttgtgttacttcattatgacacataatg

SEQ ID NO: 522477 - DNA, 120 bp, Artificial Sequence
  ENSG00000165476_41 (sequence is synthesized)
cgtgttaaggtctttctagatagcattttaaatggaattattttcattttcattatgaggtatatacttgtaatgatctaaagaggttagaaatataaataaaaattcaaaagaacacaa

SEQ ID NO: 522478 - DNA, 120 bp, Artificial Sequence
  ENSG00000165478_0 (sequence is synthesized)
atgctaattgtctgcactagagctggagaacgccacccaaaatgaagagagaaaggggagccctgtccagagcctccagggccctgcgccttgctccttttgtctaccttcttctgatcc

SEQ ID NO: 522479 - DNA, 120 bp, Artificial Sequence
  ENSG00000165478_1 (sequence is synthesized)
agacagaccccctggagggggtgaacatcaccagccccgtgcgcctgatccatggcaccgtggggaagtcggctctgctttctgtgcagtacagcagtaccagcagcgacaggcctgtag

SEQ ID NO: 522480 - DNA, 120 bp, Artificial Sequence
  ENSG00000165478_2 (sequence is synthesized)
tgaagtggcagctgaagcgggacaagccagtgaccgtggtgcagtccattggcacagaggtcatcggcaccctgcggcctgactatcgagaccgtatccgactctttgaaaatggctccc

SEQ ID NO: 522481 - DNA, 120 bp, Artificial Sequence
  ENSG00000165478_3 (sequence is synthesized)
tgcttctcagcgacctgcagctggccgatgagggcacctatgaggtcgagatctccatcaccgacgacaccttcactggggagaagaccatcaaccttactgtagatgtgcccatttcga

SEQ ID NO: 522482 - DNA, 120 bp, Artificial Sequence
  ENSG00000165478_4 (sequence is synthesized)
ggccacaggtgttggtggcttcaaccactgtgctggagctcagcgaggccttcaccttgaactgctcacatgagaatggcaccaagcccagctacacctggctgaaggatggcaagcccc

SEQ ID NO: 522483 - DNA, 120 bp, Artificial Sequence
  ENSG00000165478_5 (sequence is synthesized)
tcctcaatgactcgagaatgctcctgtcccccgaccaaaaggtgctcaccatcacccgcgtgctcatggaggatgacgacctgtacagctgcatggtggagaaccccatcagccagggcc

SEQ ID NO: 522484 - DNA, 120 bp, Artificial Sequence
  ENSG00000165478_6 (sequence is synthesized)
gcagcctgcctgtcaagatcaccgtatacagaagaagctccctttacatcatcttgtctacaggaggcatcttcctccttgtgaccttggtgacagtctgtgcctgctggaaaccctcca

SEQ ID NO: 522485 - DNA, 120 bp, Artificial Sequence
  ENSG00000165478_7 (sequence is synthesized)
aaaggaaacagaagaagctagaaaagcaaaactccctggaatacatggatcagaatgatgaccgcctgaaaccagaagcagacaccctccctcgaagtggtgagcaggaacggaagaacc

SEQ ID NO: 522486 - DNA, 120 bp, Artificial Sequence
  ENSG00000165478_8 (sequence is synthesized)
ccatggcactctatatcctgaaggacaaggactccccggagaccgaggagaacccggccccggagcctcgaagcgcgacggagcccggcccgcccggctactccgtgtctcccgccgtgc

SEQ ID NO: 522487 - DNA, 80 bp, Artificial Sequence
  ENSG00000165478_9 (sequence is synthesized)
ctacccgcgctccccagcgcgctccccagccaccggccggacacactcgtcgccgcccagggccccgagctcgcccggcc

SEQ ID NO: 522488 - DNA, 120 bp, Artificial Sequence
  ENSG00000165478_10 (sequence is synthesized)
gctcgcgcagcgcctcgcgcacactgcggactgcgggcgtgcacataatccgcgagcaagacgaggccggcccggtggagatcagcgcctgagccgcctcgggatcccctgagaggcgcc

SEQ ID NO: 522489 - DNA, 120 bp, Artificial Sequence
  ENSG00000165478_11 (sequence is synthesized)
cgcggtctgcggccagtggcccgggggaaagctggggctgggaagcccgggcgcggcgcgctggggacgaggggaggtcccgggggggcgctggtgtctcgggtgtgaacgtgtatgagc

SEQ ID NO: 522490 - DNA, 120 bp, Artificial Sequence
  ENSG00000165478_12 (sequence is synthesized)
atgcgcagacggaggcgggtgcgcggaggcggcagtgttgatatggtgaaaccgggtcgcatttgcttccggtttactggctgtgtcctcacttggtataggttgtgccctcttaggacc

SEQ ID NO: 522491 - DNA, 90 bp, Artificial Sequence
  ENSG00000165478_13 (sequence is synthesized)
taacccccgtgactatcctgtgctcttcctagggagctgtgttgtttcccacccaccacccttccctctgaacaaatgcctgagtgctgg

SEQ ID NO: 522492 - DNA, 120 bp, Artificial Sequence
  ENSG00000165478_14 (sequence is synthesized)
tccacagctgcactaagctaaggagaagccagatgccggttactgggtgtgcaggggctgttctgagctggggggatcattgtgaaggccttcttccctgggcacctggtacctggggac

SEQ ID NO: 522493 - DNA, 120 bp, Artificial Sequence
  ENSG00000165478_15 (sequence is synthesized)
ctacaaggtggtgagggaagggtacgagtacattccttttccctctgacctgggcgctagcaagggcaaagaacccgagcctgccagcttggcctcctcccacagcctccctcggaggca

SEQ ID NO: 522494 - DNA, 120 bp, Artificial Sequence
  ENSG00000165478_16 (sequence is synthesized)
tgccatgccaagcactctttctgtctctgttcatgaataaaagagatggatgggcttattcttatagagaagtgaatttcacttactcccctggcccgaaaactagaccaaatgaggaac

SEQ ID NO: 522495 - DNA, 120 bp, Artificial Sequence
  ENSG00000165478_17 (sequence is synthesized)
tgttttagctcatcaaactcatatattcctcctggcttccttacaaaacaagcctttcaaacaatcattgtcctcaggaaagttgttgagcttcctccagctgtgagaataagtcctaat

SEQ ID NO: 522496 - DNA, 120 bp, Artificial Sequence
  ENSG00000165478_18 (sequence is synthesized)
ctccagagaaatggtggggggaggaggaggcttattgcttcccagcatttggggggaacatgatccaacccctggcctcctgccacccatctgccctgctcccacatgctcaggtcccag

SEQ ID NO: 522497 - DNA, 120 bp, Artificial Sequence
  ENSG00000165478_19 (sequence is synthesized)
ggcacagaaaaagggcagactccctaatcacactaacatcaaaataaagaggctgggccgctgtgtagccaggacatgcccatgccaccgcctattgaacagttcataggagtggcagta

SEQ ID NO: 522498 - DNA, 120 bp, Artificial Sequence
  ENSG00000165478_20 (sequence is synthesized)
atctactgtgtgaggagagagggcaattaaaaagctgaaagagaaggaggccctctgtgtattccattccctcctccttaatgcctccaagggtccttgcatccctagtctcctaaactc

SEQ ID NO: 522499 - DNA, 120 bp, Artificial Sequence
  ENSG00000165478_21 (sequence is synthesized)
cagctctgattcgccatcaacccatggagcaattccaaggccccagttacccatcacctccacaccaggtcaagttttgtctcagccccaaaggcactgacatttctagtttgccccctc

SEQ ID NO: 522500 - DNA, 120 bp, Artificial Sequence
  ENSG00000165478_22 (sequence is synthesized)
tgccctgaaccccacagcatgcctgtctcagctccctgtccctcggcacttccccaggctcatttgagcaggtgtgccttcgcagctcccctaaacttcccaggtgcctcatccataatg

SEQ ID NO: 522501 - DNA, 120 bp, Artificial Sequence
  ENSG00000165478_23 (sequence is synthesized)
agataatgcatgtaggggaaaagtttctcaagaaggtggaagaggcagcaggacttggataaggagtacctgctggtcagccttgagatgcacaggtgaaggttagggtgagatgagaac

SEQ ID NO: 522502 - DNA, 120 bp, Artificial Sequence
  ENSG00000165478_24 (sequence is synthesized)
atgccataccctggtgctgaatccctgaggggccagcttgccaggcttaagccaaatctgccttaaattgggggtggggaggggtaagtaaggaagtggggtttgtttttgtgttgtttt

SEQ ID NO: 522503 - DNA, 120 bp, Artificial Sequence
  ENSG00000165478_25 (sequence is synthesized)
catcttcatctttgtattactagcatccagcagagtgcctagcacatactggatgctcaataaacttttgatgaaatgaaatgacaactttattccacataaacaagggtaacaaaacaa

SEQ ID NO: 522504 - DNA, 120 bp, Artificial Sequence
  ENSG00000165478_26 (sequence is synthesized)
tatacagtgagtttccccgcaggctttcctttagtactcaaagccccaagaggcaggtgaccatgagggactgaggacatcccaaagaaatgtcactggggggaggggaacagagatggg

SEQ ID NO: 522505 - DNA, 120 bp, Artificial Sequence
  ENSG00000165478_27 (sequence is synthesized)
gttaggtggagacagggtaggttgggacacaaagtccagttaagtgtgtgtcccagctcagtgctctgagcccagatcctcatctccctgggtagtgaggctcagcacagacaagcaacc

SEQ ID NO: 522506 - DNA, 120 bp, Artificial Sequence
  ENSG00000165478_28 (sequence is synthesized)
aactgctgggctgccggtgccccccatgttggaacctgagttggagattatctcctaagcagatacctgcttccaaactggggatgtagggcttggaaactagaaaatgccaggtctgag

SEQ ID NO: 522507 - DNA, 120 bp, Artificial Sequence
  ENSG00000165478_29 (sequence is synthesized)
ggagaggaaagaacaagtccagcaatacacagagctctgtgtattcagagggaagttggcagggttgtgttcgggcagagaaactccgagtggtacaaaggggacgtgcccagagtggag

SEQ ID NO: 522508 - DNA, 120 bp, Artificial Sequence
  ENSG00000165478_30 (sequence is synthesized)
gtagatggtaaagcgctctggcagggaaagaggcaagactggcaggtgggactagggaaaggtctgcccagcgcaccagctagactgagggaaaaccaacccaaaaggcacttgggagct

SEQ ID NO: 522509 - DNA, 120 bp, Artificial Sequence
  ENSG00000165480_0 (sequence is synthesized)
aaactagtggcgggaggctgtgagctgagcggtggggtctgcgtacgcctggagtccttccccgctgtgctcagcatggaccctatccggagcttctgcgggaagctgcggtctctggcc

SEQ ID NO: 522510 - DNA, 120 bp, Artificial Sequence
  ENSG00000165480_1 (sequence is synthesized)
agcacgctggactgcgagacggcccggctgcagcgagcgctggacggagaggaaagcgactttgaagattatccaatgagaattttatatgaccttcattcagaagttcagactctaaag

SEQ ID NO: 522511 - DNA, 120 bp, Artificial Sequence
  ENSG00000165480_2 (sequence is synthesized)
gatgatgttaatattcttcttgataaagcaagattggaaaatcaagaaggcattgatttcataaaggcaacaaaagtactaatggaaaaaaattcaatggatattatgaaaataagagag

SEQ ID NO: 522512 - DNA, 120 bp, Artificial Sequence
  ENSG00000165480_3 (sequence is synthesized)
tatttccagaagtatggatatagtccacgtgtcaagaaaaattcagtacacgagcaagaagccattaactctgacccagagttgtctaattgtgaaaattttcagaagactgatgtgaaa

SEQ ID NO: 522513 - DNA, 120 bp, Artificial Sequence
  ENSG00000165480_4 (sequence is synthesized)
gatgatctgtctgatcctcctgttgcaagcagttgtatttctgagaagtctccacgtagtccacaactttcagattttggacttgagcggtacatcgtatcccaagttctaccaaaccct

SEQ ID NO: 522514 - DNA, 120 bp, Artificial Sequence
  ENSG00000165480_5 (sequence is synthesized)
ccacaggcagtgaacaactataaggaagagcccgtaattgtaaccccacctaccaaacaatcactagtaaaagtactaaaaactccaaaatgtgcactaaaaatggatgattttgagtgt

SEQ ID NO: 522515 - DNA, 120 bp, Artificial Sequence
  ENSG00000165480_6 (sequence is synthesized)
gtaactcctaaattagaacactttggtatctctgaatatactatgtgtttaaatgaagattacacaatgggacttaaaaatgcgaggaataataaaagtgaggaggccatagatacagaa

SEQ ID NO: 522516 - DNA, 120 bp, Artificial Sequence
  ENSG00000165480_7 (sequence is synthesized)
tccaggctcaatgataatgtttttgccactcccagccccatcatccagcagttggaaaaaagtgatgccgaatataccaactctcctttggtacctacattctgtactcctggtttgaaa

SEQ ID NO: 522517 - DNA, 120 bp, Artificial Sequence
  ENSG00000165480_8 (sequence is synthesized)
attccatctacaaagaacagcatagctttggtatccacaaattacccattatcaaaaacaaatagttcatcaaatgatttggaagttgaagatcgtacttcgttggttttaaattcagac

SEQ ID NO: 522518 - DNA, 120 bp, Artificial Sequence
  ENSG00000165480_9 (sequence is synthesized)
acatgctttgagaatttaacagatccctcttcacctacgatttcttcttatgagaatctgctcagaacacctacacctccggaagtaactaaaattccagaagatattctccagctttta

SEQ ID NO: 522519 - DNA, 120 bp, Artificial Sequence
  ENSG00000165480_10 (sequence is synthesized)
tcaaaatacaactcaaacctagctactccaatagcaattaaagcagtgccacccagtaaaaggttccttaaacatggacagaacatccgagatgtcagcaacaaagaaaactgaaattcc

SEQ ID NO: 522520 - DNA, 120 bp, Artificial Sequence
  ENSG00000165480_11 (sequence is synthesized)
tttaaagacaaacatgaacattaacatcataatatgctttttatgaagtttcaataaggtttaaccttagtcttgttgacatgtagcccagtcattcactctttaaggattattagtgtt

SEQ ID NO: 522521 - DNA, 120 bp, Artificial Sequence
  ENSG00000165480_12 (sequence is synthesized)
tcattgatactaaattacccagcttaatcaacagaatggtttaagtagtaccaggaagtaggacaagtaatttcaaaaatataaaggtgtttgctactcagatgaggccgcccctgacct

SEQ ID NO: 522522 - DNA, 120 bp, Artificial Sequence
  ENSG00000165480_13 (sequence is synthesized)
tctggccagagagacattgctgccagccagctctgccttcccatcatctcctttcaggaccgtcccacaccttttacttgctcagtgctgtctgaagatgcagttgctgtttgcaaacaa

SEQ ID NO: 522523 - DNA, 120 bp, Artificial Sequence
  ENSG00000165480_14 (sequence is synthesized)
caggaacaccagttaaactaattaggaaaagagggagatttccaggcctgggtaactatatactgtgaccattggaggtagagacaggtctcaacagttggaaccaggaactctgctgtc

SEQ ID NO: 522524 - DNA, 120 bp, Artificial Sequence
  ENSG00000165480_15 (sequence is synthesized)
aggttgagagttttgtttctcttccagcttttcactgtgtgggggtcttttctcttatgtcagctctttctatcacatggcagctgacctctcacgctccactctgcagcttggacaccc

SEQ ID NO: 522525 - DNA, 120 bp, Artificial Sequence
  ENSG00000165480_16 (sequence is synthesized)
agtagaccctgaatttcactctctctaaaaggttctgagggctcatcctgggccaggggccctcctgtgcactgttagctatggccacgggagcctccagagctgcctggtagcttcagg

SEQ ID NO: 522526 - DNA, 120 bp, Artificial Sequence
  ENSG00000165480_17 (sequence is synthesized)
ttgacctgcttatcaggcctacgatccttctgatttaagtacagctggaaagtattatctaattaagttcatgatagtgcttttggagaacttgtcaaattacagccaatgagaaaataa

SEQ ID NO: 522527 - DNA, 120 bp, Artificial Sequence
  ENSG00000165480_18 (sequence is synthesized)
ggacctagcatactgtggagaaccattaaaaatttgagaagaaacaacaagtattatgtcaacttacttcaaaggcgtagttttgggaatttgatgcagtaaagattaccctgttttatg

SEQ ID NO: 522528 - DNA, 120 bp, Artificial Sequence
  ENSG00000165480_19 (sequence is synthesized)
attgttccttgaaagtcaaatgggggacctgtccattgtgctctattaatcttgtcagaaaactgtcaccaaaacaaaacttgagtttgtccttgttctaggagttactgggtagttgta

SEQ ID NO: 522529 - DNA, 120 bp, Artificial Sequence
  ENSG00000165480_20 (sequence is synthesized)
agtattatttttattaaatataatgtaaaataaaatgttaagatacttagttttgtttttcaaagtaaagctgtagtcagccttatgtatgccattgactctgaaatgtataccagcctt

SEQ ID NO: 522530 - DNA, 120 bp, Artificial Sequence
  ENSG00000165480_21 (sequence is synthesized)
tcactgtgtaccgtgtgtatataaatccacagaaccggatgagctgcttagggagggaatatattcaaagtgtaccaaggaccaaatcctggagttctcccaactttagaggatggaaag

SEQ ID NO: 522531 - DNA, 120 bp, Artificial Sequence
  ENSG00000165480_22 (sequence is synthesized)
gggcagagtaatctagcaaaggagactgaggccagtgaagtaggaagaaagtatttcaaggagagtgatgattctgtgaatattgctgagaattcaaataaaaagaggactgagaactga

SEQ ID NO: 522532 - DNA, 120 bp, Artificial Sequence
  ENSG00000165480_23 (sequence is synthesized)
gcacgctggactgcgagacggcccggctgcagcgagcgctggacggagaggaaagcggtgcgtgaggcgggcggccagggcacgactttgaagattatccaatgagaattttatatgacc

SEQ ID NO: 522533 - DNA, 120 bp, Artificial Sequence
  ENSG00000165487_0 (sequence is synthesized)
gcctagctgcgcttccgcaaagatggcggcggctgcgggtagctgcgcgcgggtggcggcctggggcggaaaactgcgacgggggctcgctgtcagccgacaggctgtgcggagtcccgg

SEQ ID NO: 522534 - DNA, 120 bp, Artificial Sequence
  ENSG00000165487_1 (sequence is synthesized)
ccccttggcagcggcagtggccggcgcggccctggcaggagcaggagcggcctggcaccacagccgcgtcagtgttgcggcgcgggatggcagttttacagtctccgcacagaaaaatgt

SEQ ID NO: 522535 - DNA, 120 bp, Artificial Sequence
  ENSG00000165487_2 (sequence is synthesized)
tgaacatggaataatatatattgggaaaccgtctcttcgtaagcagcgcttcatgcagttttcttcactcgaacatgaaggagaatattatatgacaccacgagacttcctcttctcagt

SEQ ID NO: 522536 - DNA, 120 bp, Artificial Sequence
  ENSG00000165487_3 (sequence is synthesized)
gatgtttgagcaaatggaacgtaaaacttcagtcaagaagctgacaaaaaaggacatcgaggatacactgtcagggatccaaacagctggctgtggatcaacttttttcagagaccttgg

SEQ ID NO: 522537 - DNA, 120 bp, Artificial Sequence
  ENSG00000165487_4 (sequence is synthesized)
cgataaagggctaatttcatataccgagtatcttttcttgcttacaatcctcactaaaccccattctggatttcatgttgcttttaaaatgctggatacagatggtaatgagatgattga

SEQ ID NO: 522538 - DNA, 120 bp, Artificial Sequence
  ENSG00000165487_5 (sequence is synthesized)
aaaaagggaattttttaagctgcagaagatcataagtaaacaagatgacttgatgacagtgaaaactaatgaaactggatatcaggaagcaatagtgaaagaacctgaaattaacacaac

SEQ ID NO: 522539 - DNA, 120 bp, Artificial Sequence
  ENSG00000165487_6 (sequence is synthesized)
tcttcagatgcgtttctttggaaaaagaggacaaagaaaacttcattataaagaatttcgaagatttatggaaaatttacaaacagagattcaagaaatggaattccttcagttttctaa

SEQ ID NO: 522540 - DNA, 120 bp, Artificial Sequence
  ENSG00000165487_7 (sequence is synthesized)
aatgtgagagagaagttgtcagcaggagagagcattagtttggatgaattcaagtcattttgccattttacaacccacttggaagactttgctattgccatgcagatgttcagtttagct

SEQ ID NO: 522541 - DNA, 120 bp, Artificial Sequence
  ENSG00000165487_8 (sequence is synthesized)
catcgtcctgtcagactagcggagtttaagagagctgtgaaagtagcaacaggacaagaactctcaaacaatattttggacactgtctttaagatctttgatttggatggtgatgaatgt

SEQ ID NO: 522542 - DNA, 120 bp, Artificial Sequence
  ENSG00000165487_9 (sequence is synthesized)
cttagtcatgaagagtttcttggggtgttaaaaaacagaatgcatcgaggtttatgggtaccacaacatcagagtatacaagaatactggaagtgtgtgaagaaagaaagcattaaagga

SEQ ID NO: 522543 - DNA, 120 bp, Artificial Sequence
  ENSG00000165487_10 (sequence is synthesized)
gtaaaagaagtctggaaacaagctggaaaaggtcttttttaataaaagatataatagtatggcaattatattgttccaaatgtcaaaatttgtgattttttagaagtacttgctatttat

SEQ ID NO: 522544 - DNA, 120 bp, Artificial Sequence
  ENSG00000165487_11 (sequence is synthesized)
cttcttaagtcttcattgatattctgtgtgaaataagcatgtcttgtacttgctttctgattcataattttattaaagaacttagtagaaagaaaagtaagtataaaaatagatattgga

SEQ ID NO: 522545 - DNA, 120 bp, Artificial Sequence
  ENSG00000165487_12 (sequence is synthesized)
ttctgtcagaaggcctagatttgaaataatgttttgtacttcggtaagatggaaaacttagtgattcactgatttcttagacactctaatatgatatgctttctggaaggataaaacaaa

SEQ ID NO: 522546 - DNA, 120 bp, Artificial Sequence
  ENSG00000165487_13 (sequence is synthesized)
tacatatgggaaaaagtacttgagaccaaggccagcatcaattccagacatcttcatgttcctaataggctaaatgaagttaaaaacttatttcagatttttctcatctgtaccttatat

SEQ ID NO: 522547 - DNA, 120 bp, Artificial Sequence
  ENSG00000165487_14 (sequence is synthesized)
ctcataaatttattgcatattttatgtcagtagcttagctgtttattgtctttaaaataacatgtaaacttcaatgttctatctggaagcagaataaaatatttacatagatacaaaaaa

SEQ ID NO: 522548 - DNA, 120 bp, Artificial Sequence
  ENSG00000165487_15 (sequence is synthesized)
gacttagagaggctaaggtcatacacgttataaagggcagaaccggaatttcagcattaaaagtccatctaactccaaaactctgtgctcttactcagtgctatgtccactaataaaact

SEQ ID NO: 522549 - DNA, 120 bp, Artificial Sequence
  ENSG00000165487_16 (sequence is synthesized)
tagcagaagtggaccacttaacagagtatgttagtctcttcaagctgccgcctcaaaacaccacaggctgggcagcttaaacaataaatttatttctcacagttctggaggccaggagtc

SEQ ID NO: 522550 - DNA, 120 bp, Artificial Sequence
  ENSG00000165487_17 (sequence is synthesized)
caagatcaaggcaccagcagggccagtttctggtgaggcctcttgcccagcctgcacacagcaccttctcactgtgccctttgtgtggccatttctgtgtgcacacagagagaaagggac

SEQ ID NO: 522551 - DNA, 120 bp, Artificial Sequence
  ENSG00000165487_18 (sequence is synthesized)
agagaaagctctgttgtctcttcctcttagaatgatactagtctctacggtagaaaagaaagttcatagttaacatttataagattatttaatgtacttacaaaattgtaataaaaactc

SEQ ID NO: 522552 - DNA, 120 bp, Artificial Sequence
  ENSG00000165487_19 (sequence is synthesized)
tttttaagattgatacaattgattctgaaaggcagctgcagaagatcataagtaaacaagatgacttgatgacagtgaaaactaatgaaactggatatcaggaagcaatagtgaaagaac

SEQ ID NO: 522553 - DNA, 120 bp, Artificial Sequence
  ENSG00000165487_20 (sequence is synthesized)
gaggtttgtctcctaattgatttgaatccatagtttgggattttgtctacatctgattcttttaaaatgctttcttttttaaatttgctttccatatgaggattgatacaattgattctg

SEQ ID NO: 522554 - DNA, 120 bp, Artificial Sequence
  ENSG00000165487_21 (sequence is synthesized)
gagaagttgtcagcaggagaggttggtatacccttttattatgcatgtgataaagatgaaataataagttagacatgtttacataaagtaacttctgaattaaccaagactgtgctaccc

SEQ ID NO: 522555 - DNA, 120 bp, Artificial Sequence
  ENSG00000165487_22 (sequence is synthesized)
gggagaaccccgcggacgctgaacaccacggcccacaaaactggccgcactaatttagtggtgatgagtgtgggcgtgtcttaattcgaggctcctaattcagaatctcactgcgcctcg

SEQ ID NO: 522556 - DNA, 120 bp, Artificial Sequence
  ENSG00000165487_23 (sequence is synthesized)
tcgtcctgtcagactaggtaagttatatgaaaaaccatttaatttttatcatctataaacagttttactatattcttcaactaaatgctaccaatcaaggaacaaattataagtaaaaat

SEQ ID NO: 522557 - DNA, 120 bp, Artificial Sequence
  ENSG00000165487_24 (sequence is synthesized)
agttgattgaccttttaattcagtgtggttattctagatttagaataccagtactccagtttaatggttactttctatacttttattttctcattctcctaaaaagaaggaagaaggccg

SEQ ID NO: 522558 - DNA, 120 bp, Artificial Sequence
  ENSG00000165487_25 (sequence is synthesized)
actccagcctgggcgacgagcaagattcatctcaaatatatgtttagagcattgattaaattacaatagctcatttgtcttgcagtgactctcatgacattcgtcggcttatggtttgaa

SEQ ID NO: 522559 - DNA, 120 bp, Artificial Sequence
  ENSG00000165487_26 (sequence is synthesized)
tgggtatttttgtttttgttttacttcccaaataataaaaatttggatttgcttttacttctcaaataatgaaaatttagattaatttcacttagactatttcacatagttgataagttg

SEQ ID NO: 522560 - DNA, 120 bp, Artificial Sequence
  ENSG00000165490_0 (sequence is synthesized)
tgccagtcatcccaatggctattttgttttgcagaccacggtgtgaacacatgaacagaagacgaaaatttcttctagcctcagtacttgctctccagaattcaagttttatatatccat

SEQ ID NO: 522561 - DNA, 120 bp, Artificial Sequence
  ENSG00000165490_1 (sequence is synthesized)
catgtcagaagtgcttctctaggataatcctggtctccaaaaggtctaattgtccaaaatgtggctctactggtgaatctggaaatgccaattacagatacaaactttccttaaaagttg

SEQ ID NO: 522562 - DNA, 120 bp, Artificial Sequence
  ENSG00000165490_2 (sequence is synthesized)
cagaatcaaacaaattgtttgttattactgtatttggaagttgcttagatacattttttggtcttactgccactggtttgcacaggtacattcaggatcctaataaaattccagaaacac

SEQ ID NO: 522563 - DNA, 120 bp, Artificial Sequence
  ENSG00000165490_3 (sequence is synthesized)
tggacaatgatacaactcagaatctattaactaaagcagttgaaacttgctttgttggacaaagctttatttttggagtgacgaattttgaaaaccaacctggacaaggttcagatgcca

SEQ ID NO: 522564 - DNA, 120 bp, Artificial Sequence
  ENSG00000165490_4 (sequence is synthesized)
gtaacttcttacagcaatgctctgaccacaaaagaaaagccaaagcactagtggcttgccagattgttctaccagacccaggtattgcaggctttactgtcattgactacttccatcaac

SEQ ID NO: 522565 - DNA, 120 bp, Artificial Sequence
  ENSG00000165490_5 (sequence is synthesized)
ttttgcagacttttaatttcaggaaacttcagtgtgactctcaggcacctaacaatcacttacttgctttagatcactcaaatagtgatctcagcagcatatatacttctgacagcactt

SEQ ID NO: 522566 - DNA, 120 bp, Artificial Sequence
  ENSG00000165490_6 (sequence is synthesized)
ctgattttttcaagtcctgcagcaaggatactttttcaaaattctggcagccatcacttgaattcacttgcattgtttcacaactaacagataatgatgatttttcagcttcagaacaaa

SEQ ID NO: 522567 - DNA, 120 bp, Artificial Sequence
  ENSG00000165490_7 (sequence is synthesized)
gtaaggcctttggtactcttcagcagaacagaaagtccatctccattgcagaggccactggttccagtagctgccatgatcccattcaggattcatggagccttgtttcatatatggata

SEQ ID NO: 522568 - DNA, 120 bp, Artificial Sequence
  ENSG00000165490_8 (sequence is synthesized)
aaaagagtacagcagaaaagttgggtaaagaacttggcttacaagctaaggagctgagtgcagttcacagcagtcatcatgaaattggagttaatgactctaatttattctctttggaaa

SEQ ID NO: 522569 - DNA, 120 bp, Artificial Sequence
  ENSG00000165490_9 (sequence is synthesized)
tgcgagagccccttgagtcaagtaatacaaaatccttccacagtgcagtggaaattaaaaataggtcccagcatgagctaccatgttttcagcatcatggtatagataccccaactagcc

SEQ ID NO: 522570 - DNA, 120 bp, Artificial Sequence
  ENSG00000165490_10 (sequence is synthesized)
ttcagaagagatctgcatgttgtccaccttcgttactcagacttgaagagacagccagcagttcccaggatggtgaccctcaaatttgggatgatctgccattctctgaaagcctgaaca

SEQ ID NO: 522571 - DNA, 120 bp, Artificial Sequence
  ENSG00000165490_11 (sequence is synthesized)
agtttctggcagttcttgaaagtgagattgctgtaacccaggcagatgtcagtagtaggaaacatcatgtagataatgacattgataaatttcatgcagaccacagcaggttatctgtga

SEQ ID NO: 522572 - DNA, 120 bp, Artificial Sequence
  ENSG00000165490_12 (sequence is synthesized)
ctccccagagaactactggagccctgcatacaccacctatagctttaagatcatcacaagtaatagtcaaagcaaactgtagcaaagatgacttccttttcaactgtaaaggaaatctaa

SEQ ID NO: 522573 - DNA, 120 bp, Artificial Sequence
  ENSG00000165490_13 (sequence is synthesized)
gtcctagtgttgaaaaggagtcacaaccagataacaaagtagaggctgtctctgtaaatcataatggaagagatatgtcagaatattttttaccgaatccttacctgtcagctctgtctt

SEQ ID NO: 522574 - DNA, 120 bp, Artificial Sequence
  ENSG00000165490_14 (sequence is synthesized)
aaaagatttagaaacaatagttactcttaagaagactatcagaatctcaccacacagggagagtgaccattctagtctaaataacaaatatttgaatggatgtggagaaatatcagtttc

SEQ ID NO: 522575 - DNA, 120 bp, Artificial Sequence
  ENSG00000165490_15 (sequence is synthesized)
agaaatgaatgaaaagttgacaactctgtgttataggaagtataatgatgtctctgatctttgcaaattagaaaataaacaatattgtaggtggtccaagaaccaagatgacagttttac

SEQ ID NO: 522576 - DNA, 120 bp, Artificial Sequence
  ENSG00000165490_16 (sequence is synthesized)
aatttgcaggaaacttacatatcctttagaaactctttgcaatagtccaaatagaagtacaaatacattgaaagaaatgccttggggacatatcaataacaacgtaacacagagctattc

SEQ ID NO: 522577 - DNA, 120 bp, Artificial Sequence
  ENSG00000165490_17 (sequence is synthesized)
tattggttatgaaggtagctatgatgcctctgctgatctctttgatgatattgctaaagaaatggacattgcaactgagattaccaaaaaatcacaggatattttgttaaaatggggaac

SEQ ID NO: 522578 - DNA, 120 bp, Artificial Sequence
  ENSG00000165490_18 (sequence is synthesized)
atctttggcagaaagtcacccttcagagtctgatttttcactgagatcactttctgaagacttcatccagccttcacaaaaattatccttgcaaagcctatctgactctaggcattcaag

SEQ ID NO: 522579 - DNA, 120 bp, Artificial Sequence
  ENSG00000165490_19 (sequence is synthesized)
aacatgctctccaacacctcattttcaatcagattcagaatataattttgaaaatagtcaagactttgttccatgttcacagtcaactccaatttcagggttccaccaaacaagaattca

SEQ ID NO: 522580 - DNA, 120 bp, Artificial Sequence
  ENSG00000165490_20 (sequence is synthesized)
tgggataaacagagctttcaaaaaacctgtattttattcagatcttgatggtaactatgaaaaaataaggattttccctgaaaatgacaaacagcaagccagcccaagctgtccaaaaaa

SEQ ID NO: 522581 - DNA, 120 bp, Artificial Sequence
  ENSG00000165490_21 (sequence is synthesized)
tataaaaacacctagccagaaaatcagaagccctattgtatctggtgtttcacaaccagacgttttcaatcactacccttttgctgagtgccatgaaactgatagtgatgaatgggtccc

SEQ ID NO: 522582 - DNA, 120 bp, Artificial Sequence
  ENSG00000165490_22 (sequence is synthesized)
tcctaccacacaaaaaatatttccttcagatatgcttggattccaaggcataggtctagggaaatgccttgctgcctatcatttccctgatcaacaagagttaccaagaaagaaactgaa

SEQ ID NO: 522583 - DNA, 120 bp, Artificial Sequence
  ENSG00000165490_23 (sequence is synthesized)
acatattagacaaggaaccaataaaggtttaattaagaagaaattaaagaatatgcttgcagcagttgttacgaaaaagaaaactcataaatataactgtaaaagttcaggctggatttc

SEQ ID NO: 522584 - DNA, 120 bp, Artificial Sequence
  ENSG00000165490_24 (sequence is synthesized)
caaatgtccagacattcaagtcttagcagcacctcagctgcaccctattcttggacctgattcttgttcagaagtcaaatgttgccttccattttcagaaaaaggcccaccttcagtgtg

SEQ ID NO: 522585 - DNA, 120 bp, Artificial Sequence
  ENSG00000165490_25 (sequence is synthesized)
tgaaactcgaagtgcttggtcacctgaattgttttcataaaaagtcacctgaacccaattcctgaacttttaaatctgtttggaaatgtttgccttcaggggtacggaaagcattcttta

SEQ ID NO: 522586 - DNA, 120 bp, Artificial Sequence
  ENSG00000165490_26 (sequence is synthesized)
cattttgaacacttggagagaagcaaattgaaaacaggactctgctgggagctactgtgccttttaaaatataaagccattgttttccccagggttttatctagaatactatgattaggt

SEQ ID NO: 522587 - DNA, 120 bp, Artificial Sequence
  ENSG00000165490_27 (sequence is synthesized)
agttgagcactttatcttatactgtttattgtactttaataatattgttaagattgtttttgaaagtattaatgtttgttaaaatcacatatacatccagaaataaagactttgcaaacc

SEQ ID NO: 522588 - DNA, 86 bp, Artificial Sequence
  ENSG00000165490_28 (sequence is synthesized)
gattggaaggctgccggcgtgctactgagttcggccggtccgagtcactgtgcgtcgcctgggcccgttcctggtcttctccccat

SEQ ID NO: 522589 - DNA, 120 bp, Artificial Sequence
  ENSG00000165490_29 (sequence is synthesized)
ccaagatgctaaaacaaaataagaccaaggggaagaagatggctggggcccctgctgtcatgaagaagcaagaagccaagaaagtggtgaatctcccctgtttgagaaaaggcctaagaa

SEQ ID NO: 522590 - DNA, 120 bp, Artificial Sequence
  ENSG00000165490_30 (sequence is synthesized)
tccaccccaaagggatctcactcactttgtcaaatggcctcattatattaggttgcagcagcaaagaactatcctctgtaggtcactggaagtgcctcttgtgattaaccagtttaccca

SEQ ID NO: 522591 - DNA, 120 bp, Artificial Sequence
  ENSG00000165490_31 (sequence is synthesized)
ggccttggacctcctaacagctgctcagcttcttaagctggcccacgagtacagaccagtgacaaagcaagagaagaagcaggaattgttggcccatgctgacaggaatgctgccagcaa

SEQ ID NO: 522592 - DNA, 120 bp, Artificial Sequence
  ENSG00000165490_32 (sequence is synthesized)
tggagacatccccactaagagttcacctgtccttcaagcaggggttaatactgtcaccaactcaatggtgaacaagaagtctcagctggtgctgactgcacaagatatggatcccatcaa

SEQ ID NO: 522593 - DNA, 120 bp, Artificial Sequence
  ENSG00000165490_33 (sequence is synthesized)
gctggttgtcttcctgccagccctgtgttgtaaaatgggggtcccttactgtgttatcaaagagaaggcaaggccgggaagtttagtccacaggaggacctgcatcattgtcaccttcac

SEQ ID NO: 522594 - DNA, 120 bp, Artificial Sequence
  ENSG00000165490_34 (sequence is synthesized)
acaggttaaatggaaaaaacaaggagctttagctaaactttgggagcttcaggatcaattacaatgacagatataatgagatccaccatcaatggggaggcaacatcctgggtccaaaat

SEQ ID NO: 522595 - DNA, 120 bp, Artificial Sequence
  ENSG00000165490_35 (sequence is synthesized)
ctgtggcttacaatgccaagccagaaaagacaaaggctaaaaaacatgccactaagcttagttaaatgcacactgttgagttttctgtacagaaagataataaaaaattctccttcagcc

SEQ ID NO: 522596 - DNA, 83 bp, Artificial Sequence
  ENSG00000165490_36 (sequence is synthesized)
aaggctgccggcgtgctactgagttcggccggtccgagtcactgtgcgtcgcctgggcccgttcctggtcttctcccccatgg

SEQ ID NO: 522597 - DNA, 87 bp, Artificial Sequence
  ENSG00000165490_37 (sequence is synthesized)
accagaggtcactctcatcaccatcttagtttatggcatcatcatagctcactatggccttgatcctcctgccttagcctcccaagc

SEQ ID NO: 522598 - DNA, 83 bp, Artificial Sequence
  ENSG00000165490_38 (sequence is synthesized)
aaatgagcacactgaaatctaataaagtgatatttcagctaaaaaagaacaatttccaccaatttaggttctttaaaagattc

SEQ ID NO: 522599 - DNA, 120 bp, Artificial Sequence
  ENSG00000165490_39 (sequence is synthesized)
gtgactgtcgtgtccaattacagaaaagcctgaatcaagagtatgcagccaaaactactaccaaattattggtaatgggaggagaaaatttaaacagaactgggatttgggaccaccttc

SEQ ID NO: 522600 - DNA, 120 bp, Artificial Sequence
  ENSG00000165490_40 (sequence is synthesized)
tggaagatgttagccaaaaaccgaacagatcctaggcatcaaggggtgtgaatttcgagtcaccccgccagaccccagggcgctgcggctcactccacactttcccgggaaccctacgcc

SEQ ID NO: 522601 - DNA, 120 bp, Artificial Sequence
  ENSG00000165490_41 (sequence is synthesized)
caggaggctcagcgaagctccaaaaccaattttacggactgtactactgatccacctgtcggggagaaagactctacccgcagtttgacgaaaatggtcgtttccagatgcttgtaggat

SEQ ID NO: 522602 - DNA, 120 bp, Artificial Sequence
  ENSG00000165494_0 (sequence is synthesized)
ggccggagaagaaggcggtgccagggcgtcctgcggaagggccgggggcggggctcgtgacgttgccgggacagccaatcacgcctggttttatcagtggccccgcccttttaccgcaca

SEQ ID NO: 522603 - DNA, 120 bp, Artificial Sequence
  ENSG00000165494_1 (sequence is synthesized)
tttcccctcccctagttcatttcgcacgacgcagcggttgggaacacagacattttcggagctggagccgccactgccgccgccattttgtgtctgtggagaaagaagcttctgtggcgg

SEQ ID NO: 522604 - DNA, 120 bp, Artificial Sequence
  ENSG00000165494_2 (sequence is synthesized)
ctggaagtggacggagatcacccgcgagacggcggcgtttcatacccgaggttccccctgtgtcgtcccccatcccccctccgcggtcagcatgtggtgaagccggagccgcgagagagc

SEQ ID NO: 522605 - DNA, 120 bp, Artificial Sequence
  ENSG00000165494_3 (sequence is synthesized)
cggggagaggaagaggagtcggaagggaggcggggtatccagagcggcttcagcttcagctgcagcggacctcggaggggggccgcggcgcaatgtcagagcagacgccggccgaggccg

SEQ ID NO: 522606 - DNA, 120 bp, Artificial Sequence
  ENSG00000165494_4 (sequence is synthesized)
gtgctgcgggggcccgggaggacgcctgtcgggattatcagtcatcgctcgaagacctgaccttcaatagcaagccgcacatcaatatgctgaccattctagccgaggagaacctgccct

SEQ ID NO: 522607 - DNA, 120 bp, Artificial Sequence
  ENSG00000165494_5 (sequence is synthesized)
tcgccaaggagatcgtctctctcatcgaggcccaaaccgccaaggctccttcctcagagaagcttcctgttatgtaccttatggattctattgtgaaaaacgttggaagagagtatctca

SEQ ID NO: 522608 - DNA, 120 bp, Artificial Sequence
  ENSG00000165494_6 (sequence is synthesized)
ctgcctttactaaaaatctagttgcaacatttatttgtgtgtttgaaaaggtggatgaaaatactaggaaaagtttatttaagttacgttctacatgggatgaaatattccctttgaaga

SEQ ID NO: 522609 - DNA, 120 bp, Artificial Sequence
  ENSG00000165494_7 (sequence is synthesized)
aactttatgccctggatgtcagagtcaattcattagatcctgcttggcctattaaacctctaccccccaatgtgaatacgtctagcatccatgtgaatcctaaatttttaaataaatcgc

SEQ ID NO: 522610 - DNA, 120 bp, Artificial Sequence
  ENSG00000165494_8 (sequence is synthesized)
ccgaggagccttcaacacctggtacagtggtcagttcccctagcatctccactcctccaattgttcctgatatacaaaagaatcttacacaagaacaactaataaggcagcagttactgg

SEQ ID NO: 522611 - DNA, 120 bp, Artificial Sequence
  ENSG00000165494_9 (sequence is synthesized)
caaagcaaaaacagttgttagaacttcagcagaaaaagctggagcttgagctagagcaagctaaggcacagttggcagtttctcttagtgttcagcaggaaacatccaatttaggtcctg

SEQ ID NO: 522612 - DNA, 120 bp, Artificial Sequence
  ENSG00000165494_10 (sequence is synthesized)
gatctgcaccatccaaattacatgtttcacagattccccctatggcagttaaagctcctcatcaggttcctgtgcaatctgagaaaagccgtccaggaccatccttacaaattcaggatt

SEQ ID NO: 522613 - DNA, 120 bp, Artificial Sequence
  ENSG00000165494_11 (sequence is synthesized)
taaaaggaactaaccgggatcctcgtctgaacaggataagccaacattctcatggaaaagatcagagtcacaggaaagaatttctaatgaacacattaaaccagtctgatactaagacaa

SEQ ID NO: 522614 - DNA, 120 bp, Artificial Sequence
  ENSG00000165494_12 (sequence is synthesized)
gtaaaactataccctctgaaaaactaaattcatccaagcaagaaaaaagtaaatcaggtgaaaaaataaccaagaaagaacttgaccaattagattctaaatcgaaatcgaaatcgaaat

SEQ ID NO: 522615 - DNA, 120 bp, Artificial Sequence
  ENSG00000165494_13 (sequence is synthesized)
caccctcacctttgaaaaacaaattatctcacacaaaagacttgaaaaatcaagaatcggaaagtatgaggttgtctgatatgaacaagagagatccaagattaaaaaaacatcttcagg

SEQ ID NO: 522616 - DNA, 120 bp, Artificial Sequence
  ENSG00000165494_14 (sequence is synthesized)
ataagaccgatggcaaagatgatgatgtgaaagagaagagaaaaactgcagaaaaaaaggataaagatgagcacatgaagtcatccgaacacagactggctggaagtagaaataaaatca

SEQ ID NO: 522617 - DNA, 120 bp, Artificial Sequence
  ENSG00000165494_15 (sequence is synthesized)
taaatggcattgtacaaaaacaggatacaataacagaagagtcagaaaaacaggggacaaaaccagggagatcgagtactagaaagcgatcaagatctcgatcacccaagtctaggtcac

SEQ ID NO: 522618 - DNA, 120 bp, Artificial Sequence
  ENSG00000165494_16 (sequence is synthesized)
caattatacattccccaaagagaagagataggcggtcacccaaacgaaggcaaagaagtatgtctccaacatcgacacctaaagctggaaagattcgccaatctggagctaagcagtcac

SEQ ID NO: 522619 - DNA, 120 bp, Artificial Sequence
  ENSG00000165494_17 (sequence is synthesized)
atatggaagagtttacaccaccttctagggaagacagaaatgctaagagaagtactaaacaggatattcgggatccaaggcgaatgaaaaagactgaagaggagcgaccacaagaaacta

SEQ ID NO: 522620 - DNA, 120 bp, Artificial Sequence
  ENSG00000165494_18 (sequence is synthesized)
caaatcagcattctacaaagtcaggcactgaaccaaaggagaatgtagaaaactggcaaagttccaagtctgccaaaagatggaaatctggttgggaagaaaataaaagcttacaacagg

SEQ ID NO: 522621 - DNA, 120 bp, Artificial Sequence
  ENSG00000165494_19 (sequence is synthesized)
ttgatgaacatagtaaacctcctcatctgaggcatagggagagctggtcaagcactaaaggaattttatcacctcgagccccaaagcagcaacagcatcgattaagtgtagatgccaatc

SEQ ID NO: 522622 - DNA, 120 bp, Artificial Sequence
  ENSG00000165494_20 (sequence is synthesized)
ttcagattcctaaagagttaactcttgcaagcaaaagagaattacttcaaaagacgagtgaacgtttagcatctggtgaaattacacaggatgacttccttgttgttgtgcatcaaattc

SEQ ID NO: 522623 - DNA, 120 bp, Artificial Sequence
  ENSG00000165494_21 (sequence is synthesized)
gacagctatttcagtatcaagaaggtgtgcgagaagagcagagatctccattcaatgatcgttttccacttaagcgacctcgatatgaagattcagataaaccatttgtagatagtccag

SEQ ID NO: 522624 - DNA, 120 bp, Artificial Sequence
  ENSG00000165494_22 (sequence is synthesized)
catcaagattcgccggcctggatacaaatcagcgacttacagctttagctgaagacagaccgttatttgatggacctagtaggccatcagtagcaagagatggcccaacgaagatgattt

SEQ ID NO: 522625 - DNA, 120 bp, Artificial Sequence
  ENSG00000165494_23 (sequence is synthesized)
ttgaaggacccaataaattaagccctcgaattgatggacctcccacaccagcttctcttcggtttgatgggtcaccaggacaaatggggggaggaggccctttgagatttgaggggccac

SEQ ID NO: 522626 - DNA, 120 bp, Artificial Sequence
  ENSG00000165494_24 (sequence is synthesized)
aaggtcagctaggaggtgggtgtcctttgagatttgaaggtcctccaggaccagtggggacacctctgcggtttgagggcccaattggtcaagcaggaggaggtggttttcggtttgaag

SEQ ID NO: 522627 - DNA, 120 bp, Artificial Sequence
  ENSG00000165494_25 (sequence is synthesized)
gttcccctggtctgaggtttgagggatctccaggtggtttgagatttgagggaccaggaggccagcctgtgggtggtctgaggtttgagggacatcgtggtcaacctgtgggtggtctaa

SEQ ID NO: 522628 - DNA, 120 bp, Artificial Sequence
  ENSG00000165494_26 (sequence is synthesized)
ggtttgagggacctcatggtcagcctgtgggtggacttagatttgataatccccgaggtcagcctgtaggtggacttagatttgaggggggtcatggtccatcaggggctgcgattaggt

SEQ ID NO: 522629 - DNA, 120 bp, Artificial Sequence
  ENSG00000165494_27 (sequence is synthesized)
ttgatggacctcatggtcagccaggaggtggaatcagatttgagggccctttgctacagcaaggggttggaatgaggtttgagggcccccatggtcagtcagtagctggtctgagatttg

SEQ ID NO: 522630 - DNA, 120 bp, Artificial Sequence
  ENSG00000165494_28 (sequence is synthesized)
agggacaacataatcaacttggtgggaaccttaggtttgagggtccacatggtcagccaggggttggtatcaggtttgaaggccctttagtccaacaaggaggtggaatgaggtttgagg

SEQ ID NO: 522631 - DNA, 120 bp, Artificial Sequence
  ENSG00000165494_29 (sequence is synthesized)
gtccttctgtaccaggaggtggcctgagaattgaagggcctctgggtcaaggtggtccaagatttgaaggttgtcatgctttaaggtttgatgggcagccaggtcagccgtcactcttgc

SEQ ID NO: 522632 - DNA, 120 bp, Artificial Sequence
  ENSG00000165494_30 (sequence is synthesized)
caagatttgatggattacatggtcagccaggtcctagatttgaaaggactcctggtcagccaggccctcagaggtttgatggaccacctggacagcaggttcaacccagatttgacggtg

SEQ ID NO: 522633 - DNA, 120 bp, Artificial Sequence
  ENSG00000165494_31 (sequence is synthesized)
tcaatcagactggtccatataatgatccacctggcaatgcttttaatgccccatcccaaggactacagttccaaagacatgaacaaatatttgattcacctcaaggaccaaattttaatg

SEQ ID NO: 522634 - DNA, 120 bp, Artificial Sequence
  ENSG00000165494_32 (sequence is synthesized)
gaccacatggccctggaaaccagagtttctctaatccacttaacagagcttctggacactattttgatgaaaaaaatcttcagagttctcaatttggaaactttggcaatatacctgctc

SEQ ID NO: 522635 - DNA, 120 bp, Artificial Sequence
  ENSG00000165494_33 (sequence is synthesized)
caatgacagtaggaaatattcaggcatctcaacaggttctgagtggtgttgctcagccagtagcttttggtcaaggacaacagtttttaccagttcatccacaaaatcctggatttgttc

SEQ ID NO: 522636 - DNA, 120 bp, Artificial Sequence
  ENSG00000165494_34 (sequence is synthesized)
agaatccttcaggagccctccctaaggcatatcctgataatcatctcagtcaggtggatgtaaatgaattgttttcaaaattgctaaaaacaggaattctcaaattgtcccaaactgatt

SEQ ID NO: 522637 - DNA, 120 bp, Artificial Sequence
  ENSG00000165494_35 (sequence is synthesized)
cagctacaacacaagtaagtgaagtaactgctcagcctccccctgaagaggaggaagatcaaaatgaagatcaagatgttccagatcttactaattttacagttgaagaattgaaacaac

SEQ ID NO: 522638 - DNA, 120 bp, Artificial Sequence
  ENSG00000165494_36 (sequence is synthesized)
gttatgacagtgttataaatcgactgtacactggtattcagtgttactcttgtggaatgaggtttacaacatcacagacagatgtttatgcagatcatttggactggcattatcggcaaa

SEQ ID NO: 522639 - DNA, 120 bp, Artificial Sequence
  ENSG00000165494_37 (sequence is synthesized)
atagaactgaaaaggatgttagccgaaaagtcactcatagacgttggtactacagtttaacagactggatagaatttgaggagatagctgatctggaagaacgggcaaagagccagtttt

SEQ ID NO: 522640 - DNA, 120 bp, Artificial Sequence
  ENSG00000165494_38 (sequence is synthesized)
ttgaaaaggtgcatgaagaagttgtgctcaaaactcaagaggctgctaaagaaaaagagttccaaagtgtacctgctggaccagctggagcagttgagagttgtgaaatctgtcaagaac

SEQ ID NO: 522641 - DNA, 120 bp, Artificial Sequence
  ENSG00000165494_39 (sequence is synthesized)
aatttgaacaatactgggatgaagaagaggaggaatggcatttgaaaaatgctattagagtagatggaaagatttatcatccatcatgttatgaagattatcaaaatacatcttcatttg

SEQ ID NO: 522642 - DNA, 120 bp, Artificial Sequence
  ENSG00000165494_40 (sequence is synthesized)
attgtacaccatctcccagcaagacaccagttgaaaaccccttgaatattatgttgaacattgtcaaaaacgaattgcaggaaccctgtgacagtcccaaagttaaggaagaacgaattg

SEQ ID NO: 522643 - DNA, 120 bp, Artificial Sequence
  ENSG00000165494_41 (sequence is synthesized)
atacaccaccagcttgtacagaggaaagcatagcaacaccctctgaaattaaaacagaaaatgacacagtcgagtcagtttaaataaaatgagaaaggtatgtttttcttttttaaaaaa

SEQ ID NO: 522644 - DNA, 120 bp, Artificial Sequence
  ENSG00000165494_42 (sequence is synthesized)
gctgctgttggatctagaaggtgaagaatttttttatgtatatatagacatatctatataaattgtctggctgaggcagggccttcagctatcatttggttaataaatacattttagtat

SEQ ID NO: 522645 - DNA, 120 bp, Artificial Sequence
  ENSG00000165494_43 (sequence is synthesized)
ttgcatttcctactgcctgcagagtttcaggtgcttgttgtgtgaaagttctgtagatgtgtgcaaatttaacgaaatgaaattgtatgtgtaaaaatgtacgatttttcactgtgcaac

SEQ ID NO: 522646 - DNA, 120 bp, Artificial Sequence
  ENSG00000165494_44 (sequence is synthesized)
tgtaaattataaataaaaaatatttttgctattcatggagtgtaatatttatgcacaccatcaaatagtttctgtactttttattgggtaaaaatggaattgaacagcaacctcaacata

SEQ ID NO: 522647 - DNA, 120 bp, Artificial Sequence
  ENSG00000165494_45 (sequence is synthesized)
agattttttttctagtagcctcccactgattaaagaagcaagtttgaggtttcatccttcaaaagggggttccgagagagcaccgtagggcttttctcaaatagaaaagccagattttga

SEQ ID NO: 522648 - DNA, 120 bp, Artificial Sequence
  ENSG00000165494_46 (sequence is synthesized)
aaaaattttaaagataaaataggacatattttgcagatatatatatatatatacacaaacacatctccaggtatagagaaccatccagatgttcacttttgaaaatatctaatgatgcaa

SEQ ID NO: 522649 - DNA, 120 bp, Artificial Sequence
  ENSG00000165494_47 (sequence is synthesized)
agttttattcttgaacttggacactgatgccatcaaacaattaacaaatatatttaagtactaaaggtgattttttttttaaagactttttcaaattgtcaaatgatttaatgcagatga

SEQ ID NO: 522650 - DNA, 120 bp, Artificial Sequence
  ENSG00000165494_48 (sequence is synthesized)
acatatttctattttaagtaacgggaatctgtaagaatgtttgcttgagatatggttaacttttttcttttgttggttttgacttagatggacaccatgagatgttaatattcatacatg

SEQ ID NO: 522651 - DNA, 120 bp, Artificial Sequence
  ENSG00000165494_49 (sequence is synthesized)
taataaatagaatgatgaagaaactttgtttgtacttctttatttcttgaaaagctttagaatgtgactttcttgttgtctttcatctgttttttgaaacatgaacatggtacttgctat

SEQ ID NO: 522652 - DNA, 120 bp, Artificial Sequence
  ENSG00000165494_50 (sequence is synthesized)
gagccaggcactctgagacaggttagtcttttctgccatttattggagataggcatataaaacactgagttttattgagcacatagtatgtggcaggcactagcactttctacatgtatt

SEQ ID NO: 522653 - DNA, 120 bp, Artificial Sequence
  ENSG00000165494_51 (sequence is synthesized)
ttctctggtattcacatctaataactacatggtagatggtgtccccactttacagatgaaattaagccactcactttaaaatttttataagaatttgaacgtggctttgtttcctctaat

SEQ ID NO: 522654 - DNA, 120 bp, Artificial Sequence
  ENSG00000165494_52 (sequence is synthesized)
tccatacaatttctgcaattttaaaagatacccccaaattgattgttaggatagaaataagcacaccaaactactggaaggtggctaaggaagattctacaaaagtggtgacatttgagt

SEQ ID NO: 522655 - DNA, 120 bp, Artificial Sequence
  ENSG00000165494_53 (sequence is synthesized)
cttggaggataaccaggagtggagtccatactgatgggaagggtatctttggaaaatgaacagcaaatgtaaaggcttaaaatacttttgtgttttcaaaaattgacttcttatggttaa

SEQ ID NO: 522656 - DNA, 120 bp, Artificial Sequence
  ENSG00000165494_54 (sequence is synthesized)
aactcagtagttttgaatagattatgatgagccattaatttttttagtagaaatggagtctcactacgtagtccaggctggtttcgaattcctgggctcaagtgatcctactgccttggc

SEQ ID NO: 522657 - DNA, 120 bp, Artificial Sequence
  ENSG00000165494_55 (sequence is synthesized)
tgggattacaggcatgagccacgtgcccagcctttatttttaagtagtgaagagccttcttggtcatgctaaggaatttttattaaactgatgaccagagcagccactagaaattttaaa

SEQ ID NO: 522658 - DNA, 120 bp, Artificial Sequence
  ENSG00000165494_56 (sequence is synthesized)
agaaattttaaacagggtgacatcctatctgcatttaagcttttttatttttttaagaatcaagtgaatacaattttagagattgctaaatccagagaggtccagtgggaaaactggtag

SEQ ID NO: 522659 - DNA, 120 bp, Artificial Sequence
  ENSG00000165494_57 (sequence is synthesized)
ccattggatttgagttgtaaacacgtaacagctgaacttacgtatatgaacactgccataggaactgaggtctgtgaatccaaaaatgtaggcaaaacttcctgttgaacatttttctgg

SEQ ID NO: 522660 - DNA, 120 bp, Artificial Sequence
  ENSG00000165494_58 (sequence is synthesized)
ggaaaccaccatagcttttatcaaatgcttaaaggtatggaacattctaaaaggaaggtgatattcaaacctaaaagtgtatcaacggtatccacatggagaagagggtcaaggatgggg

SEQ ID NO: 522661 - DNA, 120 bp, Artificial Sequence
  ENSG00000165494_59 (sequence is synthesized)
gaacaaagactggtaggtgggaaggtcaaaaagaaaatgggaaaaccagcaatgggaaaatttttttttttctttttttgagacagtcttgctatgttgctcaggctggatcagtgcagt

SEQ ID NO: 522662 - DNA, 120 bp, Artificial Sequence
  ENSG00000165494_60 (sequence is synthesized)
acaggtgtgcgcaggaagaaaatttcaatggacgaggtagtcaacaaaatgaagtcaagaaaatatgtaagactcagaaatactctaactgttgacctaagaacagctgagtatgggtgc

SEQ ID NO: 522663 - DNA, 120 bp, Artificial Sequence
  ENSG00000165494_61 (sequence is synthesized)
acctctcttatctgatgctgaattaacctactatgaacataaagcaaaactgaaaaggacacaggttcagcattcatttccaagacttgatctcttagatcctgatatttttgactaccc

SEQ ID NO: 522664 - DNA, 120 bp, Artificial Sequence
  ENSG00000165494_62 (sequence is synthesized)
tttgactgatgccttgttgtctggaatagaatgtgagccatccaaaagtaaacatgcaagtaggaatagtggagcacagtttgacagaaaagaacaatttagtgaaagagcaagacgtct

SEQ ID NO: 522665 - DNA, 120 bp, Artificial Sequence
  ENSG00000165494_63 (sequence is synthesized)
acaccccgcagcctcctattacttctaatactccctgattttagtgtcagcctcatcccaggtctcgcttccatcccaagggggacagtgttccttctctccaacccccccacccccctc

SEQ ID NO: 522666 - DNA, 120 bp, Artificial Sequence
  ENSG00000165494_64 (sequence is synthesized)
caactcaggctcggtctttggcccaggcttcgagcatgggcctctgggggggagggagtggggaggataaagggtggagtcccacttccgctttccaactccctttttaggccaccgcat

SEQ ID NO: 522667 - DNA, 120 bp, Artificial Sequence
  ENSG00000165494_65 (sequence is synthesized)
tgtatatcccgacacacacacgctttgaatagagccctttggggtgggggagacttaaaggcagtttgtggtttggggaagtaagagttaacataagccattttaattccctgggaagtg

SEQ ID NO: 522668 - DNA, 120 bp, Artificial Sequence
  ENSG00000165494_66 (sequence is synthesized)
taattgtgttctgtgggttggaaggaggtgaagggggacctgggagcgagctgttggtgggtgggaatagggatttggccccgagtggagcagccgcctgttaggagcccaacatggcgc

SEQ ID NO: 522669 - DNA, 120 bp, Artificial Sequence
  ENSG00000165494_67 (sequence is synthesized)
ctgaaaagcacatgatgcgaaagggaagagaggagaatccattccctgccagccaggcagctgctcactcccgtcagccccattttggggtgggggcggctagataaaacttttattctc

SEQ ID NO: 522670 - DNA, 120 bp, Artificial Sequence
  ENSG00000165494_68 (sequence is synthesized)
ctattggagggtctaatttgtcccaaaataggggcaagtggggttgagggtggggtttgggtggggggaggagatcttatccaacctgtaggtggagaactggcccagagggtaacaagt

SEQ ID NO: 522671 - DNA, 120 bp, Artificial Sequence
  ENSG00000165494_69 (sequence is synthesized)
acttgcagtttctctgaaaagttcagtccctcctcctcttccttttctctttttctcccttccctgatagcgaaggagtgtttttctttaccccttgacagaagtggtcctctgccacct

SEQ ID NO: 522672 - DNA, 120 bp, Artificial Sequence
  ENSG00000165494_70 (sequence is synthesized)
tatatttccctgtagtcctcctcttctgtggattcatatgggagcgatatgtcatttaagtaaagttactgttcaacttagttacaatgagttttaatagcgtcccagtgctacatttta

SEQ ID NO: 522673 - DNA, 120 bp, Artificial Sequence
  ENSG00000165494_71 (sequence is synthesized)
tttttcaagcttgtactcacggtttagttttttctagttgttagtgattgcaattatcaggatgagcctccttttagcagagtgaacccctttttaaaggccactttaacaacaaccacc

SEQ ID NO: 522674 - DNA, 120 bp, Artificial Sequence
  ENSG00000165494_72 (sequence is synthesized)
aatatattgtttagagacggtttctgtctagtgtaaaacttgagtggtctgactctaataaatggttttgaaatgtgtgactggtattataaaatttgtgaataaaacatataaaatatg

SEQ ID NO: 522675 - DNA, 120 bp, Artificial Sequence
  ENSG00000165494_73 (sequence is synthesized)
gtttgttcacttacttggtcttctatatatacctgtttcttcccaaatagggagcccagaatttaaaaaactaattatttgttgaccacagcaaactaattattgtttcccaatggtatt

SEQ ID NO: 522676 - DNA, 120 bp, Artificial Sequence
  ENSG00000165494_74 (sequence is synthesized)
ctaagttttctctttagttatccatactattattatttcttctgtccttttttcactgttacaccagagtggagaagttgaattattcagaatgccaaagatctagagaggtgaaattta

SEQ ID NO: 522677 - DNA, 120 bp, Artificial Sequence
  ENSG00000165494_75 (sequence is synthesized)
actgttctgccatgtccatcttgacttgactccaaactaaaataagctaactattgccttgttagctagcacaggatcatttcatttttagctaaaaggaaataaataactgggtcaggg

SEQ ID NO: 522678 - DNA, 120 bp, Artificial Sequence
  ENSG00000165494_76 (sequence is synthesized)
ctatcaataagaagacaggctccatcttccaaaagtcaccaaagttaaggtaaagagggtcaatcacattgttagagaataatactgatctttgggtattaactgtttcagccagctctt

SEQ ID NO: 522679 - DNA, 120 bp, Artificial Sequence
  ENSG00000165494_77 (sequence is synthesized)
ccaaaccgccaaggtggatgaaaatactaggaaaagtttatttaagttacgttctacatgggatgaaatattccctttgaagaaactttatgccctggatgtcagagtcaattcattaga

SEQ ID NO: 522680 - DNA, 120 bp, Artificial Sequence
  ENSG00000165495_0 (sequence is synthesized)
gtcagtctgatgaagattggcatcaggtgaagtctggagcaggacttctgaggctttctatcctccatgctgctcactagaaaaggggctgtgaactgtgctttggctctagcagacagg

SEQ ID NO: 522681 - DNA, 120 bp, Artificial Sequence
  ENSG00000165495_1 (sequence is synthesized)
aagaaattctggcccagctggaagtagaaagaggggagtgagtctcctgaggaccatctcagaggccccgggatcacccgaacagtcctccatgtgaatcaatcccatgatgcaacatgc

SEQ ID NO: 522682 - DNA, 120 bp, Artificial Sequence
  ENSG00000165495_2 (sequence is synthesized)
ctccccagcccccgctctgacgatgatggccacgcagaatgtcccgcccccaccctaccaggacagcccacagatgacggcaaccgcccagccaccctccaaggcccaggctgtccacat

SEQ ID NO: 522683 - DNA, 120 bp, Artificial Sequence
  ENSG00000165495_3 (sequence is synthesized)
ctctgccccctcagctgctgccagcacacctgtgcccagtgcccccatcgacccccaggcccagctggaggctgacaagcgagctgtatacaggcaccctcttttcccgctcctgacgct

SEQ ID NO: 522684 - DNA, 120 bp, Artificial Sequence
  ENSG00000165495_4 (sequence is synthesized)
gctgtttgagaaatgtgaacaggccacccagggctctgagtgcatcacctccgccagctttgatgtggacatcgagaactttgtccaccagcaggaacaggagcacaaacccttcttcag

SEQ ID NO: 522685 - DNA, 120 bp, Artificial Sequence
  ENSG00000165495_5 (sequence is synthesized)
cgatgacccagaactggacaatctgatggtgaaggcaatccaggtcctgagaatccacctgctggagctggagaaagtcaatgaactctgcaaggacttttgtaaccgttacatcacctg

SEQ ID NO: 522686 - DNA, 120 bp, Artificial Sequence
  ENSG00000165495_6 (sequence is synthesized)
cctcaaaaccaagatgcacagcgacaacctgctcaggaatgatctaggggggccctactcccccaaccagccctccatcaaccttcactcacaggacctcctgcagaattcccccaattc

SEQ ID NO: 522687 - DNA, 120 bp, Artificial Sequence
  ENSG00000165495_7 (sequence is synthesized)
catgtccggagtctccaataacccccaggggattgtggtcccagcctcagcgctccagcagggcaacatcgccatgacaaccgtcaactcacaagttgtgtcaggtggagccttatacca

SEQ ID NO: 522688 - DNA, 120 bp, Artificial Sequence
  ENSG00000165495_8 (sequence is synthesized)
accggttaccatggtaacctcccagggtcaggtggtcacccaagcaatcccccagggagccatccagatccagaacacacaggttaaccttgacctcacctccctcctggacaatgagga

SEQ ID NO: 522689 - DNA, 120 bp, Artificial Sequence
  ENSG00000165495_9 (sequence is synthesized)
taagaagtccaagaacaaacgaggagtcttgcccaagcatgccaccaatataatgcgttcttggctcttccagcatctcatgcacccctaccccacggaggatgagaagaggcagatcgc

SEQ ID NO: 522690 - DNA, 120 bp, Artificial Sequence
  ENSG00000165495_10 (sequence is synthesized)
agcccagaccaacctcaccctcctgcaagtaaacaactggttcatcaatgcccggaggcgcatcctgcagcccatgcttgatgccagcaacccagatcctgcccccaaagccaagaagat

SEQ ID NO: 522691 - DNA, 120 bp, Artificial Sequence
  ENSG00000165495_11 (sequence is synthesized)
caagtctcagcaccggcccacccaaagattctggcccaactccatcgctgcgggggtgctgcagcagcagggcggtgccccagggacaaaccccgatggttccatcaacttggacaacct

SEQ ID NO: 522692 - DNA, 120 bp, Artificial Sequence
  ENSG00000165495_12 (sequence is synthesized)
gcagtccctgtcctcagacagtgccaccatggccatgcagcaggctatgatggctgcacacgatgactcattggatgggacagaagaagaggatgaggatgagatggaagaggaggagga

SEQ ID NO: 522693 - DNA, 120 bp, Artificial Sequence
  ENSG00000165495_13 (sequence is synthesized)
ggaggagctggaggaggaggtcgacgagctgcagacgacaaatgtcagcgacctgggcttggaacacagtgactccctggagtagtcgggcagcccagatggcactgatcactgagcagg

SEQ ID NO: 522694 - DNA, 120 bp, Artificial Sequence
  ENSG00000165495_14 (sequence is synthesized)
agaggagtgtcgccgggaggccttcagggtgggggggaaggggacatgggcaggaagcaccgagggagttgggccctagcttccccaaatcagtagcttgaagaaaggcaaaggagacac

SEQ ID NO: 522695 - DNA, 120 bp, Artificial Sequence
  ENSG00000165495_15 (sequence is synthesized)
ccacttccctggaactgccgaggactctgtttggcggggccagtcgagcagcctgtgtggaaagacaggagtgagatctggactcaccaaatccctgaggatagatggcacccatggccc

SEQ ID NO: 522696 - DNA, 120 bp, Artificial Sequence
  ENSG00000165495_16 (sequence is synthesized)
ccacccacggaaggacttgagttgtttacaagccctgcactgaggcagattggtgctgttcgcagagtaggcctttgcccgggggcagacttagaaggaaggggagagacaaagggggac

SEQ ID NO: 522697 - DNA, 120 bp, Artificial Sequence
  ENSG00000165495_17 (sequence is synthesized)
tgagtttcatccccagaagtttctcagctcctttgacagacattcaagggcaggagggagccccaaagcataaccagtggccagaggagtgggagggcctgaggcatcacatcttgcaga

SEQ ID NO: 522698 - DNA, 120 bp, Artificial Sequence
  ENSG00000165495_18 (sequence is synthesized)
tcagaatgggatggaatccaccaggctccagctcatccctccaaggccctgtctctgcgcacagcaaccatggacatgggagaaagggatgggagccacagtgcccttcactctctcctg

SEQ ID NO: 522699 - DNA, 120 bp, Artificial Sequence
  ENSG00000165495_19 (sequence is synthesized)
gaaaccaactgtaagctggtgggctcaacctgtgggaggttaagaggagtcccttctgggttgactccaagagccaaggagatggcagaccctgggctaggaaccatatggaggtgactt

SEQ ID NO: 522700 - DNA, 120 bp, Artificial Sequence
  ENSG00000165495_20 (sequence is synthesized)
tgaggccacagctgtccctaggtgatcacagaacttagctcctttaacaacaggacaatggttttttaccctagatgttcccaccttcagtgctccacgccctccatagaccttcagaga

SEQ ID NO: 522701 - DNA, 120 bp, Artificial Sequence
  ENSG00000165495_21 (sequence is synthesized)
aggtgaaaccaggttatctgggaatctttccagcccgcaggtcgccacggccatccctttgctcccagcctggctccatcagcctccagcttcctttcttcattctgtccttcagggaag

SEQ ID NO: 522702 - DNA, 120 bp, Artificial Sequence
  ENSG00000165495_22 (sequence is synthesized)
gcagaagaaacattggaaagcatctagtccagtgggaagccaggggttggagaaggtgctacatccctcttcccatcaatatcctaaatgtgggggagggcccagagaatggcacccaag

SEQ ID NO: 522703 - DNA, 120 bp, Artificial Sequence
  ENSG00000165495_23 (sequence is synthesized)
agcctgcggggatgcccatcccacacaccccacccagctgttctaaccctgctatccacagccctggaggaactggggctcctggaaggaggaggaggctctccactgtccaccctaaca

SEQ ID NO: 522704 - DNA, 120 bp, Artificial Sequence
  ENSG00000165495_24 (sequence is synthesized)
cataccctcccacccaccttccagacccccttggttggcaccctctcctccggttccctctcaccccatggctgtgaatgacaggacaggtcacacgtgtgttttccattgggtttaatt

SEQ ID NO: 522705 - DNA, 120 bp, Artificial Sequence
  ENSG00000165495_25 (sequence is synthesized)
taatggacgtgcagtttcatttgtaaattgtgcattggccacctccttcagtggcaggatgtgagtggctacctggctcaactggaggggaccccttgggccctctggggcttcccctcc

SEQ ID NO: 522706 - DNA, 120 bp, Artificial Sequence
  ENSG00000165495_26 (sequence is synthesized)
cccacctggttggggtagagcaaaaggatggtcactcttccgaggtctccctgaaatgaatgtatttctcccccaaaagagctgatatttaatgttttaataaggatttttgagaaacaa

SEQ ID NO: 522707 - DNA, 120 bp, Artificial Sequence
  ENSG00000165495_27 (sequence is synthesized)
ataaccttatttataatctgggtgatccaatcattttttactcccttttgatgccatacatagaggaaagtctagcttttttggcgtgagacttttgcaatgtgcagtgggataaaatgc

SEQ ID NO: 522708 - DNA, 120 bp, Artificial Sequence
  ENSG00000165495_28 (sequence is synthesized)
atttccttttctggttcgtttttcttgttaacacgcgcacacagacacacacacacaccgttccactcaccacctggacaggcgtcccccagcacggacacactggcacacaggtgccca

SEQ ID NO: 522709 - DNA, 120 bp, Artificial Sequence
  ENSG00000165495_29 (sequence is synthesized)
catctcttcctctcagcccctccacctgcctaatgttatgcaacctccttctgatgtatccaccaaaccagtactgaatgtggccgagacgttttcagtaaatcttattacctaccgtaa

SEQ ID NO: 522710 - DNA, 120 bp, Artificial Sequence
  ENSG00000165495_30 (sequence is synthesized)
tcagtctgatgaagattggcatcaggtgaagtctggagcaggacttctgaggctttctatcctccatgctgctcactagaaaaggggctgtgaactgtctcctcggcagctgctgagctg

SEQ ID NO: 522711 - DNA, 120 bp, Artificial Sequence
  ENSG00000165495_31 (sequence is synthesized)
cagaatttatggaagcccttcacgctttgtgacagactgctaatgaaagagaggccaggcttctgcgtctgccttctttggtttctaatttgtccagggattctatccccaagtgggggc

SEQ ID NO: 522712 - DNA, 120 bp, Artificial Sequence
  ENSG00000165495_32 (sequence is synthesized)
cctgtcagcagggcttggcttgaaaggcccctgctgagggccacccagggggcagagggttgctcccagctccaagtacctgccagggatgtgaaacatgctctgggattaatgggaacc

SEQ ID NO: 522713 - DNA, 120 bp, Artificial Sequence
  ENSG00000165495_33 (sequence is synthesized)
agatgggcaggacagcccctccacctggcctccaccggagaaatgctcagatttctggcattgtgctgaagcttttcttaggagttctctgagactgttttttcgctccaggccacatgc

SEQ ID NO: 522714 - DNA, 120 bp, Artificial Sequence
  ENSG00000165495_34 (sequence is synthesized)
gtgttgtcacgccggtgtcagtctgatgaagattggcatcaggtgaagtctggagcaggacttctgaggctttctatcctccatgctgctcactagaaaaggggctgtgaactattgcat

SEQ ID NO: 522715 - DNA, 120 bp, Artificial Sequence
  ENSG00000165495_35 (sequence is synthesized)
ctacagacagtcagagtgcccgcaagaaatcaggcaatgagcgtaaaaacaacagactcgatccaccccgctcgaccagatcttgatgggaacctatgctcgaagggtgctttggctcta

SEQ ID NO: 522716 - DNA, 120 bp, Artificial Sequence
  ENSG00000165495_36 (sequence is synthesized)
tctcagaggccccgggatcacccgaacatatgccatgataagggctggatctgttatggtgagattgggccccaactccaaaggaccttgcccaggattttgtcctccatgtgaatcaat

SEQ ID NO: 522717 - DNA, 120 bp, Artificial Sequence
  ENSG00000165495_37 (sequence is synthesized)
tatctcccaggtttgctgctggggtggccgcagaaccgggagtcggtcacagagttcacagacgaggtcacatggaggagaagcctggtgccaggaacaagctaggagtaactggaccac

SEQ ID NO: 522718 - DNA, 120 bp, Artificial Sequence
  ENSG00000165495_38 (sequence is synthesized)
gtgccgctgacgtcccgagcagtgctgggaagtataggctgtgttgtcacgccggtgtcagtctgatgaagattggcatcaggtgctttggctctagcagacaggaagaaattctggccc

SEQ ID NO: 522719 - DNA, 120 bp, Artificial Sequence
  ENSG00000165495_39 (sequence is synthesized)
aaggcactttagcaggaatctggcggcagagaggccgattgatgagatgccgaggtctgcagccccaactggaggcgccccggaagagtgagatggagtggggagggggtggaccgggca

SEQ ID NO: 522720 - DNA, 120 bp, Artificial Sequence
  ENSG00000165495_40 (sequence is synthesized)
tacagtggctccatgggcctcagtgaccacattgagagagagttgaatggcaaatacaggagaaatggctgcaagggaaattacagaatagaggacatcctggagaggcctggagagggg

SEQ ID NO: 522721 - DNA, 120 bp, Artificial Sequence
  ENSG00000165495_41 (sequence is synthesized)
agaacacagcccggaagcccctcctctctgaccacccctgcacttcttgccttccctgctgagagctgctctacccttttttgcaggtgctttggctctagcagacaggaagaaattctg

SEQ ID NO: 522722 - DNA, 120 bp, Artificial Sequence
  ENSG00000165495_42 (sequence is synthesized)
attgccaaatgagcgacactaacaagagtgatgctctcagaggaaggacagactgagtggactgcaaggataggggagacttctggaagaggtggatggtgtggcagacccttgacactc

SEQ ID NO: 522723 - DNA, 120 bp, Artificial Sequence
  ENSG00000165495_43 (sequence is synthesized)
ccttctggacctgggtctggggaggagctagaaggagggaggggggcaggcaggaaggggaaaggacggaagaggactctggggctgtagggtctaagctctcagtgtcattgtcacaaa

SEQ ID NO: 522724 - DNA, 120 bp, Artificial Sequence
  ENSG00000165495_44 (sequence is synthesized)
ctccaccgagggaggggctcccagctcagtttcttgactaaagttttctgtaagtttatagacggttagcgccaagacccaattgtgatggtttagaacaaatttgggtcaaaatctcat

SEQ ID NO: 522725 - DNA, 120 bp, Artificial Sequence
  ENSG00000165495_45 (sequence is synthesized)
gagcccctgagaggaccaagtaaggctgttgtcccttccccgaagcacctcccaccagaggctctgtcctaggctctagacaccatcccccacccacccataaagcagaaagccatagct

SEQ ID NO: 522726 - DNA, 120 bp, Artificial Sequence
  ENSG00000165495_46 (sequence is synthesized)
cgctacccaagggctccaagtagagggtctttacacatgagtgccaaatgaactgggaaccctgcttgccctcgctcctacccactcccatggcaggggaccccaaaactggttgtctcc

SEQ ID NO: 522727 - DNA, 120 bp, Artificial Sequence
  ENSG00000165495_47 (sequence is synthesized)
tcaggtggagccttataccaaccggttaccatggtaacctcccagggtcaggtggtcacccaagcaatcccccagggagccatccagatccagaacacacaggtgagtgtgtgtaggtgt

SEQ ID NO: 522728 - DNA, 120 bp, Artificial Sequence
  ENSG00000165495_48 (sequence is synthesized)
gtgcacatgtgcatggtgtgggctagggcacctgtaatcgcttcttatctgccaggcactttacacgggtgactcattgaatcctcatcatcctctaagaggtatcattacccctacttt

SEQ ID NO: 522729 - DNA, 120 bp, Artificial Sequence
  ENSG00000165495_49 (sequence is synthesized)
acagataagaagctgggtcttggaaaggttttatcaactcctgggattttgctgcctccctcctggggttacatcaaaggatcctgcacttcctattcctgtctgcagactgagccgctg

SEQ ID NO: 522730 - DNA, 120 bp, Artificial Sequence
  ENSG00000165495_50 (sequence is synthesized)
tgtccctcagtggtagagagtgcacacacaaaggaagagtagaaagatcggaagtcagagtctgggatctgacattaactctgggatctctgataagtcacctaacctctctgagcctca

SEQ ID NO: 522731 - DNA, 120 bp, Artificial Sequence
  ENSG00000165495_51 (sequence is synthesized)
gacttcttattgataaaagggggattaatagcaactgcacacagcctagccaacctacagggctgctgtgagaatgaaccacagcgatggataggaaagtgctttgcaaactgtaaagta

SEQ ID NO: 522732 - DNA, 120 bp, Artificial Sequence
  ENSG00000165495_52 (sequence is synthesized)
aactgtaaagtaccacagaaatgctgataactacttgacagcttatggcaaattcatatcttctcctgttctctctgcatggccctgtttcctctgtctttctctctctctctctctctc

SEQ ID NO: 522733 - DNA, 120 bp, Artificial Sequence
  ENSG00000165495_53 (sequence is synthesized)
tctctctctctctctcccccccttccccatctcttcctccttgtccttcttcccttctcccatcacccaagcctcacctccactctctgaggggctggcatgggctgagagggaaaggtg

SEQ ID NO: 522734 - DNA, 120 bp, Artificial Sequence
  ENSG00000165495_54 (sequence is synthesized)
acctccccagggccctaggaatgagccgggaaaggggctggcagccaagcctgccgtcgctatggcaacaggtccccagccgctgccctcacaggctgctgatgctgattttctctccac

SEQ ID NO: 522735 - DNA, 120 bp, Artificial Sequence
  ENSG00000165496_0 (sequence is synthesized)
gagcgcattttgacttcgaggcaccgccgacgttactgtgtcgccatggggcgccgtccagctcgctgttaccggtattgtaagaacaagccgtacccaaaatctcgtttctgccgaggg

SEQ ID NO: 522736 - DNA, 120 bp, Artificial Sequence
  ENSG00000165496_1 (sequence is synthesized)
gttcctgatgccaagatccgcatctttgacctgggtagaaagaaggcaaaagtggatgagttcccactcggtggccacatggtgtctgatgaatatgagcagctgtcttctgaagccctg

SEQ ID NO: 522737 - DNA, 120 bp, Artificial Sequence
  ENSG00000165496_2 (sequence is synthesized)
gaggccgcccgtatttgtgccaacaaatacatggtgaaaagttgtggcagagatggctttcacatgcgagtgcggctccatcccttccatgtcatccgcatcaacaagatgttgtcctgt

SEQ ID NO: 522738 - DNA, 120 bp, Artificial Sequence
  ENSG00000165496_3 (sequence is synthesized)
agggtactgtagcccgggtccacattggtcaagtcatcatgtccatccgcaccaagcttcagaacgaggagcatgtgattgaagccttgcgcagggccaagttcaagttccctggacgcc

SEQ ID NO: 522739 - DNA, 120 bp, Artificial Sequence
  ENSG00000165496_4 (sequence is synthesized)
agaagattcatatctccaagaagtggggcttcacgaagtttaatgctgacgaatttgaagacatggtggccaagaagtgcctcatccctgatggttgtggagtcaagtacgttcccagtc

SEQ ID NO: 522740 - DNA, 120 bp, Artificial Sequence
  ENSG00000165496_5 (sequence is synthesized)
atggccccttggacaagtggcgggttctgcactcatgaaggttttggcagtactgtctccttgggccatgctggtctgacttatgcttactaataaattctgtttactggcaaaaaataa

SEQ ID NO: 522741 - DNA, 120 bp, Artificial Sequence
  ENSG00000165501_0 (sequence is synthesized)
gaggaccccgatggcggcgccgggtggcgggaaggaggaagtttcaaagccagcttgacgtggttgtggccgttgggcgagatgaagctacactgtgaggtggaggtgatcagccggcac

SEQ ID NO: 522742 - DNA, 120 bp, Artificial Sequence
  ENSG00000165501_1 (sequence is synthesized)
ttgcccgccttggggcttaggaaccggggcaagggcgtccgagccgtgttgagcctctgtcagcagacttccaggagtcagccgccggtccgagccttcctgctcatctccaccctgaag

SEQ ID NO: 522743 - DNA, 120 bp, Artificial Sequence
  ENSG00000165501_2 (sequence is synthesized)
gacaagcgcgggacccgctatgagctaagggagaacattgagcaattcttcaccaaatttgtagatgaggggaaagccactgttcggttaaaggagcctcctgtggatatctgtctaagt

SEQ ID NO: 522744 - DNA, 120 bp, Artificial Sequence
  ENSG00000165501_3 (sequence is synthesized)
aaggccatttccagcagtttaaaaggtttcctttcagctatgagactggctcatagaggctgtaatgttgatacaccagtttcaacgctcacaccagtgaagacttcagaatttgaaaac

SEQ ID NO: 522745 - DNA, 120 bp, Artificial Sequence
  ENSG00000165501_4 (sequence is synthesized)
tttaaaactaaaatggttatcacatccaaaaaagactatcctctaagtaagaattttccatattccttggaacatcttcagacttcttactgtgggcttgtccgagttgatatgcgtatg

SEQ ID NO: 522746 - DNA, 120 bp, Artificial Sequence
  ENSG00000165501_5 (sequence is synthesized)
ctttgcttaaaaagccttaggaaattagacttgagtcacaaccatataaaaaagcttccagctacaattggagacctcatacaccttcaagaacttaacctgaatgacaatcacttggag

SEQ ID NO: 522747 - DNA, 120 bp, Artificial Sequence
  ENSG00000165501_6 (sequence is synthesized)
caagaacaaaatcaaggcactccctgtgcagttttgccagctccaggaacttaagaatttaaaacttgacgataatgaattgattcaatttccttgcaagataggacaactaataaacct

SEQ ID NO: 522748 - DNA, 120 bp, Artificial Sequence
  ENSG00000165501_7 (sequence is synthesized)
tcgctttttgtcagcagctcgaaataagcttccatttttgcctagtgaatttagaaatttatcccttgaatacttggatctttttggaaatacttttgaacaaccaaaagtccttccagt

SEQ ID NO: 522749 - DNA, 120 bp, Artificial Sequence
  ENSG00000165501_8 (sequence is synthesized)
aataaagctgcaagcaccattaactttattggaatcttctgcacgaaccatattacataataggattccatatggctctcatatcattccattccatctctgccaagatttggataccgc

SEQ ID NO: 522750 - DNA, 120 bp, Artificial Sequence
  ENSG00000165501_9 (sequence is synthesized)
aaaaatttgtgtttgtggaagattctgtctgaactctttcattcaaggaactactaccatgaatctgcattctgttgcccacactgtggtcttagtagataatttgggtggtactgaagc

SEQ ID NO: 522751 - DNA, 120 bp, Artificial Sequence
  ENSG00000165501_10 (sequence is synthesized)
acctattatctcttatttctgttctctaggctgttatgttaattcctctgatatgttaaagtaatgggtgagaccagaaaaagaaatttcaataacagatcagtttggggtgcatgtatg

SEQ ID NO: 522752 - DNA, 120 bp, Artificial Sequence
  ENSG00000165501_11 (sequence is synthesized)
attttgcagcgtcaaattggagtaagggaagatttctgtatacttgctggagaggaggaatgtgtatagttactcatttagatgactccaaaacttttattaaaaccaattttagtttta

SEQ ID NO: 522753 - DNA, 120 bp, Artificial Sequence
  ENSG00000165501_12 (sequence is synthesized)
aaaaacctatatgtgtggaacaaggacagaaactagcaaaagagataggagcatgctgctatgtggaatgttcagctttaacccagaagggattgaagactgtttttgatgaggctatca

SEQ ID NO: 522754 - DNA, 120 bp, Artificial Sequence
  ENSG00000165501_13 (sequence is synthesized)
aaaaagaataggatcaagatgtataaactgttgtttaattacgtgagaaacatcttcagtggccaaggaaactgtccatttctctcagaaagcaaatgaaatgctgcagctatacccaga

SEQ ID NO: 522755 - DNA, 120 bp, Artificial Sequence
  ENSG00000165501_14 (sequence is synthesized)
ccttttataggccatttccagcagtttaaaaggtttcctttcagctatgagactggctcatagaggctgtaatgttgatacaccagtttcaacgctcacaccagtgaagacttcagaatt

SEQ ID NO: 522756 - DNA, 120 bp, Artificial Sequence
  ENSG00000165501_15 (sequence is synthesized)
ccgggcgcgagcccggatccaggtggtcagtcccggtacgcaaccacggcgagaacccggccctgctaagggagaagggaagccgtttcccgcgggcttcatacagacacggtgctaaga

SEQ ID NO: 522757 - DNA, 120 bp, Artificial Sequence
  ENSG00000165501_16 (sequence is synthesized)
aatcttctgcacgaaccatattacataatagaaccatctatccgaaagagattaatgtaaacatgtgggagacactccctggcagagttttttaaaaaatggttacttaagcaacagatt

SEQ ID NO: 522758 - DNA, 120 bp, Artificial Sequence
  ENSG00000165501_17 (sequence is synthesized)
aataagtctttttatgaaaaatttaaaaattgcaaatagggccatcctagatcccgtaccaaaggattccatatggctctcatatcattccattccatctctgccaagatttggataccg

SEQ ID NO: 522759 - DNA, 120 bp, Artificial Sequence
  ENSG00000165501_18 (sequence is synthesized)
acccgctatgagcactcaggatagaatagcaaaggagacaagattcctgctctcatggagtttgtatataacctactgggaggtgtgcccaccccaggctaatggactgaagttatgaag

SEQ ID NO: 522760 - DNA, 120 bp, Artificial Sequence
  ENSG00000165502_0 (sequence is synthesized)
cctgttaggcgagagctgcgaaaggcgagagctgcgaagggccaggtgtcgggcgctgtttctcgttttcatcatatagacaaaacagccctgctgcaaagatggtcaacgtacctaaaa

SEQ ID NO: 522761 - DNA, 120 bp, Artificial Sequence
  ENSG00000165502_1 (sequence is synthesized)
cccgaagaaccttctgtaagaagtgtggcaagcatcagcctcacaaagtgacacagtataagaagggcaaggattctttgtatgcccagggaaggaggcgctatgatcggaagcagagtg

SEQ ID NO: 522762 - DNA, 90 bp, Artificial Sequence
  ENSG00000165502_2 (sequence is synthesized)
aggctaagaccacaaagaagattgtgctaaggctggaatgtgttgagcctaactgcagatccaagaggatgctggccattaagagatgca

SEQ ID NO: 522763 - DNA, 120 bp, Artificial Sequence
  ENSG00000165502_3 (sequence is synthesized)
ttcttcaattttgaagagaaaatggtgaagccatagaaaagttacccgagggaaaataaatacagtgatattcttacgcaaactttttgtggtttttacttataaatagaattccatgtt

SEQ ID NO: 522764 - DNA, 120 bp, Artificial Sequence
  ENSG00000165502_4 (sequence is synthesized)
tagtgtagtcccacctcaaactttactaacaagtttatatatgtatgaagggaaaatactactttactactttttgttttctggtcaatttcaaatgttgaatgaattcataaacattga

SEQ ID NO: 522765 - DNA, 120 bp, Artificial Sequence
  ENSG00000165506_0 (sequence is synthesized)
cccagaaactctgaggcggatcccccaacccagtgtcagactgatcgcctttggcccgagggcgaggagccacaggacagtatggccaaagcggcggcctcctcgtcgctggaggacttg

SEQ ID NO: 522766 - DNA, 120 bp, Artificial Sequence
  ENSG00000165506_1 (sequence is synthesized)
gacctgagcggagaggaggtccagcggctcacctccgccttccaggacccggagttccggcgaatgttctcccagtacgccgaggagctcaccgacccggagaaccggcggcgctacgag

SEQ ID NO: 522767 - DNA, 120 bp, Artificial Sequence
  ENSG00000165506_2 (sequence is synthesized)
gcggagatcaccgcgctagagcgtgagcgcggggtggaagtgcggttcgtgcacccggagcccggccatgtgctgcgcaccagcctggacggggcgcggcgctgctttgtgaatgtctgc

SEQ ID NO: 522768 - DNA, 120 bp, Artificial Sequence
  ENSG00000165506_3 (sequence is synthesized)
ctgcagcaacgcgttggtgggcgcgcccagcagccggcccggctccggtggcgaccggggcgcagctcctggcagccactggtccctgccctacagcctggcgcccggccgcgagtacgc

SEQ ID NO: 522769 - DNA, 120 bp, Artificial Sequence
  ENSG00000165506_4 (sequence is synthesized)
cgcagcagcagccgctacatggtctacgacgtggtcttccatccagacgcgcttgcgctggcccggcggcacgagggcttccgccagatgctggacgccacggccctggaggccgtcgag

SEQ ID NO: 522770 - DNA, 120 bp, Artificial Sequence
  ENSG00000165506_5 (sequence is synthesized)
aagcagttcggcgtgaagctggaccgcaggaatgccaagaccctgaaggccaagtataaggggaccccagaggctgcggtgctgcgcacgcccctgcccggggtcatccccgcaaggcct

SEQ ID NO: 522771 - DNA, 120 bp, Artificial Sequence
  ENSG00000165506_6 (sequence is synthesized)
gacggggagccgaagggtcctctcccggacttcccctacccttaccagtacccggcagcccccgggccccgggcgccctcccctccggaagcggccttgcagcccgcccccaccgagcct

SEQ ID NO: 522772 - DNA, 120 bp, Artificial Sequence
  ENSG00000165506_7 (sequence is synthesized)
cgctacagcgtggtgcagcgccaccacgtggacctccaggattaccgctgctccagggactcagccccgagccccgtgccccatgagctggtgatcaccatcgaactgccgctgttgcgc

SEQ ID NO: 522773 - DNA, 120 bp, Artificial Sequence
  ENSG00000165506_8 (sequence is synthesized)
tcggccgagcaggcggcgctggaggtaacgagaaagctgctgtgcctcgactcgaggaaacctgactaccggctgcggctctcgctcccgtacccagtggacgatggccgcggcaaggca

SEQ ID NO: 522774 - DNA, 120 bp, Artificial Sequence
  ENSG00000165506_9 (sequence is synthesized)
caattcaacaaggcccggcggcagctggtggttacgctgccagtggtgctgccggccgcgcgccgggagcccgctgtcgccgtcgccgccgccgcgccggaagagtccgcggaccggtcc

SEQ ID NO: 522775 - DNA, 120 bp, Artificial Sequence
  ENSG00000165506_10 (sequence is synthesized)
ggaactgacggccaggcctgcgcttccgctcgcgagggggaggcgggacccgcgaggagtcgcgcggaggacggaggccacgatacctgcgtggctggggctgcgggctccggggtcacc

SEQ ID NO: 522776 - DNA, 120 bp, Artificial Sequence
  ENSG00000165506_11 (sequence is synthesized)
accctgggcgacccggaggtggcgcctccgccggccgcagctggagaggagcgtgtccccaagccgggggagcaggacttgagcaggcacgcggggtcaccgccgggcagcgtggaggag

SEQ ID NO: 522777 - DNA, 120 bp, Artificial Sequence
  ENSG00000165506_12 (sequence is synthesized)
gggaagagagagtgcgcgcggagatagcagtgtggaaacacgcgaggagtcggagggcacgggcggccagcgctcagcctgcgccatgggtggtcccgggaccaagagcggggagccttt

SEQ ID NO: 522778 - DNA, 120 bp, Artificial Sequence
  ENSG00000165506_13 (sequence is synthesized)
gtgtcctccgttactgtgtaatcaggacaaagaaaccttgactctgctcattcaggtgcctcggatccagccgcaaagtcttcaaggagatttgaatcccctctggtacaaattacgctt

SEQ ID NO: 522779 - DNA, 120 bp, Artificial Sequence
  ENSG00000165506_14 (sequence is synthesized)
ctccgcacaagacttagtttattccttctttttgcaatttgctccagagaataaattgagtaccacagaacctgtgattagcatttcttcaaacaatgcagtgatagaactggcaaaatc

SEQ ID NO: 522780 - DNA, 120 bp, Artificial Sequence
  ENSG00000165506_15 (sequence is synthesized)
tccagagagccatggacattggagagagtggtattatggtgtaaacaacgattctttggaggaaaggttatttgtcaatgaagaaaatgttaatgagtttcttgaagaggtcctgagctc

SEQ ID NO: 522781 - DNA, 120 bp, Artificial Sequence
  ENSG00000165506_16 (sequence is synthesized)
tccattcaaacagtctatgtccttgaccccaccattaattgaagttcttcaagttactgataataagattcaaattaatgcaaagttgcaagaatgtagtaactctgatcagctacaagg

SEQ ID NO: 522782 - DNA, 120 bp, Artificial Sequence
  ENSG00000165506_17 (sequence is synthesized)
aaaggaggaaagagtaaatgaagaaagtcatctaactgaaaaggaatatatagaacattgtaacacccctacaactgattctgattcatctatagcagttaaagcactacaaatagatag

SEQ ID NO: 522783 - DNA, 120 bp, Artificial Sequence
  ENSG00000165506_18 (sequence is synthesized)
ctttggtttagttacatgctttcaacaagagtctcttgatgtttctcaaatgatacttggaaaatctcagcaacctgagtcaaaaatgcaatctgaatttataaaagaaaaaagtgctac

SEQ ID NO: 522784 - DNA, 120 bp, Artificial Sequence
  ENSG00000165506_19 (sequence is synthesized)
ttgttcaaatgaggaaaaagataacttaaacgagtcagtaataactgaagagaaagaaacagatggagatcacctatcttcattactgaacaaaactacggttcacaatatacctggatt

SEQ ID NO: 522785 - DNA, 120 bp, Artificial Sequence
  ENSG00000165506_20 (sequence is synthesized)
cgacagcataaaagaaaccaatatgcaggatggtagtgtgcaggtcattaaagatcatgtgaccaattgtgcattcagttttcagaattctttgctatatgatttggattaattctatat

SEQ ID NO: 522786 - DNA, 120 bp, Artificial Sequence
  ENSG00000165506_21 (sequence is synthesized)
aaaaatacctgtatctaaaattgattctgttaactgttgtcttaaaactaaaggtattaaagtataaaattaaaatttgcaattttttttaaaaaattgcaattttgattctcatggggg

SEQ ID NO: 522787 - DNA, 120 bp, Artificial Sequence
  ENSG00000165506_22 (sequence is synthesized)
aaaattgcaattttgattctcatgggggaaattggagataatttttttttttttgcctctggagtttaaagtttccttatggagataagttttgtgattcctgtaatagatgtgtatgtt

SEQ ID NO: 522788 - DNA, 120 bp, Artificial Sequence
  ENSG00000165506_23 (sequence is synthesized)
gatgtgtatgttttctatttgagagttaaaacatttgagagttaaaacatttagttttaatacaacctatgtatatatacttctgtgttaaattttgctttgtcattaataaaatttaaa

SEQ ID NO: 522789 - DNA, 120 bp, Artificial Sequence
  ENSG00000165507_0 (sequence is synthesized)
acactgctcagggaagagcctgctacggtggactgtgagactcagtgcactgtcctcctcccagcgaccccacgctggaccccctgccggaccctccacccttcggcccccaagcttccc

SEQ ID NO: 522790 - DNA, 120 bp, Artificial Sequence
  ENSG00000165507_1 (sequence is synthesized)
aggggcttcctttggactggactgtccctgctcatccattctcctgccacccccagacctcctcagctccaggttgccacctcctctcgccagagtgatgaggtcccggcttctgctctc

SEQ ID NO: 522791 - DNA, 120 bp, Artificial Sequence
  ENSG00000165507_2 (sequence is synthesized)
cgtggcccatctgcccacaattcgggagaccacggaggagatgctgcttgggggtcctggacaggagcccccaccctctcctagcctggatgactacgtgaggtctatatctcgactggc

SEQ ID NO: 522792 - DNA, 120 bp, Artificial Sequence
  ENSG00000165507_3 (sequence is synthesized)
acagcccacctctgtgctggacaaggccacggcccagggccaacccaggccaccccacaggccagcccaggcctgccggaagggccgccctgctgtgtccctgcgagacatcaccgcacg

SEQ ID NO: 522793 - DNA, 120 bp, Artificial Sequence
  ENSG00000165507_4 (sequence is synthesized)
tttcagtggccagcagcccacactgcccatggctgatactgtggaccccctggactggctttttggggagtcccaggaaaagcagccaagccagagggacctgccaaggaggactggccc

SEQ ID NO: 522794 - DNA, 120 bp, Artificial Sequence
  ENSG00000165507_5 (sequence is synthesized)
ctctgctggcctctggggtccacatagacagatggacagcagcaagcccatgggggcccccagagggaggctctgtgaagccaggatgcctgggcattccctggcaagaccaccgcagga

SEQ ID NO: 522795 - DNA, 120 bp, Artificial Sequence
  ENSG00000165507_6 (sequence is synthesized)
tgggcagcagagctctgacctaagaagctggacttttgggcagtctgcccaagccatggcctcccgccaccgcccccgccccagcagtgtcctcagaacactctactcgcacctcccggt

SEQ ID NO: 522796 - DNA, 120 bp, Artificial Sequence
  ENSG00000165507_7 (sequence is synthesized)
gatccatgaactctgacccctccccagtaaaggcttctgtagagagcatgctgggtctgcatctcctctcgtctcctccatggtggtcactgcccctggcaggtctctgaaagggaaatg

SEQ ID NO: 522797 - DNA, 120 bp, Artificial Sequence
  ENSG00000165507_8 (sequence is synthesized)
aggagatgttaccaatcccgttcgctctgacccttgctggctgatcaccttgagcaacttacttaacatctgtgttcctcagtttctcatgggtaatatagggataattactggcacctg

SEQ ID NO: 522798 - DNA, 120 bp, Artificial Sequence
  ENSG00000165507_9 (sequence is synthesized)
cctcccaggccattctgacgtgtaaccgcatataggagcccactggctgagtagctaccatcatcgctggtggggaaactggtggtaggggtgtgagggtagtgggggtgtcagcccccc

SEQ ID NO: 522799 - DNA, 120 bp, Artificial Sequence
  ENSG00000165507_10 (sequence is synthesized)
aggtgtttcagaacaaggcctcgggcactcccaagtctgcctcttggctcccaccctcaaagcccatgttctgtgaggcccaagagaacacatggagtcttagcaaatgcactaatgtat

SEQ ID NO: 522800 - DNA, 120 bp, Artificial Sequence
  ENSG00000165507_11 (sequence is synthesized)
tccgggggactgtcacctggcaccactggggcactctgctggctacaactcatacgtcctgtggtggcattgggagagttcccccatgatgagggccaagatagaatctgtaccactcag

SEQ ID NO: 522801 - DNA, 120 bp, Artificial Sequence
  ENSG00000165507_12 (sequence is synthesized)
tgctaccatccccacccctacaccacttccacacaggggcctcatggcatggtcagggtcccagctgtgggtgagagcagggcactgtccagctgtccactggggaagtcaagatgtcct

SEQ ID NO: 522802 - DNA, 120 bp, Artificial Sequence
  ENSG00000165507_13 (sequence is synthesized)
aaggcccaggtcagggcatctggagtctgaaggaccctagttcctagaggcatctggcagcaagaaggtgaggcatcagggaacgggaatcaggctgggactgatcagaggtgaagggac

SEQ ID NO: 522803 - DNA, 120 bp, Artificial Sequence
  ENSG00000165507_14 (sequence is synthesized)
agagagaggagaggaggaagattgagctgggggcaacagccaagctcacctgggcaggtctctgccacctccttgctctgtgagctgtcagtctaggttattctctttttttgtggctat

SEQ ID NO: 522804 - DNA, 120 bp, Artificial Sequence
  ENSG00000165507_15 (sequence is synthesized)
ttttaattgctttggatttgttaaatgttttctgtcttctgttaagtgtgttttctctggagatagaatgtaaaccatattaaaaggaaaaagtttcagacaagcaattacccagtttcc

SEQ ID NO: 522805 - DNA, 120 bp, Artificial Sequence
  ENSG00000165507_16 (sequence is synthesized)
ttatctataaaatggggacatcagcaatgttcttcacaccctgcaagggctgggaatctgcgcatgtgaacttggagctgcatttatgagcactgtagacaaatgtttgtatctgtcaca

SEQ ID NO: 522806 - DNA, 120 bp, Artificial Sequence
  ENSG00000165507_17 (sequence is synthesized)
gcagccccagaggagtgtggtgacgctgaggggcggtgggacgcatggcaggccctcaccaccaggcttctgtttcccaacaggttgccacctcctctcgccagagtgatgaggtcccgg

SEQ ID NO: 522807 - DNA, 120 bp, Artificial Sequence
  ENSG00000165507_18 (sequence is synthesized)
cccggatggttctgcacatggccctggtggggggcatgggggtcgggctgaggaggaggcgagactcacgggacaggcctgcgtctggtccaggatgtccagggtgccgacactttcact

SEQ ID NO: 522808 - DNA, 120 bp, Artificial Sequence
  ENSG00000165507_19 (sequence is synthesized)
tgccctccacctgcgttgcttcctcacagtaaatgccctggacttgcttttggcattgtacagcctcttgcttttccccatatcacttcctacaaggcctgctgtggctgctgcgggcca

SEQ ID NO: 522809 - DNA, 120 bp, Artificial Sequence
  ENSG00000165507_20 (sequence is synthesized)
ccctgaggggtgcctgcttcttccccaccctgactttccaaaggcgcagtggaaggtgatggccctgtgagtaaggccctgaagtctgcagtaagccactttccctcaacgctgtctccc

SEQ ID NO: 522810 - DNA, 120 bp, Artificial Sequence
  ENSG00000165507_21 (sequence is synthesized)
ttcccgaagggaaagccacagccctggctaatgttggaggaaggggaggcctggacagctgcctgaacccaagctgggctctgtggggctgtggggccagcagacgtgggatgtgagcca

SEQ ID NO: 522811 - DNA, 120 bp, Artificial Sequence
  ENSG00000165507_22 (sequence is synthesized)
cactggtaatttcaatcttctagtacatgttaggaggtgatatggtttggatgtgtgtccccacccaaatctcatgtggaattgtaattcccagtgttggaggtggggccaggtgggagg

SEQ ID NO: 522812 - DNA, 120 bp, Artificial Sequence
  ENSG00000165509_0 (sequence is synthesized)
atgctgctgccctgccactgggtgttggatgccaccttcagtgatggcagtctaggccagtgggtgaaaaacacatgtgccacatatgccttatccccagtggtgctcccacctcagccc

SEQ ID NO: 522813 - DNA, 120 bp, Artificial Sequence
  ENSG00000165509_1 (sequence is synthesized)
cagccccggaaaaaggccacagataaggactattctgcctttcatcttgggcatctgagggaggtgaggctttttctgaggggtggaacttcagatcagcgaatggatagtcttgtcctc

SEQ ID NO: 522814 - DNA, 120 bp, Artificial Sequence
  ENSG00000165509_2 (sequence is synthesized)
tgccccacatacttcaagctctggaggaccctatcagggtccccaggtttacaactttctgacttgcattttgggagtcagccggaggggaagttttctctgaggagggcagtttcagtt

SEQ ID NO: 522815 - DNA, 120 bp, Artificial Sequence
  ENSG00000165509_3 (sequence is synthesized)
aagcagagggaggaaccccaggactggccactcaacgagaagagaactctgtggaaggacagtgaccttccaacatggaggagaggcacaggctacaccctttcccttcctgccgtcagc

SEQ ID NO: 522816 - DNA, 120 bp, Artificial Sequence
  ENSG00000165509_4 (sequence is synthesized)
cctggaaaaaggttgtggggggagaaagcggggagcttgccagagagcgagcccttgttcacttatacactggatgaaaaggtggacaagttggtgcagtttcttctcctcaaatatcaa

SEQ ID NO: 522817 - DNA, 120 bp, Artificial Sequence
  ENSG00000165509_5 (sequence is synthesized)
gcaaaagagcctctcacaagagcagagatgcagatgaatgtcatcaacacatacacgggctactttcctatgatcttcaggaaagcccgtgagttcatagagattctttttggcatttcc

SEQ ID NO: 522818 - DNA, 120 bp, Artificial Sequence
  ENSG00000165509_6 (sequence is synthesized)
ctgacagaagtggaccccgaccatttctatgtctttgtaaacacattagacctcacctgtgaggggagtctgagtgatgagcagggcatgccccagaaccgcctcctgattcttattctg

SEQ ID NO: 522819 - DNA, 120 bp, Artificial Sequence
  ENSG00000165509_7 (sequence is synthesized)
agtgtgatcttcataaagggcaactgtgcatctgaggaggtcatctgggaagtgctgaatgcaatagggccctggtcagccttggcagggttcgcggatgtgctttcccgacttgcactg

SEQ ID NO: 522820 - DNA, 120 bp, Artificial Sequence
  ENSG00000165509_8 (sequence is synthesized)
ggacctgaagcattttgcgaggagtctggactcaggtcagcagagggaagcgtcttagacctggccaatcctcaaggacttgcaggccacagacaggaagatggccgccgagggctgacc

SEQ ID NO: 522821 - DNA, 120 bp, Artificial Sequence
  ENSG00000165509_9 (sequence is synthesized)
gaggcgtccccacaacagaagaagggaggagaagatgaggatatgcctgctgctgggatgccacctcttccccagagtcctcctgagattcctccccagggtcctcccaagatctctccc

SEQ ID NO: 522822 - DNA, 120 bp, Artificial Sequence
  ENSG00000165509_10 (sequence is synthesized)
cagggtcctccgcagagtcctccccagagtcctctagactcctgctcatcccctcttttgtggacccgattggatgaggagtccagcagtgaagaggaggatacagctacttggcatgcc

SEQ ID NO: 522823 - DNA, 120 bp, Artificial Sequence
  ENSG00000165509_11 (sequence is synthesized)
ttgccagaaagtgaatccttgcccaggtatgccctggatgaaaaggtggctgagttggtgcagtttcttctcctcaaatatcaaacaaaagagcctgtcacaaaggcagagatgctgacg

SEQ ID NO: 522824 - DNA, 120 bp, Artificial Sequence
  ENSG00000165509_12 (sequence is synthesized)
actgtcatcaagaagtataaggactattttcccatgatcttcgggaaagcccatgagttcatagagctaatttttggcattgccctgactgatatggaccccgacaaccactcctatttc

SEQ ID NO: 522825 - DNA, 120 bp, Artificial Sequence
  ENSG00000165509_13 (sequence is synthesized)
tttgaagacacattagacctcacctatgagggaagcctgattgatgaccagggcatgcccaagaactgtctcctgattcttattctcagtatgatcttcataaagggcagctgtgtcccc

SEQ ID NO: 522826 - DNA, 120 bp, Artificial Sequence
  ENSG00000165509_14 (sequence is synthesized)
gaggaggtcatctgggaagtgttgagtgcaatagggcccattcagaggccagcaagagaagtcttagagtttttatccaagctatccagtatcatccctagtgcctttccatcctggtac

SEQ ID NO: 522827 - DNA, 120 bp, Artificial Sequence
  ENSG00000165509_15 (sequence is synthesized)
atggatgctttgaaagatatggaagacagagcccaggccataattgacaccacagatgatgctactgccatggccagtgcaagccccagtgtcatgtccaccaacttctgtcctgagtga

SEQ ID NO: 522828 - DNA, 120 bp, Artificial Sequence
  ENSG00000165509_16 (sequence is synthesized)
gtcagcacagcagaggaggcccaggcaatatcaggagtcaaggcctgtgggatcccatcatccccatccctgctcacacgtttacctgctgctcctgaacaacaggcctcatgcctctct

SEQ ID NO: 522829 - DNA, 120 bp, Artificial Sequence
  ENSG00000165509_17 (sequence is synthesized)
ttccaaaccttccacgcctcagctttgaggaagacttccagaacccgagtgtgacagaggacttggtagatgcacaggattccatagatgaggaggaggaggatgcctcctccacttcct

SEQ ID NO: 522830 - DNA, 120 bp, Artificial Sequence
  ENSG00000165509_18 (sequence is synthesized)
cttcctctttccactttttattcccctcctcctcttccttgtcctcatcctcacccttgtcctcacccttaccctctactctcattctgggtgttccagaagatgaggatatgcctgctg

SEQ ID NO: 522831 - DNA, 120 bp, Artificial Sequence
  ENSG00000165509_19 (sequence is synthesized)
tgagtgcaataggggtgtgtgctgggagggagcactttatatatggggatcccagaaagctgctcactatacattgggtgcagagaaagtacctggagtaccgggaggtgcccaacagtg

SEQ ID NO: 522832 - DNA, 120 bp, Artificial Sequence
  ENSG00000165509_20 (sequence is synthesized)
gtcagcacagcagaggaggcccaggcaatatcaggagtcaaggttctgagggagcaaacctcttaggaagacaggcgacctgtgaggccctagagcaccaccttaagagaagaagagctg

SEQ ID NO: 522833 - DNA, 120 bp, Artificial Sequence
  ENSG00000165509_21 (sequence is synthesized)
gaaaggagccccggggctggccaacaagcaagaagggaactctgtggaaggatagctatctcccaacacggagggaaggcccaggcgtcgcccagccactccttgctgtcacccctggac

SEQ ID NO: 522834 - DNA, 120 bp, Artificial Sequence
  ENSG00000165512_0 (sequence is synthesized)
acttccggcggcgcgggaggcgcccagcgagccagagtggtggctggtcccgcgcgaaaattctgagctgtacacctctaggaaatgaaacactagttcagaagaagcctgtaaactctc

SEQ ID NO: 522835 - DNA, 120 bp, Artificial Sequence
  ENSG00000165512_1 (sequence is synthesized)
ttacaaatacatttggttattcaccatgaggttagcaaagcctaaagcgggtatttctcggagctcaagccaaggaaaggcctatgagaacaagcgcaaaacaggccggcagcggcagaa

SEQ ID NO: 522836 - DNA, 120 bp, Artificial Sequence
  ENSG00000165512_2 (sequence is synthesized)
gtggggcatgactattcgatttgactcaagcttcagtagactcagaagaagcttggatgacaaaccctataaatgtactgaatgtgaaaagagtttcagtcagagttcaactctttttca

SEQ ID NO: 522837 - DNA, 120 bp, Artificial Sequence
  ENSG00000165512_3 (sequence is synthesized)
acaccagaagatccatactggaaagaaatcccataaatgtgctgattgtgggaaaagtttctttcagagttctaatctcattcagcatcgacggatccatacgggggaaaagccctacaa

SEQ ID NO: 522838 - DNA, 120 bp, Artificial Sequence
  ENSG00000165512_4 (sequence is synthesized)
atgtgatgagtgtggagaaagcttcaaacagagctcaaatctcattcagcaccagagaattcatactggagaaaaaccctatcagtgtgatgagtgtggccggtgtttcagccagagctc

SEQ ID NO: 522839 - DNA, 120 bp, Artificial Sequence
  ENSG00000165512_5 (sequence is synthesized)
ccaccttattcaacatcagagaacccacactggggagaaaccctaccagtgcagtgaatgtggcaaatgtttcagtcagagctctcatctgaggcagcacatgaaggtgcataaagaaga

SEQ ID NO: 522840 - DNA, 120 bp, Artificial Sequence
  ENSG00000165512_6 (sequence is synthesized)
gaagcctcgtaaaacccggggcaaaaatatcagggtgaagactcacttaccctcttggaaagctggtacaggaaggaagtctgtggctggtctccgttaagtatagggctttttgacagc

SEQ ID NO: 522841 - DNA, 120 bp, Artificial Sequence
  ENSG00000165512_7 (sequence is synthesized)
tttttgagacctcttaagaaaaaataaaaagtaaaaaatgaaaggaatcttttttagaaatagagatgctttatagtagatcacttaaatactggatcttttgctagtgtgaaaacattg

SEQ ID NO: 522842 - DNA, 120 bp, Artificial Sequence
  ENSG00000165512_8 (sequence is synthesized)
ttatgtgacatggagcacaaagaactgaaaatatgttttgagggagcatgacatccttgacctcatttgaaattacttccattttcaaaaaccatcatgttttgtagatacattttgaga

SEQ ID NO: 522843 - DNA, 120 bp, Artificial Sequence
  ENSG00000165512_9 (sequence is synthesized)
aaaaccatcatgttttgaggatacatttgtgaaagtgcaggcatgccaatgactactcagttttaggactttctgtggaagaaaaaagggagaagaaatcaattccactacttttgaagt

SEQ ID NO: 522844 - DNA, 120 bp, Artificial Sequence
  ENSG00000165512_10 (sequence is synthesized)
tctgcaacagatgagattttgtttgtaaagttttgtagtatattaaccattggtttatcactctagattcaacatattaaaatgtattcaagctcacagatttttaatcagtaaggccta

SEQ ID NO: 522845 - DNA, 120 bp, Artificial Sequence
  ENSG00000165512_11 (sequence is synthesized)
cagatttttaatcagtaaggcctatctatattagttgtcttttatttcttctccttgtggacagttgttaatgaaaggagtaaggatttccctttttttgttttgtttgttttgtttttt

SEQ ID NO: 522846 - DNA, 120 bp, Artificial Sequence
  ENSG00000165512_12 (sequence is synthesized)
tagaatccaaatgagaactgaattggacctcaagtcttctattcctactaatagagttctttgtgatggtaactgctgtgtcgtttgttttccacaagttgggatggattcatgtcgata

SEQ ID NO: 522847 - DNA, 120 bp, Artificial Sequence
  ENSG00000165512_13 (sequence is synthesized)
catccccatgcccttgacctcttctggcattctcctgtgctctgacaaactgagccagccttttagatctacatgaataaacaaactattttaccaagaaaaatctcagcttgcttactg

SEQ ID NO: 522848 - DNA, 120 bp, Artificial Sequence
  ENSG00000165512_14 (sequence is synthesized)
cttaattaaaaacctacaatttacacacctccctgccttcaagactgtgagctttggatagccctgcttaaatgtttgtcaacaacaagagtcgtaatgtgtcagtacattgtagctcct

SEQ ID NO: 522849 - DNA, 120 bp, Artificial Sequence
  ENSG00000165512_15 (sequence is synthesized)
ttgaaatttaactctttctgtgttacatgaattgttttaaggagtccggcaaacatgtttcttcacttccatgagaatggtgccaagtgtcagactctaatgagccctcagctcaggttt

SEQ ID NO: 522850 - DNA, 120 bp, Artificial Sequence
  ENSG00000165512_16 (sequence is synthesized)
taatttctattgaatgctaacattcttctgattttttggtatcttttataatcatatcggtttctgctgtattaatgacaattattcatgaaaataaaaaatgaaatattttgtatacta

SEQ ID NO: 522851 - DNA, 80 bp, Artificial Sequence
  ENSG00000165516_0 (sequence is synthesized)
agacgggctgcaatagggagccggcccgacgcggaccgcttccctgcagtgccccgagtcccgggcccgcgccgccgccg

SEQ ID NO: 522852 - DNA, 120 bp, Artificial Sequence
  ENSG00000165516_1 (sequence is synthesized)
cggcggcggcggagagccgtcctcggccgaggaggctgggaaacgcgagcgcaggcggcagagaggcctcaacgccgtccctttcgccaccgccttttccttgcctcgcgccgctgtgca

SEQ ID NO: 522853 - DNA, 120 bp, Artificial Sequence
  ENSG00000165516_2 (sequence is synthesized)
tttctctccttttcctttgtttttttggcccctcgcgggtgtgggcattgttggttagcaaaagtgcagcctcaagatggctgatggcaacgaggatctgcgggctgacgacttgcctgg

SEQ ID NO: 522854 - DNA, 120 bp, Artificial Sequence
  ENSG00000165516_3 (sequence is synthesized)
gccagccttcgagagctatgagtccatggagcttgcctgccccgctgagcgcagcggccacgtagccgtcagcgacgggcgccacatgttcgtctggggcggctacaagagtaatcaagt

SEQ ID NO: 522855 - DNA, 120 bp, Artificial Sequence
  ENSG00000165516_4 (sequence is synthesized)
cagaggattatatgacttttatctgcctagagaagaactatggatctacaacatggagactggaagatggaaaaaaatcaacactgaaggtgatgttcctccttctatgtcaggaagctg

SEQ ID NO: 522856 - DNA, 120 bp, Artificial Sequence
  ENSG00000165516_5 (sequence is synthesized)
tgctgtgtgtgtagacagggtgctgtacttgtttggaggacaccattcaagaggcaataccaataagttctacatgctggattcaaggtctacagacagagtgttacagtgggaaagaat

SEQ ID NO: 522857 - DNA, 120 bp, Artificial Sequence
  ENSG00000165516_6 (sequence is synthesized)
tgattgccaaggaattcctccatcatcaaaggacaaacttggtgtctgggtatataaaaacaagttaatattttttggagggtatggatatttgcctgaagataaagtattgggaacttt

SEQ ID NO: 522858 - DNA, 120 bp, Artificial Sequence
  ENSG00000165516_7 (sequence is synthesized)
tgaattcgatgaaacatctttttggaattcaagtcatccaagaggatggaatgatcatgtacatattttagatactgaaacatttacctggagccagcctataactactggtaaagcacc

SEQ ID NO: 522859 - DNA, 120 bp, Artificial Sequence
  ENSG00000165516_8 (sequence is synthesized)
ttcacctcgtgctgcccatgcctgtgcaactgtcggaaatagaggcttcgtgtttggaggcagatatcgagatgctagaatgaatgatcttcactatcttaatctggatacatgggagtg

SEQ ID NO: 522860 - DNA, 120 bp, Artificial Sequence
  ENSG00000165516_9 (sequence is synthesized)
gaatgaattaattccacaaggcatatgcccagttggtcgatcttggcactcactaacaccagtttcttcagatcatctttttctctttggaggatttaccactgataaacagccactaag

SEQ ID NO: 522861 - DNA, 120 bp, Artificial Sequence
  ENSG00000165516_10 (sequence is synthesized)
tgatgcctggacttactgcatcagtaaaaatgaatggatacaatttaatcatccatataccgaaaaaccaaggttatggcacacagcttgtgccagcgatgaaggagaagtaattgtttt

SEQ ID NO: 522862 - DNA, 120 bp, Artificial Sequence
  ENSG00000165516_11 (sequence is synthesized)
tggtggatgtgccaacaacttgcttgtccatcacagagctgcacacagtaatgaaatactaatattttcagttcaaccaaaatctcttgtacggctaagcttagaagcagtcatttgctt

SEQ ID NO: 522863 - DNA, 120 bp, Artificial Sequence
  ENSG00000165516_12 (sequence is synthesized)
taaagaaatgttagccaactcatggaactgccttccaaaacacttacttcacagtgttaatcagaggtttggtagtaacaacacttctggatcttaaggcttcataaataatgcctatga

SEQ ID NO: 522864 - DNA, 120 bp, Artificial Sequence
  ENSG00000165516_13 (sequence is synthesized)
tcaccttgcatggacagcaatcctgtaaacatcacagagtggcatcatttgtataattatatgcattgttgtagtttgcacctgttggttttaatgtgcatgtgaatggcctagagaacc

SEQ ID NO: 522865 - DNA, 120 bp, Artificial Sequence
  ENSG00000165516_14 (sequence is synthesized)
tatttttgtgtctaaagtttacaataaatgtatttaacaccagtagctgtcctctattaaagtaaagtaatggttgggctttttaccctgaagaatggttgctacattttcttttcagta

SEQ ID NO: 522866 - DNA, 120 bp, Artificial Sequence
  ENSG00000165516_15 (sequence is synthesized)
acttcaggatatgtatctgtagaaacattatagtcttaccatcatcaaaatgctgaagtcattttttgaaaacattatagatttttttttttttaatggcaagagtagtctatagttatg

SEQ ID NO: 522867 - DNA, 120 bp, Artificial Sequence
  ENSG00000165516_16 (sequence is synthesized)
taacctagtgttgtaaatacaatataataaaggtttttttttttaaacattaatattcacattatgacgaagctggaaaaacaaagtgtggagggaccaacaactgttcagtactttgac

SEQ ID NO: 522868 - DNA, 120 bp, Artificial Sequence
  ENSG00000165516_17 (sequence is synthesized)
cttaatgcttcagtgtaggggctggagcaagtggtcatgctgaatacaggcaggtgctgtccagtcaattaaaaagtttttttttaattaataggttttatagctcatgaaggaatggaa

SEQ ID NO: 522869 - DNA, 120 bp, Artificial Sequence
  ENSG00000165516_18 (sequence is synthesized)
ataatgatgacatcattttccattctgttaagagacagaggaaaagtgggttagagtctttagtggtaagcctaaaatgcgcttctggtattataggttaagatactctaacgtgctata

SEQ ID NO: 522870 - DNA, 120 bp, Artificial Sequence
  ENSG00000165516_19 (sequence is synthesized)
ttggtaattaattactaaaggtggaaattaaaatggtacagaactgaatcagattacaaggaaaaaattaagatcaaacctgaaggtctacaaatgaatagaaatgattaagctgagtca

SEQ ID NO: 522871 - DNA, 120 bp, Artificial Sequence
  ENSG00000165516_20 (sequence is synthesized)
caagtatcaatgaaagcagaagaaaatccactccaatacttagttttcaagacacaatcctaaatatttaaaccccttgtagctggcctataatatatatatattagatgttatatacag

SEQ ID NO: 522872 - DNA, 120 bp, Artificial Sequence
  ENSG00000165516_21 (sequence is synthesized)
tagacttaccaagtcaatagtttaagcaatcaagccacttcactgttcagtttctttacatcatgaaatgaatacttggtattaacctcccaaatttcaagaaaatgtagaataactaca

SEQ ID NO: 522873 - DNA, 120 bp, Artificial Sequence
  ENSG00000165516_22 (sequence is synthesized)
gatgtatataattagcatttaactgtccacaaatactttaggaaatcctatcatagtgtttcctctatataaaactgggaaaaaaacaagaattaagtccttttggtgaatatagcaagg

SEQ ID NO: 522874 - DNA, 120 bp, Artificial Sequence
  ENSG00000165516_23 (sequence is synthesized)
caatgtttagttcatttggcctgtaatatatatattagatgttatatacagtagacttaccaagtcaatagtttaagcaatcaagccacttcactgttcagtttctttacatcatgaaat

SEQ ID NO: 522875 - DNA, 120 bp, Artificial Sequence
  ENSG00000165516_24 (sequence is synthesized)
gaatacttggtattaacctcccaaatttcaagaaaatgtagaataactacagatgtatattaattagcatttaactgtccacaaatacttttggaaatcctatcatagacagtgtttcct

SEQ ID NO: 522876 - DNA, 120 bp, Artificial Sequence
  ENSG00000165516_25 (sequence is synthesized)
ctatataaaactgggaaaaaacaagaagtaagtccttttggtgaatatagcaaggcaatgtttagttcatttttataatgcggaaatcctgatacatggtgctttcatctttgaacttcc

SEQ ID NO: 522877 - DNA, 120 bp, Artificial Sequence
  ENSG00000165516_26 (sequence is synthesized)
aaaaggctataaaattggctcttctcaaatattttagaatttcatttcagctatttcctttttacgttcagaagattgggtgcagacactttcactttgccaggaatgtttcttgataaa

SEQ ID NO: 522878 - DNA, 120 bp, Artificial Sequence
  ENSG00000165516_27 (sequence is synthesized)
tctgtgtcctaaaaaaagaaaattgctgaatatcttcacatcctgtatggtcaatcatgtttcttttatgacaaaaacgaaaaacatttccaaacttttagctgagatggttttactgct

SEQ ID NO: 522879 - DNA, 120 bp, Artificial Sequence
  ENSG00000165516_28 (sequence is synthesized)
tctaataagacagcattttctactaaaataacaaaaaactgctaacattttaaattgtactgtcagtctccacattccttttctgaaggagaactttacctttacgctgcggaataagtc

SEQ ID NO: 522880 - DNA, 120 bp, Artificial Sequence
  ENSG00000165516_29 (sequence is synthesized)
tttttctcttgctgttgcttctttggaatgcatgaaactattcaaggctgtttttgcagctgtaaatacaaaaaagagtaagaataatctactgttaagtcactgaactgtttaaaatca

SEQ ID NO: 522881 - DNA, 120 bp, Artificial Sequence
  ENSG00000165516_30 (sequence is synthesized)
taattcaaaaaaacaaatttaaataccttttccctttttctgcactccaggagtaagtttcactttatatctttaaaaaggaattacatgtgttactaaatagacgttacaaaacaattc

SEQ ID NO: 522882 - DNA, 120 bp, Artificial Sequence
  ENSG00000165516_31 (sequence is synthesized)
acaaaagccattctgtcaactaatggtaacttacttgtagtttgtcatggtggtgtaaggggcacatattggaatggcaaacagtagtacatcttcaggatgtggctggcctgtcaaaga

SEQ ID NO: 522883 - DNA, 120 bp, Artificial Sequence
  ENSG00000165516_32 (sequence is synthesized)
atcaaataggttttcctaaaaagggaaaataacagttacaaaggcaatttataccgccctttacaaaaaatgctaaaacacttgaattagtatctcaacatattttttatcttttcctga

SEQ ID NO: 522884 - DNA, 120 bp, Artificial Sequence
  ENSG00000165516_33 (sequence is synthesized)
tatacataccatctaagctggaacagtggtacttaaactctgcttcatagttccaaagagttgaagaccaatgtttaaatatattctttactacttaatttttgcctagcataataagta

SEQ ID NO: 522885 - DNA, 120 bp, Artificial Sequence
  ENSG00000165516_34 (sequence is synthesized)
atgagaacaataattttcaaaatcctacctacagttacatttaagagaaagaaggcccaggagcagtggttcacgcctataatcctaggactctggaaggctcaggctgaggcgggtgga

SEQ ID NO: 522886 - DNA, 120 bp, Artificial Sequence
  ENSG00000165516_35 (sequence is synthesized)
gttcaagaccagcctaagcaacatggagaaacaccatctctacaaaaaatataaaagttagctgggtatagtgggtgcctgtagtcccagctactcggaagactgagggggggaggatca

SEQ ID NO: 522887 - DNA, 120 bp, Artificial Sequence
  ENSG00000165516_36 (sequence is synthesized)
agctactcggaagactgagggggggaggatcacctgagcccaggaggtagacgttgtggagagccatgatcctgtcactgcactgggtgacaccagcctgggtgacagagaccctgtctc

SEQ ID NO: 522888 - DNA, 120 bp, Artificial Sequence
  ENSG00000165516_37 (sequence is synthesized)
ggaaaaaaactattggatattacctgagttgcagaaacctgctgtggattaaaatgatgcaataataaccacaaatagatttaagtcctatcacatggaaatgggactaataccttggct

SEQ ID NO: 522889 - DNA, 120 bp, Artificial Sequence
  ENSG00000165516_38 (sequence is synthesized)
ataccactatttctcgtcctggggagattctgccctcagaagacaatgggcaatgtctagagatagttttcgttgacacgatgaggggtgagaaggaataggtaggggctgctactggga

SEQ ID NO: 522890 - DNA, 120 bp, Artificial Sequence
  ENSG00000165516_39 (sequence is synthesized)
tctagtgggtaaaggccgaggatgtcgctaaacattttataatgaatgggacagaccccacaacaaagaattaaccaacccctaatgttaatagtgccaaagttgagaaaccctgggcta

SEQ ID NO: 522891 - DNA, 120 bp, Artificial Sequence
  ENSG00000165516_40 (sequence is synthesized)
gaacagccttctctcttacccattattaaggagaaatcccagagttcttatttgctgtgctgcctgtgagattgcccccatttattttacaatatgaataaacttagatttaggacagaa

SEQ ID NO: 522892 - DNA, 120 bp, Artificial Sequence
  ENSG00000165516_41 (sequence is synthesized)
gtacggtaagtaactttgtacttggcacttagattatttaaaattgtgtttcctaagacttagcactctcgaaaaactaggtttatggattatttaagggcaataaaacttcattgctat

SEQ ID NO: 522893 - DNA, 120 bp, Artificial Sequence
  ENSG00000165516_42 (sequence is synthesized)
attcaagaggcaataccaataaggttagtgtttctaaggattatggcttgaggcatttttattcttattatctttcaaacaactgcaaatttctaaggttagccccagacttatttgtgt

SEQ ID NO: 522894 - DNA, 120 bp, Artificial Sequence
  ENSG00000165516_43 (sequence is synthesized)
cacagttaaaaatgatgtgtacttgattatgatatgaatgtgcattttagtattttgtgtgccaatctgtatttacctaggcattatgtaaaatcaacttttgttggtaacctgtgtgca

SEQ ID NO: 522895 - DNA, 120 bp, Artificial Sequence
  ENSG00000165516_44 (sequence is synthesized)
ttaggatgctagaatgaatgatcttcactatcttaatctggatacatgggagtggaatgaattgtaggtatcactttagatacatttttccaaaattcagattgtttttaccctatattc

SEQ ID NO: 522896 - DNA, 120 bp, Artificial Sequence
  ENSG00000165516_45 (sequence is synthesized)
cctactattggtatataatgtccttgcttaacttttctttaactatgaaattaaataaacataattactaggtccttaaggaatgaattttatttttgtgtttccagttcctgtaactat

SEQ ID NO: 522897 - DNA, 120 bp, Artificial Sequence
  ENSG00000165516_46 (sequence is synthesized)
gtgcctagtacatagcatgtgctcagtgtttgttgaaaggaaaaggtctgaagttgattctaacgtcaaagaaaatatttcagtataaagcatgtagtttataccaagaagcctttttaa

SEQ ID NO: 522898 - DNA, 120 bp, Artificial Sequence
  ENSG00000165516_47 (sequence is synthesized)
gagtaccccaacccgtctcgaacctccagggctgctgtcatgtcaccctggtgctcacaaagccaactcactcccacccccgttgttgccattggagcgttattccggggaaggccctgt

SEQ ID NO: 522899 - DNA, 120 bp, Artificial Sequence
  ENSG00000165516_48 (sequence is synthesized)
taatgttgcttgggcggtgcattcggaagggttggggtgtgaaaggtgacggtgtgtgatatcactcagacgcgttatgaggacggcctacgaggacttcaccctctggagctgggaacc

SEQ ID NO: 522900 - DNA, 120 bp, Artificial Sequence
  ENSG00000165516_49 (sequence is synthesized)
gagacggcttatagggttggttggaaggtttgaaattaattttgatcctgtaacatagctgtaattgtactatatggcatacttctgttcaataaagaacctggagcacttaagagccct

SEQ ID NO: 522901 - DNA, 120 bp, Artificial Sequence
  ENSG00000165516_50 (sequence is synthesized)
gctgaagggctacaacatgcaaagggcttacttggctaattgcaggggggggaaaaaaaagaaaatatactctctgtatctgctcatgatctattacctttcttgccaaagctgtgccct

SEQ ID NO: 522902 - DNA, 120 bp, Artificial Sequence
  ENSG00000165521_0 (sequence is synthesized)
ctgggcatccacttgacagccggcggcgctcgcggccctcagcatgttccgcgaggcgagggttttcctcccgcctgtgggctgaggcggcggcggcccccgaaacgagatgcacctgac

SEQ ID NO: 522903 - DNA, 120 bp, Artificial Sequence
  ENSG00000165521_1 (sequence is synthesized)
acgagatgcacctgacgggcgcggcttagaggacgcggctggcgggaagtcccggcagccagcgggagggctttcgttgccgggccgccgccgcctcccgtcgccgccgcgggcccgagc

SEQ ID NO: 522904 - DNA, 120 bp, Artificial Sequence
  ENSG00000165521_2 (sequence is synthesized)
cgccccgacatggcggcccggagcgccccgagctgccacctgcggctcgagtgggtgtacggctaccggggccaccagtgccgcaacaacctctactacactgcggccaaggagatcgta

SEQ ID NO: 522905 - DNA, 120 bp, Artificial Sequence
  ENSG00000165521_3 (sequence is synthesized)
tacttcgtggcgggggtcggcgtggtgtacagcccgcgggagcacaggcagaagttctaccggggccacagcgacgacatcatcagccttgcattgcatcctgaacgagtgttggtagca

SEQ ID NO: 522906 - DNA, 120 bp, Artificial Sequence
  ENSG00000165521_4 (sequence is synthesized)
acaggacaagttgggaaagagccttatatttgtatttgggattcatacactgtgcagaccatatcagttttaaaggatgttcatacacatggtatagcttgcttggcgtttgacttagat

SEQ ID NO: 522907 - DNA, 120 bp, Artificial Sequence
  ENSG00000165521_5 (sequence is synthesized)
ggacagcgcttggtttcagttggacttgattcaaagaatgcagtttgtgtttgggactggaaaaggggaaaaatgttgtctatggctcctggtcatacagatagaatatttgatatttct

SEQ ID NO: 522908 - DNA, 120 bp, Artificial Sequence
  ENSG00000165521_6 (sequence is synthesized)
tgggatttgtaccagccaaataaacttgtcagctgtggtgtaaaacatatcaagttctggagtttatgtggaaatgctctgaccccaaaacgaggtgtctttggtaagacgggtgacctt

SEQ ID NO: 522909 - DNA, 120 bp, Artificial Sequence
  ENSG00000165521_7 (sequence is synthesized)
cagacaatactgtgcctagcctgtgcaagggatgaattaacatattctggtgcactcaatggggatatatatgtttggaaaggaatcaatcttatacgaacaatacaaggagcccatgct

SEQ ID NO: 522910 - DNA, 120 bp, Artificial Sequence
  ENSG00000165521_8 (sequence is synthesized)
gcaggaatttttagcatgaatgcttgtgaagaaggctttgctactggtggcagagatggttgtattcgtctttgggatttaacttttaaaccaattactgtgattgatctcagggaaaca

SEQ ID NO: 522911 - DNA, 120 bp, Artificial Sequence
  ENSG00000165521_9 (sequence is synthesized)
gaccagggatacaaaggtttgtctgtaaggagtgtgtgttggcgaggtgaccacattctagttggaacacaggacagtgaaatttttgaaattgtggtgcaagaaagaaataaacctttt

SEQ ID NO: 522912 - DNA, 120 bp, Artificial Sequence
  ENSG00000165521_10 (sequence is synthesized)
ctaattatgcaagggcattgtgaaggtgaactttgggcacttgctgtccatcctactaaacctttggctgtgactggaagtgatgatcgttcggtcaggatatggagcctagtagatcat

SEQ ID NO: 522913 - DNA, 120 bp, Artificial Sequence
  ENSG00000165521_11 (sequence is synthesized)
gcattaatagcaaggtgtaatatggaagaaccaattcgttgtgcagctgtcaatgcagatggaatccatcttgcccttggaatgaaggatggctcattcactgtacttagagtaagagat

SEQ ID NO: 522914 - DNA, 120 bp, Artificial Sequence
  ENSG00000165521_12 (sequence is synthesized)
atgacggaagttgtacatattaaagataggaaggaggcaattcatgagttaaaatattcaccagatggaacttaccttgctgttggatgcaatgacagctcggttgatatttatggagtt

SEQ ID NO: 522915 - DNA, 120 bp, Artificial Sequence
  ENSG00000165521_13 (sequence is synthesized)
gctcagcgttataaaaaagttggcgagtgtttgggatcccttagtttcatcactcatctggactggtcttcagacagtagatatttgcagacaaatgatggaaatgggaaaagacttttt

SEQ ID NO: 522916 - DNA, 120 bp, Artificial Sequence
  ENSG00000165521_14 (sequence is synthesized)
tatagaatgccaggaggaaaggaagtgacaagtacagaagaaataaaaggtgttcattgggcttcatggacatgtgtttcaggccttgaagtaaatggaatttggcccaagtattcagat

SEQ ID NO: 522917 - DNA, 120 bp, Artificial Sequence
  ENSG00000165521_15 (sequence is synthesized)
atcaacgatataaattcagtagatggaaattatattggccaagttttagttacagctgatgactatggaattataaaattattccgatatccatgtttaagaaaaggggccaagtttaga

SEQ ID NO: 522918 - DNA, 120 bp, Artificial Sequence
  ENSG00000165521_16 (sequence is synthesized)
aaatatattggccattcagctcacgtaactaatgtcagatggtcacatgattatcagtgggttatttctattggtggagcagatcactctgtctttcagtggaaatttattcctgaaaga

SEQ ID NO: 522919 - DNA, 120 bp, Artificial Sequence
  ENSG00000165521_17 (sequence is synthesized)
aaactgaaagatgctgttcacatagcaccccaagaaagtctggctgactctcatagtgatgaatcagattcagatctgtctgatgttccagaactggattctgaaattgaacaagagaca

SEQ ID NO: 522920 - DNA, 120 bp, Artificial Sequence
  ENSG00000165521_18 (sequence is synthesized)
cagctcacctaccgtcgacaggtttacaaagaagatctacctcagcttaaagaacagtgcaaagagaaacaaaaaagtgctacttctaaaagaagagagcgggctccaggaaatagtatt

SEQ ID NO: 522921 - DNA, 120 bp, Artificial Sequence
  ENSG00000165521_19 (sequence is synthesized)
cgattacactttgttcacggttacagaggttatgactgtcgaagtaatctgttttatactcaaattggtgaaattgtgtaccatgtggcagcagtgggtgtcatttataatcgacagcaa

SEQ ID NO: 522922 - DNA, 120 bp, Artificial Sequence
  ENSG00000165521_20 (sequence is synthesized)
aacacacagcgtttttatctgggtcatgatgatgatattctctgcctaactattcatcctttgaaagactacgtggcaacaggccaggttggtagagatccctcaattcatatatgggat

SEQ ID NO: 522923 - DNA, 120 bp, Artificial Sequence
  ENSG00000165521_21 (sequence is synthesized)
acagagaccattaaaccattgtccatattaaagggccaccaccagtatggtgttagtgccgttgatttctcagcggatgggaaacgtttggcatcagttggcatagatgatagccatact

SEQ ID NO: 522924 - DNA, 120 bp, Artificial Sequence
  ENSG00000165521_22 (sequence is synthesized)
gttgtgctctgggactggaagaaaggagagaaactttcaatagcaagaggaagtaaagataagatttttgttgtaaagatgaacccctatgtgcctgataaactaattacagctggaatt

SEQ ID NO: 522925 - DNA, 120 bp, Artificial Sequence
  ENSG00000165521_23 (sequence is synthesized)
aaacacatgaaattttggcgtaaagcagggggaggattgattggaagaaaaggctacataggcacactggggaaaaatgacacaatgatgtgtgcagtgtatggatggactgaagagatg

SEQ ID NO: 522926 - DNA, 120 bp, Artificial Sequence
  ENSG00000165521_24 (sequence is synthesized)
gctttttctggaacatccacaggagatgtgtgtatctggagagacatctttcttgtaaaaacagtgaaagcgcatgatgggccagtgttcagtatgcatgcattggaaaaagggtttgta

SEQ ID NO: 522927 - DNA, 120 bp, Artificial Sequence
  ENSG00000165521_25 (sequence is synthesized)
actggaggaaaagatggtatagtagctctttgggatgactcttttgaaagatgtctcaagacctatgctataaaaagagctgcattggccccaggatctaaaggtcttctcttggaagat

SEQ ID NO: 522928 - DNA, 120 bp, Artificial Sequence
  ENSG00000165521_26 (sequence is synthesized)
aatccatctatacgtgccatatcattaggacatggtcatattttagttggcacaaagaatggtgaaatactagaagtggataaaagtggcccaataacacttctggttcagggacacatg

SEQ ID NO: 522929 - DNA, 120 bp, Artificial Sequence
  ENSG00000165521_27 (sequence is synthesized)
gaaggagaggtgtggggtttagctacacacccttatctgcccatctgtgctactgtaagcgatgataaaaccttaagaatatgggatctctcacctagtcattgtatgttggctgtccgg

SEQ ID NO: 522930 - DNA, 120 bp, Artificial Sequence
  ENSG00000165521_28 (sequence is synthesized)
aagctgaaaaagggtgggaggtgttgctgtttttctcctgatggtaaagctttagccgtaggtctcaacgatggaagcttcttaatggcaaatgcggatactctagaggatcttgtgtct

SEQ ID NO: 522931 - DNA, 120 bp, Artificial Sequence
  ENSG00000165521_29 (sequence is synthesized)
tttcatcacagaaaagatatgatttcagatattcgattttcacctggttctgggaaatatcttgctgtagcatcccatgacagctttatagatatatacaatgtaatgagtagtaaacga

SEQ ID NO: 522932 - DNA, 120 bp, Artificial Sequence
  ENSG00000165521_30 (sequence is synthesized)
gtaggaatatgcaaaggagctaccagttacataacccatattgattgggatattagaggaaagcttttacaggtcaacactggtgctaaggaacaattattctttgaagctcccagaggg

SEQ ID NO: 522933 - DNA, 120 bp, Artificial Sequence
  ENSG00000165521_31 (sequence is synthesized)
aaaaaacaaaccatccccagcgtggaggtagaaaaaattgcttgggcatcatggacaagtgtacttggtttatgctgtgaaggaatttggccagtaattggagaagttacagatgtaact

SEQ ID NO: 522934 - DNA, 120 bp, Artificial Sequence
  ENSG00000165521_32 (sequence is synthesized)
gcttcttgcctcaccagtgacaaaatggttctagctaccggggacgatttgggatttgtgaagttatttagatatcctactaaagggaaatttggaaagtttaagaggtatgtggcccat

SEQ ID NO: 522935 - DNA, 120 bp, Artificial Sequence
  ENSG00000165521_33 (sequence is synthesized)
agtacacatgtcacaaatgttcgctggacttatgatgacagcatgttggttaccctaggcggtacagatatgtctttaatggtgtggacaaatgagatggaaggctatcgagaaaaaagg

SEQ ID NO: 522936 - DNA, 120 bp, Artificial Sequence
  ENSG00000165521_34 (sequence is synthesized)
ccttgtgatagtgaagaatccgacattgattctgaagaagatgggggctatgacagtgatgttacaagggagaatgaaatcagttacaccatcagagccttatcaacaaatattcgccca

SEQ ID NO: 522937 - DNA, 120 bp, Artificial Sequence
  ENSG00000165521_35 (sequence is synthesized)
atgttaggaatcaagcctcatttacaacaaaaagaaccctcaattgatgaaaggcagggagtagtaagaggttccaggcctccagtgagcagggccccaccacagccagagaaactccag

SEQ ID NO: 522938 - DNA, 120 bp, Artificial Sequence
  ENSG00000165521_36 (sequence is synthesized)
acaaacaatgtaggcaagaaaaagagacctatagaggaccttgtgttggagctcatttttggttatcgaggcagagactgtaggaataatgttcactatttaaatgatggtgatgatata

SEQ ID NO: 522939 - DNA, 120 bp, Artificial Sequence
  ENSG00000165521_37 (sequence is synthesized)
atttatcacactgcatctgttggaattctgcacaatgttgctacaggttctcagagtttttatcaggaacataatgatgatattctgtgcctcacagtaaaccagcaccccaaatttatc

SEQ ID NO: 522940 - DNA, 120 bp, Artificial Sequence
  ENSG00000165521_38 (sequence is synthesized)
aacatagtggcaactggccaagtaggtgattcagcagacatgtcagctacagctccttctattcacatctgggatgcaatgaacaagcagactttatctatcctaagatgctaccattca

SEQ ID NO: 522941 - DNA, 120 bp, Artificial Sequence
  ENSG00000165521_39 (sequence is synthesized)
tggcaggaaggtgccaaaattgccagcagagctggtcacaatcaacgtatttttgtggcagaattccgaccagattcagatacccagtttgtctcagtgggagtaaaacatgtgaagttc

SEQ ID NO: 522942 - DNA, 120 bp, Artificial Sequence
  ENSG00000165521_40 (sequence is synthesized)
tggaccctggcaggaagagctcttcttagcaaaaaagggctactgagcacactggaagatgcccggatgcagaccatgctcgctattgcatttggtgcaaataacttgacgtttacaggt

SEQ ID NO: 522943 - DNA, 120 bp, Artificial Sequence
  ENSG00000165521_41 (sequence is synthesized)
accatcagtggtgatgtctgtgtgtggaaagatcacatattgtgtagaatcgtggcgagagctcacaacgggcctgtgtttgccatgtacaccaccctgcgagatggacttatcgtgact

SEQ ID NO: 522944 - DNA, 120 bp, Artificial Sequence
  ENSG00000165521_42 (sequence is synthesized)
gggggaaaggaaaggccgtcaaaagaaggaggagcggttaaactgtgggatcaggaactgaggcggtgccgtgccttcaggcttgagacaggacaagccacagattgtgttcgttctgtg

SEQ ID NO: 522945 - DNA, 120 bp, Artificial Sequence
  ENSG00000165521_43 (sequence is synthesized)
tgcagaggcaaaggcaagatccttgttgggacaaggaatgctgaaataatcgaagttggagagaaaaatgcagcttgtaatattttagttaacggtcatgtggatgggccaatctgggga

SEQ ID NO: 522946 - DNA, 120 bp, Artificial Sequence
  ENSG00000165521_44 (sequence is synthesized)
ctagcaacacatccttccagggattttttcctttctgctgcagaagatgggacagtgagactttgggatattgctgataaaaagatgttaaacaaagtgaatttgggacatgctgctcgt

SEQ ID NO: 522947 - DNA, 120 bp, Artificial Sequence
  ENSG00000165521_45 (sequence is synthesized)
actgtgtgttacagccctgaaggggacatggtggctattggaatgaaaaatggagaatttatcattttactagtgagttctctaaaaatatggggaaagaagagagacaggagatgtgca

SEQ ID NO: 522948 - DNA, 120 bp, Artificial Sequence
  ENSG00000165521_46 (sequence is synthesized)
atccatgatatcagatttagtccggattcccggtatctggcagtaggttctagtgagaactcagtggatttttatgacctaacgctgggccccactcttaacagaatcagctactgcaaa

SEQ ID NO: 522949 - DNA, 120 bp, Artificial Sequence
  ENSG00000165521_47 (sequence is synthesized)
gacattccaagctttgtcattcaaatggacttctctgcagatagcagttatctccaggtctctagtggctgctataaacggcatgtctatgaagtgccttcaggaaaacatcttatggat

SEQ ID NO: 522950 - DNA, 120 bp, Artificial Sequence
  ENSG00000165521_48 (sequence is synthesized)
catgccgctattgacagaattacttgggctacatggactagtattctaggagatgaggttttgggaatctggtccagacatgctgagaaagctgatgtcaactgtgcctgtgtatctcat

SEQ ID NO: 522951 - DNA, 120 bp, Artificial Sequence
  ENSG00000165521_49 (sequence is synthesized)
tcaggaatcagtcttgttacaggagatgactttggcatggttaagttatttgacttcccatgtccagaaaaatttgcaaaacacaaaaggttcttgggtcattcgccccatgtgacaaat

SEQ ID NO: 522952 - DNA, 120 bp, Artificial Sequence
  ENSG00000165521_50 (sequence is synthesized)
attcgatttaccagtggtgatcgacatgttgttagtgctggaggtgatgactgcagcttatttgtctggaaatgtgtacatacacctcactgagagatgctgagatgactacagaaatta

SEQ ID NO: 522953 - DNA, 120 bp, Artificial Sequence
  ENSG00000165521_51 (sequence is synthesized)
actttgagaccagaattacagagaagaaaaaccaaaacccaaccctgcatggtcaagtggtgctaacccaagactgtaacagggagaaatgcccagaatcatcaaaatagtgaaagactg

SEQ ID NO: 522954 - DNA, 120 bp, Artificial Sequence
  ENSG00000165521_52 (sequence is synthesized)
atctgttcaaaatatttgctatatgcactgggtataatccgtaatccatacactgccagataatgccatttcaaggaaggatcgaatacttgatggtaaaggccaagtccccctgtattg

SEQ ID NO: 522955 - DNA, 120 bp, Artificial Sequence
  ENSG00000165521_53 (sequence is synthesized)
ggaagtgtgtgatttcggcagacctgctgggaaaatttagggtagagcactctttacagaagaactcaaaaacccaatttggataattttcattatctttttagcaaaatggtttcttaa

SEQ ID NO: 522956 - DNA, 120 bp, Artificial Sequence
  ENSG00000165521_54 (sequence is synthesized)
tgtttatattttattttcaaggttcattgtttaatgaaatattttattcttgcatttccataaggaaagggaaagtcatgatcatcctaaaggatcacagtttttaaaaggcaaacattt

SEQ ID NO: 522957 - DNA, 120 bp, Artificial Sequence
  ENSG00000165521_55 (sequence is synthesized)
tccctaaggaaacagacacaagctttcctagagaatatgatgttttttaggcattaataaggtccttttttataaaggacacttttctcctagtagttttgaattcaggaacagatccaa

SEQ ID NO: 522958 - DNA, 120 bp, Artificial Sequence
  ENSG00000165521_56 (sequence is synthesized)
agttagcagtatatggctgctacatttccattttcattttcgagccatcagtttatgttcagatgccatctctgtaatcgcacatttaaaacataactgtagcctcactaatggaaaagt

SEQ ID NO: 522959 - DNA, 120 bp, Artificial Sequence
  ENSG00000165521_57 (sequence is synthesized)
agtatgatgaacaatcattcccaatggtgtacaatgtaagggttttagggagcaacagtatttaactggaagaaagaattgcatatttaatgtagtctaatatatacacatttgtttaac

SEQ ID NO: 522960 - DNA, 120 bp, Artificial Sequence
  ENSG00000165521_58 (sequence is synthesized)
atgtaaacaaaagtgttaaattcacatatacaacattatacaatttaatcactcttggaataaaatttttatagccttttttctattgggaaaatttgtttagatgtgtgccactccata

SEQ ID NO: 522961 - DNA, 120 bp, Artificial Sequence
  ENSG00000165521_59 (sequence is synthesized)
ggtttatttccaaaatgaatgagcccaactccatttgtaaaaacttgtcagttagaattcctttttttagtggattagggctgaattcttagatccttatttcttttcactttaaatgct

SEQ ID NO: 522962 - DNA, 120 bp, Artificial Sequence
  ENSG00000165521_60 (sequence is synthesized)
gccaaagatcactactcatcattcaggaattcgctgtctagcctatctgtagtttcctgaagattgaaaattatgtagactgctatttaaaaatatatttttctaagtgtgaggtttaag

SEQ ID NO: 522963 - DNA, 120 bp, Artificial Sequence
  ENSG00000165521_61 (sequence is synthesized)
atgctgtattgaccctatgagtttttaatgtgttaattatctttatagcataatagatcgctttaggttcctggaatcccatttggtctgacaggatatatgaagattcttaatacctat

SEQ ID NO: 522964 - DNA, 120 bp, Artificial Sequence
  ENSG00000165521_62 (sequence is synthesized)
tttctgtgtctaatacttggttaatactaaaaatagaaatgactaaattacatcacagaaagcataaccagtgattgaacctggtagttttaaagctctaaatagctgtggctgaaggac

SEQ ID NO: 522965 - DNA, 120 bp, Artificial Sequence
  ENSG00000165521_63 (sequence is synthesized)
tgattatggggctaagaagcttgaaacgtaagttggtacttgttcatcagtggattctcctaaattaagccaaattttgaaatacatgactattaagtttctactcatgtatttacagtc

SEQ ID NO: 522966 - DNA, 120 bp, Artificial Sequence
  ENSG00000165521_64 (sequence is synthesized)
agtcaataaattaaaggaggaaaaaaatccctgaacaacctgcccataaaaagaaaaatactctacatttgagcctgctgcagttttaaattttccctctgggtcaagtttgccagcttt

SEQ ID NO: 522967 - DNA, 120 bp, Artificial Sequence
  ENSG00000165521_65 (sequence is synthesized)
tggctacagagaaattatatttccattacagtgcaggtagaaactctgtaaccttaagcatgtaaactacatagaataaaactgtttccactgcatttctgtccttcaaagtggccaacc

SEQ ID NO: 522968 - DNA, 120 bp, Artificial Sequence
  ENSG00000165521_66 (sequence is synthesized)
tgattaagtcagccttaatcactgctgctgtcagtttcacgactaaaggtcatattgactaagtagtcatcagctgaccacctcgctgtatcagccagcaacgaggggaaggtgaagaaa

SEQ ID NO: 522969 - DNA, 120 bp, Artificial Sequence
  ENSG00000165521_67 (sequence is synthesized)
catgataggccatatagaatctgccctatgtttacttttttaacccagataattatttttgtgtgcagtatctaagctcctgattgtgtaacctgggacttctggcaccttttgttccat

SEQ ID NO: 522970 - DNA, 120 bp, Artificial Sequence
  ENSG00000165521_68 (sequence is synthesized)
tcattttatgtataaaatgcatgccaaagcacactgtgccctctggtacccttgcttccaatcgccaaccatgctcatttccttcctttttttgtggtccctttttgtggtgatcatttt

SEQ ID NO: 522971 - DNA, 120 bp, Artificial Sequence
  ENSG00000165521_69 (sequence is synthesized)
aaaccacgtcatccaacaaatgttttatggtcaaccttagcttgttcataagccatagcaactgaaagattaaactcttaaatatgtgtctgggcagtggctattaaatagcaaaaaaca

SEQ ID NO: 522972 - DNA, 120 bp, Artificial Sequence
  ENSG00000165521_70 (sequence is synthesized)
atcagattttagtattttattatttccttgtaaaatggctgaactaaattaaacccttgtttcccatttgttctataatttatagtgaaactgagaacaaaactatctttataaatgata

SEQ ID NO: 522973 - DNA, 120 bp, Artificial Sequence
  ENSG00000165521_71 (sequence is synthesized)
gctaaaagtatttccagatatttaaacaatttaaaataaatttcttctgcagagatgcaaagcatctcaacactggaatgaacaaatgccttaaattcaatggagtaaacctttagaatg

SEQ ID NO: 522974 - DNA, 120 bp, Artificial Sequence
  ENSG00000165521_72 (sequence is synthesized)
aagaggaactgtcatttcacccaagccgaagacaacagccttatgcacttgtgtgctctgtctttgctgcttctcgtgtttcaagcctttcctgtgggatcagcacagcaaagtgcaact

SEQ ID NO: 522975 - DNA, 120 bp, Artificial Sequence
  ENSG00000165521_73 (sequence is synthesized)
taccaaatggtttaatgactggttaattctttcttctcccaatggaaaagcaatggcaacacaacagtagactgctggcttgacaatcttaaacgtgagcctttgcacatgtaggtttat

SEQ ID NO: 522976 - DNA, 120 bp, Artificial Sequence
  ENSG00000165521_74 (sequence is synthesized)
catcatttgagtatacgactaagcaagtcaatgaactttttttttttttttagcagtttaatttggtcctgagaatgttgcagtctttattaccccttttgcattaatccacttttctaa

SEQ ID NO: 522977 - DNA, 120 bp, Artificial Sequence
  ENSG00000165521_75 (sequence is synthesized)
ccaccttttaagctttaatttttaacactatacaccaagtctttgaaatcagtgatctgttatttaactctaaagcatttgacacttcttgccttaacagttttaaaaaccacacacaaa

SEQ ID NO: 522978 - DNA, 120 bp, Artificial Sequence
  ENSG00000165521_76 (sequence is synthesized)
aaaactctgtaagtaatacagtaggccaaaagtttcatcctatctatcttgcagtttacctatctgatctgatctctgtaattatagttctgtcatttaaaatatactatttaaatctaa

SEQ ID NO: 522979 - DNA, 120 bp, Artificial Sequence
  ENSG00000165521_77 (sequence is synthesized)
tttttacatttcaaaaattatcttcagtagtaactaagtatattttctgtggattctgagaatgttatttttcagaatgtgagaatatatatgtacatttataatcttgtgactttaaag

SEQ ID NO: 522980 - DNA, 120 bp, Artificial Sequence
  ENSG00000165521_78 (sequence is synthesized)
tctgttttcagatacagtatgtaaatacttgtaaaaaaatttgtataattttgtgataatgtagtttcccaaaaaaattatttagaaggcattatgttattagtaaatgagagcactgta

SEQ ID NO: 522981 - DNA, 120 bp, Artificial Sequence
  ENSG00000165521_79 (sequence is synthesized)
ctccgtctcaaaaaaaataaaataaaatgaataaaagttgtaatattttctttctaccttcctgctttagaagctctcaagatgaagagggcagtctagtggaccacagaatgggtcatc

SEQ ID NO: 522982 - DNA, 120 bp, Artificial Sequence
  ENSG00000165521_80 (sequence is synthesized)
tttgggaaggtgtgacaagacacctctctgggagggatggtgtgagaggctcagtgaaggcactgagtgctgcatgcctttcctcctccccacttctctgttgcaggcctccagtgagca

SEQ ID NO: 522983 - DNA, 120 bp, Artificial Sequence
  ENSG00000165521_81 (sequence is synthesized)
gcgagacttcgtctcaaaaaaaaaaaattcttcttccaagattcaagttgtgtcatttcaccttaataactggaggttagttaagctgggctgtgttctttgcttaatattaagacaacg

SEQ ID NO: 522984 - DNA, 120 bp, Artificial Sequence
  ENSG00000165521_82 (sequence is synthesized)
ttttttccagatggaagaaaactatcttaatgaattgttagcttattaattatgtaatgctaatggcttttaaaagctgagatgttctgactgggtgttgtggctcacacctgtaatccc

SEQ ID NO: 522985 - DNA, 120 bp, Artificial Sequence
  ENSG00000165521_83 (sequence is synthesized)
agtaccttgggaggccaagggggaaggattgcttgaggccaggagtttgggaccatagtgagaccccgcctctatttaaaaaattaaattttgttttgttttgttttgagttggagtttt

SEQ ID NO: 522986 - DNA, 120 bp, Artificial Sequence
  ENSG00000165521_84 (sequence is synthesized)
attataggtgtgagccactgggcctggcctaagaaagtttttttaagccattagacgtttttaaaggaattgggagatgacaattggggaaatatttaaaatttaagtaaaatataaagc

SEQ ID NO: 522987 - DNA, 120 bp, Artificial Sequence
  ENSG00000165521_85 (sequence is synthesized)
ttccttatttcatgtaacccagacaatctcagtatacatgatcagttgtgtctgacaggtaaatctatttgaggccttatcacacgttacttttaagaactagaaaggaaaagtcactga

SEQ ID NO: 522988 - DNA, 120 bp, Artificial Sequence
  ENSG00000165521_86 (sequence is synthesized)
atttaaatttgatgtagcggtcattggggagccagtgaagggatttaaaggagctattgagtttgcagtgagtggagaggaagataatctgtagtacagtttactgacatctgtgtcact

SEQ ID NO: 522989 - DNA, 120 bp, Artificial Sequence
  ENSG00000165521_87 (sequence is synthesized)
tccatcacaaagaaatgataaatgtctgaggtgatggttatgcgtattaccctatgccctatagatatgtataattatgtgtcaatttcaaaataaaaattcaaaactacaactcctatg

SEQ ID NO: 522990 - DNA, 120 bp, Artificial Sequence
  ENSG00000165525_0 (sequence is synthesized)
agaggaacttgcggtagtgaccctcgggcctcgccatgaagagccgctttagcaccattgacctccgcgccgtactcgcggagctgaatgctagcttgctaggaatgagagtaaacaatg

SEQ ID NO: 522991 - DNA, 120 bp, Artificial Sequence
  ENSG00000165525_1 (sequence is synthesized)
tttatgatgtggataataagacataccttattcgtcttcaaaaaccggactttaaagctacacttttacttgaatctggcatacgaattcatacaacagaatttgagtggcctaagaata

SEQ ID NO: 522992 - DNA, 120 bp, Artificial Sequence
  ENSG00000165525_2 (sequence is synthesized)
tgatgccgtctagttttgccatgaagtgccgaaaacatttgaagagtcggagattagtcagtgcaaaacagcttggtgtggatagaattgtagattttcaatttggaagtgatgaagctg

SEQ ID NO: 522993 - DNA, 120 bp, Artificial Sequence
  ENSG00000165525_3 (sequence is synthesized)
cttaccatttaatcattgagctctatgatagggggaacattgttcttacagattatgagtacgtaattttaaatattctaaggtttcgaactgatgaggcagatgatgttaaatttgctg

SEQ ID NO: 522994 - DNA, 120 bp, Artificial Sequence
  ENSG00000165525_4 (sequence is synthesized)
ttcgtgaacgctatccacttgatcatgctagagctgctgaacctttgcttactttggaaaggttgactgaaatagtagccagcgcacctaagggtgaactactgaagagggtgcttaacc

SEQ ID NO: 522995 - DNA, 120 bp, Artificial Sequence
  ENSG00000165525_5 (sequence is synthesized)
cattacttccctatggaccagctctcattgaacactgtcttttagaaaatggattctcgggtaatgtcaaagtggatgaaaaacttgaaactaaagatattgaaaaagtacttgtttctc

SEQ ID NO: 522996 - DNA, 120 bp, Artificial Sequence
  ENSG00000165525_6 (sequence is synthesized)
tgcagaaagcagaagactatatgaaaacaacatccaacttcagtgggaagggatatatcattcagaaaagagaaataaaaccaagcttggaagcagataaaccagttgaagacatactga

SEQ ID NO: 522997 - DNA, 120 bp, Artificial Sequence
  ENSG00000165525_7 (sequence is synthesized)
cgtatgaggaatttcatcctttcttgttttctcaacattcacaatgtccatatatagaatttgaatcatttgacaaggcggtggatgaattttattccaagatagaaggccagaaaattg

SEQ ID NO: 522998 - DNA, 120 bp, Artificial Sequence
  ENSG00000165525_8 (sequence is synthesized)
acttaaaagctttacaacaggaaaagcaagcattgaagaaattagataatgttcgaaaggatcacgaaaacagattggaagctcttcagcaggctcaggaaatagacaaactgaaaggag

SEQ ID NO: 522999 - DNA, 120 bp, Artificial Sequence
  ENSG00000165525_9 (sequence is synthesized)
agctcatagaaatgaacctacaaatagttgacagagccattcaggtagttcgaagtgctttagctaaccagatagattggacagaaattgggttaattgtgaaagaagcccaggctcaag

SEQ ID NO: 523000 - DNA, 120 bp, Artificial Sequence
  ENSG00000165525_10 (sequence is synthesized)
gagaccctgttgcaagtgcaatcaaagaattaaaactacaaacaaaccatgttacaatgctgctaagaaatccatacttgttatcagaggaggaagatgatgatgttgatggtgacgtca

SEQ ID NO: 523001 - DNA, 120 bp, Artificial Sequence
  ENSG00000165525_11 (sequence is synthesized)
atgttgagaaaaatgaaactgaaccaccaaaaggaaaaaagaaaaaacaaaagaataaacagctgcagaagcctcagaaaaataagcccttacttgtagatgttgatctcagcttgtcag

SEQ ID NO: 523002 - DNA, 120 bp, Artificial Sequence
  ENSG00000165525_12 (sequence is synthesized)
catatgccaatgccaaaaagtattatgatcacaagagatatgctgctaagaaaacacaaaagactgttgaagctgctgagaaggcattcaagtcagcagaaaagaaaacaaagcaaacat

SEQ ID NO: 523003 - DNA, 120 bp, Artificial Sequence
  ENSG00000165525_13 (sequence is synthesized)
taaaagaagttcagactgttacctctattcaaaaagcaagaaaagtatattggtttgagaaatttctgtggttcattagctcagagaactatctaattataggtggacgagatcagcaac

SEQ ID NO: 523004 - DNA, 120 bp, Artificial Sequence
  ENSG00000165525_14 (sequence is synthesized)
agaatgaaataattgtgaaaagatacttgacaccaggagacatttatgtacatgctgatcttcatggagctactagctgtgtaattaagaatccaacaggagaacccatccccccacgga

SEQ ID NO: 523005 - DNA, 120 bp, Artificial Sequence
  ENSG00000165525_15 (sequence is synthesized)
ccttgactgaagctggcacaatggcactttgctacagtgctgcttgggatgcacgagttatcactagtgcttggtgggtgtaccatcatcaggtatctaaaacagcaccaactggagaat

SEQ ID NO: 523006 - DNA, 120 bp, Artificial Sequence
  ENSG00000165525_16 (sequence is synthesized)
atttgacaacaggaagcttcatgataagaggaaaaaagaattttcttcctccctcatatctaatgatggggtttagcttcctttttaaggtagatgagtcttgtgtttggagacatcagg

SEQ ID NO: 523007 - DNA, 120 bp, Artificial Sequence
  ENSG00000165525_17 (sequence is synthesized)
gtgaacgaaaagtcagagtacaggatgaagacatggagacactggcaagttgtacaagtgaactcatatcagaagaaatggaacaattagatggaggtgacacgagcagtgatgaggata

SEQ ID NO: 523008 - DNA, 120 bp, Artificial Sequence
  ENSG00000165525_18 (sequence is synthesized)
aagaagaacatgaaactcctgtggaagtagaactcatgactcaggttgaccaagaggatatcactcttcagagtggcagagatgaactaaatgaggagctcattcaggaagaaagctctg

SEQ ID NO: 523009 - DNA, 120 bp, Artificial Sequence
  ENSG00000165525_19 (sequence is synthesized)
aagacgaaggagaatatgaagaggttagaaaagatcaggattctgttggtgaaatgaaggatgaaggggaagagacattaaattatcctgatactaccattgacttgtctcaccttcaac

SEQ ID NO: 523010 - DNA, 120 bp, Artificial Sequence
  ENSG00000165525_20 (sequence is synthesized)
cccaaaggtccatccagaaattggcttcaaaagaggaatcttctaattctagtgacagtaaatcacagagccggagacatttgtcagccaaggaaagaagggaaatgaaaaagaaaaaac

SEQ ID NO: 523011 - DNA, 120 bp, Artificial Sequence
  ENSG00000165525_21 (sequence is synthesized)
ttccaagtgactcaggagatttagaagcgttagagggaaaggataaagaaaaagaaagtactgtacacattgaaactcatcagaacacaagcaaaaatgttgcggctgtgcagccaatga

SEQ ID NO: 523012 - DNA, 120 bp, Artificial Sequence
  ENSG00000165525_22 (sequence is synthesized)
aacgaggacaaaagagtaaaatgaaaaaaatgaaagaaaaatacaaagaccaggatgaagaagaccgtgaacttatcatgaagttgctggggtctgcaggttcaaacaaagaagaaaaag

SEQ ID NO: 523013 - DNA, 120 bp, Artificial Sequence
  ENSG00000165525_23 (sequence is synthesized)
ggaagaaggggaagaaaggaaaaacaaaggacgaacctgtgaagaaacagccccagaaacctagaggtggacagagggtctctgacaacattaagaaagaaactccgttccttgaggtta

SEQ ID NO: 523014 - DNA, 120 bp, Artificial Sequence
  ENSG00000165525_24 (sequence is synthesized)
gatctggatcaacagggaaatgaggaaaacctatttgattctttgacaggccagccacatcctgaagatgtactactgtttgccattccaatatgtgccccttacaccaccatgacaaac

SEQ ID NO: 523015 - DNA, 120 bp, Artificial Sequence
  ENSG00000165525_25 (sequence is synthesized)
tacaaatataaagtgaaacttactcctggagtgcagaaaaagggaaaagctgcaaaaacagccttgaatagtttcatgcattccaaagaagcaacagcaagagaaaaagacttattccgc

SEQ ID NO: 523016 - DNA, 120 bp, Artificial Sequence
  ENSG00000165525_26 (sequence is synthesized)
agcgtaaaggacacagatttatcaagaaacattcctggcaaagtgaaagtgtctgcacccaatcttctgaacgtaaaaaggaaatagctgaaatgaaattctaaaatatttgagaagagc

SEQ ID NO: 523017 - DNA, 120 bp, Artificial Sequence
  ENSG00000165525_27 (sequence is synthesized)
caattttatagccttttggaagttcaaagatgaaagcaccatgtatcaggatttccgcattataaaaatgaactaaacattgccttgctatattcaccaaaaggacttacttcttgtttt

SEQ ID NO: 523018 - DNA, 120 bp, Artificial Sequence
  ENSG00000165525_28 (sequence is synthesized)
ttcccagttttatatagaggaaacactgtctatgataggatttccaaaagtatttgtggacagttaaatgctaattaatatacatctgtagttattctacattttcttgaaatttgggag

SEQ ID NO: 523019 - DNA, 120 bp, Artificial Sequence
  ENSG00000165525_29 (sequence is synthesized)
gttaataccaagtattcatttcatgatgtaaagaaactgaacagtgaagtggcttgattgcttaaactattgacttggtaagtctactgtatataacatctaatatatatattacaggcc

SEQ ID NO: 523020 - DNA, 120 bp, Artificial Sequence
  ENSG00000165525_30 (sequence is synthesized)
aaatgaactaaacattgccttgctatattcaccaaaaggacttaattcttgtttttttcccagttttatatagaggaaacactatgataggatttcctaaagtatttgtggacagttaaa

SEQ ID NO: 523021 - DNA, 120 bp, Artificial Sequence
  ENSG00000165525_31 (sequence is synthesized)
tgctaattatatacatctgtagttattctacattttcttgaaatttgggaggttaataccaagtattcatttcatgatgtaaagaaactgaacagtgaagtggcttgattgcttaaacta

SEQ ID NO: 523022 - DNA, 120 bp, Artificial Sequence
  ENSG00000165525_32 (sequence is synthesized)
ttgacttggtaagtctactgtatataacatctaatatatatatattataggccagctacaaggggtttaaatatttaggattgtgtcttgaaaactaagtattggagtggattttcttct

SEQ ID NO: 523023 - DNA, 120 bp, Artificial Sequence
  ENSG00000165525_33 (sequence is synthesized)
gctttcattgatacttgtcagaaaaaaatattagaccaaaatgtaaaatataagtaataattctcatgactcagcttaatcatttctattcatttgtagaccttcaggtttgatcttaat

SEQ ID NO: 523024 - DNA, 120 bp, Artificial Sequence
  ENSG00000165525_34 (sequence is synthesized)
tttttccttgtaatctgattcagttctgtaccattttaatttccacctttagtaattaattaccaatatagcacgttagagtatcttaacctataataccagaagcgcattttaggctta

SEQ ID NO: 523025 - DNA, 120 bp, Artificial Sequence
  ENSG00000165525_35 (sequence is synthesized)
ccactaaagactctaacccacttttcctctgtctcttaacagaatggaaaatgatgtcatcattatttccattccttcatgagctataaaacctattaattaaaaaaaaactttttaatt

SEQ ID NO: 523026 - DNA, 120 bp, Artificial Sequence
  ENSG00000165525_36 (sequence is synthesized)
gactggacagcacctgcctgtattcagcatgaccacttgctccagcccctacactgaagcattaaggtcaaagtactgaacagttgttggtccctccacactttgtttttccagcttcgt

SEQ ID NO: 523027 - DNA, 120 bp, Artificial Sequence
  ENSG00000165525_37 (sequence is synthesized)
agcttcgtcataatgtgaatattaatgtttaaaaaaaaaaacctttattatattgtatttacaacactaggttacataactatagactactcttgccattaaaaaaaaaaaaatctataa

SEQ ID NO: 523028 - DNA, 120 bp, Artificial Sequence
  ENSG00000165525_38 (sequence is synthesized)
aaaaatgacttcagcattttgatgatggtaagactataatgtttctacagatacatatcctgaagttactgaaaagaaaatgtagcaaccattcttcagggtaaaaagcccaaccattac

SEQ ID NO: 523029 - DNA, 120 bp, Artificial Sequence
  ENSG00000165525_39 (sequence is synthesized)
tttactttaatagaggacagctactggtgttaaatacatttattgtaaactttagacacaaaaataggttctctaggccattcacatgcacattaaaaccaacaggtgcaaactacaaca

SEQ ID NO: 523030 - DNA, 120 bp, Artificial Sequence
  ENSG00000165525_40 (sequence is synthesized)
atgcatataattatacaaatgatgccactctgtgatgtttacaggattgctgtccatgcaaggtgatcataggcattatttatgaagccttaagatccagaagtgttgttactaccaaac

SEQ ID NO: 523031 - DNA, 120 bp, Artificial Sequence
  ENSG00000165525_41 (sequence is synthesized)
ctctgattaacactgtgaagtaagtgttttggaaggcagttccatgagttggctaacatttctttaaagcaaatgactgcttctaagcttagcctgaaagtggacaaggaaagagaaaag

SEQ ID NO: 523032 - DNA, 120 bp, Artificial Sequence
  ENSG00000165525_42 (sequence is synthesized)
taatttcactttactgtttggaagtacattcacttgaaaaactacataaaacatccctctttctttcttcaaagattttcataggaactggttatagcaatgaagttttattgcccttaa

SEQ ID NO: 523033 - DNA, 120 bp, Artificial Sequence
  ENSG00000165525_43 (sequence is synthesized)
ataatccataaacctagtttttcgagagtgctaagtcttaggaaacacaattttaaataatctaagtgccaagtacaaagttacttaccgtacaagagattttggttgaactgaaaatat

SEQ ID NO: 523034 - DNA, 120 bp, Artificial Sequence
  ENSG00000165525_44 (sequence is synthesized)
tagtatttcattactgtgtgcctgaaaaataaataggaagaacacatttaaaagcaaatgctttgcaagtaagtttcagtaataatgtgaaggtagtatacttacagctctgtgatggac

SEQ ID NO: 523035 - DNA, 120 bp, Artificial Sequence
  ENSG00000165525_45 (sequence is synthesized)
aagcaagttgttggcacatccaccaaaaacaattacttctccttcatcgctggcacaagctgtgtgccataacctgcatttaaaacaaaaacgagtttgaagccacccagaacaccagtt

SEQ ID NO: 523036 - DNA, 120 bp, Artificial Sequence
  ENSG00000165525_46 (sequence is synthesized)
ggccattttatactacagaatagagctatgaaataaagactagcgatcttaaggtagttcagaccaaaacatcatggcgagaagtaaaatcttaagggaaagtagcaaaagcagatcaat

SEQ ID NO: 523037 - DNA, 120 bp, Artificial Sequence
  ENSG00000165525_47 (sequence is synthesized)
caatatctattttatctggatattattttctctctctggtcgttctcatttatgcaatgaggagtttgaactgaacgatctgttctctaggtctttgttagcaataaaaatcgtatggga

SEQ ID NO: 523038 - DNA, 64 bp, Artificial Sequence
  ENSG00000165525_48 (sequence is synthesized)
tatttacattcttttctttttttttttccccccgagagggagtctcagcccaggttctagcaat

SEQ ID NO: 523039 - DNA, 85 bp, Artificial Sequence
  ENSG00000165525_49 (sequence is synthesized)
ttacattattttctattctcacaaccatccttgtcagatgagtggtggcatctcattttacaggtgaggcagtagaccctgttac

SEQ ID NO: 523040 - DNA, 120 bp, Artificial Sequence
  ENSG00000165525_50 (sequence is synthesized)
tggcatctcattttacaggtgaggcagtagaccctgttactactattagacagtgttccttttgcagaagaatgagcacctgctatgtgggcgttatataatacgtatttaagtttttat

SEQ ID NO: 523041 - DNA, 120 bp, Artificial Sequence
  ENSG00000165525_51 (sequence is synthesized)
gtgcaaattataataaaagcagcaaaagttatgcaactaattttgctgtcttggtttttggaaatacccaactaaggcagagttgtggttttcattgttgaaagggtagcaatgtccaag

SEQ ID NO: 523042 - DNA, 120 bp, Artificial Sequence
  ENSG00000165525_52 (sequence is synthesized)
aaatttattgtggtaaaggatcttggagatcatttagttcaacctattcatgatacaggttattcttttgtctaagagtaccctttgggaatgatcagacacttttctgttgattttttg

SEQ ID NO: 523043 - DNA, 120 bp, Artificial Sequence
  ENSG00000165525_53 (sequence is synthesized)
gagaaatatgggagaaacagtggaatatttttatgacatttttaggaaatcacctggcttggttggtagtcccacactgactttccttatgataattctacagatggaggtgacacgagc

SEQ ID NO: 523044 - DNA, 120 bp, Artificial Sequence
  ENSG00000165525_54 (sequence is synthesized)
gaaaaagggaaaaggtatttaaatttgtttttttgaattatgattttaaacagttcagtgacttaacagtagattattcttactcttttttgtatttacagctgcaaaaacagccttgaa

SEQ ID NO: 523045 - DNA, 67 bp, Artificial Sequence
  ENSG00000165525_55 (sequence is synthesized)
tagctgggactacaggcacccactatacccagctaacttttatattttttgtagagatggtgtttct

SEQ ID NO: 523046 - DNA, 120 bp, Artificial Sequence
  ENSG00000165525_56 (sequence is synthesized)
cagcctgagccttccagagtcctaggattataggcgtgaaccactgctcctgggccttctttctcttaaatgtaactgtaggtaggattttgaaaattattgttctcattacttattatg

SEQ ID NO: 523047 - DNA, 120 bp, Artificial Sequence
  ENSG00000165525_57 (sequence is synthesized)
ctaggcaaaaattaagtagtaaagaatatatttaaacattggtcttcaactctttggaactatgaagcagagtttaagtaccactgttccagcttagatggtatgtatatcaggaaaaga

SEQ ID NO: 523048 - DNA, 120 bp, Artificial Sequence
  ENSG00000165525_58 (sequence is synthesized)
tcattttgtaatagtgctatataacatgagtgggggaacattttttttctgtgtcaaaggttgttactaccctaggaaatgggtgccacacaaataaaataaaattttccagtaataacc

SEQ ID NO: 523049 - DNA, 120 bp, Artificial Sequence
  ENSG00000165525_59 (sequence is synthesized)
atctgaaacggagagggtaaggaacttcagcgaagtcatgcagtgaccagaggacaacgcgtaagtgctgacaggtttgaggaatgactctgtcatggcaccaaactcaaaaggtattca

SEQ ID NO: 523050 - DNA, 120 bp, Artificial Sequence
  ENSG00000165525_60 (sequence is synthesized)
ttaacttttctttgagccataaaaaggatcaaatgtgtcatttcaacaaacacacagacacttgcctgctgtcaaaaggaaatgggggccagccacagtggctcatgcctgttatcccag

SEQ ID NO: 523051 - DNA, 120 bp, Artificial Sequence
  ENSG00000165525_61 (sequence is synthesized)
aaatttatccaaaactgttgaacagatatttaaaaataaaagttctgttgaccaaaattctccatttgcttttctcctggcaaacttatcaaccttagttgtcattttaaattgtacttg

SEQ ID NO: 523052 - DNA, 120 bp, Artificial Sequence
  ENSG00000165525_62 (sequence is synthesized)
taacttttgctgctttaacatatactttatatgaaagtttcagttcccacctcctctacttcagagaactacccttcttctcttgaatgacattactttcttaagtaataaaacagacac

SEQ ID NO: 523053 - DNA, 120 bp, Artificial Sequence
  ENSG00000165525_63 (sequence is synthesized)
acacaaacacatatacgaatccacttcagagtcttaggaagaatataaccttgaggccccctatcctgtgggtcagaaatgacagtctggttgtatcactgtttctttctccttatggtt

SEQ ID NO: 523054 - DNA, 120 bp, Artificial Sequence
  ENSG00000165525_64 (sequence is synthesized)
aacagatgttttattgaatgcctaagacctgccaatgctatgttggtacaaagactacaaatcccagtgcctggccatcaaggtgatcaggggcaaaatgtgcctagtgagtaaggatga

SEQ ID NO: 523055 - DNA, 120 bp, Artificial Sequence
  ENSG00000165525_65 (sequence is synthesized)
gtcaggggtgacaatatgttgagcttggatgatggaaagaaagataaatccatgagagatgaaaaacttgcatctttttcccacatgatgattttaagcatctttgtattttctaacttg

SEQ ID NO: 523056 - DNA, 120 bp, Artificial Sequence
  ENSG00000165525_66 (sequence is synthesized)
gattatcaagtgaagcagaagccatgaccatttatatactgtatatgtgccttccccatggaacttttttagggcactaagaatttcaaattctaagaatgaaatgttttcatgtctttt

SEQ ID NO: 523057 - DNA, 120 bp, Artificial Sequence
  ENSG00000165526_0 (sequence is synthesized)
cttccttgtaagatggcggcgcccaggtggagcgcgtcgggcccctggatccggggaaacggccaaggttgcgggagtctcttcactctcgtctcaaagccattttgtgccgctgccgct

SEQ ID NO: 523058 - DNA, 120 bp, Artificial Sequence
  ENSG00000165526_1 (sequence is synthesized)
gcctctacggccataaatgcccagagattagcggagaagctccgagcccagaaacgggaacaagacacaaagaaggagccggtgtccacaaacgctgttcagcggagagtgcaagaaata

SEQ ID NO: 523059 - DNA, 120 bp, Artificial Sequence
  ENSG00000165526_2 (sequence is synthesized)
gtgcggttcacacggcagctgcagcgagtccaccccaacgtgcttgctaaggcactgacccgaggaattctccaccaggacaagaaccttgtggtcatcaataagccctacggtctccct

SEQ ID NO: 523060 - DNA, 120 bp, Artificial Sequence
  ENSG00000165526_3 (sequence is synthesized)
gtgcatggtggccctggggtccagctctgcatcactgatgtactacctatcctggcaaagatgcttcatggccacaaggcagagcccttgcatctgtgccaccggctggacaaggaaacc

SEQ ID NO: 523061 - DNA, 120 bp, Artificial Sequence
  ENSG00000165526_4 (sequence is synthesized)
acaggtgtaatggtgttggcttgggacaaggacatggcacatcaagtccaagagttgtttagaacccgtcaggtggtgaagaagtactgggccatcactgtgcatgtccccatgccctca

SEQ ID NO: 523062 - DNA, 120 bp, Artificial Sequence
  ENSG00000165526_5 (sequence is synthesized)
gcaggagtcgtggacatccccattgtggagaaggaggcgcaaggccagcagcaacaccacaagatgacattgtccccgagctaccgcatggacgatgggaaaatggtgaaagtgcggcgc

SEQ ID NO: 523063 - DNA, 120 bp, Artificial Sequence
  ENSG00000165526_6 (sequence is synthesized)
agccggaatgcgcaagttgctgtaactcagtaccaggtgctcagcagcactctctcctccgccctcgtggagctccagcccatcactggaataaaacatcagcttcgagttcacttgtct

SEQ ID NO: 523064 - DNA, 120 bp, Artificial Sequence
  ENSG00000165526_7 (sequence is synthesized)
tttggattggattgtccaatccttggtgatcacaagtactcagactggaataggttggccccccagaagctgtctgtgggcaccctgaagaagctggggctagaacagtcgaaggcccgc

SEQ ID NO: 523065 - DNA, 120 bp, Artificial Sequence
  ENSG00000165526_8 (sequence is synthesized)
tacatcccccttcacctgcacgcccggcagctgatcctgcctgccctggggtccgggaaggaggaactcaacttggtctgcaaacttcctcgcttctttgtgcattccctgcaccgcctg

SEQ ID NO: 523066 - DNA, 120 bp, Artificial Sequence
  ENSG00000165526_9 (sequence is synthesized)
cgtttagagatgccaaatgaggatcaaaatgagaacaatgaagccaagtgtctgggagcacagtgaagaccatgggagcaccctggcacctgggagcacagtgaagaccctgagagcatc

SEQ ID NO: 523067 - DNA, 120 bp, Artificial Sequence
  ENSG00000165526_10 (sequence is synthesized)
ttggaacagactgcgtaagagccaggtgggataaggtaaagcaactcagctgctacagggcttttaatggagaacaaagtctatttactgatagtttggctgcactgtggaaaagcctgc

SEQ ID NO: 523068 - DNA, 120 bp, Artificial Sequence
  ENSG00000165526_11 (sequence is synthesized)
tggaagtctccctgccgtgggctctcattgccaatatggaacagagcccagggccaggcagactggggcagtgactggaaaaggaaaactaaaggtcagaatccgggatcaggaactgtt

SEQ ID NO: 523069 - DNA, 120 bp, Artificial Sequence
  ENSG00000165526_12 (sequence is synthesized)
tttatccagcagtgaagctcttgagctcttaggaaggttcccgtggttggaaagaacataatggttaacaaatatcacagcatccagggattgcccagctatagtgtgggtgccctactg

SEQ ID NO: 523070 - DNA, 120 bp, Artificial Sequence
  ENSG00000165526_13 (sequence is synthesized)
aactctgattagggaacctgtataagggtattgagtgtgaggttgaggtgggacatttgctgagcaaggagaaccgatgtgaatggcaggcagataacatgcacacatgaagctggctgg

SEQ ID NO: 523071 - DNA, 120 bp, Artificial Sequence
  ENSG00000165526_14 (sequence is synthesized)
gtgtaaggcagtagcggggagcggcatgctgtctaacagctgttagctccagctggttgttgccatgtgggaatggattttctcatttcttcagagaagctggaaacctagatatttatg

SEQ ID NO: 523072 - DNA, 120 bp, Artificial Sequence
  ENSG00000165526_15 (sequence is synthesized)
tgaaacctcccagtgtattgccaactaaatcaaatttttaaagatgcttaggcacctaagcaaataatacttagaggttgaatttggtctacaggctagcagtttgcagtctatgtttaa

SEQ ID NO: 523073 - DNA, 120 bp, Artificial Sequence
  ENSG00000165526_16 (sequence is synthesized)
tgaatggtatagaagtttggggaaaggtgccatcttgaaaattctggatcagtggttggcattttcgctgcgtgtagtatgtatcctttctaggcttggagatggctttggttggtccgt

SEQ ID NO: 523074 - DNA, 120 bp, Artificial Sequence
  ENSG00000165526_17 (sequence is synthesized)
gaatgtagttatgagagtgctgccattaaaaaatcaaaaatctctgttgtggaagcgtatcttctgttcttaggtctcaggaaggagagggctatactgaacaccattagggatagatgg

SEQ ID NO: 523075 - DNA, 120 bp, Artificial Sequence
  ENSG00000165526_18 (sequence is synthesized)
aaatgaccttggcctccctgctcagctggtccatctagtttccaccttgtttcttgcaaacaaatacacctcacactactttttctttctgacagagttggagtgacagcacagttaggg

SEQ ID NO: 523076 - DNA, 120 bp, Artificial Sequence
  ENSG00000165526_19 (sequence is synthesized)
gggtacaccccgggacagtctttatatgttccctctgtatagatgatgccactttctagccctttccctgtctccatggtacccattactgtgcataataaatttaactttgaaagcaca

SEQ ID NO: 523077 - DNA, 120 bp, Artificial Sequence
  ENSG00000165526_20 (sequence is synthesized)
tatgaggcctgctgatggcagtagaggtggtataagtggaggcatttctttcacctatttattcattaaaaacagaaactcccattaatagaaggcactgcactatgacctgcgagattg

SEQ ID NO: 523078 - DNA, 120 bp, Artificial Sequence
  ENSG00000165526_21 (sequence is synthesized)
taaaaaatatgtgaaacagctttggtgcttagaatattaagtctgatagaacagtggttcttaattctggtatacatcaaaattatcaaaaattaattatacaagcatggggtggacatg

SEQ ID NO: 523079 - DNA, 120 bp, Artificial Sequence
  ENSG00000165526_22 (sequence is synthesized)
ctcacgcctgtaatcacagcactttgagaggcagaggtgggaggatcactttaggccaagagtcggagaacagcctgggcaacatagtgacaccttttctctataaaaagtaagaagtta

SEQ ID NO: 523080 - DNA, 60 bp, Artificial Sequence
  ENSG00000165526_23 (sequence is synthesized)
tgtgtgagccaccacgcctgtcccctgtgacttcttcgggtacagttccctcctgtttta

SEQ ID NO: 523081 - DNA, 120 bp, Artificial Sequence
  ENSG00000165526_24 (sequence is synthesized)
tcccctgtgacttcttcgggtacagttccctcctgttttacctatgtggcaaatgagccaggaacggttctctgaatgttttattaggttcattcatccaattattcatttgttcattta

SEQ ID NO: 523082 - DNA, 120 bp, Artificial Sequence
  ENSG00000165526_25 (sequence is synthesized)
ccatgcagtcagaatctacaatcttttattatttgaaaaaaaatacaaaactatattaccataattttattttaactgtacatatccatttttaaagactggaaagaccatgttattaat

SEQ ID NO: 523083 - DNA, 120 bp, Artificial Sequence
  ENSG00000165526_26 (sequence is synthesized)
gtaatttttttctttttttaccccaaatattctacaattagcatgtatgactttagtagtaaaaaagataagcttgtgaaatctatcagctctcaggctaagcattacaccaagagaatc

SEQ ID NO: 523084 - DNA, 120 bp, Artificial Sequence
  ENSG00000165526_27 (sequence is synthesized)
agtaagggtacggtgttttcccgtgagctggatctttggctactgtcaggctcagtcctaaccactgcgtcggtacgcaggttagacagatgggtatctctgctctcaaattagtcgaag

SEQ ID NO: 523085 - DNA, 120 bp, Artificial Sequence
  ENSG00000165526_28 (sequence is synthesized)
gcggcgcgggtctgatgcaaagatagtcattccctactcagattctcacccagacctttatggaaggtcttctccacggcttccgcaccaggcattccccacggctccttctttctccct

SEQ ID NO: 523086 - DNA, 120 bp, Artificial Sequence
  ENSG00000165527_0 (sequence is synthesized)
ccggcagcggcggcggcagaactgggaggaggagttggaggccggagggagcccgcgctcggggcggcggctggaggcagcgcaccgagttcccgcgaggatccatgacctgacggggcc

SEQ ID NO: 523087 - DNA, 120 bp, Artificial Sequence
  ENSG00000165527_1 (sequence is synthesized)
ccggagccgcgctgcctctcgggtgtcctgggtcggtggggagcccagtgctcgcaggccggcgggcgggccggagggctgcagtctccctcgcggtgagaggaaggcggaggagcggga

SEQ ID NO: 523088 - DNA, 120 bp, Artificial Sequence
  ENSG00000165527_2 (sequence is synthesized)
ctcgcgcggcgcctgcggggggaagggcagttccgggccgggccgcgcctcagcagggcggcggctcccagcgcagtctcagggcccgggtggcggcggcgactggagaaatcaagttgt

SEQ ID NO: 523089 - DNA, 120 bp, Artificial Sequence
  ENSG00000165527_3 (sequence is synthesized)
aaatcaagttgtgcggtcggtgatgcccgagtgagcggggggcctgggcctctgcccttaggaggcaactcccacgcaggccgcaaaggcgctctcgcggccgagaggcttcgtttcggt

SEQ ID NO: 523090 - DNA, 120 bp, Artificial Sequence
  ENSG00000165527_4 (sequence is synthesized)
ttcgcggcggcggcggcgttgttggctgaggggacccgggacacctgaatgcccccggccccggctcctccgacgcgatggggaaggtgctatccaaaatcttcgggaacaaggaaatgc

SEQ ID NO: 523091 - DNA, 120 bp, Artificial Sequence
  ENSG00000165527_5 (sequence is synthesized)
ggatcctcatgttgggcctggacgcggccggcaagacaacaatcctgtacaagttgaagctgggccagtcggtgaccaccattcccactgtgggtttcaacgtggagacggtgacttaca

SEQ ID NO: 523092 - DNA, 120 bp, Artificial Sequence
  ENSG00000165527_6 (sequence is synthesized)
aaaatgtcaagttcaacgtatgggatgtgggcggccaggacaagatccggccgctctggcggcattactacactgggacccaaggtctcatcttcgtagtggactgcgccgaccgcgacc

SEQ ID NO: 523093 - DNA, 120 bp, Artificial Sequence
  ENSG00000165527_7 (sequence is synthesized)
gcatcgatgaggctcgccaggagctgcaccgcattatcaatgaccgggagatgagggacgccataatcctcatcttcgccaacaagcaggacctgcccgatgccatgaaaccccacgaga

SEQ ID NO: 523094 - DNA, 120 bp, Artificial Sequence
  ENSG00000165527_8 (sequence is synthesized)
tccaggagaaactgggcctgacccggattcgggacaggaactggtatgtgcagccctcctgtgccacctcaggggacggactctatgaggggctcacatggttaacctctaactacaaat

SEQ ID NO: 523095 - DNA, 120 bp, Artificial Sequence
  ENSG00000165527_9 (sequence is synthesized)
cttaatgagcattctccacccatcccctggaaggagagaaatcaaaaacccattcataggattatcgccaccatcacctctttcaattgccactttctcttcttttgaatttgaactctg

SEQ ID NO: 523096 - DNA, 120 bp, Artificial Sequence
  ENSG00000165527_10 (sequence is synthesized)
gccactttctcttcttttgaatttgaactctggagttactgttctacagtttggcggggacggggcttgggggttttctcttttgtttgtttccctttctttttcctttttttttttttt

SEQ ID NO: 523097 - DNA, 120 bp, Artificial Sequence
  ENSG00000165527_11 (sequence is synthesized)
gatctgacatttgacatgaacacaaagttgctagatgctcttgttgacttccagcagatgggatgggggaaacacagcagttcttggtaaagtcctttgtaataatagtttgattttttt

SEQ ID NO: 523098 - DNA, 120 bp, Artificial Sequence
  ENSG00000165527_12 (sequence is synthesized)
atttcgagagaatctttcattttcctatgtatgcttttttccttttttgcccagtttccttatcacttgctgtagatggcttattttgcattcatgcagactatgttgcaagtctgtttc

SEQ ID NO: 523099 - DNA, 120 bp, Artificial Sequence
  ENSG00000165527_13 (sequence is synthesized)
atctagtaaactgaaaattattgcttaatcaaactgccgtttgtcttttatatttaaggccttccccccccttccttatgagttctaacttagtaatttcaaatgtgaccttttatatct

SEQ ID NO: 523100 - DNA, 120 bp, Artificial Sequence
  ENSG00000165527_14 (sequence is synthesized)
aagaccagtatagtaaacttagcccacagtggcaaataatgagtaatattgtaatatgttccagttgcacctcagtatgttaaacaggtaatgtaagaagttctctgaaatgtcagcaag

SEQ ID NO: 523101 - DNA, 120 bp, Artificial Sequence
  ENSG00000165527_15 (sequence is synthesized)
taagttctgaaacacatcatgcatgagtaggaataaaacccaagttccccataacgtagataacttaatgctgcataaaaatatgaaagtgtaacccatgaaggacactttttctttcca

SEQ ID NO: 523102 - DNA, 120 bp, Artificial Sequence
  ENSG00000165527_16 (sequence is synthesized)
tttaaactttgaaaatagactctttccagaaattggagcaataatggtgttaccacacacagattaaataatttgtagatattttaagtgacttttgggcaaaactggaatgtatacttt

SEQ ID NO: 523103 - DNA, 120 bp, Artificial Sequence
  ENSG00000165527_17 (sequence is synthesized)
taccttgtttcaaacacctaagaccagtaatttaaaaattactaaaaggtttactttgttcattaataaaacatttaacaattcaaattatatgcaccttttacctagttgaaaaaaata

SEQ ID NO: 523104 - DNA, 120 bp, Artificial Sequence
  ENSG00000165527_18 (sequence is synthesized)
cacattcctgttttcacattatagcaactgattaagctgaagctgtaagtcattttttatagatgagtgatccgcatctccatcaattagaacactggaaaagatgttttataaaagagg

SEQ ID NO: 523105 - DNA, 120 bp, Artificial Sequence
  ENSG00000165527_19 (sequence is synthesized)
tatttaattttgtttgtaggattaactcatgcaaataataaaaaagatatcctgttggttcaatagtacactgtctcctttaaggaaggaagcgtgatgaatgaatgatgtgtagacttg

SEQ ID NO: 523106 - DNA, 120 bp, Artificial Sequence
  ENSG00000165527_20 (sequence is synthesized)
agggatgactattaaaggggacgtaggatgaagagaaagaacctacagatgacaatgaatgtaaacttatttttcttcatgtgtaagcagtgtgctcgctggtgatatccagatcctaac

SEQ ID NO: 523107 - DNA, 120 bp, Artificial Sequence
  ENSG00000165527_21 (sequence is synthesized)
aagattacttggttagctggttaggaccagtaactggattgcgaccactatgataatattttgaaccaaatgttaatgcttgatgcagaattgtaaagcagcatctggttcctatatagc

SEQ ID NO: 523108 - DNA, 120 bp, Artificial Sequence
  ENSG00000165527_22 (sequence is synthesized)
cttaaggattaattttagtgatcctcaaggaattaaatagggaatttcagaaatgtagactgcaaaggcagtatacaggaaaaggtggagtgggttttgtttatgagggtgtctgaaaac

SEQ ID NO: 523109 - DNA, 120 bp, Artificial Sequence
  ENSG00000165527_23 (sequence is synthesized)
taaaattgagcgggatatcatggtatagttggacagtattggtccttcacactttggccatattgtataatggagcttttaccaaagatgtatgagaagtgtaagactataaaaaaatga

SEQ ID NO: 523110 - DNA, 120 bp, Artificial Sequence
  ENSG00000165527_24 (sequence is synthesized)
actattcaaagtaaaactcttaacaaacattttacttaaagcagatgcaaaagggtattctcatgtaggctcctgttggtgcagagggatttttttgatttcaggatacaactaaagtac

SEQ ID NO: 523111 - DNA, 120 bp, Artificial Sequence
  ENSG00000165527_25 (sequence is synthesized)
gaagttctcagtttcactttagtagaaagagctctagaaatgaggctgataaacacatctaagaacactggttgctttctaaaatttccaaagctccaccataaatgtaatttttagtgt

SEQ ID NO: 523112 - DNA, 120 bp, Artificial Sequence
  ENSG00000165527_26 (sequence is synthesized)
ttcaaatgattgcattttaaagtatataaatatgggttatccaatatcaatgctatagtaacatcctgaaacaaaacaagcacaaaggtataaatgcctaaactggaggaaacttgaaac

SEQ ID NO: 523113 - DNA, 120 bp, Artificial Sequence
  ENSG00000165527_27 (sequence is synthesized)
cctcatgttaaatcttaaatgtagtatttctaacttgtgaagacagattggtaggcagccatttttttgtgtcttaaaataactgggggcatagttaaaattttatacatcaagtgattg

SEQ ID NO: 523114 - DNA, 120 bp, Artificial Sequence
  ENSG00000165527_28 (sequence is synthesized)
ctattattgaatgttgcaggtgagatgtggttatttttagtttatttgaaatgtttgactggaaaggggggagggggaagcaaatatttgaaatttggaaaaccctaaaccttttggtaa

SEQ ID NO: 523115 - DNA, 120 bp, Artificial Sequence
  ENSG00000165527_29 (sequence is synthesized)
gaaattgtaattttcacttaaaattttctttaaggatataagaggtttataattgatgtagttaaattgaacaataaccattggtgactggagcaggtaattatagcctgcagaaaaaat

SEQ ID NO: 523116 - DNA, 120 bp, Artificial Sequence
  ENSG00000165527_30 (sequence is synthesized)
tatctaagaattttaaaaataagatcctgaagttgtttaattgcatccatttctgtatttatgtgaatttataaactgcagtaagttttgaatgaggttaatcttgtttaatataagtaa

SEQ ID NO: 523117 - DNA, 120 bp, Artificial Sequence
  ENSG00000165527_31 (sequence is synthesized)
atgagtctgtagactgtgatctccccaaactaaaaagtacagtacttggaattgtgttctttatggttgtagtgttggtaaagcactaatatgcagaaaataaaggaattacacagtgca

SEQ ID NO: 523118 - DNA, 120 bp, Artificial Sequence
  ENSG00000165533_0 (sequence is synthesized)
ggcagagtcggacgccgccagctcttcactccacgcccacctctctcctggagcgctgggccttcgctggccgcaccggcagccatgagctcggagatggagccgctgctcctggcctgg

SEQ ID NO: 523119 - DNA, 120 bp, Artificial Sequence
  ENSG00000165533_1 (sequence is synthesized)
agctattttaggcgcaggaagttccagctctgcgccgatctatgcacgcagatgctggagaagtccccttatgaccaggcagcttggatcttaaaagcaagagcgctaacagaaatggta

SEQ ID NO: 523120 - DNA, 120 bp, Artificial Sequence
  ENSG00000165533_2 (sequence is synthesized)
tacatagatgaaattgatgtagatcaggaaggaattgcagaaatgatgctggatgaaaatgctatagctcaagttccacgccctggaacgtctttgaaactccctggaactaatcagaca

SEQ ID NO: 523121 - DNA, 120 bp, Artificial Sequence
  ENSG00000165533_3 (sequence is synthesized)
ggagggcctagccaggccgttaggccaatcacacaagctggaagacccattacaggtttcctcaggcccagcacgcagagtggaaggccaggcactatggaacaggctatcagaacaccc

SEQ ID NO: 523122 - DNA, 120 bp, Artificial Sequence
  ENSG00000165533_4 (sequence is synthesized)
agaaccgcctacacagcccgccctatcaccagctcctccggaagatttgtcaggctgggaacggcttccatgcttacaagtcctgatggaccatttataaatttatctaggctgaattta

SEQ ID NO: 523123 - DNA, 120 bp, Artificial Sequence
  ENSG00000165533_5 (sequence is synthesized)
acaaagtattcccagaaacctaagttggcaaaggctttgtttgagtatatctttcatcatgaaaatgatgttaagactgctttggatctggctgccctctccacagaacattctcagtac

SEQ ID NO: 523124 - DNA, 120 bp, Artificial Sequence
  ENSG00000165533_6 (sequence is synthesized)
aaggactggtggtggaaagtacagattggaaaatgttactacaggttgggaatgtatcgtgaagcagaaaaacagtttaaatcagccctgaagcagcaggaaatggtagatacatttctg

SEQ ID NO: 523125 - DNA, 120 bp, Artificial Sequence
  ENSG00000165533_7 (sequence is synthesized)
tacttggcaaaagtttatgtctcattggatcaacctgtgactgctttaaatcttttcaaacaaggcttagataagtttccaggagaagtaaccctgctctgtggaattgcaagaatctat

SEQ ID NO: 523126 - DNA, 120 bp, Artificial Sequence
  ENSG00000165533_8 (sequence is synthesized)
gaggaaatgaacaatatgtcatcagcagcagaatattacaaagaagttttgaaacaagacaatactcatgtggaagccatcgcatgcattggaagcaaccacttctattctgatcagcca

SEQ ID NO: 523127 - DNA, 120 bp, Artificial Sequence
  ENSG00000165533_9 (sequence is synthesized)
gaaatagctctccggttttacaggcggctgctgcagatgggcatttataacggccagctttttaacaatctggggctgtgttgcttctatgcccagcagtatgatatgactctgacctca

SEQ ID NO: 523128 - DNA, 120 bp, Artificial Sequence
  ENSG00000165533_10 (sequence is synthesized)
tttgaacgtgccctttctttggctgaaaatgaagaagaggcagctgatgtctggtacaacttgggacatgtagctgtgggaataggagatacaaatttggcccatcagtgcttcaggctg

SEQ ID NO: 523129 - DNA, 120 bp, Artificial Sequence
  ENSG00000165533_11 (sequence is synthesized)
gctctggtcaacaacaacaaccacgccgaggcctacaacaacctggctgtgctggagatgcggaagggccacgttgaacaggcaagggcactattacaaactgcatcatcattagcaccc

SEQ ID NO: 523130 - DNA, 120 bp, Artificial Sequence
  ENSG00000165533_12 (sequence is synthesized)
catatgtatgaaccgcattttaattttgcaacaatctctgataagattggagatctgcagagaagctatgttgctgcgcagaagtctgaagcagcatttccagaccatgtggacacacaa

SEQ ID NO: 523131 - DNA, 120 bp, Artificial Sequence
  ENSG00000165533_13 (sequence is synthesized)
catttaattaaacaattaaggcagcattttgctatgctctgattgttccttagaccacatatgttcttatgaagcagcattatgcaaggggaaaaaagcactatgtctgtgtatgtatgt

SEQ ID NO: 523132 - DNA, 120 bp, Artificial Sequence
  ENSG00000165533_14 (sequence is synthesized)
atatagtgtaatacgtatattttaacaaacctgtccttgatattagttaaggtgacacataagggtgacacagaatgtgtaatgcaaatttcatagtaatagtaactttataaaataata

SEQ ID NO: 523133 - DNA, 120 bp, Artificial Sequence
  ENSG00000165533_15 (sequence is synthesized)
ttataaaatacaggatttaaacctttctaaatagatcctgaaactgtctctcacattatatagtagatgtttgtttataatgtttacaaaacattttggtgaatttcctcaatgttttat

SEQ ID NO: 523134 - DNA, 120 bp, Artificial Sequence
  ENSG00000165533_16 (sequence is synthesized)
aaatgtacattttttaagtccttaagctgactcttagccatcatgtagcttaaggagtctgaaatctgccattaaaactgcacctttaagccaggtgtggtagcatgtgcctatagtccc

SEQ ID NO: 523135 - DNA, 120 bp, Artificial Sequence
  ENSG00000165533_17 (sequence is synthesized)
agctacttgggaggtggaggtgggaggattataaatagagactttccttaagactttaaaaatgtatttaaaactattttttattaaatactttgtgatttcctattaagctttaaaata

SEQ ID NO: 523136 - DNA, 120 bp, Artificial Sequence
  ENSG00000165533_18 (sequence is synthesized)
aatcattgtgtaaaacaccatcatttcattattttttaatgagtttttattttagtcatctcaggtgaaacaggttttacagaagtccagtaatcttagaaatcatcattattttaattt

SEQ ID NO: 523137 - DNA, 120 bp, Artificial Sequence
  ENSG00000165533_19 (sequence is synthesized)
tatttcaaatgatataccaccaattctgttttttcctaaaaagtgatttatgggatgtcacattattaataataagaatattcagattagaaatagagtcacaggccaggagtcccactt

SEQ ID NO: 523138 - DNA, 120 bp, Artificial Sequence
  ENSG00000165533_20 (sequence is synthesized)
ctggtcagccacagcacggaagtcagcaatattccagtaccatgcatggcatagcagccttagaaaggctcttgaacttttctctgccttatttagtggaactcttattaaagtgttcac

SEQ ID NO: 523139 - DNA, 120 bp, Artificial Sequence
  ENSG00000165533_21 (sequence is synthesized)
ttctattcttttcagatttgtataaattgtatactcagctgagagaacaaaaaaattgaattcaaggaatgatagcttgctcaaggctagcattcactacagacaagaaagcaaggcccc

SEQ ID NO: 523140 - DNA, 120 bp, Artificial Sequence
  ENSG00000165533_22 (sequence is synthesized)
gcgtcacatccatagctgcagcccaaggtcttgttcctgcaccttagacttgaacctttcttggttctctgtgatgtgttagtgtttatttagcccttgagaatttcctcaggtactatc

SEQ ID NO: 523141 - DNA, 120 bp, Artificial Sequence
  ENSG00000165533_23 (sequence is synthesized)
acatttcctaatatcgtagtcaatatttagattcaaatggtataatgtgaatcattttcttaatttaaaataagagctaataagaatggctgaacatttactgaggatgttaaatatgcc

SEQ ID NO: 523142 - DNA, 120 bp, Artificial Sequence
  ENSG00000165533_24 (sequence is synthesized)
cactgttctgagctctttatgggaatgaattcatttcattctcaccgtagtcctatgcaggctgttattccattttacttatgagaatactgaggcatagtaaaaagcttattgaactag

SEQ ID NO: 523143 - DNA, 120 bp, Artificial Sequence
  ENSG00000165533_25 (sequence is synthesized)
tagtaagtgccaaagattcaggtttaggcagcgtggcctcttgagtgtgtgctcttaatcactaggtcaaatcacctctctctgtttctgctgtaaataaatctactaccatttaaaatg

SEQ ID NO: 523144 - DNA, 120 bp, Artificial Sequence
  ENSG00000165533_26 (sequence is synthesized)
aacattgtgtgcattaggaaagttgaataataagggaatattaacacagcaaaaaataaatgattccattttcctaaggtgatatggagggattttgtcttgaatttatgtgaattcagt

SEQ ID NO: 523145 - DNA, 120 bp, Artificial Sequence
  ENSG00000165533_27 (sequence is synthesized)
gtgagcatgaaggcaaagaatgagtcacagtggctcagggcagaatgatgacatagcaccgtggatgactgtatcagaagcgacattcaggatgtctttgtaacaacatttcctatggac

SEQ ID NO: 523146 - DNA, 120 bp, Artificial Sequence
  ENSG00000165533_28 (sequence is synthesized)
tgcgtaacttctggcttctgtgccaacatttctgtagaaagaacacaaaaaatactaataattgttttccagttttccactgtggctaaagaggtgctcaatccataaatacaaattgct

SEQ ID NO: 523147 - DNA, 120 bp, Artificial Sequence
  ENSG00000165533_29 (sequence is synthesized)
caaccaaaattcatatcatcgagcatatttccaactgatgaaaatgagatctggcaagaaggcttcctgcgctaaaacattactgaggttagaagttcttccttttttacaaatgtgtca

SEQ ID NO: 523148 - DNA, 120 bp, Artificial Sequence
  ENSG00000165533_30 (sequence is synthesized)
tggctgagccagtccccatagtgataactcttccattgcatttctgagtgctttttcccaggctcagattatctatcaggatacaatttatggcctacagataagaaaattaataaaggt

SEQ ID NO: 523149 - DNA, 67 bp, Artificial Sequence
  ENSG00000165533_31 (sequence is synthesized)
atacaatttatggcctacagataagaaaattaataaaggtaacgtgtcacagtcttgctcggtcgcc

SEQ ID NO: 523150 - DNA, 71 bp, Artificial Sequence
  ENSG00000165533_32 (sequence is synthesized)
cacccgccatctctacacttttagtttccaccaccaaccctttactacaatgagggatttctgtcagggtc

SEQ ID NO: 523151 - DNA, 120 bp, Artificial Sequence
  ENSG00000165533_33 (sequence is synthesized)
caccaaccctttactacaatgagggatttctgtcagggtctttcagctgggattgaatttaagcattcagaaaacaaatattttagaaaggctggcaggactaaaccttagaaaataacc

SEQ ID NO: 523152 - DNA, 120 bp, Artificial Sequence
  ENSG00000165533_34 (sequence is synthesized)
cagaaatcaagtgtaggaaaaaaagccatcaccaaataattttgtattctaggaaatagagaaattggaatgttccatgtttatgttccttgcagagttccaaaatggtcatctaggctc

SEQ ID NO: 523153 - DNA, 120 bp, Artificial Sequence
  ENSG00000165533_35 (sequence is synthesized)
agatttgagggggaaacatttatttagcaatttgaaaataactgcactttcatatctatccatatagatggcattcgtcctatttttagctaaataaaaacaacatttttgagagagact

SEQ ID NO: 523154 - DNA, 120 bp, Artificial Sequence
  ENSG00000165533_36 (sequence is synthesized)
attatttcacttctttgatgtcaaagccagtccttgaaatgaaagaatagacatgttgttataatccttgggaactatgtttcttgcaatgtgatccttttctttacctgaatctaattc

SEQ ID NO: 523155 - DNA, 120 bp, Artificial Sequence
  ENSG00000165533_37 (sequence is synthesized)
tgactaataagggaaagtggattgttaagtgaaaacaacgggaactcttggtgaaagcaaccgtgttatcttggagaagaggctagacctaaacagattttaggaagaattttgttttct

SEQ ID NO: 523156 - DNA, 120 bp, Artificial Sequence
  ENSG00000165533_38 (sequence is synthesized)
ttttaaatcagaaagagagaccctcttccaatatttgaaactcaagtttttatggactccagcaccttgcaactgtcaccgcccccaaaccccacccctcttctggtctaatagcttcaa

SEQ ID NO: 523157 - DNA, 120 bp, Artificial Sequence
  ENSG00000165533_39 (sequence is synthesized)
tttatttctctctactggattatgtcttttttaaaaatcacatttcctttaagcctgcctccctttttaaaaatagacaatataactgtttattaaaataaaggaagagaaagaaaataa

SEQ ID NO: 523158 - DNA, 120 bp, Artificial Sequence
  ENSG00000165533_40 (sequence is synthesized)
cctgaaaaggaaactcataaaagaaattaaaatggttgataaacatatgtaacaaaaaaaatttgataacagaatgaaattaattcaagagaaagatacatttttaacctcttcagagaa

SEQ ID NO: 523159 - DNA, 120 bp, Artificial Sequence
  ENSG00000165533_41 (sequence is synthesized)
caaagatttgaaatgtttattatatatgaggtgaaggtactgtcaaaattcactgttgggcatatatatcattacaatcttgagagtagtgtggcaaattttattaaattccttccattt

SEQ ID NO: 523160 - DNA, 120 bp, Artificial Sequence
  ENSG00000165533_42 (sequence is synthesized)
atggatctccacagagccatgcctgtccttggtctctccacatcctacggtagtctgtgttccatccttgctgtcatcccacatactcagcagagtcctgctctgggcccagagtgtcta

SEQ ID NO: 523161 - DNA, 120 bp, Artificial Sequence
  ENSG00000165533_43 (sequence is synthesized)
ggttcaaatactgcctctatacctttgagccttgtagaactaataatgcagtctactcattgggacttggagcttaaatggaaatgaccaagatggattagaaggatatgaaaaataaag

SEQ ID NO: 523162 - DNA, 78 bp, Artificial Sequence
  ENSG00000165533_44 (sequence is synthesized)
ttgcagcaagccgagatcacgccattggcagcttggatcttaaaagcaagagcgctaacagaaatggtatacatagat

SEQ ID NO: 523163 - DNA, 120 bp, Artificial Sequence
  ENSG00000165533_45 (sequence is synthesized)
acacagcccgccctatcaccagctcctccggaagatttgtcaggctgggaacggtaaattctatcagctttcccatagccttgtattactttggtattaccaaagtagctttatattatg

SEQ ID NO: 523164 - DNA, 120 bp, Artificial Sequence
  ENSG00000165533_46 (sequence is synthesized)
gtatatcattttcccctgttgttatagtggagaattatatggaagatttttgaaggtgattatttttatttatgttgcctttatatttttatgcatattaaacttgtttacatttcaaga

SEQ ID NO: 523165 - DNA, 120 bp, Artificial Sequence
  ENSG00000165533_47 (sequence is synthesized)
gaaaatgatgttaagactcaaaatccttttcttcaagtgaaatcttatcgagaccctaatacgtaaaacagacaaaaggctttggatctggctgccctctccacagaacattctcagtac

SEQ ID NO: 523166 - DNA, 120 bp, Artificial Sequence
  ENSG00000165548_0 (sequence is synthesized)
agtctcctcccaggtggggagcgtggagcctgtcactgcagcctggcggcctgagcgccgagcctggggctggggccgcggtgctgaggacgcaaatcagccccgtagctgggtggagcc

SEQ ID NO: 523167 - DNA, 120 bp, Artificial Sequence
  ENSG00000165548_1 (sequence is synthesized)
tccgggcctgacgtggaccttcactggagaagtgactcagggatcctcccaggatgtctgcctcaccagacgacctgagtacagggggaaggttacagaacatgacagtggatgaatgct

SEQ ID NO: 523168 - DNA, 120 bp, Artificial Sequence
  ENSG00000165548_2 (sequence is synthesized)
tccagtctcggaacaccgtcctccaggggcagccctttgggggtgtccccaccgtgctgtgcctcaacatcgccctgtgggtgctcgtccttgtggtttactccttcctccggaaagctg

SEQ ID NO: 523169 - DNA, 120 bp, Artificial Sequence
  ENSG00000165548_3 (sequence is synthesized)
cgtgggactatgggcgcctggctctgctgatacacaatgacagcctgacctcgctgatctatggggagcagagcgagaagacatctccctcggagacttccttggagatggaacgcagag

SEQ ID NO: 523170 - DNA, 120 bp, Artificial Sequence
  ENSG00000165548_4 (sequence is synthesized)
acaagggattctgttcctggttcttcaacagcataacaatgaaggacgaggatctgattaacaagtgtggggacgacgcgcgcatctacatcgtgttccagtaccacctcatcatctttg

SEQ ID NO: 523171 - DNA, 120 bp, Artificial Sequence
  ENSG00000165548_5 (sequence is synthesized)
tgctcatcatctgtatcccctccctgggcatcattttgcccatcaactatactggatctgttctggactggagcagtcactttgctcggaccaccattgtcaatgtctccacagagagca

SEQ ID NO: 523172 - DNA, 120 bp, Artificial Sequence
  ENSG00000165548_6 (sequence is synthesized)
agctcctgtggctgcatagcctgctgtccttcttctacttcatcaccaacttcatgttcatggctcatcactgcctggggtttgcacccaggaatagccaaaaggtcacaaggacactaa

SEQ ID NO: 523173 - DNA, 120 bp, Artificial Sequence
  ENSG00000165548_7 (sequence is synthesized)
tgatcacctatgtgcccaaggacattgaagacccagaactcatcattaagcattttcacgaggcctatccaggcagtgtcgtgacaagagtccacttctgctacgacgtcaggaacctga

SEQ ID NO: 523174 - DNA, 120 bp, Artificial Sequence
  ENSG00000165548_8 (sequence is synthesized)
tcgacttggacgatcagaggcgccatgccatgcggggccggcttttctatacagccaaggccaagaagactgggaaggtgatgatcaggatccacccctgtgcccgcctgtgcttctgca

SEQ ID NO: 523175 - DNA, 120 bp, Artificial Sequence
  ENSG00000165548_9 (sequence is synthesized)
agtgctggacctgcttcaaggaggtggatgcagagcagtattacagcgagctagaggagcagctaacggacgagttcaacgccgagctcaaccgcgtgccgctcaagcggctggacctga

SEQ ID NO: 523176 - DNA, 120 bp, Artificial Sequence
  ENSG00000165548_10 (sequence is synthesized)
tctttgtcaccttccaggactccaggatggccaagcgtgtccgtaaggattacaagtatgtccagtgtggtgtgcaaccccagcagtcctcagtgaccaccatcgtcaaatcatattact

SEQ ID NO: 523177 - DNA, 120 bp, Artificial Sequence
  ENSG00000165548_11 (sequence is synthesized)
ggagggtcactatggccccacaccccaaagacattatttggaaacacctgtctgtccgccgcttcttttggtgggcccgctttatcgcaatcaacaccttcctcttcttcctcttcttct

SEQ ID NO: 523178 - DNA, 120 bp, Artificial Sequence
  ENSG00000165548_12 (sequence is synthesized)
ttctcaccacgcctgccatcatcatgaacactatcgacatgtacaacgtcacccgccccatcgagaagctgcagaacccaattgtgacccagttcttcccctctgtgatgctctggggct

SEQ ID NO: 523179 - DNA, 120 bp, Artificial Sequence
  ENSG00000165548_13 (sequence is synthesized)
tcacagtgatactgcctctgattgtctacttctccgccttcctcgaggcccactggaccagatcaagtcagaatctggtcatggtgcacaagtgctacatctttctggtgttcatggtag

SEQ ID NO: 523180 - DNA, 120 bp, Artificial Sequence
  ENSG00000165548_14 (sequence is synthesized)
tcattctgccctctatgggactgaccagtttggatgtctttctccgctggctctttgacatctactatctagagcaagcatccatcaggttccagtgtgtgttcctgccagacaacggcg

SEQ ID NO: 523181 - DNA, 120 bp, Artificial Sequence
  ENSG00000165548_15 (sequence is synthesized)
ccttctttgtcaactacgtgatcacggcagctttacttggcacaggcatggagctgctgcgtctggggtcactcttctgctacagcacccgcctcttcttctctagatcagagccagaga

SEQ ID NO: 523182 - DNA, 120 bp, Artificial Sequence
  ENSG00000165548_16 (sequence is synthesized)
gagtcaacatcagaaagaaccaggccatagacttccagtttgggcgtgagtatgcgtggatgatgaacgtgttcagcgtggtgatggcgtacagcatcacttgccccatcattgtgcctt

SEQ ID NO: 523183 - DNA, 120 bp, Artificial Sequence
  ENSG00000165548_17 (sequence is synthesized)
ttgggttgctctacctgtgcatgaagcacttgacggatcgctataacatgtactactcctttgcacccaccaaactgaacgagcagatccacatggctgccgtctcccaggccatctttg

SEQ ID NO: 523184 - DNA, 120 bp, Artificial Sequence
  ENSG00000165548_18 (sequence is synthesized)
cgccactcttgggtctgttctggatgctgttcttctccatcctgcggttgggttctctccacgccatcaccatcttttccctgtccaccctcctcattgccatggtgattgcctttgttg

SEQ ID NO: 523185 - DNA, 120 bp, Artificial Sequence
  ENSG00000165548_19 (sequence is synthesized)
gcatttttctggggaagcttcggatggttgccgactacgagcccgaggaggaggagatccagacagtgtttgacatggagccaagcagcacctcctccacgcccacctccctcctgtatg

SEQ ID NO: 523186 - DNA, 120 bp, Artificial Sequence
  ENSG00000165548_20 (sequence is synthesized)
tggccaccgtgctgcaagaaccggagttgaatctgacccccgcctcctccccagccaggcacacctatggcaccatgaacaaccagccggaagagggagaagaagagagtggtctgaggg

SEQ ID NO: 523187 - DNA, 120 bp, Artificial Sequence
  ENSG00000165548_21 (sequence is synthesized)
gctttgcgagggagctagactcggcccagttccaggaagggctggaactggagggccagaaccagtaccactgaccgggacctgaggcctccactggcgacttgttgaggggtcagggga

SEQ ID NO: 523188 - DNA, 120 bp, Artificial Sequence
  ENSG00000165548_22 (sequence is synthesized)
ccaccaccccagccatgggccatacgggggtcctgacctgctgcccggctggaactgggggtgctcggcagtgctgaaggagcctgggaagggatgggaggatacaggcaagcacatgtc

SEQ ID NO: 523189 - DNA, 120 bp, Artificial Sequence
  ENSG00000165548_23 (sequence is synthesized)
ttgagagaggtggctggagccccggcacagagactgaacgctggggtcccttcctgggaccaagatggagaaggtgttcctaagggaggagacagaaggaggctgccgaaggctctgtgg

SEQ ID NO: 523190 - DNA, 120 bp, Artificial Sequence
  ENSG00000165548_24 (sequence is synthesized)
ggtcatcaccactctgcatcagctgcccttccaaggagcttctgctgctgctcctcctcccagccccggcccattcctcccctgcagtctgaggaggcaaaggtatgtgcacggggcaca

SEQ ID NO: 523191 - DNA, 120 bp, Artificial Sequence
  ENSG00000165548_25 (sequence is synthesized)
ttgacaggacacggaggaccacctcatcacagggttccctgcatggggatctgtaaagagaaagtttctgcacccaccagagcaagagccaactgaaagcgtagacctgagaagaggtaa

SEQ ID NO: 523192 - DNA, 120 bp, Artificial Sequence
  ENSG00000165548_26 (sequence is synthesized)
ctcagccccttcctgctcctctgccctcatcagatgtccccaggagcagcagggcagaggcccttctttctattcttacaagggtagctagagcgtgatcactcagggctcatcaaatga

SEQ ID NO: 523193 - DNA, 120 bp, Artificial Sequence
  ENSG00000165548_27 (sequence is synthesized)
gactcgtgtgcatttttcagaaggaaaccttggttagtccttgctgggtaacacaaagtggggtgagacgacagaagccgaattcatggaaggggggtcttctccccaaaactctgtgtg

SEQ ID NO: 523194 - DNA, 120 bp, Artificial Sequence
  ENSG00000165548_28 (sequence is synthesized)
gtgggaaaccagctatacctccccaagccccagggcctaaagagaagacccccgaagccaaagatgtggccacttaaaagcgtctcctgcctcctacccaactgagtgcctgggccccca

SEQ ID NO: 523195 - DNA, 120 bp, Artificial Sequence
  ENSG00000165548_29 (sequence is synthesized)
gcttggccaagatgggcagtacgttagggtaagaaccccatgcttcaaacttaaggactgaccatcacctgcgtcccaagtaggacccttcctcccttctcggggctgcccctgcaccct

SEQ ID NO: 523196 - DNA, 120 bp, Artificial Sequence
  ENSG00000165548_30 (sequence is synthesized)
gccttgaagaccacccaagcggcctccagtgtgggcctggtccagacattgcagatgcttcaaccgtgatgtcgccccaggcctgccaggggtgtggtggaggggaaggccacgtgctcc

SEQ ID NO: 523197 - DNA, 120 bp, Artificial Sequence
  ENSG00000165548_31 (sequence is synthesized)
agggagaagccctttctggagaagcaaggctgtcctcccagggctgccactaccagagacctgggggagctgaattccgaacagtgatggtgacactcagcacctttgccacagccgggg

SEQ ID NO: 523198 - DNA, 120 bp, Artificial Sequence
  ENSG00000165548_32 (sequence is synthesized)
ggaaccggcttctgcctctgggatgggctctcatcaggaccaccgtgcagcccagccagggaggacatgagaagggccagtgggggcctcaatgaaccagaacaagccaagctgaatggg

SEQ ID NO: 523199 - DNA, 120 bp, Artificial Sequence
  ENSG00000165548_33 (sequence is synthesized)
gtctgtgtgctccagggccctcttcagccccctcccccaaaggtctgggtccctgccaccaacctactgaaggccggcccccggctcacctcacctgagcacctgcaccaggccccaggc

SEQ ID NO: 523200 - DNA, 120 bp, Artificial Sequence
  ENSG00000165548_34 (sequence is synthesized)
acatggctgccctgaactcagatcacctagaccttgtccctgccccacctttgccccatcctagccccagaagctccaagcttcaccgcaggtgagaaattgtgctcaatgggcagaaac

SEQ ID NO: 523201 - DNA, 120 bp, Artificial Sequence
  ENSG00000165548_35 (sequence is synthesized)
tgctatacccccagggcatggcccacattttggcatgagggtgtctttccagagagcttgggttggctggagagaggctgtctttcccattccttgtccagctaggaataaaggggaaat

SEQ ID NO: 523202 - DNA, 120 bp, Artificial Sequence
  ENSG00000165548_36 (sequence is synthesized)
ggtcctagcctggcccctacacacccaggtcccacaggccccctccccactggaatttcaccaaccaacaaggggaaagtacgctgttacagcatagcggtcaggcccagcaggagcttg

SEQ ID NO: 523203 - DNA, 120 bp, Artificial Sequence
  ENSG00000165548_37 (sequence is synthesized)
gcacatgatggggaggtggccagctccaggccctgcccgaccccatcatgtgtatttggtgtatggggtgtggggggtcacaccagaagctggcctggggtctcttctttgctggacaca

SEQ ID NO: 523204 - DNA, 120 bp, Artificial Sequence
  ENSG00000165548_38 (sequence is synthesized)
gctccctggcccctgcccccagcccctgcagcccctgccggactgtggaagccacatatgggaaaagtcctggcagacaatgtggcgggatgactgggggcttctccctctgaacctggg

SEQ ID NO: 523205 - DNA, 120 bp, Artificial Sequence
  ENSG00000165548_39 (sequence is synthesized)
tccagtgtagcctggctctgagagaaggtggtgagcatgtggagaaggttccatagtccactcttaggggaaccagcaaagcctcatggcagttggctccatctggacctcccatggtca

SEQ ID NO: 523206 - DNA, 120 bp, Artificial Sequence
  ENSG00000165548_40 (sequence is synthesized)
ctacaggatggtggagcagggggcatcttttagcctccccccgccaccacatccaggccctctcaggcacctcctgcctcagcccacacctgcctcacccattgcccccctccccccacc

SEQ ID NO: 523207 - DNA, 120 bp, Artificial Sequence
  ENSG00000165548_41 (sequence is synthesized)
tactgccatcccactcctctgccagccacttcccagccgccccaccccactccatccaccaaatcacctcctgacttaatcctttctggaaggagctgccgcccaggaaccggtattgcc

SEQ ID NO: 523208 - DNA, 120 bp, Artificial Sequence
  ENSG00000165548_42 (sequence is synthesized)
tagagcctccaggaggggccctcctcaggcctccagtggccccatgcccacctgcctgaccctccactgcccctggaagcaaagtgcctatcagcagcgttgcgtcctctggggcccccg

SEQ ID NO: 523209 - DNA, 120 bp, Artificial Sequence
  ENSG00000165548_43 (sequence is synthesized)
gtcgggggggagggggtgtgggctaaccttggccaccaccacaaaaggaatgtgccagaatgctgaaccttcttgttaatgctatgaccgtgccttgaataaacaagtcctcccaacctc

SEQ ID NO: 523210 - DNA, 120 bp, Artificial Sequence
  ENSG00000165548_44 (sequence is synthesized)
tgccagcctgggttccccggcaggtcagagaagctttggggcggggccaaggttggcccctgcttgggaggagccgggatgcctctctcacagtgatgcagagaggaatttgctgacagt

SEQ ID NO: 523211 - DNA, 120 bp, Artificial Sequence
  ENSG00000165548_45 (sequence is synthesized)
cccttgccaggtggggctggcttcgcccagccggcgaggaggaggacccgctggcagtctcctcccaggtggggagcgtggagcctgtcactgcagcctggcggcctgagcgccgagcct

SEQ ID NO: 523212 - DNA, 120 bp, Artificial Sequence
  ENSG00000165548_46 (sequence is synthesized)
ggggctggggccgcggtgctgaggacgcaaatgtgagccttggaggagcctccctcggggtcaggaatcgagcggggacaccgctgggccactcagaaggaccgtttcctggggactgat

SEQ ID NO: 523213 - DNA, 120 bp, Artificial Sequence
  ENSG00000165548_47 (sequence is synthesized)
aatatcattcagtgatagtggcggtggataacaatgacctcctaccagctgtgaatttctcgtcttccactagtactagtaaaagagattgctgctggctaagaatacccaccggtgggg

SEQ ID NO: 523214 - DNA, 120 bp, Artificial Sequence
  ENSG00000165548_48 (sequence is synthesized)
gggaaaagtctccccgggcctctccacctgcaggatcgccttcctacaccttcccccgcccgcttccttcgcgcgggctcctcccaatgaccaccagcagaactgcagcctcctgcctta

SEQ ID NO: 523215 - DNA, 120 bp, Artificial Sequence
  ENSG00000165548_49 (sequence is synthesized)
gacggtccctggcatctgccagttggggtggcatctcggctggcagactcctgcccatgactttttctcctcctcggcaggttctctccacgccatcaccatcttttccctgtccaccct

SEQ ID NO: 523216 - DNA, 120 bp, Artificial Sequence
  ENSG00000165548_50 (sequence is synthesized)
agtaaaagatgatgaaagccactatcaatcctcactgctgagtggcagggagaagcagcaccactctcagctcttttctaatcttgtaacttagtgctagaagtctctccaggctattac

SEQ ID NO: 523217 - DNA, 120 bp, Artificial Sequence
  ENSG00000165548_51 (sequence is synthesized)
catgggcatttgttctctgttggagctgtaagcagatgaacccaagtagagaagatagatcttggaaggagagatccattgagtccagaagccagatcagcaaatggaggaacctcggag

SEQ ID NO: 523218 - DNA, 80 bp, Artificial Sequence
  ENSG00000165553_0 (sequence is synthesized)
ttcccaggccaccatagcggctggcggagggagcgcgcgccttgctggcctggagggggcgggggccgtggcggctttaa

SEQ ID NO: 523219 - DNA, 120 bp, Artificial Sequence
  ENSG00000165553_1 (sequence is synthesized)
ggctgcggggcgcagggcgcagcggccaagcggggtccccggaagcacagctggggtgtctccacctacgactggccgcgcgccttttctctcccgcgccagggaaggagcggctgcggc

SEQ ID NO: 523220 - DNA, 120 bp, Artificial Sequence
  ENSG00000165553_2 (sequence is synthesized)
gaggcacggggggcgtacgaggggcggaggggaccgcgtcgcggaggagatggcgcggcacgtgcggtgacggcacccgagccctgagggtcccagccccgcgctccgcgtccccgggac

SEQ ID NO: 523221 - DNA, 120 bp, Artificial Sequence
  ENSG00000165553_3 (sequence is synthesized)
cgtccccgggacagcatggagcgcccggagcccgagctgatccggcagagctggcgggcagtgagccgcagcccgctggagcacggcaccgtcctgtttgccaggctgtttgccctggag

SEQ ID NO: 523222 - DNA, 120 bp, Artificial Sequence
  ENSG00000165553_4 (sequence is synthesized)
cctgacctgctgcccctcttccagtacaactgccgccagttctccagcccagaggactgtctctcctcgcctgagttcctggaccacatcaggaaggtgatgctcgtgattgatgctgca

SEQ ID NO: 523223 - DNA, 120 bp, Artificial Sequence
  ENSG00000165553_5 (sequence is synthesized)
gtgaccaatgtggaagacctgtcctcactggaggagtaccttgccagcctgggcaggaagcaccgggcagtgggtgtgaagctcagctccttctcgacagtgggtgagtctctgctctac

SEQ ID NO: 523224 - DNA, 120 bp, Artificial Sequence
  ENSG00000165553_6 (sequence is synthesized)
atgctggagaagtgtctgggccctgccttcacaccagccacacgggctgcctggagccaactctacggggccgtagtgcaggccatgagtcgaggctgggatggcgagtaagaggcgacc

SEQ ID NO: 523225 - DNA, 120 bp, Artificial Sequence
  ENSG00000165553_7 (sequence is synthesized)
ggtccttgtccccttggccacactggagaggtgatggggcagggctgggtctcagtatcctagagtccagctgcagaaggagtggcttttcctccaggaaggggcttctgggtgtcccct

SEQ ID NO: 523226 - DNA, 120 bp, Artificial Sequence
  ENSG00000165553_8 (sequence is synthesized)
catccccagtagcctctttcttgcgtttctttttaccttttttggcactccctctgaccccgcgatgagtgttttggtggcagaggtgggatgagctggaaaggtatggaggtgggagag

SEQ ID NO: 523227 - DNA, 120 bp, Artificial Sequence
  ENSG00000165553_9 (sequence is synthesized)
gatggggctcttctgtctgtcctgcttcttcaggtgagtgcaggccaaggcgggggtgagatggctgagcttccagcgccttctgtcctgcctgcccagtcccttcactgctttcctgcc

SEQ ID NO: 523228 - DNA, 120 bp, Artificial Sequence
  ENSG00000165553_10 (sequence is synthesized)
ccaagatggcttgcttttcacaaataaagagaaagagcagctttagccttcttggtggaatcccaggcagtgggagcagaatcagaactgccagggaagggaagggggacctgggtctca

SEQ ID NO: 523229 - DNA, 120 bp, Artificial Sequence
  ENSG00000165553_11 (sequence is synthesized)
atgggtctcatttgagtctcgcgggctgtgcagatgccctgacagagtcggtttcctttggcggcattccctttccctcattcagcacttctgctgggaactccctgactattccgctgc

SEQ ID NO: 523230 - DNA, 120 bp, Artificial Sequence
  ENSG00000165553_12 (sequence is synthesized)
tgcaggaacccagctagctggccaggtggggaggggctggggaccggccaggaaggaggggtgacttcatcccagagagacccgagttcccccagcccttcatcaccaacccgctcctgc

SEQ ID NO: 523231 - DNA, 120 bp, Artificial Sequence
  ENSG00000165553_13 (sequence is synthesized)
aggagtgagtcttacctcccctggccctcctttctggctcagcctgcagcgactgtgaggccacagctcctcagattcactgcccgctgtgtgccagtactcaggcagctggagagaaga

SEQ ID NO: 523232 - DNA, 120 bp, Artificial Sequence
  ENSG00000165553_14 (sequence is synthesized)
gaaggcagcagcagaggcccccgccctcaccccagccatctgcacttgtaccatttgctctgtgctgactgtggtcctataaattcatgagaaataaactggttctgtgtgcctctctga

SEQ ID NO: 523233 - DNA, 120 bp, Artificial Sequence
  ENSG00000165555_0 (sequence is synthesized)
aaattcagaatctgggagtagagaggtgctgaagcccatcatcatgagtgcttgtgacctgggcacacacaccatcatacacacacctcctacatagacccctcttctaccgggacaggg

SEQ ID NO: 523234 - DNA, 120 bp, Artificial Sequence
  ENSG00000165555_1 (sequence is synthesized)
agccaaattgattagtgtctatcactgcaggaaatagtggcttggaaatggacatgctccaggaccttgagtccctgcagtttgagtatggggttccagaggaagatcgtatctggctgt

SEQ ID NO: 523235 - DNA, 120 bp, Artificial Sequence
  ENSG00000165555_2 (sequence is synthesized)
atttgcagggccgttctcggggactgatgatcgaggcttgtgcccatgcaaccttcttctgcaaactattatataatttgagagcatcattaaataagaatcaaagttccagacatctct

SEQ ID NO: 523236 - DNA, 120 bp, Artificial Sequence
  ENSG00000165555_3 (sequence is synthesized)
caattggctcccttaattcagccactcctgaagagtttaaggtgggcatcattggaggtggccaccttgggaagcagctggctggcacactgctgcagcttggccccatccctgctgaaa

SEQ ID NO: 523237 - DNA, 120 bp, Artificial Sequence
  ENSG00000165555_4 (sequence is synthesized)
gcctgcggatctccactcggaggccagagactctgggtgagctccagaagctgggaatcaaatgcttttaccataacgctgatctggtgagttgggccgatgtgatattcctctgctgct

SEQ ID NO: 523238 - DNA, 120 bp, Artificial Sequence
  ENSG00000165555_5 (sequence is synthesized)
tgccgtctcagctgcctaatatctgcgtagaaatttacaccagccttgagaaggccagcattgtgtacagctttgtagctgccatcccactacccaggctgaaactactgttgaaccaca

SEQ ID NO: 523239 - DNA, 120 bp, Artificial Sequence
  ENSG00000165555_6 (sequence is synthesized)
ccaatatcttgcggcctcagtatcagtatgatgaagattctgtcagcgtctggggggccaataagggagtcatagctgctctccaagatcctacgattcttcaagctacctgtccctaca

SEQ ID NO: 523240 - DNA, 120 bp, Artificial Sequence
  ENSG00000165555_7 (sequence is synthesized)
ccctaaacatatgcacagcaagaaacatggcccactcccaagtgctgcagcttctgagtgaactctttctctccgtgcactttgaagactgtgggaaagacacagcatcttgcccaaagt

SEQ ID NO: 523241 - DNA, 120 bp, Artificial Sequence
  ENSG00000165555_8 (sequence is synthesized)
tgcaattaacagattttgtcagcaaagcctatggcaagaatttgtctcaggaaaggcctttcccctggtttgatctgactgctgtgcaactcaaggaaactccgtttagccagcatctct

SEQ ID NO: 523242 - DNA, 120 bp, Artificial Sequence
  ENSG00000165555_9 (sequence is synthesized)
caagtagtcctgttctccaagaccaccttacccatctatactgtgcttcatttggcatctccctaaccaaagaacagccagtcatttccacaggctttccatcccaataagagaactcag

SEQ ID NO: 523243 - DNA, 120 bp, Artificial Sequence
  ENSG00000165555_10 (sequence is synthesized)
gaatcaggattttttcccactcacagattttccctataatagttgtgccctgattatcacaattgactgtgggagtcttgtggctgtattgtgtttgccacatgatagacatcaggaatt

SEQ ID NO: 523244 - DNA, 120 bp, Artificial Sequence
  ENSG00000165555_11 (sequence is synthesized)
ataaaactgtactgatgactctttaaaatgtagaataaaacaagtggtcctatccatcaatatgtatctggctctcagaagcaactagtgaaactacacaacctaacttaagtaagctgc

SEQ ID NO: 523245 - DNA, 120 bp, Artificial Sequence
  ENSG00000165555_12 (sequence is synthesized)
tcccgcagaaaagtcttgttaatacaaattatttctcttctaaaattaaagaagttataatgttataagttttagacaattacatactgcagcttcttttccaataaatcaagtttcaat

SEQ ID NO: 523246 - DNA, 120 bp, Artificial Sequence
  ENSG00000165555_13 (sequence is synthesized)
ccatttgccagcagtaggtagctggaaaaagatacagtttgattttctcacaattttggacagagaagtgaaggtatggtaaaccatcttaattgaattatggcttgtatcatgcttatt

SEQ ID NO: 523247 - DNA, 120 bp, Artificial Sequence
  ENSG00000165555_14 (sequence is synthesized)
ttgactatatatgactgttctggtactatcttatttacagctgttcccatttaaaccatttaaaaaactggtatttaatggctaaaactaattttgcaaaatatagatctatactgcaaa

SEQ ID NO: 523248 - DNA, 120 bp, Artificial Sequence
  ENSG00000165555_15 (sequence is synthesized)
tccctacagtcctgctggtcacggctcaacatatttctggcattcttttgaaaattactttcctgttggcccattgctatcttattaaatcaatctctctctctctgtgtgtgtgtgtgt

SEQ ID NO: 523249 - DNA, 120 bp, Artificial Sequence
  ENSG00000165555_16 (sequence is synthesized)
ccaaaagaggagatagcttatttcaataggaggatgtaatgttggactaaaatggcttttccctgttctaatcttgtagttttccccagttccttctccatattagcaacgactattcca

SEQ ID NO: 523250 - DNA, 120 bp, Artificial Sequence
  ENSG00000165555_17 (sequence is synthesized)
gagacactttttgccattagcaatgtctacattagttgtatctgtccacttttgggatggtcaacacatgatgtgttataaagggcacaagtagcacttgtggctcaggaaggaatgttt

SEQ ID NO: 523251 - DNA, 120 bp, Artificial Sequence
  ENSG00000165555_18 (sequence is synthesized)
gcttatcttgtggttcatattaccaatctgtcttggaaaaaaggcggctattcactgtcaggggtttattctaggttttctgcaactcatttttggtggtgctaactggtatttaccttc

SEQ ID NO: 523252 - DNA, 120 bp, Artificial Sequence
  ENSG00000165556_0 (sequence is synthesized)
aatcacggaaggccgccggcctggggctccgcacgccagcctgtggcgggtcttccccgcctctgcagcctagtgggaaggaggtgggaggaaagaaggaagaaagggagggagggagga

SEQ ID NO: 523253 - DNA, 120 bp, Artificial Sequence
  ENSG00000165556_1 (sequence is synthesized)
ggcaggccagagggagggaccgcctcggaggcagaagagccgcgaggagccagcggagcaccgcgggctggggcgcagccacccgccgctcctcgagtcccctcgcccctttcccttcgt

SEQ ID NO: 523254 - DNA, 120 bp, Artificial Sequence
  ENSG00000165556_2 (sequence is synthesized)
gccccccggcagcctccagcgtcggtccccaggcagcatggtgaggtctgctcccggaccctcgccaccatgtacgtgagctacctcctggacaaggacgtgagcatgtaccctagctcc

SEQ ID NO: 523255 - DNA, 120 bp, Artificial Sequence
  ENSG00000165556_3 (sequence is synthesized)
gtgcgccactctggcggcctcaacctggcgccgcagaacttcgtcagccccccgcagtacccggactacggcggttaccacgtggcggccgcagctgcagcggcagcgaacttggacagc

SEQ ID NO: 523256 - DNA, 120 bp, Artificial Sequence
  ENSG00000165556_4 (sequence is synthesized)
gcgcagtccccggggccatcctggccggcagcgtatggcgccccactccgggaggactggaatggctacgcgcccggaggcgccgcggccgccgccaacgccgtggctcacggcctcaac

SEQ ID NO: 523257 - DNA, 120 bp, Artificial Sequence
  ENSG00000165556_5 (sequence is synthesized)
ggtggctccccggccgcagccatgggctacagcagccccgcagactaccatccgcaccaccacccgcatcaccacccgcaccacccggccgccgcgccttcctgcgcttctgggctgctg

SEQ ID NO: 523258 - DNA, 120 bp, Artificial Sequence
  ENSG00000165556_6 (sequence is synthesized)
caaacgctcaaccccggccctcctgggcccgccgccaccgctgccgccgagcagctgtctcccggcggccagcggcggaacctgtgcgagtggatgcggaagccggcgcagcagtccctc

SEQ ID NO: 523259 - DNA, 120 bp, Artificial Sequence
  ENSG00000165556_7 (sequence is synthesized)
ggcagccaagtgaaaaccaggacgaaagacaaatatcgagtggtgtacacggaccaccagcggctggagctggagaaggagtttcactacagtcgctacatcaccatccggaggaaagcc

SEQ ID NO: 523260 - DNA, 120 bp, Artificial Sequence
  ENSG00000165556_8 (sequence is synthesized)
gagctagccgccacgctggggctctctgagaggcaggttaaaatctggtttcagaaccgcagagcaaaggagaggaaaatcaacaagaagaagttgcagcagcaacagcagcagcagcca

SEQ ID NO: 523261 - DNA, 120 bp, Artificial Sequence
  ENSG00000165556_9 (sequence is synthesized)
ccacagccgcctccgccgccaccacagcctccccagcctcagccaggtcctctgagaagtgtcccagagcccttgagtccggtgtcttccctgcaagcctcagtgcctggctctgtccct

SEQ ID NO: 523262 - DNA, 120 bp, Artificial Sequence
  ENSG00000165556_10 (sequence is synthesized)
ggggttctggggccaactgggggggtgctaaaccccaccgtcacccagtgacccaccgggttctgcagcggcagagcaattccaggctgagccatgaggagcgtggactctgctagactc

SEQ ID NO: 523263 - DNA, 120 bp, Artificial Sequence
  ENSG00000165556_11 (sequence is synthesized)
ctcaggagagacccctcccctcccacccacagccatagacctacagacctggctctcagaggaaaaatgggagccaggagtaagacaagtgggatttggggcctcaagaaatatactctc

SEQ ID NO: 523264 - DNA, 120 bp, Artificial Sequence
  ENSG00000165556_12 (sequence is synthesized)
ccagatttttactttttcccatctggctttttctgccactgaggagacagaaagcctccgctgggcttcattccggactggcagaagcattgcctggactgaccacaccaaccaggcctt

SEQ ID NO: 523265 - DNA, 120 bp, Artificial Sequence
  ENSG00000165556_13 (sequence is synthesized)
catcctcctccccagctcttctcttcctagatctgcaggctgcacctctggctagagccgaggggagagagggactcaagggaaaggcaagcttgaggccaagatggctgctgcctgctc

SEQ ID NO: 523266 - DNA, 120 bp, Artificial Sequence
  ENSG00000165556_14 (sequence is synthesized)
ggactgaccaaagactgcagaacccccaggtggcctgcgtcttttttctcttcccttcccagaccaggaaaggcttggctggtgtatgcacagggtgtggtatgagggggtggttattgg

SEQ ID NO: 523267 - DNA, 120 bp, Artificial Sequence
  ENSG00000165556_15 (sequence is synthesized)
actccaggcctgaccagggggcccgaacagggacttgtttagagagcctgtcaccagagcttctctgggctgaatgtatgtcagtgctataaatgccagagccaacctggacttcctgtc

SEQ ID NO: 523268 - DNA, 120 bp, Artificial Sequence
  ENSG00000165556_16 (sequence is synthesized)
attttcacaatcttggggctgatgaagaagggggtggggggagtttgtgttgttgttgctgctgtttgggttgttggtctgtgtaacatccaagccagagtttttaaagccttctggatc

SEQ ID NO: 523269 - DNA, 120 bp, Artificial Sequence
  ENSG00000165556_17 (sequence is synthesized)
catggggggagaagtgatatggtgaagggaagtggggagtatttgaacacagttgaattttttctaaaaagaaaaagagataaatgagctttccagatttcagattctgtatttatcttc

SEQ ID NO: 523270 - DNA, 120 bp, Artificial Sequence
  ENSG00000165556_18 (sequence is synthesized)
agattttgtctgcaactattttttattttttaaagaaatgaaatatcttctctgcttgcaagctgatttggaaaattcagagagggagtggagattatctggacagcctcattttacccc

SEQ ID NO: 523271 - DNA, 120 bp, Artificial Sequence
  ENSG00000165556_19 (sequence is synthesized)
agagcatcagaagcctgaaagagcaggttctgagaccttccctgcccccaagcctgagcccagccttggaatgcgtggctctcctgggggtgcctttgggcaaaatgcacatctgaatgg

SEQ ID NO: 523272 - DNA, 120 bp, Artificial Sequence
  ENSG00000165556_20 (sequence is synthesized)
ccaggtgcttcccagcagtcagaaattatggggggtgggggtgagagggccccctcatagcatctcaccaaatccacatggaggctttttgcaaacagcaggcagttcccttctgcagtg

SEQ ID NO: 523273 - DNA, 120 bp, Artificial Sequence
  ENSG00000165556_21 (sequence is synthesized)
actccctcctaaggacgccccacaacccagctagttaaacgtgagcattaaattttttttaaaaaaaatccccctagtttcccaagacagcatttccatgaatttagtcttctgtaaatc

SEQ ID NO: 523274 - DNA, 120 bp, Artificial Sequence
  ENSG00000165556_22 (sequence is synthesized)
actgggcatttccgtgagccctttctgcctccactctcttctctgtctttgcagtttccttatccccgaccgcgcccccccttccaacccaatcaccccacaaacaagatttctagaccc

SEQ ID NO: 523275 - DNA, 120 bp, Artificial Sequence
  ENSG00000165556_23 (sequence is synthesized)
agtataaaatgatccttttagtgacagtttcttgttatctggccgatccactggggaccgggctgcagcctttaaaatttttgatcctggaggccgccgagctgaactttccggcaggac

SEQ ID NO: 523276 - DNA, 120 bp, Artificial Sequence
  ENSG00000165556_24 (sequence is synthesized)
ccgggcgaggggggcttagcccttcgtttcgatcttcccaccaacatccgagagcctaatcagcgcgcccacggaggcgccttaagggcagttggggaagatgagcagagccgggaaaca

SEQ ID NO: 523277 - DNA, 120 bp, Artificial Sequence
  ENSG00000165556_25 (sequence is synthesized)
gcaagaggtatagaccctctgcagcacctctccaattccgcggcccttccgggtggcgtatacagctccaggattgggaaaggggctccggtggcccggcccgcgggcgcctggcctcga

SEQ ID NO: 523278 - DNA, 120 bp, Artificial Sequence
  ENSG00000165556_26 (sequence is synthesized)
agccagagggaggagtgcggggcgtggggtcggggggtgccgggcagaggaggaagccgtgtccgggtccgctgggcgaggggtcctgggtcaggggtcctgggtcagggccggtctgag

SEQ ID NO: 523279 - DNA, 120 bp, Artificial Sequence
  ENSG00000165556_27 (sequence is synthesized)
ccccggtgccccgcaggtctccccgcgccccggccgcgcccacaggcccgccccctagccgccggggttgctatgcgttgccgtgaaacgcctgtcaataaaccctgtttggacagtgga

SEQ ID NO: 523280 - DNA, 120 bp, Artificial Sequence
  ENSG00000165566_0 (sequence is synthesized)
ggcaaactccaccccggggagctgttgtgcttgcattgctgggctgctgatagactgattgagtggtggcgtgtacttttgtcacaagaaccataaccacaatgacagccacacagcatg

SEQ ID NO: 523281 - DNA, 120 bp, Artificial Sequence
  ENSG00000165566_1 (sequence is synthesized)
gacctagcgtgtgctcagctctggacaagacatggatgtaggcagacatgcttcctgcctgctgggcttagtgcaccaatgctaaggacagacatgaagggcttgggaaaggcatgaaga

SEQ ID NO: 523282 - DNA, 120 bp, Artificial Sequence
  ENSG00000165566_2 (sequence is synthesized)
tgcagggagtctaggagagaggataagaaaaacaagcattttgtggtgggttgaattgcgttgtcgtttttagaggcatttcgtgatccatggttgcgctcccgtgaagagcgagtctag

SEQ ID NO: 523283 - DNA, 120 bp, Artificial Sequence
  ENSG00000165566_3 (sequence is synthesized)
agaaggaatccgaaggtgggtgagagttgagggaatttgaattccataattacgactcgaatttctgcaatcagctcgcggctgtgttgcctgctcctgccacaaaaacgccatgcagcg

SEQ ID NO: 523284 - DNA, 120 bp, Artificial Sequence
  ENSG00000165566_4 (sequence is synthesized)
ccgagccaagtcggatggaagtgggttagggtattatataagcccttgcgggagggaagatggtcttttatgtgtgtttcttttgcagcggcggcggcgagcgcggctcaggttgattta

SEQ ID NO: 523285 - DNA, 120 bp, Artificial Sequence
  ENSG00000165566_5 (sequence is synthesized)
gaatacgggtgacagtggcctggcgcgagcccactgctgacgaaagcggcttatcccgcgcggtttccatggagacgagccggagccgcggcggcggcggggctgtcagcgagcgcggcg

SEQ ID NO: 523286 - DNA, 120 bp, Artificial Sequence
  ENSG00000165566_6 (sequence is synthesized)
gagctggcgcgtccgtgggggtctgcaggaggaaggcggaggccggggccgggaccgggaccctcgcggcagacatggacttgcattgtgactgtgccgccgaaacgccggccgccgagc

SEQ ID NO: 523287 - DNA, 120 bp, Artificial Sequence
  ENSG00000165566_7 (sequence is synthesized)
cgccgtcggggaagattaataaagctgccttcaaattattcaagaagaggaaatcgggtggcaccatgcccagcatttttggggtcaaaaacaaaggggacgggaaaagctcgggtccga

SEQ ID NO: 523288 - DNA, 120 bp, Artificial Sequence
  ENSG00000165566_8 (sequence is synthesized)
ccgacggggctggtgaggagcaggacccacgacggacttgccgaggtgctggtgctggagagcggcaggaaggaggagccgcgcggcgggggcgacagcggcgggggcggcggggggcgg

SEQ ID NO: 523289 - DNA, 120 bp, Artificial Sequence
  ENSG00000165566_9 (sequence is synthesized)
acccggggccccccagagccgcagggcccggcgggggctccctcgccagcagctcggtggccaagtcgcacagcttcttctcgctgctgaagaagaacgggcgctcggaaaacggcaagg

SEQ ID NO: 523290 - DNA, 120 bp, Artificial Sequence
  ENSG00000165566_10 (sequence is synthesized)
gagagcctgtggacgcgagcaaggccggcggcaaacaaaagcgggggctgcgggggctgttcagcggcatgcgctggcacaggaaagacaagcgggccaaggcggaggccgcggaggggc

SEQ ID NO: 523291 - DNA, 120 bp, Artificial Sequence
  ENSG00000165566_11 (sequence is synthesized)
gcgcgcccgggggcggcttgatcctacccggctcgctcaccgccagcctggagtgcgtcaaggaggagacgcccagagccgcgcgcgagccggaggagcccagccaggacgccccgcgag

SEQ ID NO: 523292 - DNA, 80 bp, Artificial Sequence
  ENSG00000165566_12 (sequence is synthesized)
acccagcaggtgagcccgcagggggagaggaggtgcccgcccccgccgaccgcgccccagcgcggagctgccgagaggca

SEQ ID NO: 523293 - DNA, 120 bp, Artificial Sequence
  ENSG00000165566_13 (sequence is synthesized)
gccgttcccgtaaagacggtcccccttgtcgactccgaaggcggcagcggccgggcgcccgccgccccagaccctgcctctgtcgatccaccctcagacccgtcggcagatcgtatttgt

SEQ ID NO: 523294 - DNA, 120 bp, Artificial Sequence
  ENSG00000165566_14 (sequence is synthesized)
ttgatgttttctgacgtgacttcactgaaaagctttgactctcttacaggctgtggagatattattgcagaccaagaggaagaggcaggtcccagctgtgacaagcatgtccccgggcca

SEQ ID NO: 523295 - DNA, 120 bp, Artificial Sequence
  ENSG00000165566_15 (sequence is synthesized)
ggcaagccggctctgtctaaaaagaaccccggcgtggtggcctaccaaggaggcggggaagagatggccagcccggacgaggtggacgacacctatctacaggagttctgggacatgctc

SEQ ID NO: 523296 - DNA, 120 bp, Artificial Sequence
  ENSG00000165566_16 (sequence is synthesized)
tcccagaccgaggagcagggacccgagccccaggagggcgcggctaaggtggcagctgcgctggaaaccaaggtggtgcccgagacccccaaagacaccaggtgtgtggaagcggccaag

SEQ ID NO: 523297 - DNA, 120 bp, Artificial Sequence
  ENSG00000165566_17 (sequence is synthesized)
gacgcgtcctcggtcaagcgcaggaggctcaaccggattcccatcgagccccatcctaaggaggagcccaagcacccggagaaggagcagcaggaaggcgtccccaacagcgacgagggc

SEQ ID NO: 523298 - DNA, 120 bp, Artificial Sequence
  ENSG00000165566_18 (sequence is synthesized)
tactgggactccaccacgccaggcccagaggaagacagctcgagcagcgggaagaaggcgggcatcccccgggatagctacagcggggacgcgctctatgatctctatgctgacccggac

SEQ ID NO: 523299 - DNA, 120 bp, Artificial Sequence
  ENSG00000165566_19 (sequence is synthesized)
ggaagtccagcaacccttcctggagggaaggacaacgaggagacgtcctccctgtcccggttaaagcccgtatctccaggcaccatcacctgtccactgcgaacaccaggcagcttgctg

SEQ ID NO: 523300 - DNA, 120 bp, Artificial Sequence
  ENSG00000165566_20 (sequence is synthesized)
aaggactctaagatccctattagcatcaagcacctgaccaaccttccatctagccatcccgtggtgcaccagcaaccctccaggagtgagatgcccagaacaaaaatcccggtttccaaa

SEQ ID NO: 523301 - DNA, 120 bp, Artificial Sequence
  ENSG00000165566_21 (sequence is synthesized)
gtgctggtccgcagagtcagcaaccggggcttggctgggaccaccatcagagcaacggcctgccacgacagtgccaaaaagttgtgaggtcttccaggccaaggtggatgggccccatgc

SEQ ID NO: 523302 - DNA, 120 bp, Artificial Sequence
  ENSG00000165566_22 (sequence is synthesized)
caaggaatacaacttttccctggaaaccactaaagtaagttttgcttttcctaaagaaagtcttttaggacaccacccgtcccccgccctgctccagagcgtggaccgaggaggtctttg

SEQ ID NO: 523303 - DNA, 120 bp, Artificial Sequence
  ENSG00000165566_23 (sequence is synthesized)
tgccctgagcagggaccggataacaccagaaagagggatgctacacgggggtttctcctctcaagataagtccctgagaattattttcaagcacttttttcttttttacctttaagtttt

SEQ ID NO: 523304 - DNA, 120 bp, Artificial Sequence
  ENSG00000165566_24 (sequence is synthesized)
tcttccttttgctttaatatactgaacacttggaagtcacctttacttgcctttgcagaaaacagaacttagccaaacctaagtaagagtcatgcctggatattgggataagccagtgtc

SEQ ID NO: 523305 - DNA, 120 bp, Artificial Sequence
  ENSG00000165566_25 (sequence is synthesized)
tagaggcctgaaggaaccgctgaagaaccagaggagatctcctcttccaagacacgtttccttccttcccttctttcctctttcctttccagttaaaaaaaaacaaaaacaaaaacaaaa

SEQ ID NO: 523306 - DNA, 120 bp, Artificial Sequence
  ENSG00000165566_26 (sequence is synthesized)
ttagatatgcaaattgataaggatctaacactaggaaaataaaggcgagttttggtttggttggtttcagtcatttgtttggggagatataaaaggctcaggagagcaggcttttgcttt

SEQ ID NO: 523307 - DNA, 120 bp, Artificial Sequence
  ENSG00000165566_27 (sequence is synthesized)
tgcttttgtttgtttcttcccccacccagtgcagaaatcaggatcagggaaagattttattaaatgccaatagatacagtatttaagcatttataaactgaaaccttttcatgtgaagat

SEQ ID NO: 523308 - DNA, 120 bp, Artificial Sequence
  ENSG00000165566_28 (sequence is synthesized)
aatgcatattttaccgtttatccagctgttaacattttgtaatcagtcaattcaatagaattattctggataattctatatctagaatataaaatctggtcttatagctagacatgatga

SEQ ID NO: 523309 - DNA, 120 bp, Artificial Sequence
  ENSG00000165566_29 (sequence is synthesized)
tggtccccaaaccattgatgttctgttatgtactgtaatgggaagcgattctgattttgttttatatgggttctctggttctcaaaaaaaaaaaaaatctattgtgctggtgtcccagag

SEQ ID NO: 523310 - DNA, 120 bp, Artificial Sequence
  ENSG00000165566_30 (sequence is synthesized)
gaatggctctgccttgttttgggtaagagtctgtttctcaccccaaaccctgttttcagatttttttttaccttgattgtaaaatttcagatccaaccattcctcaatataatgagtgca

SEQ ID NO: 523311 - DNA, 120 bp, Artificial Sequence
  ENSG00000165566_31 (sequence is synthesized)
aaatgaggaacacataaagaaaaacaatagaaagatacagtttttcacatcatttgccttttgctttatagacttatgacaaagacaagtgtgttcagaatatgacactggcaagcttat

SEQ ID NO: 523312 - DNA, 120 bp, Artificial Sequence
  ENSG00000165566_32 (sequence is synthesized)
gtattgtaaacactttatgccaagttttttttgaaaagtggtttgcttctatgtatgttttctaatatttcagatgaaacatttatttcagaaagggttattatatgcctagtttgaatg

SEQ ID NO: 523313 - DNA, 120 bp, Artificial Sequence
  ENSG00000165566_33 (sequence is synthesized)
ataaactgaagcagttcctagaatgctattagtgtctaatgatgaaattaatatcctttttgaaatacacttcagtgtatttaatcaaaagaccagagcttctactaggaggtgattcat

SEQ ID NO: 523314 - DNA, 120 bp, Artificial Sequence
  ENSG00000165566_34 (sequence is synthesized)
cataccaggaagattatgcatattcacgtgaaactgcacatatgtaaatgacatgaacacttctgtataagtctcatttccagagagattgcattagtaatgaactgttattacatgctt

SEQ ID NO: 523315 - DNA, 120 bp, Artificial Sequence
  ENSG00000165566_35 (sequence is synthesized)
tttaagtttgttttctgtttcataaatgaaagaacaaggcaagttaaatatatgaaaacctattttaataatatgaagaaagtaacaaaataaatggacatcaaaggaaagcaaattgag

SEQ ID NO: 523316 - DNA, 120 bp, Artificial Sequence
  ENSG00000165566_36 (sequence is synthesized)
ccagtagcagaaagtaggccattccccattttaaatttgcagtgattcaattaggagaggtttgctgaatttcttcattagtcatatgactggcttttattgcattgtctcagatccata

SEQ ID NO: 523317 - DNA, 120 bp, Artificial Sequence
  ENSG00000165566_37 (sequence is synthesized)
atgttatttcaaagtaatcttttaatatttaatttctttatgtgtgtaaatgaggccctatatgcagtcatagccttaagcattctgaacacactaccaagaattcatataagcatctca

SEQ ID NO: 523318 - DNA, 120 bp, Artificial Sequence
  ENSG00000165566_38 (sequence is synthesized)
cactcacgtgctcatgcactcaactgtgtacagactaacagacaaaagacatctactctagatctggaaattatttttgaaattatttctgtattaaacaagggatttacatttgatttc

SEQ ID NO: 523319 - DNA, 120 bp, Artificial Sequence
  ENSG00000165566_39 (sequence is synthesized)
atgccgctggtactatttaggctcaaaatacattcatcttcccctagtgaatggagaaaatataaattttattcctagctgtaaaacaaaggatcttgatttccttgttgtacattttcc

SEQ ID NO: 523320 - DNA, 120 bp, Artificial Sequence
  ENSG00000165566_40 (sequence is synthesized)
tgcaagggttatattctcctttgcatgaatccatggcaaagttatgttggttcatttgttcaattgtacaggaaagttaagaatacctgaaaaacttatgagaatattgtaatagtaaag

SEQ ID NO: 523321 - DNA, 120 bp, Artificial Sequence
  ENSG00000165566_41 (sequence is synthesized)
gcaatctatttcttaagcagtagaagaaaagtttttgctttcataattttaggacttaatcctccatttacaccattatgctgtgtctcctctttataagaaaaggaacacgtgagcaaa

SEQ ID NO: 523322 - DNA, 120 bp, Artificial Sequence
  ENSG00000165566_42 (sequence is synthesized)
gtttatcttaatttccactgacctgtcaattaaccagttataaaagatataaaatattttcttttaaaatttatattttccactttttttttaccttattttttaagaattgcacccaca

SEQ ID NO: 523323 - DNA, 120 bp, Artificial Sequence
  ENSG00000165566_43 (sequence is synthesized)
ccaatcaaataaaggatttgggcaatgaattaaacagcctcaatcacttgatgggaaatccctggagtggcaggaagagtagattctcaactttttccaaccatagaaaagggatcatag

SEQ ID NO: 523324 - DNA, 120 bp, Artificial Sequence
  ENSG00000165566_44 (sequence is synthesized)
atacattatatctaatgaccttgtgaagattattcaggcccatatttgctgactttttaagggaaggattggatagaggctaattatatctttcccacatgtatgtatattctaagatac

SEQ ID NO: 523325 - DNA, 120 bp, Artificial Sequence
  ENSG00000165566_45 (sequence is synthesized)
ttggttgattgacttcctttagttgaaaggctgcccaaattagacaggaaaaagtcaaatcaattgttgggcgaaaatttatcggttggtttaatagctctgcacaaagacagcctgact

SEQ ID NO: 523326 - DNA, 120 bp, Artificial Sequence
  ENSG00000165566_46 (sequence is synthesized)
tgaatgtctatattacacatacactgttatttgaaacactctgctttagtacagatggtggttgatgcgtttatcctgccattagcaccaattgggagaaattttactacagcattttaa

SEQ ID NO: 523327 - DNA, 120 bp, Artificial Sequence
  ENSG00000165566_47 (sequence is synthesized)
tgggagaaattttactacagcattttaaataatcacaagagtaaatagatttctattattttatctaataacaacaatagaatatagaatacaaaggacttcctctagatacattttatt

SEQ ID NO: 523328 - DNA, 120 bp, Artificial Sequence
  ENSG00000165566_48 (sequence is synthesized)
atacaaaggacttcctttagatacattttccacaaattatctgcttatttaaatacaaagggtttaatatctatgaaggtaataactcaccgtgtttaaaggatttatttcttcatctca

SEQ ID NO: 523329 - DNA, 120 bp, Artificial Sequence
  ENSG00000165566_49 (sequence is synthesized)
gaggtagtcttcaagtatttgcagttaaacagtatgcaaatagccctttgcttacacaattatccaggtaaaaagactatgtcaggtgttgagatttctttgaattttctaagagttttc

SEQ ID NO: 523330 - DNA, 120 bp, Artificial Sequence
  ENSG00000165566_50 (sequence is synthesized)
attatttacgcctttgtcagattaattttaaaggcaactcttgactgttagcttggtgtgaagagatccactcaggcagctcatgtctcctaagtgccctcagacagcagtgacgggaca

SEQ ID NO: 523331 - DNA, 120 bp, Artificial Sequence
  ENSG00000165566_51 (sequence is synthesized)
cttcacatgacgctagcatgttggctctgtccgcatggcggaatgcattccctgctgttagttatctgaatttttctcctgaattacaaatatatggatttggctcccctgatgctgggc

SEQ ID NO: 523332 - DNA, 120 bp, Artificial Sequence
  ENSG00000165566_52 (sequence is synthesized)
ttctgctgagacctgttccagtacattcacgtatgctttgctccccttcattgttaagaaattaattcaagaagttttttgctgttaaacataaggaataagcatcacaattgcctcatc

SEQ ID NO: 523333 - DNA, 120 bp, Artificial Sequence
  ENSG00000165566_53 (sequence is synthesized)
tcatcactgaggaaagctggtttaaagtatctgagtgaaataagaggaaaaccccaaatacttcacctaacccagtttccctttcccctcctccaggcagagcaaggaaaagaacagttg

SEQ ID NO: 523334 - DNA, 120 bp, Artificial Sequence
  ENSG00000165566_54 (sequence is synthesized)
taatttgtgtaaactcagccttagaaaatttcaattcattacacacaaaaatatttatgaagcagtttggaaccaaaggggtagtatggtagacgagtgtcttacagagcctgtgtgggg

SEQ ID NO: 523335 - DNA, 120 bp, Artificial Sequence
  ENSG00000165566_55 (sequence is synthesized)
aagcaaaaggcaagggtgtagttcacaggcagaagcgagctgtgacattgtcagtgcagcgtgtaagtgtggctcctcacaggcggccattgattgtgagacctcatcttgctctgaaga

SEQ ID NO: 523336 - DNA, 120 bp, Artificial Sequence
  ENSG00000165566_56 (sequence is synthesized)
tttcccggtggctgtcatgcattgcttctcaaaagccttgcactgtgataaggtttaaggagacagattgttgcaacaatagccacttctaaggaatgttattatgtcactgcagatgat

SEQ ID NO: 523337 - DNA, 120 bp, Artificial Sequence
  ENSG00000165566_57 (sequence is synthesized)
gtttttaagaggtgattcagaatgatagtttcgtgattacggaaaggagttccttctcaaactgcaaaaggaaagatgaaaatagtcatgaagcctccagaactgaaattgggcaccttt

SEQ ID NO: 523338 - DNA, 120 bp, Artificial Sequence
  ENSG00000165566_58 (sequence is synthesized)
tatgatggatatttactttaattcaatgcaacacatatttatggggcatagactgtatcaaatacttaataaaacccattcagtttggagctcacacctaagctgcgctgtaattggatt

SEQ ID NO: 523339 - DNA, 120 bp, Artificial Sequence
  ENSG00000165566_59 (sequence is synthesized)
ttcttaatattcattaaaaacacaaaacaatattattttacttttttttggtatttgcatttgttgcttatagtttgtggggtgaagcaaagtggtgtgaagttgaagaagggcactatg

SEQ ID NO: 523340 - DNA, 120 bp, Artificial Sequence
  ENSG00000165566_60 (sequence is synthesized)
aattaagccacacaaatgcctctaaaaaatagtaaatgtaacaatggttaacattcattgaatacttactatgtgtcaggcactgctaggagatttagaaataattacttagtcctctta

SEQ ID NO: 523341 - DNA, 120 bp, Artificial Sequence
  ENSG00000165566_61 (sequence is synthesized)
acagccatgtggggtaggtaatattatctccccagtaagacagctttaattcatcctttttgtttctatccctttccatctctgtctgtctgtctctctctctcttttcccctagtctct

SEQ ID NO: 523342 - DNA, 120 bp, Artificial Sequence
  ENSG00000165566_62 (sequence is synthesized)
aggacagggatataaactctttagtgattttcagtaatagagagctaagcactgcttagtgtcattgtcagctcacttctaatagaaagagctaacccatgtccacgcagctgaaaatta

SEQ ID NO: 523343 - DNA, 120 bp, Artificial Sequence
  ENSG00000165566_63 (sequence is synthesized)
gttttgtgtctgagatgatggtgctcacaatcatatacagggaaccctgccactgtgctatgctgagtaggcaaacattggccttcccttggagggatcctcttctcttaggattaatgt

SEQ ID NO: 523344 - DNA, 120 bp, Artificial Sequence
  ENSG00000165566_64 (sequence is synthesized)
gggaagtacagacagaaatctcttctgttgtcatggcgatacttcttccctgacagggtatcattcattcaaagcatatttgtttcatttgtttttattcctaccttaagccatcttggt

SEQ ID NO: 523345 - DNA, 120 bp, Artificial Sequence
  ENSG00000165566_65 (sequence is synthesized)
cttaagccatcttggtgggttctgggtggtctatgcatatgtgtgtgtgttttaattgcagtaagaatattgaatatgagatctaccctctttaattttttttttttttttttttgagat

SEQ ID NO: 523346 - DNA, 68 bp, Artificial Sequence
  ENSG00000165566_66 (sequence is synthesized)
tacctccaaagtgttgggattacaggcaatgagccaccacgcccgggttaccttctttaatttttaag

SEQ ID NO: 523347 - DNA, 120 bp, Artificial Sequence
  ENSG00000165566_67 (sequence is synthesized)
atgagccaccacgcccgggttaccttctttaatttttaagtacacaatacagtattgttaactatagccacagtgttgtacagcaaatctctctcacctatgcatcctgcgtaactgaaa

SEQ ID NO: 523348 - DNA, 120 bp, Artificial Sequence
  ENSG00000165566_68 (sequence is synthesized)
ctctgtgcccattgaacagcagctcctcatttcctcccccatcagcccctggcagccatcattctactctctgcttctgtgagtctggctattttagatcccttatagaagtggaaacgc

SEQ ID NO: 523349 - DNA, 120 bp, Artificial Sequence
  ENSG00000165566_69 (sequence is synthesized)
tgtccttctgtgactggcttatttcattgagcataacgacccccaagtttagccatgttgttgcttatggcaggatttccttcttttttcaggctgaataatatttccttatatgtatat

SEQ ID NO: 523350 - DNA, 120 bp, Artificial Sequence
  ENSG00000165566_70 (sequence is synthesized)
atgtatatgctgcatttttaaaaaccctttcatctactgacagacgtttagattatttccacatcttggctattatgagtaatgctacaacgaacgagggagtgaaaatatctctttaag

SEQ ID NO: 523351 - DNA, 120 bp, Artificial Sequence
  ENSG00000165566_71 (sequence is synthesized)
atcctgatttcagtttttttgaataaatacccagaagtggaatgactgggtcattcatatggtaattctaattaaacatagaattatttttaattttttgagaaacttctgtgctgcttt

SEQ ID NO: 523352 - DNA, 120 bp, Artificial Sequence
  ENSG00000165566_72 (sequence is synthesized)
ccacagtggttgcatctgtttacatacttaccaatggtgcacaagggttccaatttctccacatctttgccaacttgttatctgtgtttgtttaaatgacagctgtatgagttgtccctt

SEQ ID NO: 523353 - DNA, 120 bp, Artificial Sequence
  ENSG00000165566_73 (sequence is synthesized)
gcctccatgcaattctgaacttcagaaataagcacttggctcctttaatagctgtccgtcctatgttgtgtctacagccactgaatcctgtcctacattttctgattcattaactcattc

SEQ ID NO: 523354 - DNA, 120 bp, Artificial Sequence
  ENSG00000165566_74 (sequence is synthesized)
aactaatagctattgaacaccatcaataagtcagccaccatgaagatgagtattttatattgaattctactaacatatcctgtatgtttactatgttgccagagaggatgctgtgtgctt

SEQ ID NO: 523355 - DNA, 120 bp, Artificial Sequence
  ENSG00000165566_75 (sequence is synthesized)
tttttacattgttatctttactcttcacaagaaccatgtaaggtaggtattggtaaaatgggtaattttggaaatgcttcaataatcgagtagaataacttttgctctatgtgagaagat

SEQ ID NO: 523356 - DNA, 120 bp, Artificial Sequence
  ENSG00000165566_76 (sequence is synthesized)
acgttttaaataagatatggcttaggtttctggttacctgagacatactataccttctcagatactctcagacctgaatcatttaacaaactaaggcagaaatactaaaaatatctggtt

SEQ ID NO: 523357 - DNA, 120 bp, Artificial Sequence
  ENSG00000165566_77 (sequence is synthesized)
caataacataggggcatggagtagacatgcagaaaatgcttgttcacttgccttgaaatggctccaggtggcctgaaggaatcaatgaaacttctcaagtatctacattacaaccactgg

SEQ ID NO: 523358 - DNA, 120 bp, Artificial Sequence
  ENSG00000165566_78 (sequence is synthesized)
tccccactacacatttatttctaaataaaggaggagaaactctagcaaagtaatatttaacattttcattgcttccaggataaatcttattgaatatggaggatctgatagtggtaggtc

SEQ ID NO: 523359 - DNA, 120 bp, Artificial Sequence
  ENSG00000165566_79 (sequence is synthesized)
tatcaggaatatcagggaaaatgcttttgatgttgttggcaaagtcaattcctatcatttgtacttgacaccagctacctagcaggctcattgtgaacttcaggtttcgcccacgttatt

SEQ ID NO: 523360 - DNA, 120 bp, Artificial Sequence
  ENSG00000165566_80 (sequence is synthesized)
tatataaagtatctcagtgtaatatagggagttgctggttatttgaaaatagtaacaaaaataacccaaacgagaaactccatttccataattagctttcctgaaagtcaggcatgtctt

SEQ ID NO: 523361 - DNA, 120 bp, Artificial Sequence
  ENSG00000165566_81 (sequence is synthesized)
tgaggacaggttttggcagtattatttttgtgcacaggaggaaaattgttagtaggtttatagatgttatttttataatagaatgttaaacccctgaaaaacatcaaaaattgtctccta

SEQ ID NO: 523362 - DNA, 120 bp, Artificial Sequence
  ENSG00000165566_82 (sequence is synthesized)
gaactaattctatgttttaaaaacttgttttaaaaaggattctaaatagcaatagggtctttcctcctttctccactccaatggtttaatgggatagaggaatcaatgtttatattttta

SEQ ID NO: 523363 - DNA, 120 bp, Artificial Sequence
  ENSG00000165566_83 (sequence is synthesized)
aacctgtaaatattttattttgggtattttgtatatttgttgatataattccattttgtgcatatgtaccattgtgcatgttgctgtttttgatagtcactcttttaatgaatgtaagaa

SEQ ID NO: 523364 - DNA, 120 bp, Artificial Sequence
  ENSG00000165566_84 (sequence is synthesized)
gcttgggctaatagcacttttcttgttccattcaaacatctgaaaatgaaattacaacactgccattttactgttgtgtttaattcagtcaataaattttgttgctcctttgcatttaaa

SEQ ID NO: 523365 - DNA, 120 bp, Artificial Sequence
  ENSG00000165568_0 (sequence is synthesized)
gcacttccagccagtcgcaacggcgggtcgccagcgccgcagtagctcgcgcggtgcctgtcggtagtcgcgtgcggggcggcggggcggcggggcggccggcggcggccatgggagata

SEQ ID NO: 523366 - DNA, 120 bp, Artificial Sequence
  ENSG00000165568_1 (sequence is synthesized)
gggagatatcccagccgtgggcctcagctcctggaaggcttctccagggaaagtgaccgaggcagtgaaagaggccattgacgcagggtaccggcacttcgactgtgcttacttttacca

SEQ ID NO: 523367 - DNA, 120 bp, Artificial Sequence
  ENSG00000165568_2 (sequence is synthesized)
caatgagagggaggttggagcagggatccgttgcaagatcaaggaaggcgctgtaagacgggaggatctgttcattgccactaagctgtggtgcacctgccataagaagtccttggtgga

SEQ ID NO: 523368 - DNA, 120 bp, Artificial Sequence
  ENSG00000165568_3 (sequence is synthesized)
aacagcatgcagaaagagtctcaaggccttgaagctgaactatttggacctctacctcatacactggcccatgggtttcaagcctcctcatccagaatggatcatgagctgcagtgaact

SEQ ID NO: 523369 - DNA, 120 bp, Artificial Sequence
  ENSG00000165568_4 (sequence is synthesized)
ttccttctgcctctcacatcctcgagtgcaggacttgcctctggacgagagcaacatggttattcccagtgacacggacttcctggacacgtgggaggccatggaggacctggtgatcac

SEQ ID NO: 523370 - DNA, 120 bp, Artificial Sequence
  ENSG00000165568_5 (sequence is synthesized)
cgggctggtgaagaacatcggggtgtcaaacttcaaccatgaacagcttgagaggcttttgaataagcctgggttgaggttcaagccactaaccaaccagattgagtgccacccatatct

SEQ ID NO: 523371 - DNA, 120 bp, Artificial Sequence
  ENSG00000165568_6 (sequence is synthesized)
cttaccgtcctcttggtggctcgtgtgagggggttgacctgatagacaaccctgtgatcaagaggattgcaaaggagcacggcaagtctcctgctcagattttgatccgatttcaaatcc

SEQ ID NO: 523372 - DNA, 120 bp, Artificial Sequence
  ENSG00000165568_7 (sequence is synthesized)
agaggaatgtgatagtgatccccggatctatcaccccaagtcacattaaagagaatatccaggtgtttgattttgaattaacacagcacgatatggataacatcctcagcctaaacagga

SEQ ID NO: 523373 - DNA, 120 bp, Artificial Sequence
  ENSG00000165568_8 (sequence is synthesized)
atctccgactggccatgttccccataactaaaaatcacaaagactatcctttccacatagaatactgaggacgcttccccttccttgtttctgctcagcccagatgcacagacactattg

SEQ ID NO: 523374 - DNA, 120 bp, Artificial Sequence
  ENSG00000165568_9 (sequence is synthesized)
gcaatgttgaccctcctctgtcatcacagcgccagggcagctgtgcctgggacaggagccacacagtcagagggggatgtaagagccaccttctctgacaaatctggagaattgagtgtg

SEQ ID NO: 523375 - DNA, 120 bp, Artificial Sequence
  ENSG00000165568_10 (sequence is synthesized)
ttctaagtgaaggcaatggggtttctccaagacagcctgtgtggcctctactctgaacaaatacactgatgagtcatcagtgaaatttgccttcacattttaagaaaactttatcttatg

SEQ ID NO: 523376 - DNA, 120 bp, Artificial Sequence
  ENSG00000165568_11 (sequence is synthesized)
gagttatttaagccatctacagagctgaggaaacagtgtaatgtgtctctgccccattgcgcagctccacccattgtgccccaggccagcccgcgtcacctacacttccttctgtgccct

SEQ ID NO: 523377 - DNA, 120 bp, Artificial Sequence
  ENSG00000165568_12 (sequence is synthesized)
gccagtgacccccaggttattctaaagcagagtccttcccttcccccagtgagaaggaaaatgggataagtctgggacactgtttcagttcaataaagaggcttttttcttccttaaaaa

SEQ ID NO: 523378 - DNA, 120 bp, Artificial Sequence
  ENSG00000165568_13 (sequence is synthesized)
cccacagtgaactgtgctctatttactgtacttcccacagttcagtgtccaaactgagcactgttgccgtgaagatgtcagggtgaacgaggagccctgtgatctcctgaggttcaagag

SEQ ID NO: 523379 - DNA, 120 bp, Artificial Sequence
  ENSG00000165568_14 (sequence is synthesized)
agacttcagaagatggtgagctcctgagggcaaggcccatgcaggtcattttcagcactgcaccctggcctaacttgccccgtgcacaggcttctccagggaaagtgaccgaggcagtga

SEQ ID NO: 523380 - DNA, 120 bp, Artificial Sequence
  ENSG00000165568_15 (sequence is synthesized)
gagatgtgtccgtgactgcttaccgtcctcttggtggctcgtgtgagggggttgacctgatagacaaccctgtgatcaagaggattgcaaaggagcacgattttgatccgatttcaaatc

SEQ ID NO: 523381 - DNA, 120 bp, Artificial Sequence
  ENSG00000165568_16 (sequence is synthesized)
cccatgtaaatatggctccttctttttaaaacagagggaagaatatacagattgaatgattggtgtctgaataggtatttatcatacacattttagattaattaaactttctcattataa

SEQ ID NO: 523382 - DNA, 120 bp, Artificial Sequence
  ENSG00000165568_17 (sequence is synthesized)
atgcttccagccattgtcggagtgtcagccgtcacaaggcacttccagccagtcgcaacggcgggtcgccagcgccgcagtagctcgcgcggtgcctgtcggcttctccagggaaagtga

SEQ ID NO: 523383 - DNA, 120 bp, Artificial Sequence
  ENSG00000165568_18 (sequence is synthesized)
gttctcttataggccatggaggacctggtgatcaccgggctggtgaagaacatcggggtgtcaaacttcaaccatgaacagcttgagaggcttttgaataagcctgggttgaggttcaag

SEQ ID NO: 523384 - DNA, 120 bp, Artificial Sequence
  ENSG00000165568_19 (sequence is synthesized)
agacctgagggccaaagccgaagtgatctgatggctgaggacagacagcagcggcgggttaggaggggccggaggaagtgcttatgctgtcaggaggaggtgggagccaggtccacaaga

SEQ ID NO: 523385 - DNA, 120 bp, Artificial Sequence
  ENSG00000165568_20 (sequence is synthesized)
ctcaccagggaggagaaaggcatccagtgcagggggctgccccggcccgccccctgtggccccagtgccgctcagaactgctgctgcaaggctgcctaccctttataaggagtcttctag

SEQ ID NO: 523386 - DNA, 120 bp, Artificial Sequence
  ENSG00000165568_21 (sequence is synthesized)
aactgcttgctgttccccttaaacccaagaatccgcctaccccggccccagcactccccactacctccagatgacacgctgaggctactttctcctgccctcaggaggggaaggctcttg

SEQ ID NO: 523387 - DNA, 120 bp, Artificial Sequence
  ENSG00000165572_0 (sequence is synthesized)
agcattgtcgcccacgctgcagtagcggcttctgcggctccaagccagcgggtcctgtgaaggcgagcagacgcggagaaaggacgcgggagtgagagagggtgagtcagccactgtcta

SEQ ID NO: 523388 - DNA, 120 bp, Artificial Sequence
  ENSG00000165572_1 (sequence is synthesized)
aacgataacgggaggcggttctgcggggtagggttgaattcagtaaatgggctcgtgctgctgtctcttcggagacgctgctatcttagcgtcagcgagggaaggttgaggaggagccag

SEQ ID NO: 523389 - DNA, 120 bp, Artificial Sequence
  ENSG00000165572_2 (sequence is synthesized)
agccgggtcctgcagcgtttctcgccatcagcgcccgtcgccatctccaccatgcagtcccgggaagacgccccgcgctctcgccgcctagccagtccccgtggtgggaagcggcccaag

SEQ ID NO: 523390 - DNA, 120 bp, Artificial Sequence
  ENSG00000165572_3 (sequence is synthesized)
aagattcacaaacccacagtttcggcctttttcacgggtccagaggaattaaaggacacggcccattctgcagccctgctggcacagctcaagtccttctacgatgcgcggctgctgtgt

SEQ ID NO: 523391 - DNA, 120 bp, Artificial Sequence
  ENSG00000165572_4 (sequence is synthesized)
gatgtgaccatcgaggtggtgacgcctggcagcgggcctggcacgggtcgcctgttcccctgcaaccgcaatgtgctggccgcggcatgtccctacttcaagagcatgttcacaggtggc

SEQ ID NO: 523392 - DNA, 120 bp, Artificial Sequence
  ENSG00000165572_5 (sequence is synthesized)
atgtacgagagccagcaggccagcgtgaccatgcacgatgtggacgccgagtccttcgaggtgttggtcgactactgctacacgggtcgtgtgtctctcagtgaggccaacgtggagcgc

SEQ ID NO: 523393 - DNA, 120 bp, Artificial Sequence
  ENSG00000165572_6 (sequence is synthesized)
ctgtacgcggcctccgacatgctacagctggaatatgtgcgggaagcctgtgcctccttcttagcccgacgtcttgacctgaccaactgcaccgccatcctcaagtttgcagatgccttt

SEQ ID NO: 523394 - DNA, 120 bp, Artificial Sequence
  ENSG00000165572_7 (sequence is synthesized)
ggccatcgcaagctgcgatcccaggcccagtcctatatagctcagaacttcaagcaactcagccacatgggttcaattcgggaggagactctagcagatctgaccctggcccagctgctg

SEQ ID NO: 523395 - DNA, 120 bp, Artificial Sequence
  ENSG00000165572_8 (sequence is synthesized)
gctgtcctgcgcttggatagtctggacgtggagagtgagcagacagtgtgccatgtggcagtgcagtggctggaggctgctcccaaagagcggggtcccagtgctgcagaagtcttcaag

SEQ ID NO: 523396 - DNA, 120 bp, Artificial Sequence
  ENSG00000165572_9 (sequence is synthesized)
tgcgtgcgctggatgcacttcactgaagaagatcaggactacttagaagggctgctgaccaagcccatcgtgaagaagtactgcctggacgttattgaaggggccctgcagatgcgctat

SEQ ID NO: 523397 - DNA, 120 bp, Artificial Sequence
  ENSG00000165572_10 (sequence is synthesized)
ggtgacctgttgtacaagtctctggtgccagtgccaaacagcagcagcagcagtagcagcagcaactctcttgtatctgcagcagaaaatccaccccagagactgggtatgtgtgccaag

SEQ ID NO: 523398 - DNA, 120 bp, Artificial Sequence
  ENSG00000165572_11 (sequence is synthesized)
gagatggtgatcttctttggacaccccagagatccctttctctgctgtgatccatactcgggggacctttacaaagtgccgtcacctttgacctgtctggctcacactaggactgtcacc

SEQ ID NO: 523399 - DNA, 120 bp, Artificial Sequence
  ENSG00000165572_12 (sequence is synthesized)
actttagctgtctgtatctctcctgaccatgacatctatctagctgctcagcccaggacagacctctgggtgtataaaccagctcagaatagttggcagcaacttgcagatcgcttgctg

SEQ ID NO: 523400 - DNA, 120 bp, Artificial Sequence
  ENSG00000165572_13 (sequence is synthesized)
tgtcgtgagggcatggatgtggcatatctcaatggctatatctacattttgggggggcgagaccctattactggagttaagttgaaggaagtggaatgctacaatgttaagagaaaccag

SEQ ID NO: 523401 - DNA, 120 bp, Artificial Sequence
  ENSG00000165572_14 (sequence is synthesized)
tgggcattggtggctccactgccccattcttttttatcctttgacctaatggtaattcgagactatctctatgctctcaacagtaagcgcatgttctgttatgatcctagccacaatatg

SEQ ID NO: 523402 - DNA, 120 bp, Artificial Sequence
  ENSG00000165572_15 (sequence is synthesized)
tggctgaagtgcgtttctctgaagcgcaatgactttcaggaagcctgcgtcttcaatgaggagatctattgtatctgtgatatcccagtcatgaaggtctacaacccagttagggcagaa

SEQ ID NO: 523403 - DNA, 120 bp, Artificial Sequence
  ENSG00000165572_16 (sequence is synthesized)
tggaggcaaatgaataatattcccttggtctcagagaccaacaactacagaattatcaagcatggccaaaaattgttgctcatcacctctcgcaccccacagtggaaaaagaaccgggtg

SEQ ID NO: 523404 - DNA, 120 bp, Artificial Sequence
  ENSG00000165572_17 (sequence is synthesized)
actgtgtatgaatatgatattaggggagaccaatggattaatataggtaccacattaggcctcttgcagtttgattctaactttttttgcctctctgctcgtgtttatccttcctgcctt

SEQ ID NO: 523405 - DNA, 120 bp, Artificial Sequence
  ENSG00000165572_18 (sequence is synthesized)
gaacctggtcagagtttcctcactgaagaagaagaaataccaagtgagtctagcactgaatgggacttaggtggattcagtgagccagactctgagtcaggaagttcaagttctctttct

SEQ ID NO: 523406 - DNA, 120 bp, Artificial Sequence
  ENSG00000165572_19 (sequence is synthesized)
gatgatgatttttgggtgcgtgtagcgcctcagtgaaatgcacaggatcaacagggtttgttgtaactagattgaaacactaagttgtttttactgttttggaaaatatcttaaatatcc

SEQ ID NO: 523407 - DNA, 120 bp, Artificial Sequence
  ENSG00000165572_20 (sequence is synthesized)
tttttgttcctaaaggagaggaaaagttgattaacttctggtttggtttagaaaaagtaatgtttgaaatacgaaggtaatttaatgttacaaattttaacactcaaatcaaccttttaa

SEQ ID NO: 523408 - DNA, 120 bp, Artificial Sequence
  ENSG00000165572_21 (sequence is synthesized)
ttttgatacattttacattctgtttactgccacaagcactgtggcaataacttttgaattttaatttttataatagaaaaatgattaggaattgctagatagtgttttgaaagcatatct

SEQ ID NO: 523409 - DNA, 120 bp, Artificial Sequence
  ENSG00000165572_22 (sequence is synthesized)
ttttcttcagaacaatgtagacttccaaaatggttaacctaaggggtctttacaaaatgtgttataagttaaacataatttgggaagttttacttttgttttcttctatgaagaaaaaaa

SEQ ID NO: 523410 - DNA, 63 bp, Artificial Sequence
  ENSG00000165572_23 (sequence is synthesized)
cccgggagtcagaggctgcagagagccgagactgggccactgcactccagcctggatgacaga

SEQ ID NO: 523411 - DNA, 69 bp, Artificial Sequence
  ENSG00000165572_24 (sequence is synthesized)
tatgtgtattagggtgactgagtggtgacttcatttataataatacagagaatagctataagctcattg

SEQ ID NO: 523412 - DNA, 120 bp, Artificial Sequence
  ENSG00000165572_25 (sequence is synthesized)
ttcatttataataatacagagaatagctataagctcattgacagtaaaaacaacaaaccaggattctactgtttgaaaagaagtttcgttttaattttggaatttagaatgtgtatttgc

SEQ ID NO: 523413 - DNA, 120 bp, Artificial Sequence
  ENSG00000165572_26 (sequence is synthesized)
aaagtcaccaattttcatctaaaaggttatattctagttgtgtcaccaaatcatcaaaaaaccttaaaaaagaagtaacttgctttgtaggtttgtattgttgatctaaacctgatacat

SEQ ID NO: 523414 - DNA, 120 bp, Artificial Sequence
  ENSG00000165572_27 (sequence is synthesized)
gcttcatttaatcaggaataatccttttttttctgctggacatgtataaatttcactggattgtataaatttttatctattgccttaaacatttacatgattctcaatatgttttagctg

SEQ ID NO: 523415 - DNA, 120 bp, Artificial Sequence
  ENSG00000165572_28 (sequence is synthesized)
tacagttttggtgttcatcttagaggattcttcagcagaagtgatatttctttactgttttgtgaggtaatactgattttgaaaatatatataagctaaaaacagtatttcgttgatatc

SEQ ID NO: 523416 - DNA, 120 bp, Artificial Sequence
  ENSG00000165572_29 (sequence is synthesized)
agtagtcattgtgttaactataaagtcaagtgccagcaaagaactttaaaactgtaaagctgtgtatagaactgttttgtgtagcatggaaatattctgtcagctttttaaagtcactaa

SEQ ID NO: 523417 - DNA, 120 bp, Artificial Sequence
  ENSG00000165572_30 (sequence is synthesized)
gtagcatggaaatattctgtcagctttttaaagtcactaaatgttcttgattatcagcttgaaggtatttttgtattacaagttgacagttgctgggtgtagtggctcatgcctgtaatc

SEQ ID NO: 523418 - DNA, 120 bp, Artificial Sequence
  ENSG00000165572_31 (sequence is synthesized)
acatagcaaaaccccatctctacaaaaataaaaaatatgtctgggcatggtggcccaagtctgagtcccagttacttgggaggatcacttgaatgtaggatcacttgagtctaggagttc

SEQ ID NO: 523419 - DNA, 120 bp, Artificial Sequence
  ENSG00000165572_32 (sequence is synthesized)
aggatcacttgagtctaggagttcggggctgcagctatcatctgcagctataatcatagctcactgcagctatgatcatgtctcagcactccagctttggcaacagaacgagatcccatc

SEQ ID NO: 523420 - DNA, 120 bp, Artificial Sequence
  ENSG00000165572_33 (sequence is synthesized)
tcttagaaaaacaaagttgatagttaaagaacataagtggatgatggcatttgaggccactagtgaaagtatgttttctctaaaatatttctctaatagtgatataaatggctattttat

SEQ ID NO: 523421 - DNA, 120 bp, Artificial Sequence
  ENSG00000165572_34 (sequence is synthesized)
tatgatgtttgtatgtgttttgtatttctctgtaaaccatgctccagtctttgtttttctgttaccataatgtaagagaaggtcctggaacagagactaaatcccacgaaactgacattg

SEQ ID NO: 523422 - DNA, 120 bp, Artificial Sequence
  ENSG00000165572_35 (sequence is synthesized)
ttaaacacactaaaacagaagtacttacctcttgaagatttaatatataatggttgacatgatacatgtacatgatgaatgaccagatgcttatggtctacattttcctttatcctgtta

SEQ ID NO: 523423 - DNA, 120 bp, Artificial Sequence
  ENSG00000165572_36 (sequence is synthesized)
gtattaccttccttaatctttgttcattaacatgctaattcctcttcagtgtttattttctagtgacagaatgctaacatttcttacaccctggcagaagggagagaaatgtgttttggg

SEQ ID NO: 523424 - DNA, 120 bp, Artificial Sequence
  ENSG00000165572_37 (sequence is synthesized)
gtgggtaactaaatttttgagtgaaatatcataagatgagaatggaaagagggagacacaaagagttataacaaaaaaacaatggtttttttagccatttgactggctctttaaatagtc

SEQ ID NO: 523425 - DNA, 120 bp, Artificial Sequence
  ENSG00000165572_38 (sequence is synthesized)
tacaagacattcacgtttaacatcacttttagtgaaataaaatgtgccatactagtatgtgcttcaaaagggcaaatgtgctttagtgccctaaggctaaattttggtcatttgacatca

SEQ ID NO: 523426 - DNA, 120 bp, Artificial Sequence
  ENSG00000165572_39 (sequence is synthesized)
gagatgttgtaagtattgcacttaatacgcacctatttctcaatagtgttattttttggctagcattttctttaccactatcttgttgatagctttttgttctctaaggttgaaacatga

SEQ ID NO: 523427 - DNA, 120 bp, Artificial Sequence
  ENSG00000165572_40 (sequence is synthesized)
cagtgcttatctcaaacagattacccatctgcagaactaaggaaagcaatttatgtatgaaagaaattcttgaattcgtcattctcaacctttgaattaaagcttagactaaatagtaat

SEQ ID NO: 523428 - DNA, 120 bp, Artificial Sequence
  ENSG00000165572_41 (sequence is synthesized)
atatcgtgggaaggattttggttttgtgatatttctgtgaattaaggaatagatgttaaccattattttgtagaaaagtgatttgtatgtggttaattataaataaaactggtaccagaa

SEQ ID NO: 523429 - DNA, 120 bp, Artificial Sequence
  ENSG00000165583_0 (sequence is synthesized)
cgctctgattgtttcgattcttccaaaatcagagacagagtgctcccggtgccatgaacggagacgatgcctttgtacggagacctagggttggttctcaaataccagagaagatgcaaa

SEQ ID NO: 523430 - DNA, 120 bp, Artificial Sequence
  ENSG00000165583_1 (sequence is synthesized)
agcatccctggagacaagtctgtgaccgtggaatacatttggtgaatctcagtccgttctggaaggtgggaagagagccagccagcagcattaaagctctactgtgtggcaggggagaag

SEQ ID NO: 523431 - DNA, 120 bp, Artificial Sequence
  ENSG00000165583_2 (sequence is synthesized)
ctagggccttcgatgatattgccaaatacttctctgagaaagagtgggaaaagatgaaagcctcggagaaaatcatctatgtgtatatgaagagaaagtatgaggccatgactaaactag

SEQ ID NO: 523432 - DNA, 120 bp, Artificial Sequence
  ENSG00000165583_3 (sequence is synthesized)
gtttcaaggccaccctcccacctttcatgcgtaataaacgggtcgcagacttccaggggaatgattttgataatgaccctaaccgtgggaatcaggttgaacatcctcagatgactttcg

SEQ ID NO: 523433 - DNA, 120 bp, Artificial Sequence
  ENSG00000165583_4 (sequence is synthesized)
gcaggctccagggaatcttcccgaagatcacgcccgagaagccagcagaggaaggaaatgattcgaagggagtgccagaagcatctggcccacagaacaatgggaaacagctgcgcccct

SEQ ID NO: 523434 - DNA, 120 bp, Artificial Sequence
  ENSG00000165583_5 (sequence is synthesized)
ctggacccacagagtgcgtgagagaaagcaactggtgatttatgaagagatcagcgaccctcaggaagatgacgagtaactcccctcggggatatgacacatgcccatgatgagaagcag

SEQ ID NO: 523435 - DNA, 120 bp, Artificial Sequence
  ENSG00000165583_6 (sequence is synthesized)
ctcggggatatgacacatgcccatgatgagaagcagaacgtggtgacctttcacgaacatgggcatggctgcggatccctcgtcatcaggtgtatagcaagtgaaagcaagtgttcacaa

SEQ ID NO: 523436 - DNA, 120 bp, Artificial Sequence
  ENSG00000165583_7 (sequence is synthesized)
aagagttcgatgttagtgtttctgttgtattttgttacagtgtgccattctgttagatattagcgttttcactgatgagcaagacatacttaatgcatatttcagtttgtgtatccatgc

SEQ ID NO: 523437 - DNA, 120 bp, Artificial Sequence
  ENSG00000165583_8 (sequence is synthesized)
acctacctcagaaaacaagtatcgtcaggtattctctgcatagaacaacactaccctcctctcttcccagatgtgaccactgagggcagttctgagtgtttaatttcagattttttcctc

SEQ ID NO: 523438 - DNA, 78 bp, Artificial Sequence
  ENSG00000165583_9 (sequence is synthesized)
tgagggcagttctgagtgtttaatttcagattttttcctctgcatttacacaaacacacacacatgccacacagacac

SEQ ID NO: 523439 - DNA, 120 bp, Artificial Sequence
  ENSG00000165583_10 (sequence is synthesized)
ctgcttttccccatgtgtcctggtcaagcccccctcactctgtttcctgttcagcatgtactcccctcatccgattcccctctatcagtcactgccagttaataaacctttgcaaacgtt

SEQ ID NO: 523440 - DNA, 77 bp, Artificial Sequence
  ENSG00000165583_11 (sequence is synthesized)
ctcataacctctgctgcagaatgccctcatgcaactgaagtctctctagagtttggaaatcttatcctcagatgact

SEQ ID NO: 523441 - DNA, 120 bp, Artificial Sequence
  ENSG00000165584_0 (sequence is synthesized)
ctctttcgattcttccatactcaagagtacgcacggtctgattttctctttggattcttccaaaatcagagtcagactactccctgtgccatgaacggagatgacacctttgcaaggaga

SEQ ID NO: 523442 - DNA, 120 bp, Artificial Sequence
  ENSG00000165584_1 (sequence is synthesized)
cccacggttggtgctcaaataccagagaagatacaaaaggccttcgatgatattgccaaatacttctctaaggaagagtgggaaaagatgaaagtctcggagaaaatcgtctatgtgtat

SEQ ID NO: 523443 - DNA, 120 bp, Artificial Sequence
  ENSG00000165584_2 (sequence is synthesized)
atgaagagaaagtatgaggccatgactaaactaggtttcaaggccatcctcccatctttcatgcgtaataaacgggtcacagacttccaggggaatgattttgataatgaccctaaccgt

SEQ ID NO: 523444 - DNA, 120 bp, Artificial Sequence
  ENSG00000165584_3 (sequence is synthesized)
gggaatcaggttcaacgtcctcagatgactttcggcaggctccagggaatcttcccgaagatcatgcccaagaagccagcagaggaaggaaatgtttcgaaggaagtgccagaagcatct

SEQ ID NO: 523445 - DNA, 120 bp, Artificial Sequence
  ENSG00000165584_4 (sequence is synthesized)
ggcccacaaaacgatgggaaacagctgtgccccccgggaaaaccaactacctctgagaagattaacatgatatctggacccaaaaggggggaacatgcctggacccacagactgcgtgag

SEQ ID NO: 523446 - DNA, 120 bp, Artificial Sequence
  ENSG00000165584_5 (sequence is synthesized)
gaagatgatgagtaactccccttggggatatgacacatgcccatgatgagaagcagaacgtggtgacctttcacgaacatgggcatggctgtggacccctcgtcatcaggtgcatagcaa

SEQ ID NO: 523447 - DNA, 120 bp, Artificial Sequence
  ENSG00000165584_6 (sequence is synthesized)
gtcatttttcttagtgtgccaagagtacgatattagcgtttccattgtattttcttgaagtgtgtcattctgttagatattaacattttcactgatgagcaagacatacttaatgcatat

SEQ ID NO: 523448 - DNA, 120 bp, Artificial Sequence
  ENSG00000165584_7 (sequence is synthesized)
atgcatattttggtttgtgtatccatgcacctaccttagaaaacaagtattgtcagttacctctgcatggaacagcattaccctcctctctccctagatgtgactactgagggcagttct

SEQ ID NO: 523449 - DNA, 89 bp, Artificial Sequence
  ENSG00000165584_8 (sequence is synthesized)
ccctcctctctccctagatgtgactactgagggcagttctgagtgtttaatttcagattttttcctctgcatttacacacacacacaag

SEQ ID NO: 523450 - DNA, 120 bp, Artificial Sequence
  ENSG00000165584_9 (sequence is synthesized)
ttcccattgccatgcgtcctggtcaggcttccctcactctgtttcctggtcagcatgtactcccctcatccgattcccctgtagcagtcactgacagtaaataaacctttgcaaacgttc

SEQ ID NO: 523451 - DNA, 120 bp, Artificial Sequence
  ENSG00000165584_10 (sequence is synthesized)
actgggtgtgtggcatggatcccagataaccctgggtccaggctgggctgaggagcttgcccagctccagatgagatgttagacatgacttccagagacagactggagttgtcatccata

SEQ ID NO: 523452 - DNA, 120 bp, Artificial Sequence
  ENSG00000165584_11 (sequence is synthesized)
taaaaaaaaaccacgtgacttgaggaaagtcttccaaatttcctcagctccaggttcctagtccataagatggaaataaagaatcatagttcataaattgtttggagacattaaatttaa

SEQ ID NO: 523453 - DNA, 120 bp, Artificial Sequence
  ENSG00000165584_12 (sequence is synthesized)
tctagaaggcctgatgacatgaaaggtgctcaagcgattctatctgtgataacctgggatcatatcttactcagctcaatgcctgttacccaatacaggtgtccttcagagatactgcag

SEQ ID NO: 523454 - DNA, 120 bp, Artificial Sequence
  ENSG00000165584_13 (sequence is synthesized)
gttcggttccagaccactgcaataaagtgagtcacacacattgttttttgtttgacagtgcataaaacgttatgtttacactacagtgtagtctactaagtgtgcaatagcattatgtct

SEQ ID NO: 523455 - DNA, 120 bp, Artificial Sequence
  ENSG00000165584_14 (sequence is synthesized)
gtgtccttcagagatactgcaggttcggttccagaccactgcaataaagaaatagggaggcccaagaaaaggaagagagacgcggaacagctcatcggtggagcagtcagaagacacaaa

SEQ ID NO: 523456 - DNA, 120 bp, Artificial Sequence
  ENSG00000165584_15 (sequence is synthesized)
acattaatcgattaagtttgtcatattctatgggtgcagttcctggtacccccaaaacaattacacacaacagggtgattatagtcaataataacttaattgtacttaaaaaaactaaaa

SEQ ID NO: 523457 - DNA, 120 bp, Artificial Sequence
  ENSG00000165588_0 (sequence is synthesized)
agctccaacacagcctccactgtgattaaaaataaaaattgctagagcagccctcactcgccacatctactttgatagctggctatttggaatttaaaggatatttgactttttctaacc

SEQ ID NO: 523458 - DNA, 120 bp, Artificial Sequence
  ENSG00000165588_1 (sequence is synthesized)
tcccatgaggctgtaagttccactgctccaaacccacccaccaaggactctgaacctgtccaccccgggcgcatcaagatcttccagctgggtacccccgatttgggccgactttgcacc

SEQ ID NO: 523459 - DNA, 120 bp, Artificial Sequence
  ENSG00000165588_2 (sequence is synthesized)
tccaaacaaccttagcatgatgtcttatcttaagcaaccgccttacgcagtcaatgggctgagtctgaccacttcgggtatggacttgctgcacccctccgtgggctacccggccacccc

SEQ ID NO: 523460 - DNA, 120 bp, Artificial Sequence
  ENSG00000165588_3 (sequence is synthesized)
ccggaaacagcgccgggagaggacgacgttcactcgggcgcagctagatgtgctggaagcactgtttgccaagacccggtacccagacatcttcatgcgagaggaggtggcactgaaaat

SEQ ID NO: 523461 - DNA, 120 bp, Artificial Sequence
  ENSG00000165588_4 (sequence is synthesized)
caacttgcccgagtcgagggtgcaggtatggtttaagaatcgaagagctaagtgccgccaacaacagcaacaacagcagaatggaggtcaaaacaaagtgagacctgccaaaaagaagac

SEQ ID NO: 523462 - DNA, 120 bp, Artificial Sequence
  ENSG00000165588_5 (sequence is synthesized)
atctccagctcgggaagtgagttcagagagtggaacaagtggccaattcactcccccctctagcacctcagtcccgaccattgccagcagcagtgctcctgtgtctatctggagcccagc

SEQ ID NO: 523463 - DNA, 120 bp, Artificial Sequence
  ENSG00000165588_6 (sequence is synthesized)
ttccatctccccactgtcagatcccttgtccacctcctcttcctgcatgcagaggtcctatcccatgacctatactcaggcttcaggttatagtcaaggatatgctggctcaacttccta

SEQ ID NO: 523464 - DNA, 120 bp, Artificial Sequence
  ENSG00000165588_7 (sequence is synthesized)
ctttgggggcatggactgtggatcatatttgacccctatgcatcaccagcttcccggaccaggggccacactcagtcccatgggtaccaatgcagtcaccagccatctcaatcagtcccc

SEQ ID NO: 523465 - DNA, 120 bp, Artificial Sequence
  ENSG00000165588_8 (sequence is synthesized)
agcttctctttccacccagggatatggagcttcaagcttgggttttaactcaaccactgattgcttggattataaggaccaaactgcctcctggaagcttaacttcaatgctgactgctt

SEQ ID NO: 523466 - DNA, 120 bp, Artificial Sequence
  ENSG00000165588_9 (sequence is synthesized)
ggattataaagatcagacatcctcgtggaaattccaggttttgtgaagacctgtagaacctctttttgtgggtgatttttaaatatactgggctggacattccagttttagccaggcatt

SEQ ID NO: 523467 - DNA, 120 bp, Artificial Sequence
  ENSG00000165588_10 (sequence is synthesized)
ggttaaaagagttagatgggatgatgctcagactcatctgatcaaagttccgagaggcatagaaggaaaaacgaagggccttagaggggcctacaaaccagcaacatgaaatggacaaac

SEQ ID NO: 523468 - DNA, 120 bp, Artificial Sequence
  ENSG00000165588_11 (sequence is synthesized)
caatctgcttaagatcctgtcatagttttagatcattggttatcctgatttgcaaagtgatcaaaagcattctagccatgtgcaaccaaacaccaccaaaaataaaatcaaacaaaacta

SEQ ID NO: 523469 - DNA, 120 bp, Artificial Sequence
  ENSG00000165588_12 (sequence is synthesized)
aatcttaggaatgaacagtgtctcaagctcattcacgtttcatgaccaactggtagttggcactgaaaaaacttttcagggctgtgtgaattgtgtgactgattgtcctagatgcactac

SEQ ID NO: 523470 - DNA, 120 bp, Artificial Sequence
  ENSG00000165588_13 (sequence is synthesized)
tttatttaaaaaataatgttcataaggagtcaatatgtagtttaagagacaatcagtgtgtgtcttataaatggtacatctgtggtttttaatctgtgctagacttcaaaactgtgatct

SEQ ID NO: 523471 - DNA, 120 bp, Artificial Sequence
  ENSG00000165588_14 (sequence is synthesized)
cctgttattgtatgcaaccttgaactccacctctgcaggggttcttctgtgattaaataggttataattataagcaaaattcagagcaactgagtactgatctaaaaagattacctttgg

SEQ ID NO: 523472 - DNA, 120 bp, Artificial Sequence
  ENSG00000165588_15 (sequence is synthesized)
ctggaggtgagctgcactgaaactttacgacaaaatgtctctggacaaagagagtcagagaagagaagcaaaaggacactaattcatctgtaatttactgttggtaagcctagcagtaaa

SEQ ID NO: 523473 - DNA, 120 bp, Artificial Sequence
  ENSG00000165588_16 (sequence is synthesized)
gagacattggtcaattgctctgaccctgatgaattattaaactgagatcattgtcgtttatgcttgcagatgttaaatggaaaagttatatatgcataaaccttttcttcctggatttgg

SEQ ID NO: 523474 - DNA, 120 bp, Artificial Sequence
  ENSG00000165588_17 (sequence is synthesized)
cagatatgtataattatattaaaatggttctagcacaacattgggtccagtttaattttacaccgctatttatgaataagaagcctacattcagcctttcctccccaaaacacgtttttc

SEQ ID NO: 523475 - DNA, 120 bp, Artificial Sequence
  ENSG00000165588_18 (sequence is synthesized)
ttaggacagagagtaaattagcaaacttatttttactttttttttttgctaatctatgcataaaatagatatgaatgacagtggtaggtagactttttgtgactttcatcaggattgctc

SEQ ID NO: 523476 - DNA, 120 bp, Artificial Sequence
  ENSG00000165588_19 (sequence is synthesized)
tgaaattgagtttggagagcctaacaacaagatcttgttttccttgcttttccctccctacttcaaacctgaacgatttcttaggcactttattagaatgttttaaaatatatcaagttt

SEQ ID NO: 523477 - DNA, 120 bp, Artificial Sequence
  ENSG00000165588_20 (sequence is synthesized)
ttaagagggaggaggagaattggagtatctctgaaaacatgagaatgacaagaatttcttgttactattctcttatttgattaaggggattttttttttttaacttccaaaaactgaggt

SEQ ID NO: 523478 - DNA, 120 bp, Artificial Sequence
  ENSG00000165588_21 (sequence is synthesized)
aaacatgagagggagtgtaatcagaatctgaaagtaattcaggcagaaatgattcctgaacaaaagagtttcagaaaagttttaaaacctataatttcagtagttgaacataaggcaccc

SEQ ID NO: 523479 - DNA, 120 bp, Artificial Sequence
  ENSG00000165588_22 (sequence is synthesized)
tggtcagtttgtgtgtatgtgtttaagaaagtgccgagggggaaaaaatgggtcccttttcagttgtacctgcattttgtaaaccagtcaccagaaaagacaaatgggccaatgatcatg

SEQ ID NO: 523480 - DNA, 120 bp, Artificial Sequence
  ENSG00000165588_23 (sequence is synthesized)
gtgctcctcaggtaaaagcaatatttaatttcattttaagctgcttaagctcttacagctgaccaaaattaagtgactcttgattgtaacgttttaaatgaaggttagcagttgcaacca

SEQ ID NO: 523481 - DNA, 120 bp, Artificial Sequence
  ENSG00000165588_24 (sequence is synthesized)
agctccaacacagcctccactgtgattaaaaataaaaattgctagagcagccctcactcgccacatctactttgtatgtattgcagaggggcccacgcgtgtttagaactctagccgcct

SEQ ID NO: 523482 - DNA, 120 bp, Artificial Sequence
  ENSG00000165588_25 (sequence is synthesized)
tcctcattttcgttctttaaaaaaaattttttttggttgtgtttgacttttcatggaagggtgaagactgcaaggtttctaactcaatactcttgatttcttttaggatagctggctatt

SEQ ID NO: 523483 - DNA, 120 bp, Artificial Sequence
  ENSG00000165588_26 (sequence is synthesized)
cgcctgaccacagccggccctggcgcttgcacattaagaaactcaaattaagaagtgggtgaattgggaaaggagggagccgggggcgtttgcaccgtgtatctcaggatagctggctat

SEQ ID NO: 523484 - DNA, 120 bp, Artificial Sequence
  ENSG00000165591_0 (sequence is synthesized)
agacactggacttgtaaacgaaaagcttcataagtccctctttgcttagtacttttctcgtcctttccccagggtgcacgtaaccctcaagcactaggaccgtgcggaatccaggctgcg

SEQ ID NO: 523485 - DNA, 120 bp, Artificial Sequence
  ENSG00000165591_1 (sequence is synthesized)
atggcaccttcatttaccgcccgcattcagttgttcctcttgcgggcgctaggctttctcataggcttagtaggccgagcagctttagtcttagggggtccaaagtttgcctcaaagacc

SEQ ID NO: 523486 - DNA, 120 bp, Artificial Sequence
  ENSG00000165591_2 (sequence is synthesized)
cctcggccggtgactgaaccattgcttctgctttcggggatgcagctggccaagctgatccgacagagaaaggtgaaatgtatagatgttgttcaggcttatatcaacagaatcaaggac

SEQ ID NO: 523487 - DNA, 120 bp, Artificial Sequence
  ENSG00000165591_3 (sequence is synthesized)
gtgaacccaatgatcaatggaattgtcaagtacaggtttgaggaagcgatgaaggaggctcatgctgtagatcaaaagcttgcagagaagcaggaagatgaagccaccctggaaaataaa

SEQ ID NO: 523488 - DNA, 120 bp, Artificial Sequence
  ENSG00000165591_4 (sequence is synthesized)
tggcccttccttggggttcctttgacagtcaaggaagctttccagctacaaggaatgcccaattcttctggactcatgaaccgtcgtgatgccattgccaaaacagatgccactgtggtg

SEQ ID NO: 523489 - DNA, 120 bp, Artificial Sequence
  ENSG00000165591_5 (sequence is synthesized)
gcattactgaagggagctggtgccattcctcttggcataaccaactgtagtgagttgtgtatgtggtatgaatccagtaacaagatctatggccgatcaaacaacccatatgatttacag

SEQ ID NO: 523490 - DNA, 120 bp, Artificial Sequence
  ENSG00000165591_6 (sequence is synthesized)
catattgtaggtggaagttctggtggtgagggctgcacactggcagctgcctgctcagttattggtgtgggctctgatattggtggtagcattcgaatgcctgctttcttcaatggtata

SEQ ID NO: 523491 - DNA, 120 bp, Artificial Sequence
  ENSG00000165591_7 (sequence is synthesized)
tttggacacaagccttctccaggtgtggttcccaacaaaggtcagtttcccttggctgtgggagcccaggagttgtttctgtgcactggtcctatgtgccgttatgctgaagacctggcc

SEQ ID NO: 523492 - DNA, 120 bp, Artificial Sequence
  ENSG00000165591_8 (sequence is synthesized)
ttaaaagacttaaaattttactggatggaacatgatggaggctcatttttaatgtccaaagtggaccaagatctcattatgactcagaaaaaggttgtggttcaccttgaaactattcta

SEQ ID NO: 523493 - DNA, 120 bp, Artificial Sequence
  ENSG00000165591_9 (sequence is synthesized)
ggagcctcagttcaacatgttaaactgaagaaaatgaagtactcttttcagttgtggatcgcaatgatgtcagcaaagggacatgatgggaaggaacctgtgaaatttgtagatttgctt

SEQ ID NO: 523494 - DNA, 120 bp, Artificial Sequence
  ENSG00000165591_10 (sequence is synthesized)
ggtgaccatgggaaacatgtcagtcctctgtgggagttgatcaaatggtgcctgggtctgtcagtgtacaccatcccttccattggactggctttgttggaagaaaagctcagatatagc

SEQ ID NO: 523495 - DNA, 120 bp, Artificial Sequence
  ENSG00000165591_11 (sequence is synthesized)
aatgagaaataccaaaagtttaaggcagtggaagaaagcctgcgtaaagagctggtggatatgctaggtgatgatggtgtgttcttatatccctcacatcccacagtggcacctaagcat

SEQ ID NO: 523496 - DNA, 120 bp, Artificial Sequence
  ENSG00000165591_12 (sequence is synthesized)
catgtccctctaacacggcctttcaactttgcttacacaggtgtcttcagtgccctgggtttgcctgtgacccaatgcccactgggactgaatgccaaaggactccctttaggcatccag

SEQ ID NO: 523497 - DNA, 120 bp, Artificial Sequence
  ENSG00000165591_13 (sequence is synthesized)
gttgtggctggaccctttaatgatcatctgaccctggctgtggcccagtacttggagaaaacttttgggggctgggtctgtccaggaaagttttaggaggaccttctgcaaggttaatgt

SEQ ID NO: 523498 - DNA, 120 bp, Artificial Sequence
  ENSG00000165591_14 (sequence is synthesized)
gtgtgtgtgtttgtgttcgtgtggtggtgtttctattaattgggtgaaatcaagcaccagcagacaagcagagaaacaactggggaatttattgactcatttagttattctttctacttt

SEQ ID NO: 523499 - DNA, 120 bp, Artificial Sequence
  ENSG00000165591_15 (sequence is synthesized)
tatttccttctctaactgttggtcttactaaaatggtaatatttgcttcttgcttttatgttactggaaaattaggacatgtaaatggataagtgcaataaagtttcctaaatgctggaa

SEQ ID NO: 523500 - DNA, 120 bp, Artificial Sequence
  ENSG00000165606_0 (sequence is synthesized)
gacagccggcgatgttttatttccactgcccgccacagctagagggcactgcaacctttggcaatcactcttcgggggattttgatgacgggtttctgcgtagaaaacagcgccggaacc

SEQ ID NO: 523501 - DNA, 120 bp, Artificial Sequence
  ENSG00000165606_1 (sequence is synthesized)
ggacgacgttcactcttcagcagctggaagctctcgaggccgtttttgcccaaacacactatccagatgtcttcaccagagaagagctcgccatgaaaataaacctcacagaagccagag

SEQ ID NO: 523502 - DNA, 120 bp, Artificial Sequence
  ENSG00000165606_2 (sequence is synthesized)
tgcaggtttggttccagaacagaagggccaaatggaggaagacagagagaggggcctcagaccaggagccaggagccaaggagcccatggcagaggtgacacctcctccagtgagaaaca

SEQ ID NO: 523503 - DNA, 120 bp, Artificial Sequence
  ENSG00000165606_3 (sequence is synthesized)
tcaactccccgccccctggggaccaagcccggagtaagaaggaggcgctggaggcccagcagagcctggggcgaacggtaggtcctgcagggcctttcttcccctcctgcttgccgggga

SEQ ID NO: 523504 - DNA, 120 bp, Artificial Sequence
  ENSG00000165606_4 (sequence is synthesized)
ctctcctgaacacggccacctacgcccaggccttgtcccatgtggcttccctcaaagggggcccactgtgctcttgctgcgtcccagaccccatgggactctccttccttcccacctatg

SEQ ID NO: 523505 - DNA, 120 bp, Artificial Sequence
  ENSG00000165606_5 (sequence is synthesized)
gctgccagagtaaccgcacggccagcgtggccaccctgcgcatgaaggcccgcgagcactcagaagctgtcctgcagtcagccaacctcctgccttccaccagcagcagccccggccctg

SEQ ID NO: 523506 - DNA, 120 bp, Artificial Sequence
  ENSG00000165606_6 (sequence is synthesized)
tcgccaagccggcgcccccagatggcagccaggaaaagacctctcccaccaaggaacagagcgaggcagagaagagtgtatgagggtccacagtgccccgcccggcctgccctcccccgc

SEQ ID NO: 523507 - DNA, 120 bp, Artificial Sequence
  ENSG00000165606_7 (sequence is synthesized)
ccctccttctcccagcctcagcccctacagaaaactctccaaatagcaaggagaagcctgcggccccagggcctctgcatggacccaggacgggcaagtgagacccacagctcccttggc

SEQ ID NO: 523508 - DNA, 120 bp, Artificial Sequence
  ENSG00000165606_8 (sequence is synthesized)
acctggagcgtccctctggagtcccaccagtgcggcagtgttgtcctggcttctttggcaacagatcccgatggcacttggtggcagcagagccctctctgtgaggagcctccctgggat

SEQ ID NO: 523509 - DNA, 120 bp, Artificial Sequence
  ENSG00000165606_9 (sequence is synthesized)
ttccatccaggcccagagtctcggagggaggtagattcctcatccgtctcccttcctatttcctccctgggctgcctttgaaggtcttgtcaaccccaggaactgtggcatgggctgaag

SEQ ID NO: 523510 - DNA, 120 bp, Artificial Sequence
  ENSG00000165606_10 (sequence is synthesized)
tttcatgaaaagaaaagggcctgtcccgcttacagtgtttaagaactggggaactggtggaaccccaagcgactcttgctcccctggaccaagatgagcagtaatgccctttctcttgtt

SEQ ID NO: 523511 - DNA, 120 bp, Artificial Sequence
  ENSG00000165606_11 (sequence is synthesized)
gacccaggagatctcactggcacatctggccggggggctgggctaatcacccaggccacctgctccatgaactgggggctgctgtcttgacactgtgggtgtggaactagtgtggcccct

SEQ ID NO: 523512 - DNA, 120 bp, Artificial Sequence
  ENSG00000165606_12 (sequence is synthesized)
gtacctgaagcactcacctgcaagcccttcctctctcccagatagacctgtggattggtgggaagttaagcaactgaaaagcagctctctggtccaggagggcctgagggcccttggaga

SEQ ID NO: 523513 - DNA, 120 bp, Artificial Sequence
  ENSG00000165606_13 (sequence is synthesized)
gggaagaagcccttcaggaatgcctctgaagtaattatgcatacagatgaactacctttccccacatgcctggcacgtagagggggctcttcagtggtggtggttttttactggggaaaa

SEQ ID NO: 523514 - DNA, 120 bp, Artificial Sequence
  ENSG00000165606_14 (sequence is synthesized)
aaaagtaggaaaggagacaggaacggcgtatgtgcagatatggagcatggggaagacagctttctcatggtgtggagagcattaattccaaagggccaaatttcacagagatttctgttt

SEQ ID NO: 523515 - DNA, 120 bp, Artificial Sequence
  ENSG00000165606_15 (sequence is synthesized)
tggtctagtgtggctgttttctctggtgaggatggtgacctagaggagatccaaggggaacgtgcaatagcataagctctgccgctttctggcaggggcgcccggcatgggaaaggttgc

SEQ ID NO: 523516 - DNA, 120 bp, Artificial Sequence
  ENSG00000165606_16 (sequence is synthesized)
agtctttggtggcttttgctgatggtgtttccatgcggatggttattgccttcatgatggttattttggtttcagttattatcgtcaaaatgttttactttcacatttcctgtccccttt

SEQ ID NO: 523517 - DNA, 120 bp, Artificial Sequence
  ENSG00000165606_17 (sequence is synthesized)
ttaccttcccccactccatgacccccaaataatactcctgagtgtatcatgccttgtctatgatcactacgaagcatttgataaaacccactgtctcctttaaagaaaaaaatcaaatcc

SEQ ID NO: 523518 - DNA, 120 bp, Artificial Sequence
  ENSG00000165606_18 (sequence is synthesized)
ttcttcctgctgtattttgcttgttgagtataaagatgaaacgatttgccaaaaagcggcaaagttgcttccgtttccctgtaattacgaatgtttggttgaaggatgtaagctcaagcc

SEQ ID NO: 523519 - DNA, 120 bp, Artificial Sequence
  ENSG00000165606_19 (sequence is synthesized)
cttatgtacactaactcttcaatctaattgtttgattaaactcgtatttcctccagaaaggtacataaataagtgaactgttgagcaaattaagaatacttaacagcattgcatctgaaa

SEQ ID NO: 523520 - DNA, 120 bp, Artificial Sequence
  ENSG00000165606_20 (sequence is synthesized)
agtagttatgctgattaaattttgtgtccttgaggactttcaggaaattacttttgatcgtcaataacacaattaagtaaactacacacacattagcatgaataattgataagaaattat

SEQ ID NO: 523521 - DNA, 120 bp, Artificial Sequence
  ENSG00000165606_21 (sequence is synthesized)
gtattaccacgaagcactgatttaataattcatgatgcgacactctagtgactgtgcaaaactggatcatatcgaaaagtctgcctgatgttactgaaaggaaagaaaatgagcaccaaa

SEQ ID NO: 523522 - DNA, 120 bp, Artificial Sequence
  ENSG00000165606_22 (sequence is synthesized)
gagccccgcccgccgccagccgagcagggcttgcggatcggaggcggtcacgctccgacctcctcgaccgccgcccgccgagccaggcaggagcaacgcgcgcgggtccgttctgctgcc

SEQ ID NO: 523523 - DNA, 120 bp, Artificial Sequence
  ENSG00000165609_0 (sequence is synthesized)
gcccatccttttagcaccgcgagaggcgccggtgtttcgagccgtggcaccggcatcggctgacactgctgcctccagctagttatttcgtcctcttccgttcttcacccctacaccttg

SEQ ID NO: 523524 - DNA, 120 bp, Artificial Sequence
  ENSG00000165609_1 (sequence is synthesized)
gaggtgaacttctcacctgagggctgtaaagactcgtttgaaaatggagagccaagaaccaacggaatcttctcagaatggcaaacagtatatcatttcagaggagttaatttcagaagg

SEQ ID NO: 523525 - DNA, 120 bp, Artificial Sequence
  ENSG00000165609_2 (sequence is synthesized)
aaaatgggtcaagcttgaaaaaacaacgtacatggatcctactggtaaaactagaacttgggaatcagtgaaacgtacaaccaggaaagagcagactgcggatggtgtcgcggtcatccc

SEQ ID NO: 523526 - DNA, 120 bp, Artificial Sequence
  ENSG00000165609_3 (sequence is synthesized)
cgtgctgcagagaacacttcactatgagtgtatcgttctggtgaaacagttccgaccaccaatggggggctactgcatagagttccctgcaggtctcatagatgatggtgaaaccccaga

SEQ ID NO: 523527 - DNA, 120 bp, Artificial Sequence
  ENSG00000165609_4 (sequence is synthesized)
agcagctgctctccgggagcttgaagaagaaactggctacaaaggggacattgccgaatgttctccagcggtctgtatggacccaggcttgtcaaactgtactatacacatcgtgacagt

SEQ ID NO: 523528 - DNA, 120 bp, Artificial Sequence
  ENSG00000165609_5 (sequence is synthesized)
caccattaacggagatgatgccgaaaacgcaaggccgaagccaaagccaggggatggagagtttgtggaagtcatttctttacccaagaatgacctgctgcagagacttgatgctctggt

SEQ ID NO: 523529 - DNA, 120 bp, Artificial Sequence
  ENSG00000165609_6 (sequence is synthesized)
agctgaagaacatctcacagtggacgccagggtctattcctacgctctagcactgaaacatgcaaatgcaaagccatttgaagtgcccttcttgaaattttaagcccaaatatgacactg

SEQ ID NO: 523530 - DNA, 120 bp, Artificial Sequence
  ENSG00000165609_7 (sequence is synthesized)
gccatttttgtaaacgagaccaccaggccttcttcactaagactttgtattcaacttagtttaatgtagatttgccattagctttttcgtaaaataaaagcacagaacagatgtggtggt

SEQ ID NO: 523531 - DNA, 120 bp, Artificial Sequence
  ENSG00000165609_8 (sequence is synthesized)
ggtatggaattgtaattacaggtaggttgtgaccttcctttaaatttgttataactccagctaaaattaacaaagaatataaatgcaagtatgtttactccaatttttttaaagctcaac

SEQ ID NO: 523532 - DNA, 120 bp, Artificial Sequence
  ENSG00000165609_9 (sequence is synthesized)
agcagttaactacagctcagttacttttctagtccagtctggtagacaggggtatttgtatagagaaatagacctgagttctcaattaggtcatttccactctcaacccccaatataaaa

SEQ ID NO: 523533 - DNA, 120 bp, Artificial Sequence
  ENSG00000165609_10 (sequence is synthesized)
ttctaagctgggtatgcaaataaccatgtactccgttagtgtttaaaacagcgttaaaaagaaaaaaaaggctttttggcctcttctaattgaatttttactatgcaaaatttatctagg

SEQ ID NO: 523534 - DNA, 120 bp, Artificial Sequence
  ENSG00000165609_11 (sequence is synthesized)
gtagttgaatccaactagggtagggttcgatagaatcctctactagttttcagttcatctatttactgaggctgaaccagcttttaagtaaggaaaacggttgactccattcactacacc

SEQ ID NO: 523535 - DNA, 120 bp, Artificial Sequence
  ENSG00000165609_12 (sequence is synthesized)
aaggctaggagactaatgaaaattcaggtccatcccgcaagcatctgcacgtgcttgaggatctcttttcctattcttacctcaaagagtacttgaagtttctgaaaacaaatctgtaag

SEQ ID NO: 523536 - DNA, 120 bp, Artificial Sequence
  ENSG00000165609_13 (sequence is synthesized)
cccaatacagagtagttcacagcaagaagtacagattgatctggttcccatgcctgaaaccctgtcatctagcagttctaccagtgttcctgggccattttcttagcttcttgagtgagt

SEQ ID NO: 523537 - DNA, 120 bp, Artificial Sequence
  ENSG00000165609_14 (sequence is synthesized)
ttagctctttttgtgttgacttttagggcctccagcagctccatgattttccaggactttccagtctggcccccacggaattctcaggatgattctcatccagccctaagtcatgtttct

SEQ ID NO: 523538 - DNA, 120 bp, Artificial Sequence
  ENSG00000165609_15 (sequence is synthesized)
agcctggctccagcgggtaagccaggccctgagaaccatatgaaagggctctccagataaaatcagagtgctaatgccagaatgctgcagtagcctccgtttgtccacaggctcactgtc

SEQ ID NO: 523539 - DNA, 120 bp, Artificial Sequence
  ENSG00000165609_16 (sequence is synthesized)
tgagcccaggatatttttatgagtgaaactgtaagatctttacactggacttcctaaagataaaacaattatggaaatacagaactttacagatgaagctgtctagccctatacatgtga

SEQ ID NO: 523540 - DNA, 120 bp, Artificial Sequence
  ENSG00000165609_17 (sequence is synthesized)
aaattaagatccaactacttcctgtaatggtagccttcccctatgcctctaacccttttttaaatcctgatttcaatcacaggcattgtgattctccaaagctctaactcttccttaggt

SEQ ID NO: 523541 - DNA, 120 bp, Artificial Sequence
  ENSG00000165609_18 (sequence is synthesized)
ctgaaagccacatgctatcaatcattgaaatcaagagagaaggcatccgtagacgggcgcagcccagtctttccacatagcccagttcctccccagccactccccatgggaatgacctct

SEQ ID NO: 523542 - DNA, 120 bp, Artificial Sequence
  ENSG00000165609_19 (sequence is synthesized)
gcagctgacctaagcttatcctctccttcttcctaagagtgcaacttagaagtcagagccaaatcctagaatgtatccctaaatgccatttctattttttataaacatgaaaaggttgtg

SEQ ID NO: 523543 - DNA, 120 bp, Artificial Sequence
  ENSG00000165609_20 (sequence is synthesized)
ctttggaaattcagtctgtttgagaactggcagtctggctggcactgtttaaaaatgtttatttgccctgcatttaaaaactgaaggtttcctatgtattaaaagccatatttccacctt

SEQ ID NO: 523544 - DNA, 120 bp, Artificial Sequence
  ENSG00000165609_21 (sequence is synthesized)
cttaagggaaaaaaaaatcggacgtcataacactgggtggatgtttttatggtaacagtggtctgaggcccttggcggatgctcaccgagccactgtcactatcctgcctgcctttatct

SEQ ID NO: 523545 - DNA, 120 bp, Artificial Sequence
  ENSG00000165609_22 (sequence is synthesized)
gccttgccctgcgattatttggctttgtaagcataagctacgtaagacataccacacctaagaaactaaacagcaatgaaaacccatacttctgaaaagggtgtcttttaaaaattaagt

SEQ ID NO: 523546 - DNA, 120 bp, Artificial Sequence
  ENSG00000165609_23 (sequence is synthesized)
ttgatcttttgggaaataaagcacatagttttcaaaatgatttaccaagatctatgctctttcaaatggagactgggatattgttgttttgagaccactgttttcctgtttcctcccaaa

SEQ ID NO: 523547 - DNA, 120 bp, Artificial Sequence
  ENSG00000165609_24 (sequence is synthesized)
tgttagtcacatatatgattacccttaagttggtcactatctatctatctgtcaataatttaggattaaagtttgaagtgtaattacatttgacttttacaggcatctcagggtggactt

SEQ ID NO: 523548 - DNA, 120 bp, Artificial Sequence
  ENSG00000165609_25 (sequence is synthesized)
cttatgaatacactgaacctatacaaatgatcttagaaaacgtttaatatcagatttctttattttttccaacacaactgaatcagttttcttaaataaaagtttattgtctactgttta

SEQ ID NO: 523549 - DNA, 120 bp, Artificial Sequence
  ENSG00000165609_26 (sequence is synthesized)
ggactcttccggtccctaaagcaagaaggaagaccgagaaaaggaagcggaggagaatcccggggcatacgcttgacacacacgcatacaaaaagagctttagtctcgaaagaggaatta

SEQ ID NO: 523550 - DNA, 120 bp, Artificial Sequence
  ENSG00000165609_27 (sequence is synthesized)
ccgaagtgtcgagagaggaattttaagaagtttacaactccgtcttcgccctaaacgcacgctgacccggaaagtaatctcctgaagctaggtcaaaggcgggggttctacggatgccgg

SEQ ID NO: 523551 - DNA, 120 bp, Artificial Sequence
  ENSG00000165609_28 (sequence is synthesized)
tgggttgttttggtaggctcttgacgttagctttgttttcacttgcactttgtctgtttagagtttgtggaagtcatttctttacccaagaatgacctgctgcagagacttgatggtaag

SEQ ID NO: 523552 - DNA, 120 bp, Artificial Sequence
  ENSG00000165609_29 (sequence is synthesized)
cattctccagaccgccacccagtttctccagttctccccgtccccatcccagcaaactgggtactaaatataactccatttctttatcttttttgtatcactaaagtcaaatgcctagca

SEQ ID NO: 523553 - DNA, 120 bp, Artificial Sequence
  ENSG00000165609_30 (sequence is synthesized)
acttgtaaaactgcaggtgaccactactaattttcctttctgggtggcacagagtttgaaaataagagcaaagcattctgggtcaagtgcaaacttttggtagaggctttttctcctaca

SEQ ID NO: 523554 - DNA, 120 bp, Artificial Sequence
  ENSG00000165609_31 (sequence is synthesized)
gaatggcccagatgacattcctgctgagtagccaaaacgattctacactttaaaccttcagtccatagcaatgcaaaggtgtgggtagataagctgttagcttttcctcaagtatgctag

SEQ ID NO: 523555 - DNA, 120 bp, Artificial Sequence
  ENSG00000165609_32 (sequence is synthesized)
tatgagggatggtcctttgtggaggctgtatgttcaaggagaaattgatgatgctccttcaacaaatacttgaggtatttcctgtatactccgtgtgatatgcttttcacataataaacc

SEQ ID NO: 523556 - DNA, 120 bp, Artificial Sequence
  ENSG00000165609_33 (sequence is synthesized)
tgcggatggtaggagtgcaaacctattccaaccctttagaaaggaagttagcacttgtgatcgtgtcgcggtcatccccgtgctgcagagaacacttcactatgagtgtatcgttctggt

SEQ ID NO: 523557 - DNA, 120 bp, Artificial Sequence
  ENSG00000165609_34 (sequence is synthesized)
atgaggagatactgtgtggagacgaggagatactgtatggagacataccatgggcccttcaaggagcacctctgtatgggctggcaaatccctttcactcatctagaaagaagcagacac

SEQ ID NO: 523558 - DNA, 120 bp, Artificial Sequence
  ENSG00000165609_35 (sequence is synthesized)
ttgtcatcatgggaatattttattgggtataagtgttttaggtaattgataactgatttttctactgtttttaagtgattacttcaaatgtgatttgaagcattgtttggcctgaagctt

SEQ ID NO: 523559 - DNA, 120 bp, Artificial Sequence
  ENSG00000165609_36 (sequence is synthesized)
taagaccagtttcttaagcttttccctgagtttcagcagcttacggtttcagtgaataagcagagcgcctggttttgaattgtctgttgtttgtttgaaaatctgaatgtgtctttcaaa

SEQ ID NO: 523560 - DNA, 120 bp, Artificial Sequence
  ENSG00000165609_37 (sequence is synthesized)
ttgcattacgtgtcttggaacttgctgctagtttgatttattaaaagaatgtagtctttcatggaaagaatcggtctttcaaatagacttcatcagtattcttgtctctcttcctaatca

SEQ ID NO: 523561 - DNA, 120 bp, Artificial Sequence
  ENSG00000165609_38 (sequence is synthesized)
tgtattttagcatttttcttttgccacttcattcatctttacgctttctttgtaaaaaaatgttaaatgacatatttccctgttttctatatgaagtgtattcccacttagtaatatgag

SEQ ID NO: 523562 - DNA, 120 bp, Artificial Sequence
  ENSG00000165609_39 (sequence is synthesized)
atggatcctactggtaaaactagtgtttgggatgggaccttcagtgcttttcccagcactgtcttcttcagtctttaggactaaccttaggaggcagcagagagagctatgccaaaagaa

SEQ ID NO: 523563 - DNA, 120 bp, Artificial Sequence
  ENSG00000165617_0 (sequence is synthesized)
cgactgggggccatgaagccgagtccggccgggacggcgaaggagctggagcctccggcgccggcccgaggcgagcagcgcacggcggagcccgaggggcgctggcgggagaagggcgag

SEQ ID NO: 523564 - DNA, 120 bp, Artificial Sequence
  ENSG00000165617_1 (sequence is synthesized)
gagaagggcgaggcagacaccgagcggcagcgcacccgggagcggcaggaggccacgctggccgggctggcggagctggagtacctgcgccagcgccaagagctgctggtcaggggcgcc

SEQ ID NO: 523565 - DNA, 120 bp, Artificial Sequence
  ENSG00000165617_2 (sequence is synthesized)
ctgcgcggcgccgggggtgcgggagccgctgcgccccgcgctggggagctactgggggaggcggcgcagcgcagtcgcctggaggagaagttcttggaggagaacatcttgctgctaaga

SEQ ID NO: 523566 - DNA, 120 bp, Artificial Sequence
  ENSG00000165617_3 (sequence is synthesized)
aagcaattgaactgtttgaggcgaagagatgctggtttgttgaatcagttgcaagagcttgacaagcagataagtgacctgagactggatgtagaaaagacatctgaagagcacctggag

SEQ ID NO: 523567 - DNA, 120 bp, Artificial Sequence
  ENSG00000165617_4 (sequence is synthesized)
acagacagtcggcctagctcagggttttatgagctgagtgatggggcttcaggatccctttccaattcctctaactcggtgttcagtgagtgtttatccagttgtcattccagcacctgc

SEQ ID NO: 523568 - DNA, 120 bp, Artificial Sequence
  ENSG00000165617_5 (sequence is synthesized)
ttttgcagccccttggaggcgaccttgagtctctcagatggttgccccaaatctgcagatctcataggattgttggaatataaagaaggccactgtgaagaccaggcctcaggggcagtt

SEQ ID NO: 523569 - DNA, 120 bp, Artificial Sequence
  ENSG00000165617_6 (sequence is synthesized)
tgccgttccctctccacaccacaatttaattcccttgatgtcattgcagatgtgaatcccaagtaccagtgtgatctggtgtctaaaaacgggaatgatgtatatcgctatcccagtcca

SEQ ID NO: 523570 - DNA, 120 bp, Artificial Sequence
  ENSG00000165617_7 (sequence is synthesized)
cttcatgctgtggctgtgcagagcccaatgtttctcctttgtctgacgggcaaccctctgagggaagaggacaggcttggaaaccatgccagtgacatttgcggtggatctgagctagat

SEQ ID NO: 523571 - DNA, 120 bp, Artificial Sequence
  ENSG00000165617_8 (sequence is synthesized)
gccgtcaaaacagacagttccttaccgtccccaagcagtctgtggtctgcttcccatccttcatccagcaagaaaatggatggctacattctgagcctggtccagaaaaaaacacaccct

SEQ ID NO: 523572 - DNA, 120 bp, Artificial Sequence
  ENSG00000165617_9 (sequence is synthesized)
gtaaggaccaacaaaccaagaaccagcgtgaacgctgaccccacgaaagggcttctgaggaacgggagcgtttgtgtcagagccccgggcggtgtctcacagggcaacagtgtgaacctt

SEQ ID NO: 523573 - DNA, 120 bp, Artificial Sequence
  ENSG00000165617_10 (sequence is synthesized)
aatgggacattctccccaccgaagcagtggtcgaaagaatcaaaggccgaacaagccgaaagcaagagggtgcccctgccagagggctgcccctcaggcgctgcctccgaccttcagagt

SEQ ID NO: 523574 - DNA, 120 bp, Artificial Sequence
  ENSG00000165617_11 (sequence is synthesized)
aagcacctgccaaaaacggccaagccagcctcgcaagaacatgctcggtgttccgccattgggacaggggagtcccctaaggaaagcgctcagctctcaggggcctctccaaaagagagt

SEQ ID NO: 523575 - DNA, 120 bp, Artificial Sequence
  ENSG00000165617_12 (sequence is synthesized)
cctagcagaggccctgccccgccgcaggagaacaaagttgtacagcccctgaaaaagatgtcacagaaaaacagcctgcagggcgtccccccggccactcctcccctgctgtctacagct

SEQ ID NO: 523576 - DNA, 120 bp, Artificial Sequence
  ENSG00000165617_13 (sequence is synthesized)
ttccccgtggaagagaggcctgccttggatttcaagagcgagggctcttcccaaagcctggaggaagcgcacctggtcaaggcccagtttatcccggggcagcagcccagtgtcaggctc

SEQ ID NO: 523577 - DNA, 120 bp, Artificial Sequence
  ENSG00000165617_14 (sequence is synthesized)
caccggggccacaggaacatgggcgtcgtgaagaactccagcctgaagcaccgcggcccagccctccaggggctggagaacggcttgcccaccgtcagggagaaaacgcgggccgggagc

SEQ ID NO: 523578 - DNA, 120 bp, Artificial Sequence
  ENSG00000165617_15 (sequence is synthesized)
aagaagtgtcgcttcccagatgacttggatacaaataagaaactcaagaaagcctcctccaaggggaggaagagtgggggcgggcccgaggctggtgttcccggcaggcccgcgggcggg

SEQ ID NO: 523579 - DNA, 120 bp, Artificial Sequence
  ENSG00000165617_16 (sequence is synthesized)
ggccacagggcggggagcagggcgcatggccacggacgggaggcggtggtggccaaacctaagcacaagcgaactgactaccggcggtggaagtcctcggccgagatttcctacgaagag

SEQ ID NO: 523580 - DNA, 120 bp, Artificial Sequence
  ENSG00000165617_17 (sequence is synthesized)
gccctgaggagggcccggcgcggtcgccgggagaatgtggggctgtaccccgcgcctgtgcctctgccctacgccagcccctacgcctacgtggctagcgactccgagtactcggccgag

SEQ ID NO: 523581 - DNA, 120 bp, Artificial Sequence
  ENSG00000165617_18 (sequence is synthesized)
tgcgagtccctgttccactccaccgtggtggacaccagtgaggacgagcagagcaattacaccaccaactgcttcggggacagcgagtcgagtgtgagcgagggcgagttcgtgggggag

SEQ ID NO: 523582 - DNA, 120 bp, Artificial Sequence
  ENSG00000165617_19 (sequence is synthesized)
agcacaaccaccagcgactctgaagaaagcgggggcttaatttggtcccagtttgtccagactctgcccattcaaacggtaacggccccagaccttcacaaccaccccgcaaaaaccttt

SEQ ID NO: 523583 - DNA, 120 bp, Artificial Sequence
  ENSG00000165617_20 (sequence is synthesized)
gtcaaaattaaggcctcacataacctcaagaagaagatcctccgctttcggtctggctctttgaaactgatgacgacggtttgagtgacatcattggtgtagaaagtttgtgtgtttttt

SEQ ID NO: 523584 - DNA, 120 bp, Artificial Sequence
  ENSG00000165617_21 (sequence is synthesized)
ccgccacagggcggcatgagcccacccgcggccgcagccctagcgccctgctcctccgcctgggcggcccggctgcggtgacggctctcgctgcccgactgggggccatgaagccgagtc

SEQ ID NO: 523585 - DNA, 120 bp, Artificial Sequence
  ENSG00000165617_22 (sequence is synthesized)
ttttaaaaaaatataaaaccaaggtaaattattgtttcatcttcacgtatggatgctagtgcctttaatggaaggtaaagaatgttttgctagttagaagtacatattgaggttttaatg

SEQ ID NO: 523586 - DNA, 120 bp, Artificial Sequence
  ENSG00000165617_23 (sequence is synthesized)
gtggtgatagtgagttttgtggcaccagctgttttttattttaaactttctgagcatccggcaaggtacaggttttgatgttcaagttttattgggataagatcttttgatcccaaggtc

SEQ ID NO: 523587 - DNA, 120 bp, Artificial Sequence
  ENSG00000165617_24 (sequence is synthesized)
aggtggatggaatttttggatttatatttgttccttgagtcttcagggcagtgtctccatgagggttttcctgttgaggggcaccacatacaatagtgtgaagtaggtatgaggggcagt

SEQ ID NO: 523588 - DNA, 120 bp, Artificial Sequence
  ENSG00000165617_25 (sequence is synthesized)
cattgtattctatagtttttttatgtagtctacatttctcagatgtatccccattcggttttattctcagaactgttactagactcatgacttggaggccaaaccttaaatccagagata

SEQ ID NO: 523589 - DNA, 120 bp, Artificial Sequence
  ENSG00000165617_26 (sequence is synthesized)
gcagcctcgatagggaccttaaaaggattcacaaaaacttttgccacacttggtgcctaggccctgttcctaataaccccttctagggccgtttatccaacatttagatgccttcttttc

SEQ ID NO: 523590 - DNA, 120 bp, Artificial Sequence
  ENSG00000165617_27 (sequence is synthesized)
cctccctaatttgtagccagtccaacctttcattccttggaggatttagttttgggataaaattttggtccttgggcacagagacattcactattaatgaagtaacccttgggcatgact

SEQ ID NO: 523591 - DNA, 120 bp, Artificial Sequence
  ENSG00000165617_28 (sequence is synthesized)
ccaatcccagaattgctcactgagcgctatgccaccgaagcgttgacctgaacatattagtgcaatccagtccagattggacctttgatcctatgtggaagggctgttttttaagaaaaa

SEQ ID NO: 523592 - DNA, 120 bp, Artificial Sequence
  ENSG00000165617_29 (sequence is synthesized)
atttttggtaaacagtattgtgtaaaattgctttttgtataccaatatatgcatgttttgtgcatgagtagtacttgtgttgatactcctgttgatgttaaattactatataatataaac

SEQ ID NO: 523593 - DNA, 120 bp, Artificial Sequence
  ENSG00000165617_30 (sequence is synthesized)
agtatgtgtttttatatatcattgtgtaaatttaatataacatatgcagtaataaaccatttgttttactgctgttaagtttgttatttgggtataaaaccagatgtttacacctgtaaa

SEQ ID NO: 523594 - DNA, 120 bp, Artificial Sequence
  ENSG00000165617_31 (sequence is synthesized)
gagtcgcctagttctaacgttcggtctccttagttagatgagtatatgccctctccccagcggtttgcaaactcccacttaaaataccattttatttggaggttttcttgactttatctc

SEQ ID NO: 523595 - DNA, 120 bp, Artificial Sequence
  ENSG00000165617_32 (sequence is synthesized)
ctcccgccgagaggggccaaaagccaaggagggggtttgtggcgtgcttaactgtccagggccgagttttacgattacactggagcgcctgtagggagccgtgcctctccgagagctctc

SEQ ID NO: 523596 - DNA, 120 bp, Artificial Sequence
  ENSG00000165617_33 (sequence is synthesized)
cccagcatgccagctttcacccaggctggtgcttaatttcaaatagaagccctttgtataaggcagctcaaactagatggaaatgatggaaatttggctggagactgtgtcccctcctct

SEQ ID NO: 523597 - DNA, 120 bp, Artificial Sequence
  ENSG00000165617_34 (sequence is synthesized)
gacaaaagtctgaggctggtggagacttaatcaccttaatcagtgattacgacggtggggaatgcaactcacttccagacattctagaatctttggaatccacagtgctctgcaggagga

SEQ ID NO: 523598 - DNA, 120 bp, Artificial Sequence
  ENSG00000165621_0 (sequence is synthesized)
aactaggctgcacaggcacgctgggcgcatgtccgcctcgccggggctgccagaatcttggaatcccaatccgtgaggttcctgggtgtgctggcatcaggacagcggtccacgaacggg

SEQ ID NO: 523599 - DNA, 120 bp, Artificial Sequence
  ENSG00000165621_1 (sequence is synthesized)
taatcctgatgaaaatcaacaaaatacacatgaagagacagcactgagagcgagttactgctcatttgattcatattgccaaactgaactctcttgttttcttgcaagatgaaaggagac

SEQ ID NO: 523600 - DNA, 120 bp, Artificial Sequence
  ENSG00000165621_2 (sequence is synthesized)
aaccatgaatgagccactagactatttagcaaatgcttctgatttccccgattatgcagctgcttttggaaattgcactgatgaaaacatcccactcaagatgcactacctccctgttat

SEQ ID NO: 523601 - DNA, 120 bp, Artificial Sequence
  ENSG00000165621_3 (sequence is synthesized)
ttatggcattatcttcctcgtgggatttccaggcaatgcagtagtgatatccacttacattttcaaaatgagaccttggaagagcagcaccatcattatgctgaacctggcctgcacaga

SEQ ID NO: 523602 - DNA, 120 bp, Artificial Sequence
  ENSG00000165621_4 (sequence is synthesized)
tctgctgtatctgaccagcctccccttcctgattcactactatgccagtggcgaaaactggatctttggagatttcatgtgtaagtttatccgcttcagcttccatttcaacctgtatag

SEQ ID NO: 523603 - DNA, 120 bp, Artificial Sequence
  ENSG00000165621_5 (sequence is synthesized)
cagcatcctcttcctcacctgtttcagcatcttccgctactgtgtgatcattcacccaatgagctgcttttccattcacaaaactcgatgtgcagttgtagcctgtgctgtggtgtggat

SEQ ID NO: 523604 - DNA, 120 bp, Artificial Sequence
  ENSG00000165621_6 (sequence is synthesized)
catttcactggtagctgtcattccgatgaccttcttgatcacatcaaccaacaggaccaacagatcagcctgtctcgacctcaccagttcggatgaactcaatactattaagtggtacaa

SEQ ID NO: 523605 - DNA, 120 bp, Artificial Sequence
  ENSG00000165621_7 (sequence is synthesized)
cctgattttgactgcaactactttctgcctccccttggtgatagtgacactttgctataccacgattatccacactctgacccatggactgcaaactgacagctgccttaagcagaaagc

SEQ ID NO: 523606 - DNA, 120 bp, Artificial Sequence
  ENSG00000165621_8 (sequence is synthesized)
acgaaggctaaccattctgctactccttgcattttacgtatgttttttacccttccatatcttgagggtcattcggatcgaatctcgcctgctttcaatcagttgttccattgagaatca

SEQ ID NO: 523607 - DNA, 120 bp, Artificial Sequence
  ENSG00000165621_9 (sequence is synthesized)
atgaagcttacatcgtttctagaccattagctgctctgaacacctttggtaacctgttactatatgtggtggtcagcgacaactttcagcaggctgtctgctcaacagtgagatgcaaag

SEQ ID NO: 523608 - DNA, 120 bp, Artificial Sequence
  ENSG00000165621_10 (sequence is synthesized)
taagcgggaaccttgagcaagcaaagaaaattagttactcaaacaacccttgaaatatttcatttacttaaccaaaaacaaatacttgctgatactttacctagcatcctaagatgttca

SEQ ID NO: 523609 - DNA, 120 bp, Artificial Sequence
  ENSG00000165621_11 (sequence is synthesized)
ggatgtctccctcaatggaactcctggtaaatactgtgtattcaagtaatcatgtgccaaagccagggcagagcttctagttctttgcaatccctttattgagctcctccactggggaga

SEQ ID NO: 523610 - DNA, 120 bp, Artificial Sequence
  ENSG00000165621_12 (sequence is synthesized)
tataagaatgggatgcatgtatatcagcaaagtattcagacatagtattacaagctattggaactcagaggcatcttagagaacatctgttcccaccaacttactatatatacacggaaa

SEQ ID NO: 523611 - DNA, 120 bp, Artificial Sequence
  ENSG00000165621_13 (sequence is synthesized)
ccaatttcttacccttgccctagattgctcagtaaatttgtgccaagataggagaaaaccaatcttttcactcatcatttcatgcttctctgcactctgggcctatttgtattgaaccat

SEQ ID NO: 523612 - DNA, 120 bp, Artificial Sequence
  ENSG00000165621_14 (sequence is synthesized)
tagacaattcaaaccactacttgtatctttcttaatatttattttttacatctcagagctctacaatttgtttccttcaagcttaactttgagattataaaactgggtttagccagttct

SEQ ID NO: 523613 - DNA, 120 bp, Artificial Sequence
  ENSG00000165621_15 (sequence is synthesized)
gtatattacttcaagccagtaagatacccttgaaataatccaaggacgtccatgcaaatagttgaaattagtacctgcaatatatttggagtattatgtctttattgttgttaaaaagtt

SEQ ID NO: 523614 - DNA, 120 bp, Artificial Sequence
  ENSG00000165621_16 (sequence is synthesized)
tttattgaatgtatgaaaattatcaaattgtattcatcattattaacatgtcctggggaaggaagggaaactttctaggacagaagtcactttcagatgtcatgtatgtattgggtgttc

SEQ ID NO: 523615 - DNA, 120 bp, Artificial Sequence
  ENSG00000165621_17 (sequence is synthesized)
aatcatatctaacactgttttgatttttgtgggaaaatattccaggaaacgctaattctctttagactccttgttcttttatgactacaatgaacatatgtctatgtgatagctaaagat

SEQ ID NO: 523616 - DNA, 120 bp, Artificial Sequence
  ENSG00000165621_18 (sequence is synthesized)
atttttgaattgtatgtgtgcttaattatcggtaagtataaatatttgagaaaacacatggtctggatatttaaaaccctcataaacatgttggtacagttaataaacttatttataatt

SEQ ID NO: 523617 - DNA, 120 bp, Artificial Sequence
  ENSG00000165621_19 (sequence is synthesized)
aggtctgcggtccgggaccaactaggctgcacaggcacgctgggcgcatgtccgcctcgccggggctgccagaatcttggaatcccaatccgtgaggttcctgggtgtgctggcatcagg

SEQ ID NO: 523618 - DNA, 120 bp, Artificial Sequence
  ENSG00000165621_20 (sequence is synthesized)
agagcgagactccttctcaaaagaaaaaaaaaaaaaagaggcactgggctgtaggagagtggtgaaatttctggaccaagacaaggcggccacaaccctcctggggcaacaaccctcccg

SEQ ID NO: 523619 - DNA, 120 bp, Artificial Sequence
  ENSG00000165623_0 (sequence is synthesized)
ctcccccgccttccttcctctcgcctgggctgcctgcctcagaagtggggacccaaagggtgcaggacgcctggtctgccttgtgggtcctggacggagcccctacctctgcaaagatga

SEQ ID NO: 523620 - DNA, 120 bp, Artificial Sequence
  ENSG00000165623_1 (sequence is synthesized)
cttggagacaggccgtcctgctgtcttgcttctccgccgtggtgctcctgtctatgctgagagagggaaccagtgtatctgtgggcaccatgcagatggcgggagaagaggcgagtgaag

SEQ ID NO: 523621 - DNA, 120 bp, Artificial Sequence
  ENSG00000165623_2 (sequence is synthesized)
atgcaaaacagaagattttcatgcaggaatcagatgcctcgaatttcctcaagaggcgcggcaagcggtcccccaagtccagagatgaggtcaatgtggaaaacaggcagaagcttcggg

SEQ ID NO: 523622 - DNA, 120 bp, Artificial Sequence
  ENSG00000165623_3 (sequence is synthesized)
aacaaaggaatgaatttgagaacttcgtggaggaacaaaacgatgagcaggaagagaggagccgggaggctgtggagcagtggcgccagtggcactatgacggcctgcacccatcctatc

SEQ ID NO: 523623 - DNA, 120 bp, Artificial Sequence
  ENSG00000165623_4 (sequence is synthesized)
tctacaaccgccaccacacctgatcccatcctgaagccggccaagaagacaaagcttgtagcaccattggcatccccgtgttccagcaatctttcccatgcaaaccggcccttcagaggg

SEQ ID NO: 523624 - DNA, 120 bp, Artificial Sequence
  ENSG00000165623_5 (sequence is synthesized)
tctcagcttggggtctgcagtggccagcagctcttgaaaagacgcatgcctttccttccagtgtgtgaaagtgtcctgactttcacctctttgcagaccatcttctgaggtgagcaactg

SEQ ID NO: 523625 - DNA, 120 bp, Artificial Sequence
  ENSG00000165623_6 (sequence is synthesized)
cctgcagggcctcctagtaccaaacctacagtggcttcccctggcttcgttcccaagcaaaagaatcagtcaagaatcacatgtttgcttatggcttacaaataaaaacgctgaatcaac

SEQ ID NO: 523626 - DNA, 120 bp, Artificial Sequence
  ENSG00000165626_0 (sequence is synthesized)
atcctagcattatatctacagagcagaggcaggacctttggcaggagacacatcccttctcctgtgatgtgtcagttagtgtagagaagcaagctggcatggacttgagagccggggtga

SEQ ID NO: 523627 - DNA, 120 bp, Artificial Sequence
  ENSG00000165626_1 (sequence is synthesized)
tgtctccagcggcagcgtgtcatcctggaggacattgtgtcagcagtgaagccctgcatccctgccagtcatcctgaaggacattgtgtcagtagtgaagccctgcgtccctgccagtcc

SEQ ID NO: 523628 - DNA, 120 bp, Artificial Sequence
  ENSG00000165626_2 (sequence is synthesized)
aggctttcttccttgtccttgccccgcctggtgaagctgacagacagagatgaaagcatggaaataaaaaagcaaattacagggatgagaagattgctgaacgacagcactgggcggatc

SEQ ID NO: 523629 - DNA, 120 bp, Artificial Sequence
  ENSG00000165626_3 (sequence is synthesized)
tatcagcgagttggcaaagaaggagagaaactaaaagaagagccccaggacctggatttagtctggcctccacgtttgaactcctctgctgaggccccgcaaagcctccacccgtcttca

SEQ ID NO: 523630 - DNA, 120 bp, Artificial Sequence
  ENSG00000165626_4 (sequence is synthesized)
cgtggtgtgtggaatgagctaccgccccagagtggacagttctcagggcagtatggcacccgttctagaaccttccaaagccagccccaccctaccacgagctccaatggagaacttcca

SEQ ID NO: 523631 - DNA, 120 bp, Artificial Sequence
  ENSG00000165626_5 (sequence is synthesized)
gtggtgaattcatcagctggatcaaactgctgtacttgtaactgccagtcaacgttgcaggccattctacaagaactcaagaccatgaggaaattaatgcaaattcaagcagttggaact

SEQ ID NO: 523632 - DNA, 120 bp, Artificial Sequence
  ENSG00000165626_6 (sequence is synthesized)
caaaacagacaacaacctccaatttcccttatatgctcccagcgaactgctgtctcacgaaagagaaataaaaagaaaaaagtgcccccaaagactgtggaacctcttactgtgaaacag

SEQ ID NO: 523633 - DNA, 120 bp, Artificial Sequence
  ENSG00000165626_7 (sequence is synthesized)
aagcccagtgggtcagagatggagaaaaagtcggtggtggcctctgagctatctgctctccaggcagccgagcacacctccccggaggagagccgcgttctaggattcggcattgttctg

SEQ ID NO: 523634 - DNA, 120 bp, Artificial Sequence
  ENSG00000165626_8 (sequence is synthesized)
gaatcaccttcctcagatccagaagtacaacttgctgaaggctttgacgtgtttatgcctaaatctcagctggactctatattgtcaaactacactcgctcaggaagccttctgtttaga

SEQ ID NO: 523635 - DNA, 120 bp, Artificial Sequence
  ENSG00000165626_9 (sequence is synthesized)
acaaccggaaaggactagaccaaaatattgtgggtgcaataaaagtcttcacagaaaagtactgtacagctaaccatgtggataagcttcctggcccaagagattgggtacagattctac

SEQ ID NO: 523636 - DNA, 120 bp, Artificial Sequence
  ENSG00000165626_10 (sequence is synthesized)
aggatcaaattaaactggccagaagaaggttaaaaagaggctcagcagagatcgcggacagtgatgaaagactggacggcattgctctaccaccaacaggtgcttgtggtgggccctgca

SEQ ID NO: 523637 - DNA, 120 bp, Artificial Sequence
  ENSG00000165626_11 (sequence is synthesized)
ctgttctgccgggtgggagtgcagcggtgaccctagtcttgcagagctcacctcagacaatgtcacaagaaaagggacagatggcagaaccctgggaggagcagcatctcgtgctcctga

SEQ ID NO: 523638 - DNA, 120 bp, Artificial Sequence
  ENSG00000165626_12 (sequence is synthesized)
acaaccttaccagagacagagctgaaacaggagctttgtcccaaaccagccaagacttcaagcaccattcattcctcataactcaggtctcagctacacttcatcatcagagagggattc

SEQ ID NO: 523639 - DNA, 120 bp, Artificial Sequence
  ENSG00000165626_13 (sequence is synthesized)
gcaactttcccacgccaggctcagccaagtctcttacccttcacatctcttgcctctctctctgaaattatcttgcttatttatgtgtgtgtgtatcacccatctttccactggaatctg

SEQ ID NO: 523640 - DNA, 120 bp, Artificial Sequence
  ENSG00000165626_14 (sequence is synthesized)
agccttgtgatgtcaggctgttaagatttcaggccctggtgaaaacatgttcaggatgccctctctcccctttgcccagcaagagtggactgattaaagttggacctgaggtttccatga

SEQ ID NO: 523641 - DNA, 120 bp, Artificial Sequence
  ENSG00000165626_15 (sequence is synthesized)
atatgcaaccgagtcattctgacgacagtgagtcctggcctcccagtgctgccagttaccagaagtgactccccttctcccatcagcccaaacccagagcctttatcacagaacccaaga

SEQ ID NO: 523642 - DNA, 120 bp, Artificial Sequence
  ENSG00000165626_16 (sequence is synthesized)
ttgagaggagggtcaggctggttggacagtggccttatcatgggatggatggatcaggagccttttacagcgctctcctttccgctgtatcccattgtcttagatcacgtggacttgcct

SEQ ID NO: 523643 - DNA, 120 bp, Artificial Sequence
  ENSG00000165626_17 (sequence is synthesized)
tttcccctaataccgccccctcagtgctcttctataattggagaaattgtgtcaatagatcgaccaaagagatgcaggttgtactccatgagaatttaataaacgctagcgattcaaagc

SEQ ID NO: 523644 - DNA, 120 bp, Artificial Sequence
  ENSG00000165626_18 (sequence is synthesized)
ggacctttggcaggagacacatcccttctcctgtgatgtgtcagttagtgtagagaagcaagctggcatggacttgagagccggggagatgaaagcatggaaataaaaaagcaaattaca

SEQ ID NO: 523645 - DNA, 120 bp, Artificial Sequence
  ENSG00000165626_19 (sequence is synthesized)
aactggccagaagaaggttaaaaagaggctcagagatcgcggacagtgatgaaagactggacggcattgctctaccaccaacagtggtctgatgaaggactgcaaaccacagctcttgtg

SEQ ID NO: 523646 - DNA, 120 bp, Artificial Sequence
  ENSG00000165626_20 (sequence is synthesized)
ttttttgcaccatgggttttaaaatccgtcctctgcctcccacaaggagctactacccaagggaagggagaagattaattggtgacctttcgccgtgttaaaataggatgagtatgttgc

SEQ ID NO: 523647 - DNA, 120 bp, Artificial Sequence
  ENSG00000165626_21 (sequence is synthesized)
tggtcaaggcagaaacgctaacttccaactgtggtctgttaagagatctgctgggaaccttcagaagcactgccttccaaggcggggccacagcttggggtgttcagcacttgaggacgg

SEQ ID NO: 523648 - DNA, 120 bp, Artificial Sequence
  ENSG00000165626_22 (sequence is synthesized)
gtggagcttgttcaacccaaagatgtgtgcgatgaacggatctacacactggaaatacgtatcaaaactgcaacagcaaaatcatattttgtaaattaaaattgtgtttacttactgtga

SEQ ID NO: 523649 - DNA, 80 bp, Artificial Sequence
  ENSG00000165626_23 (sequence is synthesized)
gaaagttgggctgcggcgggcggcgtctggaacccgcgggccggcatgagcgggggccgcgggggcgcctagggcaccgg

SEQ ID NO: 523650 - DNA, 80 bp, Artificial Sequence
  ENSG00000165626_24 (sequence is synthesized)
ctcccgtcccgcggcctcccctcgccgactccaggcgcggaccttggtcccggcggctccgccgcggtgacacgagcccg

SEQ ID NO: 523651 - DNA, 120 bp, Artificial Sequence
  ENSG00000165626_25 (sequence is synthesized)
cgccgccgctgccgctgccgccgctgccgctgccgccgctgccgccgcctcctcagcccccgccgccgccttccccgcaccatggagttctccgagaggaaaagaagcaggaaatcccag

SEQ ID NO: 523652 - DNA, 120 bp, Artificial Sequence
  ENSG00000165626_26 (sequence is synthesized)
cacgaggtgtataagatcccagaattcagcaacgatgttaatggggaggccaaagagacacagcccatttttttaggagatgaaagcatggaaataaaaaagcaaattacagggatgaga

SEQ ID NO: 523653 - DNA, 120 bp, Artificial Sequence
  ENSG00000165626_27 (sequence is synthesized)
tggctttcccacggcctcacagctggttgacggcctggccggaacccaggtccctcgactcccagccatgataccatatagctttctcatacctaagccaaagccagcttttctctgcat

SEQ ID NO: 523654 - DNA, 120 bp, Artificial Sequence
  ENSG00000165626_28 (sequence is synthesized)
gtttcttaaagatcctaagagatgatggatgtgctaatccctttaggagtcctcttcactgtctcagtcttcacaattaaaatgttcgtcgtcagtcggcccggttcactgcagctgaaa

SEQ ID NO: 523655 - DNA, 120 bp, Artificial Sequence
  ENSG00000165626_29 (sequence is synthesized)
tttacattttcatcacctcctggaaaatacagcccacaaaactatttgcattgaaaacgattttaacattagacatgcagacacttgagcaaactgcttctgcagtggaccaggccccgt

SEQ ID NO: 523656 - DNA, 120 bp, Artificial Sequence
  ENSG00000165626_30 (sequence is synthesized)
cattggagcttctcaaggccccgtactcagagatgtttttcatactgaatagaaaaacgtttttctcacactcttattttcataaaaatctcagaagagcaaatcctaagaactaagtat

SEQ ID NO: 523657 - DNA, 120 bp, Artificial Sequence
  ENSG00000165626_31 (sequence is synthesized)
cataacattttgcctccccaaacctttggacattacaaaatatttttaacgtgaaatgagatttcaccttaaaacggggaccactaattttgtgtgatcaaattcatggctaggctgtcc

SEQ ID NO: 523658 - DNA, 120 bp, Artificial Sequence
  ENSG00000165626_32 (sequence is synthesized)
tctcccacctcctccaaacggccttggagccttgagcagtcaatcagtggacacccagtgaatactatgttttaactgagcgatttgaacaaggccagccatccggcgtgagtggcacat

SEQ ID NO: 523659 - DNA, 120 bp, Artificial Sequence
  ENSG00000165626_33 (sequence is synthesized)
tcctaataccaggaccagatcagctgaagatacccttccatggaagcatttgctgcacgctgttgtgttaagccatagacataattccaacttcatgttatttgactctcaagtaatgct

SEQ ID NO: 523660 - DNA, 120 bp, Artificial Sequence
  ENSG00000165626_34 (sequence is synthesized)
tctgaccctggcttcctacctgtgtatgggttcatatctgagagccagaggggcaggtgtctgatcaatgagccttgtggaaaacaatgtatcccctccattggtcacaggactctactg

SEQ ID NO: 523661 - DNA, 120 bp, Artificial Sequence
  ENSG00000165626_35 (sequence is synthesized)
acttccctccaaaggatatctgaagattctctgcccacaaaacccaggtacccccaaaaaccctcttactgaaaaggttcaaccgaatgttttttcctctagttttggggtggtctgtgt

SEQ ID NO: 523662 - DNA, 120 bp, Artificial Sequence
  ENSG00000165626_36 (sequence is synthesized)
tgattaaattcagcaaatattagtggagtctctaggttgtgtaggaacttgactaggccatgtattcattgacagcacatatcccaaaatggcaaggaaagccacattcgcaggcatagg

SEQ ID NO: 523663 - DNA, 120 bp, Artificial Sequence
  ENSG00000165626_37 (sequence is synthesized)
atgggcctgtgctagtgaacttcagagcttcagagcaacaggaaaattcagccgtgtaagagacacattgctttctctgccactgagtagctaagcaacagatcaatggacagataaatc

SEQ ID NO: 523664 - DNA, 120 bp, Artificial Sequence
  ENSG00000165626_38 (sequence is synthesized)
aaatgagctacatagtgcaaaaagacctgcctacatcaagttcttcccatacagagtcattatataaaagagatttctgttcttctttggctgtgttttcacatttgtgaattaagagaa

SEQ ID NO: 523665 - DNA, 120 bp, Artificial Sequence
  ENSG00000165626_39 (sequence is synthesized)
ttgaaatacgtgatctctgttgttccttcccaatttgtcattctctgaatatcagggcacgcatatcagcctcattcttatcacctgggcccaatcccagccgatccatgaaatcctaat

SEQ ID NO: 523666 - DNA, 120 bp, Artificial Sequence
  ENSG00000165626_40 (sequence is synthesized)
cgtaatagacctagccttcagaaggcccttcaggggagcaccatgcctttctagctgtgcttcccaagtgccctcccaccctggccatctgcactgcctgtcctcctgtgtcatgtgaca

SEQ ID NO: 523667 - DNA, 120 bp, Artificial Sequence
  ENSG00000165626_41 (sequence is synthesized)
cagtgagcttttattatttgaaagccactccccttgaagtttatattcacccccaagtggtgagtacggaatgcctttgtattttcctatctgaagttggagatacgtttccagtgagaa

SEQ ID NO: 523668 - DNA, 120 bp, Artificial Sequence
  ENSG00000165626_42 (sequence is synthesized)
aactgaggtcagagggtgctagaagagcctcatggaactgaaaaaaatgtcaaggaatctgagaatgagaaggaacttgagagatcctctagtccaatcccttctttttatccagtcctt

SEQ ID NO: 523669 - DNA, 120 bp, Artificial Sequence
  ENSG00000165626_43 (sequence is synthesized)
ttgcagatcttttcattaaactattgatagatatttgatacaaatcactaagcagcatgataaataaaaacgtttatcatttagaaaagaggaaaagaggccgggcgcggtggctcacac

SEQ ID NO: 523670 - DNA, 120 bp, Artificial Sequence
  ENSG00000165626_44 (sequence is synthesized)
gcgagactccgtctcaaaaaaaagaaggaaaagaagtctcagattgatgctcaaattttgcagtaataatattaagtaatcttgatattcacctggatagcatgtctcttgattgcctcc

SEQ ID NO: 523671 - DNA, 120 bp, Artificial Sequence
  ENSG00000165626_45 (sequence is synthesized)
ctccaaagtaaaatccccattctggttggcttctttgaatgcagtgctgctcctaacacccctcctcacatgtgccctttaaggactccacctttctcgcacatgtggtttcatccttga

SEQ ID NO: 523672 - DNA, 120 bp, Artificial Sequence
  ENSG00000165626_46 (sequence is synthesized)
gcttgagcctcactggtcagaaccacaggatcgaccaagggctctgatacagactctcattatcccatttatctgagctagcaacagttagttctttttaaagattcaacaatgctttta

SEQ ID NO: 523673 - DNA, 120 bp, Artificial Sequence
  ENSG00000165626_47 (sequence is synthesized)
ttacttttttaaggtcttttttcctccttccaaagttgtgtatttgggggaagggcagggaaagggatgtaaatgcttaagtgtttctatgaaccagaagtgactagggtagggttacag

SEQ ID NO: 523674 - DNA, 120 bp, Artificial Sequence
  ENSG00000165626_48 (sequence is synthesized)
cttctgttcatcaggctttagcagaaatggattcaccttctgtagtgcatctattttagtttcccttaaccctattcactaagcctttttgagcaactaccaagaatcagccccgtgttg

SEQ ID NO: 523675 - DNA, 120 bp, Artificial Sequence
  ENSG00000165626_49 (sequence is synthesized)
ggtgctggtgtacaaatgccctcagactagtgtgagaggcagaaggaattacataaatgctatagcacagatgtgtggagagggtctggggctcaagaaaagccacccaggagctgggga

SEQ ID NO: 523676 - DNA, 120 bp, Artificial Sequence
  ENSG00000165626_50 (sequence is synthesized)
caatttgcattaaaaaaaaaagtatagagaaagtgaaatcaaaacagtgctttctaaaatttaaaatggggcttccaaatttgaaatggggatgttcatctagacttagcaattgtcata

SEQ ID NO: 523677 - DNA, 120 bp, Artificial Sequence
  ENSG00000165626_51 (sequence is synthesized)
aattggcattttacatacttttaaaaaattaataaaagtgtaaggaagaacatttcaattgcttttaccacccacagacaaccattattggatgatttttctcaaatgtttctccatttt

SEQ ID NO: 523678 - DNA, 120 bp, Artificial Sequence
  ENSG00000165626_52 (sequence is synthesized)
atttatttatacagtggagatcaaatatgtaaaattttgtttcctacatgtttttttgatttttacctaacaagcatttttccactctatggcaaatcttcatatgcattattttaatag

SEQ ID NO: 523679 - DNA, 120 bp, Artificial Sequence
  ENSG00000165626_53 (sequence is synthesized)
ctgcataatattctgttttgcaggtaaattatcttttaggccattttccatgactggacaatatgtggatatactctaatagtaacacacattcgtggcctttctcataaaaaatcatta

SEQ ID NO: 523680 - DNA, 120 bp, Artificial Sequence
  ENSG00000165626_54 (sequence is synthesized)
caaatttccaatttctacaattgctcatggaggacaactaaagccttggctaaaaacttagcgacttaagtgtgaaacacagacacctccccagtaaattgtttacttgtccagaacgcc

SEQ ID NO: 523681 - DNA, 120 bp, Artificial Sequence
  ENSG00000165626_55 (sequence is synthesized)
cacctccagccatgtcacagaaccatgtacaactcttccttagagaagcggctctccgccttcattttcttgtctctgttgtaggtaatatatttgacaccaggagagaaaacacggagg

SEQ ID NO: 523682 - DNA, 120 bp, Artificial Sequence
  ENSG00000165626_56 (sequence is synthesized)
acacagaaccaggtttcattgcctagactttgattttagtgacattgttgagtggcatatgtaacttccgtttgaatttccacaaagatccacgtagcatttcaggttcctgcaaagtgt

SEQ ID NO: 523683 - DNA, 120 bp, Artificial Sequence
  ENSG00000165626_57 (sequence is synthesized)
gggtgttctgtcaagcttacctgtcatgtttgaatagtttcatatactttctttgtaatgtgtgataaccaagcctccaatctggtataagattttttaaatcatttttagggttgattt

SEQ ID NO: 523684 - DNA, 120 bp, Artificial Sequence
  ENSG00000165626_58 (sequence is synthesized)
gttaccctttaaaagtccagcatatgattcagtgagttcattgtccattataaagaagtggttctctcttccctgttttcattcaaaacctcagtatgaatatagagctttgaaacgtat

SEQ ID NO: 523685 - DNA, 120 bp, Artificial Sequence
  ENSG00000165626_59 (sequence is synthesized)
ttattttaatgtaaattgcttagatgcagtataaaggagaatggctctttccagtgctgagagagcagttgtgaaggccaagattaattagaccttcatcatcttagaagatgaaaaagt

SEQ ID NO: 523686 - DNA, 120 bp, Artificial Sequence
  ENSG00000165626_60 (sequence is synthesized)
tgttttgggagataggatagctctgacctgtaagatgaaatcattcatgacgtcagtgccccccaaatagccatttgtaactgagtaagtgcaaatgacctatgagttcttaggaaagaa

SEQ ID NO: 523687 - DNA, 120 bp, Artificial Sequence
  ENSG00000165626_61 (sequence is synthesized)
aaacctttcacctaagttgcgtcaacacaatgacaaaataactaattaaaaggtgagaaaaccagtaaattatctacatgatacctgacagccattttaacagatggtcttaacggagtg

SEQ ID NO: 523688 - DNA, 120 bp, Artificial Sequence
  ENSG00000165626_62 (sequence is synthesized)
ctacagggttttggcaccatgtggtaactagctaaaaatgtacttaatattatgtcatttatttggttcctagtatacttgccctccactttatataaaactaatttatgaaaatctgga

SEQ ID NO: 523689 - DNA, 120 bp, Artificial Sequence
  ENSG00000165626_63 (sequence is synthesized)
tttattttaaaaagatatcttgccatgaaggtatttgttttatagaaatatttacctccagatttctttctctaataagatggtgaatttaaaacactgtgttatttagaaacactgcat

SEQ ID NO: 523690 - DNA, 120 bp, Artificial Sequence
  ENSG00000165626_64 (sequence is synthesized)
ttacacttcatttattgtataaagcaaattgcattgaatcttcgccacttgacccaaaggccaaaaattggcatgagaacaatttggactacacatcaccaaacccggggttcacacctg

SEQ ID NO: 523691 - DNA, 120 bp, Artificial Sequence
  ENSG00000165626_65 (sequence is synthesized)
tccactagcagttccagtgccttcccctagccctggatttggcaaagcacagaatgttaagagctaaaagttattgtagaggctactcagtcccacccgggaaactgaggatgaatgagg

SEQ ID NO: 523692 - DNA, 120 bp, Artificial Sequence
  ENSG00000165626_66 (sequence is synthesized)
gtaagcggttgcccagagcccgttaacccctccgtggctggggccctgcctagaacccgaatttcctgactaccctgtccaaggtattcatgtcacatcacactgaaacgctaaacctag

SEQ ID NO: 523693 - DNA, 120 bp, Artificial Sequence
  ENSG00000165626_67 (sequence is synthesized)
agataggagaggccctctgggataaatccctgttccaccaaagaccagccagtcatcaaagatgagagaaggcatccctgtactgtaacaaaaagctggctttaggcgtggcttgtagaa

SEQ ID NO: 523694 - DNA, 120 bp, Artificial Sequence
  ENSG00000165626_68 (sequence is synthesized)
tcaatctaactactagacaagttacatctcatatatgtgtggcttctttttcttcttttggggggctacaaggaaggtttggagaaattatttccatcatacctttttgttagccttttt

SEQ ID NO: 523695 - DNA, 120 bp, Artificial Sequence
  ENSG00000165626_69 (sequence is synthesized)
tcagtctttattcagaaacctttttataggctttcttagcaaaaaaaaaatccatatctatggataatgtctcaatcttctgtatatatgttttattaatatgtaaatatttagattttt

SEQ ID NO: 523696 - DNA, 120 bp, Artificial Sequence
  ENSG00000165626_70 (sequence is synthesized)
aaaaagaattcaatgcaagcctggttgtgaaaatggtgtataacattgtgttgtggtatcaattcccaagatgctctttatgtctgatctggaagaatacaataaattactttaattgaa

SEQ ID NO: 523697 - DNA, 120 bp, Artificial Sequence
  ENSG00000165626_71 (sequence is synthesized)
ttgtttcttcatctcctgccattctcaggaggacaggagagggcccggctcatcactcgacacatctgcggcttggctccccttaggtcaagggtgcatcatcttgcagccaagctgtgg

SEQ ID NO: 523698 - DNA, 120 bp, Artificial Sequence
  ENSG00000165626_72 (sequence is synthesized)
cttagagggcactgggacaaagcagtcctgcccatttgggcagcaggggcgagaagtgggcagtttcctgtgaacatcctgatctttctccacgttcacagtcaaccttctgtttggttg

SEQ ID NO: 523699 - DNA, 120 bp, Artificial Sequence
  ENSG00000165626_73 (sequence is synthesized)
gtcccccatttctagccccttgaccccaacaagtaaagtactgggtcatgacatcaaatgttccagatacagaaagagaatccttcacctctgcattgcatattacttagttgtcattct

SEQ ID NO: 523700 - DNA, 120 bp, Artificial Sequence
  ENSG00000165626_74 (sequence is synthesized)
agttgatgtatcaaccaagtattgtgtgtagggttgggtttaggtctgaattttttctgagtggtctgctaaaatcagatttctgagcctgcatgctgagaacccattccaagactagaa

SEQ ID NO: 523701 - DNA, 120 bp, Artificial Sequence
  ENSG00000165626_75 (sequence is synthesized)
caattgcaccaagatgtggaggaccatcaggccctgcctgaacaaccagccttgattctagctctttcccaccctctcgtagtgttttacatgccacagtcttcacagaaaagtactgta

SEQ ID NO: 523702 - DNA, 120 bp, Artificial Sequence
  ENSG00000165626_76 (sequence is synthesized)
ttttgtaacctcaaatgcgtgaaattgattatccccccgaaagtaatatatacagatatgtgtgtatataaatatttatttctattttgttattggtgaaattaaaaagaatgtttaaat

SEQ ID NO: 523703 - DNA, 120 bp, Artificial Sequence
  ENSG00000165626_77 (sequence is synthesized)
cagcaacgatgttaatggggaggccaaagagacacagcccatttttttagaagacaccgaaaaggagaactcacatatgaaagccagtgacatgttggaaaccaaaattggaaaatcaca

SEQ ID NO: 523704 - DNA, 90 bp, Artificial Sequence
  ENSG00000165626_78 (sequence is synthesized)
aagccagtgacatgttggaaaccaaaattggaaaatcacatttgttctgcttgttccttattctgctctaacacagagacaggctctcgt

SEQ ID NO: 523705 - DNA, 120 bp, Artificial Sequence
  ENSG00000165629_0 (sequence is synthesized)
ctgaccgaccttcagcagggctgtggctaccatgttctctcgcgcgggtgtcgctgggctgtcggcctggaccttgcagccgcaatggattcaagttcgaaatatggcaactttgaaaga

SEQ ID NO: 523706 - DNA, 120 bp, Artificial Sequence
  ENSG00000165629_1 (sequence is synthesized)
tatcaccaggagactaaagtccatcaaaaacatccagaaaattaccaagtctatgaaaatggtagcggcagcaaaatatgcccgagctgagagagagctgaaaccagctcgaatatatgg

SEQ ID NO: 523707 - DNA, 120 bp, Artificial Sequence
  ENSG00000165629_2 (sequence is synthesized)
attgggatctttagctctgtatgaaaaagctgatatcaaggggcctgaagacaagaagaaacacctccttattggtgtgtcctcagatcgaggactgtgtggtgctattcattcctccat

SEQ ID NO: 523708 - DNA, 120 bp, Artificial Sequence
  ENSG00000165629_3 (sequence is synthesized)
tgctaaacagatgaaaagcgaggttgctacactaacagcagctgggaaagaagttatgcttgttggaattggtgacaaaatcagaggcatactttataggactcattctgaccagtttct

SEQ ID NO: 523709 - DNA, 120 bp, Artificial Sequence
  ENSG00000165629_4 (sequence is synthesized)
ttcaggtctgtcatctcctataagacagaagaaaagcccatcttttcccttaataccgttgcaagtgctgacagcatgagtatctatgacgatattgatgctgacgtgctgcaaaattac

SEQ ID NO: 523710 - DNA, 120 bp, Artificial Sequence
  ENSG00000165629_5 (sequence is synthesized)
caagaatacaatctggccaacatcatctactactctctgaaggagtccaccactagtgagcagagtgccaggatgacagccatggacaatgccagcaagaatgcttctgagatgattgac

SEQ ID NO: 523711 - DNA, 120 bp, Artificial Sequence
  ENSG00000165629_6 (sequence is synthesized)
aaattgacattgacattcaaccgtacccgccaagctgtcatcacaaaagagttgattgaaattatctctggtgctgcagctctgtaaagaaggaaaattcagccagttgattttgttttt

SEQ ID NO: 523712 - DNA, 120 bp, Artificial Sequence
  ENSG00000165629_7 (sequence is synthesized)
agcttactgctgcctttgtccgaagaaactgttcctccattatttgaattactgaagacagcaagatatttgtaaattatcttaaaataaacaacttaaaataaaatcattgtttttctt

SEQ ID NO: 523713 - DNA, 120 bp, Artificial Sequence
  ENSG00000165629_8 (sequence is synthesized)
ataggtaatttaaatatatattgtttattttcataaagatgtaagcacgaataaatcttctctcaaaagttttgacaaactctcaaaaccttcatcaataacaaggtatattcttcaggg

SEQ ID NO: 523714 - DNA, 120 bp, Artificial Sequence
  ENSG00000165629_9 (sequence is synthesized)
ccttttttggtatattcacaagggggtgtttgtttcctttttcttttttccaggatatattggaacatttctgttttccttcccctgttttctacctttgcttcttcatccggatcataa

SEQ ID NO: 523715 - DNA, 120 bp, Artificial Sequence
  ENSG00000165629_10 (sequence is synthesized)
gttgaatgccatgtgaatatcaaaagctatcagcattaagccaaatgaggcatctgaggagctgttacagcctggaaatgttagcaatagttcattaggattagaaggagaggaataaag

SEQ ID NO: 523716 - DNA, 120 bp, Artificial Sequence
  ENSG00000165629_11 (sequence is synthesized)
gttctgttgtttgtagaatgatcatgatataactagaaaaaattataccagtgttggtgtaggtgggtgtatgtgtgggaaggggtaaatcatgttatatataaataatgttatggaata

SEQ ID NO: 523717 - DNA, 120 bp, Artificial Sequence
  ENSG00000165629_12 (sequence is synthesized)
tgtggttaaggcaactttcaataccatttaatgttttaaatgtatattattgtcttatgttgccatttgcttgtcctaagtagtagctagttttgccttccttttattagtactatttct

SEQ ID NO: 523718 - DNA, 120 bp, Artificial Sequence
  ENSG00000165629_13 (sequence is synthesized)
gaaaagcccatcttttcccttaataccgttgcaagtgctgattgatacattcagatttcttcagtaatcaaatgactaagttggaattactgcacagacagcatgagtatctatgacgat

SEQ ID NO: 523719 - DNA, 120 bp, Artificial Sequence
  ENSG00000165630_0 (sequence is synthesized)
agttgttctcaggtgtttgggcttgttgttccgtatactcagtgggttcgcggccgccggcccagtgaggctgggttcgaggagctggagcgggaaactggagcttaaattctggcggcg

SEQ ID NO: 523720 - DNA, 120 bp, Artificial Sequence
  ENSG00000165630_1 (sequence is synthesized)
agatggacattctgaaatcagagatccttcggaagcggcagctggtggaggacaggaacctgctggtggaaaataaaaaatatttcaagcgtagtgagctcgccaaaaaagaagaggaag

SEQ ID NO: 523721 - DNA, 120 bp, Artificial Sequence
  ENSG00000165630_2 (sequence is synthesized)
catattttgaaagatgtggctacaagatacagccaaaagaggaggaccagaaaccattaacttcatcgaatccagtgttagaacttgaactggcagaggaaaaattacctatgacgcttt

SEQ ID NO: 523722 - DNA, 120 bp, Artificial Sequence
  ENSG00000165630_3 (sequence is synthesized)
ctaggcaagaggtcatcagaagattgagagaaagaggagaaccaatcagactatttggagagactgattatgatgcttttcaacgtttaaggaaaatagagatcctcacaccagaagtta

SEQ ID NO: 523723 - DNA, 120 bp, Artificial Sequence
  ENSG00000165630_4 (sequence is synthesized)
acaagggattgaggaatgatttgaaagcagccttggataagattgatcagcagtacctcaatgaaatcgtcggcggtcaggagcctggagaggaagacacacagaatgatctgaaagttc

SEQ ID NO: 523724 - DNA, 120 bp, Artificial Sequence
  ENSG00000165630_5 (sequence is synthesized)
atgaggaaaacaccacaattgaagagttagaggcgcttggagagtccttagggaaaggcgatgatcataaagacatggacatcatcaccaaattcctgaagtttcttcttggcgtttggg

SEQ ID NO: 523725 - DNA, 120 bp, Artificial Sequence
  ENSG00000165630_6 (sequence is synthesized)
ctacggaaaaggaatcttcctgctgatattaaagaatcaataacggatattattaaattcatgttgcagagagaatacgtgaaggcaaatgatgcttatcttcagatggccattggaaat

SEQ ID NO: 523726 - DNA, 120 bp, Artificial Sequence
  ENSG00000165630_7 (sequence is synthesized)
gcgccttggcccatcggtgtcactatggttggtatccatgccagaactggcagagaaaagattttttccaagcatgttgcacatgttttaaatgacgaaactcagcggaaatatattcag

SEQ ID NO: 523727 - DNA, 120 bp, Artificial Sequence
  ENSG00000165630_8 (sequence is synthesized)
ggattgaagaggttaatgaccatttgccagaaacactttcctacagacccatccaaatgtgtggagtacaatgcactgtgagatctgtgtatggtgtgttaataacaataagaaacttag

SEQ ID NO: 523728 - DNA, 120 bp, Artificial Sequence
  ENSG00000165630_9 (sequence is synthesized)
ggaagcaggctgtggacttctggaattaccaacaggaatgaggaaagaagaaaactggagtttccagtctctgagttctacctgatgtaactcttgattggttttaagaactttgttggc

SEQ ID NO: 523729 - DNA, 120 bp, Artificial Sequence
  ENSG00000165630_10 (sequence is synthesized)
cttcatttcatatctgactgcaagctgatttttctttcttgctttcattttaattagtccaaaattaagttttaaagatttttcctcacaatttaaatccatagacaacagaagggggtt

SEQ ID NO: 523730 - DNA, 120 bp, Artificial Sequence
  ENSG00000165630_11 (sequence is synthesized)
taaaatgacctttttttcagttgacccgaaagttgtggttagatgattaaaaagaaacatttgaggatggacttaattatttcagtaaaatattataatttgcctattgtcttttatgta

SEQ ID NO: 523731 - DNA, 120 bp, Artificial Sequence
  ENSG00000165630_12 (sequence is synthesized)
atatttatataaaatatttttatatatttcaaaaacatgggaccattgaatgaaactttatagtccttaaatgttgctgaacttttgctgtcttgcaatagaatttgaatgtaaatatta

SEQ ID NO: 523732 - DNA, 120 bp, Artificial Sequence
  ENSG00000165630_13 (sequence is synthesized)
cagtcacaagtaacaagccactagccaggtgcttcaggaagaccgccctcttgcctctgtggaatccagtgaggatgatcagaacgttccccggggaaaataaaaaatatttcaagcgta

SEQ ID NO: 523733 - DNA, 120 bp, Artificial Sequence
  ENSG00000165632_0 (sequence is synthesized)
agcgggaggcggagcgagtccaaaatggcggctctcaggctggcgcgctccgtgctgctggggctttgaggtggtcgccgggggtccgggggaccctttccccgccgcggaagccctaga

SEQ ID NO: 523734 - DNA, 120 bp, Artificial Sequence
  ENSG00000165632_1 (sequence is synthesized)
ggatgaatcggggaccctgctaaggtctggcggcggggctggagagcagtggcagcaagggctgcggtggcgtccacgcagcgggatgtgcgagagttactccaggtcgttgttgagggt

SEQ ID NO: 523735 - DNA, 120 bp, Artificial Sequence
  ENSG00000165632_2 (sequence is synthesized)
ctcggtggcgcagatctgccaggcgctgggctgggactcggtgcagctcagcgcctgccacctcctcacggacgtgctgcagcgctatctgcagcagctgggccggggctgccatcggta

SEQ ID NO: 523736 - DNA, 120 bp, Artificial Sequence
  ENSG00000165632_3 (sequence is synthesized)
ctctgagctctatggccgaacagacccaattttggatgatgttggtgaagctttccagctgatgggggttagtctacatgaactagaagactatattcacaacattgagcctgtcacctt

SEQ ID NO: 523737 - DNA, 120 bp, Artificial Sequence
  ENSG00000165632_4 (sequence is synthesized)
cccacaccaaattccgtcatttcctgttagcaagaacaatgtacttcagtttcctcaacctggaagtaaagatgcagaggaaagaaaagaatacattcctgattacctgccacccattgt

SEQ ID NO: 523738 - DNA, 120 bp, Artificial Sequence
  ENSG00000165632_5 (sequence is synthesized)
gtcttctcaagaagaagaagaagaagagcaggtgcccactgatggaggcacatcagcagaagccatgcaggttcccttggaagaagatgatgaattggaggaggaagaaattattaatga

SEQ ID NO: 523739 - DNA, 120 bp, Artificial Sequence
  ENSG00000165632_6 (sequence is synthesized)
tgagaatttcctgggcaagagaccactggatagtcctgaagctgaagaactgccagccatgaagcggcctcggctattaagcactaaaggggacacgctagatgttgtgttattggaagc

SEQ ID NO: 523740 - DNA, 120 bp, Artificial Sequence
  ENSG00000165632_7 (sequence is synthesized)
tcgagagccactcagctcaataaatactcaaaagatcccaccaatgctttctccagtccatgtacaggacagtacagacttggcacctccctcacccgagccgccaatgttggctccagt

SEQ ID NO: 523741 - DNA, 120 bp, Artificial Sequence
  ENSG00000165632_8 (sequence is synthesized)
tgcaaaatcacaaatgccaactgcaaaaccattagaaacaaagtcatttacacctaaaacaaagactaaaactagctctccaggacagaagactaaatcacctaaaaccgcccagtcacc

SEQ ID NO: 523742 - DNA, 120 bp, Artificial Sequence
  ENSG00000165632_9 (sequence is synthesized)
agcaatggtcggaagtcctattcgatcaccaaaaactgtatccaaagaaaagaaatcacctggacgttccaagagccccaagagtcccaagagccccaaggtcacgactcacattcccca

SEQ ID NO: 523743 - DNA, 120 bp, Artificial Sequence
  ENSG00000165632_10 (sequence is synthesized)
aacacctgtgagacctgaaacgcccaacaggactccttcagctacactcagtgaaaaaatcagtaaagagactatccaggtaaaacaaatacagacaccccctgatgctgggaaactgaa

SEQ ID NO: 523744 - DNA, 120 bp, Artificial Sequence
  ENSG00000165632_11 (sequence is synthesized)
cagtgagaatcagccgaaaaaggctgtggtagcagataaaacgattgaggcctctatcgatgctgtgattgcacgagcctgtgctgagcgagagccagatcctttcgaattttcttctgg

SEQ ID NO: 523745 - DNA, 120 bp, Artificial Sequence
  ENSG00000165632_12 (sequence is synthesized)
atcggaatctgaaggagacatttttactagccctaagagaatttcaggcccggagtgtactactcccaaagcttccacttccgcgaacaatttcacaaagtcaggatccactcctctgcc

SEQ ID NO: 523746 - DNA, 120 bp, Artificial Sequence
  ENSG00000165632_13 (sequence is synthesized)
tctttccggtggaacctcaagttccgataactcatggacaatggatgcctccattgatgaggttgtacgtaaagcaaaactgggaacaccttcaaatatgccccccaactttccttatat

SEQ ID NO: 523747 - DNA, 120 bp, Artificial Sequence
  ENSG00000165632_14 (sequence is synthesized)
ctcttctccgtcagtgtctcctcccactcccgaacctctccacaaggtgtatgaggagaaaaccaagctgccttcctccgtggaggtaaagaagaagttgaaaaaggaactaaagactaa

SEQ ID NO: 523748 - DNA, 120 bp, Artificial Sequence
  ENSG00000165632_15 (sequence is synthesized)
aatgaaaaagaaagaaaagcagagagatagggagagggaaaaagacaagaacaaggacaaaagtaaggagaaggataaagtgaaagagaaagagaaagacaaggaaactggcagggaaac

SEQ ID NO: 523749 - DNA, 120 bp, Artificial Sequence
  ENSG00000165632_16 (sequence is synthesized)
aaagtatccctggaaggaatttcttaaagaggaagaggcagatccctacaagtttaaaatcaaagaatttgaagatgttgatcccaaagtgaaattgaaagatggacttgtgaggaagga

SEQ ID NO: 523750 - DNA, 120 bp, Artificial Sequence
  ENSG00000165632_17 (sequence is synthesized)
gaaagagaagcataaagataagaagaaagatagagagaaaggcaagaaagataaagataagagagagaaagaaaaagtgaaagataaaggcagagaagataagatgaaagccccagcacc

SEQ ID NO: 523751 - DNA, 120 bp, Artificial Sequence
  ENSG00000165632_18 (sequence is synthesized)
cccactggtgttgcccccaaaagagttggccctgcccttgttcagccctgccacagcctccagggtcccagccatgctgccatctttgttgccagtgcttccggaaaaactgtttgagga

SEQ ID NO: 523752 - DNA, 120 bp, Artificial Sequence
  ENSG00000165632_19 (sequence is synthesized)
gaaagagaaggtgaaggagaaagaaaagaaaaaggacaaaaaggagaagaagaaaaagaaggaaaaagagaaggagaagaaggagaaggaaagagagaaagagaagagagagcgagagaa

SEQ ID NO: 523753 - DNA, 120 bp, Artificial Sequence
  ENSG00000165632_20 (sequence is synthesized)
tatccccagattaactctccgagtcggtgctggccaagacaagattgtcatcagcaaggtggtccctgcccccgaggccaagccggcgccctcgcagaacaggccgaagaccccaccgcc

SEQ ID NO: 523754 - DNA, 80 bp, Artificial Sequence
  ENSG00000165632_21 (sequence is synthesized)
cgcagaacaggccgaagaccccaccgccggcccccgcgcccgcccccggccccatgctcgtcagccctgcgcccgtgccg

SEQ ID NO: 523755 - DNA, 120 bp, Artificial Sequence
  ENSG00000165632_22 (sequence is synthesized)
ggccagtgccaaagcccccgtgcgcagcgtggtgactgagacggtcagcacctacgtgatccgagatgagtggggcaatcagatctggatctgccctgggtgtaacaagcctgacgatgg

SEQ ID NO: 523756 - DNA, 120 bp, Artificial Sequence
  ENSG00000165632_23 (sequence is synthesized)
gagtcccatgattgggtgtgacgactgcgatgactggtaccactggccctgtgttggaatcatgactgcacccccagaagagatgcagtggttctgccccaagtgtgcgaacaagaagaa

SEQ ID NO: 523757 - DNA, 120 bp, Artificial Sequence
  ENSG00000165632_24 (sequence is synthesized)
ggacaaaaagcacaagaagaggaagcatcgagcccactgacgactcccgaggggctggaccaagcggggtcagcccgggcttcttccctggcgcctctggaagggagctggtgcaagtct

SEQ ID NO: 523758 - DNA, 120 bp, Artificial Sequence
  ENSG00000165632_25 (sequence is synthesized)
gccgtcacatccacccccagatgcctgtggataaagaacccaggaggactgaggctggaacacaccgcgcacctggattgttcactcccgagccgccttggcctgtggctccgtggcagt

SEQ ID NO: 523759 - DNA, 120 bp, Artificial Sequence
  ENSG00000165632_26 (sequence is synthesized)
gcgacagaaggaaactcaagcagaggcgtggcctgggggctgcccctcctccacttctctaataccagtgacaagtattattaataaagagcgtacatcttcccttttgatttcctttat

SEQ ID NO: 523760 - DNA, 120 bp, Artificial Sequence
  ENSG00000165632_27 (sequence is synthesized)
tctctccagggccttttcattgaggtattagatgagaagataatgtacaaactgcctcaactgtaatttaaggatgatagagtctgtatacagttttcagcccctttccctctatagtaa

SEQ ID NO: 523761 - DNA, 120 bp, Artificial Sequence
  ENSG00000165632_28 (sequence is synthesized)
gataatcagaataacataaaagaaaactccagttggagtaccggtaaatatttttgtgataagaatatatgaagcttccctccttcccccgtttttagtactaacatgtaaaatgttcag

SEQ ID NO: 523762 - DNA, 120 bp, Artificial Sequence
  ENSG00000165632_29 (sequence is synthesized)
gcttttgtgaaataccttatattttttaagaaaaaggtttctatcatgtcctgtttgcttttgtgcaaattatttttgtttaatgtattttatatcttcgttgcattctaattttgccct

SEQ ID NO: 523763 - DNA, 120 bp, Artificial Sequence
  ENSG00000165632_30 (sequence is synthesized)
tctttaaactgctggagtctcttctcactgcttgtacatttcatcaacttgtataaaaactcttcagactaaaagattgcccctaatgtaaataataaatatttatgaagtagttatttt

SEQ ID NO: 523764 - DNA, 120 bp, Artificial Sequence
  ENSG00000165632_31 (sequence is synthesized)
ttaaatttttatcgtgtttaattctggctttctctgaaatccactgtgatttcagccaggtctgtaatgacgctggacagaaacaaggctagagaaaaagccatcgttcaaagaaatttc

SEQ ID NO: 523765 - DNA, 120 bp, Artificial Sequence
  ENSG00000165632_32 (sequence is synthesized)
ccttgagctcagcctgcgcagtgcccggaaacatggtggggaaagggcccgagcagttggaaggaaaacaaggcaatttaaatttagagtttatgacttgaagttgttttgtttgttgtc

SEQ ID NO: 523766 - DNA, 120 bp, Artificial Sequence
  ENSG00000165632_33 (sequence is synthesized)
tattttgtttttgtaaatttctttgacagacttttactaaaaggacatgtagtttccatgaaagtaaaaaaaaaaaacaacaaaaaacccacatatactgtagcattttgtctttatatt

SEQ ID NO: 523767 - DNA, 120 bp, Artificial Sequence
  ENSG00000165632_34 (sequence is synthesized)
gttttatttctacaaatctgttcattaatattgtgctttaaggctgaaatgaagtatattatgaatttttttaagaaaactcatcaaatttcagggtatcacaaaactttattatattat

SEQ ID NO: 523768 - DNA, 120 bp, Artificial Sequence
  ENSG00000165632_35 (sequence is synthesized)
tatactgcccactatttattatatgttatagatgtctgagaggtaaaccaaatattttatttttaatgttaaaaaaacatcaaatttaactttattagcatattttagcaactttgggat

SEQ ID NO: 523769 - DNA, 120 bp, Artificial Sequence
  ENSG00000165632_36 (sequence is synthesized)
aaatacggacttttacttgattttgaaataatcccagtgtaggcccatgtgctggatctgttggatgctagaatatgggctttgaacctaatacaaatatattactagaaaatgtgattt

SEQ ID NO: 523770 - DNA, 120 bp, Artificial Sequence
  ENSG00000165632_37 (sequence is synthesized)
ttttaaatgccaagtaaattgatattagtgtatgaattagtcatattttaaaacattatgtggttagagaaatgcggttttctgccatgaatgttaagttgcaaatcagtggaaatggag

SEQ ID NO: 523771 - DNA, 120 bp, Artificial Sequence
  ENSG00000165632_38 (sequence is synthesized)
tcgacctcttcggagcacagggtgtcattgccctcgttgttcaagaggccagaatttttctatccccgctaagaaacaaagcatctatgttgagatatgtgtttttttgtttgattaatt

SEQ ID NO: 523772 - DNA, 120 bp, Artificial Sequence
  ENSG00000165632_39 (sequence is synthesized)
tgagatcattctaaatactttatacaatattttcacatgcacaaaaatgcgcgttagtggtttttggagaggggtgaggggtgggggaagtgcaaaataaagattattggctatttcata

SEQ ID NO: 523773 - DNA, 120 bp, Artificial Sequence
  ENSG00000165633_0 (sequence is synthesized)
gggcggcggcggggagatgcggctgctggcactggcggcggccgcgctgctggcgcgggctccggctccggaggtctgtgcggccctcaatgtcactgtgtccccggggcccgtggttga

SEQ ID NO: 523774 - DNA, 120 bp, Artificial Sequence
  ENSG00000165633_1 (sequence is synthesized)
gtggttgactacctggagggggagaatgccactctcctctgccacgtctcccagaaaaggcggaaggacagcttgctggccgtgcgctggttctttgcacactccttcgactcccaggag

SEQ ID NO: 523775 - DNA, 120 bp, Artificial Sequence
  ENSG00000165633_2 (sequence is synthesized)
gccttgatggtgaagatgaccaagctccgggtggtgcagtactatgggaatttcagccgcagcgccaaacggcggaggctgcgcctgctggaggagcagcggggggcgctctacaggctc

SEQ ID NO: 523776 - DNA, 120 bp, Artificial Sequence
  ENSG00000165633_3 (sequence is synthesized)
tccgtcttgacactgcagccctccgatcaagggcattacgtctgcagagtccaggaaatcagcaggcacaggaacaagtggacggcctggtccaatggctcctcagccacggaaatgaga

SEQ ID NO: 523777 - DNA, 120 bp, Artificial Sequence
  ENSG00000165633_4 (sequence is synthesized)
ggagtctccagccatccagtggagaggggagcttttcttgggatttcccttgtaatactacctcactctttgcccttcaccgcagacttaaccatggcctccttcctgcagagttcttga

SEQ ID NO: 523778 - DNA, 120 bp, Artificial Sequence
  ENSG00000165633_5 (sequence is synthesized)
tgtgagataaaattgcttgtctttcactggaaactcccagaaagaaaggctggtgcctggtctctcctcatttccctgtcatgaacacctcgcccagcacatggagggtgacttgcgatg

SEQ ID NO: 523779 - DNA, 120 bp, Artificial Sequence
  ENSG00000165633_6 (sequence is synthesized)
atatatttaaaaaataactcccagttctgagaagagccataggagtgttggctcttattatctgtcctgatttccatatgttggttgttttctattgcaaaagtaatatagtgtaatata

SEQ ID NO: 523780 - DNA, 120 bp, Artificial Sequence
  ENSG00000165633_7 (sequence is synthesized)
gttcaattatagaaaacatggaaaaatactgaaagggtttaaagaagaaaataaaaatgacttaccatatctctactcaacttaacatttcagtgcaaatccttcctgtcattttatgca

SEQ ID NO: 523781 - DNA, 120 bp, Artificial Sequence
  ENSG00000165633_8 (sequence is synthesized)
aattaaaatttaaaacctaatttcaatcttactgtaaagagtgttctgtgactcgcttttctgatattactaaatagtgtgcacattttcccttgttaaatatgcctcaaaaacataatg

SEQ ID NO: 523782 - DNA, 120 bp, Artificial Sequence
  ENSG00000165633_9 (sequence is synthesized)
aataatgttccatcatgcaggtggacctcaatttagcttcctgcttattgttactggacatttgaagctgctgtaaatctttgtcaataaatctccatgaatatccctgaccttagcata

SEQ ID NO: 523783 - DNA, 120 bp, Artificial Sequence
  ENSG00000165633_10 (sequence is synthesized)
aaatcctggaaataagattgccgggtccaaagatctacccaaattaaaaatggacacaatttcaagaagtgaattgacctctaaaatagtttacaaatttatattaccaccagcattgaa

SEQ ID NO: 523784 - DNA, 120 bp, Artificial Sequence
  ENSG00000165633_11 (sequence is synthesized)
aatgccttttccccacggattggtctacataagagtgttggttaattttatgtgttgacttgactaggctaaacgatgcccagatagcaggtaaaacattatttctgggtgtgttcgttc

SEQ ID NO: 523785 - DNA, 120 bp, Artificial Sequence
  ENSG00000165633_12 (sequence is synthesized)
tgtttctctgggatcccagactaacacaatcatatactttttgaggatgatgatgataacaatgaatgcctgcaacagtgcctggtacacagttgatcctcaatagatacttgatgaatg

SEQ ID NO: 523786 - DNA, 120 bp, Artificial Sequence
  ENSG00000165633_13 (sequence is synthesized)
aataaaatgttctttgtcaagtgtcattagcaactgttgctgtggatgactttgaagtaggcgtgacttggtggatgtagtcaccctctctgggatgccttacctctctttcccttgacc

SEQ ID NO: 523787 - DNA, 120 bp, Artificial Sequence
  ENSG00000165633_14 (sequence is synthesized)
tatttcaatcatacatattttttggggctccacatccagctttcatcttccatcaatgccttctttgggcatgccagcccatggagtgctctcccactggcaacatcttgtagcttctgt

SEQ ID NO: 523788 - DNA, 120 bp, Artificial Sequence
  ENSG00000165633_15 (sequence is synthesized)
ttttagcactgtagacacaacattatgtggtcatgccgttgtttttcaagctgctgtggcacagtgatgatgtcaaaaatattatacataaaagagttggccaggcatggtggcttacgc

SEQ ID NO: 523789 - DNA, 120 bp, Artificial Sequence
  ENSG00000165633_16 (sequence is synthesized)
gatcctcagcattctgctcttcatgctggtcatcgtctggcagtctgtgtttaacaagcggaaatccagagtgagacattatttggtgaaatgccctcagaacagctcaggggagactgt

SEQ ID NO: 523790 - DNA, 120 bp, Artificial Sequence
  ENSG00000165633_17 (sequence is synthesized)
cactagcgtgaccagcttggccccactacagcccaagaagggcaagaggcagaaggagaagcctgacattcctcccgcagtccctgccaaagctccgatagcccccacgttccataaacc

SEQ ID NO: 523791 - DNA, 120 bp, Artificial Sequence
  ENSG00000165633_18 (sequence is synthesized)
gaagctgctgaaaccacagagaaaagtcacgctgccaaagattgctgaggaaaacttaacctatgccgaactggagctgatcaaaccccaccgggctgccaaaggcgcccccaccagcac

SEQ ID NO: 523792 - DNA, 120 bp, Artificial Sequence
  ENSG00000165633_19 (sequence is synthesized)
tgtctacgcccagatcctcttcgaggagaacaagctgtagtacagcgtccacctccaaggttctatttaatacctgccacccagtgatttatgaagccttggagacaaagcccttatgtc

SEQ ID NO: 523793 - DNA, 120 bp, Artificial Sequence
  ENSG00000165633_20 (sequence is synthesized)
tgtattttcactcatgccttctgagtggtggggagccccttttcagcagcattctgggtgcctttgaagaggtacaagcctgctctccccaaaagaatcggggccacagctcttgacaga

SEQ ID NO: 523794 - DNA, 120 bp, Artificial Sequence
  ENSG00000165633_21 (sequence is synthesized)
tctcccgggacaagatgcgcctgggtttgagccctgagcgtaaggattctgatcctgagagcagccaaggagattttctgctgagccaaaccccttcacatttttctcctctttccccag

SEQ ID NO: 523795 - DNA, 120 bp, Artificial Sequence
  ENSG00000165633_22 (sequence is synthesized)
gttttctttaaaatcgtttttaaatcttaattttactctctactcttcctgtatccacgatacaagctcacagtatatagctagaggaaatgccattatggacccaactgtaagatggca

SEQ ID NO: 523796 - DNA, 120 bp, Artificial Sequence
  ENSG00000165633_23 (sequence is synthesized)
catatgttggttttccaaggatcagatggcattgccagggccacagccaactgctgattgccagcaccacctgagatggcatctcttgttttaaatagatgcactaaccctgaagattaa

SEQ ID NO: 523797 - DNA, 120 bp, Artificial Sequence
  ENSG00000165633_24 (sequence is synthesized)
ggccagaggggcagactgactagagaagtataaggtctgtctctgaatgccatggtgcccacctatgagaccctgaggccgcaggacaagaagaacaccattctagagggcttccagccc

SEQ ID NO: 523798 - DNA, 120 bp, Artificial Sequence
  ENSG00000165633_25 (sequence is synthesized)
tttcacaaggtggacctgtactgatagagaaacacactctctaagaagtgcttactcacccttttccaaaggagcacaggtgttggccatcagaagacacactggagcgcatgggcctct

SEQ ID NO: 523799 - DNA, 120 bp, Artificial Sequence
  ENSG00000165633_26 (sequence is synthesized)
tcactgtgtgccaagctcagtcacctctgattcagcccctgaaggtgtctgctgccaggtgccctcagggtaggagagtgggaagtacacgccaagctggaaagtgtgttctgaagaccc

SEQ ID NO: 523800 - DNA, 120 bp, Artificial Sequence
  ENSG00000165633_27 (sequence is synthesized)
tcctcttgccaagtgccttgcccattgcaaccttgtgtgtgaattctaatgggtttgaatgggggtcagggtgcatggggaagttgctctgtggacctttgggacacaggaatcttggac

SEQ ID NO: 523801 - DNA, 120 bp, Artificial Sequence
  ENSG00000165633_28 (sequence is synthesized)
ttactggcaggggatccattctgaaagcaccatcctgtcaactgtgttattgaggacatttcttgatgtgagtatagtctgggtggctatttactgcccactatagaaattgtttgacta

SEQ ID NO: 523802 - DNA, 120 bp, Artificial Sequence
  ENSG00000165633_29 (sequence is synthesized)
tgtagtggaccatgtatatatgataaattatctattttaaacacagctggggtatgagttgtgccctctatatagctgtgtgaacttggctaaatttcttatcccctaatgacctcagac

SEQ ID NO: 523803 - DNA, 120 bp, Artificial Sequence
  ENSG00000165633_30 (sequence is synthesized)
tccatgtttgtgtaaagacgacttaacttcccatagaattcttgagggtaaaatgggataatgaatcttgccagttctagaaactgtaaattgctacacaaatgctctgtgttgacattc

SEQ ID NO: 523804 - DNA, 120 bp, Artificial Sequence
  ENSG00000165633_31 (sequence is synthesized)
atgctaaagccagtctgcattttcaaaatgaaaatttcttcactatttaaggctttcattgcaataactttaaaaaccaaatatttgtccaccaacttagccctacagtaatgttcccaa

SEQ ID NO: 523805 - DNA, 120 bp, Artificial Sequence
  ENSG00000165633_32 (sequence is synthesized)
agactcatgagagtttatggtttattggaaagggtccaaattggaagcagatattgattttctgggagcaaactggtctgcctttacaaagtggaagttcaccctctctggataacacct

SEQ ID NO: 523806 - DNA, 120 bp, Artificial Sequence
  ENSG00000165633_33 (sequence is synthesized)
gtgtctcattcctccctctctgccagatctcgaaggcactgaataaaccatgcagcttttgaggaagaaagaaccatttggaagaactcactagaacttctttgagcatctctttgggag

SEQ ID NO: 523807 - DNA, 120 bp, Artificial Sequence
  ENSG00000165633_34 (sequence is synthesized)
gggaggatatatggttagcacaccatttatataataattatcacagggatttttaattttatcatggcagtgttctgacagatgtatagtgttttgagggcagaggatgatctcctaatt

SEQ ID NO: 523808 - DNA, 120 bp, Artificial Sequence
  ENSG00000165633_35 (sequence is synthesized)
tgcccaaagagccttatgggtttgtggggctctgggggtgccaaatgggaaggagagggggcacatgaaaaggaaatggcgggaagagggcaacaggccagggggtaatatcttcccagg

SEQ ID NO: 523809 - DNA, 120 bp, Artificial Sequence
  ENSG00000165633_36 (sequence is synthesized)
ccccttaggcctctacagaacggaaatgaacttcattcacccccaaacccacccacttaaatccaaagagagcttagggttattatgcatggacaggaacacattctaccaagaacacat

SEQ ID NO: 523810 - DNA, 120 bp, Artificial Sequence
  ENSG00000165633_37 (sequence is synthesized)
tagattgaatccagcctctttctcccaaactgtggtcatcactgcatgaatccacactaaggtgtgtgaatgggaacctgcagattatctcctcctactgaaaatgctgcccaggggaat

SEQ ID NO: 523811 - DNA, 120 bp, Artificial Sequence
  ENSG00000165633_38 (sequence is synthesized)
cttggaagctatggacagcatccaggcagagctggtcccactgttatctccagaagcaaatgcccaagctgtgctcagaactggaagcaatggatgacttgtatcaggtgcttgtttgag

SEQ ID NO: 523812 - DNA, 120 bp, Artificial Sequence
  ENSG00000165633_39 (sequence is synthesized)
aggatatattgacattattgccatagtaagcttaaaaaaatgtgcccactcattcattctttgtccatggaccactaatcatgcattgtcatttccaaagataaggggaaacatatcaca

SEQ ID NO: 523813 - DNA, 120 bp, Artificial Sequence
  ENSG00000165633_40 (sequence is synthesized)
tatcattgaaatagaaattagggaaagtttgtcaatttgttttcactataaggcatcaatggcagaaactacatatgagtaattttcaaaatagaccattgcttaaatgtttaaatgaag

SEQ ID NO: 523814 - DNA, 120 bp, Artificial Sequence
  ENSG00000165633_41 (sequence is synthesized)
ctaaaagaagtatgaacccattggttagagtgcagtggcttctttcaggcagacagcagatgctctcagatttggtggtgagttttggccttggcatggttggcatggagtcagcacagg

SEQ ID NO: 523815 - DNA, 120 bp, Artificial Sequence
  ENSG00000165633_42 (sequence is synthesized)
aagccgggaggtatgaaggggcatccacctgggtgaaactgtcttgccaagccaaagccccgaggcctgccctgaagcagctgtagtggaggagaggcctgggattccttagagtcacct

SEQ ID NO: 523816 - DNA, 120 bp, Artificial Sequence
  ENSG00000165633_43 (sequence is synthesized)
ttttacgaatgtaccgccactctgttagctcacagggaaaataaggaaaagccaggcctcccacctcttgactcttgtgagagtgaagacaacatggggcatttagaaaatatattttta

SEQ ID NO: 523817 - DNA, 120 bp, Artificial Sequence
  ENSG00000165633_44 (sequence is synthesized)
gtgtatgataatgtgggctggcccacacagcaatgagcccaaagaccccctcgctttgggaattattcatggccctgctcatcacagcctctgatatgcatgactgtaacctaggctgag

SEQ ID NO: 523818 - DNA, 120 bp, Artificial Sequence
  ENSG00000165633_45 (sequence is synthesized)
ccaagaatggagctcatgccagaaatggtcctaagcatgcacatggccccctggaatatcaaaatcctggggagaaagaaatcatctttgccttgggcagtgaagctggaatggcacata

SEQ ID NO: 523819 - DNA, 120 bp, Artificial Sequence
  ENSG00000165633_46 (sequence is synthesized)
tctatctgttgccacatctcctgcctagtggagaagccttggaaggcaacagacactgagcaagcagcagggaggagaatgtcctggaagggcaggactctacccaagtccctaacatcc

SEQ ID NO: 523820 - DNA, 120 bp, Artificial Sequence
  ENSG00000165633_47 (sequence is synthesized)
ccagactcttctcttccataaactctctaattactctgctgtttaaatcctggttttggtcaagccagtcaggttgcataaagaatatgaatacagtatgcatcaaagttgcttcccaga

SEQ ID NO: 523821 - DNA, 120 bp, Artificial Sequence
  ENSG00000165633_48 (sequence is synthesized)
acaaacaaacaaacaaacaaacaaaatactgatatcagtacccagggtgcccaattaggtcacacccagtggctgcattgcagcccctgagctcctgctgcaccgtgtgtcctgctgccc

SEQ ID NO: 523822 - DNA, 120 bp, Artificial Sequence
  ENSG00000165633_49 (sequence is synthesized)
gtcctgctgcccgagtgggccccaccctgggttctgaagatgcccttcttaatggagagctcccgatggagggctccaggactgatgctctccctaaggaagggaggcctcagatttgga

SEQ ID NO: 523823 - DNA, 120 bp, Artificial Sequence
  ENSG00000165633_50 (sequence is synthesized)
gagggacaccaacaggaccagaggaggactgaggggcactggcaccaataagtggaagggaacagcgtggtaacaaaaaagagccatgccacttgcatgctggagggagtctttttgtgt

SEQ ID NO: 523824 - DNA, 120 bp, Artificial Sequence
  ENSG00000165633_51 (sequence is synthesized)
cagcctaaagcttaggctggtgtccatgtggaacatgacatctttccagtatccctgatccaggaaactgcagtgagacccaggtgacccagctctgtgtcatttggagcccattaaaaa

SEQ ID NO: 523825 - DNA, 120 bp, Artificial Sequence
  ENSG00000165633_52 (sequence is synthesized)
gtgaggcagccacatggcggggacattgaccccactccagaccacactcccatctccatacataggatagaaactgttcatcaggaaggaaaaccaaacagaaattcgtggtctagggga

SEQ ID NO: 523826 - DNA, 120 bp, Artificial Sequence
  ENSG00000165633_53 (sequence is synthesized)
ggggtctgcattcagcatggccatgctgggctggagtggctgtggggtgtccagatagatgggcatgtagactagtgctttctcaacctttaatgcatgcacaaatcatcgagatcttgt

SEQ ID NO: 523827 - DNA, 84 bp, Artificial Sequence
  ENSG00000165633_54 (sequence is synthesized)
tgtagatcctggctcaggaggtctgggataggacctgggattctgagtttctaacaagctcccagggatgtccatgcttctggt

SEQ ID NO: 523828 - DNA, 120 bp, Artificial Sequence
  ENSG00000165633_55 (sequence is synthesized)
gagtttctaacaagctcccagggatgtccatgcttctggtccctgaaccacactttgagtgacaaggatgtaaactgttggaaacatggatctggtgctcattgcgggaaagggggtgtc

SEQ ID NO: 523829 - DNA, 120 bp, Artificial Sequence
  ENSG00000165633_56 (sequence is synthesized)
ctcagggcataggtcacagccaaagccctgacagcgggcaagagtcccagggagaggctgcctgcacattgaggaggggaagggctgggcctgagcagtggggagcatccatgctggcag

SEQ ID NO: 523830 - DNA, 120 bp, Artificial Sequence
  ENSG00000165633_57 (sequence is synthesized)
gtatgcagcaggcaaggagatccaggtggagatcagaggacagtgacagtcacagcagcaggggagagccaggagaaagctgctcctaggggtgtctcaaaggaagaagggatctgcagt

SEQ ID NO: 523831 - DNA, 120 bp, Artificial Sequence
  ENSG00000165633_58 (sequence is synthesized)
gtgaactctgcagagggcagggagaatagaggttaagcctttgctcattctgaattaattgattactgctttttaaaagtgctttctttctctgggaaaaaaaaaacattccccagtgcc

SEQ ID NO: 523832 - DNA, 120 bp, Artificial Sequence
  ENSG00000165633_59 (sequence is synthesized)
taaggctaacagacgtgggcgctgagctgtgtctggtctgctgagtgtattttccccagagcaatcctcatcttctcagggggtggggatttggacaagactcttcctgaacacgcagcg

SEQ ID NO: 523833 - DNA, 120 bp, Artificial Sequence
  ENSG00000165633_60 (sequence is synthesized)
tggtggggaagggtggccatggaggttttctgttccttctgttgtcactggtgaaagacgacttggtgcccaatttctaataaacacaatgctattagcgtcactccaatttagtgtctg

SEQ ID NO: 523834 - DNA, 120 bp, Artificial Sequence
  ENSG00000165633_61 (sequence is synthesized)
attgttaaatgttaatgtactgcactctacagttttaaatataattagagatgtttacagctttggttaaatgcaccttgttcttccacattaaactttattacaagcgtcctccatcaa

SEQ ID NO: 523835 - DNA, 120 bp, Artificial Sequence
  ENSG00000165633_62 (sequence is synthesized)
gggatcctcagcattctgctcttcatgctggtcatcgtctggcagtctgtgtttaacaagcggaaatccagagtgagacattatttggtgaaatgccctcagaacaggtaagaatatttt

SEQ ID NO: 523836 - DNA, 120 bp, Artificial Sequence
  ENSG00000165633_63 (sequence is synthesized)
cttccttttttcagatgaaactctttgccatttaactttcttttgatattaccaataaattgattaaatttgtagttttacctaaaagtctgcatatttgtccacaaatatgcctgcaaa

SEQ ID NO: 523837 - DNA, 120 bp, Artificial Sequence
  ENSG00000165633_64 (sequence is synthesized)
ggatccagagagcatgcagcttttgctggcccagcaggcttgctggaggaggcttggtgtatggtcctgcagagctgctccccagtttaggaaggggctcacacttgctctgaaccactt

SEQ ID NO: 523838 - DNA, 120 bp, Artificial Sequence
  ENSG00000165633_65 (sequence is synthesized)
tgatacattttgaccacaaacacccccaattctcttcaccaatgctgacttactgtatgccctgcttttagctggtgaggcacactttataggtaacataatagttataagagatagtgc

SEQ ID NO: 523839 - DNA, 120 bp, Artificial Sequence
  ENSG00000165633_66 (sequence is synthesized)
taattcaaagcgtttaaaaatttgggacttctgatccagacaagatggcataggtcaatttcttccttctctttcctgctgagtaaagctttaaaccttggaaataacataagagacaac

SEQ ID NO: 523840 - DNA, 120 bp, Artificial Sequence
  ENSG00000165637_0 (sequence is synthesized)
ggcgcggcggacagccccgggggcagcggcggggtcctgtctgggagaggacagggttgcggcgggcggaacggtgtctccttcacttcgccctccagctgctggagctgcagcccgacc

SEQ ID NO: 523841 - DNA, 120 bp, Artificial Sequence
  ENSG00000165637_1 (sequence is synthesized)
gcgagcgtgccaagcggcttcagcagctagcggagcggtggcggcggcccccctcaggacaccaccagattcccctcttcccgcggcctcgccatggcgacccacggacagacttgcgcg

SEQ ID NO: 523842 - DNA, 120 bp, Artificial Sequence
  ENSG00000165637_2 (sequence is synthesized)
cgtccaatgtgtattcctccatcatatgctgaccttggcaaagctgccagagatattttcaacaaaggatttggttttgggttggtgaaactggatgtgaaaacaaagtcttgcagtggc

SEQ ID NO: 523843 - DNA, 120 bp, Artificial Sequence
  ENSG00000165637_3 (sequence is synthesized)
gtggaattttcaacgtccggttcatctaatacagacactggtaaagttactgggaccttggagaccaaatacaagtggtgtgagtatggtctgactttcacagaaaagtggaacactgat

SEQ ID NO: 523844 - DNA, 120 bp, Artificial Sequence
  ENSG00000165637_4 (sequence is synthesized)
aacactctgggaacagaaatcgcaattgaagaccagatttgtcaaggtttgaaactgacatttgatactaccttctcaccaaacacaggaaagaaaagtggtaaaatcaagtcttcttac

SEQ ID NO: 523845 - DNA, 120 bp, Artificial Sequence
  ENSG00000165637_5 (sequence is synthesized)
aagagggagtgtataaaccttggttgtgatgttgactttgattttgctggacctgcaatccatggttcagctgtctttggttatgagggctggcttgctggctaccagatgacctttgac

SEQ ID NO: 523846 - DNA, 120 bp, Artificial Sequence
  ENSG00000165637_6 (sequence is synthesized)
gtttgtgaagatcttgacacttcagtaaaccttgcttggacatcaggtaccaactgcactcgttttggcattgcagctaaatatcagttggatcccactgcttccatttctgcaaaagtc

SEQ ID NO: 523847 - DNA, 120 bp, Artificial Sequence
  ENSG00000165637_7 (sequence is synthesized)
aacaactctagcttaattggagtaggctatactcagactctgaggcctggtgtgaagcttacactctctgctctggtagatgggaagagcattaatgctggaggccacaaggttgggctc

SEQ ID NO: 523848 - DNA, 120 bp, Artificial Sequence
  ENSG00000165637_8 (sequence is synthesized)
gccctggagttggaggcttaatccagctgaaagaaacctttgggaatggatatcagaagatttggccttaatatatttccattgtgaccagcagcaggcttttttcccccaagaagatga

SEQ ID NO: 523849 - DNA, 120 bp, Artificial Sequence
  ENSG00000165637_9 (sequence is synthesized)
tcaaaacaaaggatgatctcaacaagagctgtattttaagtatttagacagttctttgttagctggtttctagttggttatctagttaccaatgctgcagtcctgcagtcacctatacat

SEQ ID NO: 523850 - DNA, 120 bp, Artificial Sequence
  ENSG00000165637_10 (sequence is synthesized)
tatttaaatgtatttaactgttaaatgcgctacccaccaataatgaaatagacctttatgaaaactgtgcaattgtgtgcatgtttgtttttatgttcctttagaaaacattgactgtta

SEQ ID NO: 523851 - DNA, 120 bp, Artificial Sequence
  ENSG00000165637_11 (sequence is synthesized)
ccattgaatgagatggatcagtggatattaagatgaggttacaaattttgttaagttcagccattattacttttggtatcccagaacatgacaaattatgaataaaacaagtatacataa

SEQ ID NO: 523852 - DNA, 120 bp, Artificial Sequence
  ENSG00000165637_12 (sequence is synthesized)
cacattttggtctggtttgttgtgctagactagaattaacaaagatgatttttatgagagtgcttaggcttttgtgctgtatggacagtttggggtctttggatacattccagtggctat

SEQ ID NO: 523853 - DNA, 120 bp, Artificial Sequence
  ENSG00000165637_13 (sequence is synthesized)
caagagtattgtgtcctactgagaatttgatttttgagttgaatggatacgaattaaatagtacctggtttgtttggcttaatacataatattgaattttattgtctcacgtgaataaaa

SEQ ID NO: 523854 - DNA, 120 bp, Artificial Sequence
  ENSG00000165637_14 (sequence is synthesized)
acttgagcctgggaggttgaggctgcagtcagctgtgatcacatcattgtgttccagcttgggtgacagaggcaagatgctgtctcaaaaaaaaaaaaaaaattcagataagccctccgt

SEQ ID NO: 523855 - DNA, 120 bp, Artificial Sequence
  ENSG00000165637_15 (sequence is synthesized)
ccgtattttttctttttcagttcgtgtgcaaccagggattggcacattattatttttagacagggtctcactgtgtcacccatgctgagtgcagtggtgggattatggctcactgcagcc

SEQ ID NO: 523856 - DNA, 120 bp, Artificial Sequence
  ENSG00000165637_16 (sequence is synthesized)
aagatggccgcgctgccccgcggcccctcgcccctctctgcccgggatctccctttggccctttgaccccagcttaccgcacttcttgtccctcccgcagattcccctcttcccgcggcc

SEQ ID NO: 523857 - DNA, 120 bp, Artificial Sequence
  ENSG00000165637_17 (sequence is synthesized)
gttaattggggattctgcctttggaggatcggatcaatcacttttctagaggaagtagcagtccctcttgtgagagcgcaaggtcattacttgtgctcctaagggcgtggacgtgctttg

SEQ ID NO: 523858 - DNA, 120 bp, Artificial Sequence
  ENSG00000165637_18 (sequence is synthesized)
cccaccgacggacggaggcagcccacctgcaggaccggggcgctgtcggtccacgtggccgctctggagcagattcccctcttcccgcggcctcgccatggcgacccacggacagacttg

SEQ ID NO: 523859 - DNA, 120 bp, Artificial Sequence
  ENSG00000165637_19 (sequence is synthesized)
caaggaataactttgcagtgggctacaggactggggacttccagctacacactaatgtgtaagtatttctttcataggatactgtgatgtgggccctcagaggatgattttgatgtctgt

SEQ ID NO: 523860 - DNA, 120 bp, Artificial Sequence
  ENSG00000165643_0 (sequence is synthesized)
gggggcggggctgcctgcggaaggggccgtgcgcgtggggtcgctccgcagctgcgagttcatggcgtcccggtgctccgagccctacccggaggtctccagaatccctaccgtcagggg

SEQ ID NO: 523861 - DNA, 120 bp, Artificial Sequence
  ENSG00000165643_1 (sequence is synthesized)
atgcaacggctccctgtctggtgccctctcctgctgcgaggactcggcccggggctcgggcccgcccaaggcccctacggtggccgagggtcccagctcctgccttcggcggaacgtgat

SEQ ID NO: 523862 - DNA, 120 bp, Artificial Sequence
  ENSG00000165643_2 (sequence is synthesized)
cagcgagagggagcgcaggaagcggatgtcgttgagctgtgagcgtctgcgggccctgctgccccagttcgatggccggcgggaggacatggcctcggtcctggagatgtctgtgcagtt

SEQ ID NO: 523863 - DNA, 120 bp, Artificial Sequence
  ENSG00000165643_3 (sequence is synthesized)
cctgcggcttgccagcgccctggggcccagtcaggagcagcacgctattcttgcttcctccaaggaaatgtggcactcgttgcaggaggatgttttacagttgacgttgtcgagtcagat

SEQ ID NO: 523864 - DNA, 120 bp, Artificial Sequence
  ENSG00000165643_4 (sequence is synthesized)
tcaagcaggtgtgccagaccctgggacgggagcgtccagcgggactcgaaccccagatgtgaaggcgtttctggaaagtccttggtccctggatccagcgtcggccagcccagagcccgt

SEQ ID NO: 523865 - DNA, 120 bp, Artificial Sequence
  ENSG00000165643_5 (sequence is synthesized)
gccgcacatccttgcgtcctccaggcagtgggaccccgcgagctgcacgtccctgggcacggacaagtgtgaggcactgttggggctgtgccaggtgcggggtgggctgccccctttctc

SEQ ID NO: 523866 - DNA, 120 bp, Artificial Sequence
  ENSG00000165643_6 (sequence is synthesized)
agaaccttccagcctggtgccgtggcccccaggccggagtcttcctaaggctgtgaggccacccctgtcctggcctccgttctcgcagcagcagaccttgcccgtgatgagcggggaggc

SEQ ID NO: 523867 - DNA, 120 bp, Artificial Sequence
  ENSG00000165643_7 (sequence is synthesized)
ccttggctggctgggccaggctgggcccctggccatgggggctgcacctctgggggagccagccaaggaggaccccatgctggcgcaggaggccgggtctgcgttggggtctgatgtgga

SEQ ID NO: 523868 - DNA, 120 bp, Artificial Sequence
  ENSG00000165643_8 (sequence is synthesized)
agggctggtccccccgcgtaagcacctgatatgagctggggaattgggactcaggcctagcgtgtgtcagggggccccagggtctgtgtctgagcccccgttttctccaccgttggtgct

SEQ ID NO: 523869 - DNA, 120 bp, Artificial Sequence
  ENSG00000165643_9 (sequence is synthesized)
tagctgttgggccgtgtctggtattgagcgttataggtgatatgtgagtgtgtgagtgaacgtgatgtggacgagcctgcatgagagctggcggtgcttggagccctgtattcttcccct

SEQ ID NO: 523870 - DNA, 120 bp, Artificial Sequence
  ENSG00000165643_10 (sequence is synthesized)
tgaccctgtgtcagcgaggcccctggtccagcccgtgctggccggcaaaggtgtatggccctgtgacatggcgtgtgtccattccatttaggatttagtgtttgggagcccgttcctggt

SEQ ID NO: 523871 - DNA, 120 bp, Artificial Sequence
  ENSG00000165643_11 (sequence is synthesized)
tctggtccaacaggtgtcctgggtctggggccaccaggtatgagctcacccacctcatcacagcctctgtgcagcggggacagggcagggcagacggactgaggtgggagctctgttcct

SEQ ID NO: 523872 - DNA, 120 bp, Artificial Sequence
  ENSG00000165643_12 (sequence is synthesized)
ccgaccccacctgtctgcctcaagctcccagagcacctgcctgccctgccgatgtgtcctgtttgcttccagggtctctggagggtcgaggaggcagtggccctgcatgggccccagctg

SEQ ID NO: 523873 - DNA, 120 bp, Artificial Sequence
  ENSG00000165643_13 (sequence is synthesized)
agagcagtccactggatgttggagagccaggcttcctaggggaccctgagcttggctcccaggagctccaggacagccctctggagccgtggggcctggatgtggactgtgcaggcctgg

SEQ ID NO: 523874 - DNA, 120 bp, Artificial Sequence
  ENSG00000165643_14 (sequence is synthesized)
ccctgaaggacgaggtggagagcatcttccctgacttctttgcctgctagcagccaggctgtggagaggaggcgggcggggccggtggatctggagccgtgtgtgtccctgtcgcgtgct

SEQ ID NO: 523875 - DNA, 120 bp, Artificial Sequence
  ENSG00000165643_15 (sequence is synthesized)
tgggcattttattttgggtttgggttgcagctgcaccctaatttgagcgaggcttacaggctgtgagaagaggatagtgaatattaaagagggaaagcagttttcctggaggaagcaaaa

SEQ ID NO: 523876 - DNA, 80 bp, Artificial Sequence
  ENSG00000165644_0 (sequence is synthesized)
ggtgccccggctctccgtgcccgccgcgctggccctgggctcagccgcactgggcgccgccttcgccactggcctcttcc

SEQ ID NO: 523877 - DNA, 120 bp, Artificial Sequence
  ENSG00000165644_1 (sequence is synthesized)
tggggaggcggtgccccccatggcgaggccggcgagagcagtgcctgcttccccccgaggacagccgcctgtggcagtatcttctgagccgctccatgcgggagcacccggcgctgcgaa

SEQ ID NO: 523878 - DNA, 120 bp, Artificial Sequence
  ENSG00000165644_2 (sequence is synthesized)
gcctgaggctgctgaccctggagcagccgcagggggattctatgatgacctgcgagcaggcccagctcttggccaacctggcgcggctcatccaggccaagaaggcgctggacctgggca

SEQ ID NO: 523879 - DNA, 120 bp, Artificial Sequence
  ENSG00000165644_3 (sequence is synthesized)
ggcaccttcacgggctactccgccctggccctggccctggcgctgcccgcggacgggcgcgtggtgacctgcgaggtggacgcgcagcccccggagctgggacggcccctgtggaggcag

SEQ ID NO: 523880 - DNA, 120 bp, Artificial Sequence
  ENSG00000165644_4 (sequence is synthesized)
aggcggagcacaagatcgacctccggctgaagcccgccttggagaccctggacgagctgctggcggcgggcgaggccggcaccttcgacgtggccgtggtggatgcggacaaggagaact

SEQ ID NO: 523881 - DNA, 120 bp, Artificial Sequence
  ENSG00000165644_5 (sequence is synthesized)
ctcgccgtcctcagagtcctgtggcgcgggaaggtgctgcaacctccgaaaggggacgtggcggccgagtgtgtgcgaaacctaaacgaacgcatccggcgggacgtcagggtctacatc

SEQ ID NO: 523882 - DNA, 120 bp, Artificial Sequence
  ENSG00000165644_6 (sequence is synthesized)
agcctcctgcccctgggcgatggactcaccttggccttcaagatctagggctggcccctagtgagtgggctcgagggagggttgcctgggaaccccaggaattgaccctgagttttaaat

SEQ ID NO: 523883 - DNA, 120 bp, Artificial Sequence
  ENSG00000165644_7 (sequence is synthesized)
tcgaaaataaagtggggctgggacacacgacctcctgagcctccgtgtgtggcgctggatggggaagggagggaaggcccagcacagacagctcctgccttcagtgaaaggggccttgag

SEQ ID NO: 523884 - DNA, 120 bp, Artificial Sequence
  ENSG00000165644_8 (sequence is synthesized)
attcgtcccctccctggcgccaggtctgtggcccaactgcaggaacctccagctggcaggaggcaggttataaagttttaactggcctggccacgtgtaatggccagagaccccagcacc

SEQ ID NO: 523885 - DNA, 120 bp, Artificial Sequence
  ENSG00000165644_9 (sequence is synthesized)
tcgggcttgtctgcctcctacatctctccctcagggcaggcgaagctctggttctgagcagctgggactggtagagagccacgtctggtgtctgacaacatgaaagaggattgcagggga

SEQ ID NO: 523886 - DNA, 120 bp, Artificial Sequence
  ENSG00000165644_10 (sequence is synthesized)
actacgagcgctgcctgcagctgctgcgacccggaggcatcctcgccgtcctcagagtaagggatccactgcgggggaggagaaagcaccctgtcgggccgggtccccatcttttccctt

SEQ ID NO: 523887 - DNA, 120 bp, Artificial Sequence
  ENSG00000165644_11 (sequence is synthesized)
gactcctcttataccccaaagccccacccagtccagtcacgtaggctacaccccctccggggctccggccccggtacccaggctttcctccgctttggttctgtctccagctctggtcac

SEQ ID NO: 523888 - DNA, 120 bp, Artificial Sequence
  ENSG00000165644_12 (sequence is synthesized)
cttccctgggccgggtgcggtgggcgttccgaagggccagtcccccaggccacgcccagaaccgcgcccctggggcttgggacccccagggcgaaggtgggtgacctgcatggctggtgc

SEQ ID NO: 523889 - DNA, 120 bp, Artificial Sequence
  ENSG00000165644_13 (sequence is synthesized)
cccatggcgaggccggcgagagcagtgcctgcttccccccgaggacagccgcctgtggcagtatcttctgagccgctccatgcgggagcacccggcgctgcgaagcctgaggctggtcag

SEQ ID NO: 523890 - DNA, 120 bp, Artificial Sequence
  ENSG00000165646_0 (sequence is synthesized)
ggggcggagactgcgacccggagccgcccggactgacggagcccactgcggtgcgggcgttggcgcgggcacggaggacccgggcaggcatcgcaagcgaccccgagcggagccccggag

SEQ ID NO: 523891 - DNA, 120 bp, Artificial Sequence
  ENSG00000165646_1 (sequence is synthesized)
ccatggccctgagcgagctggcgctggtccgctggctgcaggagagccgccgctcgcggaagctcatcctgttcatcgtgttcctggcgctgctgctggacaacatgctgctcactgtcg

SEQ ID NO: 523892 - DNA, 120 bp, Artificial Sequence
  ENSG00000165646_2 (sequence is synthesized)
tggtccccatcatcccaagttatctgtacagcattaagcatgagaagaatgctacagaaatccagacggccaggccagtgcacactgcctccatctcagacagcttccagagcatcttct

SEQ ID NO: 523893 - DNA, 120 bp, Artificial Sequence
  ENSG00000165646_3 (sequence is synthesized)
cctattatgataactcgactatggtcaccgggaatgctaccagagacctgacacttcatcagaccgccacacagcacatggtgaccaacgcgtccgctgttccttccgactgtcccagtg

SEQ ID NO: 523894 - DNA, 120 bp, Artificial Sequence
  ENSG00000165646_4 (sequence is synthesized)
aagacaaagacctcctgaatgaaaacgtgcaagttggtctgttgtttgcctcgaaagccaccgtccagctcatcaccaaccctttcataggactactgaccaacagaattggctatccaa

SEQ ID NO: 523895 - DNA, 120 bp, Artificial Sequence
  ENSG00000165646_5 (sequence is synthesized)
ttcccatatttgcgggattctgcatcatgtttgtctcaacaattatgtttgccttctccagcagctatgccttcctgctgattgccaggtcgctgcagggcatcggctcgtcctgctcct

SEQ ID NO: 523896 - DNA, 120 bp, Artificial Sequence
  ENSG00000165646_6 (sequence is synthesized)
ctgtggctgggatgggcatgcttgccagtgtctacacagatgatgaagagagaggcaacgtcatgggaatcgccttgggaggcctggccatgggggtcttagtgggcccccccttcggga

SEQ ID NO: 523897 - DNA, 120 bp, Artificial Sequence
  ENSG00000165646_7 (sequence is synthesized)
gtgtgctctatgagtttgtggggaagacggctccgttcctggtgctggccgccctggtactcttggatggagctattcagctctttgtgctccagccgtcccgggtgcagccagagagtc

SEQ ID NO: 523898 - DNA, 120 bp, Artificial Sequence
  ENSG00000165646_8 (sequence is synthesized)
agaaggggacacccctaaccacgctgctgaaggacccgtacatcctcattgctgcaggctccatctgctttgcaaacatgggcatcgccatgctggagccagccctgcccatctggatga

SEQ ID NO: 523899 - DNA, 120 bp, Artificial Sequence
  ENSG00000165646_9 (sequence is synthesized)
tggagaccatgtgttcccgaaagtggcagctgggcgttgccttcttgccagctagtatctcttatctcattggaaccaatatttttgggatacttgcacacaaaatggggaggtggcttt

SEQ ID NO: 523900 - DNA, 120 bp, Artificial Sequence
  ENSG00000165646_10 (sequence is synthesized)
gtgctcttctgggaatgataattgttggagtcagcattttatgtattccatttgcaaaaaacatttatggactcatagctccgaactttggagttggttttgcaattggaatggtggatt

SEQ ID NO: 523901 - DNA, 120 bp, Artificial Sequence
  ENSG00000165646_11 (sequence is synthesized)
cgtcaatgatgcctatcatgggctacctcgtagacctgcggcacgtgtccgtctatgggagtgtgtacgccattgcggatgtggcattttgtatggggtatgctataggtccttctgctg

SEQ ID NO: 523902 - DNA, 120 bp, Artificial Sequence
  ENSG00000165646_12 (sequence is synthesized)
gtggtgctattgcaaaggcaattggatttccatggctcatgacaattattgggataattgatattctttttgcccctctctgcttttttcttcgaagtccacctgccaaagaagaaaaaa

SEQ ID NO: 523903 - DNA, 120 bp, Artificial Sequence
  ENSG00000165646_13 (sequence is synthesized)
tggctattctcatggatcacaactgccctattaaaacaaaaatgtacactcagaataatatccagtcatatccgataggtgaagatgaagaatctgaaagtgactgagatgagatcctca

SEQ ID NO: 523904 - DNA, 120 bp, Artificial Sequence
  ENSG00000165646_14 (sequence is synthesized)
aaaatcatcaaagtgtttaattgtataaaacagtgtttccagtgacacaactcatccagaactgtcttagtcataccatccatccctggtgaaagagtaaaaccaaaggttattatttcc

SEQ ID NO: 523905 - DNA, 120 bp, Artificial Sequence
  ENSG00000165646_15 (sequence is synthesized)
atcatacaatatattttgatgaaataggtattgtgtaaatctataaatatttgaatccaaaccaaatataattttttaacttacattaacaaacatttgggcaaaaatcatattggtaat

SEQ ID NO: 523906 - DNA, 120 bp, Artificial Sequence
  ENSG00000165646_16 (sequence is synthesized)
gagtgtttaaaattaaagcacacattatctctgagactcttccaacaaagagaaactagaatgaagtctgaaaaacagaatcaagtaagacagcatgttatatagtgacactgaatgtta

SEQ ID NO: 523907 - DNA, 120 bp, Artificial Sequence
  ENSG00000165646_17 (sequence is synthesized)
tttaacttgtagttactatcaatatatttatgcgttaaacagctagttctctcaagtgtagaggacaagaacttgtgtcagttatcttttgaatccataaatcttagctggcattagttt

SEQ ID NO: 523908 - DNA, 120 bp, Artificial Sequence
  ENSG00000165646_18 (sequence is synthesized)
tctatgtaatcacctacctagagagagttgtaaattatatgttaacatgttatctggttggcagcaaacactaaagccaataaaggaaaaacagtaaatgttccgaaagcagagaaaagc

SEQ ID NO: 523909 - DNA, 120 bp, Artificial Sequence
  ENSG00000165646_19 (sequence is synthesized)
aaccaaacatattgttatgaactaaaagctttccctttaagatgcatacttgtcttactggatgaagaaaattgagggtacatgtaccttatactgtcaaggttgtttaaacatgataag

SEQ ID NO: 523910 - DNA, 120 bp, Artificial Sequence
  ENSG00000165646_20 (sequence is synthesized)
gttaatcgccatctacttcaagttttagaaaaggaaacaagaagctgaaaacagctgctctgactttaatatctgactatatctttgatctgtttgcaggtcatccaagtgttttctagg

SEQ ID NO: 523911 - DNA, 120 bp, Artificial Sequence
  ENSG00000165646_21 (sequence is synthesized)
aatatatttattttaggttgtctgaaactactattttttagactcctgaaagttgttcacatcaatgtgaagacaaattttaaatgaaaatgaagaatgaaattatgtcttgaatcatat

SEQ ID NO: 523912 - DNA, 120 bp, Artificial Sequence
  ENSG00000165646_22 (sequence is synthesized)
attaagaagtaaaaataatagtgatcaggcagaaaagaaaaatggaacatctaaaaatgtatgtgctaactatatcatccagtgtgcagtgttgtgtatttttctaagcatgacaacatt

SEQ ID NO: 523913 - DNA, 120 bp, Artificial Sequence
  ENSG00000165646_23 (sequence is synthesized)
gatgtgccttttcagtgtaacagcaaatactgttagtgaacattgtcaatttatgtcattttgttaagagatatgactggagtgtgcagtgtggaatgtctctaatactacttgtgaatc

SEQ ID NO: 523914 - DNA, 120 bp, Artificial Sequence
  ENSG00000165646_24 (sequence is synthesized)
ctgcagttctataatcataaacaaaaattacttagtttcgttaagctaagattgtgtttgtgttaacttcgacatcaaggagcaaagaactttagaacagactcctcaatcttgtgactt

SEQ ID NO: 523915 - DNA, 120 bp, Artificial Sequence
  ENSG00000165646_25 (sequence is synthesized)
tcttattctctaggaaagtaacacttcgtttcatgaagcttttctgtggggcttcgattatttcaagtctggtttctaagtgcagtgtgtttgaagcaaacgaacttccaactcacttat

SEQ ID NO: 523916 - DNA, 120 bp, Artificial Sequence
  ENSG00000165646_26 (sequence is synthesized)
ttggcattgggcaacttggccaagtctgccactttggaagatggctctggaggaaactctcatatggctaaaaaggcaggctagtttcttacttctacaggggtagagccttaaaaaaga

SEQ ID NO: 523917 - DNA, 120 bp, Artificial Sequence
  ENSG00000165646_27 (sequence is synthesized)
acgtgctacaaattggttctctttgagggtttctggttctccctgcccccaataccatatactttattgcaattttatttttgcctttacggctctgtgtctttctgcaagaaggcctgg

SEQ ID NO: 523918 - DNA, 120 bp, Artificial Sequence
  ENSG00000165646_28 (sequence is synthesized)
caaaggtatgcctgctgttggtccctcgggataagataaaatataaataaaaccttcagaactgttttggagcaaaagatagcttgtacttggggaaaaaaattctaagttcttttatat

SEQ ID NO: 523919 - DNA, 120 bp, Artificial Sequence
  ENSG00000165646_29 (sequence is synthesized)
gactaatattcttggttagcaagactggaaagaggtgtttttttaaaatgtacataccagaacaaagaacatacagctctctgaacatttattttttgaacagaggtggtttttatgttt

SEQ ID NO: 523920 - DNA, 120 bp, Artificial Sequence
  ENSG00000165646_30 (sequence is synthesized)
ggacctggtaatacagatacaaaaactttaatgaggtagcaatgaatattcaactgtttgactgctaagtgtatctgtccatattttagcaagtttacttaataaatcttctgaaccatg

SEQ ID NO: 523921 - DNA, 120 bp, Artificial Sequence
  ENSG00000165646_31 (sequence is synthesized)
gggtgctggggattcttggagaaggcacccactttcctcttgggttctgcttggtcttacattttagtgaatctgacaggtttgggaagatcacaaggctggctggagagggaaggcgag

SEQ ID NO: 523922 - DNA, 80 bp, Artificial Sequence
  ENSG00000165650_0 (sequence is synthesized)
ccttcgggagcgtctgaggaggcgcgggccgctgcgggctcgggcgccgcagcgcgccggcccgagcccctggacgaggc

SEQ ID NO: 523923 - DNA, 120 bp, Artificial Sequence
  ENSG00000165650_1 (sequence is synthesized)
gatgtcctcaaaatggaggcagcgggggcggcggcgtgaagaaagcggcgctgtgggcgcgggagtaggggcccgggcggaggcggtggcgggatggggctgctgctcatgatcctggcg

SEQ ID NO: 523924 - DNA, 120 bp, Artificial Sequence
  ENSG00000165650_2 (sequence is synthesized)
tcggccgtgctgggttccttcctcacgctcctcgcccagttcttcctgctgtaccgcagacagcccgagccgccggcggacgaggccgcccgcgcgggcgagggcttccgctacatcaag

SEQ ID NO: 523925 - DNA, 120 bp, Artificial Sequence
  ENSG00000165650_3 (sequence is synthesized)
ccagtgccgggcctgctcctaagggagtacctttatggcggcggccgggatgaggagccctccggagcggcccctgagggcggcgcgacccccaccgcggcccccgagacccccgccccg

SEQ ID NO: 523926 - DNA, 120 bp, Artificial Sequence
  ENSG00000165650_4 (sequence is synthesized)
ccgacgcgggagacttgctacttcctcaacgccaccatcctattcctgttccgggagttgcgggacaccgcgctgacccgccgctgggtcaccaagaagatcaaggtggagttcgaggag

SEQ ID NO: 523927 - DNA, 120 bp, Artificial Sequence
  ENSG00000165650_5 (sequence is synthesized)
ctgctgcagaccaagacggccgggcgcctgctggaggggctgagcctgcgggacgtgttcctgggcgagacggtgcccttcatcaagaccatccggctcgtgcggccagtcgtgccctcg

SEQ ID NO: 523928 - DNA, 120 bp, Artificial Sequence
  ENSG00000165650_6 (sequence is synthesized)
gccaccggggagcccgatggccctgaaggggaggcgctgcccgccgcctgccccgaggagctggccttcgaggcggaggtggagtacaacgggggcttccacctggccatcgacgtggac

SEQ ID NO: 523929 - DNA, 120 bp, Artificial Sequence
  ENSG00000165650_7 (sequence is synthesized)
ctggtcttcggcaagtccgcctacttgtttgtcaagctgtcccgcgtggtgggaaggctgcgcttggtctttacgcgcgtgcccttcacccactggttcttctccttcgtggaagacccg

SEQ ID NO: 523930 - DNA, 120 bp, Artificial Sequence
  ENSG00000165650_8 (sequence is synthesized)
ctgatcgacttcgaggtgcgctcccagtttgaagggcggcccatgccccagctcacctccatcatcgtcaaccagctcaagaagatcatcaagcgcaagcacaccctaccgaattacaag

SEQ ID NO: 523931 - DNA, 120 bp, Artificial Sequence
  ENSG00000165650_9 (sequence is synthesized)
atcaggtttaagccgttttttccataccagaccttgcaaggatttgaagaagatgaagagcatatccatatacaacaatgggcacttactgaaggccgtcttaaagttacgttgttagaa

SEQ ID NO: 523932 - DNA, 120 bp, Artificial Sequence
  ENSG00000165650_10 (sequence is synthesized)
tgtagcaggttactcatttttggatcctatgacagagaggcaaatgttcattgcacacttgagttaagcagtagtgtttgggaagaaaaacagaggagttctattaagacggttgaatta

SEQ ID NO: 523933 - DNA, 120 bp, Artificial Sequence
  ENSG00000165650_11 (sequence is synthesized)
ataaaaggaaatttacaaagtgttggacttacacttcgtcttgtccagtcaactgatgggtatgctgggcacgtcatcattgaaactgtggctccaaactcgcctgctgcaattgcagat

SEQ ID NO: 523934 - DNA, 120 bp, Artificial Sequence
  ENSG00000165650_12 (sequence is synthesized)
cttcagcggggagatcgacttatcgccattggaggtgtgaaaatcacatcaacactgcaagtgttgaagcttatcaagcaggctggtgaccgagtcctggtgtactatgaaaggcctgtt

SEQ ID NO: 523935 - DNA, 120 bp, Artificial Sequence
  ENSG00000165650_13 (sequence is synthesized)
ggccagagtaatcaaggtgcagtgctgcaagataactttggccagttggaagaaaactttttgtcaagctcatgccaatcgggttatgaagaggaagctgccgggttgacagtagatact

SEQ ID NO: 523936 - DNA, 120 bp, Artificial Sequence
  ENSG00000165650_14 (sequence is synthesized)
gaaagtagagagctggattctgaatttgaagacttggcaagtgatgtcagagcacaaaatgagttcaaagatgaggcacaatcattaagtcatagtcccaaacgtgttccaacaacactt

SEQ ID NO: 523937 - DNA, 120 bp, Artificial Sequence
  ENSG00000165650_15 (sequence is synthesized)
tctattaaaccccttggagctatatcaccagttttaaaccgtaaattagctgtaggaagtcacccactaccaccgaaaattcagtccaaagatggaaataaacctccacccctaaaaact

SEQ ID NO: 523938 - DNA, 120 bp, Artificial Sequence
  ENSG00000165650_16 (sequence is synthesized)
tctgagataacagacccagcacaagtgtcaaaaccaacccaaggatctgctttcaaaccacctgtgccaccacgaccacaagcgaaagttcctttgccttccgccgatgctccaaatcag

SEQ ID NO: 523939 - DNA, 120 bp, Artificial Sequence
  ENSG00000165650_17 (sequence is synthesized)
gcagaaccagatgttctcgttgaaaagccagagaaggtggtgccacctcctcttgtagataaatctgctgaaaagcaagcaaaaaatgtggatgccatagacgatgcagctgcacctaag

SEQ ID NO: 523940 - DNA, 120 bp, Artificial Sequence
  ENSG00000165650_18 (sequence is synthesized)
caatttttagcaaagcaagaagtggccaaagatgtcacttcagaaacttcctgccctactaaggacagttcggacgaccgtcaaacatgggaatcatcagaaattctttatcgtaataag

SEQ ID NO: 523941 - DNA, 120 bp, Artificial Sequence
  ENSG00000165650_19 (sequence is synthesized)
ctaggaaaatggacaagaaccagagcatcctgtttgtttgacatagaagcctgtcacaggtacttaaacattgcattgtggtgcagggatcctttcaagttgggaggtctcatctgtttg

SEQ ID NO: 523942 - DNA, 120 bp, Artificial Sequence
  ENSG00000165650_20 (sequence is synthesized)
gggcatgttagtttaaaacttgaagatgtggctttaggatgcctagctacatcaaacacggaatacctttccaaattgagactggaagccccctcacctaaggctatagtcactagaacc

SEQ ID NO: 523943 - DNA, 120 bp, Artificial Sequence
  ENSG00000165650_21 (sequence is synthesized)
gcactacgcaatctgagtatgcaaaagggattcaatgacaaattttgctatggtgacattactattcacttcaaatatttgaaagaaggagaatcagaccaccatgtagttactaacgta

SEQ ID NO: 523944 - DNA, 120 bp, Artificial Sequence
  ENSG00000165650_22 (sequence is synthesized)
gaaaaagaaaaagaaccccatttggttgaagaagtttctgttctccctaaagaggagcaatttgttggacagatgggtttaacagaaaacaaacacagttttcaggatactcagttccag

SEQ ID NO: 523945 - DNA, 120 bp, Artificial Sequence
  ENSG00000165650_23 (sequence is synthesized)
aacccaacatggtgtgactactgtaagaaaaaagtttggactaaagcagcttcccagtgtatgttttgtgcttatgtttgccataaaaaatgtcaagaaaagtgtctagctgagacttct

SEQ ID NO: 523946 - DNA, 120 bp, Artificial Sequence
  ENSG00000165650_24 (sequence is synthesized)
gtttgtggagcaactgataggcgaatagacaggacactgaaaaaccttaggctggaaggacaggaaaccctcttaggcctgcctcctcgtgttgatgctgaagctagcaagtcagtcaat

SEQ ID NO: 523947 - DNA, 120 bp, Artificial Sequence
  ENSG00000165650_25 (sequence is synthesized)
aaaacaacaggtttgacaaggcatattatcaatactagttctcgtttattaaatttgcgtcaagtctctaaaactcgcctttctgaaccaggaaccgatctcgtagaaccttcaccaaaa

SEQ ID NO: 523948 - DNA, 120 bp, Artificial Sequence
  ENSG00000165650_26 (sequence is synthesized)
cacacacccaacacgtcagacaacgaaggcagtgacacggaggtctgtggtccaaacagtccttctaaacggggaaacagcacaggaataaagttagtgagaaaagagggtggtctggat

SEQ ID NO: 523949 - DNA, 120 bp, Artificial Sequence
  ENSG00000165650_27 (sequence is synthesized)
gacagtgttttcattgcagttaaagaaattggtcgtgatctgtacaggggcttgcctacagaggaaaggatccagaaactagagttcatgttggataagctacagaatgaaattgatcag

SEQ ID NO: 523950 - DNA, 120 bp, Artificial Sequence
  ENSG00000165650_28 (sequence is synthesized)
gagttggaacacaataattcccttgttagagaagaaaaagagacaactgatacaaggaaaaaatcacttctttctgctgccttagctaaatcaggtgaaaggctacaagctctaacactt

SEQ ID NO: 523951 - DNA, 120 bp, Artificial Sequence
  ENSG00000165650_29 (sequence is synthesized)
cttatgattcactacagagcaggcattgaagatatagaaactttagaaagtctgtctttagaccagcactccaaaaaaataagcaagtacacagatgatacagaagaagaccttgataat

SEQ ID NO: 523952 - DNA, 120 bp, Artificial Sequence
  ENSG00000165650_30 (sequence is synthesized)
gaaataagccaactaatagactctcagccattcagcagcatatcagatgacttatttggcccatccgagtctgtgtagcagacaggtctatttaagctttcaaatgaacagggtaaagtt

SEQ ID NO: 523953 - DNA, 120 bp, Artificial Sequence
  ENSG00000165650_31 (sequence is synthesized)
gcatctaaagtaccacagatacaaccatgtttaaatcctcgtatgcactctggcctgcttctccagttacttgcttgtgtaagaacaaaaatgagaaaggttgttttccagtaaaaacat

SEQ ID NO: 523954 - DNA, 120 bp, Artificial Sequence
  ENSG00000165650_32 (sequence is synthesized)
gaccagcttactaattggttgttttggattgcatttatagctatgcttttttgggtttatactgggaatttatttttactaaattatttaacttttctaattatgtaattatgtaagcta

SEQ ID NO: 523955 - DNA, 120 bp, Artificial Sequence
  ENSG00000165650_33 (sequence is synthesized)
gcttttcatgtttatgtatgtatggtgtccccttgtgttatttttcttcctcttggtttttgaattagtgttaaatagaatactgtctagattcttaaaatattttcatttccatcatgg

SEQ ID NO: 523956 - DNA, 120 bp, Artificial Sequence
  ENSG00000165650_34 (sequence is synthesized)
ttataacaaatttgctgcatgcccaaactgacaacagcaatcactgagggaacaggttttgaatctttcttttgtgttatgaagtttatcgtctctacttgcttgagatttttgttattt

SEQ ID NO: 523957 - DNA, 120 bp, Artificial Sequence
  ENSG00000165650_35 (sequence is synthesized)
tgggggtttgggggtgctttttgttttgtttttgccaaatgtaacatgaaagcagatgctgcagctttagtctgttatgctgatttagtaaaaaaaaattttttacatatattgcttgct

SEQ ID NO: 523958 - DNA, 120 bp, Artificial Sequence
  ENSG00000165650_36 (sequence is synthesized)
ttcgatgcttctgtgaaatttttttctaaagcttttgtgcagctgtatggtaaaaatatggtgattaatttgaagagcttacattgaaagacaatgtaataggaaataaatgtagattgc

SEQ ID NO: 523959 - DNA, 120 bp, Artificial Sequence
  ENSG00000165650_37 (sequence is synthesized)
agttggtcaagaattttgtagagaggataacaagacttaattactgaaaaacagtaacatagcattttgaaatataatcttttaaaatattgatgctttccttttaaatggaaatttaaa

SEQ ID NO: 523960 - DNA, 120 bp, Artificial Sequence
  ENSG00000165650_38 (sequence is synthesized)
ttttataattaaaagtttaaacatttatgataattttcctcatcagttctcccataggaaataaagcatgtgaaagggtatttaaagttttggaggactctttttaaaatgactgtgttg

SEQ ID NO: 523961 - DNA, 120 bp, Artificial Sequence
  ENSG00000165650_39 (sequence is synthesized)
ataactagtttgggctggttttgttttagaaaaaacattttcatgtaggagtattctgtgaaggaaaggaatcatgcaaaatatactttttgctttggcgtcttacagttgtaaaggaat

SEQ ID NO: 523962 - DNA, 120 bp, Artificial Sequence
  ENSG00000165650_40 (sequence is synthesized)
ggaattgggaccagttctctgaaaatgaagatatactcacactgggtccattttacgggtcccagtaacatttgactgagggaaaacaagtaagctcgactgttgttggggtaccttaat

SEQ ID NO: 523963 - DNA, 120 bp, Artificial Sequence
  ENSG00000165650_41 (sequence is synthesized)
ggtttcggtctgttatatacctataaaatagacaagtatatgtttgtccctttgtaggtaactgctatgatgattgctatatagtgaaactgacatgagtttaaaactagatggagcagc

SEQ ID NO: 523964 - DNA, 120 bp, Artificial Sequence
  ENSG00000165650_42 (sequence is synthesized)
ttttattgctggcaggaaaaagcatggtgtaatattaaggactggggcccaggtctagactccaggactccataaaagagtttaagttcaagcccttccattaatgaactgtgtaagcat

SEQ ID NO: 523965 - DNA, 120 bp, Artificial Sequence
  ENSG00000165650_43 (sequence is synthesized)
aggcagttacaaaaggacccatctctaaaatgggaataataatactttacctccctcacagtattgttgtgagggaaacaatagcataactgcaaaagtgctttgaacagtaaaaagata

SEQ ID NO: 523966 - DNA, 120 bp, Artificial Sequence
  ENSG00000165650_44 (sequence is synthesized)
tacaagtaaaaggcattatttatatgagtaagaaagacatttttgaggggagaaaagttattccactttaaaaatcaatagccaagtctcatgccttttgttactttagtaagcgaaaat

SEQ ID NO: 523967 - DNA, 120 bp, Artificial Sequence
  ENSG00000165650_45 (sequence is synthesized)
ttactttagtaagcgaaaatttcaggtactaaatacctttcttagccaagtttataacaaaaacatctcagtatacttcattacttatttaagcgtgatgtctttttttttttttttttt

SEQ ID NO: 523968 - DNA, 120 bp, Artificial Sequence
  ENSG00000165650_46 (sequence is synthesized)
ggcgtgagccaccacgcccggccacgtgatcttattttaaaagaacactgctatagaagaatttacacaccaaattccctgaaagctaaagtattgttccataacttacacttgaggcaa

SEQ ID NO: 523969 - DNA, 120 bp, Artificial Sequence
  ENSG00000165650_47 (sequence is synthesized)
gcaatctgctcagtgtgtaaccactttataaaaaataacttaccattgataacctggaaggtggactacttgtaagtagctggtgtttattgattaaaccatggaagttttcatgatacc

SEQ ID NO: 523970 - DNA, 120 bp, Artificial Sequence
  ENSG00000165650_48 (sequence is synthesized)
caagcatgttgctgaaactgatgcatttgaaagagctgttgaaataatgcaaaactttggttttataagaatctactcatgttttaaaagtatttaactctgtagaccacaattatagaa

SEQ ID NO: 523971 - DNA, 120 bp, Artificial Sequence
  ENSG00000165650_49 (sequence is synthesized)
agctcagtaatgctgctaatgacatttgtaaactatatctgtaatgtagtgcaatatttttatatttcactgggagaggcagtagagacatcatagttgtactttagtgcaagtggggga

SEQ ID NO: 523972 - DNA, 120 bp, Artificial Sequence
  ENSG00000165650_50 (sequence is synthesized)
acactccaaatagcctagagtatagtaaggtacaaagcttcaatgaaaaaagctgtattatattacattactgatgtaatcttgctgccatgctatgtatcaatagctaaaaaataataa

SEQ ID NO: 523973 - DNA, 120 bp, Artificial Sequence
  ENSG00000165650_51 (sequence is synthesized)
taaagactaccacagaaaacaagaatatcttcatttaatgaaatctttaaaaaaggtgattgctgcatctctatggaattatcttctggtataatttggccatgcagaaaagcataacaa

SEQ ID NO: 523974 - DNA, 120 bp, Artificial Sequence
  ENSG00000165650_52 (sequence is synthesized)
agtccacttttcctaaacaaaattgctgttttgcagactgccccaaaacatttttttactattgtttccttatggattatcaagtttatgggtttcctttggctatgtattagtaattag

SEQ ID NO: 523975 - DNA, 120 bp, Artificial Sequence
  ENSG00000165650_53 (sequence is synthesized)
actttaaaatatattttctacattagtattagctgagtgaatggcttagacaaactgagcaacattttagcattattagcaatcataataggctatacttcttcatatcaagccttatat

SEQ ID NO: 523976 - DNA, 120 bp, Artificial Sequence
  ENSG00000165650_54 (sequence is synthesized)
tcaatatcagaagtacttgaaataagtggctattttgtgatgctgggaggagaaaacacaacctaaaaattttgaggggtactatcaagttctaaatgtatagctgaattttttttaaag

SEQ ID NO: 523977 - DNA, 120 bp, Artificial Sequence
  ENSG00000165650_55 (sequence is synthesized)
aaagcaatttggaaatatttggctcttaaaaataagataaataataaaatgttaagtcccctaaaagtgaataaattttaaatacctacttttaaaaatactgtcttctaaattgacata

SEQ ID NO: 523978 - DNA, 120 bp, Artificial Sequence
  ENSG00000165650_56 (sequence is synthesized)
cttttcttaccaaaagaaggagaggttcccctaattccttttgggccatagatccgcttttaggatctgattaaagatgtggactttcaccgcaggaagatacccatgggcacaccattc

SEQ ID NO: 523979 - DNA, 120 bp, Artificial Sequence
  ENSG00000165650_57 (sequence is synthesized)
aaaatgtatcagatttcaacggttttacaaactcccccgggattaagtcaaatgggtggatattacagctgttttcatcagatatggttatttgttgacaaccatcaggacaacaatgtt

SEQ ID NO: 523980 - DNA, 120 bp, Artificial Sequence
  ENSG00000165650_58 (sequence is synthesized)
tatagatggaaggataacttcctggtttttttccacattgaatgtggctagttacatatctcaatttaaaataaattgtggaaagccaaaaaagtatggtcaagctaacctggggtggct

SEQ ID NO: 523981 - DNA, 120 bp, Artificial Sequence
  ENSG00000165650_59 (sequence is synthesized)
tttacctgatgcctacaagcacagaaaaatagtttttaattaaatatccacagtcaaaatgataccttatgtattttattccaacaacatttggtttataaaggaatacaaacaggcaca

SEQ ID NO: 523982 - DNA, 120 bp, Artificial Sequence
  ENSG00000165650_60 (sequence is synthesized)
aaacatggttcagaagatttattaagtaaacttgctaaaatatggacagatacacttagcagtcaaacagttgaatattcattgctacctcattaaagtttttgtatctgtattaccagg

SEQ ID NO: 523983 - DNA, 120 bp, Artificial Sequence
  ENSG00000165650_61 (sequence is synthesized)
tccaaacataaaaaccacctctgttcaaaaaataaatgttcagagagctgtatgttctttgttctggtatgtacattttaaaaaaacacctctttccagtcttgctaaccaagaatatta

SEQ ID NO: 523984 - DNA, 120 bp, Artificial Sequence
  ENSG00000165650_62 (sequence is synthesized)
gtcatataaaagaacttagaatttttttccccaagtacaagctatcttttgctccaaaacagttctgaaggttttatttatattttatcttatcccgagggaccaacagcaggcatacct

SEQ ID NO: 523985 - DNA, 120 bp, Artificial Sequence
  ENSG00000165650_63 (sequence is synthesized)
ttgccaggccttcttgcagaaagacacagagccgtaaaggcaaaaataaaattgcaataaagtatatggtattgggggcagggagaaccagaaaccctcaaagagaaccaatttgtagca

SEQ ID NO: 523986 - DNA, 120 bp, Artificial Sequence
  ENSG00000165650_64 (sequence is synthesized)
cgttcttttttaaggctctacccctgtagaagtaagaaactagcctgcctttttagccatatgagagtttcctccagagccatcttccaaagtggcagacttggccaagttgcccaatgc

SEQ ID NO: 523987 - DNA, 120 bp, Artificial Sequence
  ENSG00000165650_65 (sequence is synthesized)
caaataagtgagttggaagttcgtttgcttcaaacacactgcacttagaaaccagacttgaaataatcgaagccccacagaaaagcttcatgaaacgaagtgttactttcctagagaata

SEQ ID NO: 523988 - DNA, 120 bp, Artificial Sequence
  ENSG00000165650_66 (sequence is synthesized)
agaaagtcacaagattgaggagtctgttctaaagttctttgctccttgatgtcgaagttaacacaaacacaatcttagcttaacgaaactaagtaatttttgtttatgattatagaactg

SEQ ID NO: 523989 - DNA, 120 bp, Artificial Sequence
  ENSG00000165650_67 (sequence is synthesized)
caggattcacaagtagtattagagacattccacactgcacactccagtcatatctcttaacaaaatgacataaattgacaatgttcactaacagtatttgctgttacactgaaaaggcac

SEQ ID NO: 523990 - DNA, 120 bp, Artificial Sequence
  ENSG00000165650_68 (sequence is synthesized)
atcaatgttgtcatgcttagaaaaatacacaacactgcacactggatgatatagttagcacatacatttttagatgttccatttttcttttctgcctgatcactattatttttacttctt

SEQ ID NO: 523991 - DNA, 120 bp, Artificial Sequence
  ENSG00000165650_69 (sequence is synthesized)
aatatatgattcaagacataatttcattcttcattttcatttaaaatttgtcttcacattgatgtgaacaactttcaggagtctaaaaaatagtagtttcagacaacctaaaataaatat

SEQ ID NO: 523992 - DNA, 120 bp, Artificial Sequence
  ENSG00000165650_70 (sequence is synthesized)
attcctagaaaacacttggatgacctgcaaacagatcaaagatatagtcagatattaaagtcagagcagctgttttcagcttcttgtttccttttctaaaacttgaagtagatggcgatt

SEQ ID NO: 523993 - DNA, 120 bp, Artificial Sequence
  ENSG00000165650_71 (sequence is synthesized)
aaccttatcatgtttaaacaaccttgacagtataaggtacatgtaccctcaattttcttcatccagtaagacaagtatgcatcttaaagggaaagcttttagttcataacaatatgtttg

SEQ ID NO: 523994 - DNA, 120 bp, Artificial Sequence
  ENSG00000165650_72 (sequence is synthesized)
gttgcttttctctgctttcggaacatttactgtttttcctttattggctttagtgtttgctgccaaccagataacatgttaacatataatttacaactctctctaggtaggtgattacat

SEQ ID NO: 523995 - DNA, 120 bp, Artificial Sequence
  ENSG00000165650_73 (sequence is synthesized)
agaaaactaatgccagctaagatttatggattcaaaagataactgacacaagttcttgtcctctacacttgagagaactagctgtttaacgcataaatatattgatagtaactacaagtt

SEQ ID NO: 523996 - DNA, 120 bp, Artificial Sequence
  ENSG00000165650_74 (sequence is synthesized)
aaataacattcagtgtcactatataacatgctgtcttacttgattctgtttttcagacttcattctagtttctctttgttggaagagtctcagagataatgtgtgctttaattttaaaca

SEQ ID NO: 523997 - DNA, 120 bp, Artificial Sequence
  ENSG00000165650_75 (sequence is synthesized)
ctcattaccaatatgatttttgcccaaatgtttgttaatgtaagttaaaaaattatatttggtttggattcaaatatttatagatttacacaatacctatttcatcaaaatatattgtat

SEQ ID NO: 523998 - DNA, 120 bp, Artificial Sequence
  ENSG00000165650_76 (sequence is synthesized)
gatatttaataaaattaaatacataaaataaagtttcaacactatttatacaaacccctagaaaagcttctttttctttataaggctgttggcaatcgaccataaccatggaaaggaaat

SEQ ID NO: 523999 - DNA, 120 bp, Artificial Sequence
  ENSG00000165650_77 (sequence is synthesized)
aataacctttggttttactctttcaccagggatggatggtatgactaagacagttctggatgagttgtgtcactggaaacactgttttatacaattaaacactttgatgatttttgagga

SEQ ID NO: 524000 - DNA, 120 bp, Artificial Sequence
  ENSG00000165650_78 (sequence is synthesized)
agcggggagatcgacttatcgccattggagttcaaactgagagatgtcatctaacctaagaagagatagaaagcaattaggagttagcatcctggcactctttttgggatcctgtgtcat

SEQ ID NO: 524001 - DNA, 120 bp, Artificial Sequence
  ENSG00000165655_0 (sequence is synthesized)
ggctggacacgcagcggctcgcatcgcagagcgcagcgccggcgcggggccgcgagaacgcagcgcaggggagcagcccgaggcggacaccgcgagccgcccggcactcccgcagtccag

SEQ ID NO: 524002 - DNA, 120 bp, Artificial Sequence
  ENSG00000165655_1 (sequence is synthesized)
cagtccagccggctcctctagcccggccacggctccgctgcgggccacccaggattactcgcgtctggctccaggcgccgagaaggcgcgctgggcgcccgtggccgccgcgccagctcc

SEQ ID NO: 524003 - DNA, 120 bp, Artificial Sequence
  ENSG00000165655_2 (sequence is synthesized)
ctcccggggcgagcgcgcagccccgagcccgccccgcgcctcccggagccctcccccccgctgctcccatgcgcgcgggtgggtcatgagcacagcgccctcgctttctgccctaagaag

SEQ ID NO: 524004 - DNA, 120 bp, Artificial Sequence
  ENSG00000165655_3 (sequence is synthesized)
tcgctttctgccctaagaagcagtaagcacagcggcggcggcggcggcggaggcggaggcggcggtgcagaccctgcctggaccagcgcgctctctggaaatagctccggccccggccca

SEQ ID NO: 524005 - DNA, 120 bp, Artificial Sequence
  ENSG00000165655_4 (sequence is synthesized)
ggctcgtccccggccggcagcaccaagccttttgtgcacgccgtgcccccctctgaccccctgcgccaggccaaccgcctgccaatcaaggtgctgaagatgctgacggcacgaactggc

SEQ ID NO: 524006 - DNA, 120 bp, Artificial Sequence
  ENSG00000165655_5 (sequence is synthesized)
cacattttgcaccccgagtacctgcagcccctgccttccacgccggtcagccccatcgagctcgatgccaagaagagcccgctggcgctgttggcgcaaacatgttcgcagatcgggaag

SEQ ID NO: 524007 - DNA, 120 bp, Artificial Sequence
  ENSG00000165655_6 (sequence is synthesized)
cccgacccctcgccctcctccaaactctcctcggttgcctccaacgggggcggcgcgggcggtgccggcggcggtgctgcgggcgacaaggacaccaaatcgggccccctgaagctgagc

SEQ ID NO: 524008 - DNA, 120 bp, Artificial Sequence
  ENSG00000165655_7 (sequence is synthesized)
gacatcggcgtggaggacaagtcgagtttcaagccgtactccaaacccggctcggataagaaggagccgggaggcggcggtggaggcggtggcggtggcgggggcggcggcgggggtgtt

SEQ ID NO: 524009 - DNA, 120 bp, Artificial Sequence
  ENSG00000165655_8 (sequence is synthesized)
tcgtcggagaagtcgggattccgggtaccgagcgccacctgccagccattcacgcccaggacaggcagcccgagctccagcgcctcggcctgctcgccgggaggtatgctgtcctcggcc

SEQ ID NO: 524010 - DNA, 120 bp, Artificial Sequence
  ENSG00000165655_9 (sequence is synthesized)
gggggtgccccggagggcaaggacgacaagaaagacaccgacgtgggcggcggtggcaagggcaccgggggcgcctcggccgaagggggacccacggggctggcacacggccggattagc

SEQ ID NO: 524011 - DNA, 120 bp, Artificial Sequence
  ENSG00000165655_10 (sequence is synthesized)
tgcggcggcgggattaatgtggatgtgaaccagcatccggatgggggcccgggaggcaaggctctgggctcggactgcggcggttcatcgggctccagctccggctccggccccagcgcg

SEQ ID NO: 524012 - DNA, 120 bp, Artificial Sequence
  ENSG00000165655_11 (sequence is synthesized)
cccacctcctcctcagtgttgggctctgggctggtggctcccgtgtcaccctacaagccgggccagacagtgttccctctgcctcccgcgggtatgacctacccaggcagcctggccggg

SEQ ID NO: 524013 - DNA, 120 bp, Artificial Sequence
  ENSG00000165655_12 (sequence is synthesized)
gcctacgccggctacccgccccagttcctgccacacggcgtggcacttgaccccaccaagccgggcagcctggtgggggcgcagctggcggcggccgcggccgggtctctgggctgcagt

SEQ ID NO: 524014 - DNA, 120 bp, Artificial Sequence
  ENSG00000165655_13 (sequence is synthesized)
gctaccactgcgctagccacctggcaggggcggcggccgccagcgcttcttgcgcacatgatccggctgctgcggctgcggcgctgaagtccggatacccgctggtgtaccccacgcacc

SEQ ID NO: 524015 - DNA, 120 bp, Artificial Sequence
  ENSG00000165655_14 (sequence is synthesized)
cgctgcacggtgtgcactcctcgctaacggccgccgcggctgctggcgccacaccgccctccctggccggccaccccctctacccctacggctttatgctccctaacgacccactccccc

SEQ ID NO: 524016 - DNA, 120 bp, Artificial Sequence
  ENSG00000165655_15 (sequence is synthesized)
acatctgcaactgggtgtcggccaacgggccgtgcgacaagcgcttcgccacgtccgaagagctgctgagccacttgcggacccatacggcatttcccgggacagacaaactgctgtcgg

SEQ ID NO: 524017 - DNA, 120 bp, Artificial Sequence
  ENSG00000165655_16 (sequence is synthesized)
gctaccccagctcgtcgtctctggccagcgctgccgcggccgccatggcttgccacatgcacatccccacctcgggcgcaccgggcagccctgggacgctggcgctgcgcagcccccacc

SEQ ID NO: 524018 - DNA, 120 bp, Artificial Sequence
  ENSG00000165655_17 (sequence is synthesized)
acgcgctgggactcagcagccgctaccacccctactccaagagcccgcttcccacgcctggcgcccccgtgccggtgcccgccgccaccggaccgtactactccccctacgccctctacg

SEQ ID NO: 524019 - DNA, 120 bp, Artificial Sequence
  ENSG00000165655_18 (sequence is synthesized)
gacagagactgaccaccgcctcggcgctggggtatcagtgagggcggccgggagggcgagcgagggagaggagggagagggggaggggaggagtccagggagaggcgggatcacggccca

SEQ ID NO: 524020 - DNA, 120 bp, Artificial Sequence
  ENSG00000165655_19 (sequence is synthesized)
ggctgctgacacccgcgcgtggggaggactcgggccacgaaaggaaagaaatgtataccgtatctatctacccgacagcagcgaccgagacccggtgggacactccccttctccccactt

SEQ ID NO: 524021 - DNA, 120 bp, Artificial Sequence
  ENSG00000165655_20 (sequence is synthesized)
tcacctccccacccaaactttataaaagttgaaaaaatatcatttgactttttatagaaaaaaaaaggaaaaaataattgagaaagtgttcatctgaggactgcatcggtggacactggt

SEQ ID NO: 524022 - DNA, 120 bp, Artificial Sequence
  ENSG00000165655_21 (sequence is synthesized)
atttatttatgttagctccaagcggaccggtggttcaaaagtgcattatttagtttgagctctgtaggtaaaaaggaggtgggaaaaattttaaaacttgagggtaaaaatgtggaaaac

SEQ ID NO: 524023 - DNA, 120 bp, Artificial Sequence
  ENSG00000165655_22 (sequence is synthesized)
aaaccctcccatcccttgtagattataaataaaagcaaaaccgccacagaactagaggtcttctctttaatgttactttaaaattgctatgattgtattgtacgttatttaatgtctgat

SEQ ID NO: 524024 - DNA, 120 bp, Artificial Sequence
  ENSG00000165655_23 (sequence is synthesized)
tgaaacacaaatttacatgcatgtttgttacaaaaaaaatgaaaaaaaaagtcacaatttgtcagctctgatttcaaattgcaattatttttaaggtgtataccatcgaagagaatgggt

SEQ ID NO: 524025 - DNA, 120 bp, Artificial Sequence
  ENSG00000165655_24 (sequence is synthesized)
caacaaaaaaaaaaagaaaaagaaaaaattctattccaaaacctcatttgccttattttgttctttaaaaggaacacttaactatttttaatttttaagtccacccgctgagaaggggac

SEQ ID NO: 524026 - DNA, 120 bp, Artificial Sequence
  ENSG00000165655_25 (sequence is synthesized)
ttttaagtccacccgctgagaaggggacaaggtttacgtcatgtactaaaataatagacaatgtatcgctttaaagattaaaattccgtatatttgatgtattaaagggttttacttctt

SEQ ID NO: 524027 - DNA, 120 bp, Artificial Sequence
  ENSG00000165660_0 (sequence is synthesized)
agatttccatcatggcggcgtccatttcgggctacaccttcagtgctgtgtgtttccacagcgccaacagcaacgcggaccacgaaggatttttactgggagaggtaagacaagaggaaa

SEQ ID NO: 524028 - DNA, 120 bp, Artificial Sequence
  ENSG00000165660_1 (sequence is synthesized)
cgtttagcatcagtgactcacaaatcagcaacacagaatttctgcaagtaattgaaatccataaccatcagccttgttcaaaactttttagtttttatgactacgcaagcaaagtgaatg

SEQ ID NO: 524029 - DNA, 120 bp, Artificial Sequence
  ENSG00000165660_2 (sequence is synthesized)
aggagagtttggacaggattcttaaagatcggagaaagaaagtcattgggtggtacagattccggcgcaatacgcagcagcagatgtcctacagagagcaggttcttcacaagcagctca

SEQ ID NO: 524030 - DNA, 120 bp, Artificial Sequence
  ENSG00000165660_3 (sequence is synthesized)
cccgcatcctcggcgtgcccgacctcgtctttcttctcttcagcttcatctccactgccaacaattccactcacgctttagaatatgtgctcttcagaccaaatagaaggtataatcaga

SEQ ID NO: 524031 - DNA, 120 bp, Artificial Sequence
  ENSG00000165660_4 (sequence is synthesized)
ggatatcactcgctattcccaatctaggaaatactagccagcaagagtacaaagtgtcttcagtgccaaatacttctcagagttatgccaaagtgattaaagaacatggtactgactttt

SEQ ID NO: 524032 - DNA, 120 bp, Artificial Sequence
  ENSG00000165660_5 (sequence is synthesized)
ttgacaaggatggagtgatgaaagacatcagggcgatttatcaggtttataatgcacttcaggagaaagttcaggcagtgtgtgcagatgttgaaaagagtgagcgagttgttgaatctt

SEQ ID NO: 524033 - DNA, 120 bp, Artificial Sequence
  ENSG00000165660_6 (sequence is synthesized)
gtcaggcagaagtgaacaaattaagaagacaaatcactcagaggaaaaatgaaaaggaacaagaaagaagattgcagcaggcagtgttaagcagacagatgccgtctgaaagcttggacc

SEQ ID NO: 524034 - DNA, 120 bp, Artificial Sequence
  ENSG00000165660_7 (sequence is synthesized)
cagcgttcagtcctcggatgccgtcctctgggtttgcagctgaaggcagaagtacacttggagatgcagaggcctcggatcctcctcccccttactctgattttcacccaaacaatcaag

SEQ ID NO: 524035 - DNA, 120 bp, Artificial Sequence
  ENSG00000165660_8 (sequence is synthesized)
aaagtactttgagccactctcgcatggaaaggagtgtctttatgcctcgacctcaagctgtgggctcttccaattatgcttccaccagtgccggactgaagtatcctggaagtggggctg

SEQ ID NO: 524036 - DNA, 120 bp, Artificial Sequence
  ENSG00000165660_9 (sequence is synthesized)
accttcctcctccccaaagagcagctggagacagtggtgaggattcagacgacagtgattatgaaaatttgattgaccctacagagccttctaatagtgaatactcacattcaaaggatt

SEQ ID NO: 524037 - DNA, 120 bp, Artificial Sequence
  ENSG00000165660_10 (sequence is synthesized)
ctcgacccatggcacatcccgacgaggaccccaggaacactcagacctcccagatttaactaaacaaaagaaactctccacctagcactgtttttcttcattgcttactgagagggtttt

SEQ ID NO: 524038 - DNA, 120 bp, Artificial Sequence
  ENSG00000165660_11 (sequence is synthesized)
tgagaacttaatctggggggagaactgctttctcagataccttaactcccgagaagagagtccttgtgcacagaacttgtgggagcctccatccgctgctctttacctttggatacagtg

SEQ ID NO: 524039 - DNA, 120 bp, Artificial Sequence
  ENSG00000165660_12 (sequence is synthesized)
atttaggcaaagtgaaacttatcagcgtagtttctgttctttaaaataaattggaaattagagactaagcacaattagtctataaatgttctataaatcaaaaacttacctcttgcacta

SEQ ID NO: 524040 - DNA, 120 bp, Artificial Sequence
  ENSG00000165660_13 (sequence is synthesized)
tcatgccttgaaatttactttttcaaagggaaacaagtttagcagcagccttcaaagaacttctttctatgatgagccaaattcatctttgccagaaaagaaattttgataattccaaga

SEQ ID NO: 524041 - DNA, 120 bp, Artificial Sequence
  ENSG00000165660_14 (sequence is synthesized)
agcctgattagaacaaatcagatataccttctcttgtctgcatgactttgtgagataaaagagagggcttccaacttttttctactagcttgatatgtattatcacttaaaatggttgcc

SEQ ID NO: 524042 - DNA, 120 bp, Artificial Sequence
  ENSG00000165660_15 (sequence is synthesized)
tttaaaaaaaaaaagtagagatactaattaccagtaagtaatcatccaaataaatacgtcataaaataaattaattattttttctttgatggattacagtgactactgtgttgcactggc

SEQ ID NO: 524043 - DNA, 120 bp, Artificial Sequence
  ENSG00000165660_16 (sequence is synthesized)
acatttatggtctctgttctggaatcttggaggacacacagcagtggagaacagaaggagtgagttttataatgaacagattccagacacggtaggtttagctgagttcatacagaggag

SEQ ID NO: 524044 - DNA, 120 bp, Artificial Sequence
  ENSG00000165660_17 (sequence is synthesized)
atataactcatttagatcttctgacaaatcctagtgttagttttatctgtggaggaaagacatttaataataaactgtttgggaatcttggtgaataaagattcattttcaagctgaata

SEQ ID NO: 524045 - DNA, 120 bp, Artificial Sequence
  ENSG00000165660_18 (sequence is synthesized)
accatacttattttattttaagttgccatttggggaataattgcagtatgtgtagagactctcttgggatgcacttatatttttatttaatgactacttgttttctagttttgcccacaa

SEQ ID NO: 524046 - DNA, 120 bp, Artificial Sequence
  ENSG00000165660_19 (sequence is synthesized)
cgtctgaaaccactaagacattcaggagcatgttgagcttctggtttggaaacagcaagacccaccatttatgacaaggacagccatgaggttaatacttggagtttaactgccttccct

SEQ ID NO: 524047 - DNA, 120 bp, Artificial Sequence
  ENSG00000165660_20 (sequence is synthesized)
ttgaactagttaaaatctgtaagaataaggaagttgttgaaggcttaaaatctgggttctgaaaaagtagtttcagtttataggatacacatttactcactgagctccagttccaatact

SEQ ID NO: 524048 - DNA, 120 bp, Artificial Sequence
  ENSG00000165660_21 (sequence is synthesized)
aaattagacagtatcatatagacggaaaatgaaatgctagaactgccgttctttggatcgccactctatgggggtctgtcttttaactactctcctggttatgttggccttacaccactg

SEQ ID NO: 524049 - DNA, 120 bp, Artificial Sequence
  ENSG00000165660_22 (sequence is synthesized)
ccatttgatttaaaacgctgcagaccactttatctgcaaatgtgttccagttgttatcagctacctactacgcagcttcagcgccagtgtgaatttatttttttttaagtgccattaccg

SEQ ID NO: 524050 - DNA, 120 bp, Artificial Sequence
  ENSG00000165660_23 (sequence is synthesized)
tctcctctgttcagattttgacattcaggaaaatatttttattttgatgccatactgaaatctacaatgtatatctgacaaagcagttaaatgtgacaataaaaaacttatttaatcatg

SEQ ID NO: 524051 - DNA, 120 bp, Artificial Sequence
  ENSG00000165661_0 (sequence is synthesized)
ccagggtgaaagttcagcgcgccggcggcacttccaacatggcggcggccggggcggcggtggcgcgcagcccgggaatcggagcgggacctgcgctgagagcccggcgctcgcccccgc

SEQ ID NO: 524052 - DNA, 80 bp, Artificial Sequence
  ENSG00000165661_1 (sequence is synthesized)
gggcggtgcggcgcggctgtaccgcgcgggcgaggacgccgtgtgggtgctggacagcggcagcgtgcgcggggccaccg

SEQ ID NO: 524053 - DNA, 120 bp, Artificial Sequence
  ENSG00000165661_2 (sequence is synthesized)
gcggcagcgtgcgcggggccaccgccaacagctcggccgcgtggctcgtgcagttctactcgtcgtggtgtggccactgcatcggctacgcgcccacttggcgggccctggctggggatg

SEQ ID NO: 524054 - DNA, 120 bp, Artificial Sequence
  ENSG00000165661_3 (sequence is synthesized)
tgcgagactgggccagtgccattcgcgtcgcagctctggactgcatggaagagaagaaccaggccgtgtgccatgactacgacatccacttctaccccaccttccggtattttaaagcat

SEQ ID NO: 524055 - DNA, 120 bp, Artificial Sequence
  ENSG00000165661_4 (sequence is synthesized)
ttacaaaggagtttacaactggagaaaattttaaaggacctgaccgagagctgcgaacagtcagacagacgatgattgacttcctgcagaaccacacggaaggaagccggccccctgcct

SEQ ID NO: 524056 - DNA, 120 bp, Artificial Sequence
  ENSG00000165661_5 (sequence is synthesized)
gcccgcgcctagaccccattcagcccagtgatgttctttcccttcttgacaaccgtggcagccattacgtggctattgtctttgaaagcaacagctcctaccttggacgggaggtgatct

SEQ ID NO: 524057 - DNA, 120 bp, Artificial Sequence
  ENSG00000165661_6 (sequence is synthesized)
tagacctgatcccgtatgaaagcatcgtggtgacccgagcactggacggggacaaagcatttctggagaaacttggtgtttcttcagtcccttcgtgttacctgatctacccaaatgggt

SEQ ID NO: 524058 - DNA, 120 bp, Artificial Sequence
  ENSG00000165661_7 (sequence is synthesized)
cgcatggattgattaacgtcgtgaagcctctgcgggccttcttttcgtcttatttgaagtcattgccggatgtgaggaaaaaatcgcttcccttgcctgaaaagccacacaaagaagaaa

SEQ ID NO: 524059 - DNA, 120 bp, Artificial Sequence
  ENSG00000165661_8 (sequence is synthesized)
attcagaaatcgtggtttggagagaatttgacaagtcgaagctgtacacggtggacctggagtcagggctacactacctcctgcgggtggagctggcagcccacaagtccctggccggag

SEQ ID NO: 524060 - DNA, 120 bp, Artificial Sequence
  ENSG00000165661_9 (sequence is synthesized)
cagagctgaagacgctcaaggactttgtgactgtcttggccaagctgttccctggacggccgccagtcaagaagctgttggagatgctgcaggagtggctggccagccttcccctggaca

SEQ ID NO: 524061 - DNA, 120 bp, Artificial Sequence
  ENSG00000165661_10 (sequence is synthesized)
ggatcccctacaacgccgtgcttgacctggtcaacaacaagatgcggatttctggaatattccttactaatcacataaagtgggttggatgtcaaggaagccgatctgagttgaggggtt

SEQ ID NO: 524062 - DNA, 120 bp, Artificial Sequence
  ENSG00000165661_11 (sequence is synthesized)
acccgtgttctctctggaaactgttccacactttgactgttgaagcctcgacccacccagatgcactggttggcacaggctttgaagacgacccccaggctgtgctgcagacaatgagga

SEQ ID NO: 524063 - DNA, 120 bp, Artificial Sequence
  ENSG00000165661_12 (sequence is synthesized)
ggtacgttcacaccttctttgggtgtaaggaatgtggtgagcactttgaggaaatggctaaagaatccatggactcggtgaaaaccccagaccaagccatcctctggctgtggaagaagc

SEQ ID NO: 524064 - DNA, 120 bp, Artificial Sequence
  ENSG00000165661_13 (sequence is synthesized)
ataatatggtgaacggccgcctggcaggccatctgagtgaggatccccggtttccaaagcttcagtggcccactccggacctctgcccagcctgccatgaggaaattaagggcctggcca

SEQ ID NO: 524065 - DNA, 120 bp, Artificial Sequence
  ENSG00000165661_14 (sequence is synthesized)
gctgggatgaaggccacgtgctcacattcttgaagcagcactatggccgcgacaacctcttagacacgtattccgcagaccagggggattccagtgaaggaggaaccctggccaggggtg

SEQ ID NO: 524066 - DNA, 120 bp, Artificial Sequence
  ENSG00000165661_15 (sequence is synthesized)
aggaagaggagaaaagactcactcccccagaggtgtcccatggagaccgagacacccagagcgtccgtccacctggtgcactgggccccaggcctgcccttccagagagcttgcatcaca

SEQ ID NO: 524067 - DNA, 120 bp, Artificial Sequence
  ENSG00000165661_16 (sequence is synthesized)
gcttggacgggaaactccagagtctggatgggcccggggcccacaaggaggtgggcggggccgcacccttcctcggggttgacttctccagcctggacatgagtctctgtgtcgtgctgt

SEQ ID NO: 524068 - DNA, 120 bp, Artificial Sequence
  ENSG00000165661_17 (sequence is synthesized)
acgtggcttcatccctgttcctcatggtgatgtacttcttcttccgggtgaggtccaggcggtggaaggtcaagcaccaccacccggccgtgtgagtgcccgggtgctgccagccacggc

SEQ ID NO: 524069 - DNA, 120 bp, Artificial Sequence
  ENSG00000165661_18 (sequence is synthesized)
acatcggatggcaccttttggcttcaaagtcctggttttacaaacgctcttctaacaagggaagaacacggggtaattttgtggggatatttgcattcctggcgtactcaagtctgttca

SEQ ID NO: 524070 - DNA, 120 bp, Artificial Sequence
  ENSG00000165661_19 (sequence is synthesized)
tgctccttttgcaggtcttacagcaaaaagacttctgtatttttactcttctagatgtgaaaagagggtgcagagtccaggccagatagtcttccccacacactttcatctcgtttcctc

SEQ ID NO: 524071 - DNA, 120 bp, Artificial Sequence
  ENSG00000165661_20 (sequence is synthesized)
cactccgccccatcctgcagggccttgtttttgtatttggagaacctcgcccatcccccccgcggctcctggctcccccccactcccctcgctccccctccccccgctccccccacgccc

SEQ ID NO: 524072 - DNA, 120 bp, Artificial Sequence
  ENSG00000165661_21 (sequence is synthesized)
cctgctccaggctgccaagtgttttcctttagccgggcggggacagacagagccggaagcgcagtcggcctctgcagcccctccaagcaagtgctccagggactatcctgtgtttgtagc

SEQ ID NO: 524073 - DNA, 120 bp, Artificial Sequence
  ENSG00000165661_22 (sequence is synthesized)
tgcttccctagggcaggttcctgagggctctccttgttcctccgggtgttcgacaccagacgtggggatttcaacaggggaggagccaaggaattctgtggctgtgctgcgtttcagaaa

SEQ ID NO: 524074 - DNA, 120 bp, Artificial Sequence
  ENSG00000165661_23 (sequence is synthesized)
ataacccccagaggccttgggctgtggacctgggggttggaaggatgggggctcatttaaccctcagaggcagcgcctttgtctgtctatctggtgacaagagagagacaagtaaatggg

SEQ ID NO: 524075 - DNA, 120 bp, Artificial Sequence
  ENSG00000165661_24 (sequence is synthesized)
ggccgttgggacggcgggtgcctggagggcagctctgggctcagcgggcagtgcttagagcacaggcccctctgttgggggatggggaggagagcagtctgcccttgggagcgtaggccc

SEQ ID NO: 524076 - DNA, 120 bp, Artificial Sequence
  ENSG00000165661_25 (sequence is synthesized)
cagggagacttctaaagccccccctgtcgtctgctcttcacccagcaccacagaggcacctgctgcacacacaagcatctcactcggcccacggagggggccaggcttcctttgcctgaa

SEQ ID NO: 524077 - DNA, 120 bp, Artificial Sequence
  ENSG00000165661_26 (sequence is synthesized)
gctgttttgggaagggtctccacacaggcactgatctcccaagcttttgtcatgatgtcttttaccatttgataattttaaacattgtttttaaacccaaaacatttagtggtccgttgc

SEQ ID NO: 524078 - DNA, 120 bp, Artificial Sequence
  ENSG00000165661_27 (sequence is synthesized)
ctctgaagatgtaaacaaacaaatacactatttctgggaacatttatattgagattctttgtggctattggtgtgtctcacaggcaaaatttgatttggctaaaataggctcagatgtat

SEQ ID NO: 524079 - DNA, 120 bp, Artificial Sequence
  ENSG00000165661_28 (sequence is synthesized)
gtgtgtgtgtgtatgagagagagagagactttgacggttgtagatattttttccgctttgcctactttatgttgtataatcatgtgtttactaacaagttgatgacatggatgtattcat

SEQ ID NO: 524080 - DNA, 120 bp, Artificial Sequence
  ENSG00000165661_29 (sequence is synthesized)
tgtttactaacaagttgatgacatggatgtattcataagaccatgtaatattgatgtgattgttgtcgcttgagaaaaaaaggcaacagctgattctttcaacaactgtcacagaatggc

SEQ ID NO: 524081 - DNA, 120 bp, Artificial Sequence
  ENSG00000165661_30 (sequence is synthesized)
tgggctgagaacgctgcccagggccctgcagctggcgggagaggtgtctggtgggagcggtgtctggtgcgtcagcctgctgcttcgtgtctcactcgagagttgcttctggtttcacac

SEQ ID NO: 524082 - DNA, 120 bp, Artificial Sequence
  ENSG00000165661_31 (sequence is synthesized)
tttttaacccctctgtgctttagcagccgtgaccttgccttcattgcttcatccagtgcaggcctgggttattgaagacaccaaagtgtttctcttccagtttgaaaaccaggcaggttt

SEQ ID NO: 524083 - DNA, 120 bp, Artificial Sequence
  ENSG00000165661_32 (sequence is synthesized)
acacgtgggtttcagtgtatttgcctttgaacccttcaaactaaactttagccttttggctggtgttgaatgtctttagctggggtgacctggagtgacctgggacggtgttgtggttta

SEQ ID NO: 524084 - DNA, 120 bp, Artificial Sequence
  ENSG00000165661_33 (sequence is synthesized)
ccgtctccagcttcagcctttccagaaacccttgtggagggcagtgttggctgcaggtttcatcatattgcagtttgaggtcaccactatttggggaacaagcttgcgtcctgctgaggg

SEQ ID NO: 524085 - DNA, 120 bp, Artificial Sequence
  ENSG00000165661_34 (sequence is synthesized)
gcaggattttcagcagagcgtcggtggggctgggccgtcgtggaggtggccccaggagtcatatggccatactcagacacaccttgtgtggcctgctcagagctggatgccacctttagg

SEQ ID NO: 524086 - DNA, 120 bp, Artificial Sequence
  ENSG00000165661_35 (sequence is synthesized)
taggcaatgtttagagtctattttctaaagttttaagtattttaagaggtattgagactaatgaatataatagttcagtaatttaaatgcttatttattttcagtggaaggatttttatt

SEQ ID NO: 524087 - DNA, 120 bp, Artificial Sequence
  ENSG00000165661_36 (sequence is synthesized)
agaagctaattgacatggaaatgtcagtgaaatttcttacctgcaaggaaagtgaacattttgtatttaagtaaactataatgtgcacattttaataaagaaatctgacatttgaaaaaa

SEQ ID NO: 524088 - DNA, 120 bp, Artificial Sequence
  ENSG00000165669_0 (sequence is synthesized)
gcgatgttgacggggtcctaagatggctgctgggcgaccacttcctgacagaagaaaagatgtggagtgggctgctacctcctggcctaaatgaaagtgacgctgagtcaaactcggaag

SEQ ID NO: 524089 - DNA, 120 bp, Artificial Sequence
  ENSG00000165669_1 (sequence is synthesized)
atgaagctacgttggagaactctggacttaacttacaggaagataaagaggatgagagcatcagaaaaacagaaatcatagatttctcaacagatgaaccaaaaactgaaacagagtcaa

SEQ ID NO: 524090 - DNA, 120 bp, Artificial Sequence
  ENSG00000165669_2 (sequence is synthesized)
atgtaaatgcctatgaagagtgtccttctggaattcccatagatatgtggaataaatttcaagaattgcataaaaaacattctgaacagaaaagcacaacctcaagattcagagggaaaa

SEQ ID NO: 524091 - DNA, 120 bp, Artificial Sequence
  ENSG00000165669_3 (sequence is synthesized)
aatgaaaaagaattacatagtgaaccgtcctcaaatgaaacccagtggaaagagcttactcagtattttggagtcaatgatagatttgacccgcctgttaaaaggaaaaaagttgagaag

SEQ ID NO: 524092 - DNA, 120 bp, Artificial Sequence
  ENSG00000165669_4 (sequence is synthesized)
tcaggccttgaaaagaggatagaccaggctgtggaggagtggaatattgagaaggctgaggaactcagcaaccagctagctactcgagagcttggtgtaaaaattgccaaagcagttgcc

SEQ ID NO: 524093 - DNA, 120 bp, Artificial Sequence
  ENSG00000165669_5 (sequence is synthesized)
tgccacaactttgtaaaagccaaaaaggaggttgaaaattcacaggctgcccgaaaaaagaagaaacttgcatgggggtttgaagcaaagaagagatgggaaaccaaaagcaacatggga

SEQ ID NO: 524094 - DNA, 120 bp, Artificial Sequence
  ENSG00000165669_6 (sequence is synthesized)
tacatgtaacttgccagagtgcttcaagacatttgtagactcaaatgctcaatttactgagaatgttttcctgcctatgttaatatgtcagaaaattgatagcactaaaacaaaaataag

SEQ ID NO: 524095 - DNA, 120 bp, Artificial Sequence
  ENSG00000165669_7 (sequence is synthesized)
aggcgcgatgttgacggggtcctaagatggctgctgggcgaccacttcctgacagctccagttaatgggactgccagcaggctagacatccttcgccggaatgtgcagcgcttagttctg

SEQ ID NO: 524096 - DNA, 120 bp, Artificial Sequence
  ENSG00000165669_8 (sequence is synthesized)
tgcccgggaggggcttctctctcttttgggattggagtgtggcattgccgccagaaagcctgcagaattccgggttgtgcagccaagcaggaacggtgtacctttctagacccatcctct

SEQ ID NO: 524097 - DNA, 120 bp, Artificial Sequence
  ENSG00000165669_9 (sequence is synthesized)
aaaatttgggattttgattatcagctcttttcagtctttctttaaggactttgtcctattgaagtgaataaaatgaagcattctgttatttgtataagaaatgtaagaaaaaaaatatag

SEQ ID NO: 524098 - DNA, 120 bp, Artificial Sequence
  ENSG00000165669_10 (sequence is synthesized)
aaagaagaggataggattttgtttatttgtatggatggacccttggtataaaatcacttttggcgctttccattcatttggtttagcacagccagtgagcttctcgtactttctttcttt

SEQ ID NO: 524099 - DNA, 120 bp, Artificial Sequence
  ENSG00000165669_11 (sequence is synthesized)
gcctcatatgattcacctgcctctgcctcccaaagttctgggagtacagacatgagctaccatgctgcccttgtattttcttatctgtacccagtgtaactacacgtttactggaactgt

SEQ ID NO: 524100 - DNA, 120 bp, Artificial Sequence
  ENSG00000165669_12 (sequence is synthesized)
gtttttaagactgacagttgtttataatggattagtcgtaagtaccaaaaagtctcagttgatattatctttacaaatgacttgaccttaatgttataaaagtagttactgttttttttt

SEQ ID NO: 524101 - DNA, 120 bp, Artificial Sequence
  ENSG00000165669_13 (sequence is synthesized)
aattggaggcagacttgatatttcagagttgcatagtaaaagcaatttgttaatttttgtgtactttcagataaactattacaataaagaaaggagcagaatgtagtatttggaagatga

SEQ ID NO: 524102 - DNA, 120 bp, Artificial Sequence
  ENSG00000165669_14 (sequence is synthesized)
tttaaattcagcaacgcctaaaaatgtcttcctaagtatttttctcagccatgtcattctttaaattatgagatggttcttagaagagaaaatggtgtaattgtattaaacagacaatta

SEQ ID NO: 524103 - DNA, 120 bp, Artificial Sequence
  ENSG00000165669_15 (sequence is synthesized)
taactcaagataatataactttgaaccttctaagaactgatttgtttggttttcctcccattccccattcctccttaaaagattgaatgaattaatgagcagaaagagaggattggtaac

SEQ ID NO: 524104 - DNA, 120 bp, Artificial Sequence
  ENSG00000165669_16 (sequence is synthesized)
atgggaaatcgttttcattagatgtacatttcctggttctgacaggaaaggggctccagaaaatcataaaacaagcaggtgaacaagaccaggtgtgtcggcacctccctgctcagtgcc

SEQ ID NO: 524105 - DNA, 120 bp, Artificial Sequence
  ENSG00000165669_17 (sequence is synthesized)
cagcggaggtaaagaaccactcagcatggtttttgtcagttcacctcttctgtcgttgtcagaggtttcctacctgtctgatataaactttctctgggttgataatataaattcagaaac

SEQ ID NO: 524106 - DNA, 120 bp, Artificial Sequence
  ENSG00000165669_18 (sequence is synthesized)
atgtaaaatgaatcatgattatattactgttatttttagacttaaaatagtaacaaaattttatttatggtggcacatttaatggctttttttttctgtgttctggaataagagaatacc

SEQ ID NO: 524107 - DNA, 120 bp, Artificial Sequence
  ENSG00000165669_19 (sequence is synthesized)
tagctactatttaagcatccaaaaatcatatcttgctttcatttagttgagaaaagccagcatagagaaagcaaagttttagaatattatgtgtcatactaattcagtatccagaccaaa

SEQ ID NO: 524108 - DNA, 120 bp, Artificial Sequence
  ENSG00000165669_20 (sequence is synthesized)
tgttggaaagtcttattttatgatttaatatcccttgttccattttacagatatgatcatgtaaaacttacctacaatattcatttcaaactgctaaattaggtaaatacagacttttag

SEQ ID NO: 524109 - DNA, 120 bp, Artificial Sequence
  ENSG00000165669_21 (sequence is synthesized)
tatagaaacctttcctctaaaaatccattatgggggaaatattcactatacaatccagtggttttgtctgaaatcctaaaaatgttatttttgagcaggcgagtggtatagatattctca

SEQ ID NO: 524110 - DNA, 120 bp, Artificial Sequence
  ENSG00000165669_22 (sequence is synthesized)
cacttggggccccgatatgggcatttccctttgacttcagtctcatttttttttttttttctgtttctactccttagagcatttagtgacccctgcaggcatgttgcacttcccatactg

SEQ ID NO: 524111 - DNA, 120 bp, Artificial Sequence
  ENSG00000165669_23 (sequence is synthesized)
aagccttgccagagtggcctcctgtagggtctgacttgggatcctgtccagccaaggaagcccttcttcagcctgctccagtgcccgcagttgccccctcagcatcccctcggggttctc

SEQ ID NO: 524112 - DNA, 120 bp, Artificial Sequence
  ENSG00000165669_24 (sequence is synthesized)
atgtagatgggaacattttaactacgcggaaggcaggcatttcagcagaattaagtatagcgggggctcatctaataaaggaagccacttctcccaagtcgtcactcctttctgggcatg

SEQ ID NO: 524113 - DNA, 120 bp, Artificial Sequence
  ENSG00000165669_25 (sequence is synthesized)
ggttgtggaaagctctaaaacgttatgtgtagcagaagaaggggttggagggaagatttgtggggacaggttgtcttggattggccctgctgacatgtcatttgagagcagttttatttt

SEQ ID NO: 524114 - DNA, 120 bp, Artificial Sequence
  ENSG00000165669_26 (sequence is synthesized)
atcctttctaataggaattaggtattttactcctagaaacattattccttgagtacgcatgctgctcaaaggatgtagtcatttgtccactccattctagtcacagcaaaataaggattc

SEQ ID NO: 524115 - DNA, 120 bp, Artificial Sequence
  ENSG00000165669_27 (sequence is synthesized)
tttttggatcagtaataactttggttcctaaaacttcaatatgtgcatttactaccaccagaatgcctgagttagatcagtaatgtaaacgtcagttattgttaactgagattaatatgt

SEQ ID NO: 524116 - DNA, 120 bp, Artificial Sequence
  ENSG00000165669_28 (sequence is synthesized)
ttcaggccgttggtatggcattaatgtaactatgatttactatttaagtactttaggctaaaacatcttactaaagaacagtaattttgagctttacagcactggttctgagaaagggaa

SEQ ID NO: 524117 - DNA, 120 bp, Artificial Sequence
  ENSG00000165669_29 (sequence is synthesized)
gttggcagtgcattcttgtttgggagccctcaggatgtttctgattttcagcagaacattctatgtctttcaccgaaaggagagattgaatatataatcttaggtttgctataattagtt

SEQ ID NO: 524118 - DNA, 120 bp, Artificial Sequence
  ENSG00000165669_30 (sequence is synthesized)
ctgatgacagagttaaatacctcagccaagactgtaaatcagtacgtaaacaggtttctgcaactgatcataaatctcaaactgcatattttaaacacttatttttttaggatgacagat

SEQ ID NO: 524119 - DNA, 120 bp, Artificial Sequence
  ENSG00000165669_31 (sequence is synthesized)
aagggagcagcaggctaaggataggaataaaatgttatctgaacttttaagtcacaacttagaactcacattaaaatcttctgattttctttataccttttgtctaaaatattatctttt

SEQ ID NO: 524120 - DNA, 120 bp, Artificial Sequence
  ENSG00000165669_32 (sequence is synthesized)
agcttattaataactttaataagacaagtttgaatttaattcacaaaaaatgaagatataatttataaaatgtccaaatttttgttaagacattactttttaagaaatgtgtgtcttgct

SEQ ID NO: 524121 - DNA, 120 bp, Artificial Sequence
  ENSG00000165669_33 (sequence is synthesized)
aaatataaaacatattgtatgaggttgttgtttaaacaaaatgagagttgtacattattttttaagagatgataaagtttgaggaggcaagccgatgttatgtcagatctcattttgaag

SEQ ID NO: 524122 - DNA, 120 bp, Artificial Sequence
  ENSG00000165669_34 (sequence is synthesized)
ttagtgaaacctagtctaatccagaaccaactgaatccaagttttccattttggcagaagttgcttttatttttagtatctggcagagcaacaaatgctttgcatgtcagttcaatattt

SEQ ID NO: 524123 - DNA, 120 bp, Artificial Sequence
  ENSG00000165669_35 (sequence is synthesized)
tttcctgccaactgtttattcattggcttaaaatttacactctactaaagtcttagctctgactttcatgaaacaaatagtaatatttggacaaaatatgtacatgaaaatctttttcca

SEQ ID NO: 524124 - DNA, 120 bp, Artificial Sequence
  ENSG00000165669_36 (sequence is synthesized)
gaaccaaatgtagactggtatttgtgacatcagtgccttctagcatggtgacgggtcgaaaaatactttgaaaagttgaaggctgtgtaaacccacggcagtgcatctcaagtgattttt

SEQ ID NO: 524125 - DNA, 120 bp, Artificial Sequence
  ENSG00000165669_37 (sequence is synthesized)
attatgaggtaatcagagtatctaggttttcaaatttaaattagtgggtgactttatgctagaaagtagaatatgtgttagaataaatttatcaatatatattcttggcctttgtaggat

SEQ ID NO: 524126 - DNA, 120 bp, Artificial Sequence
  ENSG00000165669_38 (sequence is synthesized)
actgagacaataaggtccatttttcatttttgaggttggggagctctgtagattttgataaaatgtgcagaactgcattctttaatctttattatttcatcctccctccacactgcttgc

SEQ ID NO: 524127 - DNA, 120 bp, Artificial Sequence
  ENSG00000165669_39 (sequence is synthesized)
tttaaaagaaaaaaatacctacacacattttctagtgttaactgctgtaatcagcatagacttcctgggaagggattcttgccttcagtaaaggacatgacagcatgtggccaatggaga

SEQ ID NO: 524128 - DNA, 120 bp, Artificial Sequence
  ENSG00000165669_40 (sequence is synthesized)
ttgccacgaggaaacctggaaaggcattgaaccattttgtgctactgttaaaatgaggtgtgttgtctctttattatctcctactcaatagtgagtattctggaggtgtctgttcccttt

SEQ ID NO: 524129 - DNA, 120 bp, Artificial Sequence
  ENSG00000165669_41 (sequence is synthesized)
ccggaatttcttcaaatacagagatgcttcagagtagcttcctgccacattggctttcatgatcttaatccctggaacacagctataggcttctgggagatagtttattaaatgccatgc

SEQ ID NO: 524130 - DNA, 120 bp, Artificial Sequence
  ENSG00000165669_42 (sequence is synthesized)
agaatgctatgtttttagatgtgcatgtaaatcaagaattagctgaggaatatctttttattagtagtagtagtaactcatttttagattcaagtaaagtttgttttccaggtgagatga

SEQ ID NO: 524131 - DNA, 120 bp, Artificial Sequence
  ENSG00000165669_43 (sequence is synthesized)
catttttaagaaattgaatttaagtatgtgcttttatatccggaccaggtttctcaaggaagcagaatacaagggaatgaaaggggaagggagggtagtgcccaagagaaacctcggctc

SEQ ID NO: 524132 - DNA, 120 bp, Artificial Sequence
  ENSG00000165669_44 (sequence is synthesized)
ctaagtgctcccctgccaggtttcccccgtgcctgcccactggcaccatcctggcagctccagcccacaccccctcctggaccctgggctgcctctcgctgaatagctgcagggggcctg

SEQ ID NO: 524133 - DNA, 120 bp, Artificial Sequence
  ENSG00000165669_45 (sequence is synthesized)
ctatgtgacaggtatggaatgaggtaatccttttccacctctaatttctgaagggtgtgtctgtccagtttttacttgttcattgaatttaaagccttaggaaccaacagctacagtgca

SEQ ID NO: 524134 - DNA, 120 bp, Artificial Sequence
  ENSG00000165669_46 (sequence is synthesized)
agctgtaattattgatgtctgtttcatattcatctgtaagttctggcatttgatcaagaagtcaatatatcacttcatcttcaggctgaatgtgtctcagctataaaggttttattgttt

SEQ ID NO: 524135 - DNA, 120 bp, Artificial Sequence
  ENSG00000165669_47 (sequence is synthesized)
gatggatagcatacaattatgactgcccacaataaaaagtgttttcatttgtaagatgggtgatactagaagtaattatgaatgtcacaaggaatagtgaaacaatgaagctttgcgttt

SEQ ID NO: 524136 - DNA, 120 bp, Artificial Sequence
  ENSG00000165669_48 (sequence is synthesized)
ctttgaatttctccctacataatgcccaaggaacatttcctgaatgcctactatatgtcagataaactaactcttgcagatgcaaggatgaataagcaaaatctaataggaaatatatgt

SEQ ID NO: 524137 - DNA, 120 bp, Artificial Sequence
  ENSG00000165669_49 (sequence is synthesized)
aaaccatgttttgaacaactccattttcaggcgggctattagaaaatcagtgagtttttctttgctgaatacaaagacataatctacatataagaagtaatgtagacttaaaaattttag

SEQ ID NO: 524138 - DNA, 120 bp, Artificial Sequence
  ENSG00000165669_50 (sequence is synthesized)
ttacctgagtatatacttactgtacaggttgctgaatttcctagctaggcagtcagctacagtggcttatcagcttagtgactgatccatacttgctcacatcagagtgggtgggattga

SEQ ID NO: 524139 - DNA, 120 bp, Artificial Sequence
  ENSG00000165669_51 (sequence is synthesized)
tgccctgactgtctcccctggagatgaggagcattggtggggtttgactcaggaatgaatgcaaatgtttgttctgcacattactcagtgattttaagcttaaagttttcttagactgca

SEQ ID NO: 524140 - DNA, 120 bp, Artificial Sequence
  ENSG00000165669_52 (sequence is synthesized)
ttaacgtgtcctttattttagcttgggtgggccacagtaccttcccatgttagggtaatgcttcctactactacaaatatgccccccaaaatataatgactcaagcacaatacaagctta

SEQ ID NO: 524141 - DNA, 120 bp, Artificial Sequence
  ENSG00000165669_53 (sequence is synthesized)
tttcttgttcatgagacaaaggagaatgttgcttgctatcaacgagggctctgttccgggctgtcattcagagacccaggctgacagcgactcaccgccttctttccctagtaatcctgg

SEQ ID NO: 524142 - DNA, 120 bp, Artificial Sequence
  ENSG00000165669_54 (sequence is synthesized)
atgtcccctcgatgccagtcagctggaagggaaaagagcatggaagagcactggcgggaagttacgggcctggcctggaagtggaacacattagttctcactttgcactggctcagactt

SEQ ID NO: 524143 - DNA, 120 bp, Artificial Sequence
  ENSG00000165669_55 (sequence is synthesized)
aatcacatacgatgtagtaactttacattttgctgatgttgagtagcacaaactactatttgtgatttgatggagtcatttttacttgggtgtgttgacagagctgagtcaaagtagctg

SEQ ID NO: 524144 - DNA, 120 bp, Artificial Sequence
  ENSG00000165669_56 (sequence is synthesized)
ttcatattaccgtgtagtgggtgtggtgtcacagtgtgatacctgctgaaagagcattgcatgctcagtcagtgaggcaaaggcagtgcttattatgccataaagggctgttgggacttt

SEQ ID NO: 524145 - DNA, 120 bp, Artificial Sequence
  ENSG00000165669_57 (sequence is synthesized)
accaggtaggcgagtagaagcgagtgcatcctaggtagaaggaacggcgtggcacatttgaggtacagcaaggactttagcaggggccaggggagagaatgagaacagggaagtagagca

SEQ ID NO: 524146 - DNA, 120 bp, Artificial Sequence
  ENSG00000165669_58 (sequence is synthesized)
gcagaaagagatggcgttgaaaagagctggccagaaccaactcacacacaactttgagagatgctggggagattggacttgtgcggggaagagttgggtgtctatggatggtgatgtggg

SEQ ID NO: 524147 - DNA, 120 bp, Artificial Sequence
  ENSG00000165669_59 (sequence is synthesized)
atgaagaaggtagtcagagagcaggcttttaaagagtaatgttatattagtagtttagtaatatagagttagacatttagtatttagtaaagtaggtcatatttatacttgttgtgtcat

SEQ ID NO: 524148 - DNA, 120 bp, Artificial Sequence
  ENSG00000165669_60 (sequence is synthesized)
ggtacctgtggaatgccatggaaatgtcaaatggacacttctatgtagcaacctggaggtcagaagggagggaggttgcagaaataggtcgatgaaagaggtcttgaaaggtggcatgtc

SEQ ID NO: 524149 - DNA, 120 bp, Artificial Sequence
  ENSG00000165669_61 (sequence is synthesized)
aacaggaacaaatgccgctgagctgtcaggcaagataatggtggagaggtggctgttggagttagcatcagatggcaccggtgatcttggccaaatcagacatccagaccagaattgcaa

SEQ ID NO: 524150 - DNA, 120 bp, Artificial Sequence
  ENSG00000165669_62 (sequence is synthesized)
tagatggtgcaattgcaatcttaggttggatttcctagaaacagtgcctcagatctcttgtggaggtgatttgtaaaagtatgcacttcaggaaacatttgtaagggagggagcaaagcc

SEQ ID NO: 524151 - DNA, 120 bp, Artificial Sequence
  ENSG00000165669_63 (sequence is synthesized)
catgaggaaggggaatgcctgaaaggggtaaagccttggccttgtgctgggggaagagggctctgtgaactctgcttgtggcaaaggagctgttttttttctttttttctttttgagacg

SEQ ID NO: 524152 - DNA, 66 bp, Artificial Sequence
  ENSG00000165669_64 (sequence is synthesized)
gcaaaggagctgttttttttctgtcatctcagctcacttcaacctctgcttcccaggttcaagcaa

SEQ ID NO: 524153 - DNA, 120 bp, Artificial Sequence
  ENSG00000165669_65 (sequence is synthesized)
caggcatgagccaccgcgcccggctggagctggcttttaaacccggtatcagtctcagtcagtcagtcactgcaggccagcattttacatgggatgaaaggagggatggatggaaggggt

SEQ ID NO: 524154 - DNA, 120 bp, Artificial Sequence
  ENSG00000165669_66 (sequence is synthesized)
gaaggggtggaggatacatacctggtccttccagttaaactatttaataaataatcatgactgagaatataagccttagaagtactgttattgttctgtaaattttttaaaaacactttg

SEQ ID NO: 524155 - DNA, 120 bp, Artificial Sequence
  ENSG00000165669_67 (sequence is synthesized)
aggattcattgttatttatgctccttgccttggagggacatcttggttctacatatgtataaatgtctagcagattgaaaatctgaaattcttctttcattactcttcccatacagtgct

SEQ ID NO: 524156 - DNA, 120 bp, Artificial Sequence
  ENSG00000165669_68 (sequence is synthesized)
cttgcactattcctctaagaaagccaaagacacattatacttgttttttagatgaggaaatcaaggtgctgggaagtttaagagaactctacagccattcatctagcataaaagggctga

SEQ ID NO: 524157 - DNA, 120 bp, Artificial Sequence
  ENSG00000165669_69 (sequence is synthesized)
cgttagaacgcaggccaggcctttgcctcttccctaccccattccagtggttcttgaagtgggatccatgccctcctgcaagcagaatcacttgttaaaaatgtaaactccagggtccct

SEQ ID NO: 524158 - DNA, 120 bp, Artificial Sequence
  ENSG00000165669_70 (sequence is synthesized)
ctctgggggcagggcctgggattccacattttcaaaagctcctctgtaattagtgcatacaaagaagactcattgtcttggagcagcacccgcttcttacacggggagtctgggatggga

SEQ ID NO: 524159 - DNA, 120 bp, Artificial Sequence
  ENSG00000165669_71 (sequence is synthesized)
aagaggaaagcaagtcagtgcaacttgcacatgtcttatcacaaaccatagggaaggaggtgccttgtggtataaatactgagtttaatgccattaatataaacgctcatattcccaaac

SEQ ID NO: 524160 - DNA, 120 bp, Artificial Sequence
  ENSG00000165669_72 (sequence is synthesized)
agactgcctgtactagtacattacttccattttccaaaaaaggaaaagaaaggttccgtgtcaaagaactcaattggaatcctcgcttggtacttgcttccttgccagcagtgctcaaaa

SEQ ID NO: 524161 - DNA, 120 bp, Artificial Sequence
  ENSG00000165669_73 (sequence is synthesized)
agagaaaaagaaaatccaaagtccatgtacataaaagttccattcccgatggtggagggcttaattaaagtcctcagatgtttctgtgcaccttggaaaacatttttatgaaattcatat

SEQ ID NO: 524162 - DNA, 120 bp, Artificial Sequence
  ENSG00000165669_74 (sequence is synthesized)
attaccagaagtggctccaacaattcttgcagttaaaaaccttgtaactcatgcagctccatcaggagcaagctgcctttttcaagatttgttttgctgcttcctttacctccgtagcct

SEQ ID NO: 524163 - DNA, 120 bp, Artificial Sequence
  ENSG00000165669_75 (sequence is synthesized)
gtggcagtgacggctgctcaagggccttaactgccaggatggcactagaggattttccaaggttaaggtcagataacagaatctggaagaaatggatccctcttcctgcatttccttttc

SEQ ID NO: 524164 - DNA, 120 bp, Artificial Sequence
  ENSG00000165669_76 (sequence is synthesized)
tcattatttcaataaatgcattgaaggcttgtgatgtgtctggcactacagcaggcactgaggatgccacgctgaacaaagcggctggatcttcatggggctcatatcctagagggaaag

SEQ ID NO: 524165 - DNA, 120 bp, Artificial Sequence
  ENSG00000165669_77 (sequence is synthesized)
acataataagcagactctgcagtgtcacacaacatcacctaggaaatatagagatgcaagtgctcaggcgccaggccagacgtgaattcaactgtggtagcaagaccttgtatcttctga

SEQ ID NO: 524166 - DNA, 120 bp, Artificial Sequence
  ENSG00000165669_78 (sequence is synthesized)
tgggacgttgaagtgtgagaaccactggactctcatatggtgataaactttggagaaaaaggacggaggcaggtgtgttgctgatgccagcaaatgttagaatagtgaaactgctacacc

SEQ ID NO: 524167 - DNA, 120 bp, Artificial Sequence
  ENSG00000165669_79 (sequence is synthesized)
ctggactatgaagcaagccagatttgaatcccagctctgctacttacaagctgtgtaacctccggcaggctacttaatctctctgtaccttgggttctcctgagaaatggagataataat

SEQ ID NO: 524168 - DNA, 120 bp, Artificial Sequence
  ENSG00000165669_80 (sequence is synthesized)
agtagctatcttatagagatgtgaggattaaaggaactaatgaatatgaaagtgctgagaatagattctcacatatagcaaacaatatacttgttgggagacaattctctggacaattct

SEQ ID NO: 524169 - DNA, 120 bp, Artificial Sequence
  ENSG00000165669_81 (sequence is synthesized)
tgcatttctacacgtcttggaagcaaggcactaagtacccttttgttccaaactatctttgcaaggatgtttgtatataacatccttggaagattgagatagtgtctcactctagagcaa

SEQ ID NO: 524170 - DNA, 120 bp, Artificial Sequence
  ENSG00000165669_82 (sequence is synthesized)
agaacagacatgcttactcccattacaaaagattcggtttcctaactcagagttcctgttcttgaatgaaagtcatgcagtatacaggtgtcttttggccctcttaactgtcatactgta

SEQ ID NO: 524171 - DNA, 120 bp, Artificial Sequence
  ENSG00000165669_83 (sequence is synthesized)
ggaatcaatgcaaaaatgctgatggctatttctgttgtgagtaaatgtctgaactgagagtctagtgtcttctatcagcatttgtaaaactggccaactgacttgctaagttgcaagtag

SEQ ID NO: 524172 - DNA, 120 bp, Artificial Sequence
  ENSG00000165669_84 (sequence is synthesized)
ggtgaaatctcagacccttcgtagtccttgacaattctgtgaaagtgtgtaagtgtttgttagtactaatgttgttattactccacagtacgtgccaattttctggaagaaacaaaaatg

SEQ ID NO: 524173 - DNA, 120 bp, Artificial Sequence
  ENSG00000165669_85 (sequence is synthesized)
taattgatggccctagccttcaaagagttcccagttgagccaaggaggttaaatatgcgaagatgacgcaaaagacatacagcagcaggaaagcaaagctttggaatgaaacttgggttt

SEQ ID NO: 524174 - DNA, 120 bp, Artificial Sequence
  ENSG00000165669_86 (sequence is synthesized)
gaatgtaggctgtggatgctcaccagctatggcaactctgagcctcaacaaatttctatttgtaaagtgctgttgttaataatgcttactgtgtgaggttgtgaacattaagatagtgca

SEQ ID NO: 524175 - DNA, 120 bp, Artificial Sequence
  ENSG00000165669_87 (sequence is synthesized)
tggagagagcttagcacgggtctggcatgcagtaagcactcagttaccattactgatgttgctgtattgcatttgtgcttaggatacaagcagagcactttctctcccctccctgggtct

SEQ ID NO: 524176 - DNA, 120 bp, Artificial Sequence
  ENSG00000165669_88 (sequence is synthesized)
ttagggaagtaaggccccagtactgtacttcctttcaggtggaagctgctttccttggaaccaccaaaccccaactcagtatgtccctggattctgcccaaagaattccccagggctaag

SEQ ID NO: 524177 - DNA, 120 bp, Artificial Sequence
  ENSG00000165669_89 (sequence is synthesized)
ctcctataggtgggtggctaaaggactggcttcagagtcagacagctctcagtggatatatacttagagatttaatatgatatatactgctttgaagtttatgtggtttttgatgatttt

SEQ ID NO: 524178 - DNA, 120 bp, Artificial Sequence
  ENSG00000165669_90 (sequence is synthesized)
attaatgtgcataatagtcctagcatataatatgtgttcagccaatgttaatcagtgccctaggctacaccaccatgatctaatgggccattcaattttcatgactgtattcctaggata

SEQ ID NO: 524179 - DNA, 120 bp, Artificial Sequence
  ENSG00000165669_91 (sequence is synthesized)
tttctcaatgactcatacatggtaggtgttcagtaaatatttgttgatttaattggcttgagtgaacaaaagaagtaatacgtcctttcatcttttctttcaagatatttctgcattaaa

SEQ ID NO: 524180 - DNA, 120 bp, Artificial Sequence
  ENSG00000165669_92 (sequence is synthesized)
tcatcctcagtatatttttttgaaagccaagttttcccaaagctcctcatttcctcatctccctctgtgccactggtttttcagttgctgggggctacagaccctctctctagaaagatg

SEQ ID NO: 524181 - DNA, 120 bp, Artificial Sequence
  ENSG00000165669_93 (sequence is synthesized)
gacatgtgaacataagcactgcattttgcacacaatttccgtggttcagaaaccacctgaacttttccttctagaggaccctgcttaaacacttccattctagggtgtccagcccattaa

SEQ ID NO: 524182 - DNA, 120 bp, Artificial Sequence
  ENSG00000165669_94 (sequence is synthesized)
gatggccaagaaatcacatcccactcatctcccccaaatcagcaagctgtcatggacggtcctcaatacagttgctactttgttcctctataatcaaggccacacaagacccacttccaa

SEQ ID NO: 524183 - DNA, 120 bp, Artificial Sequence
  ENSG00000165669_95 (sequence is synthesized)
tctacttgtgatttagggatagcaaaggattaaagcaattcaagtattttagattcctattgatagcagaattgtggttttcaagacgtgctaatggaaaaattgttagtaaaaataggt

SEQ ID NO: 524184 - DNA, 120 bp, Artificial Sequence
  ENSG00000165669_96 (sequence is synthesized)
tcatgcagtcttattgatcatgcttgtaattctgaagattccacttgtactttttgtaaccatatttctcttctcttccattctctagttgtgagaaaacccagttgtccaataattgtc

SEQ ID NO: 524185 - DNA, 120 bp, Artificial Sequence
  ENSG00000165669_97 (sequence is synthesized)
ttgtgagaaaacccagttgtccaataattgtcaagctttcctcggccttagggaatgagcactcaagacctttctgggccaagtgtggtcgccgactcctgtaatcctagcactttggga

SEQ ID NO: 524186 - DNA, 120 bp, Artificial Sequence
  ENSG00000165669_98 (sequence is synthesized)
aggagttcaagactagcctgagcaacagcaggacttcatcactacaaaaaataaaaaattagccatatgtggtggtacacccctgtagtcccccagctactcgggaggctaaggtgggag

SEQ ID NO: 524187 - DNA, 89 bp, Artificial Sequence
  ENSG00000165669_99 (sequence is synthesized)
tacttaaacccgagaggtcgaggctgcagtgagccgtgatcgcaccactgcagtccagcctgaccctgtctcaaaaaaaaaaaaaaaaa

SEQ ID NO: 524188 - DNA, 120 bp, Artificial Sequence
  ENSG00000165669_100 (sequence is synthesized)
ttccaaaaccaaatcatgtcaagtacctagcttgacctcaaaaaaaaatacagaagcagggttggtaattgattgacaggaagggcagctcaaagcaggaaatggagagtggtatgaaaa

SEQ ID NO: 524189 - DNA, 120 bp, Artificial Sequence
  ENSG00000165669_101 (sequence is synthesized)
cacttaagcagtactgcccaaaggaagaacctgaaaagttcagccatagattttctgagaagatgaaagtgtaggcattagcatactcaagaatcaggcagacagttttccccatttgga

SEQ ID NO: 524190 - DNA, 120 bp, Artificial Sequence
  ENSG00000165669_102 (sequence is synthesized)
agctgaaaaaggaatgatctgctgcccaagacaagaaaatgatgtgggcccagagggaaccgtcactcacacgtacactgtccagggggccagagaaggattacagccgccattttggct

SEQ ID NO: 524191 - DNA, 120 bp, Artificial Sequence
  ENSG00000165669_103 (sequence is synthesized)
tctctagagtgaagcagcaaaacaatgtctagtggttgctaggcaaccattagtccatcgctgcccttttccattaaacattatctgccttcttagattgttttatttttttaaacagga

SEQ ID NO: 524192 - DNA, 120 bp, Artificial Sequence
  ENSG00000165669_104 (sequence is synthesized)
taggtaatgcaacagagaattaacggtgcaacctaacaatgaaaacgcatttgaggttcccgaatcagtgaaggctttgcaaaggttagatcactcttgggtggatgccgaagatagtga

SEQ ID NO: 524193 - DNA, 120 bp, Artificial Sequence
  ENSG00000165669_105 (sequence is synthesized)
cagttgactgaaacctcttccccagacatttcatcactggtcctcatgtttcctagtgccaaaaataataatgtggacgtaacaataatctctgtacattgtaaaatgtctgtcctctgc

SEQ ID NO: 524194 - DNA, 120 bp, Artificial Sequence
  ENSG00000165669_106 (sequence is synthesized)
tacgacctgctccaagctagatcttgtcctgaagcaagtttctctatcggcaaagagtggatgtcagaggtggtaaaatggagttctagccctggtcagctttgcagatagctaagatca

SEQ ID NO: 524195 - DNA, 120 bp, Artificial Sequence
  ENSG00000165669_107 (sequence is synthesized)
tggtatccaaagaacctgagcaaaagtacatggaaataacacctgtttatgcaaggaacgctttctgacacataaaaatgaagagtaactggtaggagagaataagcgtctttattcaga

SEQ ID NO: 524196 - DNA, 120 bp, Artificial Sequence
  ENSG00000165669_108 (sequence is synthesized)
tacacatcgcattcggattttaaacatacctaatgacttttacaacaagaggacactgaggtacccagaaagagggtggaaaatcaggatgaagggagttactgctagcctgtcatgtac

SEQ ID NO: 524197 - DNA, 120 bp, Artificial Sequence
  ENSG00000165669_109 (sequence is synthesized)
catgcacacaacctatctttttaaataccagtggatttcctgtctggctcagggggcctgtctaggaagagattcaaggaaagtagatgggttagttccagggactggggctcaaaaatt

SEQ ID NO: 524198 - DNA, 120 bp, Artificial Sequence
  ENSG00000165669_110 (sequence is synthesized)
taaagccacacgtaacgttagctctctcactcccacacacatttaagataaaggagatggcagtagtgtgctgcccagaggatggaatacgcagataactaggtttctatactggttcta

SEQ ID NO: 524199 - DNA, 120 bp, Artificial Sequence
  ENSG00000165669_111 (sequence is synthesized)
ctcactagtctgatcttgggtaattttttgggtcattgttctgtaagggagggcaataataactacttggtcagggctgttgtgacaattcagcaataaaacatggtcaattgcagctaa

SEQ ID NO: 524200 - DNA, 120 bp, Artificial Sequence
  ENSG00000165669_112 (sequence is synthesized)
ccgccggttcgggctccggcatgatgagtctgggagggcctcttgtgggcagccgagggaggcggcatgggcggcctcatagctcctcggccgagcctcccggagcaggctagaaaagcc

SEQ ID NO: 524201 - DNA, 120 bp, Artificial Sequence
  ENSG00000165669_113 (sequence is synthesized)
cccggcccggggccgcggaagcgacggcggggccgccctcagccttcctcgaaaggggcgtcgcagcggcctccccagcctgttatgtggagggggttctccgtcccacccaggtcaaag

SEQ ID NO: 524202 - DNA, 120 bp, Artificial Sequence
  ENSG00000165669_114 (sequence is synthesized)
tgagaggggattgaggaggctgtcgatagggaaaacaggctcacgtttacagttgctgtattccggaaaacagctccagttaatgggactgccagcaggctagacatccttcgccggaat

SEQ ID NO: 524203 - DNA, 120 bp, Artificial Sequence
  ENSG00000165669_115 (sequence is synthesized)
tgtgtgcacatgcctctgtgtgtctctgccctggtcagaatgtgcatgtattcttgggacttaacagggagggagatggactcagaatgcttttactgttctctgaggcatcggccactt

SEQ ID NO: 524204 - DNA, 120 bp, Artificial Sequence
  ENSG00000165669_116 (sequence is synthesized)
gatatgggtcctgtctttgtattcattatactttgagaaggaatgaacatagaatttctaatttctagacatggctttcttacccacaagttctcaattatttgtataagtgtaattact

SEQ ID NO: 524205 - DNA, 120 bp, Artificial Sequence
  ENSG00000165669_117 (sequence is synthesized)
taaccatttttttaaaatatggttttgaaattactgaagttaggtattgacactttgtgaattcttttcagataaattgaagaatgaaaaagaattacataggtaggtagaatttaaaat

SEQ ID NO: 524206 - DNA, 120 bp, Artificial Sequence
  ENSG00000165669_118 (sequence is synthesized)
agttatctattttaggccattgtagaaattgttgaactaattgtttctgatagtaatcaaacatatgaactagtaattgtagtataattgtagtaaccgattaaaaacagtaaaagtaaa

SEQ ID NO: 524207 - DNA, 120 bp, Artificial Sequence
  ENSG00000165669_119 (sequence is synthesized)
acaagaccaggtgtgtcggcacctccctgctcagtgcccagcggagatatgatcatgtaaaacttacctacaatattcatttcaaactgctaaattagagcatttagtgacccctgcagg

SEQ ID NO: 524208 - DNA, 120 bp, Artificial Sequence
  ENSG00000165671_0 (sequence is synthesized)
gctggcccgggagggggcgcggggcacggttgatgccggcccaggatggatcagacctgtgaactacccagaagaaattgtctgctgcccttttccaatccagtgaatttagatgcccct

SEQ ID NO: 524209 - DNA, 120 bp, Artificial Sequence
  ENSG00000165671_1 (sequence is synthesized)
gaagacaaggacagccctttcggtaatggtcaatccaatttttctgagccacttaatgggtgtactatgcagttatcgactgtcagtggaacatcccaaaatgcttatggacaagattct

SEQ ID NO: 524210 - DNA, 120 bp, Artificial Sequence
  ENSG00000165671_2 (sequence is synthesized)
ccatcttgttacattccactgcggagactacaggatttggcctccatgatcaatgtagagtatttaaatgggtctgctgatggatcagaatcctttcaagaccctgaaaaaagtgattca

SEQ ID NO: 524211 - DNA, 120 bp, Artificial Sequence
  ENSG00000165671_3 (sequence is synthesized)
agagctcagacgccaattgtttgcacttccttgagtcctggtggtcctacagcacttgctatgaaacaggaaccctcttgtaataactcccctgaactccaggtaaaagtaacaaagact

SEQ ID NO: 524212 - DNA, 120 bp, Artificial Sequence
  ENSG00000165671_4 (sequence is synthesized)
atcaagaatggctttctgcactttgagaattttacttgtgtggacgatgcagatgtagattctgaaatggacccagaacagccagtcacagaggatgagagtatagaggagatctttgag

SEQ ID NO: 524213 - DNA, 120 bp, Artificial Sequence
  ENSG00000165671_5 (sequence is synthesized)
gaaactcagaccaatgccacctgcaattatgagactaaatcagagaatggtgtaaaagtggccatgggaagtgaacaagacagcacaccagagagtagacacggtgcagtcaaatcgcca

SEQ ID NO: 524214 - DNA, 120 bp, Artificial Sequence
  ENSG00000165671_6 (sequence is synthesized)
ttcttgccattagctcctcagactgaaacacagaaaaataagcaaagaaatgaagtggacggcagcaatgaaaaagcagcccttctcccagcccccttttcactaggagacacaaacatt

SEQ ID NO: 524215 - DNA, 120 bp, Artificial Sequence
  ENSG00000165671_7 (sequence is synthesized)
acaatagaagagcaattaaactcaataaatttatcttttcaggatgatccagattccagtaccagtacattaggaaacatgctagaattacctggaacttcatcatcatctacttcacag

SEQ ID NO: 524216 - DNA, 120 bp, Artificial Sequence
  ENSG00000165671_8 (sequence is synthesized)
gaattgccattttgtcaacctaagaaaaagtctacgccactgaagtatgaagttggagatctcatctgggcaaaattcaagagacgcccatggtggccctgcaggatttgttctgatccg

SEQ ID NO: 524217 - DNA, 120 bp, Artificial Sequence
  ENSG00000165671_9 (sequence is synthesized)
ttgattaacacacattcaaaaatgaaagtttccaaccggaggccctatcggcagtactacgtggaggcttttggagatccttctgagagagcctgggtggctggaaaagcaatcgtcatg

SEQ ID NO: 524218 - DNA, 120 bp, Artificial Sequence
  ENSG00000165671_10 (sequence is synthesized)
tttgaaggcagacatcaattcgaagagctacctgtccttaggagaagagggaaacagaaagaaaaaggatataggcataaggttcctcagaaaattttgagtaaatgggaagccagtgtt

SEQ ID NO: 524219 - DNA, 120 bp, Artificial Sequence
  ENSG00000165671_11 (sequence is synthesized)
ggacttgcagaacagtatgatgttcccaaggggtcaaagaaccgaaaatgtattcctggttcaatcaagttggacagtgaagaagatatgccatttgaagactgcacaaatgatcctgag

SEQ ID NO: 524220 - DNA, 120 bp, Artificial Sequence
  ENSG00000165671_12 (sequence is synthesized)
tcagaacatgacctgttgcttaatggctgtttgaaatcactggcttttgattctgaacattctgcagatgagaaggaaaagccttgcgctaaatctcgagccagaaagagctctgataat

SEQ ID NO: 524221 - DNA, 120 bp, Artificial Sequence
  ENSG00000165671_13 (sequence is synthesized)
ccaaaaaggactagtgtgaaaaagggccacatacaatttgaagcacataaagatgaacggaggggaaagattccagagaaccttggcctaaactttatctctggggatatatctgatacg

SEQ ID NO: 524222 - DNA, 120 bp, Artificial Sequence
  ENSG00000165671_14 (sequence is synthesized)
caggcctctaatgaactttccaggatagcaaatagcctcacagggtccaacactgccccaggaagttttctgttttcttcctgtggaaaaaacactgcaaagaaagaatttgagacttca

SEQ ID NO: 524223 - DNA, 120 bp, Artificial Sequence
  ENSG00000165671_15 (sequence is synthesized)
aatggtgactctttattgggcttgcctgagggtgctttgatctcaaagtgttctcgagagaagaataaaccccaacgaagcctggtgtgtggttcaaaagtgaagctctgctatattgga

SEQ ID NO: 524224 - DNA, 120 bp, Artificial Sequence
  ENSG00000165671_16 (sequence is synthesized)
gcaggtgatgaggaaaagcgaagtgattccattagtatctgtaccacttctgatgatggaagcagtgacctggatcccatagaacacagctcagagtctgataacagtgtccttgaaatt

SEQ ID NO: 524225 - DNA, 120 bp, Artificial Sequence
  ENSG00000165671_17 (sequence is synthesized)
ccagatgctttcgatagaacagagaacatgttatctatgcagaaaaatgaaaagataaagtattctaggtttgctgccacaaacactagggtaaaagcaaaacagaagcctctcattagt

SEQ ID NO: 524226 - DNA, 120 bp, Artificial Sequence
  ENSG00000165671_18 (sequence is synthesized)
aactcacatacagaccacttaatgggttgtactaagagtgcagagcctggaaccgagacgtctcaggttaatctctctgatctgaaggcatctactcttgttcacaaaccccagtcagat

SEQ ID NO: 524227 - DNA, 120 bp, Artificial Sequence
  ENSG00000165671_19 (sequence is synthesized)
tttacaaatgatgctctctctccaaaattcaacctgtcatcaagcatatccagtgagaactcgttaataaagggtggggcagcaaatcaagctctattacattcgaaaagcaaacagccc

SEQ ID NO: 524228 - DNA, 120 bp, Artificial Sequence
  ENSG00000165671_20 (sequence is synthesized)
aagttccgaagtataaagtgcaaacacaaagaaaatccagttatggcagaacccccagttataaatgaggagtgcagtttgaaatgctgctcttctgataccaaaggctctcctttggcc

SEQ ID NO: 524229 - DNA, 120 bp, Artificial Sequence
  ENSG00000165671_21 (sequence is synthesized)
agcatttctaaaagtgggaaagtggatggtctaaaactactgaacaatatgcatgagaaaaccagggattcaagtgacatagaaacagcagtggtgaaacatgttttatccgagttgaag

SEQ ID NO: 524230 - DNA, 120 bp, Artificial Sequence
  ENSG00000165671_22 (sequence is synthesized)
gaactctcttacagatccttaggtgaggatgtcagtgactctggaacatcaaagccatcaaaaccattacttttctcttctgcttctagtcagaatcacatacctattgaaccagactac

SEQ ID NO: 524231 - DNA, 120 bp, Artificial Sequence
  ENSG00000165671_23 (sequence is synthesized)
aaattcagtacattgctaatgatgttgaaagatatgcatgatagtaagacgaaggagcagcggttgatgactgctcaaaacctggtctcttaccggagtcctggtcgtggggactgttct

SEQ ID NO: 524232 - DNA, 120 bp, Artificial Sequence
  ENSG00000165671_24 (sequence is synthesized)
actaatagtcctgtaggagtctctaaggttttggtttcaggaggctccacacacaattcagagaaaaagggagatggcactcagaactccgccaatcctagccctagtgggggtgactct

SEQ ID NO: 524233 - DNA, 120 bp, Artificial Sequence
  ENSG00000165671_25 (sequence is synthesized)
gcattatctggcgagttgtctgcttccctacctggcttactgtccgacaagagagacctccctgcttctggtaaaagtcgttcagactgtgttactaggcgcaactgtggacgatcaaag

SEQ ID NO: 524234 - DNA, 120 bp, Artificial Sequence
  ENSG00000165671_26 (sequence is synthesized)
ccttcatccaaattgcgagatgctttttcagcccaaatggtaaagaacacagtgaaccgtaaagccttaaagaccgagcgcaaaagaaaactgaatcagcttccaagtgtgactcttgat

SEQ ID NO: 524235 - DNA, 120 bp, Artificial Sequence
  ENSG00000165671_27 (sequence is synthesized)
gctgtactgcagggagaccgagaacgtggaggttcattgagaggtggggcagaagatcctagtaaagaggatccccttcagataatgggccacttaacaagtgaagatggtgaccatttt

SEQ ID NO: 524236 - DNA, 120 bp, Artificial Sequence
  ENSG00000165671_28 (sequence is synthesized)
tctgatgtgcatttcgatagcaaggttaagcaatctgatcctggtaaaatttctgaaaaaggactctcttttgaaaacggaaaaggcccagagctggactctgtaatgaacagtgagaat

SEQ ID NO: 524237 - DNA, 120 bp, Artificial Sequence
  ENSG00000165671_29 (sequence is synthesized)
gatgaactcaatggtgtaaatcaagtggtgcctaaaaagcggtggcagcgtttaaaccaaaggcgcactaaacctcgtaagcgcatgaacagatttaaagagaaagaaaactctgagtgt

SEQ ID NO: 524238 - DNA, 120 bp, Artificial Sequence
  ENSG00000165671_30 (sequence is synthesized)
gcctttagggtcttacttcctagtgaccctgtgcaggaggggcgggatgagtttccagagcatagaactccttcagcaagcatacttgaggaaccactgacagagcaaaatcatgctgac

SEQ ID NO: 524239 - DNA, 120 bp, Artificial Sequence
  ENSG00000165671_31 (sequence is synthesized)
tgcttagattcagctgggccacggttaaatgtttgtgataaatccagtgccagcattggtgacatggaaaaggagccaggaattcccagtttgacaccacaggctgagctccctgaacca

SEQ ID NO: 524240 - DNA, 120 bp, Artificial Sequence
  ENSG00000165671_32 (sequence is synthesized)
gctgtgcggtcagagaagaaacgccttaggaagccaagcaagtggcttttggaatatacagaagaatatgatcagatatttgctcctaagaaaaaacaaaagaaggtacaggagcaggtg

SEQ ID NO: 524241 - DNA, 120 bp, Artificial Sequence
  ENSG00000165671_33 (sequence is synthesized)
cacaaggtaagttcccgctgtgaagaggaaagccttctagcccgaggtcgatctagtgctcagaacaagcaggtggacgagaattctttgatttcaaccaaagaagagcctccagttctt

SEQ ID NO: 524242 - DNA, 120 bp, Artificial Sequence
  ENSG00000165671_34 (sequence is synthesized)
gaaagggaggctccgtttttggagggccccttggctcagtcagaacttggaggtggacatgctgagttgccgcagctgaccttgtctgtgcctgtggctccggaagtctctccacggcct

SEQ ID NO: 524243 - DNA, 120 bp, Artificial Sequence
  ENSG00000165671_35 (sequence is synthesized)
gcccttgagtctgaggaattgctagttaaaacgccaggaaattatgaaagtaaacgtcaaagaaaaccaactaagaaacttcttgaatccaatgatttagaccctggatttatgcccaag

SEQ ID NO: 524244 - DNA, 120 bp, Artificial Sequence
  ENSG00000165671_36 (sequence is synthesized)
aagggggaccttggcctttctaaaaagtgctatgaagctggtcacctggagaatggcataactgaatcttgtgccacatcttattcaaaagattttggtggaggcactaccaagatattt

SEQ ID NO: 524245 - DNA, 120 bp, Artificial Sequence
  ENSG00000165671_37 (sequence is synthesized)
gacaagccaaggaagcgaaaacgacagaggcatgctgcagccaagatgcagtgtaaaaaagtgaaaaatgatgactcgtcaaaagagattccaggctcagagggagaactaatgcctcac

SEQ ID NO: 524246 - DNA, 120 bp, Artificial Sequence
  ENSG00000165671_38 (sequence is synthesized)
aggacggccacaagccccaaggagactgttgaggaaggtgtagaacacgatcccgggatgcctgcctctaaaaaaatgcagggtgaacgcggtggaggagctgcactcaaggagaatgtc

SEQ ID NO: 524247 - DNA, 120 bp, Artificial Sequence
  ENSG00000165671_39 (sequence is synthesized)
tgtcagaattgtgaaaaattgggtgagctgctgttatgtgaggctcagtgctgtggggctttccacctggagtgccttggattgactgagatgccaagaggaaaatttatctgcaatgaa

SEQ ID NO: 524248 - DNA, 120 bp, Artificial Sequence
  ENSG00000165671_40 (sequence is synthesized)
tgtcgcacaggaatccatacctgttttgtatgtaagcagagtggggaagatgttaaaaggtgccttctacccttgtgtggaaagttttaccatgaagagtgtgtccagaagtacccaccc

SEQ ID NO: 524249 - DNA, 120 bp, Artificial Sequence
  ENSG00000165671_41 (sequence is synthesized)
actgttatgcagaacaagggcttccggtgctccctccacatctgtataacctgtcatgctgctaatccagccaatgtttctgcatctaaaggtcggttgatgcgctgtgtccgctgtcct

SEQ ID NO: 524250 - DNA, 120 bp, Artificial Sequence
  ENSG00000165671_42 (sequence is synthesized)
gtggcataccacgccaatgacttttgcctggctgctgggtcaaagatccttgcatctaatagtatcatctgccctaatcactttacccctaggcggggctgccgaaatcatgagcatgtt

SEQ ID NO: 524251 - DNA, 120 bp, Artificial Sequence
  ENSG00000165671_43 (sequence is synthesized)
aatgttagctggtgctttgtgtgctcagaaggaggcagccttctgtgctgtgattcttgccctgctgcttttcatcgtgaatgcctgaacattgatatccctgaaggaaactggtattgc

SEQ ID NO: 524252 - DNA, 120 bp, Artificial Sequence
  ENSG00000165671_44 (sequence is synthesized)
aatgactgtaaagcaggcaaaaagccacactacagggagattgtctgggtaaaagttggacgatacaggtggtggccagctgagatctgccatcctcgagctgttccttccaacattgat

SEQ ID NO: 524253 - DNA, 120 bp, Artificial Sequence
  ENSG00000165671_45 (sequence is synthesized)
aagatgagacatgatgtgggagagttcccagtcctcttttttggatctaatgactatttgtggactcaccaggcccgagtcttcccttacatggagggtgacgtgagcagcaaggataag

SEQ ID NO: 524254 - DNA, 120 bp, Artificial Sequence
  ENSG00000165671_46 (sequence is synthesized)
atgggcaaaggagtggatgggacatataaaaaagctcttcaggaagctgcagcaaggtttgaggaattaaaggcccaaaaagagctaagacagctgcaggaagaccgaaagaatgacaag

SEQ ID NO: 524255 - DNA, 120 bp, Artificial Sequence
  ENSG00000165671_47 (sequence is synthesized)
aagccaccaccttataaacatataaaggtaaaccgtcctattggcagggtacagatcttcactgcagacttatctgaaataccccgttgcaactgtaaagctactgatgagaacccctgt

SEQ ID NO: 524256 - DNA, 120 bp, Artificial Sequence
  ENSG00000165671_48 (sequence is synthesized)
gggatagactctgaatgcatcaaccgcatgctgctctatgagtgccaccccacagtgtgtcctgccggagggcgctgtcaaaaccagtgcttttccaagcgccaatatccagaggttgaa

SEQ ID NO: 524257 - DNA, 120 bp, Artificial Sequence
  ENSG00000165671_49 (sequence is synthesized)
attttccgcacattacagcggggttggggtctacggacaaaaacagatattaaaaagggtgaatttgtgaatgagtatgtgggtgagcttatagatgaagaagaatgcagagctcgaatt

SEQ ID NO: 524258 - DNA, 120 bp, Artificial Sequence
  ENSG00000165671_50 (sequence is synthesized)
cgctatgctcaagaacatgatatcactaatttctatatgctcaccctagacaaagaccgaatcattgatgctggtcccaaaggaaactatgctcggttcatgaatcattgctgccagccc

SEQ ID NO: 524259 - DNA, 120 bp, Artificial Sequence
  ENSG00000165671_51 (sequence is synthesized)
aactgtgaaacacagaagtggtctgtgaatggagatacccgtgtaggcctttttgcactaagtgacattaaagcaggcactgaacttaccttcaactacaacctagaatgtcttgggaat

SEQ ID NO: 524260 - DNA, 120 bp, Artificial Sequence
  ENSG00000165671_52 (sequence is synthesized)
ggaaagactgtttgcaaatgtggagccccgaactgcagtggcttcttgggtgtaaggccaaagaatcaacccattgccacggaagaaaagtcaaagaaattcaagaagaagcaacaggga

SEQ ID NO: 524261 - DNA, 120 bp, Artificial Sequence
  ENSG00000165671_53 (sequence is synthesized)
gttgtggggatgctggccagctcgtctcctgcaagaaaccaggctgcccaaaagtttaccacgcagactgtctcaatctgaccaagcgaccagcagggaaatgggaatgtccgtggcatc

SEQ ID NO: 524262 - DNA, 120 bp, Artificial Sequence
  ENSG00000165671_54 (sequence is synthesized)
agtgtgacatctgcgggaaggaagcagcctccttctgtgagatgtgccccagctccttttgtaagcagcatcgagaagggatgcttttcatttccaaactggatgggcgtctgtcttgta

SEQ ID NO: 524263 - DNA, 120 bp, Artificial Sequence
  ENSG00000165671_55 (sequence is synthesized)
ctgagcatgacccctgtgggcccaatcctctggaacctggggagatccgtgagtatgtgcctcccccagtaccgctgcctccagggccaagcactcacctggcagagcaatcaacaggaa

SEQ ID NO: 524264 - DNA, 120 bp, Artificial Sequence
  ENSG00000165671_56 (sequence is synthesized)
tggctgctcaggcacccaaaatgtcagataaacctcctgctgacaccaaccagatgctgtcgctctccaaaaaagctctggcagggacttgtcagaggccattgctacctgaaagacctc

SEQ ID NO: 524265 - DNA, 120 bp, Artificial Sequence
  ENSG00000165671_57 (sequence is synthesized)
ttgagagaactgactccaggccccagcctttagataaggtcagagacctcgctgggtcagggaccaaatcccaatccttggtttccagccagaggccactggacaggccaccagcagtgg

SEQ ID NO: 524266 - DNA, 120 bp, Artificial Sequence
  ENSG00000165671_58 (sequence is synthesized)
caggaccaagaccccagctaagcgacaaaccctctccagtgaccagcccaagctcctcaccctcagtcaggtcccaaccactggaaagacctctggggacggctgacccaaggctggata

SEQ ID NO: 524267 - DNA, 120 bp, Artificial Sequence
  ENSG00000165671_59 (sequence is synthesized)
aatccataggtgctgccagcccaaggccccagtcactggagaaaacctcagttcccactggcctgagacttccgccgccagacagactgctcattactagcagtcccaaaccccagactt

SEQ ID NO: 524268 - DNA, 120 bp, Artificial Sequence
  ENSG00000165671_60 (sequence is synthesized)
cagacaggcctactgacaaaccccatgcctctttgtcccagagactcccacctcctgagaaagtactatcagctgtggtccagacccttgtagctaaagaaaaagcactgaggcctgtgg

SEQ ID NO: 524269 - DNA, 120 bp, Artificial Sequence
  ENSG00000165671_61 (sequence is synthesized)
accagaatactcagtcaaaaaatagagctgctttggtgatggatctcatagacctaactcctcgccagaaggagcgggcagcttcacctcatcaggtcacaccacaggctgatgagaaga

SEQ ID NO: 524270 - DNA, 120 bp, Artificial Sequence
  ENSG00000165671_62 (sequence is synthesized)
tgccagtgttggagtcaagttcatggcctgccagcaaaggtctggggcatatgccgagagctgttgagaaaggctgtgtgtcagatcctcttcagacatctgggaaagcagcagcccctt

SEQ ID NO: 524271 - DNA, 120 bp, Artificial Sequence
  ENSG00000165671_63 (sequence is synthesized)
cagaggacccctggcaagctgttaaatcactcacccaggccagacttctttctcagcctcctgccaaggcctttttatatgagccaacaactcaggcctcaggaagagcttctgcagggg

SEQ ID NO: 524272 - DNA, 120 bp, Artificial Sequence
  ENSG00000165671_64 (sequence is synthesized)
ctgagcagaccccagggcctcttagccaatccccgggcctggtgaagcaggcgaagcagatggtcggaggccagcaactacctgcacttgccgccaagagtgggcaatcttttaggtctc

SEQ ID NO: 524273 - DNA, 120 bp, Artificial Sequence
  ENSG00000165671_65 (sequence is synthesized)
tcgggaaggccccagcctccctccccactgaagaaaagaagttggtaaccacagagcaaagtccctgggccctgggaaaagcctcatcacgggcagggctctggcccatagtggctggac

SEQ ID NO: 524274 - DNA, 120 bp, Artificial Sequence
  ENSG00000165671_66 (sequence is synthesized)
agacactggcacagtcttgctggtctgctgggagcacacagacattggcacagacttgctggtctcttggaagagggcaagaccccaaaccagagcaaaatacacttccagctcttaacc

SEQ ID NO: 524275 - DNA, 120 bp, Artificial Sequence
  ENSG00000165671_67 (sequence is synthesized)
aggctccttccagtcacaagtgtgcagaatcagaacagaagtagtaccaatcaatgtcacatgaacaaacaagctgcccccagggtaccatttggggaggggaaatcttttctttctttc

SEQ ID NO: 524276 - DNA, 120 bp, Artificial Sequence
  ENSG00000165671_68 (sequence is synthesized)
ccccttaaaaaaaaacacatctgccccgaacactttcccactgttattctttcctcatatcccaacactcagaactcttgtgacattagccagtgggggcttatggttgtgtgaaccatg

SEQ ID NO: 524277 - DNA, 120 bp, Artificial Sequence
  ENSG00000165671_69 (sequence is synthesized)
tatgaaaatccagtgggccccaaccaaggagacagacagacttgggtctctttcccccaacttttccacatggtcatcgtgaaataaaaagtccactctggagtcaagtatggaattcaa

SEQ ID NO: 524278 - DNA, 120 bp, Artificial Sequence
  ENSG00000165671_70 (sequence is synthesized)
ttccgctggtcaggttggaaggtataggggctctcaaagcgatttccccaaccagacagagccccattgagggcacctaggaacccttgggaggaaatggtgttctttcaaatcagtggc

SEQ ID NO: 524279 - DNA, 120 bp, Artificial Sequence
  ENSG00000165671_71 (sequence is synthesized)
gatttcctgagcattcacgtgttctaggccgggtgctagtcactgatgagagatacaggcctcatccctgtgagcctggattccaaggctttcaggaacctttgaccaggaagtaacagg

SEQ ID NO: 524280 - DNA, 120 bp, Artificial Sequence
  ENSG00000165671_72 (sequence is synthesized)
aagttctgaggggccctggggctttagactcattttgaaatgtcctttgtggcaccagaagtggttgtgttgaggaagtgtctcttggctgcggtgtgcatgggtgcgtgtgcatgcgcg

SEQ ID NO: 524281 - DNA, 120 bp, Artificial Sequence
  ENSG00000165671_73 (sequence is synthesized)
cacactcacagaggtctcctctatagatgcaagggtgctgcattgaggccagcaaggctgttggctgtggggtcgccgctgctgcttttgtctgggctgtgcagagtctcaagatcagtc

SEQ ID NO: 524282 - DNA, 120 bp, Artificial Sequence
  ENSG00000165671_74 (sequence is synthesized)
cttggaggagcaggtggtcaggggcagtcgggctctgtgcgaatgtagatttccagcagtggaagaaggcatttggcaagcttctctttctttgcttttgtttctacctatttttctctt

SEQ ID NO: 524283 - DNA, 120 bp, Artificial Sequence
  ENSG00000165671_75 (sequence is synthesized)
tgtacatgaatccaccccatccctatttccctaaaacactcaggtgctttcagatttcagagcctcgggcagtggacatagggaatctctggcaagctctgagctagacacaccagcttc

SEQ ID NO: 524284 - DNA, 120 bp, Artificial Sequence
  ENSG00000165671_76 (sequence is synthesized)
aggaagagtaccagatcctgatgggaaatttcttttccccattccttttccctcctgagtggagggagtcctcttcttcgcctccctgagaattgctgtgctctgtattgagagcacctg

SEQ ID NO: 524285 - DNA, 120 bp, Artificial Sequence
  ENSG00000165671_77 (sequence is synthesized)
cctgctgacttagctcaaaggcaagccagaacccttccctgaagactggcaagaggtggtgtttagagcaacgtccaggctaagagatgactcctattaactgctgattatctgttactg

SEQ ID NO: 524286 - DNA, 120 bp, Artificial Sequence
  ENSG00000165671_78 (sequence is synthesized)
ctgccctgagctggggcccaagggctgggaaatctgttggtgctaccctgccctaccattcacccagctcacagactgccaacaggaagtgctgtttggctagtttcctcccacttgtct

SEQ ID NO: 524287 - DNA, 120 bp, Artificial Sequence
  ENSG00000165671_79 (sequence is synthesized)
acccctcctttgtccttagaccaacatgtttacctctctgctttgccaacttagccagcaggccatccccggccctaacgtctcctggccattatctcttagttatggctttcacgctct

SEQ ID NO: 524288 - DNA, 120 bp, Artificial Sequence
  ENSG00000165671_80 (sequence is synthesized)
caataggattctgtatttggtcccaatttcctcaagttcttattgaggttactcccatcaattccacggagggaacagtagttattatagaagcatttgcgctttatctaaagattaaaa

SEQ ID NO: 524289 - DNA, 120 bp, Artificial Sequence
  ENSG00000165671_81 (sequence is synthesized)
atagaatctgcttttatttcccaaagtctgtctctgaggttgagacacttgaactcaggcagagggacgaggctgggcagggctgtcctgagtttaggggcctatccctgcatttcactg

SEQ ID NO: 524290 - DNA, 120 bp, Artificial Sequence
  ENSG00000165671_82 (sequence is synthesized)
agacctcggaatctcctctgtgaattccacctgcctagttctcccctttcatcctctctctcttcccacatcatcaaagaggaaaagctctttgttcaaaaggaagagaaaacgtaaagc

SEQ ID NO: 524291 - DNA, 120 bp, Artificial Sequence
  ENSG00000165671_83 (sequence is synthesized)
cgtaaagcatcttattttcttttaaaagaattttaaaccatgaaaaagatatttttaaagaaattcaccgagaacattaaagttcattatattaagtatttatcatgtgtgagaataata

SEQ ID NO: 524292 - DNA, 120 bp, Artificial Sequence
  ENSG00000165671_84 (sequence is synthesized)
actgcagctagtaggtccctttccctaatcttttaggtcatatgagtagggtttgcttggtgccagtcctgtgcccttttctctccagtcatctgtagttgtgatcagaaaaaggtatct

SEQ ID NO: 524293 - DNA, 120 bp, Artificial Sequence
  ENSG00000165671_85 (sequence is synthesized)
gcactgcactgtcagagtctcctttcactatgttgtgtgttaaattaccgtagctctttgtttcatgaaataaactgtgaatttggggggggcggggggagggcgtgcaggccatgtaaa

SEQ ID NO: 524294 - DNA, 120 bp, Artificial Sequence
  ENSG00000165671_86 (sequence is synthesized)
aattttccgtggagaagtttgattctaaagtagcttctctaaagtaggctttggtaggtaatcaacttgacagcagtctagatgtctcacaggacaggagggagtgagggaaaggggcca

SEQ ID NO: 524295 - DNA, 120 bp, Artificial Sequence
  ENSG00000165671_87 (sequence is synthesized)
tgattggctgctttgtggttttattttggttctttccattctccgccattcattggaggcttcgttccagacctgcctgggaaaacagcttctgagccattttggggagcagttcttcat

SEQ ID NO: 524296 - DNA, 120 bp, Artificial Sequence
  ENSG00000165671_88 (sequence is synthesized)
ctgaatggatggacatctgggcttccttcaagggccattgaatgggaactagaaaaccactggaaactagaaatttgagctattgggcccaccagtagcagcatgtgatactagatggtt

SEQ ID NO: 524297 - DNA, 120 bp, Artificial Sequence
  ENSG00000165671_89 (sequence is synthesized)
aaaatcatgaaagcagtcactatccaattagaagcagagtcacaacaactgttgggaaatgtgactcttggaggaaggtggggagggagtggccttgccagccctgtgggacgtcccctg

SEQ ID NO: 524298 - DNA, 120 bp, Artificial Sequence
  ENSG00000165671_90 (sequence is synthesized)
aagtttgtaataagaccccttttccaaagggatgtgaattggagtgaaaaggaaatctttcatcttagaaaacttctggtccttaacgcagggtggtatttgggtatgtgcttggaaatt

SEQ ID NO: 524299 - DNA, 120 bp, Artificial Sequence
  ENSG00000165671_91 (sequence is synthesized)
gagatctcaagagtgtttgccttggagccagctccccaggaggccttttccagggacaaggcaaaagttgaaattctccatgggtagctagaaagccaatacatctagccctgctaagtc

SEQ ID NO: 524300 - DNA, 120 bp, Artificial Sequence
  ENSG00000165671_92 (sequence is synthesized)
agaaaaagattatgaaaaatgttgaaatttacattcaaagcctcatttgcttatcttgctggagccaacccagtctaatagcaaaatagctgtcattgatacagaaacatcctcattttt

SEQ ID NO: 524301 - DNA, 120 bp, Artificial Sequence
  ENSG00000165671_93 (sequence is synthesized)
aaatgtctgctttaccctgttactgagtttgagatgacttaaatcactgtgttgaccctcttctgaaccaaatctttagcattgatgaaaatagttattttattctttacatccttcacc

SEQ ID NO: 524302 - DNA, 120 bp, Artificial Sequence
  ENSG00000165671_94 (sequence is synthesized)
ccacactatggtcagggcatgaaacaccctgttgatcccttcccaggctcggcactgtctgctcactggagccggactcccaggttgtaattctaatgttgcctcatgagaacagaatgg

SEQ ID NO: 524303 - DNA, 120 bp, Artificial Sequence
  ENSG00000165671_95 (sequence is synthesized)
cagaaagtttagtcctgacagattcccccatagggagtaatgaggacagcatgaaacttggataggttttacccttagtccctataaggtggattttactaaggttttttaaatgatact

SEQ ID NO: 524304 - DNA, 120 bp, Artificial Sequence
  ENSG00000165671_96 (sequence is synthesized)
gtcatcctcttggggtttatcagccaggttagaggagcccagtgtcctaacctctctcagatcatggcagagaaggagctgcctccagcccctttcttgctgagtttcatttgagcagtt

SEQ ID NO: 524305 - DNA, 120 bp, Artificial Sequence
  ENSG00000165671_97 (sequence is synthesized)
ccatgtgtagacattccaagtcactgcttggtagttgctgtgggagcctgtcattggctatggccagttagttctcagctgagcttcctagggccagtgcaacagggccagaggctgcta

SEQ ID NO: 524306 - DNA, 120 bp, Artificial Sequence
  ENSG00000165671_98 (sequence is synthesized)
tagtgtaaattgaaataagaatagatcattgttttgtacacacacacaataaaatgtaatgatggtgctaatttcacggtataaataagcactgccaagggttgagggactggcagctca

SEQ ID NO: 524307 - DNA, 120 bp, Artificial Sequence
  ENSG00000165671_99 (sequence is synthesized)
agaaacccgggttcctgtttgggaggagattttatgtagaaaagtttgaggctttgttaaaagtggggagaaggaagatcctcagtgaagcctgcacccaaccctggagtggcccagtgc

SEQ ID NO: 524308 - DNA, 120 bp, Artificial Sequence
  ENSG00000165671_100 (sequence is synthesized)
aatccagaggtggaagagatcctatatccaggtgaaggtggccattgagtttctcagggctggggccaccttgtccatagcctccgtccacgctgcctggagcaggttgttagagagctc

SEQ ID NO: 524309 - DNA, 120 bp, Artificial Sequence
  ENSG00000165671_101 (sequence is synthesized)
tggttgttgggtcttcctcagctcccttctgcccctctctacctcttccactcatggaagcccctctactgcttatgaagattaagggtagtattttctaaggaagtggaaagaattaaa

SEQ ID NO: 524310 - DNA, 120 bp, Artificial Sequence
  ENSG00000165671_102 (sequence is synthesized)
ctagaaatccacaacctcggaagaagtgtttcgagtttaacatgcgctgtttctgcttatgtggttccttctctagagctgctttcccatggctttcaaaacatcaggttattgtggggc

SEQ ID NO: 524311 - DNA, 120 bp, Artificial Sequence
  ENSG00000165671_103 (sequence is synthesized)
ttcaggtgtaaggtcctggaagttcagcaaagtttcgtggacaagacatgggcacagagagtagaagcagaaataaatggttctatgttttcaacttccagggttggggcaggccagagc

SEQ ID NO: 524312 - DNA, 120 bp, Artificial Sequence
  ENSG00000165671_104 (sequence is synthesized)
aaggcggtctcatcgaggtgggtgctacctgtgtgtgtgtagatgagtgtgctgaaggtggggagggcagcacacagcagctcatggcagagccgcctcctaggtcttggcaaagaggca

SEQ ID NO: 524313 - DNA, 120 bp, Artificial Sequence
  ENSG00000165671_105 (sequence is synthesized)
agctgacgatagacatctacctatattgttaagaaaggggtcggggggatcagccaaggtccatcattgcttttttgccgcgcccccccccccccgcccccatagattgtcagctgtaag

SEQ ID NO: 524314 - DNA, 120 bp, Artificial Sequence
  ENSG00000165671_106 (sequence is synthesized)
tgaaactcctagtgaaaaagaggggagccctgtgttaggagtccccataaacatgtactgtaattctttgtatatagaaaaaaaatttactgtaaagtaaagtttaactttactcatata

SEQ ID NO: 524315 - DNA, 120 bp, Artificial Sequence
  ENSG00000165671_107 (sequence is synthesized)
caggtcgcgctcgctgccttctcccctgaagagagacgcggggggaggggggtgcggcgagcggccccgctctctccccaccgctccgctcgcaccccagtgtaatgagggtcaccccct

SEQ ID NO: 524316 - DNA, 120 bp, Artificial Sequence
  ENSG00000165671_108 (sequence is synthesized)
aaatttgtttttggttgcttatcagttcacagctgaaatcctattgctaatcataagctttgggcaaaattttactttgatttttaaatttatctctgttgtatgaatttggttgtttta

SEQ ID NO: 524317 - DNA, 120 bp, Artificial Sequence
  ENSG00000165671_109 (sequence is synthesized)
agctttttccaaataactcttcattgagagtaggctaatgcttttaaaggcatttgattgagttcaggtttaatttctcaagttggaggtatacatatatgattaaaaaaaaaaaaaaaa

SEQ ID NO: 524318 - DNA, 120 bp, Artificial Sequence
  ENSG00000165671_110 (sequence is synthesized)
atcttcacccgcacctactcctcttccggccgccaagacccccgcctttttctatagtaggattttaagaggtgaaagaagcacagtgagaacaagattaactcggatatattctttgct

SEQ ID NO: 524319 - DNA, 120 bp, Artificial Sequence
  ENSG00000165671_111 (sequence is synthesized)
atattttgaatctgaatggttaataaacaaatgaaaaacaacttgaggtaattaacacctctggaggaagagttatcttaaatattacttgttaagccatttaagttttctctgttaaat

SEQ ID NO: 524320 - DNA, 120 bp, Artificial Sequence
  ENSG00000165671_112 (sequence is synthesized)
tgtattacctgattattaatgttataagattagaattaattaaaatataggattagagctaaattctttttaaaattaatctgttctcttgggagttggtatcctttgtaattaatacag

SEQ ID NO: 524321 - DNA, 120 bp, Artificial Sequence
  ENSG00000165671_113 (sequence is synthesized)
aaaacctcctctgggggagggagggagagagagaggaagggggagccccacaaccgtctaggaatgctcagcccctgggcccgtgcagggcgggagagccgggcctcagcacatcctgta

SEQ ID NO: 524322 - DNA, 120 bp, Artificial Sequence
  ENSG00000165671_114 (sequence is synthesized)
gtctgtggagcaggacaggtcgcacagatggcccctgaaatctaggttgatggtgaagtcccggtcccagttcttggcgttgggccgcatgccgatggtgccgaagatctcctcgcccgt

SEQ ID NO: 524323 - DNA, 120 bp, Artificial Sequence
  ENSG00000165671_115 (sequence is synthesized)
atgcagaggatgcttgtgtccgagcccacatccagcaccaccttgtctttaaagaggtggcggttgtgaaacatggagttgccgaagtgggcgtaggagtcaaagtagtaatctttggac

SEQ ID NO: 524324 - DNA, 120 bp, Artificial Sequence
  ENSG00000165671_116 (sequence is synthesized)
gtcatgccctcgacgttcggcttctcgctgctttccgcctggccacaggacacctccatgatgcagttcacgacctcggcggccgccatcttcacccgcacctactcctcttccggccgc

SEQ ID NO: 524325 - DNA, 120 bp, Artificial Sequence
  ENSG00000165671_117 (sequence is synthesized)
ctgctcagcttggtctgtggtggtggtggtggtggtggtgtgggtttggggtgcggccgggtagggggttcgcctgcggccgcgtctgctcggggcctgaggcctcgaagaccccagccc

SEQ ID NO: 524326 - DNA, 120 bp, Artificial Sequence
  ENSG00000165671_118 (sequence is synthesized)
aacttcatcatcatctacttcacaggaattgccatttagactggccttgtcatgttgcccaggctggcgtcgggactcctgggctcattcgatcctcctgcatcagctagaactacagta

SEQ ID NO: 524327 - DNA, 120 bp, Artificial Sequence
  ENSG00000165671_119 (sequence is synthesized)
tttcagtaatgctgtcaagtattgttagagggtgataaatgataacatttgtttttatttgagcttatgaagaatttcttgactttctagctaaatgatcagttcacttctcttagcctc

SEQ ID NO: 524328 - DNA, 120 bp, Artificial Sequence
  ENSG00000165671_120 (sequence is synthesized)
aattttattgcgtctaaattccagaagttcttgattgctataagattccttcagctttaaatattaatatttgatattgattttgtttctgcccaaacacattgtttggtcaccgccggt

SEQ ID NO: 524329 - DNA, 120 bp, Artificial Sequence
  ENSG00000165671_121 (sequence is synthesized)
aatgttagcaaagagaattttttttggccaacaaatgtctcataccacattcagtttttataagaaaaacttttatggtatgttgttattctgagttcattaaacattcgctttacctta

SEQ ID NO: 524330 - DNA, 120 bp, Artificial Sequence
  ENSG00000165671_122 (sequence is synthesized)
atttaatggtcgacgttgagctcttcgacaacttcttgggtaagttgtaataggatcagcttcgatgattgctctcaattggtcgttgtcaacttcccatggccggctactactcctcat

SEQ ID NO: 524331 - DNA, 120 bp, Artificial Sequence
  ENSG00000165671_123 (sequence is synthesized)
cttcttgaaccaccactgcactgtacgtttgtttgaagttcctggggcaaacgtgttgttgatgttgtgaattgtctccactgctttatgacccattttgaacctgatgtcaacctaaga

SEQ ID NO: 524332 - DNA, 81 bp, Artificial Sequence
  ENSG00000165671_124 (sequence is synthesized)
gataaatccagtgccagcattggtgacatggaaaaggagccaggaattcccagtttgacaccacaggctgagctccctgaa

SEQ ID NO: 524333 - DNA, 120 bp, Artificial Sequence
  ENSG00000165672_0 (sequence is synthesized)
gtggcgcccgagtgcactgaagatggcggctgctgtaggacggttgctccgagcgtcggttgcccgacatgtgagtgccattccttggggcatttctgccactgcagccctcaggcctgc

SEQ ID NO: 524334 - DNA, 120 bp, Artificial Sequence
  ENSG00000165672_1 (sequence is synthesized)
tgcatgtggaagaacgagcttgacaaatttattgtgttctggttccagtcaagcaaaattattcagcaccagttcctcatgccatgcacctgctgtcacccagcatgcaccctattttaa

SEQ ID NO: 524335 - DNA, 120 bp, Artificial Sequence
  ENSG00000165672_2 (sequence is synthesized)
gggtacagccgttgtcaatggagagttcaaagacctaagccttgatgactttaaggggaaatatttggtgcttttcttctatcctttggatttcacctttgtgtgtcctacagaaattgt

SEQ ID NO: 524336 - DNA, 120 bp, Artificial Sequence
  ENSG00000165672_3 (sequence is synthesized)
tgcttttagtgacaaagctaacgaatttcacgacgtgaactgtgaagttgtcgcagtctcagtggattcccactttagccatcttgcctggataaatacaccaagaaagaatggtggttt

SEQ ID NO: 524337 - DNA, 120 bp, Artificial Sequence
  ENSG00000165672_4 (sequence is synthesized)
gggccacatgaacatcgcactcttgtcagacttaactaagcagatttcccgagactacggtgtgctgttagaaggttctggtcttgcactaagaggtctcttcataattgaccccaatgg

SEQ ID NO: 524338 - DNA, 120 bp, Artificial Sequence
  ENSG00000165672_5 (sequence is synthesized)
agtcatcaagcatttgagcgtcaacgatctcccagtgggccgaagcgtggaagaaaccctccgcttggtgaaggcgttccagtatgtagaaacacatggagaagtctgcccagcgaactg

SEQ ID NO: 524339 - DNA, 120 bp, Artificial Sequence
  ENSG00000165672_6 (sequence is synthesized)
accacagttgaaacctgcttttatcattttcaagatggttatttgtagaaggcaaggaaccaattatgcttgtattcataagtattactctaaatgttttgtttttgtaattctggctaa

SEQ ID NO: 524340 - DNA, 120 bp, Artificial Sequence
  ENSG00000165672_7 (sequence is synthesized)
gaccttttaaacatggttagttgctagtacaaggaatcctttattggtaacatcttggtggctggctagctagtttctacagaacataatttgcctctatagaaggctattcttagatca

SEQ ID NO: 524341 - DNA, 120 bp, Artificial Sequence
  ENSG00000165672_8 (sequence is synthesized)
tgtctcaatggaaacactcttctttcttagccttacttgaatcttgcctataataaagtagagcaacacacattgaaagcttctgatcaacggtcctgaaattttcatcttgaatgtctt

SEQ ID NO: 524342 - DNA, 120 bp, Artificial Sequence
  ENSG00000165672_9 (sequence is synthesized)
tgtattaaactgaattttcttttaagctaacaaagatcataattttcaatgattagccgtgtaactcctgcaatgaatgtttatgtgattgaagcaaatgtgaatcgtattattttaaaa

SEQ ID NO: 524343 - DNA, 120 bp, Artificial Sequence
  ENSG00000165672_10 (sequence is synthesized)
agtggcagagtgacttaactgatcatgcatgatccctcatccctgaaattgagtttatgtagtcattttacttattttattcattagctaactttgtctatgtatatttctagatattga

SEQ ID NO: 524344 - DNA, 120 bp, Artificial Sequence
  ENSG00000165672_11 (sequence is synthesized)
ttagtgtaatcgattataaaggatatttatcaaatccagggattgcattttgaaattataattattttctttgctgaagtattcattgtaaaacatacaaaataaacatattttaaaaca

SEQ ID NO: 524345 - DNA, 120 bp, Artificial Sequence
  ENSG00000165672_12 (sequence is synthesized)
agaaccaatccccccacaggtggcaaaggatgactgtgcctaagatgtacagttgaaccgaatgttttgatttatactaagcactttatactactaattaattatgagaagtttaaataa

SEQ ID NO: 524346 - DNA, 89 bp, Artificial Sequence
  ENSG00000165672_13 (sequence is synthesized)
tctttcttgggttacaccttgggttttagcgctgagtggcatcttagagtttgggcccttttcgagacggtgtcttgctttatcgccca

SEQ ID NO: 524347 - DNA, 76 bp, Artificial Sequence
  ENSG00000165672_14 (sequence is synthesized)
catcgtgttggccaggctggtctcaaaactcttgacttcgtgatctgcctgcctcggcctcaccattttttttttt

SEQ ID NO: 524348 - DNA, 120 bp, Artificial Sequence
  ENSG00000165672_15 (sequence is synthesized)
gccaccgcacctggcagaccatttttttttttttaaactttaaagagattatcaaacgaatgcctaggtctttcagaattgtcaatggccagagaaagggtactggctatttttctccta

SEQ ID NO: 524349 - DNA, 120 bp, Artificial Sequence
  ENSG00000165672_16 (sequence is synthesized)
cggtccctttccctatgagaactcactaattttgcagttacctctgtacccgttttaatattgagattaacaagagagagaagctgagtctggcttataagataaagacttttgggagtc

SEQ ID NO: 524350 - DNA, 120 bp, Artificial Sequence
  ENSG00000165672_17 (sequence is synthesized)
tatgggccctgctctgtcccagctctgcctcaccttctattggtggacttcagctggctgcaccctctgggaacagtttcacctcaaaccccaggctcccagtgcctgacccagggaggg

SEQ ID NO: 524351 - DNA, 120 bp, Artificial Sequence
  ENSG00000165672_18 (sequence is synthesized)
agaagcatcttttatcctgagttttctctaacctgccttttccatgagtgattgatacctgaaatttccacatccttttaagacagactgttaaaacctgtaggttaaataaccggacac

SEQ ID NO: 524352 - DNA, 120 bp, Artificial Sequence
  ENSG00000165672_19 (sequence is synthesized)
agtgacacacacctatagtcacgctacttgggagtctgaggtgggaggatcagttgagccagaagttcgaggctgcagcctgctgtgatcacacctgagaagagcactgcactccagcgt

SEQ ID NO: 524353 - DNA, 120 bp, Artificial Sequence
  ENSG00000165672_20 (sequence is synthesized)
gggcaatacagtgagaccctatatttaaaccaaacaaccaaaaaaacttctaggctaaacatatctgcatctgtcacagtaacaccaacacagaagataaacacagaccactgtggtagc

SEQ ID NO: 524354 - DNA, 120 bp, Artificial Sequence
  ENSG00000165672_21 (sequence is synthesized)
ccccatttacccaataattcattcataataaacagttgttgaacctagataaaatacacctctgtctcttcccatttgcctataagtttcttgccaagatgtgatacagcagctcaaaga

SEQ ID NO: 524355 - DNA, 120 bp, Artificial Sequence
  ENSG00000165672_22 (sequence is synthesized)
atgcttgccaagtcactaatagtctttgctctctctagttcagtgactttccgatactgtgtaacattcagggcactatgtgaacttgtaagtgtgaccatactgcatgttttatggtga

SEQ ID NO: 524356 - DNA, 120 bp, Artificial Sequence
  ENSG00000165672_23 (sequence is synthesized)
cctggtccagtactgcctttgttaaagcatctgtcatcagtaagagatgataagttttttgcacaacagtgaaaaccccacctttaagcatatgattacgcttaataaatattttattaa

SEQ ID NO: 524357 - DNA, 120 bp, Artificial Sequence
  ENSG00000165675_0 (sequence is synthesized)
acatttcccatgaagccatgggctcgggcctccggcttccccggtgaccagtagccaataggagacgccgcagtgggcaccctgtgtgtgagagtccagccttgggccagagtgccgggt

SEQ ID NO: 524358 - DNA, 120 bp, Artificial Sequence
  ENSG00000165675_1 (sequence is synthesized)
ctaggcctggaagcgcgaggcgggcatttcggaagagagtggcgcggcgtggggcgccgcgagggcactacgagcccaggaactgccgcgccggcccgattttccgcggctgtataagga

SEQ ID NO: 524359 - DNA, 120 bp, Artificial Sequence
  ENSG00000165675_2 (sequence is synthesized)
ctagcgcttcggtagccggggagctggagggaacctgatttgagatcaattcttggagaacacaaagaagtgtgatggattgaaccagctgccctttgaccctgctaacaacaacgagcc

SEQ ID NO: 524360 - DNA, 120 bp, Artificial Sequence
  ENSG00000165675_3 (sequence is synthesized)
cctgcagtttggtagtgccagtggccctctggtcacagaaggcctcattgagaatggaggggaatcaagcaagaaaagaaagagaacaaatactccttcagaaatgatgacagagctaag

SEQ ID NO: 524361 - DNA, 120 bp, Artificial Sequence
  ENSG00000165675_4 (sequence is synthesized)
ttcacagttgaggaccacacaatgcaaagagattttagatggctgtgggtctacgaaataggctatgcagccgataacagtagaactctgaacgtggattccactgcaatgacactacct

SEQ ID NO: 524362 - DNA, 120 bp, Artificial Sequence
  ENSG00000165675_5 (sequence is synthesized)
atgtctgatccaactgcatgggccacagcaatgaataatcttggaatggcaccgctgggaattgccggacaaccaattttacctgactttgatcctgctcttggaatgatgactggaatt

SEQ ID NO: 524363 - DNA, 120 bp, Artificial Sequence
  ENSG00000165675_6 (sequence is synthesized)
ccaccaataactccaatgatgcctggtttgggaatagtacctccaccaattcctccagatatgccagtagtaaaagagatcatacactgtaaaagctgcacgctcttccctccaaatcca

SEQ ID NO: 524364 - DNA, 120 bp, Artificial Sequence
  ENSG00000165675_7 (sequence is synthesized)
aatctcccacctcctgcaacccgagaaagaccaccaggatgcaaaacagtatttgtgggtggtctgcctgaaaatgggacagagcaaatcattgtggaagttttcgagcagtgtggagag

SEQ ID NO: 524365 - DNA, 120 bp, Artificial Sequence
  ENSG00000165675_8 (sequence is synthesized)
atcattgccattcgcaagagcaagaagaacttctgccacattcgctttgctgaggagtacatggtggacaaagccctgtatctgtctggttaccgcattcgcctgggctctagtactgac

SEQ ID NO: 524366 - DNA, 120 bp, Artificial Sequence
  ENSG00000165675_9 (sequence is synthesized)
aagaaggacacaggcagactccacgttgatttcgcacaggctcgagatgacctgtatgagtgggagtgtaaacagcgtatgctagccagagaggagcgccatcgtagaagaatggaagaa

SEQ ID NO: 524367 - DNA, 120 bp, Artificial Sequence
  ENSG00000165675_10 (sequence is synthesized)
gaaagattgcgtccaccatctccacccccagtggtccactattcagatcatgaatgcagcattgttgctgaaaaattaaaagatgattccaaattctcagaagctgtacagaccttgctt

SEQ ID NO: 524368 - DNA, 120 bp, Artificial Sequence
  ENSG00000165675_11 (sequence is synthesized)
acctggatagagcgaggagaggtcaaccgtcgtagcgccaataacttctactccatgatccagtcggccaacagccatgtccgccgcctggtgaacgagaaagctgcccatgagaaagat

SEQ ID NO: 524369 - DNA, 120 bp, Artificial Sequence
  ENSG00000165675_12 (sequence is synthesized)
atggaagaagcaaaggagaagttcaagcaggccctttctggaattctcattcaatttgagcagatagtggctgtgtaccattccgcctccaagcagaaggcatgggaccacttcacaaaa

SEQ ID NO: 524370 - DNA, 120 bp, Artificial Sequence
  ENSG00000165675_13 (sequence is synthesized)
gcccagcggaagaacatcagcgtgtggtgcaaacaagctgaggaaattcgcaacattcataatgatgaattaatgggaatcaggcgagaagaagaaatggaaatgtctgatgatgaaata

SEQ ID NO: 524371 - DNA, 120 bp, Artificial Sequence
  ENSG00000165675_14 (sequence is synthesized)
gaagaaatgacagaaacaaaagaaactgaggaatcagccttagtatcacaggcagaagctctgaaggaagaaaatgacagcctccgttggcagctcgatgcctaccggaatgaagtagaa

SEQ ID NO: 524372 - DNA, 120 bp, Artificial Sequence
  ENSG00000165675_15 (sequence is synthesized)
ctgctcaagcaagaacaaggcaaagtccacagagaagatgaccctaacaaagaacagcagctgaaactcctgcaacaagccctgcaaggaatgcaacagcatctactcaaagtccaagag

SEQ ID NO: 524373 - DNA, 120 bp, Artificial Sequence
  ENSG00000165675_16 (sequence is synthesized)
gaatacaaaaagaaagaagctgaacttgaaaaactcaaagatgacaagttacaggtggaaaaaatgttggaaaatcttaaagaaaaggaaagctgtgcttctaggctgtgtgcctcaaac

SEQ ID NO: 524374 - DNA, 120 bp, Artificial Sequence
  ENSG00000165675_17 (sequence is synthesized)
gcactgctagtggggattatctccacattccttcatgttcacccatttggagcaagcattgaatacatctgttcctacttgcaccgtcttgataataagatctgcaccagcgatgtggag

SEQ ID NO: 524375 - DNA, 120 bp, Artificial Sequence
  ENSG00000165675_18 (sequence is synthesized)
tgtctcatgggtagactccagcataccttcaagcaggaaatgactggagttggagccagcctggaaaagagatggaaattctgtggcttcgagggcttgaagctgacctaaatctctttg

SEQ ID NO: 524376 - DNA, 120 bp, Artificial Sequence
  ENSG00000165675_19 (sequence is synthesized)
cctaacaacttgggatcctgaagataaatatgtgttggacaagcatagaaagtgatttatatttttaatggttttcaagtggaagttcctttgaatttgtcagttcattcctggaaaatc

SEQ ID NO: 524377 - DNA, 120 bp, Artificial Sequence
  ENSG00000165675_20 (sequence is synthesized)
ttttgagttaaaataaggatcctaggacagcacctcgaactacaggccctaaagagaaattgcctcaaaccacaagtgctgtaacttcctcccctttctgtcaattggttgtctttaaat

SEQ ID NO: 524378 - DNA, 120 bp, Artificial Sequence
  ENSG00000165675_21 (sequence is synthesized)
attgcaaaagtcctgatgctaaacagtatttggagtgttttcagtgtctgtactactgttgtagaccttggtatttttttaaacactgttaactgaaatgttttgatgatttgtatgtga

SEQ ID NO: 524379 - DNA, 120 bp, Artificial Sequence
  ENSG00000165675_22 (sequence is synthesized)
tttgtgtttctaaacttctctttacattaatgttgttactggtgaaaggcatgagagcagcactaagtcctctgtgtaactgccattgtctttccaatccccagtagaccagtaaataaa

SEQ ID NO: 524380 - DNA, 120 bp, Artificial Sequence
  ENSG00000165675_23 (sequence is synthesized)
taacacatcagtgtcttctagaaggtgcctgaccaggttcaccttttaaacgacaaagcatggtttgtggctttttgcaaaattactatgaaccaaaagttgacaaatgttccaaagtta

SEQ ID NO: 524381 - DNA, 120 bp, Artificial Sequence
  ENSG00000165675_24 (sequence is synthesized)
ttttctctaacatatcacattaaagatctgtttcagaattgtaaaaagtacatctagatgtgtttacagaaagcaagtatccagtatgactggcatgtgttcatgctattcagaatcact

SEQ ID NO: 524382 - DNA, 120 bp, Artificial Sequence
  ENSG00000165675_25 (sequence is synthesized)
tgtaaatagtctgcttttaaaggagggcatgttcagttttctgtgaattaaaatatgctcatgtgtgggcacacacgcacaaacacacacacgcacgcacacagtggcagaagggattta

SEQ ID NO: 524383 - DNA, 120 bp, Artificial Sequence
  ENSG00000165675_26 (sequence is synthesized)
tattaatattctttcccctctggccttcttacagtctgttggtccctttgcttctgttgtcagtgtgttgaattgcaaaccgagtactgctgtaaatactatgtttacttcatgctgaat

SEQ ID NO: 524384 - DNA, 120 bp, Artificial Sequence
  ENSG00000165675_27 (sequence is synthesized)
gtttgcaaagacttgatataagtattaatagtaatgaatcaatgaataaataatgagctagggtttgtgaggctttctacaaataggtcagctccacctggagtgcgaattgccagagac

SEQ ID NO: 524385 - DNA, 120 bp, Artificial Sequence
  ENSG00000165675_28 (sequence is synthesized)
accttggtagtgcccatcggcaaatcgcaatggcagcatgtgagtggaccattcagaaacttctgcttggtggaaagtaaacagagaggatggaggtttggggcgaatgtcctgaggcag

SEQ ID NO: 524386 - DNA, 120 bp, Artificial Sequence
  ENSG00000165675_29 (sequence is synthesized)
agatggtctttattgtgtgtggtggtggttgtggtatttataataatgcaagcataccctcccttgagtctcaattgaagataaaagaatgtactgagcaagcaaagccaatggagagta

SEQ ID NO: 524387 - DNA, 120 bp, Artificial Sequence
  ENSG00000165675_30 (sequence is synthesized)
tttcacaaaaatactttgtaaatgagatgccagtagtgttcaaagttgtatttttaaaagataaatattcctttttatacctcagttttgtgtcctgtttttaatgacttacgctctaag

SEQ ID NO: 524388 - DNA, 120 bp, Artificial Sequence
  ENSG00000165675_31 (sequence is synthesized)
taatccattagtagttatctcagttccttcctttgggttactagaatgttggaaaaagatgccaagtctgtcttgacaactggaaacagggttccacagcagcccattcgtgctgaaaac

SEQ ID NO: 524389 - DNA, 120 bp, Artificial Sequence
  ENSG00000165675_32 (sequence is synthesized)
tggcttccccctgaagcaccctgctgtggcaccagcaggaagctcaggttaattttacactagcttgctcactgatgcatctctcatcaatgctacggaaggctttgattcatcagtctc

SEQ ID NO: 524390 - DNA, 120 bp, Artificial Sequence
  ENSG00000165675_33 (sequence is synthesized)
gggctcttggaatacctaattttaataatatctatgaaatcaagggaaactttccatttacagttatttcttgtttaaataaactaaattaatttttaggggagagcagtaggaaaaaga

SEQ ID NO: 524391 - DNA, 120 bp, Artificial Sequence
  ENSG00000165675_34 (sequence is synthesized)
taggggagagcagtaggaaaaagagctaatgcatgcggggtttaatacctaggtgatgggttgaggtgcagcaaaaccaccatggcacacgttcacctatgtaacaaacctgcacatcct

SEQ ID NO: 524392 - DNA, 120 bp, Artificial Sequence
  ENSG00000165678_0 (sequence is synthesized)
agtgcgccggaggaactgtgctctttgaggccgacgctaggggcccggaagggaaactgcgaggcgaaggtgaccggggaccgagcatttcagatctgctcggtagacctggtgcaccac

SEQ ID NO: 524393 - DNA, 120 bp, Artificial Sequence
  ENSG00000165678_1 (sequence is synthesized)
caccatgttggctgcaaggctggtgtgtctccggacactaccttctagggttttccacccagctttcaccaaggcctcccctgttgtgaagaattccatcacgaagaatcaatggctgtt

SEQ ID NO: 524394 - DNA, 120 bp, Artificial Sequence
  ENSG00000165678_2 (sequence is synthesized)
aacacctagcagggaatatgccaccaaaacaagaattgggatccggcgtgggagaactggccaagaactcaaagaggcagcattggaaccatcgatggaaaaaatatttaaaattgatca

SEQ ID NO: 524395 - DNA, 120 bp, Artificial Sequence
  ENSG00000165678_3 (sequence is synthesized)
gatgggaagatggtttgttgctggaggggctgctgttggtcttggagcattgtgctactatggcttgggactgtctaatgagattggagctattgaaaaggctgtaatttggcctcagta

SEQ ID NO: 524396 - DNA, 120 bp, Artificial Sequence
  ENSG00000165678_4 (sequence is synthesized)
tgtcaaggatagaattcattccacctatatgtacttagcagggagtattggtttaacagctttgtctgccatagcaatcagcagaacgcctgttctcatgaacttcatgatgagaggctc

SEQ ID NO: 524397 - DNA, 120 bp, Artificial Sequence
  ENSG00000165678_5 (sequence is synthesized)
ttgggtgacaattggtgtgacctttgcagccatggttggagctggaatgctggtacgatcaataccatatgaccagagcccaggcccaaagcatcttgcttggttgctacattctggtgt

SEQ ID NO: 524398 - DNA, 120 bp, Artificial Sequence
  ENSG00000165678_6 (sequence is synthesized)
gatgggtgcagtggtggctcctctgacaatattagggggtcctcttctcatcagagctgcatggtacacagctggcattgtgggaggcctctccactgtggccatgtgtgcgcccagtga

SEQ ID NO: 524399 - DNA, 120 bp, Artificial Sequence
  ENSG00000165678_7 (sequence is synthesized)
aaagtttctgaacatgggtgcacccctgggagtgggcctgggtctcgtctttgtgtcctcattgggatctatgtttcttccacctaccaccgtggctggtgccactctttactcagtggc

SEQ ID NO: 524400 - DNA, 120 bp, Artificial Sequence
  ENSG00000165678_8 (sequence is synthesized)
aatgtacggtggattagttcttttcagcatgttccttctgtatgatacccagaaagtaatcaagcgtgcagaagtatcaccaatgtatggagttcaaaaatatgatcccattaactcgat

SEQ ID NO: 524401 - DNA, 120 bp, Artificial Sequence
  ENSG00000165678_9 (sequence is synthesized)
ctctgctacatcaaatatcttgtttaatggggcagatatgcattaaatagtttgtacaagcagctttcgttgaagtttagaagataagaaacatgtcatcatatttaaatgttccggtaa

SEQ ID NO: 524402 - DNA, 120 bp, Artificial Sequence
  ENSG00000165678_10 (sequence is synthesized)
tgtgatgcctcaggtctgcctttttttctggagaataaatgcagtaatcctctcccaaataagcacacacattttcaattctcatgtttgagtgattttaaaatgttttggtgaatgtga

SEQ ID NO: 524403 - DNA, 120 bp, Artificial Sequence
  ENSG00000165678_11 (sequence is synthesized)
aaactaaagtttgtgtcatgagaatgtaagtcttttttctactttaaaatttagtaggttcactgagtaactaaaatttagcaaacctgtgtttgcatatttttttggagtgcagaatat

SEQ ID NO: 524404 - DNA, 120 bp, Artificial Sequence
  ENSG00000165678_12 (sequence is synthesized)
tgtaattaatgtcataagtgatttggagctttggtaaagggaccagagagaaggagtcacctgcagtcttttgtttttttaaatacttagaacttagcacttgtgttattgattagtgag

SEQ ID NO: 524405 - DNA, 120 bp, Artificial Sequence
  ENSG00000165678_13 (sequence is synthesized)
gagccagtaagaaacatctgggtatttggaaacaagtggtcattgttacattcatctgctgaacttaacaaaactgttcatcctgaaacaggcacaggtgatgcattctcctgctgttgc

SEQ ID NO: 524406 - DNA, 120 bp, Artificial Sequence
  ENSG00000165678_14 (sequence is synthesized)
ttctcagtgctctctttccaatatagatgtggtcatgtttgacttgtacagaatgttaatcatacagagaatccttgatggaattatatatgtgtgttttacttttgaatgttacaaaag

SEQ ID NO: 524407 - DNA, 120 bp, Artificial Sequence
  ENSG00000165678_15 (sequence is synthesized)
gaaataactttaaaactattctcaagagaaaatattcaaagcatgaaatatgttgctttttccagaatacaaacagtatactcatgattgctaagtgtttttttatttttgcatatttat

SEQ ID NO: 524408 - DNA, 120 bp, Artificial Sequence
  ENSG00000165678_16 (sequence is synthesized)
tgaactgtctaattgaatacagcttgctcttgtcacctcttcaagctttcaagcctttatagaaaagcttctttgtggcttacactggaaattatgaaagcagtttttctcctaagactt

SEQ ID NO: 524409 - DNA, 120 bp, Artificial Sequence
  ENSG00000165678_17 (sequence is synthesized)
ttggtttctcgcattgcctctcagactaagcactaaaaagcaaagcaaaacagaactagttctgtcttaatgaaatatatcaacccaaaagtgtaatgaggaaaatgcttcattagtttc

SEQ ID NO: 524410 - DNA, 120 bp, Artificial Sequence
  ENSG00000165678_18 (sequence is synthesized)
ccctagcagacttttacttctcttacactgctacaccattactttcttgagacatttgtaagttctttgatacagaagagttatatttagaagtctttaatgaagggaaagaagtctgta

SEQ ID NO: 524411 - DNA, 120 bp, Artificial Sequence
  ENSG00000165682_0 (sequence is synthesized)
ctatgaagaagcttcctggaaaacaataagcaaaggaaaacaaatgtgtcccatctcacatggttctaccctactaaagacaggaagatcataaactgacagatactgaaattgtaaagt

SEQ ID NO: 524412 - DNA, 120 bp, Artificial Sequence
  ENSG00000165682_1 (sequence is synthesized)
tggaaactacattttgcaaagtcattgaactctgagctcagttgcagtactcgggaagccatgcaggatgaagatggatacatcaccttaaatattaaaactcggaaaccagctctcatc

SEQ ID NO: 524413 - DNA, 120 bp, Artificial Sequence
  ENSG00000165682_2 (sequence is synthesized)
tccgttggctctgcatcctcctcctggtggcgtgtgatggctttgattctgctgatcctgtgcgtggggatggttgtcgggctggtggctctggggatttggtctgtcatgcagcgcaat

SEQ ID NO: 524414 - DNA, 120 bp, Artificial Sequence
  ENSG00000165682_3 (sequence is synthesized)
aatgcagcccctgtgacacaaactggagatattatggagatagctgctatgggttcttcaggcacaacttaacatgggaagagagtaagcagtactgcactgacatgaatgctactctcc

SEQ ID NO: 524415 - DNA, 120 bp, Artificial Sequence
  ENSG00000165682_4 (sequence is synthesized)
tgaagattgacaaccggaacattgtggagtacatcaaagccaggactcatttaattcgttgggtcggattatctcgccagaagtcgaatgaggtctggaagtgggaggatggctcggtta

SEQ ID NO: 524416 - DNA, 120 bp, Artificial Sequence
  ENSG00000165682_5 (sequence is synthesized)
tctcagaaaatatgtttgagtttttggaagatggaaaaggaaatatgaattgtgcttattttcataatgggaaaatgcaccctaccttctgtgagaacaaacattatttaatgtgtgaga

SEQ ID NO: 524417 - DNA, 120 bp, Artificial Sequence
  ENSG00000165682_6 (sequence is synthesized)
ggaaggctggcatgaccaaggtggaccaactaccttaatgcaaagaggtggacaggataacacagataagggctttattgtacaataaaagatatgtatgaatgcatcagtagctgaaaa

SEQ ID NO: 524418 - DNA, 120 bp, Artificial Sequence
  ENSG00000165682_7 (sequence is synthesized)
tcttctcactggagttatttttaatattatctttcctatcagaattacctagtcccttctttgaatatacagaagccatcacgtgagtttatcatttgcttcccaattgttctattttcc

SEQ ID NO: 524419 - DNA, 120 bp, Artificial Sequence
  ENSG00000165682_8 (sequence is synthesized)
tttaattttctttcttcttgtccttcatttctaattacctgaacatggtatgatttactgcatcttcagatatacacatataacatcaaaatcaggccaatataggttagggcttaatta

SEQ ID NO: 524420 - DNA, 120 bp, Artificial Sequence
  ENSG00000165682_9 (sequence is synthesized)
atataagttgtgcaaaatatctatgtttgaaatctgtccaaaatatctaagtttgaaaggcggtgtaagatagtaaaaagaatattaaacttagaatcagcaaaataatttagatgtcaa

SEQ ID NO: 524421 - DNA, 120 bp, Artificial Sequence
  ENSG00000165682_10 (sequence is synthesized)
ttaactaaattacaatcatgaacaagtttcataacctctttaacttcccttttctcatatttaaaataggaataataacaaccatcttttatatctcacagttctacaacctaaaataga

SEQ ID NO: 524422 - DNA, 120 bp, Artificial Sequence
  ENSG00000165682_11 (sequence is synthesized)
cccattcactattctcttaccagcaccaacccgaaaccctggctcacaaaacagagagatatttgtttctctttgtataagatagttcatgagaaaaatagctcaatcattaaaacatta

SEQ ID NO: 524423 - DNA, 120 bp, Artificial Sequence
  ENSG00000165682_12 (sequence is synthesized)
cgcaaatagaattactattccaagtctacctctggttagattcaacagtagtaattttctgcgctagagaaggaaaagaaagtttgcaagaaaactcactgggtttgtaaaatgaataaa

SEQ ID NO: 524424 - DNA, 120 bp, Artificial Sequence
  ENSG00000165682_13 (sequence is synthesized)
tgcttcttaagtttcagaggctactagacagaaggacaagtaaaaatgctttaattagtattttcctaacagttctgtgctttatttttgctgagtaactcaggaagtatttacagaata

SEQ ID NO: 524425 - DNA, 120 bp, Artificial Sequence
  ENSG00000165682_14 (sequence is synthesized)
tgtggaaaggcacccttttacaggataataggaaaaaattgcatttctttcccacagcttcccttttttaactagtggctaccatttacgaacatgattctcaaacatctcaacggaggt

SEQ ID NO: 524426 - DNA, 120 bp, Artificial Sequence
  ENSG00000165682_15 (sequence is synthesized)
tttggttaaaacatagagaaaccaaataggaaactcaaatgctgatgttactcagtgggaagactgaggagacacagagacctgggtttttaccagcatcacgacacaattctcatacaa

SEQ ID NO: 524427 - DNA, 120 bp, Artificial Sequence
  ENSG00000165682_16 (sequence is synthesized)
gtagtctttaatacagttagagaaatatcactactttagaacttactctctatctggctttggataagtaatgttctcaccttgaaatgggtttaatattattaccttgctcataagtta

SEQ ID NO: 524428 - DNA, 120 bp, Artificial Sequence
  ENSG00000165682_17 (sequence is synthesized)
attgtgaagctcatttaatatgattatataaagtatcgatcagaataccaagtatgtaatacatactcaataaatatgtgttactcttaaagctttgtgcgctaacactgaaagacactt

SEQ ID NO: 524429 - DNA, 120 bp, Artificial Sequence
  ENSG00000165682_18 (sequence is synthesized)
gaatctttatcttttttctagcctatcaataattaagcagatttggagggcttaggaaaaataatagaaatacctcaaattttacttgttacttcaaatgtctggagatcttggatttgg

SEQ ID NO: 524430 - DNA, 120 bp, Artificial Sequence
  ENSG00000165682_19 (sequence is synthesized)
gtgatggtatcagtatgttttttattttgaattgtctatttagagaaactaaataggaaccaataattcagaaaactgtacaaaattagcaactcaactttgtttcatctccctaaaatg

SEQ ID NO: 524431 - DNA, 120 bp, Artificial Sequence
  ENSG00000165682_20 (sequence is synthesized)
gaaaaacatatgtgtatacatccctatagcacacataaacttagaagaataatatcttagtgcatggcaacaatacaattaaaaatgtaggccaatcactgtgattctttttctggtatt

SEQ ID NO: 524432 - DNA, 120 bp, Artificial Sequence
  ENSG00000165682_21 (sequence is synthesized)
catatctaaagtatcttatacataaaatcaaaatagcacaaacgttagtagcacagatcagaccacctcatttcaaatactaaatcttctacatgtcatctaagtgaactccagcaaaat

SEQ ID NO: 524433 - DNA, 120 bp, Artificial Sequence
  ENSG00000165682_22 (sequence is synthesized)
ttgacttctgtcttcttcaatttaaaactaacttacaggcatgcctcggaaatattgtgggttcagttccagaccaccacaataaagcaattattgcaataaagtgagtcacattaatta

SEQ ID NO: 524434 - DNA, 120 bp, Artificial Sequence
  ENSG00000165682_23 (sequence is synthesized)
tttgctttcccaattcgtgtaaaagttatgtttgagctacaacgtcttctattaagtatacaacagcattatgtctggaaaatgtacatagttttattaaaaatagtttattgctaaaaa

SEQ ID NO: 524435 - DNA, 120 bp, Artificial Sequence
  ENSG00000165682_24 (sequence is synthesized)
gggggcagaagattgtaagggctggttttaaagaaaaaaattaggtcaaggtcaaacctccaaatcaaggaggggttacaaaaatgcctaaacagctggtaaaacaagtttagttgcttt

SEQ ID NO: 524436 - DNA, 120 bp, Artificial Sequence
  ENSG00000165682_25 (sequence is synthesized)
ctaaacgattatgtgtcacttttgcatctaccccaaccatgaaaatttatttgcttattatagaattacaggaaaatatttactaacaggataaaaaataccttgtaacaaagcctcttg

SEQ ID NO: 524437 - DNA, 120 bp, Artificial Sequence
  ENSG00000165682_26 (sequence is synthesized)
ggtataatactcccagttatgagttatggagataaacatatctatctatatattttttttcagaacaatgcttatgtttgcatagctaattgctgtatgtctttaacaaaagccaagctt

SEQ ID NO: 524438 - DNA, 120 bp, Artificial Sequence
  ENSG00000165684_0 (sequence is synthesized)
acaccttctacgctgggtggccagtttccatgtggcttggtgtgggagcagagacgggacagtggggcctgtccttgttcatccactccctgcctgtgctggttgcagcctcagagcagg

SEQ ID NO: 524439 - DNA, 120 bp, Artificial Sequence
  ENSG00000165684_1 (sequence is synthesized)
cgggagatgttcttggggcttaggctcctggcagagcacatagcaggagtttgtggggtctgaggttcctgtcccagggttccccgattctgtgcctggcctattaatctttctctgggg

SEQ ID NO: 524440 - DNA, 120 bp, Artificial Sequence
  ENSG00000165684_2 (sequence is synthesized)
agcccagtgcccactgccgagcaggctcctgccatcccccatgggcgggtgtgtctgaaggagaatgggatcccggcacggtcttggtttctaacatctcggggtgtgttttggaggcag

SEQ ID NO: 524441 - DNA, 120 bp, Artificial Sequence
  ENSG00000165684_3 (sequence is synthesized)
gcgggagtcatggatgtagatgctgaaagagagaagataacacaggagatcaaggagctggaaaggattttggatcccggctcctcgggctcccacgtggagatctcagaatcaagtctc

SEQ ID NO: 524442 - DNA, 120 bp, Artificial Sequence
  ENSG00000165684_4 (sequence is synthesized)
gagtcagattctgaagcagattcactgccttctgaggacttggatcctgccgatcccccgatctcggaagaagaaaggtggggcgaagccagcaatgacgaggacgatcccaaggataaa

SEQ ID NO: 524443 - DNA, 120 bp, Artificial Sequence
  ENSG00000165684_5 (sequence is synthesized)
accctccctgaagacccagaaacctgcctgcagctgaacatggtctaccaggaggtcatccaggagaagctggctgaggccaacctgctgctggcccagaaccgggagcagcaggaggaa

SEQ ID NO: 524444 - DNA, 120 bp, Artificial Sequence
  ENSG00000165684_6 (sequence is synthesized)
ctcatgagggatctggctgggtccaaaggcaccaaggtgaaagatggcaaaagcctgcccccaagcacatacatggggcacttcatgaagccgtatttcaaggacaaggtcacgggcgtg

SEQ ID NO: 524445 - DNA, 120 bp, Artificial Sequence
  ENSG00000165684_7 (sequence is synthesized)
gggccacctgccaacgaggacacacgagagaaggctgcccaggggatcaaggctttcgaggagctccttgtgaccaaatggaaaaactgggaaaaggccttgctccgaaagtcagtggtg

SEQ ID NO: 524446 - DNA, 120 bp, Artificial Sequence
  ENSG00000165684_8 (sequence is synthesized)
agtgaccgcctgcagcgattgcttcagcccaagttactgaagctcgagtacttgcaccagaagcagagcaaagtctccagtgagctggagaggcaagccctggagaagcagggcagggaa

SEQ ID NO: 524447 - DNA, 120 bp, Artificial Sequence
  ENSG00000165684_9 (sequence is synthesized)
gccgagaaggagatccaggacatcaaccagcttccagaagaggccttgctgggaaacaggctggacagccacgactgggagaagatttccaatattaactttgaaggcagccgcagtgca

SEQ ID NO: 524448 - DNA, 120 bp, Artificial Sequence
  ENSG00000165684_10 (sequence is synthesized)
gaggagatccggaagttctggcagaactcggagcaccccagcatcaacaagcaggagtggagcagggaggaggaggagcggctgcaggcgatcgcggctgcacacggccacctggagtgg

SEQ ID NO: 524449 - DNA, 120 bp, Artificial Sequence
  ENSG00000165684_11 (sequence is synthesized)
cagaagattgcagaggagctggggaccagccgcagcgccttccagtgcctgcagaaattccagcagcacaacaaagctctgaaacgcaaggagtggacagaggaggaggaccgcatgctc

SEQ ID NO: 524450 - DNA, 120 bp, Artificial Sequence
  ENSG00000165684_12 (sequence is synthesized)
acgcagctggtgcaggagatgcgcgtcggcagccacatcccctaccgcagaattgtctactatatggaagggagagactccatgcagctgatctaccgatggaccaagagcttggatcct

SEQ ID NO: 524451 - DNA, 120 bp, Artificial Sequence
  ENSG00000165684_13 (sequence is synthesized)
ggtctgaagaagggttactgggccccggaggaagatgctaagttgcttcaagctgttgccaaatacggggagcaggattggtttaaaatccgggaagaggtgccaggtaggagcgatgcc

SEQ ID NO: 524452 - DNA, 120 bp, Artificial Sequence
  ENSG00000165684_14 (sequence is synthesized)
cagtgccgagatcggtatctcaggagattacatttcagcttgaaaaagggtcggtggaatttaaaagaagaggaacagttaattgaattaatagaaaaatatggtgtcggtcactgggca

SEQ ID NO: 524453 - DNA, 120 bp, Artificial Sequence
  ENSG00000165684_15 (sequence is synthesized)
aaaatagcttctgagctgccccatcggtctggctcccagtgtctgagcaagtggaagatcatgatggggaagaagcagggtctccggaggcggcggcggagggcccgtcacagcgtccgg

SEQ ID NO: 524454 - DNA, 120 bp, Artificial Sequence
  ENSG00000165684_16 (sequence is synthesized)
tggagctctaccagcagcagcggcagcagcagtggcagcagtggagggagcagcagcagcagcagcagcagcagcgaggaggacgagccagagcaggcgcaggccggggagggtgacaga

SEQ ID NO: 524455 - DNA, 120 bp, Artificial Sequence
  ENSG00000165684_17 (sequence is synthesized)
gcgctgctgtccccacagtacatggtcccggacatggacctgtgggttcctgccaggcagagcaccagccagccatggagaggaggggcaggggcctggctgggaggccccgctgcctcc

SEQ ID NO: 524456 - DNA, 120 bp, Artificial Sequence
  ENSG00000165684_18 (sequence is synthesized)
ctcagccctcccaaggggtccagtgccagccagggcggcagcaaggaagcttccaccacagccgcggctcctggagaggagacgagtccggtgcaggtccctgccagggcccacggccct

SEQ ID NO: 524457 - DNA, 120 bp, Artificial Sequence
  ENSG00000165684_19 (sequence is synthesized)
gtcccgaggtctgcccaggcctcccactcagcagacactcgcccggcgggcgcagagaagcaggccctggagggtgggaggcgtctgctgacagtgcctgtggagaccgtgctgagggtg

SEQ ID NO: 524458 - DNA, 120 bp, Artificial Sequence
  ENSG00000165684_20 (sequence is synthesized)
ggtgacagcgtggcccgatcccatgtgcagtggctacggcacagagccacccagagtgggcagcggcgctggagacacgctctgcaccggaggctcctgaaccgcaggctgctgctggct

SEQ ID NO: 524459 - DNA, 120 bp, Artificial Sequence
  ENSG00000165684_21 (sequence is synthesized)
gtgaccccttgggtaggggacgttgtcgtgccctgcacacaggcttcccagagacccgccgtagtgcagactcaagcggatggcctcagggagcagctgcagcaggcccgcctggccagc

SEQ ID NO: 524460 - DNA, 120 bp, Artificial Sequence
  ENSG00000165684_22 (sequence is synthesized)
acccctgtgtttaccctgtttacccagctgttccacatcgatactgccggctgcttggaggtcgtccgagagaggaaggccctgccacccaggctgccccaggctggtgctcgggaccca

SEQ ID NO: 524461 - DNA, 120 bp, Artificial Sequence
  ENSG00000165684_23 (sequence is synthesized)
ccagttcatcttctgcaggcatcctcaagtgcccagagcaccccaggccacctcttcccaaacgtgccggctcaagaagcctcaaagagtgccagccacaaagggagccgaagactggcg

SEQ ID NO: 524462 - DNA, 120 bp, Artificial Sequence
  ENSG00000165684_24 (sequence is synthesized)
tccagccgggtggagcgcaccctaccccaggcgtccctgctggcttcaaccggcccccggcccaagcccaagactgtgtcggagctgcttcaggagaagcggcttcaggaggcccgtgcc

SEQ ID NO: 524463 - DNA, 120 bp, Artificial Sequence
  ENSG00000165684_25 (sequence is synthesized)
agggaggccacccggggcccggtggtgctcccgtcccagctgctggtctcctcgtctgtgatcctccagccccctctaccacacaccccacacggccgcccagccccgggtcccaccgtc

SEQ ID NO: 524464 - DNA, 120 bp, Artificial Sequence
  ENSG00000165684_26 (sequence is synthesized)
ttaaatgtaccgctctctgggcctggggcccccgcggcagccaaacctggcacttctggctcctggcaggaggctgggacttcagccaaggacaagagactctccaccatgcaagccctg

SEQ ID NO: 524465 - DNA, 120 bp, Artificial Sequence
  ENSG00000165684_27 (sequence is synthesized)
cccctcgctcctgtcttctcagaggccgagggcacagcccctgctgcttcccaagcccctgccctgggccccggccagatctctgtgagctgccccgagagtggtctcggacagtctcag

SEQ ID NO: 524466 - DNA, 120 bp, Artificial Sequence
  ENSG00000165684_28 (sequence is synthesized)
gcccccgctgcatcccggaagcagggcctgcctgaggcgccaccctttctccccgcagcccccagccccaccccactgcccgtccagcccctcagcctgacgcacataggagggccacat

SEQ ID NO: 524467 - DNA, 120 bp, Artificial Sequence
  ENSG00000165684_29 (sequence is synthesized)
gtggcgaccagtgtccccctgcctgtcacctgggtgctcacagcccaggggcttctccctgttcctgtaccagctgtggtgagccttcccaggccagcagggacccctggccccgcaggg

SEQ ID NO: 524468 - DNA, 120 bp, Artificial Sequence
  ENSG00000165684_30 (sequence is synthesized)
ctgctggccactctgctgcctcccctgactgagactcgggcggcccagggccccagggccccagcgttgagcagctcttggcagcccccagccaatatgaacagggaaccggagccttcc

SEQ ID NO: 524469 - DNA, 120 bp, Artificial Sequence
  ENSG00000165684_31 (sequence is synthesized)
tgcaggacagacaccccagctcctcccacacacgccctctcccaaagtcctgcagaagcggatggcagtgtggcctttgtccctggagaggcccaggtggccagggagatacctgagccc

SEQ ID NO: 524470 - DNA, 120 bp, Artificial Sequence
  ENSG00000165684_32 (sequence is synthesized)
aggacgtcctcccacgctgaccctcctgaagcagaacccccttggtccgggaggctgccagccttcggtggtgtcatcccagcaactgagccaagggggacgccggggtccccctcaggg

SEQ ID NO: 524471 - DNA, 120 bp, Artificial Sequence
  ENSG00000165684_33 (sequence is synthesized)
acacaggagcccagggggcctctgggcctggagaagctgcccctgcgccagcctgggcctgagaagggggccctggacctggagaagccgcccctaccccagcctgggcctgagaagggg

SEQ ID NO: 524472 - DNA, 120 bp, Artificial Sequence
  ENSG00000165684_34 (sequence is synthesized)
gccctggacctgggcctgctgtcccaggagggcgaggcggccacacagcagtggctggggggccagcggggggtgcgtgtgcctcttctgggcagcagactgccctatcagcccccagcc

SEQ ID NO: 524473 - DNA, 120 bp, Artificial Sequence
  ENSG00000165684_35 (sequence is synthesized)
ctgtgcagcctgcgagctctgtccggtctcctactccacaagaaggccctggagcacaaggccacctccctggtggtggggggcgaggctgagcggccggccggagcactgcaagcctca

SEQ ID NO: 524474 - DNA, 120 bp, Artificial Sequence
  ENSG00000165684_36 (sequence is synthesized)
ctggggctggtgcgggggcagctccaggacaacccggcctacctcctgttgcgggcgcggttcctggcagccttcaccctccctgcgctcctggccaccctggccccccaaggcgtccgc

SEQ ID NO: 524475 - DNA, 120 bp, Artificial Sequence
  ENSG00000165684_37 (sequence is synthesized)
accaccctctcagtaccttcgagggtgggctctgagagtgaggatgaagacctcctgagtgagctggaacttgcagacagggacgggcagccgggctgcacgacagccacatgccccatt

SEQ ID NO: 524476 - DNA, 120 bp, Artificial Sequence
  ENSG00000165684_38 (sequence is synthesized)
cagggagccccagactctggtaaatgctctgcttcctcctgcctggatacttctaatgaccctgacgacctggacgtgctcagaacccggcatgccaggcacacccggaagcggaggcgg

SEQ ID NO: 524477 - DNA, 120 bp, Artificial Sequence
  ENSG00000165684_39 (sequence is synthesized)
ctggtgtgagcagcaggacaagcactttctcagaagcccgtggccctgctgacgagagacagcccacccccagcctgcaagagaggcagccagaggccaggtatctgctggccgctgact

SEQ ID NO: 524478 - DNA, 120 bp, Artificial Sequence
  ENSG00000165684_40 (sequence is synthesized)
gaccaggtccgcagtgaacagaggcgggcctgccgactgactgtgtggcatggagcatggctgttccccaagtgcacacctgaacacttggaggaataaagttctgtttttaattgtgga

SEQ ID NO: 524479 - DNA, 120 bp, Artificial Sequence
  ENSG00000165685_0 (sequence is synthesized)
cacggagagagaagaaaggagattagcagggtgactttcaccctgcaacagtcacgctggagtactctggtgaaggatcaagaatattaccagttttctgatgaagaaaggaatatattt

SEQ ID NO: 524480 - DNA, 120 bp, Artificial Sequence
  ENSG00000165685_1 (sequence is synthesized)
ggtcaccagcaatctgcctttgaccatcctcaaagccaagtttttcatcgctgtctagaaaaatacttcattcagaggacacatatgtcctctttgaatgtctcctttttgggagcagta

SEQ ID NO: 524481 - DNA, 120 bp, Artificial Sequence
  ENSG00000165685_2 (sequence is synthesized)
ggagaaagaaacttcaagatgtagaaagaattaatagtgtaacggaaagaaagaaggcaaaaggaagtaaatgtggaggccatagaaatagtaataagaataaagaagaaaaacaggaaa

SEQ ID NO: 524482 - DNA, 120 bp, Artificial Sequence
  ENSG00000165685_3 (sequence is synthesized)
gaagagggaaaagccatagaaaataacagccagagcgagtaggaggagacagagagaacgagagagagaaaagctgataaattcctgagaaaagtttctcttcttaagaattctaggtca

SEQ ID NO: 524483 - DNA, 120 bp, Artificial Sequence
  ENSG00000165685_4 (sequence is synthesized)
agaagtaaaatatggcacagagcattgaaaggaggcaacggatgcccagtgcaagattctgaagaagcaggaattcagcccgatgggagtccgagttcatgtcgtggcggcctcagccct

SEQ ID NO: 524484 - DNA, 120 bp, Artificial Sequence
  ENSG00000165685_5 (sequence is synthesized)
gctgtatttcatcctgttgcctgaccacagactgggtacatctctggtatatatggttgctagtggtaattggcgcgctgcttctcctgtgtggcctgacgtccctgtgcttccgctgct

SEQ ID NO: 524485 - DNA, 120 bp, Artificial Sequence
  ENSG00000165685_6 (sequence is synthesized)
gctgtctgagccgccagcaaaatggggaagatgggggcccaccaccctgtgaagtgaccgtcattgctttcgatcacgacagcactctccagagcactatcacatctctgcagtcggtgt

SEQ ID NO: 524486 - DNA, 120 bp, Artificial Sequence
  ENSG00000165685_7 (sequence is synthesized)
ttggccctgcagctcggaggatcctggctgtggctcactcccacagctccctgggccagctgccctcctctttggacaccctcccagggtatgaagaagctcttcacatgagtcgcttca

SEQ ID NO: 524487 - DNA, 120 bp, Artificial Sequence
  ENSG00000165685_8 (sequence is synthesized)
cagtagccatgtgcgggcagaaagcacctgatctacccccagtacctgaagaaaagcagctgcctccaacagagaaggagtcgactcgaatagttgactcttggaactgatgagagctgt

SEQ ID NO: 524488 - DNA, 120 bp, Artificial Sequence
  ENSG00000165685_9 (sequence is synthesized)
cattttataaataggagtggagtgatgtccagagtctgtgggaaaatggaacacatacttttctaaccctcagaagttttaagatggcatctaacaccatcattctatgggaaagatggt

SEQ ID NO: 524489 - DNA, 120 bp, Artificial Sequence
  ENSG00000165685_10 (sequence is synthesized)
tcttactcttcgttcacaggcctttatatcttccgatacagaatgctctaattgggaactctaattttgtatccaatggccaaaatctgcaagtaatctctagccacactgattactact

SEQ ID NO: 524490 - DNA, 120 bp, Artificial Sequence
  ENSG00000165685_11 (sequence is synthesized)
ctctctgtcagcgaatccactgcggttaactggaaaagaaagacaacagtgtcagcacagccatcgacattaatgcactgaatgcatgcatctttcctcctgagacagcaatcgatttta

SEQ ID NO: 524491 - DNA, 120 bp, Artificial Sequence
  ENSG00000165685_12 (sequence is synthesized)
caccgaatgacaatgatcatcttagacagcacaacatacccactcggatatctaaaagctagggatggcattgctgatatgggcaaagagaacacagtatagtatttaagtgccaaatat

SEQ ID NO: 524492 - DNA, 120 bp, Artificial Sequence
  ENSG00000165685_13 (sequence is synthesized)
cagtctttctttctctctggtcctacccctcagcagtatgaaaaactccatactgtgcagtcacagttggattaattcttcagttcctccgcactgcaaacacatatatgtgcgcacatg

SEQ ID NO: 524493 - DNA, 120 bp, Artificial Sequence
  ENSG00000165685_14 (sequence is synthesized)
catgtatacctgcaccctgttttaactctaaaggaatagtgttgctttacttctttcctgttttgcctggaccacttaaagccacaacacctctatagtgacacacgctagtctctagtg

SEQ ID NO: 524494 - DNA, 120 bp, Artificial Sequence
  ENSG00000165685_15 (sequence is synthesized)
gtggccctcactgccacctagaggagccatggtggaaaacacactctctcctttgagcctatctgcacatctctcgagttcttggagcaaaaactaaatgctgaactaagcctggttgag

SEQ ID NO: 524495 - DNA, 120 bp, Artificial Sequence
  ENSG00000165685_16 (sequence is synthesized)
atgcttcccatggaccatgccgcagcacagtgctaatctatccacaaaacataccacctcccaaagtattattattggaaaatcgaggaagtgacgcacatttagggaaaaactactcac

SEQ ID NO: 524496 - DNA, 72 bp, Artificial Sequence
  ENSG00000165685_17 (sequence is synthesized)
aatcgaggaagtgacgcacatttagggaaaaactactcaccttagaaaagtcactgaaatcgatgcaatggc

SEQ ID NO: 524497 - DNA, 62 bp, Artificial Sequence
  ENSG00000165685_18 (sequence is synthesized)
cctccacctcccggattcaagcaattcttctgcctcagcttcccgactagctgggattacag

SEQ ID NO: 524498 - DNA, 120 bp, Artificial Sequence
  ENSG00000165685_19 (sequence is synthesized)
cttggcctcccaaagtgctggaattagaggcctgaccccctgctcctggcctgaaatctttaaagccgttttttccctaaaaaatgggaaataataacacctcagaaggtttttgtgaag

SEQ ID NO: 524499 - DNA, 120 bp, Artificial Sequence
  ENSG00000165685_20 (sequence is synthesized)
aataacacctcagaaggtttttgtgaagatcaaagaagctaaatatatgtggcatgatttgtaaagtgttatgcatatgtatgttattcttcctactgtcttctaaccttcccttgcctg

SEQ ID NO: 524500 - DNA, 120 bp, Artificial Sequence
  ENSG00000165685_21 (sequence is synthesized)
ctatgacttatctgagagccatgttcccatttatctttttgccaactatgttactgttgtcacacctgaaatggctttgtttttatcaataaatacttgttgattgcggtaaacagcaac

SEQ ID NO: 524501 - DNA, 120 bp, Artificial Sequence
  ENSG00000165685_22 (sequence is synthesized)
aggcgtgagccaccgcgcctggcctcatcactcttaaataatgaaaaactaaatttttagaggaaaaagaaaatcacaggaccctgtgaaggaagatttttaaaagcaagcttaaatgga

SEQ ID NO: 524502 - DNA, 120 bp, Artificial Sequence
  ENSG00000165685_23 (sequence is synthesized)
tttttaaaagcaagcttaaatggatcctgcagccatagagaaataaattctgcctgagggagcttgcaagtgaatcttcccaggctcacctgagaatgcatgatgagagtgcaacccagc

SEQ ID NO: 524503 - DNA, 120 bp, Artificial Sequence
  ENSG00000165685_24 (sequence is synthesized)
agccaccttgactgcagccttgtgagacatcaagcagaggacccaactaagttgtgcccacacttctgactcacagatactttgaaataataaaagtacattgttttaccttgctgctca

SEQ ID NO: 524504 - DNA, 120 bp, Artificial Sequence
  ENSG00000165685_25 (sequence is synthesized)
gaaggtgtttcaggatatttcgctaagtaatttatgaaagggaaaactatttttcatgagcatcagaggagagatattgtacccactcttcagagacagaaactgaaattcaaagagagt

SEQ ID NO: 524505 - DNA, 120 bp, Artificial Sequence
  ENSG00000165688_0 (sequence is synthesized)
ggagacgcaagatggcggctgtggtgctggcggcgacgcggttgctgcggggctcgggttcttggggctgttcgcggctgaggtttggacctcctgcgtacagacggtttagtagtggtg

SEQ ID NO: 524506 - DNA, 120 bp, Artificial Sequence
  ENSG00000165688_1 (sequence is synthesized)
gtgcctatcccaacatccccctctcttctcccttacctggagtacccaagcctgtttttgctacagttgatggacaggaaaagtttgaaaccaaagtaaccacattggataatgggcttc

SEQ ID NO: 524507 - DNA, 120 bp, Artificial Sequence
  ENSG00000165688_2 (sequence is synthesized)
gcgtggcatctcagaataagtttggacagttttgtacagtaggaattcttatcaattcaggatcgagatatgaagcgaaataccttagtggaattgctcactttttggaaaaattggcat

SEQ ID NO: 524508 - DNA, 120 bp, Artificial Sequence
  ENSG00000165688_3 (sequence is synthesized)
tttcgtctactgctcgatttgacagcaaagatgaaattctgcttacgttggaaaagcatgggggtatctgtgactgccagacatcaagagacaccaccatgtatgctgtgtctgctgata

SEQ ID NO: 524509 - DNA, 120 bp, Artificial Sequence
  ENSG00000165688_4 (sequence is synthesized)
gcaaaggcttggacacggtggttgccttactggctgatgtggttctgcagccccggctaacagatgaagaagtcgagatgacgcggatggcggtccagtttgagctggaggacctgaacc

SEQ ID NO: 524510 - DNA, 120 bp, Artificial Sequence
  ENSG00000165688_5 (sequence is synthesized)
tgcggcctgacccagagccacttctcaccgagatgattcatgaagcggcttacagggagaacacagttggcctccaccgtttctgccccacagaaaacgtagcaaagatcaaccgagagg

SEQ ID NO: 524511 - DNA, 120 bp, Artificial Sequence
  ENSG00000165688_6 (sequence is synthesized)
tgctgcattcctacctgaggaactactacactcccgaccgcatggtgctggccggcgtgggcgtggagcacgagcatctggtggactgtgcccggaagtacctcctgggggtccagccgg

SEQ ID NO: 524512 - DNA, 120 bp, Artificial Sequence
  ENSG00000165688_7 (sequence is synthesized)
cctgggggagcgcagaggccgtggatattgacagatctgtggcccagtacactggggggattgccaagctagaaagagacatgtccaatgtcagcctgggcccgacccccatccccgagc

SEQ ID NO: 524513 - DNA, 120 bp, Artificial Sequence
  ENSG00000165688_8 (sequence is synthesized)
ggacttcatcccctttgcagtgttgaacatgatgatgggcggaggtggctccttctcggctggtgggcccggcaagggcatgttctccaggctctacctcaacgtgctcaacaggcacca

SEQ ID NO: 524514 - DNA, 120 bp, Artificial Sequence
  ENSG00000165688_9 (sequence is synthesized)
ctggatgtataacgcgacctcctaccaccacagctacgaggacactggcctcctttgcatccatgccagcgccgacccaagacaggttcgagaaatggtagaaatcatcacaaaggagtt

SEQ ID NO: 524515 - DNA, 120 bp, Artificial Sequence
  ENSG00000165688_10 (sequence is synthesized)
tattttaatgggcggaaccgtggacacggtggagctggaacgagccaagacgcagctgacatcaatgctcatgatgaacctggaatccaggcctgtgatcttcgaggatgtggggaggca

SEQ ID NO: 524516 - DNA, 120 bp, Artificial Sequence
  ENSG00000165688_11 (sequence is synthesized)
ggtgctggccactcgctccagaaagctgccgcacgagctgtgcacgctcatccgcaacgtgaagccggaagatgtgaagagagtcgcttctaagatgctccgagggaagccggcagtggc

SEQ ID NO: 524517 - DNA, 120 bp, Artificial Sequence
  ENSG00000165688_12 (sequence is synthesized)
cgccctgggtgacctgactgacctgcccacgtatgagcacatccagaccgccctgtcgagtaaggacgggcgcctgcccaggacgtaccggctcttccggtagaaccgctccccggcctg

SEQ ID NO: 524518 - DNA, 120 bp, Artificial Sequence
  ENSG00000165688_13 (sequence is synthesized)
acagacccagggagctgcagctggagcccgttcccgtgcgtgttagtttggacacgaatttagtctaaaaagctgtctggttgtataaacggtgcaaacaatgtcgccacagcacccacg

SEQ ID NO: 524519 - DNA, 120 bp, Artificial Sequence
  ENSG00000165688_14 (sequence is synthesized)
cggtttgcattcttttggaactcaatgtgccgatcagtggagtcagtatcgagcctgaccaccgcaagccaggaagcaggtgaagtgcccagcgctggagtgcagcgtgccacgaggagg

SEQ ID NO: 524520 - DNA, 120 bp, Artificial Sequence
  ENSG00000165688_15 (sequence is synthesized)
gcggtcggtgcttccctcctcgggctgtgggcacatggggccccgcaggttccttggaggagccctgagctgggaggcagcaaaggctgacctatcaaagcctcccggaggccaccgtgc

SEQ ID NO: 524521 - DNA, 120 bp, Artificial Sequence
  ENSG00000165688_16 (sequence is synthesized)
tgggtaccaggactcacctctgacaagcaggagaaggtaagggcccggtcagctccaaggagcgcgctccacgcgcgtgcacacagcttccctggtaataaagagctggcatctttctta

SEQ ID NO: 524522 - DNA, 120 bp, Artificial Sequence
  ENSG00000165688_17 (sequence is synthesized)
tcgaacagtggtcctcgggacaccaggggtggtggggagggtgcctccgtgatgttgtccttgcaggttatggatatatacagaacatttttttgttttttgagatgaggtttctccaca

SEQ ID NO: 524523 - DNA, 83 bp, Artificial Sequence
  ENSG00000165688_18 (sequence is synthesized)
cagaacatttttttgttttttgagatgaggtttctccacattgcctacgctggtcttgcactcctgggctcagctcaggtgat

SEQ ID NO: 524524 - DNA, 120 bp, Artificial Sequence
  ENSG00000165688_19 (sequence is synthesized)
tgagtctgctgtttatacaatgttcgtattttccagtttttatagtaactaggtctttactactaaacacaattaatcttaggctttttgtgaatttgtattctggagaggcagatttta

SEQ ID NO: 524525 - DNA, 120 bp, Artificial Sequence
  ENSG00000165688_20 (sequence is synthesized)
ctctttataaatacgcacgcagctgctattgccagagtgcaagtaaaatatcagcttgcgtcggattttcccagggctggctgcagatgggcgctggtgctgcttgttggaggaagcctg

SEQ ID NO: 524526 - DNA, 120 bp, Artificial Sequence
  ENSG00000165688_21 (sequence is synthesized)
catggctgaggcgggatgtgaggcccaggtcccctagctcctgctccctgtagcagtccccctcactcacacaagcacccagtctgcccctagatgaaggcagaggtgactgccaacagc

SEQ ID NO: 524527 - DNA, 120 bp, Artificial Sequence
  ENSG00000165688_22 (sequence is synthesized)
caccaacaggcgacactcaggccagcacacaagctgtgggtcactgctgtgttcctcatctctgcctgtgcagactcagccctggcctttgggttctcttgcagatgaagaagtcgagat

SEQ ID NO: 524528 - DNA, 120 bp, Artificial Sequence
  ENSG00000165688_23 (sequence is synthesized)
ggcacagcctggggctgagctgctccacctgggagcccgctgaggctgttcttccctggtccaaaccccgaaaacagaaaaacagaccaccgccctcccccagtgctcggtccactactt

SEQ ID NO: 524529 - DNA, 120 bp, Artificial Sequence
  ENSG00000165688_24 (sequence is synthesized)
ctttctctgagccactgggtgagtcgtgggactgaccatgtgactctctcagctttgctggcgaaacgctgcaggagtttttgtgtccttctcagccgcctctgtgaggtgactggggtg

SEQ ID NO: 524530 - DNA, 120 bp, Artificial Sequence
  ENSG00000165688_25 (sequence is synthesized)
aagcagctcgcacaggtgggctgcagcgtggggtgtctcgagcctttccctggctccattctatgtttgaaactgtatttgtttaccaatttttttttgttctttttaagatggagtctc

SEQ ID NO: 524531 - DNA, 75 bp, Artificial Sequence
  ENSG00000165688_26 (sequence is synthesized)
gtttaccaatttttttttgttctttttaagatggagtctcactgtctcacccaggctggagtgcagtagctcaaa

SEQ ID NO: 524532 - DNA, 120 bp, Artificial Sequence
  ENSG00000165688_27 (sequence is synthesized)
ttacaattacaggtgtgagccaccatgcgtccctgtttactaattttttaagcttagtttttgatgctttacacatttgggaacctcgttacttcctggaccagaagtggtacaaataag

SEQ ID NO: 524533 - DNA, 64 bp, Artificial Sequence
  ENSG00000165688_28 (sequence is synthesized)
ctgcatccttccacctcccgggttcagcctagctaatttttttgttttttgttttctgtttttt

SEQ ID NO: 524534 - DNA, 64 bp, Artificial Sequence
  ENSG00000165688_29 (sequence is synthesized)
gctgggattacaggtgtgagccattgcacgcagcccggtcttgaactgctgacctcaggtgatc

SEQ ID NO: 524535 - DNA, 120 bp, Artificial Sequence
  ENSG00000165688_30 (sequence is synthesized)
agtgctgggattactttgggatcccggtgtgagccaccgtgcccggccaggaaaaaaagcattcaagaaataaagttgtggttaaattaatacgcttcagttccactagtgcactgctag

SEQ ID NO: 524536 - DNA, 120 bp, Artificial Sequence
  ENSG00000165688_31 (sequence is synthesized)
aaaaacagtcctccactaacgtgaagtcaacttgaaataaatatgaagtatttaggtatttgcctaaagttgcaaaaagacctaagaattgttttacttaaaagaaatggtatagaggcc

SEQ ID NO: 524537 - DNA, 63 bp, Artificial Sequence
  ENSG00000165688_32 (sequence is synthesized)
cctaagaattgttttacttaaaagaaatggtatagaggccaggtccggtggcttatgcctgtt

SEQ ID NO: 524538 - DNA, 120 bp, Artificial Sequence
  ENSG00000165688_33 (sequence is synthesized)
gtgctggccactcgctccagaaagctgccgcacgagctgtgcacgctcatccgtgagtaccgcaggggtagtgaggggctgccgcaggcctcggccaggctcagaggaggccgtctcgcc

SEQ ID NO: 524539 - DNA, 120 bp, Artificial Sequence
  ENSG00000165688_34 (sequence is synthesized)
ctcccgcaggccgtggtgggcctgtggtatgtccatcacacccagaatctggggccttcaccagttgtcctcagcaggggcggccaagggcagggtcgtggggtcgcagacctggtctca

SEQ ID NO: 524540 - DNA, 120 bp, Artificial Sequence
  ENSG00000165688_35 (sequence is synthesized)
cttcccggccccaccatgcacctgctgcctccttggcaggtgaccccaccctctgcacccctgggaggggctgtcactactgcccagagttgttaaagagcactcaagttagtaggcgag

SEQ ID NO: 524541 - DNA, 120 bp, Artificial Sequence
  ENSG00000165688_36 (sequence is synthesized)
aagggctcagtagaggactgctacattgtacgtggagtagcagtggctcggaatgccgctgtaccgttgctggctctcgggcaggagtctcagccccaggtttccggggcccccatgagt

SEQ ID NO: 524542 - DNA, 120 bp, Artificial Sequence
  ENSG00000165688_37 (sequence is synthesized)
gaccttaggaggtctgaatttcctgaaactgccaagttgtatgtgcatcggactcttctgggggacaggcttaaaacctggcaaggctgcctattacgttggggtggctcgggcttatgg

SEQ ID NO: 524543 - DNA, 120 bp, Artificial Sequence
  ENSG00000165688_38 (sequence is synthesized)
cccgggcacttgccctgtcccgtgtgggccctcgtccttccctcaggagcccccgcttaaatcctcaagcgagtgtccagcctctctcgggcctcgttttctgtagaaaacagacccacc

SEQ ID NO: 524544 - DNA, 120 bp, Artificial Sequence
  ENSG00000165688_39 (sequence is synthesized)
tggaccctatcactcctgtcctggggttcctgggtgcagccctttggccttctctcaccccacccttctgtccatgcggccctcgggggctgggggttttttctgcaggccgtcctaaag

SEQ ID NO: 524545 - DNA, 120 bp, Artificial Sequence
  ENSG00000165688_40 (sequence is synthesized)
tgagttcatcagacacggagctcgctcttctgtaagtgtaactcttcttgggtggctttgtcctatatttttaagtcattgccatgtccccatttactgagaactcaacgtctgtcactt

SEQ ID NO: 524546 - DNA, 120 bp, Artificial Sequence
  ENSG00000165688_41 (sequence is synthesized)
gtggactcacccttggctacacccagtggctgcctttgggcccaggtgcccccatcagcagcacagcgtgagtgagtggtacagaccagccgccccctccgtgtgtttactgatgcagcc

SEQ ID NO: 524547 - DNA, 120 bp, Artificial Sequence
  ENSG00000165688_42 (sequence is synthesized)
ggttgctgcggtctgtccgttgatctctgacgtttaagaaccctttccgtacccaccgctcctcccacccaagtgaccgggcctgcctttccccacgctggaactttgttccgacagcac

SEQ ID NO: 524548 - DNA, 120 bp, Artificial Sequence
  ENSG00000165688_43 (sequence is synthesized)
aggcgtcgcccctccccacacaacgagcgccgtttcaggggtgcggaggtgctgcctccaggagatggatacaggctggagcgtaaacaaaatatcggcagtcgcgtaaatgctttggag

SEQ ID NO: 524549 - DNA, 120 bp, Artificial Sequence
  ENSG00000165688_44 (sequence is synthesized)
ttagttgtaattagcatgccaattatgaattgtaccctgagtggaaacaaagtgtacgatttcataaatgttgagctacacatatacctgtgaaaccatcagcacaatcaccctcatgta

SEQ ID NO: 524550 - DNA, 120 bp, Artificial Sequence
  ENSG00000165688_45 (sequence is synthesized)
attaaatctgattatcatgtcatattgacatcttaaaatgtttctcttgattaaatcttattttgaatatctgatgtaacctgtcaattttctttttactactagttcttatcaattcag

SEQ ID NO: 524551 - DNA, 80 bp, Artificial Sequence
  ENSG00000165689_0 (sequence is synthesized)
cctcgccgacggcccaaggcgttcaggcacgcgctttcggtgctcggagcggaagcagcggcgagaggctcggaggcgcg

SEQ ID NO: 524552 - DNA, 80 bp, Artificial Sequence
  ENSG00000165689_1 (sequence is synthesized)
gccatggagccgccgctgccgggctaggcaggtcgtgccccgccgggccggcggcgatgtcgggctaccagcgccgcccg

SEQ ID NO: 524553 - DNA, 120 bp, Artificial Sequence
  ENSG00000165689_2 (sequence is synthesized)
ccaccccgctgtcccgagcccggagcctcgccattcccgacgctccagcgttctatgagcgccggtcttgtctcccccagctaaattgtgagcgcccccatggcagggacctggactccc

SEQ ID NO: 524554 - DNA, 120 bp, Artificial Sequence
  ENSG00000165689_3 (sequence is synthesized)
ccttcttcggcattcggccggcctttatgtgctatgtgcccagcccggtgctggcttccgtgggagacacagatgacagatttgaagatctggaagaggcaaatccattctcttttagag

SEQ ID NO: 524555 - DNA, 120 bp, Artificial Sequence
  ENSG00000165689_4 (sequence is synthesized)
agtttctgaagaccaagaacctcggcctctcgaaagaggatccggccagcagaatttatgcaaaggaagcctcgaggcattccctgggacttgaccacaactccccaccctcccaaaccg

SEQ ID NO: 524556 - DNA, 120 bp, Artificial Sequence
  ENSG00000165689_5 (sequence is synthesized)
gcgggtatggcctggagtatcagcagccatttttcgaggatccgacaggggctggtgacctcctggatgaggaggaggatgaggacaccggatggagtggggcctacctgccgtccgcca

SEQ ID NO: 524557 - DNA, 120 bp, Artificial Sequence
  ENSG00000165689_6 (sequence is synthesized)
tcgagcagactcaccccgagagggtccctgccggcacgtcgccctgcagcacatacctttcctttttctccaccccgtcggagctggcagggcctgagtctctgccctcgtgggcgttga

SEQ ID NO: 524558 - DNA, 120 bp, Artificial Sequence
  ENSG00000165689_7 (sequence is synthesized)
gtgacactgattctcgcgtgtctccggcctctccggcagggagtcctagcgcagactttgcggttcatggagagtctctgggagacaggcacctgcggacgctgcagataagttacgacg

SEQ ID NO: 524559 - DNA, 120 bp, Artificial Sequence
  ENSG00000165689_8 (sequence is synthesized)
cactgaaagatgaaaattctaagctgagaagaaagctgaatgaggttcagagcttctctgaagctcaaacagaaatggtgaggacgcttgagcggaagttagaagcaaaaatgatcaagg

SEQ ID NO: 524560 - DNA, 120 bp, Artificial Sequence
  ENSG00000165689_9 (sequence is synthesized)
tcagcaggtggagcagaacctggagctgatgaccaaacgggctgtaaaggcagaaaaccacgtcgtgaaactaaaacaggaaatcagtttgctccaggcgcaggtctccaacttccagcg

SEQ ID NO: 524561 - DNA, 120 bp, Artificial Sequence
  ENSG00000165689_10 (sequence is synthesized)
agagaatgaagccctgcggtgcggccagggtgccagcctgaccgtggtgaagcagaacgccgacgtggccctgcagaacctccgggtggtcatgaacagtgcacaggcttccatcaagca

SEQ ID NO: 524562 - DNA, 120 bp, Artificial Sequence
  ENSG00000165689_11 (sequence is synthesized)
actggtttccggagctgagacactgaatcttgttgccgaaatccttaaatctatagacagaatttctgaagttaaagacgaggaggaagactcttgaggacccctgggtgttctcagcat

SEQ ID NO: 524563 - DNA, 120 bp, Artificial Sequence
  ENSG00000165689_12 (sequence is synthesized)
gaagctccgtgtataccctgaggtcaccaccgctcgatctaaatgtgcagttgtgtccttaaatatgcagtcttcacccagagtaaagtgttgatcgcaagagtccagtgtcgtgccctc

SEQ ID NO: 524564 - DNA, 120 bp, Artificial Sequence
  ENSG00000165689_13 (sequence is synthesized)
agccagttcttggccaccacaatgggagcagccctggccgagttgtctctgtggtttctatgcagcccttcttggcgaaattcctgcgatcttatagattctaatgagctcttggaagac

SEQ ID NO: 524565 - DNA, 120 bp, Artificial Sequence
  ENSG00000165689_14 (sequence is synthesized)
attgtcataaaagccagtgattttaagaaaaagagtggttctggaatcaatgttttccagtcccatcccagaacatcagttgtaagataagtacaattggttgtccttgatttcataagt

SEQ ID NO: 524566 - DNA, 120 bp, Artificial Sequence
  ENSG00000165689_15 (sequence is synthesized)
agaacaaacactaaatgtgcctctgagatggccaccccgggcagggacctgtgccttccgccgatgctcagggctccctctggctcccgggtcactcttgtggccccagtgggtggtccc

SEQ ID NO: 524567 - DNA, 120 bp, Artificial Sequence
  ENSG00000165689_16 (sequence is synthesized)
tgcagtcatggcctgagtgcgcaggggccaccgcgtggctgctgctgtcctcctccgggacccacggggaccaaggtcacacgttccgtgctgtgaagctgtccagatgtgcctctttgg

SEQ ID NO: 524568 - DNA, 120 bp, Artificial Sequence
  ENSG00000165689_17 (sequence is synthesized)
ctgggggttctggtggacgtttcaagtggcattttgtacaatgcaggttagaattcaggaatttcaagtatgtgcccgggtctgtcaggtcccagttgcctttctgacggcccccctcag

SEQ ID NO: 524569 - DNA, 120 bp, Artificial Sequence
  ENSG00000165689_18 (sequence is synthesized)
agggacggcgatgagcactaaatgcttttttgactattttcctatagattttttttaaaacttttttttcctcctgttccaattgatagctttcttatttaataaattctgtagttcacc

SEQ ID NO: 524570 - DNA, 120 bp, Artificial Sequence
  ENSG00000165689_19 (sequence is synthesized)
ctgaggctgccgctgcctcccctctgtgcctgagacccattccatcacaggctcttagcgggttttatctggctcatgaggtatctttttgtagtcctcttaaaagtagccacagaaatt

SEQ ID NO: 524571 - DNA, 120 bp, Artificial Sequence
  ENSG00000165689_20 (sequence is synthesized)
gggagaacctggagccatcctacctcttgggtggcctggtttgatttccaggacaaggcgatttgcgtgacagcctgctatccactttccctttgactttgcttctggttacacgtggga

SEQ ID NO: 524572 - DNA, 120 bp, Artificial Sequence
  ENSG00000165689_21 (sequence is synthesized)
agcccggagcctcgccattcccgacgattttggctatggaaaggggaaatgttctaagcagagcccgtcaggagcccacgggacacattttggagatgacagatttgaagatctggaaga

SEQ ID NO: 524573 - DNA, 120 bp, Artificial Sequence
  ENSG00000165689_22 (sequence is synthesized)
tcctgctccctgggttggggcccgtgtccggtatgaatgtgaggacatcagtgatgctttttgtggtttttcttttttgggtaacagaaacgggctgtaaaggcagaaaaccacgtcgtg

SEQ ID NO: 524574 - DNA, 120 bp, Artificial Sequence
  ENSG00000165689_23 (sequence is synthesized)
cccgcgccacgtgtggcacctccgctgcagcacgagctcgtccattgacccatcaatgtgcagagcgctcactgcgtgccaggcactcggaattcaaaggcggagtcccctgctaggagc

SEQ ID NO: 524575 - DNA, 120 bp, Artificial Sequence
  ENSG00000165689_24 (sequence is synthesized)
tcacagtctggttgcggggagacctcccccaagacagacagttccagtacaggatgatgacagatttgaagatctggaagaggcaaatccattctcttttagagagtttctgaagaccaa

SEQ ID NO: 524576 - DNA, 120 bp, Artificial Sequence
  ENSG00000165694_0 (sequence is synthesized)
aaatgcccttgggtgtgcattacttcaagcaaacggaagtgtgccccgctgacagtgggaatgcctggctgggggtgggggggcccgagtgcaccacatccagctgggagtgaaattcct

SEQ ID NO: 524577 - DNA, 120 bp, Artificial Sequence
  ENSG00000165694_1 (sequence is synthesized)
ggagaaagcacccacagcactctgagcctgcttgcagcccaacggcctcgctgagaatgctacatttaaaagtgcagtttttggatgattcccagaagatttttgtggttgatcaaaagt

SEQ ID NO: 524578 - DNA, 120 bp, Artificial Sequence
  ENSG00000165694_2 (sequence is synthesized)
catccgggaaggcattgtttaacctgagttgcagccatctaaatcttgctgaaaaggaatattttggattagaattctgcagccattctggaaataatgtttggctggagcttttgaagc

SEQ ID NO: 524579 - DNA, 120 bp, Artificial Sequence
  ENSG00000165694_3 (sequence is synthesized)
ccataacaaagcaggtaaaaaatcctaaggagattgttttcaaatttatggtgaaatttttcccagtggaccctggacatctgcgggaagaacttacaaggtatctttttactcttcaaa

SEQ ID NO: 524580 - DNA, 120 bp, Artificial Sequence
  ENSG00000165694_4 (sequence is synthesized)
taaagaaggatttggctctaggaaggcttccatgcagtgacaactgtacagcgttgatggtatctcacatcttacaatcagaacttggagactttcatgaagaaacagataggaagcatc

SEQ ID NO: 524581 - DNA, 120 bp, Artificial Sequence
  ENSG00000165694_5 (sequence is synthesized)
tggcacaaactcggtacttaccaaaccaagactgtttagagggcaagatcatgcactttcatcagaagcacattggcaggagcccagctgaatctgacattctgctactggacatagcaa

SEQ ID NO: 524582 - DNA, 120 bp, Artificial Sequence
  ENSG00000165694_6 (sequence is synthesized)
ggaagctggatatgtatggcatcaggcctcaccccgccagtgatggtgaagggatgcagattcacctggctgttgctcacatgggagtactggtgttacggggaaatacaaagatcaata

SEQ ID NO: 524583 - DNA, 120 bp, Artificial Sequence
  ENSG00000165694_7 (sequence is synthesized)
cttttaactgggctaaaatccgcaagttgagttttaagagaaagcattttctcatcaaacttcatgccaatatcttggtgttgtgcaaggataccttggagttcaccatggccagccgag

SEQ ID NO: 524584 - DNA, 120 bp, Artificial Sequence
  ENSG00000165694_8 (sequence is synthesized)
atgcctgcaaggctttctggaagacttgtgtggaataccatgctttcttcaggctttcggaagagcccaaatcaaagcccaaaaccctactctgcagcaagggttccagtttccgctata

SEQ ID NO: 524585 - DNA, 120 bp, Artificial Sequence
  ENSG00000165694_9 (sequence is synthesized)
gtggacgaacccaaaggcaacttttggaatatgggagaaaagggaggctgaagagcttgccatttgaaaggaaacattacccatctcagtaccatgaacgacagtgcaggtcctcaccag

SEQ ID NO: 524586 - DNA, 120 bp, Artificial Sequence
  ENSG00000165694_10 (sequence is synthesized)
acctcctctctgatgtgtcaaaacaagtggaagatttgagactagcatatggtggtggctactaccaaaatgtgaatggagtgcacgcatctgagccagtgctggagagtaggaggagga

SEQ ID NO: 524587 - DNA, 120 bp, Artificial Sequence
  ENSG00000165694_11 (sequence is synthesized)
attctgcattggaggtgacatttgcaactgagctggagcattccaaaccagaggcggatcccacattgctacatcagtcccaaagcagttcctctttcccttttatttatatggaccctg

SEQ ID NO: 524588 - DNA, 120 bp, Artificial Sequence
  ENSG00000165694_12 (sequence is synthesized)
tctttaacactgagcccaatcctaaccctgatcccagagacattttttcagagaggagttctctaagctccttccaaacaagctgtaagttttctggtaatcacatgagcatatattctg

SEQ ID NO: 524589 - DNA, 120 bp, Artificial Sequence
  ENSG00000165694_13 (sequence is synthesized)
ttggtattatgcctccccaggtctttttttatgtggacaagccaccccaggtgcccagatggtccccaattagagcagaggaaaggacaagtccacatagctatgtagagcccactgcaa

SEQ ID NO: 524590 - DNA, 120 bp, Artificial Sequence
  ENSG00000165694_14 (sequence is synthesized)
tgaagccagctgaaagaagcccaaggaatatcagaatgaagagctttcagcaagacctgcaagtactccaagaagctatagccaggactagcggtaggagcaacatcaatgtaggtctag

SEQ ID NO: 524591 - DNA, 120 bp, Artificial Sequence
  ENSG00000165694_15 (sequence is synthesized)
aagaggaagacccaaatttggaagatgcatttgtatgtaacattcaagagcaaacccctaaaaggtcccagagccaatcagacatgaaaactattcgttttccttttgggtcagaattta

SEQ ID NO: 524592 - DNA, 120 bp, Artificial Sequence
  ENSG00000165694_16 (sequence is synthesized)
gacctttagggccttgtcctgctctcagtcataaagcagacctgtttacggatatgtttgcagagcaggagttgccagcagttctaatggatcaaagtacagcagaaaggtatgtagcta

SEQ ID NO: 524593 - DNA, 120 bp, Artificial Sequence
  ENSG00000165694_17 (sequence is synthesized)
gtgaatccagtgattctgaatcagagattcttaaaccagactactatgctttgtatggcaaagaaataaggtcacccatggccagaatccgcctgtcttctggtagtctacagttagatg

SEQ ID NO: 524594 - DNA, 120 bp, Artificial Sequence
  ENSG00000165694_18 (sequence is synthesized)
aagaagatgaagatgcttatttcaacacaccaactgctgaagacaggacttcactaaaaccatgtaattactttttagcttaaaagtgtgaacctatggacatttctgagccagttccat

SEQ ID NO: 524595 - DNA, 120 bp, Artificial Sequence
  ENSG00000165694_19 (sequence is synthesized)
gttaccgacttaggcagaaaataatgaagttgtagaaaccattttcttggttactacatattcattggtattaaggaaatctcattttggatgcctgccttatgaaagatccagctgttg

SEQ ID NO: 524596 - DNA, 120 bp, Artificial Sequence
  ENSG00000165694_20 (sequence is synthesized)
cctcattccttgagtttcactcttccattacctctgaagggactttagaacatgccctctcctcaccagcactgtggcaaggcaaggtgggtatttgtcatctccactgcatacttcctc

SEQ ID NO: 524597 - DNA, 120 bp, Artificial Sequence
  ENSG00000165694_21 (sequence is synthesized)
atagagacattgtgagtgaaggtcaggctcttcaatgctgaagaatggtgacagtatgggttggcatatggaattagcgtctaatggcatttagtgatttagtagattgtgactgtgttg

SEQ ID NO: 524598 - DNA, 120 bp, Artificial Sequence
  ENSG00000165694_22 (sequence is synthesized)
atctttgtgctcttaaacaacactgaacaaatatttcagtctttactatttgtgtggggcccagtagaaatggtcttgtaatatgctaaatacttccatttttataacatataaaagcag

SEQ ID NO: 524599 - DNA, 120 bp, Artificial Sequence
  ENSG00000165694_23 (sequence is synthesized)
agcatggccctcctacagcctcaggaaggaggtggtggcatagatcctctcaagagaatacaggtttagaattaatctaggacttggcagaattctaaacctaggaaattcatgaattaa

SEQ ID NO: 524600 - DNA, 120 bp, Artificial Sequence
  ENSG00000165694_24 (sequence is synthesized)
atcaatttctagagccagacataaaccagatgaaagtatcatgttgttttacttataacttctatattcttatctactatatctagtaaaagagaaacattatcaggtcagtttgtttat

SEQ ID NO: 524601 - DNA, 120 bp, Artificial Sequence
  ENSG00000165694_25 (sequence is synthesized)
ctaatatttcctgccagaatttattttttgtcatagcttcttgcatgtatgcaggccaggaaatgaatgttattgtaataaagtgtgatggaaaatccaggtaattaaaaaataaattat

SEQ ID NO: 524602 - DNA, 120 bp, Artificial Sequence
  ENSG00000165694_26 (sequence is synthesized)
aaaaggcatctgactgactgggggcaccattcctttcttgaatcatcttggatctgggagaaggaaaatgcttctttcttatttctgtttctttctcaagagattctccccaatttcttt

SEQ ID NO: 524603 - DNA, 120 bp, Artificial Sequence
  ENSG00000165695_0 (sequence is synthesized)
cggggctcgactctaggagttgggctgaggatttccacccgatcctcgaacctccggcccatctcatggacgcccctcccccttcaaacaccctcccccacatttattcccgcgtctgtt

SEQ ID NO: 524604 - DNA, 120 bp, Artificial Sequence
  ENSG00000165695_1 (sequence is synthesized)
ttaaagatgggtaaactgaggcacagggagccgggccggggagcactgacagaaccagaagcaggttctgcctcccgtcccctcggagggccgacttgccccttctgggtttcgtcgggg

SEQ ID NO: 524605 - DNA, 120 bp, Artificial Sequence
  ENSG00000165695_2 (sequence is synthesized)
gtctcagatacgaggaggcccagctggaagccacctgagggtgtcccccgctaagatgcgcaaatgggaaaagcgaggccggggttggggaaagaacttgcccgagccgcagagcgcgtc

SEQ ID NO: 524606 - DNA, 120 bp, Artificial Sequence
  ENSG00000165695_3 (sequence is synthesized)
gggcgacccgcgcgaccgaggatcgggtatctgggcccggcgcggagcctgcagggcggggccgcggcgcgtgctgatgacgcagtcggcgcggcggccctagcgacgcggttactaggg

SEQ ID NO: 524607 - DNA, 120 bp, Artificial Sequence
  ENSG00000165695_4 (sequence is synthesized)
tagcgacgcggttactagggagcggcgagccgagacggctacatggacgccactatcgccccgcaccgtatcccccccgagatgccccagtacggggaggagaaccacatcttcgagttg

SEQ ID NO: 524608 - DNA, 120 bp, Artificial Sequence
  ENSG00000165695_5 (sequence is synthesized)
atgcagaacatgctggagcaactcctgatccaccagcccgaagatcccatccccttcatgatccagcacttgcatagagacaacgacaatgtgcccaggattgtaatattaggtccaccc

SEQ ID NO: 524609 - DNA, 120 bp, Artificial Sequence
  ENSG00000165695_6 (sequence is synthesized)
gcctcagggaaaacaacaatagcaatgtggctctgcaaacatctgaacagcagtctcctcaccctggagaacctgatcttaaatgagttttcctatacggccaccgaagccagaaggctt

SEQ ID NO: 524610 - DNA, 120 bp, Artificial Sequence
  ENSG00000165695_7 (sequence is synthesized)
tatctgcaaaggaagacagttcccagcgcgctgctcgtccagctgattcaggaacgcctggctgaagaggattgcatcaagcagggctggattctggatggcatccctgagacgcgtgag

SEQ ID NO: 524611 - DNA, 120 bp, Artificial Sequence
  ENSG00000165695_8 (sequence is synthesized)
acccagacacgtcattgtgctgagtgctccagacacggtcctgatcgagagaaacttggggaagagaatcgaccctcaaactggagagatttatcacaccacctttgactggccacccga

SEQ ID NO: 524612 - DNA, 120 bp, Artificial Sequence
  ENSG00000165695_9 (sequence is synthesized)
atctgaaatccagaaccgtctcatggtgccagaggacatctcagagctggagacggctcagaaactgctggagtatcataggaacatcgtcagggtcattccctcctaccccaaaatcct

SEQ ID NO: 524613 - DNA, 120 bp, Artificial Sequence
  ENSG00000165695_10 (sequence is synthesized)
caaagtcatcagtgctgaccagccatgtgtggacgtcttctaccaggctctgacctatgtccaaagcaaccatcgtactaatgccccgttcaccccgagggtgctgctgctcgggcctgt

SEQ ID NO: 524614 - DNA, 120 bp, Artificial Sequence
  ENSG00000165695_11 (sequence is synthesized)
gggcagtgggaaaagtctgcaggccgccctcctggcccagaaatacaggcttgtcaatgtctgctgtgggcaactgctgaaagaggctgtggcagataggaccacgtttggcgagctcat

SEQ ID NO: 524615 - DNA, 120 bp, Artificial Sequence
  ENSG00000165695_12 (sequence is synthesized)
ccagcccttctttgaaaaggagatggcagttcctgacagcctcctcatgaaggtgctgagccagcgcctggaccagcaggactgcatccagaaaggctgggtgctacacggcgtcccgcg

SEQ ID NO: 524616 - DNA, 120 bp, Artificial Sequence
  ENSG00000165695_13 (sequence is synthesized)
ggacctcgaccaggcacacctgctgaaccgcctgggctacaatcccaacagggtgtttttcctgaatgtgccatttgattccatcatggagcggctgactctgagaagaattgatccagt

SEQ ID NO: 524617 - DNA, 120 bp, Artificial Sequence
  ENSG00000165695_14 (sequence is synthesized)
cactggggaaaggtaccacctcatgtacaagccacctcccaccatggagatccaggctcgcctcctgcagaacccaaaggatgctgaagagcaggtcaagctgaaaatggacctgttcta

SEQ ID NO: 524618 - DNA, 120 bp, Artificial Sequence
  ENSG00000165695_15 (sequence is synthesized)
caggaactcagctgacttggagcagttgtatgggtcggccatcaccctcaatggggaccaggacccatacacagtcttcgaatacatcgagagtgggatcattaatcccctgcccaagaa

SEQ ID NO: 524619 - DNA, 120 bp, Artificial Sequence
  ENSG00000165695_16 (sequence is synthesized)
aatcccctgatgggttcagagccaggagcgctgccccagggaaagagttaatcccctgcccccagccccccagcctcggcacagctcccctaaaaagccaataaagcctgctggatacag

SEQ ID NO: 524620 - DNA, 120 bp, Artificial Sequence
  ENSG00000165695_17 (sequence is synthesized)
ttttcctatacggccaccgaagccagaaggctttatctgcaaaggaaggcatttcccagtggtttctgaaatacttcctaactgcctttttgccaagcactattctgcagtgctgtggga

SEQ ID NO: 524621 - DNA, 120 bp, Artificial Sequence
  ENSG00000165695_18 (sequence is synthesized)
tgagtttcttctccttaccccagaagcttccagccagtgaggagactgatggtcccataaaactaagcacaagccagggtatgggagccagggaaccttcaataaagcaattaatcggtg

SEQ ID NO: 524622 - DNA, 120 bp, Artificial Sequence
  ENSG00000165695_19 (sequence is synthesized)
tctgctctgggcacccacagagggacacgaggaaggctgccacaggctgggctctgagctggaagacactggcaaggacatgggatacctgagactcagttttcttatctgtacttgagg

SEQ ID NO: 524623 - DNA, 120 bp, Artificial Sequence
  ENSG00000165695_20 (sequence is synthesized)
atgaaaataccaacctaatgggtgatgggatggctgtgaagatgaaatgggagtctgcaggtgcctatcagagtggctggcacagaagatttatcacaccacctttgactggccacccga

SEQ ID NO: 524624 - DNA, 120 bp, Artificial Sequence
  ENSG00000165698_0 (sequence is synthesized)
ctcgcctcccaagtcctggaacgggcctccccaccctccggggcaccgacactcacggagtcactccaacttctctgggtgctccgtggagcgaagagcgctctaggacaagcaaggatt

SEQ ID NO: 524625 - DNA, 120 bp, Artificial Sequence
  ENSG00000165698_1 (sequence is synthesized)
cctcttctcctgtaaatgaccacagaggaagacaatgaatgaggtgaaagaatcccttcgcagcatcgagcagaagtacaagctcttccagcagcagcagctcaccttcaccgccgctct

SEQ ID NO: 524626 - DNA, 120 bp, Artificial Sequence
  ENSG00000165698_2 (sequence is synthesized)
ggagcactgcagggagaacgcccacgacaagatccggcccatctccagcattggacaggtgcagagctacatggaacactactgcaacagctccacagaccggcgggttctgctcatgtt

SEQ ID NO: 524627 - DNA, 120 bp, Artificial Sequence
  ENSG00000165698_3 (sequence is synthesized)
ctctggcaccccagtcaccaacaacctcctggagaaatgcaaaaccctcgttagccaaagcaacgacttaagcagcctcagagcaaaataccctcatgatgtggtgaaccacctcagctg

SEQ ID NO: 524628 - DNA, 120 bp, Artificial Sequence
  ENSG00000165698_4 (sequence is synthesized)
tgacgaggcccggaaccactacggcggcgtggtcagcctcatccccctcatcctagacttaatgaaagaatggatcgcccactccgagaagttgccgcgcaaggtgctgcagcacgggac

SEQ ID NO: 524629 - DNA, 120 bp, Artificial Sequence
  ENSG00000165698_5 (sequence is synthesized)
gacttagcttctgtattattgttgcttcctcagggggagacagtcaagaataaaaagtattctaccacctctctgcctgacttggtttcctgggatttatccctgaaagaaaacctacat

SEQ ID NO: 524630 - DNA, 120 bp, Artificial Sequence
  ENSG00000165698_6 (sequence is synthesized)
ctcccctaagacatcaaaggacactgggcagtaagcctcagcagacagcagagagagaggccaccctaggcaagggggcatgcctgtctcaagtcggcttctaagaggctcatgcccaag

SEQ ID NO: 524631 - DNA, 120 bp, Artificial Sequence
  ENSG00000165698_7 (sequence is synthesized)
gcccagggccactaaacacaagtgtagacagctcacaaaagccagcctcaaacccaggggatgttcaaaaccaccctggaggcctcctggtgggaaattgtaactcagagccaggagctc

SEQ ID NO: 524632 - DNA, 120 bp, Artificial Sequence
  ENSG00000165698_8 (sequence is synthesized)
cgtcggcggagagctttgctgtttaatttggattttactggttggtccttttttcactggtacccatggaccctgccacttactaaccccaagggaatcagccaatatattactgagact

SEQ ID NO: 524633 - DNA, 63 bp, Artificial Sequence
  ENSG00000165698_9 (sequence is synthesized)
tactaaccccaagggaatcagccaatatattactgagacttcctctctctcttcttgctttaa

SEQ ID NO: 524634 - DNA, 66 bp, Artificial Sequence
  ENSG00000165698_10 (sequence is synthesized)
tctcctgacctcatgatctaccctcgtcttgctttaacttctaacatttccacttctaagcatcag

SEQ ID NO: 524635 - DNA, 120 bp, Artificial Sequence
  ENSG00000165698_11 (sequence is synthesized)
tcttgctttaacttctaacatttccacttctaagcatcaggctccgtgctgatgaagaggaaacccacttacagaagttgcccaaacaggatggtgtggtagagggtcccaggagggcac

SEQ ID NO: 524636 - DNA, 120 bp, Artificial Sequence
  ENSG00000165698_12 (sequence is synthesized)
tgaactgtcacctaggtcctctttgagccacatccggctccagtgccacgcctgtccctgctgcgggctgcagttttgcagagggtgatcaagctggagaccatctgctccttgccccac

SEQ ID NO: 524637 - DNA, 120 bp, Artificial Sequence
  ENSG00000165698_13 (sequence is synthesized)
caccagccccaactgtaggcaaggcacacgctgtttgcgagccagggatgctcccctccaggatggagtgggggtcggcatgtggaactcagcgtgtttatttttttattttttgagatg

SEQ ID NO: 524638 - DNA, 70 bp, Artificial Sequence
  ENSG00000165698_14 (sequence is synthesized)
ccacctggctaatttatatatatatatattttttagtagagacggggcttcaccacgttggccaggctgg

SEQ ID NO: 524639 - DNA, 120 bp, Artificial Sequence
  ENSG00000165698_15 (sequence is synthesized)
ttacaggtgtgagccacggcacctggccagaactcagtagtgtgtttagttctctggaccacagccaaaggggaataaactcacctttccttcgcctttacttgggagagggagaccatg

SEQ ID NO: 524640 - DNA, 120 bp, Artificial Sequence
  ENSG00000165698_16 (sequence is synthesized)
ggagagggagaccatgacagaagccagaattctgattttgtggctcctgagcaagggcgatgacctggttttcacagcgtagtcgaaccccaaacattgtaaaatgtgtccctggcttct

SEQ ID NO: 524641 - DNA, 120 bp, Artificial Sequence
  ENSG00000165698_17 (sequence is synthesized)
gagcttgcccaaagtaatgtctgactgttggtttttcccttcacaggggacgacttagcttctgtattattgttgcttcctcagggggagacagtcaagaataaaaagtattctaccacc

SEQ ID NO: 524642 - DNA, 120 bp, Artificial Sequence
  ENSG00000165698_18 (sequence is synthesized)
gacacacgaatcgtacatcccgagttgggctgcttcgtgggcgcgcgactcggccccagctgcgggtcccggccgcgcacccgacgtcgcagtggaggctcccgagccgccgccagcgtc

SEQ ID NO: 524643 - DNA, 120 bp, Artificial Sequence
  ENSG00000165698_19 (sequence is synthesized)
gcgacgggcaggggtgtccggtcacctgcatcaactcgaagatgtggttctcctccccgtactggggcatctcgggggggatacggtgcggggcgatagtggcgtccatgtagccgtctc

SEQ ID NO: 524644 - DNA, 120 bp, Artificial Sequence
  ENSG00000165698_20 (sequence is synthesized)
ggctcgccgctccctagtaaccgcgtcgctagggccgccgcgccgactgcgtcatcagcacgcgccgcggccccgccctgcaggctccgcgccgggcccagatacccgatcctcggtcgc

SEQ ID NO: 524645 - DNA, 120 bp, Artificial Sequence
  ENSG00000165699_0 (sequence is synthesized)
acgacgggggaggtgctgtacgtccaagatggcggcgccctgtaggctggagggactgtgaggtaaacagctgagggggaggagacggtggtgaccatgaaagacaccaggttgacagca

SEQ ID NO: 524646 - DNA, 120 bp, Artificial Sequence
  ENSG00000165699_1 (sequence is synthesized)
ctggaaactgaagtaccagttgtcgctagaacagtttggtagtggccccaatgaagaaccttcagaacctgtagcacacgtcctggagccagcacagcgccttcgagcgagagaatggcc

SEQ ID NO: 524647 - DNA, 120 bp, Artificial Sequence
  ENSG00000165699_2 (sequence is synthesized)
caacaagcaaatgtcggggagcttcttgccatgctggactcccccatgctgggtgtgcgggacgacgtgacagctgtctttaaagagaacctcaattctgaccgtggccctatgcttgta

SEQ ID NO: 524648 - DNA, 120 bp, Artificial Sequence
  ENSG00000165699_3 (sequence is synthesized)
aacaccttggtggattattacctggaaaccagctctcagccggcattgcacatcctgaccaccttgcaagagccacatgacaagcacctcttggacaggattaacgaatatgtgggcaaa

SEQ ID NO: 524649 - DNA, 120 bp, Artificial Sequence
  ENSG00000165699_4 (sequence is synthesized)
gccgccactcgtttatccatcctctcgttactgggtcatgtcataagactgcagccatcttggaagcataagctctctcaagcacctcttttgccttctttactaaaatgtctcaagatg

SEQ ID NO: 524650 - DNA, 120 bp, Artificial Sequence
  ENSG00000165699_5 (sequence is synthesized)
gacactgacgtcgttgtcctcacaacaggcgtcttggtgttgataaccatgctaccaatgattccacagtctgggaaacagcatcttcttgatttctttgacatttttggccgtctgtca

SEQ ID NO: 524651 - DNA, 120 bp, Artificial Sequence
  ENSG00000165699_6 (sequence is synthesized)
tcatggtgcctgaagaaaccaggccacgtggcggaagtctatctcgtccatctccatgccagtgtgtacgcactctttcatcgcctttatggaatgtacccttgcaacttcgtctccttt

SEQ ID NO: 524652 - DNA, 120 bp, Artificial Sequence
  ENSG00000165699_7 (sequence is synthesized)
ttgcgttctcattacagtatgaaagaaaacctggagacttttgaagaagtggtcaagccaatgatggagcatgtgcgaattcatccggaattagtgactggatccaaggaccatgaactg

SEQ ID NO: 524653 - DNA, 120 bp, Artificial Sequence
  ENSG00000165699_8 (sequence is synthesized)
gaccctcgaaggtggaagagattagaaactcatgatgttgtgatcgagtgtgccaaaatctctctggatcccacagaagcctcatatgaagatggctattctgtgtctcaccaaatctca

SEQ ID NO: 524654 - DNA, 120 bp, Artificial Sequence
  ENSG00000165699_9 (sequence is synthesized)
gcccgctttcctcatcgttcagccgatgtcaccaccagcccttatgctgacacacagaatagctatgggtgtgctacttctaccccttactccacgtctcggctgatgttgttaaatatg

SEQ ID NO: 524655 - DNA, 120 bp, Artificial Sequence
  ENSG00000165699_10 (sequence is synthesized)
ccagggcagctacctcagactctgagttccccatcgacacggctgataactgaaccaccacaagctactctttggagcccatctatggtttgtggtatgaccactcctccaacttctcct

SEQ ID NO: 524656 - DNA, 120 bp, Artificial Sequence
  ENSG00000165699_11 (sequence is synthesized)
ggaaatgtcccacctgatctgtcacacccttacagtaaagtctttggtacaactgcaggtggaaaaggaactcctctgggaaccccagcaacctctcctcctccagccccactctgtcat

SEQ ID NO: 524657 - DNA, 120 bp, Artificial Sequence
  ENSG00000165699_12 (sequence is synthesized)
tcggatgactacgtgcacatttcactcccccaggccacagtcacaccccccaggaaggaagagagaatggattctgcaagaccatgtctacacagacaacaccatcttctgaatgacaga

SEQ ID NO: 524658 - DNA, 120 bp, Artificial Sequence
  ENSG00000165699_13 (sequence is synthesized)
ggatcagaagagccacctggcagcaaaggttctgtcactctaagtgatcttccagggtttttaggtgatctggcctctgaagaagatagtattgaaaaagataaagaagaagctgcaata

SEQ ID NO: 524659 - DNA, 120 bp, Artificial Sequence
  ENSG00000165699_14 (sequence is synthesized)
tctagagaactttctgagatcaccacagcagaggcagagcctgtggttcctcgaggaggctttgactctcccttttaccgagacagtctcccaggttctcagcggaagacccactcggca

SEQ ID NO: 524660 - DNA, 120 bp, Artificial Sequence
  ENSG00000165699_15 (sequence is synthesized)
gcctccagttctcagggcgccagcgtgaaccctgagcctttacactcctccctggacaagcttgggcctgacacaccaaagcaagcctttactcccatagacctgccctgcggcagtgct

SEQ ID NO: 524661 - DNA, 120 bp, Artificial Sequence
  ENSG00000165699_16 (sequence is synthesized)
gatgaaagccctgcgggagacagggaatgccagacttctttggagaccagtatcttcactcccagtccttgtaaaattccacctccgacgagagtgggctttggaagcgggcagcctccc

SEQ ID NO: 524662 - DNA, 120 bp, Artificial Sequence
  ENSG00000165699_17 (sequence is synthesized)
ccgtatgatcatctttttgaggtggcattgccaaagacagcccatcattttgtcatcaggaagactgaggagctgttaaagaaagcaaaaggaaacacagaggaagatggtgtgccctct

SEQ ID NO: 524663 - DNA, 120 bp, Artificial Sequence
  ENSG00000165699_18 (sequence is synthesized)
acctccccaatggaagtgctggacagactgatacagcagggagcagacgcgcacagcaaggagctgaacaagttgcctttacccagcaagtctgtcgactggacccactttggaggctct

SEQ ID NO: 524664 - DNA, 120 bp, Artificial Sequence
  ENSG00000165699_19 (sequence is synthesized)
cctccttcagatgagatccgcaccctccgagaccagttgcttttactgcacaaccagttactctatgagcgttttaagaggcagcagcatgccctccggaacaggcggctcctccgcaag

SEQ ID NO: 524665 - DNA, 120 bp, Artificial Sequence
  ENSG00000165699_20 (sequence is synthesized)
gtgatcaaagcagcagctctggaggaacataatgctgccatgaaagatcagttgaagttacaagagaaggacatccagatgtggaaggttagtctgcagaaagaacaagctagatacaat

SEQ ID NO: 524666 - DNA, 120 bp, Artificial Sequence
  ENSG00000165699_21 (sequence is synthesized)
cagctccaggagcagcgtgacactatggtaaccaagctccacagccagatcagacagctgcagcatgaccgagaggaattctacaaccagagccaggaattacagacgaagctggaggac

SEQ ID NO: 524667 - DNA, 120 bp, Artificial Sequence
  ENSG00000165699_22 (sequence is synthesized)
tgcaggaacatgattgcggagctgcggatagaactgaagaaggccaacaacaaggtgtgtcacactgagctgctgctcagtcaggtttcccaaaagctctcaaacagtgagtcggtccag

SEQ ID NO: 524668 - DNA, 120 bp, Artificial Sequence
  ENSG00000165699_23 (sequence is synthesized)
cagcagatggagttcttgaacaggcagctgttggttcttggggaggtcaacgagctctatttggaacaactgcagaacaagcactcagataccacaaaggaagtagaaatgatgaaagcc

SEQ ID NO: 524669 - DNA, 120 bp, Artificial Sequence
  ENSG00000165699_24 (sequence is synthesized)
gcctatcggaaagagctagaaaaaaacagaagccatgttctccagcagactcagaggcttgatacctcccaaaaacggattttggaactggaatctcacctggccaagaaagaccacctt

SEQ ID NO: 524670 - DNA, 120 bp, Artificial Sequence
  ENSG00000165699_25 (sequence is synthesized)
cttttggaacagaagaaatatctagaggatgtcaaactccaggcaagaggacagctgcaggccgcagagagcaggtatgaggctcagaaaaggataacccaggtgtttgaattggagatc

SEQ ID NO: 524671 - DNA, 120 bp, Artificial Sequence
  ENSG00000165699_26 (sequence is synthesized)
ttagatttatatggcaggttggagaaagatggcctcctgaaaaaacttgaagaagaaaaagcagaagcagctgaagcagcagaagaaaggcttgactgttgtaatgacgggtgctcagat

SEQ ID NO: 524672 - DNA, 120 bp, Artificial Sequence
  ENSG00000165699_27 (sequence is synthesized)
tccatggtagggcacaatgaagaggcatctggccacaacggtgagaccaagacccccaggcccagcagcgcccggggcagtagtggaagcagaggtggtggaggcagcagcagcagcagc

SEQ ID NO: 524673 - DNA, 120 bp, Artificial Sequence
  ENSG00000165699_28 (sequence is synthesized)
agcgagctttctaccccagagaaacccccacaccagagggcaggcccattcagcagtcggtgggagacgactatgggagaagcgtctgccagcatccccaccactgtgggctcacttccc

SEQ ID NO: 524674 - DNA, 120 bp, Artificial Sequence
  ENSG00000165699_29 (sequence is synthesized)
agttcaaaaagcttcctgggtatgaaggctcgagagttatttcgtaataagagcgagagccagtgtgatgaggacggcatgaccagtagcctttctgagagcctaaagacagaactgggc

SEQ ID NO: 524675 - DNA, 120 bp, Artificial Sequence
  ENSG00000165699_30 (sequence is synthesized)
aaagacttgggtgtggaagccaagattcccctgaacctagatggccctcacccgtctcccccgaccccggacagtgttggacagctacatatcatggactacaatgagactcatcatgaa

SEQ ID NO: 524676 - DNA, 120 bp, Artificial Sequence
  ENSG00000165699_31 (sequence is synthesized)
cacagctaaggaatgatggtcaatcagtgttaacttgcatattgttggcacagaacaggaggtgtgaatgcacgtttcaaagctttcctgtttccagggtctgagtgcaagttcatgtgt

SEQ ID NO: 524677 - DNA, 120 bp, Artificial Sequence
  ENSG00000165699_32 (sequence is synthesized)
ggaaatgggacggaggtcctttggacagctgactgaatgcagaacggtttttggatctggcattgaaatgcctcttgaccttcccctccacccgccctaaccccctctcatttacctcgc

SEQ ID NO: 524678 - DNA, 120 bp, Artificial Sequence
  ENSG00000165699_33 (sequence is synthesized)
agtgtgttctaatccaagggccagttggtgttcctcagtagctttactttcttcctttcccccccaaatggttgcgtcctttgaacctgtgcaatatgaggccaaatttaatctttgagt

SEQ ID NO: 524679 - DNA, 120 bp, Artificial Sequence
  ENSG00000165699_34 (sequence is synthesized)
ctaacacaccactttctgctttcccgaagttcagataactgggttggctctcaattagaccaggtagtttgttgcattgcaggtaagtctggttttgtcccttccaggaggacatagcct

SEQ ID NO: 524680 - DNA, 120 bp, Artificial Sequence
  ENSG00000165699_35 (sequence is synthesized)
gaacaacggtttattcatacttgcattcttttggcagttctgataagcttcctagaaagttctgtgtaaacagaagcctgtttcagaaatctggagctggcactgtggagaccacacacc

SEQ ID NO: 524681 - DNA, 120 bp, Artificial Sequence
  ENSG00000165699_36 (sequence is synthesized)
ctttgggaaagctcttgtctcttcttcccccactacctcttatttatttggtgtttgcttgaatgctggtactattgtgaccacaggctggtgtgtaggtggtaaaacctgttctccata

SEQ ID NO: 524682 - DNA, 120 bp, Artificial Sequence
  ENSG00000165699_37 (sequence is synthesized)
ggagggaaggagcagtcactgggagaggttacccgagaagcacttgagcatgaggaactgcacctttaggccatctcagcttgctgggccttttgttaaacccttctgtctactggcctc

SEQ ID NO: 524683 - DNA, 120 bp, Artificial Sequence
  ENSG00000165699_38 (sequence is synthesized)
cctttgtgtgcatacgcctcttgttcatgtcagcttatatgtgacactgcagcagaaaggctctgaaggtccaaagagtttctgcaaagtgtatgtgaccatcatttcccaggccattag

SEQ ID NO: 524684 - DNA, 120 bp, Artificial Sequence
  ENSG00000165699_39 (sequence is synthesized)
ggttgcctcactgtagcaggttctaggctaccagaagaggggcagctttttcataccaattccaactttcaggggctgactctccagggagctgatgtcatcacactctccatgttagta

SEQ ID NO: 524685 - DNA, 120 bp, Artificial Sequence
  ENSG00000165699_40 (sequence is synthesized)
atggcagagcagtctaaacagagtccgggagaatgctggcaaaggctggctgtgtatacccactaggctgccccacgtgctcccgagagatgacactagtcagaaaattggcagtggcag

SEQ ID NO: 524686 - DNA, 120 bp, Artificial Sequence
  ENSG00000165699_41 (sequence is synthesized)
agaatccaaactcaacaagtgctcctgaaagaaacgctagaagcctaagaactgtggtctggtgttccagctgaggcagggggatttggtaggaaggagccagtgaacttggctttcctg

SEQ ID NO: 524687 - DNA, 120 bp, Artificial Sequence
  ENSG00000165699_42 (sequence is synthesized)
tttctatctttcattaaaaagaatagaaggattcagtcataaagaggtaaaaaactgtcacggtacgaaatcttagtgcccacggaggcctcgagcagagagaatgaaagtctttttttt

SEQ ID NO: 524688 - DNA, 120 bp, Artificial Sequence
  ENSG00000165699_43 (sequence is synthesized)
ttttttttttttttagcatggcaataaatattctagcatccctaactaaaggggactagacagttagagactctgtcaccctagctataccagcagaaaacctgttcaggcaggctttct

SEQ ID NO: 524689 - DNA, 120 bp, Artificial Sequence
  ENSG00000165699_44 (sequence is synthesized)
gggtgtgactgattcccagcctgtggcagggcgtggtcccaactactcagcctagcacaggctggcagttggtactgaattgtcagatgtggagtattagtgacaccacacatttaattc

SEQ ID NO: 524690 - DNA, 120 bp, Artificial Sequence
  ENSG00000165699_45 (sequence is synthesized)
agctttgtccaaaggaaagcttaaaacccaatacagtctagtttcctggttccgttttagaaaaggaaaacgtgaacaaacttagaaagggaaggaaatcccatcagtgaatcctgaaac

SEQ ID NO: 524691 - DNA, 120 bp, Artificial Sequence
  ENSG00000165699_46 (sequence is synthesized)
tggttttaagtgctttccttctcctcatgcccaagagatctgtgccatagaacaagataccaggcacttaaagccttttcctgaattggaaaggaaaagaggcccaagtgcaaaagaaaa

SEQ ID NO: 524692 - DNA, 120 bp, Artificial Sequence
  ENSG00000165699_47 (sequence is synthesized)
aacattttagaaacggacagcttataaaaataaagggaagaaaggaggcagcatggagagaggcctgtgctagaagctccatggacgtgtctgcacagggtcctcagctcatccatgcgg

SEQ ID NO: 524693 - DNA, 120 bp, Artificial Sequence
  ENSG00000165699_48 (sequence is synthesized)
cctgggtgtccttttactcagctttataacaaatgtggctccaagctcaggtgcctttgagttctaggaggctgtgggttttattcaactacggttgggagaatgagacctggagtcatg

SEQ ID NO: 524694 - DNA, 120 bp, Artificial Sequence
  ENSG00000165699_49 (sequence is synthesized)
ttgaaggtgcccaacctaaaaatgtaggctttcatgttgcaaagaactccagagtcagtagttaggtttggtttggttttggacatgataaacctgccaagagtcaacaggtcacttgat

SEQ ID NO: 524695 - DNA, 120 bp, Artificial Sequence
  ENSG00000165699_50 (sequence is synthesized)
catgctgcagtgggtagttctaaggatggaaaggtgacagtattactctcgagaggcaattcagtcctgggcaaaggtattagtacaataagcgttaagggcagagtctaccttgaaacc

SEQ ID NO: 524696 - DNA, 120 bp, Artificial Sequence
  ENSG00000165699_51 (sequence is synthesized)
aattaagcagcttggtattcataaatattgggattggatggcctccatccagaaatcactatgggtgagcatacctgtctcagctgtttggccaatgtgcataacctactcggatcccca

SEQ ID NO: 524697 - DNA, 120 bp, Artificial Sequence
  ENSG00000165699_52 (sequence is synthesized)
cctgacactaaccagagtcagcacaggccccgaggagcccgaagtctgctgctgtgcagcatggaattcctttaaaaaggtgcactacagttttagcggggagggggataggaagacgca

SEQ ID NO: 524698 - DNA, 120 bp, Artificial Sequence
  ENSG00000165699_53 (sequence is synthesized)
gagcaaatgagctccggagtccctgcaggtgaataaacacacagatctgcatctgatagaactttgatggattttcaaaaagccgttgacaaggctctgctatacagtctataaaaattg

SEQ ID NO: 524699 - DNA, 120 bp, Artificial Sequence
  ENSG00000165699_54 (sequence is synthesized)
ttattatgggattggaagaaacacgtggtcatgaatagaaaaaaaacaaacccaaaggtaggaaggtcaaggtcatttcttagatggagaagttgtgaaagatgtccttggagatgagtt

SEQ ID NO: 524700 - DNA, 120 bp, Artificial Sequence
  ENSG00000165699_55 (sequence is synthesized)
ttaggaccagcattactaaggcaggtgggcagacagtgacctctctaggtgtgtccacagagtttttcaggagagaaaactgcctgacctttgggactaagctgcggaatcttcttacta

SEQ ID NO: 524701 - DNA, 120 bp, Artificial Sequence
  ENSG00000165699_56 (sequence is synthesized)
agcttgaagagtggagaggcgagaggtgagctactttgtgagccaaagcttatgtgacatggttggggaaacagtccaaactgttctgagaaggtgaactgttacgacccaggacaatta

SEQ ID NO: 524702 - DNA, 120 bp, Artificial Sequence
  ENSG00000165699_57 (sequence is synthesized)
gaaaaattcacccaccatgccgcacattactgggtaaaagcagggcagcagggaacaaaactccagactcttgggccgtccccatttgcaacagcacacatagtttctggtatatttgtt

SEQ ID NO: 524703 - DNA, 120 bp, Artificial Sequence
  ENSG00000165699_58 (sequence is synthesized)
gggaaagataaaactctagcagttgttgaggggaggatgtataaaatggtcatggggatgaaaggatctctgagaccacagaggctcagactcactgttaagaatagaaaactgggtatg

SEQ ID NO: 524704 - DNA, 120 bp, Artificial Sequence
  ENSG00000165699_59 (sequence is synthesized)
cgtttcatgtagccagcagaactgaagtgtgctgtgacaagccaatgtgaatttctaccaaatagtagagcataccacttgaagaaggaaagaaccgaagagcaaacaaaagttctgcgt

SEQ ID NO: 524705 - DNA, 120 bp, Artificial Sequence
  ENSG00000165699_60 (sequence is synthesized)
aatgagactcaccttttctcgctgaaagcactaagaggtgggaggaggcctgcacaggctggaggagggtttgggcagagcgaagacccggccaggaccttggtgagatggggtgccgcc

SEQ ID NO: 524706 - DNA, 120 bp, Artificial Sequence
  ENSG00000165699_61 (sequence is synthesized)
cacctcctgcggatactcttggagagttgttcccccagggggctctgccccacctggagaaggaagctgcctggtgtggagtgactcaaatcagtatacctatctgctgcaccttcactc

SEQ ID NO: 524707 - DNA, 120 bp, Artificial Sequence
  ENSG00000165699_62 (sequence is synthesized)
tccagggtacatgctttaaaaccgacccgcaacaagtattggaaaaatgtatccagtctgaagatgtttgtgtatctgtttacatccagagttctgtgacacatgccccccagattgctg

SEQ ID NO: 524708 - DNA, 120 bp, Artificial Sequence
  ENSG00000165699_63 (sequence is synthesized)
caaagatcccaaggcattgattgcacttgattaagcttttgtctgtaggtgaaagaacaagtttaggtcgaggactggcccctaggctgctgctgtgacccttgtcccatgtggcttgtt

SEQ ID NO: 524709 - DNA, 120 bp, Artificial Sequence
  ENSG00000165699_64 (sequence is synthesized)
tgcctgtccgggactcttcgatgtgcccaggggagcgtgttcctgtctcttccatgccgtcctgcagtccttatctgctcgcctgagggaagagtagctgtagctacaagggaagcctgc

SEQ ID NO: 524710 - DNA, 120 bp, Artificial Sequence
  ENSG00000165699_65 (sequence is synthesized)
ctggaagagccgagcacctgtgcccatggcttctggtcatgaaacgagttaatgatggcagaggagcttcctccccacttcgcagcgccacattatccatcctctgagataagtaggctg

SEQ ID NO: 524711 - DNA, 120 bp, Artificial Sequence
  ENSG00000165699_66 (sequence is synthesized)
gtttaaccattggaatggacctttcagtggaaaccctgagagtctgagaacccccagaccaacccttccctccctttccccacctcttacagtgtttggacaggagggtatggtgctgct

SEQ ID NO: 524712 - DNA, 120 bp, Artificial Sequence
  ENSG00000165699_67 (sequence is synthesized)
ctgtgtagcaagtactttggcttatgaaagaggcagccacgcattttgcactaggaagaatcagtaatcacttttcagaagacttctatggaccacaaatatattacggaggaacagatt

SEQ ID NO: 524713 - DNA, 120 bp, Artificial Sequence
  ENSG00000165699_68 (sequence is synthesized)
ttgctaagacataatctagttttataactcaatcatgaatgaaccatgtgtggcaaacttgcagtttaaaggggtcccatcagtgaaagaaactgattttttttaacggactgcttttag

SEQ ID NO: 524714 - DNA, 120 bp, Artificial Sequence
  ENSG00000165699_69 (sequence is synthesized)
ttaaattgaagaaagtcagctcttgtcaaaaggtctaaactttcccgcctcaatcctaaaagcatgtcaacaatccacatcagatgccataaatatgaactgcaggataaaatggtacaa

SEQ ID NO: 524715 - DNA, 120 bp, Artificial Sequence
  ENSG00000165699_70 (sequence is synthesized)
tcttagtgaatgggaattggaatcaaaagagtttgctgtccttcttagaatgttctaaaatgtcaaggcagttgcttgtgtttaactgtgaacaaataaaaatttattgttttgcactac

SEQ ID NO: 524716 - DNA, 120 bp, Artificial Sequence
  ENSG00000165699_71 (sequence is synthesized)
agttatgagtggaagagcctcttccttccggcggggctgccgagcgcggccgtctatccttcctttcgagaaggaggggaggtccggagggggactctttttcgtggcggaggccgccgt

SEQ ID NO: 524717 - DNA, 120 bp, Artificial Sequence
  ENSG00000165699_72 (sequence is synthesized)
actacgtgcacatttcactcccccaggccacagtcacaccccccaggaaggtgcgatccagctcgtctgctatccctctgcccaggcacagtgactcacttgcaagcctcactttgagaa

SEQ ID NO: 524718 - DNA, 120 bp, Artificial Sequence
  ENSG00000165699_73 (sequence is synthesized)
gcctaattatgccagatagaattctgacctaaaatgcaatgggtttgaatcagaataattgaaaatggactaacaagctgctctcaaggtgtgatctgccgacccctgggtggttccaaa

SEQ ID NO: 524719 - DNA, 88 bp, Artificial Sequence
  ENSG00000165699_74 (sequence is synthesized)
ctctcaaggtgtgatctgccgacccctgggtggttccaaaactctgctttggcagaactcttgtggggaacccagcaggtcaaaccta

SEQ ID NO: 524720 - DNA, 120 bp, Artificial Sequence
  ENSG00000165699_75 (sequence is synthesized)
aaggcgttctgattttcaagctgtctcctattagggctggtttcccctagatgtcatgagtaggtgtgaagtgtgagctacttgaaggcagaagccaggggggtcccccgcaatcccgga

SEQ ID NO: 524721 - DNA, 120 bp, Artificial Sequence
  ENSG00000165699_76 (sequence is synthesized)
cagatttagtatgtggttgggaaaatttcacactgctcatttcaggagtcacttttaaggatccatgatattagcaaagaaagttactgttgcctcttagattcatcttgaagtcttgat

SEQ ID NO: 524722 - DNA, 120 bp, Artificial Sequence
  ENSG00000165699_77 (sequence is synthesized)
ttacaaaatgcaacttgtttcttgatacgcttttaataagatgcctttttctagatgaaaaagctaaatttaagctgaacactggccatggatataaacctcgtggatgacttagcattc

SEQ ID NO: 524723 - DNA, 120 bp, Artificial Sequence
  ENSG00000165699_78 (sequence is synthesized)
ccttacagtaaagtctttggtacaactggtatgtatgtcttaggttggatttgattagttggttttggcctgcctttaatggcaggaggagctctcttttagatctaagggaccacttgc

SEQ ID NO: 524724 - DNA, 120 bp, Artificial Sequence
  ENSG00000165699_79 (sequence is synthesized)
tgttgtaaacttgtttttgacacttattgcaaatccctggggctttcagaatgtgtaaagtgaacctaaaaacaaaaaagagagagactgatctagatccccagaaagttaactctagca

SEQ ID NO: 524725 - DNA, 120 bp, Artificial Sequence
  ENSG00000165699_80 (sequence is synthesized)
gctttatttatagtaatagttataggctgaaaaaaaatcggcagtttttctaatagttgggctcagtgttcatatatgttctgcccttgtctctaagcaggtggaaaaggaactcctctg

SEQ ID NO: 524726 - DNA, 120 bp, Artificial Sequence
  ENSG00000165699_81 (sequence is synthesized)
agtatgtctcccgcatggcatagagaatggcttgatgacttatttcctaaaagacggagcggcagtcccactactccgtggtccagctatacaagcactttccagccaccatgtgagctt

SEQ ID NO: 524727 - DNA, 120 bp, Artificial Sequence
  ENSG00000165699_82 (sequence is synthesized)
gtttctcctattgggttgctttgaagttaactcacactgaaagcacctaatggtagttggtagagagtaggtgtaaagtgtttcctttctcttccctaggctgcctttcaaagagggaga

SEQ ID NO: 524728 - DNA, 120 bp, Artificial Sequence
  ENSG00000165699_83 (sequence is synthesized)
gagaaaaagaaggatgggggaccaattctgtttaacatacctctcaggaccatggatatagagtgctgtacataccatttttttttttccttttaatgttggatttctgcagatggtagt

SEQ ID NO: 524729 - DNA, 120 bp, Artificial Sequence
  ENSG00000165699_84 (sequence is synthesized)
tcagtcctggcaacaaggccagcattgggatgatcttacattaattagtgcctcaccagtggtgtcgaggcagaagttttaagtcactttataaatagcctcaggtaatgttagtgaatg

SEQ ID NO: 524730 - DNA, 120 bp, Artificial Sequence
  ENSG00000165699_85 (sequence is synthesized)
aggtgggaattgaattttaatagtagctgttcagatacttcctgtcactaacttctccatcacacatgggccttctttttgggtttcttgggcatgtgctttgtaaagagtctttttcgg

SEQ ID NO: 524731 - DNA, 120 bp, Artificial Sequence
  ENSG00000165699_86 (sequence is synthesized)
ccggatgtagagaggagtcttagaactggagagagtaattttcctaatagagttactctttatttcttggctcctctcagctctcagattcagactcccttttttagaaggatgttaggt

SEQ ID NO: 524732 - DNA, 120 bp, Artificial Sequence
  ENSG00000165699_87 (sequence is synthesized)
gtgggactttctctagaaagcagctatcacttattttggaggtgtaatgactgggaacagaaagggggagaaacagatccgaggcacaagagagctcctgaaaaagctgctgaaacgtgc

SEQ ID NO: 524733 - DNA, 120 bp, Artificial Sequence
  ENSG00000165699_88 (sequence is synthesized)
ctgggccatctcctgagagaagcctagatgggcggcctccaaggagtccttgtgctgtttgggaccttgagtagctgcctctccatggggccctgtttcccagttcataaaacgggtgat

SEQ ID NO: 524734 - DNA, 120 bp, Artificial Sequence
  ENSG00000165699_89 (sequence is synthesized)
gcagctgagttgtgatagtcaggatgccttcaattgtagacaacaaaaaccaaactagggctgggcacggtgacacatgcctacagtgccaactatttggaaggctgaaataggaggatt

SEQ ID NO: 524735 - DNA, 120 bp, Artificial Sequence
  ENSG00000165699_90 (sequence is synthesized)
gcttgagctcagaagttctagaccaagcctaacaatatccaaaaaaacaacaaaaacaaaaagcactcaactggcttaacagtgaagaactgtattgtttcacttgacaagaggttgtga

SEQ ID NO: 524736 - DNA, 120 bp, Artificial Sequence
  ENSG00000165699_91 (sequence is synthesized)
ggcaggtgagttccaggttggtcaagttggccattcagggacagcatcgaggagccaggctctttccactcttctgcactgccttgcttatcctgcagaccttgtcttccagctagctgc

SEQ ID NO: 524737 - DNA, 120 bp, Artificial Sequence
  ENSG00000165699_92 (sequence is synthesized)
actcatggttgccaggtgtgtgccacaggcacagatatgacaggcagacacaatgatgtccccacagaagaggagagcatctcttcctattcctcagcaagaaaatctttcccaggctgg

SEQ ID NO: 524738 - DNA, 90 bp, Artificial Sequence
  ENSG00000165699_93 (sequence is synthesized)
ttgtagtcccagctacttggggagctgaggcaggggaatcgcttgaaccccggaggcggaggtttcagtgggccgagatcacgccactgc

SEQ ID NO: 524739 - DNA, 120 bp, Artificial Sequence
  ENSG00000165699_94 (sequence is synthesized)
ggggaggagacgaataatgaacttggtggaaacgagatctgaaaccctagtgctcatgagaaccttgatgtacagatatttggcactatactaggtagacctacatattcggacaccttg

SEQ ID NO: 524740 - DNA, 120 bp, Artificial Sequence
  ENSG00000165699_95 (sequence is synthesized)
tatatatattttggaagaagactgattcttatgtgcaccggaggttgaggaccactggcttcaagtatcattctggctattttcatttattatttatcacagagatcatgaattggtaac

SEQ ID NO: 524741 - DNA, 120 bp, Artificial Sequence
  ENSG00000165699_96 (sequence is synthesized)
atactcattctccatttaaattcatctgaaagaggcactgataggaagagagaatgggagcaagtatcttaccctttttagatgcatttgtgctgaaggcgtcttggttcacttgataga

SEQ ID NO: 524742 - DNA, 120 bp, Artificial Sequence
  ENSG00000165699_97 (sequence is synthesized)
atattaccctaagaagtcacctgagagttcctgagccagagcggaacattaacttaacagtgtaacatttctgctctatctaactgtacctgataataaaatagtctatccatgcctgga

SEQ ID NO: 524743 - DNA, 120 bp, Artificial Sequence
  ENSG00000165699_98 (sequence is synthesized)
gatgaggtctcactatgttgcccaggctagtcttaaactcctggactcaaacgatcctcctacctgggcctcccaaaatcctgggattacaggtttgagccaccacacctgaccaaaccc

SEQ ID NO: 524744 - DNA, 120 bp, Artificial Sequence
  ENSG00000165699_99 (sequence is synthesized)
gattacaggtttgagccaccacacctgaccaaacccaccttcatagtaacactaagctgtcatttgcccttcccactgcattggcatctgcaatgatggcacaaatacgacggggggtga

SEQ ID NO: 524745 - DNA, 120 bp, Artificial Sequence
  ENSG00000165699_100 (sequence is synthesized)
aatggtggcaacttagcctgaatcaaggcaggcattgaagtgtcctatcccaagaggccttgcattcttccctgacatcttctctccattaaaaacaataaaaactaaaaaattttaaaa

SEQ ID NO: 524746 - DNA, 120 bp, Artificial Sequence
  ENSG00000165699_101 (sequence is synthesized)
actgaagtaccagttgtcgctagaacagttaacctgctccagagtttctgtaagctctccaggtgattctgatgtacatcctgggctgagaacccttgagctgaataaaaccttactttg

SEQ ID NO: 524747 - DNA, 120 bp, Artificial Sequence
  ENSG00000165699_102 (sequence is synthesized)
caaatggaaaaacaagctaggtggcccaagctgattagcccacactatcgccaagttgactggatgggcgccatctttgtttaaaattgagctcatgtcactccgggctctggggctgcc

SEQ ID NO: 524748 - DNA, 120 bp, Artificial Sequence
  ENSG00000165699_103 (sequence is synthesized)
agtgacaatgtggttatggccccctggaaagtgagcagttgatgagctctgcttatggctgctctcctccatggcagaatgcattcctgcaggatgaggtcatggagccaaggaagtgac

SEQ ID NO: 524749 - DNA, 120 bp, Artificial Sequence
  ENSG00000165699_104 (sequence is synthesized)
ttctttagtttgtctttttatactctgtttctggtccagggatggatttgacacctgaggccttgataggagaccttaagtcagcctcagctgcttggcagtctccaggtctccctattt

SEQ ID NO: 524750 - DNA, 120 bp, Artificial Sequence
  ENSG00000165699_105 (sequence is synthesized)
tttgatgacctttgttccaaaggacatttttccctgcctgctgctctgctgcatagcttatgtttcatttttccattttgaggctacacctagtcttttgttgaggaaatatttgtttca

SEQ ID NO: 524751 - DNA, 120 bp, Artificial Sequence
  ENSG00000165699_106 (sequence is synthesized)
gattagcttgtaaacttgatataaccattttaaacagggaaggtataggattgtaaaatgaatggctatttctttatgtactagaattgtttcagacttgggctggcatggtcccgcttg

SEQ ID NO: 524752 - DNA, 120 bp, Artificial Sequence
  ENSG00000165699_107 (sequence is synthesized)
ggggctcagtgttctgttgagtctgtttgaatgttatcccttcagtaatccttagggatagggaaatgagtacgtgagtcaacttgtgatttgtgattctctcagtgtttagagcctctt

SEQ ID NO: 524753 - DNA, 85 bp, Artificial Sequence
  ENSG00000165699_108 (sequence is synthesized)
tgagtagctgggaccacaggcatacaccacgatgctcagctgatttttattgtattttttgtagagatgggatctccctatgttg

SEQ ID NO: 524754 - DNA, 120 bp, Artificial Sequence
  ENSG00000165699_109 (sequence is synthesized)
aagttctggcattacaggcgtgagccactgtgtccagccggatgccactttttctcctctctctgagtgacactggcatgtggcagcatgccacccaaactgcctagtctttcccaggtg

SEQ ID NO: 524755 - DNA, 120 bp, Artificial Sequence
  ENSG00000165699_110 (sequence is synthesized)
tctagaggatgtcaaactccaggcaaggtaactttcatcaggaaaggcttttgtgtttttattaagtggaacttcctatattctggctggtctgtatctttcagaggacagctgcaggcc

SEQ ID NO: 524756 - DNA, 120 bp, Artificial Sequence
  ENSG00000165699_111 (sequence is synthesized)
ttctgtgcacggccactgtgcaacttgtcctgagcttattcttttgatttctgtgcgccactgatgacattgttcccagtttataactacatataaaaattactttgtaggacccatgat

SEQ ID NO: 524757 - DNA, 120 bp, Artificial Sequence
  ENSG00000165699_112 (sequence is synthesized)
ttataactacatataaaaattactttgtaggacccatgattcttgaaaagtttacaaaataaaacatatttcagagactgttaaagatcttgtttgggccgggtgtggtggctcacgcct

SEQ ID NO: 524758 - DNA, 84 bp, Artificial Sequence
  ENSG00000165699_113 (sequence is synthesized)
acctgagattgcaccattgcactccagatcttgtttaaagaaatcttacatttccagtactataattgtatagtgatgatttgg

SEQ ID NO: 524759 - DNA, 120 bp, Artificial Sequence
  ENSG00000165699_114 (sequence is synthesized)
cttacatttccagtactataattgtatagtgatgatttggcccataggtacccatctttcaacccatactttgaatagaatttttagacttttatcgatatggaaaagcttcaagtacaa

SEQ ID NO: 524760 - DNA, 120 bp, Artificial Sequence
  ENSG00000165699_115 (sequence is synthesized)
cttcatgttttccttttgtttttagtaagtagctaataaagcattgttattgcagactttggtaagtcttaagtgtatatatgagagcaacttccccaggatttgaagaccttgtattgc

SEQ ID NO: 524761 - DNA, 120 bp, Artificial Sequence
  ENSG00000165699_116 (sequence is synthesized)
gaagaccttgtattgcatgccttttacagtacatcttgttttgttttgttttctaaagaggtgaggtctcattgtgttccctagactggagcgtggtggcacaatcatagctcactgtaa

SEQ ID NO: 524762 - DNA, 120 bp, Artificial Sequence
  ENSG00000165699_117 (sequence is synthesized)
cctcagcctcccaaagtgcagggattgccggcatgagccactgcgcctggcccgtcttgtttttttgtttactctggtctgaaatgtaacttctactacctaattgatacttgaggccaa

SEQ ID NO: 524763 - DNA, 120 bp, Artificial Sequence
  ENSG00000165699_118 (sequence is synthesized)
tgatacttgaggccaaaccatgtaggctgggttgctctagcaataagtggctgcttccagcaggatcccctcatggcttcagtaacctatcacagtttgggactgttggttattgagggg

SEQ ID NO: 524764 - DNA, 120 bp, Artificial Sequence
  ENSG00000165699_119 (sequence is synthesized)
ctgtgaacaagtctccccctttctgcatgcgtgtattgtagggtcctttttcatgagctgcaaactggctgccttttgtcaggccaaatgcagcagtgttttgtttgctaacgtggtttt

SEQ ID NO: 524765 - DNA, 120 bp, Artificial Sequence
  ENSG00000165699_120 (sequence is synthesized)
taaaatcttgaatttgaccttttatctgcatgacccttgctttacattagagacaagacttgagagattggagcacatcattgctgtctttatttgtgttaacttcatacattcatgtga

SEQ ID NO: 524766 - DNA, 120 bp, Artificial Sequence
  ENSG00000165699_121 (sequence is synthesized)
gtacgtccaagatggcggcgccctgtaggctggagggactgtgaggtaaacagctgagggggaggagacggtgggcactgtgaaagtgcttggcagtcattatctcctttggtcctcacg

SEQ ID NO: 524767 - DNA, 120 bp, Artificial Sequence
  ENSG00000165699_122 (sequence is synthesized)
acaaagagaagaggcagccactgttaacacctccaatcttctcaaatgaagaaactgaggcccggagagagcagggtactttgcctaagttcacaccccaattgtatctgagccaggact

SEQ ID NO: 524768 - DNA, 120 bp, Artificial Sequence
  ENSG00000165699_123 (sequence is synthesized)
ttgttcttatagctctgtcttcatttgaagtttgtttggctacaggtatgtttatttctgggttccagggccatagtgaactaaaattagcttttcctggaattaattggatattcttga

SEQ ID NO: 524769 - DNA, 120 bp, Artificial Sequence
  ENSG00000165699_124 (sequence is synthesized)
atgccgatgagccaaatatagcaatatctcaaccatttcaggcttttctagagagtcagatagcttttgaccttcagtgggtcacttaagttctgtgagcctgtgtcttcatctgtgaag

SEQ ID NO: 524770 - DNA, 120 bp, Artificial Sequence
  ENSG00000165699_125 (sequence is synthesized)
taaaagttggaatgtaaattaatgagtatttctaggcctacatttctgtgatttaaagtcctttggggtgtcatttaaatattctgactaaatcgattgagtcaacctgttaatggtttt

SEQ ID NO: 524771 - DNA, 120 bp, Artificial Sequence
  ENSG00000165699_126 (sequence is synthesized)
tactctttgaaaaggtaattccctataagtttcccatattataaatctctgaaaggttagtctttgcattggttttgtcatttaagtagctgaaggcgtgaaagaaaagtgtacttaata

SEQ ID NO: 524772 - DNA, 120 bp, Artificial Sequence
  ENSG00000165699_127 (sequence is synthesized)
gcgttaaaatctgtggctgtttgcttgaaatgtgtatatgtagtatacactcaaacactgagtttgttttttttaatctcagatcatgaattggtaactaatataatttgggtagcatga

SEQ ID NO: 524773 - DNA, 120 bp, Artificial Sequence
  ENSG00000165699_128 (sequence is synthesized)
aatactcattctccatttaaattcatctgaaagaggtaaactgtcagcagtttgagattattctttctctggtttactttttaagactgtagttgctagaaattagtaactttatgtctg

SEQ ID NO: 524774 - DNA, 120 bp, Artificial Sequence
  ENSG00000165699_129 (sequence is synthesized)
ttttcatgggagagaataaaaatgcaaattttatatactgtgtataaaatacactgtctcaggaccttgtcagtttcttcttgtcctttctctcgttcagtgctaacttttattatgaac

SEQ ID NO: 524775 - DNA, 120 bp, Artificial Sequence
  ENSG00000165699_130 (sequence is synthesized)
atggaatcagcaaaagataacaatactttttacggttgaatgaattcagatttacatctaataagtaaaatgtcttaaaaaccatgctttagtccaaaataaagcatagtagttactgcc

SEQ ID NO: 524776 - DNA, 120 bp, Artificial Sequence
  ENSG00000165699_131 (sequence is synthesized)
ctacaactcacaggtcactctcttaagtaaatatgatggcagtagaggcccagaagtgttggagtaacaaaggacagttttgcccttctgtgggtgatgtgatggaagacacagagggga

SEQ ID NO: 524777 - DNA, 120 bp, Artificial Sequence
  ENSG00000165699_132 (sequence is synthesized)
gctgtaggaagaacagaggcagtgaccttaatgtctgcaatcattaagactctgctactttgagtagttcacagagcatagtaacaaacttgaactgtatccattttaagttatacaatg

SEQ ID NO: 524778 - DNA, 120 bp, Artificial Sequence
  ENSG00000165699_133 (sequence is synthesized)
gttgtatcaatgtttcaaataccagttgttaaatggatagactgctaagcattatgtacccagcaatccatttttgtgaagtagtaatattgttataataaagtttatattttttgagta

SEQ ID NO: 524779 - DNA, 120 bp, Artificial Sequence
  ENSG00000165699_134 (sequence is synthesized)
atacagcagggagcagacgcgcacagcaaggagctgaacaagttgcctttacccagcaagtctgtcgactggacccactttggagaaagatcagttgaagttacaagagaaggacatcca

SEQ ID NO: 524780 - DNA, 120 bp, Artificial Sequence
  ENSG00000165699_135 (sequence is synthesized)
aactgaaccaccacaagtatggtgtcaactagtgtgcctgctctctcctctgctttctggctactctttggagcccatctatggtttgtggtatgaccactcctccaacttctcctggaa

SEQ ID NO: 524781 - DNA, 120 bp, Artificial Sequence
  ENSG00000165702_0 (sequence is synthesized)
tgcgaggctgagtatgatgggctccatccagcacgaacacaaagccctgtgagaggaggcagagtgagatgaagtcgaactgtgggatatgaaaggcattttgaaggagtaggcatcagg

SEQ ID NO: 524782 - DNA, 83 bp, Artificial Sequence
  ENSG00000165702_1 (sequence is synthesized)
tacagagcaagaccccatctttttgaaacttcctgcaactcgcatctggaaaagtgctgttatttgaaagggtgccgacattg

SEQ ID NO: 524783 - DNA, 120 bp, Artificial Sequence
  ENSG00000165702_2 (sequence is synthesized)
atctggaaaagtgctgttatttgaaagggtgccgacattgtgaaaaacacggagtattgatctctgaagctgagatttttgtcctaaagaatactcaagatgtgtccctggctgggcaca

SEQ ID NO: 524784 - DNA, 80 bp, Artificial Sequence
  ENSG00000165702_3 (sequence is synthesized)
attgtgaatagtaccactataaatagagaaagcgtgccgctccaagtgtcgagggttagaaatgagaattcgaagtcttg

SEQ ID NO: 524785 - DNA, 120 bp, Artificial Sequence
  ENSG00000165702_4 (sequence is synthesized)
tccaagtgtcgagggttagaaatgagaattcgaagtcttgtgtcctggaaagttttgataagcaaatacggctgagctcccgcgctctcttcattggctgcttgttcaccgccagatttt

SEQ ID NO: 524786 - DNA, 120 bp, Artificial Sequence
  ENSG00000165702_5 (sequence is synthesized)
gacacaaataatcagattgaaaatcagggaggggaacagaagaggaaaaacacacagagagacagagcaaaaaggagaagtatctatttgtgcaaagagtcacacagttgacagagtgga

SEQ ID NO: 524787 - DNA, 120 bp, Artificial Sequence
  ENSG00000165702_6 (sequence is synthesized)
ggccagtcccgagagaggctttgcagttcccacctcgggaagctccggcagaacccaggcgagggacagctccggacaggtgtggggtgcacactgaaaatgccacgctccttcctggtg

SEQ ID NO: 524788 - DNA, 120 bp, Artificial Sequence
  ENSG00000165702_7 (sequence is synthesized)
aagagcaagaaggctcacacctaccaccagccccgtgtgcaggaagatgaaccgctctggcctcctgcccttaccccggtgcccagagaccaggctccaagcaacagccctgtccttagc

SEQ ID NO: 524789 - DNA, 120 bp, Artificial Sequence
  ENSG00000165702_8 (sequence is synthesized)
actctattcccaaaccagtgcctggactggaccaacctcaaacgagagccggagctggagcaggaccagaacttggccaggatggccccggcaccagagggccccattgtgctgtcccga

SEQ ID NO: 524790 - DNA, 120 bp, Artificial Sequence
  ENSG00000165702_9 (sequence is synthesized)
ccccaggatggggactctccactgtccgactcacccccattctacaagcctagcttctcctgggacaccttggccacaacctatggccacagctaccggcaggccccctccaccatgcag

SEQ ID NO: 524791 - DNA, 120 bp, Artificial Sequence
  ENSG00000165702_10 (sequence is synthesized)
ccagcactgagcccgccttggacttcagcctccgctactccccaggcatggatgcgtaccactgtgtgaagtgcaacaaggtcttctccacccctcacgggctcgaagtgcatgtgcgac

SEQ ID NO: 524792 - DNA, 120 bp, Artificial Sequence
  ENSG00000165702_11 (sequence is synthesized)
gctcccatagtgggacccggcccttcgcctgtgacatctgcggcaaaaccttcggccacgctgtgagcctggagcagcacacgcacgtccactcccaggagcgcagcttcgagtgccgca

SEQ ID NO: 524793 - DNA, 120 bp, Artificial Sequence
  ENSG00000165702_12 (sequence is synthesized)
tgtgcggcaaggccttcaagcgctcgtccacgctgtccacccacctgctcatccactcagacacgcggccctacccctgccagttctgcggcaagcgtttccaccagaagtccgacatga

SEQ ID NO: 524794 - DNA, 120 bp, Artificial Sequence
  ENSG00000165702_13 (sequence is synthesized)
agaagcacacctacatccacacaggtgagaagccgcacaagtgccaggtgtgcggaaaggccttcagccagagctccaacctcatcacccacagccgcaagcacacaggcttcaagccct

SEQ ID NO: 524795 - DNA, 120 bp, Artificial Sequence
  ENSG00000165702_14 (sequence is synthesized)
tcagctgtgagctgtgcaccaaaggcttccagcgcaaggtggacctgcggcggcaccgcgagagccagcacaatctcaagtgaggctgcgccggctcccagctcctggccagcctgccct

SEQ ID NO: 524796 - DNA, 120 bp, Artificial Sequence
  ENSG00000165702_15 (sequence is synthesized)
gcggtcctgtcacctggaggccagcctcacatgcccaaatctccagtctcctggaggtgggactggacaggagtctaccagcttgttttgagactcatgaaattgctgtgtgaccttggg

SEQ ID NO: 524797 - DNA, 120 bp, Artificial Sequence
  ENSG00000165702_16 (sequence is synthesized)
caagtcacttaccctgtctggatcaacatttctcctgctgccaagtgtgggagcctggctgggtctttctcagcagaagttgtttccaggtgtgctcaagtgccttcctctagcagagca

SEQ ID NO: 524798 - DNA, 120 bp, Artificial Sequence
  ENSG00000165702_17 (sequence is synthesized)
cagaaagctagaatacccccagggagacagggatgccaagagtagaccagagctgggacccacagacagaacctccacctgcctgctgcccactgagctgggacctggtcaccttggatt

SEQ ID NO: 524799 - DNA, 120 bp, Artificial Sequence
  ENSG00000165702_18 (sequence is synthesized)
ttagccggcctctttctggctataacaggcagagtcggagctgcctcccaccccagtcagaagcctggcaccccctctgcttcggccagatgtgctggctgactccgacttccgaccagc

SEQ ID NO: 524800 - DNA, 120 bp, Artificial Sequence
  ENSG00000165702_19 (sequence is synthesized)
actcagctggcctctggggattctagctccacaaccaggccgtgaggctggagaaactggcagttattgctgtcaaaagcctgttctctcaactgctgtcaataaaattaaagatacaga

SEQ ID NO: 524801 - DNA, 120 bp, Artificial Sequence
  ENSG00000165702_20 (sequence is synthesized)
acacccagagcgagtcatgcaaatttcagcggagacaccgaatccagctgtttacctcacagtccctccagcctacagggcgccgccatcttggacgtacagcacctcccccgtcgtgaa

SEQ ID NO: 524802 - DNA, 120 bp, Artificial Sequence
  ENSG00000165702_21 (sequence is synthesized)
agggccaaggccgacggcggcctccgccacgaaaaagagtccccctccggacctcccctccttctcgaaaggaaggatagacggccgcgctcggcagccccgccggaaggaagaggctct

SEQ ID NO: 524803 - DNA, 120 bp, Artificial Sequence
  ENSG00000165702_22 (sequence is synthesized)
tccactcataactgacgatgtgggttggacgagaaaaaaaacactattcagaccactaccttccatacaccaccctggagcctccctgtgacggggcttcctgaccggcctgtctgagca

SEQ ID NO: 524804 - DNA, 120 bp, Artificial Sequence
  ENSG00000165702_23 (sequence is synthesized)
tgaaagggctgagccctccataggcgggcgtgctgacaggatgcacgtggtggaggacatctgctgcatttggctgtgtgacatctccccctcgccttctgaacaggtctctgcagaggc

SEQ ID NO: 524805 - DNA, 120 bp, Artificial Sequence
  ENSG00000165702_24 (sequence is synthesized)
catgaaaaatgtgccattcagcttttctgctaattgttgaaggcccagctgccaccgctctggatctacaccccatttgcaatgaagccacacatctcgtgagccactcccagcccgtga

SEQ ID NO: 524806 - DNA, 120 bp, Artificial Sequence
  ENSG00000165702_25 (sequence is synthesized)
ctgggcacagcaggggccctaacgcaggatagctctgaggaggtgtgggacccttgacagtggaggacattggcccgagaactcttcatcgacctgatcaaacctctcttggaactgcaa

SEQ ID NO: 524807 - DNA, 120 bp, Artificial Sequence
  ENSG00000165702_26 (sequence is synthesized)
agcagtctgagactcttctcccagtttattatctccctattaactatctatagtgtagctcattggaaaagagtcattaattttgattatcaaattcactcctttttctttttgacttgc

SEQ ID NO: 524808 - DNA, 120 bp, Artificial Sequence
  ENSG00000165702_27 (sequence is synthesized)
actttgggtttttgagattttgtttagcaatgccgcttccaacccttagtcacacgcagtccccctctcctcacaggtttcagatccatatcatagctgaaggctctctctgctgtccag

SEQ ID NO: 524809 - DNA, 120 bp, Artificial Sequence
  ENSG00000165702_28 (sequence is synthesized)
ctcctcctctgtgtgggacatttatctgagttttaaaatgtccttcccaaaagttgactttagtattattttattatttatttttgagacagtgtctcactccagtccagactagagtac

SEQ ID NO: 524810 - DNA, 81 bp, Artificial Sequence
  ENSG00000165702_29 (sequence is synthesized)
tttttgagacagtgtctcactccagtccagactagagtacagtggcctgatcatagctcagtgcaacctggaacacctagg

SEQ ID NO: 524811 - DNA, 73 bp, Artificial Sequence
  ENSG00000165702_30 (sequence is synthesized)
gactccaggcacacaccaccacaccgggataattttttttattttttgtagaagtgggcatctcccacctccg

SEQ ID NO: 524812 - DNA, 120 bp, Artificial Sequence
  ENSG00000165702_31 (sequence is synthesized)
atgcctgacctgtagtgtattattgatttattattaggtattttatagtttttaatattattttgtgtgtttttttaaaattttcaacttggttgttactgaagtagagaaattctattg

SEQ ID NO: 524813 - DNA, 120 bp, Artificial Sequence
  ENSG00000165702_32 (sequence is synthesized)
tgcacctagttgaactctctaattttactagtttgtcattttatttttatttatgttgagttttctagggatattatcacatcatctgaaaataaaacagttttatctctctctcttttt

SEQ ID NO: 524814 - DNA, 120 bp, Artificial Sequence
  ENSG00000165702_33 (sequence is synthesized)
ctttttttctgagatgaactcttgctctgttgtccaggctggagtatagtggcatgatcatggcccactgcagtctcgaattcccaggctcaagtgaccctcccacctcaacctcccggg

SEQ ID NO: 524815 - DNA, 120 bp, Artificial Sequence
  ENSG00000165702_34 (sequence is synthesized)
ctcaagtgaccctcccacctcaacctcccgggtagctgagactatagacatgcctggttaattttcaaatattttatagaggtgaggtctccctatgctgcccaggctggtcttgaactc

SEQ ID NO: 524816 - DNA, 120 bp, Artificial Sequence
  ENSG00000165702_35 (sequence is synthesized)
ccaaagtactgggattacagtcatgagtcatcacactcggtctgtctcttctttttaaattagaactctcctcatttgtctttccctttttatagtgttggctgggacctccagtactat

SEQ ID NO: 524817 - DNA, 120 bp, Artificial Sequence
  ENSG00000165702_36 (sequence is synthesized)
gtcaaccagtagtggtgatattaggcatctattcattattcccaatcttcaaggaaatgcatataaattttctacagtaggtatgatgtttgctctaagacttttgtctatgacttttac

SEQ ID NO: 524818 - DNA, 120 bp, Artificial Sequence
  ENSG00000165702_37 (sequence is synthesized)
caaattaaagaatagatgtggcctttatccaatgctttttctgcattcattgaatagtcagaaatatccttattttagcctatcaatgtggtgaagtacacagatacatttttttgatgg

SEQ ID NO: 524819 - DNA, 120 bp, Artificial Sequence
  ENSG00000165702_38 (sequence is synthesized)
tcatttatccttgcactcctaggacaagcacaacttgatcatgatgtatttttaaaaatacttgttgattcgtgttttattaaggatttttgcatttattgtatgcatttatggttcttt

SEQ ID NO: 524820 - DNA, 120 bp, Artificial Sequence
  ENSG00000165702_39 (sequence is synthesized)
taattggaatgtatagactatttacatttaatgtaattatcagtgtagttgggcttaagtttaccttcttgatatttgctttctatttttccatctgttctttgttcctttcttttgtct

SEQ ID NO: 524821 - DNA, 120 bp, Artificial Sequence
  ENSG00000165702_40 (sequence is synthesized)
ttttcagcctccttttggattaatttagcattttttagaattccattttaccaccactattggcttctttgctgtacctcttcgtcttatgcttttagtgattgttctaggatttaaaat

SEQ ID NO: 524822 - DNA, 120 bp, Artificial Sequence
  ENSG00000165702_41 (sequence is synthesized)
atgaatctttaacttatcaccatctatattcagtggctactataccatttcagatataatttaagagctttacaacaatatacttctgaccaggcgtggtggctccatgcctgtaatccc

SEQ ID NO: 524823 - DNA, 120 bp, Artificial Sequence
  ENSG00000165702_42 (sequence is synthesized)
tagataggtggcctttattgcgaggctgagtatgatgggctccatccagcacgaacacaaagccctgaacagactcttccctttgcattcacaccagggaagggattcaagatttctgaa

SEQ ID NO: 524824 - DNA, 120 bp, Artificial Sequence
  ENSG00000165702_43 (sequence is synthesized)
ccttggctccatgacctcatcctgcaggaatgcattctgccatggaggagagcagccataagcagagctcatcaactgctcactttccagggggccataaccacattgtcactgtttcta

SEQ ID NO: 524825 - DNA, 120 bp, Artificial Sequence
  ENSG00000165702_44 (sequence is synthesized)
cactgtctggaagaagaatgggcattgttacctcaatatgggaccaccaggggcttgcaagaagaggctgaaggtgacaggcagagacagctctactaccatctcctgccacttaccagg

SEQ ID NO: 524826 - DNA, 120 bp, Artificial Sequence
  ENSG00000165702_45 (sequence is synthesized)
gctactaggagccttgctgaggaagccggcatgcccaaaccagcaaggagcagctgtggccacagagaggaaggagagctgcaggactagcccattgcccaggaggcctgcttaggtctc

SEQ ID NO: 524827 - DNA, 120 bp, Artificial Sequence
  ENSG00000165704_0 (sequence is synthesized)
agcttcaggcggctgcgacgagccctcaggcgaacctctcggctttcccgcgcggcgccgcctcttgctgcgcctccgcctcctcctctgctccgccaccggcttcctcctcctgagcag

SEQ ID NO: 524828 - DNA, 120 bp, Artificial Sequence
  ENSG00000165704_1 (sequence is synthesized)
tcagcccgcgcgccggccggctccgttatggcgacccgcagccctggcgtcgtgattagtgatgatgaaccaggttatgaccttgatttattttgcatacctaatcattatgctgaggat

SEQ ID NO: 524829 - DNA, 120 bp, Artificial Sequence
  ENSG00000165704_2 (sequence is synthesized)
ttggaaagggtgtttattcctcatggactaattatggacaggactgaacgtcttgctcgagatgtgatgaaggagatgggaggccatcacattgtagccctctgtgtgctcaaggggggc

SEQ ID NO: 524830 - DNA, 120 bp, Artificial Sequence
  ENSG00000165704_3 (sequence is synthesized)
tataaattctttgctgacctgctggattacatcaaagcactgaatagaaatagtgatagatccattcctatgactgtagattttatcagactgaagagctattgtaatgaccagtcaaca

SEQ ID NO: 524831 - DNA, 120 bp, Artificial Sequence
  ENSG00000165704_4 (sequence is synthesized)
ggggacataaaagtaattggtggagatgatctctcaactttaactggaaagaatgtcttgattgtggaagatataattgacactggcaaaacaatgcagactttgctttccttggtcagg

SEQ ID NO: 524832 - DNA, 120 bp, Artificial Sequence
  ENSG00000165704_5 (sequence is synthesized)
gactttgttggatttgaaattccagacaagtttgttgtaggatatgcccttgactataatgaatacttcagggatttgaatcatgtttgtgtcattagtgaaactggaaaagcaaaatac

SEQ ID NO: 524833 - DNA, 120 bp, Artificial Sequence
  ENSG00000165704_6 (sequence is synthesized)
aaagcctaagatgagagttcaagttgagtttggaaacatctggagtcctattgacatcgccagtaaaattatcaatgttctagttctgtggccatctgcttagtagagctttttgcatgt

SEQ ID NO: 524834 - DNA, 120 bp, Artificial Sequence
  ENSG00000165704_7 (sequence is synthesized)
atcttctaagaattttatctgttttgtactttagaaatgtcagttgctgcattcctaaactgtttatttgcactatgagcctatagactatcagttccctttgggcggattgttgtttaa

SEQ ID NO: 524835 - DNA, 120 bp, Artificial Sequence
  ENSG00000165704_8 (sequence is synthesized)
cttgtaaatgaaaaaattctcttaaaccacagcactattgagtgaaacattgaactcatatctgtaagaaataaagagaagatatattagttttttaattggtattttaatttttatata

SEQ ID NO: 524836 - DNA, 120 bp, Artificial Sequence
  ENSG00000165704_9 (sequence is synthesized)
tgcaggaaagaatagaagtgattgaatattgttaattataccaccgtgtgttagaaaagtaagaagcagtcaattttcacatcaaagacagcatctaagaagttttgttctgtcctggaa

SEQ ID NO: 524837 - DNA, 120 bp, Artificial Sequence
  ENSG00000165704_10 (sequence is synthesized)
ttattttagtagtgtttcagtaatgttgactgtattttccaacttgttcaaattattaccagtgaatctttgtcagcagttcccttttaaatgcaaatcaataaattcccaaaaatttaa

SEQ ID NO: 524838 - DNA, 80 bp, Artificial Sequence
  ENSG00000165704_11 (sequence is synthesized)
gggatccgcagtgcgggctcgggcggccgggcccagggaaccccgcaggcgggggcggccagtttcccgggttcggcttt

SEQ ID NO: 524839 - DNA, 120 bp, Artificial Sequence
  ENSG00000165714_0 (sequence is synthesized)
atctgcgtcccggaaggagcgagcttgcggagcgtgaaccagtgagtgaaagcggcgccgcccgccggccgcaggtgcggcaaagccagtgtcatctgccggttctcttagggctcccgg

SEQ ID NO: 524840 - DNA, 120 bp, Artificial Sequence
  ENSG00000165714_1 (sequence is synthesized)
aaagaaggagggctagccgcgtgcgttcgcgccgcgcctccttgcgtttctgttccccaaatagggcctctccttctcccgccgcccaggcccctgcgtgggctggacgcgtcagcccca

SEQ ID NO: 524841 - DNA, 120 bp, Artificial Sequence
  ENSG00000165714_2 (sequence is synthesized)
cacattagcctcgctgcggcgcccagactctgctttgcctccccgtcccggtccctggcccctgccctgtcgcccgccgccggagcggtgaccgcccggcccgccgttcttctgctgcca

SEQ ID NO: 524842 - DNA, 120 bp, Artificial Sequence
  ENSG00000165714_3 (sequence is synthesized)
ccgctgtcggcaccatgggcagtgagcagagctccgaggccgagagccgacccaacgatctgaactcctcagtgactccttcaccagccaagcatagagccaagatggatgatattgtgg

SEQ ID NO: 524843 - DNA, 120 bp, Artificial Sequence
  ENSG00000165714_4 (sequence is synthesized)
ttgtagctcagggctcccaggcctcacggaacgtcagcaacgatcccgatgtcatcaagttgcaagagattccaaccttccagccccttttgaaagggctattgagtggccagacttccc

SEQ ID NO: 524844 - DNA, 120 bp, Artificial Sequence
  ENSG00000165714_5 (sequence is synthesized)
caacaaatgccaaattggagaaactggactctcagcaggtgttgcagctctgcctccgatatcaagatcacctgcatcagtgtgcagaggccgttgcttttgaccagaatgctttggtta

SEQ ID NO: 524845 - DNA, 120 bp, Artificial Sequence
  ENSG00000165714_6 (sequence is synthesized)
aacgaatcaaagagatggatctgtctgtagaaactctgttcagcttcatgcaggagcgccagaaaagatacgccaagtatgccgagcagatccagaaagtgaacgagatgtccgccatcc

SEQ ID NO: 524846 - DNA, 120 bp, Artificial Sequence
  ENSG00000165714_7 (sequence is synthesized)
tccgccgcatacagatgggcatcgaccagactgtgcccctgctggacaggctcaacagcatgctgcccgagggcgagcggctggagcccttcagcatgaagcccgaccgcgagctcaggc

SEQ ID NO: 524847 - DNA, 120 bp, Artificial Sequence
  ENSG00000165714_8 (sequence is synthesized)
tgtagctgctgcccggcctgcctggggctgggagccccagacaccgacaccctgaggacgtgtggagctaaggtcatatcatctgaccaggtctggaggctggcgggaggctccctgaaa

SEQ ID NO: 524848 - DNA, 120 bp, Artificial Sequence
  ENSG00000165714_9 (sequence is synthesized)
gtgggtgcgaaggagtccggctggcatgaaaatctgactttgcccagctcttttccttgatgcagtttcccggtgtggaaggaacctaaccagttctcggtgataactgaagctggaacg

SEQ ID NO: 524849 - DNA, 86 bp, Artificial Sequence
  ENSG00000165714_10 (sequence is synthesized)
agagagtatatagtccagtccaggtaccggaataaaaatatggagacaaggggaaaatattttacgaagctctgtgttctcaacgc

SEQ ID NO: 524850 - DNA, 120 bp, Artificial Sequence
  ENSG00000165714_11 (sequence is synthesized)
caaggggaaaatattttacgaagctctgtgttctcaacgccctcatgaacttttcagtaggctgtctggtttatgtgtggtcaacttgaaaaactaattgaatctaggtctctgtattgt

SEQ ID NO: 524851 - DNA, 120 bp, Artificial Sequence
  ENSG00000165714_12 (sequence is synthesized)
tcctgtttctaccctgactgtttccgtcacaccaagcccttatctggggcgcgtcttcctgcccaggtggaacactggcattttgttgactgtcaggttaggtgtcccttagtcgtcatc

SEQ ID NO: 524852 - DNA, 120 bp, Artificial Sequence
  ENSG00000165714_13 (sequence is synthesized)
agaagctgaagccttcctttccacaccctcatcagattcatctccactgataaccggtttccttgatgcagacatagtttagctttctttgactgcagagatgtctcattccacagacat

SEQ ID NO: 524853 - DNA, 120 bp, Artificial Sequence
  ENSG00000165714_14 (sequence is synthesized)
ttcttgaacccatttgatgtgtccaatattgtgccagggatacaaatatggccgtatagcctcaggccttcatttctgaaaagaaaaaagctcaaaaagctgctgaatttctctgggagt

SEQ ID NO: 524854 - DNA, 120 bp, Artificial Sequence
  ENSG00000165714_15 (sequence is synthesized)
ttaggaaaggaagttatttgagtaacaacaaaagtgcttagtgtcgtactttacacatcataggtgttctaatggaagcaaggactggagaagcaaagagtggaatgtgaggagcagacc

SEQ ID NO: 524855 - DNA, 120 bp, Artificial Sequence
  ENSG00000165714_16 (sequence is synthesized)
taggcagacaccttgagactaaaagtcagagctgaagggagtcgctggggccaggacggcatgcaggcctgtaccctgttccctaagttcctgcaagcgtcgggaggtgtgttttcagat

SEQ ID NO: 524856 - DNA, 120 bp, Artificial Sequence
  ENSG00000165714_17 (sequence is synthesized)
accagaaagagccttcagtagattcacaagattaaaattgatgcgcttaatttaatgtatcttggctaaacttgatctgattctaatcttggtttgagacagggtcttgtgctgttgctc

SEQ ID NO: 524857 - DNA, 90 bp, Artificial Sequence
  ENSG00000165714_18 (sequence is synthesized)
agacagggtcttgtgctgttgctacactgactcctcaaactcccgggctccggggatcctcacgcctcagactcctgagtagctgggatt

SEQ ID NO: 524858 - DNA, 120 bp, Artificial Sequence
  ENSG00000165714_19 (sequence is synthesized)
ccagctaattaaaaaaaattaattaattttacattttcaaattcaaaagaataatacaatgaatattcatatttctttcacctagattgacaaaaagtggtatatttaagacatcaccat

SEQ ID NO: 524859 - DNA, 120 bp, Artificial Sequence
  ENSG00000165714_20 (sequence is synthesized)
gtctttcttctggagtatacagaacctggttctgaacacagggatatgtttgtagcttcgaggaatgaagggctgtttacagagctacaaaaatagcttaggtgccattatcctcactgc

SEQ ID NO: 524860 - DNA, 120 bp, Artificial Sequence
  ENSG00000165714_21 (sequence is synthesized)
acttaatacaggtgacacatgaaagcacagagtgggtggcagttcaagcctgcgagggccgagcctttccactgctgcagctgttagtggctggcacagggcaggatggcagacctagtg

SEQ ID NO: 524861 - DNA, 120 bp, Artificial Sequence
  ENSG00000165714_22 (sequence is synthesized)
cagcacaaacaaaccacgcagtcagccagctctccagccaactgtgtctacttctaaagtagaagttagacaaaacatggggttcacttagactggggtcctgagtaggtgataggctac

SEQ ID NO: 524862 - DNA, 120 bp, Artificial Sequence
  ENSG00000165714_23 (sequence is synthesized)
ttattactgggtggaagcggagaagtatggcagaagaacaataggcaaattcaatactcccggaaagaattctagttagtttaatattttgatggcatgttgtggtttctgcagtgtcgt

SEQ ID NO: 524863 - DNA, 120 bp, Artificial Sequence
  ENSG00000165714_24 (sequence is synthesized)
gaacttggctaaactgaactgtgttcccagaattcccttccttgtttgtttctctggtgagggttggccacgagagagatttgcatgaggtttggaagtggaagtagagcaacagccatg

SEQ ID NO: 524864 - DNA, 120 bp, Artificial Sequence
  ENSG00000165714_25 (sequence is synthesized)
tgtattcactggaagtggatgtaggtcaggccctgttccatcacgtgcacgttaccatggatctcctgcacttgtggtgtgggcagccgctgggcccacggctcctcccactcccgcaga

SEQ ID NO: 524865 - DNA, 120 bp, Artificial Sequence
  ENSG00000165714_26 (sequence is synthesized)
ccacaaggatgaaggtttggggatgagagaccagcacgggctctgatgagagacaggtgcaggtcccagcttgtggcttgcaggtctcagtcgtacttgctctccctcaccatcctttcc

SEQ ID NO: 524866 - DNA, 120 bp, Artificial Sequence
  ENSG00000165714_27 (sequence is synthesized)
aaccgcctggcctgtggtctggtgaagaagaaacagccgaaccgagactttcaccagcccctctaattgctcaaaccgctttcacaatcctctctttctacatcattcctagtggttctt

SEQ ID NO: 524867 - DNA, 120 bp, Artificial Sequence
  ENSG00000165714_28 (sequence is synthesized)
ttctgatggaacctctgactggtaacatggcattaccagtcctttccctctcatgttttgctatttcctgatggaacctgggagtctgagtgatttgtatttcaagaagcagttatgctg

SEQ ID NO: 524868 - DNA, 120 bp, Artificial Sequence
  ENSG00000165714_29 (sequence is synthesized)
gatctctttgttggttaataccccatgacctatctggccgttatgggatatttcagggataggagttgtgaaagagcccttggctggacgtttctagccttaatctttggcaagccattt

SEQ ID NO: 524869 - DNA, 120 bp, Artificial Sequence
  ENSG00000165714_30 (sequence is synthesized)
catttccctgagcctcagtttccgccttcctacagcgtgagcaggtctgggtgggctctcaagcccctttcagctctaagattccaagtctgtgattccgatacatcttgactacaatga

SEQ ID NO: 524870 - DNA, 120 bp, Artificial Sequence
  ENSG00000165714_31 (sequence is synthesized)
gcgtgtttaccttttgtctctgagcagtggccctgggtcttggtagtgactaaattccgagctcccaaggtgcagctgcttttcttccttttaattataaattagctgttcattggctgc

SEQ ID NO: 524871 - DNA, 120 bp, Artificial Sequence
  ENSG00000165714_32 (sequence is synthesized)
ttctttctagagcctgttttgcttatcttgcaatctgttcatttctgttgatgaacacagtcaaataggcctctatgtgcagtctcctggtttccctggtcaaagtggaaggttggtaga

SEQ ID NO: 524872 - DNA, 120 bp, Artificial Sequence
  ENSG00000165714_33 (sequence is synthesized)
aactggccttcatgtctttgtttccctcaaagttttattcttagtaacgctatatatggttttatagaccacacatatatagtttcctgtgtcttagatgataacatccttaaaatatga

SEQ ID NO: 524873 - DNA, 120 bp, Artificial Sequence
  ENSG00000165714_34 (sequence is synthesized)
aatatattttgaacctagatacctacccagtattctctgcacagagtaaacatttcattaaatgagtttcaaggactccataccctgatataggagtacattcaagaaatgagtttaggc

SEQ ID NO: 524874 - DNA, 83 bp, Artificial Sequence
  ENSG00000165714_35 (sequence is synthesized)
gaaaccccatctctactaaaaaaaatacagaaattacccgggcatggtggctggtgcctgtaatccccgctacttgggaggcc

SEQ ID NO: 524875 - DNA, 120 bp, Artificial Sequence
  ENSG00000165714_36 (sequence is synthesized)
ccattgcactctggcctgggtaacaagagtgaaactccgtttagaaatgagtttagtctgggagaatctgctttttgagtaaaaaagtttgattttatgtatgtgtgcgtctgtatatat

SEQ ID NO: 524876 - DNA, 120 bp, Artificial Sequence
  ENSG00000165714_37 (sequence is synthesized)
gtttctgtatcctgagtatttctttgcggcttcttcagttatgaaagaggttggtactgttacccttacgttataggtattacaaactcggttttacaaggttacataaactaatggccc

SEQ ID NO: 524877 - DNA, 120 bp, Artificial Sequence
  ENSG00000165714_38 (sequence is synthesized)
tggggcgaatgacgtatgccacttttgtgttgatttgtagaacttacttagctttggcatttcccctagtaattcccaaggcaaaaccaggaattgtcagagacgtgaccagacatgtat

SEQ ID NO: 524878 - DNA, 120 bp, Artificial Sequence
  ENSG00000165714_39 (sequence is synthesized)
taaaattctagtgcaattgggaaacttggtcttcctgatttgtttatacttcagccaaacccagatatatagtgctcagcagaaattattcaaaatgttgatactcaagattgaaggatg

SEQ ID NO: 524879 - DNA, 120 bp, Artificial Sequence
  ENSG00000165714_40 (sequence is synthesized)
gattagggagaaatgaaaacttttcttcttgtggactttttaggtatgaaatttaatcacgagagtagttttgcttttctttccctgacctttcgcttcattcctttgttaagaactata

SEQ ID NO: 524880 - DNA, 120 bp, Artificial Sequence
  ENSG00000165714_41 (sequence is synthesized)
tagtgcctctgaggaggtggcattattgttcactaacttaccataaatcaggggtctccaaaccccaggccacagactggtacccatctgtggcgtgtgaggaagtgtgctgcacagcag

SEQ ID NO: 524881 - DNA, 88 bp, Artificial Sequence
  ENSG00000165714_42 (sequence is synthesized)
tacccatctgtggcgtgtgaggaagtgtgctgcacagcaggaggtgagcggcggatgagcaggtgaagcttcacgtgttgttgttgtt

SEQ ID NO: 524882 - DNA, 67 bp, Artificial Sequence
  ENSG00000165714_43 (sequence is synthesized)
cgacttcgtgtgtatttatagctgctccccatcactcacatcactgcctgagctccacctcctgtca

SEQ ID NO: 524883 - DNA, 120 bp, Artificial Sequence
  ENSG00000165714_44 (sequence is synthesized)
cccatcactcacatcactgcctgagctccacctcctgtcagaacagacccagcattagactcccctaagagcgtgaaccctattgtgaactgcgcacgtgaaggatctaggttttgcgct

SEQ ID NO: 524884 - DNA, 120 bp, Artificial Sequence
  ENSG00000165714_45 (sequence is synthesized)
ctaatgcctgatgatctgagatggaacggtttcatccagaaaccatccccctgcttccctgtctgtagaaaaattgtcttctatgaaatgggtccctggtgccagaaaggttggggactg

SEQ ID NO: 524885 - DNA, 120 bp, Artificial Sequence
  ENSG00000165714_46 (sequence is synthesized)
ggttggggactgctgtcataaataacattgaatttcatgtgggttttttttttttgacacaccaggcatgtctcttccattcaaatgctatggctacagagggaaagggtagccagataa

SEQ ID NO: 524886 - DNA, 120 bp, Artificial Sequence
  ENSG00000165714_47 (sequence is synthesized)
ttatccacatgcttcaaaccaaaaagataaaaaagttggcaactagatctagttgcctgccaggatgaccagcgttatgctggtgtgtgcgtgtccatgcctccgggatttttccagggt

SEQ ID NO: 524887 - DNA, 120 bp, Artificial Sequence
  ENSG00000165714_48 (sequence is synthesized)
tatcaatgtcagtgtaagatctgatggaatttaccgttgactcaattttcttcaccaatcaaggctcattccttgaggcatgagttatgcgaaaagcttttctgcaccaagtactttcat

SEQ ID NO: 524888 - DNA, 120 bp, Artificial Sequence
  ENSG00000165714_49 (sequence is synthesized)
tctggtctttggaattgtcataattctgacagagaacacagaccattactgaatgctcttcaggttaccctatttgcctgtcacattgcttctaccggccacatcctgcatttcctgtgg

SEQ ID NO: 524889 - DNA, 120 bp, Artificial Sequence
  ENSG00000165714_50 (sequence is synthesized)
gacagcattttcaaacggattctagtgtttgagctggaaccaaaagaatgaaactgtttttacataagtgcatattgctgtctctgcaaataaagtacaacaatatgactgacttgtaaa

SEQ ID NO: 524890 - DNA, 80 bp, Artificial Sequence
  ENSG00000165716_0 (sequence is synthesized)
gggcccgcgcagccccggccggagcccaccatgcggcggctgcggcgcctggcgcacctggtgctcttctgccccttctc

SEQ ID NO: 524891 - DNA, 120 bp, Artificial Sequence
  ENSG00000165716_1 (sequence is synthesized)
cctggtgctcttctgccccttctccaagcgcctgcagggccggctcccaggcctcagggtccgctgcatcttcctggcctggctgggcgtctttgcaggcagctggctggtgtacgtgca

SEQ ID NO: 524892 - DNA, 120 bp, Artificial Sequence
  ENSG00000165716_2 (sequence is synthesized)
ctactcgtcctactcggagcgctgtcgcggccatgtctgccaggtggtcatttgtgaccagtaccgcaaggggatcatctcgggctccgtctgccaggacctgtgtgagctgcatatggt

SEQ ID NO: 524893 - DNA, 120 bp, Artificial Sequence
  ENSG00000165716_3 (sequence is synthesized)
ggagtggaggacctgcctctcggtggccccgggccagcaggtgtacagcgggctctggcgggacaaggatgtaaccatcaagtgtggcattgaggagaccctcgactccaaggcccggtc

SEQ ID NO: 524894 - DNA, 120 bp, Artificial Sequence
  ENSG00000165716_4 (sequence is synthesized)
ggatgcggccccccggcgggagctggtactgtttgacaagcccacccggggcacctccatcaaggaattccgggagatgaccctcagcttcctcaaggcgaacctgggagacctgccttc

SEQ ID NO: 524895 - DNA, 120 bp, Artificial Sequence
  ENSG00000165716_5 (sequence is synthesized)
cctgccggcgctggttggccaggtcctgctcatggctgacttcaacaaggacaaccgggtgtccctggcggaagccaagtccgtgtgggccctgctgcagcgtaacgagttcctgctgct

SEQ ID NO: 524896 - DNA, 120 bp, Artificial Sequence
  ENSG00000165716_6 (sequence is synthesized)
gctgtccctgcaggagaaggagcacgcctccagactgctgggctactgtggggacctctacctcaccgagggcgtgccgcatggcgcctggcacgcggccgcccttccacccctgttgcg

SEQ ID NO: 524897 - DNA, 120 bp, Artificial Sequence
  ENSG00000165716_7 (sequence is synthesized)
cccactgctgccgcctgccctgcagggtgctctccagcagtggctggggcctgcgtggccttggcgggccaagatcgccatcggcctgctggagttcgtggaggagctcttccacggctc

SEQ ID NO: 524898 - DNA, 120 bp, Artificial Sequence
  ENSG00000165716_8 (sequence is synthesized)
ttacgggactttctacatgtgtgagaccacactggccaacgtgggctacacagccacctacgacttcaagatggccgacctgcagcaggtggcacccgaggccaccgtgcgccgcttcct

SEQ ID NO: 524899 - DNA, 120 bp, Artificial Sequence
  ENSG00000165716_9 (sequence is synthesized)
gcagtgcaagggcgacctcatccagcccaacctggccaaggtgtgcgcactgctacggggctacctgctgcctggcgcgcccgccgacctccgcgaggagctgggcacacagctgcgcac

SEQ ID NO: 524900 - DNA, 120 bp, Artificial Sequence
  ENSG00000165716_10 (sequence is synthesized)
ctgtaccacgctgagcgggctggccagccaggtggaggcccatcactcgctggtgctcagccacctcaagactctgctctggaagaagatctccaacaccaagtactcttgatggggcag

SEQ ID NO: 524901 - DNA, 120 bp, Artificial Sequence
  ENSG00000165716_11 (sequence is synthesized)
tgaggggcctggccacccttcctggagctggccaggtgccagggtccaaccctccctcaaggaatcctgtcagaagatgtgaaatgcaactgtgttgcaaaatcactcccctaccgtcag

SEQ ID NO: 524902 - DNA, 120 bp, Artificial Sequence
  ENSG00000165716_12 (sequence is synthesized)
ggctctggattccagcaccacagacatgagaccccagctcggagcaaaggcggacatggacatcccggcaggagagtcctccaagggggtttgttactctgaagaacgtaatgtcaataa

SEQ ID NO: 524903 - DNA, 120 bp, Artificial Sequence
  ENSG00000165716_13 (sequence is synthesized)
acagcttttatgtaatgcccagggctgagcaccctgagcccccatcgatgctgtgtgtgggacccttcgccccgctgtggatccacccagcccaggcactcaggctggggttgagcccct

SEQ ID NO: 524904 - DNA, 120 bp, Artificial Sequence
  ENSG00000165716_14 (sequence is synthesized)
gaatccttcctggcgaggcagccctcaggtgttagtccaaggtgaggtctattgcagagctgcctgcccttcaacccacacacacctctgaagccgccagggcagttccccaaacacagc

SEQ ID NO: 524905 - DNA, 120 bp, Artificial Sequence
  ENSG00000165716_15 (sequence is synthesized)
ggcttctgaaacagtcaatgaccagtaccccccaaacctgggctgtgcacaacagaccaagaaaaaggtgttccagtaagaaaacagatatatgcggtattttaaaaactgattttacaa

SEQ ID NO: 524906 - DNA, 120 bp, Artificial Sequence
  ENSG00000165716_16 (sequence is synthesized)
aatccagccatgagatgtacaactcattccctaggaaacagcccaggaatggccatcttctccagccccgtacgctctccccagtagcccagggcacccagcaaccatcccctaggagaa

SEQ ID NO: 524907 - DNA, 120 bp, Artificial Sequence
  ENSG00000165716_17 (sequence is synthesized)
caggcaaggaccctcgtgggaagatcccaccacagcaacacctttcttcagggcgggctctgctccgcaatgtgtgagtcaagacaatccattccattcaagaccaatttactctcaaat

SEQ ID NO: 524908 - DNA, 120 bp, Artificial Sequence
  ENSG00000165716_18 (sequence is synthesized)
tttgccaacacagaaatattatccttaaagaaatgtgcatttaaatcttttaattcacttcatcctgtattttaaaataaatgttttccatatagattttccccttgggggggaaaagaa

SEQ ID NO: 524909 - DNA, 120 bp, Artificial Sequence
  ENSG00000165716_19 (sequence is synthesized)
ggccgcagcctgtcctcctgcctcagcctggggaaggctgggccgggccaaagagggaggccaagtccttgggacaggaggagacccacacctgagattagtggaaacccagccagaagc

SEQ ID NO: 524910 - DNA, 120 bp, Artificial Sequence
  ENSG00000165716_20 (sequence is synthesized)
tgccatgcaggtgtggctctgggcatcaggatctgtcgtgagagcccccatgagtgcccagtgcagaatggctggcagcccgccctgacggggagcagaggggctggacgcggtgccctt

SEQ ID NO: 524911 - DNA, 120 bp, Artificial Sequence
  ENSG00000165716_21 (sequence is synthesized)
cacgggatgacacccagctgtttgccctgtgtccagggggttgcttctctgacagaggccctatggctcgtgtctgactcctgtccaggttctgccagcctgaccatccatcgctctggc

SEQ ID NO: 524912 - DNA, 120 bp, Artificial Sequence
  ENSG00000165716_22 (sequence is synthesized)
accaagagcccacccttttgttcttcctggcgtcccagggaaagccctgcctgggtggggcagctcctggcccttcagatggaagacgcagtccagtcagcaccatcataggaaacaagt

SEQ ID NO: 524913 - DNA, 120 bp, Artificial Sequence
  ENSG00000165716_23 (sequence is synthesized)
tcagaaatgtctcacttactattccgggcagggagggcgccatgagtcagggggtgcatcctccctcctggcgtcacccgaggcaggaatgaagagtcaggcagagagcgcgcgtgtggc

SEQ ID NO: 524914 - DNA, 120 bp, Artificial Sequence
  ENSG00000165716_24 (sequence is synthesized)
agctggtggtgtagatattagggactagtgtgaattctagttcaccggccaatgcctggatggtccagagctgggtcggctgggcggagagctgcctccaggttcctgcctctggccctg

SEQ ID NO: 524915 - DNA, 120 bp, Artificial Sequence
  ENSG00000165716_25 (sequence is synthesized)
gcgtggggtcgacactgggtgtggtgtgtgtctcatgtccaggcagtggcctttgctgtgccgtcctgttacaggagccaggatggtggggacgggaccggaccggagggttggcggggc

SEQ ID NO: 524916 - DNA, 120 bp, Artificial Sequence
  ENSG00000165716_26 (sequence is synthesized)
tgcccctgcagccgacagccccatcctgcagccaccaatggcatgacccagggccccggcactgcctgtgtgaggggctggcagctttccaactgcagcaagtggaggcccctgccagct

SEQ ID NO: 524917 - DNA, 120 bp, Artificial Sequence
  ENSG00000165716_27 (sequence is synthesized)
tcgggcctgtgggcaggggctcagtggggcaggggtgtggctgccccgcccggcacgcctgcacctgtctcctcagtgtgaccagtaccgcaaggggatcatctcgggctccgtctgcca

SEQ ID NO: 524918 - DNA, 120 bp, Artificial Sequence
  ENSG00000165724_0 (sequence is synthesized)
ccgtcctgtcccggcgcgccgcggcctcgccccggcccccgctcggcgcctcccgagggagcggcgctgccggccgagagcgcaggcccggccatgaccgacttcaaattgggtatcgtg

SEQ ID NO: 524919 - DNA, 120 bp, Artificial Sequence
  ENSG00000165724_1 (sequence is synthesized)
ggcccggccatgaccgacttcaaattgggtatcgtgcggctcggccgggtggccgggaagaccaaatacacgctgatcgatgagcaggacatcccgctggtggagagctactcctttgag

SEQ ID NO: 524920 - DNA, 120 bp, Artificial Sequence
  ENSG00000165724_2 (sequence is synthesized)
gcccgaatggaagtggatgcagatggaaatggtgctaagatatttgcctatgcctttgacaagaaccgaggaaggggctctgggagactccttcatgagctgctgtgggagcggcaccgg

SEQ ID NO: 524921 - DNA, 120 bp, Artificial Sequence
  ENSG00000165724_3 (sequence is synthesized)
gggggcgtggccccgggcttccaggtggtgcacctcaacgctgtgaccgtggacaatcgcctggacaacctgcaactggtgccgtggggctggcggcccaaggctgaagagacctccagc

SEQ ID NO: 524922 - DNA, 120 bp, Artificial Sequence
  ENSG00000165724_4 (sequence is synthesized)
gtcctaaatgtgacccggtattataatgccaacggggatgtagtggaagaggaggagaactcttgcacctactatgagtgccactaccctccctgcacagtgattgagaagcagctccgg

SEQ ID NO: 524923 - DNA, 120 bp, Artificial Sequence
  ENSG00000165724_5 (sequence is synthesized)
gagttcaacatctgtgggcgctgccaggtggcccggtactgcggctcccagtgccagcagaaggactggcctgcccacaagaagcactgtcgggagaggaagcgtcccttccagcatgag

SEQ ID NO: 524924 - DNA, 120 bp, Artificial Sequence
  ENSG00000165724_6 (sequence is synthesized)
cttgagccagagcgatgacgggcaggggagccacacatactcacagcccccgggctctaccctgggcacagcagagacagactggtggttgaacctggaggtgccaaaaaagccagctgc

SEQ ID NO: 524925 - DNA, 120 bp, Artificial Sequence
  ENSG00000165724_7 (sequence is synthesized)
gggcccaggacagctgccgtgagactcccgatgtcacaggcagtctgtgtggttacagcgcccctcagtgttcatctccagcagagacaacggaggaggctcccaccaggacggttctca

SEQ ID NO: 524926 - DNA, 120 bp, Artificial Sequence
  ENSG00000165724_8 (sequence is synthesized)
ttatttatatgttaatatgtttgtaaactcatgtacagttttttttgggggggaggcaatgggaagggtagaaattacaaatagaatcatttgctgtaatccttaaatggcaaacggtca

SEQ ID NO: 524927 - DNA, 120 bp, Artificial Sequence
  ENSG00000165724_9 (sequence is synthesized)
ggccacgtgactaaaaactgtcctgttgtcgaagcttctcccctgggccgccgggagccccgtggagcgcggcctgcacgggagttgtgtccacaaaggcaaagtaaaggggtggaatca

SEQ ID NO: 524928 - DNA, 120 bp, Artificial Sequence
  ENSG00000165724_10 (sequence is synthesized)
caaaaccttctggctcttctgcctcagccccggcccctccctcagctcagtgaaacagtctttgcctaggtttattggtgcgttgaatgttcagtgccactgttggggttagccctgcga

SEQ ID NO: 524929 - DNA, 120 bp, Artificial Sequence
  ENSG00000165724_11 (sequence is synthesized)
ggatgaagcctgataccagctcctctggcgcagactaaagtgggcagctggcttttaacctgtctgcctgtgttttgtcgtagactgcaccaccccaaacggtggaatgaggcccccatg

SEQ ID NO: 524930 - DNA, 120 bp, Artificial Sequence
  ENSG00000165724_12 (sequence is synthesized)
tgctgagctgtcttggtctgaagaggcctgtagttactttccacttcacaggaaaatgcaacaggctcctgcctgttctggttataaggttactgcacctcacgcagatcccaaatgtaa

SEQ ID NO: 524931 - DNA, 120 bp, Artificial Sequence
  ENSG00000165724_13 (sequence is synthesized)
ccttccctgaatctcgcagttatttttgtgtccttcaccactaacccaaaggaacgaatgatttgtatgttgcacttcaaacaccaagtggactttctgctgggagcttgcccaggaccg

SEQ ID NO: 524932 - DNA, 120 bp, Artificial Sequence
  ENSG00000165724_14 (sequence is synthesized)
gcagcctctggagggacggtggttgctccccttgctgggttttgccgagcccccccggtgtgcatggtagggaccactcagatggggagctgtctcgaggccatctgcttaggtggtttt

SEQ ID NO: 524933 - DNA, 120 bp, Artificial Sequence
  ENSG00000165724_15 (sequence is synthesized)
gcgttccagctttggctgtctgtgctctgaagtccaggggccgggtcctccctgtgtccctgtcctgtttgggccacagatcaggtgcttgggtttctctcagcagcttccgcctgaggt

SEQ ID NO: 524934 - DNA, 120 bp, Artificial Sequence
  ENSG00000165724_16 (sequence is synthesized)
accctcatccaaaggaccaggggcccgatcagatcacatggctgacatttcttcctggaaggactttggtacctgaccagaaatgtctgtgagggtgggaggcagcgatgcagggttaga

SEQ ID NO: 524935 - DNA, 120 bp, Artificial Sequence
  ENSG00000165724_17 (sequence is synthesized)
tgcagggtttgctgtctgtttctagggagcggcaccgggggggcgtggccccgggcttccaggtggtgcacctcaacgctgtgaccgtggacaatcgcctggacaacctgcaactggtgc

SEQ ID NO: 524936 - DNA, 80 bp, Artificial Sequence
  ENSG00000165730_0 (sequence is synthesized)
gcagtcggccgatcctcccgccgagcgagcggcgtcgtagccgccgcgctcgccgaggccctgcgttgcgggctcccggc

SEQ ID NO: 524937 - DNA, 120 bp, Artificial Sequence
  ENSG00000165730_1 (sequence is synthesized)
ggctcgctggcgctagtgctgtgccggctggaggcgcagaaggcggcgggggccgcggaggagcctggtgggcgcgcggtgttccgcgctttccgtcgcgccaacgcgcgctgcttctgg

SEQ ID NO: 524938 - DNA, 80 bp, Artificial Sequence
  ENSG00000165730_2 (sequence is synthesized)
ttccagggctggctgcggcggggggtgctgctggtgcgcgcgccccccgcctgcctgcaggtgctgcgcgatgcctggcg

SEQ ID NO: 524939 - DNA, 120 bp, Artificial Sequence
  ENSG00000165730_3 (sequence is synthesized)
cgggccctgcggccgccgcgcggcttccgcatcagggcggtgggtgatgtctttccagtgcaaatgaatccaataactcaatctcagttcgtacctttgggtgaagttctttgctgtgct

SEQ ID NO: 524940 - DNA, 120 bp, Artificial Sequence
  ENSG00000165730_4 (sequence is synthesized)
atatctgatatgaatacagctcagattgtagtaacgcaggaatcacttttggagcgtttgatgaaacattacccaggcattgcaattccatcggaagatattctttataccactctggga

SEQ ID NO: 524941 - DNA, 120 bp, Artificial Sequence
  ENSG00000165730_5 (sequence is synthesized)
acgctgattaaagaaaggaagatttatcacactggagaaggatacttcatagttactcctcagacttacttcattacaaatacaaccacccaggaaaataagagaatgctgccatcagat

SEQ ID NO: 524942 - DNA, 120 bp, Artificial Sequence
  ENSG00000165730_6 (sequence is synthesized)
gaaagtcgcctgatgccagcttccatgacatatctggtgagcatggagagctgtgcagagtcagcccaagagaatgctgcccccatatcccactgtcagtcttgccagtgtttccgggac

SEQ ID NO: 524943 - DNA, 120 bp, Artificial Sequence
  ENSG00000165730_7 (sequence is synthesized)
atgcacactcaggatgttcaggaagcaccagttgctgcagaagtgactaggaagagtcacagaggtcttggggaatccgtatcttgggtacagaatggggcagtttcagtgtctgcggag

SEQ ID NO: 524944 - DNA, 120 bp, Artificial Sequence
  ENSG00000165730_8 (sequence is synthesized)
caccacatttgtgagagcaccaaacctttaccatacacaagagataaagaaaaaggcaagaagtttggttttagtctcttatggcgcagcttatctagaaaggagaagcccaaaacagaa

SEQ ID NO: 524945 - DNA, 120 bp, Artificial Sequence
  ENSG00000165730_9 (sequence is synthesized)
cacagcagtttctctgctcagttcccacctgaagaatggcccgtccgagatgaagatgacttggacaatatccctcgagatgttgaacatgagataatcaaacgaattaaccccattttg

SEQ ID NO: 524946 - DNA, 120 bp, Artificial Sequence
  ENSG00000165730_10 (sequence is synthesized)
actgttgacaatttaatcaaacacactgtcctaatgcaaaaatacgaagaacagaaaaaatataatagccagggcacttccactgacatgctgacaatcgggcataagtatccttcaaaa

SEQ ID NO: 524947 - DNA, 120 bp, Artificial Sequence
  ENSG00000165730_11 (sequence is synthesized)
gagggggttaagaaaaggcagggtctgtctgcaaaacctcaagggcagggccattctcgaagggatagacacaaagccaggaatcagggaagtgagtttcagccaggaagcattagactg

SEQ ID NO: 524948 - DNA, 120 bp, Artificial Sequence
  ENSG00000165730_12 (sequence is synthesized)
gagaaacaccccaagctccctgctacacagcccatccccagaattaaaagcccaaatgaaatggtaggtcagaaaccacttggtgagattacaacagtgctaggttcccatttgatttac

SEQ ID NO: 524949 - DNA, 120 bp, Artificial Sequence
  ENSG00000165730_13 (sequence is synthesized)
aaaaagcgaatcagtaatcctttccagggtttgtctcaccgaggaagcacaatatccaaagggcacaaaattcagaagacgagtgatctgaaacccagccagactggaccaaaggaaaag

SEQ ID NO: 524950 - DNA, 120 bp, Artificial Sequence
  ENSG00000165730_14 (sequence is synthesized)
tcctcaagaatctttgatggtaaagccaaagagccatatgctgaacaacctaatgataaaatggaagcagaatccatttacataaatgaccctactgtcaaacccatcaatgatgacttc

SEQ ID NO: 524951 - DNA, 120 bp, Artificial Sequence
  ENSG00000165730_15 (sequence is synthesized)
agaggtcacctcttcagtcaccctcaacagagcatgttgcaaaatgatggtaaatgctgtccctttatggaaagcatgttgagatatgaagtgtatggtggagaaaatgaggtaattcct

SEQ ID NO: 524952 - DNA, 120 bp, Artificial Sequence
  ENSG00000165730_16 (sequence is synthesized)
gaagtcttgaggaaaagtcattcccactttgacaaattaggggagaccaaacagactccgcatagtctgccatcacgaggtgcctccttttcagaccgaacaccctctgcttgtagatta

SEQ ID NO: 524953 - DNA, 120 bp, Artificial Sequence
  ENSG00000165730_17 (sequence is synthesized)
gtggataacacaatacaccagtttcaaaatcttggccttttggattacccagttggcgtgaaccctttaagacaagctgcaagacaagacaaagactcagaagaattattgagaaaagga

SEQ ID NO: 524954 - DNA, 120 bp, Artificial Sequence
  ENSG00000165730_18 (sequence is synthesized)
tttgtccaggatgcagagactacaagcctagaaaatgaacagctttctaacgatgaccaggccttgtatcagaatgaagtggaagatgatgatggtgcctgtagttcattatatctagag

SEQ ID NO: 524955 - DNA, 120 bp, Artificial Sequence
  ENSG00000165730_19 (sequence is synthesized)
gaggatgacatttctgagaatgacgacttacgtcaaatgctgcctggccacagtcagtattccttcacaggtggaagccagggaaatcatttaggaaaacaaaaagtgattgagagatct

SEQ ID NO: 524956 - DNA, 120 bp, Artificial Sequence
  ENSG00000165730_20 (sequence is synthesized)
ctgaccgagtacaacagcacaatggagagggttgagtctcaggtgcttaaaagaaatgaatgctacaaacccactgggctgcatgctaccccaggtgaaagccaagaacctaacctctct

SEQ ID NO: 524957 - DNA, 120 bp, Artificial Sequence
  ENSG00000165730_21 (sequence is synthesized)
gctgaaagttgtggcctaaattcaggggcccagtttggttttaactacgaagaagaacccagtgttgctaaatgtgtacaggcctcagcacctgctgatgaaagaatctttgattactat

SEQ ID NO: 524958 - DNA, 120 bp, Artificial Sequence
  ENSG00000165730_22 (sequence is synthesized)
agcgcaagaaaagccagttttgaagctgaagtcatacaagacactattggtgacacaggaaagaagccagctagctggagtcagagtcctcagaatcaggaaatgagaaaacatttccca

SEQ ID NO: 524959 - DNA, 120 bp, Artificial Sequence
  ENSG00000165730_23 (sequence is synthesized)
caaaagttccaacttttcaacacttcacatatgccagtgttggctcaggatgtccaatatgaacacagtcacttggaagggacagaaaatcacagcatggcaggagatagtggaatagat

SEQ ID NO: 524960 - DNA, 120 bp, Artificial Sequence
  ENSG00000165730_24 (sequence is synthesized)
tctccacggacacagagtctgggatctaataattcagtcattttggatggactaaaaagaagacagaattttctgcaaaatgtcgaaggcacaaagagcagtcaaccactcacatctaat

SEQ ID NO: 524961 - DNA, 120 bp, Artificial Sequence
  ENSG00000165730_25 (sequence is synthesized)
tccttactaccgctaactccagtcataaacgtttaattttcttttggaaacctacttttttctttataaaaaggtagagcattattacagaatctttcaatcatgtaagaattgagtata

SEQ ID NO: 524962 - DNA, 120 bp, Artificial Sequence
  ENSG00000165730_26 (sequence is synthesized)
taagaattgtctaaaggcaagcatatctatactattaaccacattacacattttgttctaattactggctttttttcctcttttggtgtcttaaggctttttgaagcttattttactgtg

SEQ ID NO: 524963 - DNA, 120 bp, Artificial Sequence
  ENSG00000165730_27 (sequence is synthesized)
agtttattgggagtatatagattattttcgattaaaaagtggaattattggtccccttccaattgtaattatcttgaatttttatacattagtttctcaaatatatagaatgccaattta

SEQ ID NO: 524964 - DNA, 120 bp, Artificial Sequence
  ENSG00000165730_28 (sequence is synthesized)
tctccctgttttaaaggaatgtattaaatgaatcaagctcattatgaaaccagtaaaattttctcctatgaaactcatcatataacacagacattaaagatgggaatatgtgcgattaaa

SEQ ID NO: 524965 - DNA, 80 bp, Artificial Sequence
  ENSG00000165731_0 (sequence is synthesized)
agtcccgcgaccgaagcagggcgcgcagcagcgctgagtgccccggaacgtgcgtcgcgcccccagtgtccgtcgcgtcc

SEQ ID NO: 524966 - DNA, 120 bp, Artificial Sequence
  ENSG00000165731_1 (sequence is synthesized)
cgcacccgccatccagacccgccggccctagccgcagtccctccagccgtggccccagcgcgcacgggcgatggcgaaggcgacgtccggtgccgcggggctgcgtctgctgttgctgct

SEQ ID NO: 524967 - DNA, 120 bp, Artificial Sequence
  ENSG00000165731_2 (sequence is synthesized)
gctgctgccgctgctaggcaaagtggcattgggcctctacttctcgagggatgcttactgggagaagctgtatgtggaccaggcagccggcacgcccttgctgtacgtccatgccctgcg

SEQ ID NO: 524968 - DNA, 120 bp, Artificial Sequence
  ENSG00000165731_3 (sequence is synthesized)
ggacgcccctgaggaggtgcccagcttccgcctgggccagcatctctacggcacgtaccgcacacggctgcatgagaacaactggatctgcatccaggaggacaccggcctcctctacct

SEQ ID NO: 524969 - DNA, 120 bp, Artificial Sequence
  ENSG00000165731_4 (sequence is synthesized)
taaccggagcctggaccatagctcctgggagaagctcagtgtccgcaaccgcggctttcccctgctcaccgtctacctcaaggtcttcctgtcacccacatcccttcgtgagggcgagtg

SEQ ID NO: 524970 - DNA, 120 bp, Artificial Sequence
  ENSG00000165731_5 (sequence is synthesized)
ccagtggccaggctgtgcccgcgtatacttctccttcttcaacacctcctttccagcctgcagctccctcaagccccgggagctctgcttcccagagacaaggccctccttccgcattcg

SEQ ID NO: 524971 - DNA, 120 bp, Artificial Sequence
  ENSG00000165731_6 (sequence is synthesized)
ggagaaccgacccccaggcaccttccaccagttccgcctgctgcctgtgcagttcttgtgccccaacatcagcgtggcctacaggctcctggagggtgagggtctgcccttccgctgcgc

SEQ ID NO: 524972 - DNA, 120 bp, Artificial Sequence
  ENSG00000165731_7 (sequence is synthesized)
cccggacagcctggaggtgagcacgcgctgggccctggaccgcgagcagcgggagaagtacgagctggtggccgtgtgcaccgtgcacgccggcgcgcgcgaggaggtggtgatggtgcc

SEQ ID NO: 524973 - DNA, 120 bp, Artificial Sequence
  ENSG00000165731_8 (sequence is synthesized)
cttcccggtgaccgtgtacgacgaggacgactcggcgcccaccttccccgcgggcgtcgacaccgccagcgccgtggtggagttcaagcggaaggaggacaccgtggtggccacgctgcg

SEQ ID NO: 524974 - DNA, 120 bp, Artificial Sequence
  ENSG00000165731_9 (sequence is synthesized)
tgtcttcgatgcagacgtggtacctgcatcaggggagctggtgaggcggtacacaagcacgctgctccccggggacacctgggcccagcagaccttccgggtggaacactggcccaacga

SEQ ID NO: 524975 - DNA, 120 bp, Artificial Sequence
  ENSG00000165731_10 (sequence is synthesized)
gacctcggtccaggccaacggcagcttcgtgcgggcgaccgtacatgactataggctggttctcaaccggaacctctccatctcggagaaccgcaccatgcagctggcggtgctggtcaa

SEQ ID NO: 524976 - DNA, 120 bp, Artificial Sequence
  ENSG00000165731_11 (sequence is synthesized)
tgactcagacttccagggcccaggagcgggcgtcctcttgctccacttcaacgtgtcggtgctgccggtcagcctgcacctgcccagtacctactccctctccgtgagcaggagggctcg

SEQ ID NO: 524977 - DNA, 120 bp, Artificial Sequence
  ENSG00000165731_12 (sequence is synthesized)
ccgatttgcccagatcgggaaagtctgtgtggaaaactgccaggcattcagtggcatcaacgtccagtacaagctgcattcctctggtgccaactgcagcacgctaggggtggtcacctc

SEQ ID NO: 524978 - DNA, 120 bp, Artificial Sequence
  ENSG00000165731_13 (sequence is synthesized)
agccgaggacacctcggggatcctgtttgtgaatgacaccaaggccctgcggcggcccaagtgtgccgaacttcactacatggtggtggccaccgaccagcagacctctaggcaggccca

SEQ ID NO: 524979 - DNA, 120 bp, Artificial Sequence
  ENSG00000165731_14 (sequence is synthesized)
ggcccagctgcttgtaacagtggaggggtcatatgtggccgaggaggcgggctgccccctgtcctgtgcagtcagcaagagacggctggagtgtgaggagtgtggcggcctgggctcccc

SEQ ID NO: 524980 - DNA, 120 bp, Artificial Sequence
  ENSG00000165731_15 (sequence is synthesized)
aacaggcaggtgtgagtggaggcaaggagatggcaaagggatcaccaggaacttctccacctgctctcccagcaccaagacctgccccgacggccactgcgatgttgtggagacccaaga

SEQ ID NO: 524981 - DNA, 120 bp, Artificial Sequence
  ENSG00000165731_16 (sequence is synthesized)
catcaacatttgccctcaggactgcctccggggcagcattgttgggggacacgagcctggggagccccgggggattaaagctggctatggcacctgcaactgcttccctgaggaggagaa

SEQ ID NO: 524982 - DNA, 120 bp, Artificial Sequence
  ENSG00000165731_17 (sequence is synthesized)
gtgcttctgcgagcccgaagacatccaggatccactgtgcgacgagctgtgccgcacggtgatcgcagccgctgtcctcttctccttcatcgtctcggtgctgctgtctgccttctgcat

SEQ ID NO: 524983 - DNA, 120 bp, Artificial Sequence
  ENSG00000165731_18 (sequence is synthesized)
ccactgctaccacaagtttgcccacaagccacccatctcctcagctgagatgaccttccggaggcccgcccaggccttcccggtcagctactcctcttccggtgcccgccggccctcgct

SEQ ID NO: 524984 - DNA, 120 bp, Artificial Sequence
  ENSG00000165731_19 (sequence is synthesized)
ggactccatggagaaccaggtctccgtggatgccttcaagatcctggaggatccaaagtgggaattccctcggaagaacttggttcttggaaaaactctaggagaaggcgaatttggaaa

SEQ ID NO: 524985 - DNA, 120 bp, Artificial Sequence
  ENSG00000165731_20 (sequence is synthesized)
agtggtcaaggcaacggccttccatctgaaaggcagagcagggtacaccacggtggccgtgaagatgctgaaagagaacgcctccccgagtgagctgcgagacctgctgtcagagttcaa

SEQ ID NO: 524986 - DNA, 120 bp, Artificial Sequence
  ENSG00000165731_21 (sequence is synthesized)
cgtcctgaagcaggtcaaccacccacatgtcatcaaattgtatggggcctgcagccaggatggcccgctcctcctcatcgtggagtacgccaaatacggctccctgcggggcttcctccg

SEQ ID NO: 524987 - DNA, 120 bp, Artificial Sequence
  ENSG00000165731_22 (sequence is synthesized)
cgagagccgcaaagtggggcctggctacctgggcagtggaggcagccgcaactccagctccctggaccacccggatgagcgggccctcaccatgggcgacctcatctcatttgcctggca

SEQ ID NO: 524988 - DNA, 120 bp, Artificial Sequence
  ENSG00000165731_23 (sequence is synthesized)
atttcggatttcggcttgtcccgagatgtttatgaagaggattcctacgtgaagaggagccagggtcggattccagttaaatggatggcaattgaatccctttttgatcatatctacacc

SEQ ID NO: 524989 - DNA, 120 bp, Artificial Sequence
  ENSG00000165731_24 (sequence is synthesized)
acgcaaagtgatgtatggtcttttggtgtcctgctgtgggagatcgtgaccctagggggaaacccctatcctgggattcctcctgagcggctcttcaaccttctgaagaccggccaccgg

SEQ ID NO: 524990 - DNA, 120 bp, Artificial Sequence
  ENSG00000165731_25 (sequence is synthesized)
atggagaggccagacaactgcagcgaggagatgtaccgcctgatgctgcaatgctggaagcaggagccggacaaaaggccggtgtttgcggacatcagcaaagacctggagaagatgatg

SEQ ID NO: 524991 - DNA, 120 bp, Artificial Sequence
  ENSG00000165731_26 (sequence is synthesized)
gttaagaggagagactacttggaccttgcggcgtccactccatctgactccctgatttatgacgacggcctctcagaggaggagacaccgctggtggactgtaataatgcccccctccct

SEQ ID NO: 524992 - DNA, 120 bp, Artificial Sequence
  ENSG00000165731_27 (sequence is synthesized)
cgagccctcccttccacatggattgaaaacaaactctatggcatgtcagacccgaactggcctggagagagtcctgtaccactcacgagagctgatggcactaacactgggtttccaaga

SEQ ID NO: 524993 - DNA, 120 bp, Artificial Sequence
  ENSG00000165731_28 (sequence is synthesized)
tatccaaatgatagtgtatatgctaactggatgctttcaccctcagcggcaaaattaatggacacgtttgatagttaacatttctttgtgaaaggtaatggactcacaaggggaagaaac

SEQ ID NO: 524994 - DNA, 120 bp, Artificial Sequence
  ENSG00000165731_29 (sequence is synthesized)
atgctgagaatggaaagtctaccggccctttctttgtgaacgtcacattggccgagccgtgttcagttcccaggtggcagactcgtttttggtagtttgttttaacttccaaggtggttt

SEQ ID NO: 524995 - DNA, 120 bp, Artificial Sequence
  ENSG00000165731_30 (sequence is synthesized)
tacttctgatagccggtgattttccctcctagcagacatgccacaccgggtaagagctctgagtcttagtggttaagcattcctttctcttcagtgcccagcagcacccagtgttggtct

SEQ ID NO: 524996 - DNA, 120 bp, Artificial Sequence
  ENSG00000165731_31 (sequence is synthesized)
gtgtccatcagtgaccaccaacattctgtgttcacatgtgtgggtccaacacttactacctggtgtatgaaattggacctgaactgttggatttttctagttgccgccaaacaaggcaaa

SEQ ID NO: 524997 - DNA, 120 bp, Artificial Sequence
  ENSG00000165731_32 (sequence is synthesized)
aaaatttaaacatgaagcacacacacaaaaaaggcagtaggaaaaatgctggccctgatgacctgtccttattcagaatgagagactgcggggggggcctgggggtagtgtcaatgcccc

SEQ ID NO: 524998 - DNA, 120 bp, Artificial Sequence
  ENSG00000165731_33 (sequence is synthesized)
tccagggctggaggggaagaggggccccgaggatgggcctgggctcagcattcgagatcttgagaatgattttttttaaatcatgcaacctttccttaggaagacatttggttttcatca

SEQ ID NO: 524999 - DNA, 120 bp, Artificial Sequence
  ENSG00000165731_34 (sequence is synthesized)
tgattaagatgattcctagatttagcacaatggagagattccatgccatctttactatgtggatggtggtatcagggaagagggctcacaagacacatttgtcccccgggcccaccacat

SEQ ID NO: 525000 - DNA, 120 bp, Artificial Sequence
  ENSG00000165731_35 (sequence is synthesized)
catcctcacgtgttcggtactgagcagccactacccctgatgagaacagtatgaagaaagggggctgttggagtcccagaattgctgacagcagaggctttgctgctgtgaatcccacct

SEQ ID NO: 525001 - DNA, 120 bp, Artificial Sequence
  ENSG00000165731_36 (sequence is synthesized)
gccaccagcctgcagcacaccccacagccaagtagaggcgaaagcagtggctcatcctacctgttaggagcaggtagggcttgtactcactttaatttgaatcttatcaacttactcata

SEQ ID NO: 525002 - DNA, 120 bp, Artificial Sequence
  ENSG00000165731_37 (sequence is synthesized)
aagggacaggctagctagctgtgttagaagtagcaatgacaatgaccaaggactgctacacctctgattacaattctgatgtgaaaaagatggtgtttggctcttatagagcctgtgtga

SEQ ID NO: 525003 - DNA, 120 bp, Artificial Sequence
  ENSG00000165731_38 (sequence is synthesized)
aaggcccatggatcagctcttcctgtgtttgtaatttaatgctgctacaagatgtttctgtttcttagattctgaccatgactcataagcttcttgtcattcttcattgcttgtttgtgg

SEQ ID NO: 525004 - DNA, 120 bp, Artificial Sequence
  ENSG00000165731_39 (sequence is synthesized)
tcacagatgcacaacactcctccagtcttgtgggggcagcttttgggaagtctcagcagctcttctggctgtgttgtcagcactgtaacttcgcagaaaagagtcggattaccaaaacac

SEQ ID NO: 525005 - DNA, 120 bp, Artificial Sequence
  ENSG00000165731_40 (sequence is synthesized)
tgcctgctcttcagacttaaagcactgataggacttaaaatagtctcattcaaatactgtattttatataggcatttcacaaaaacagcaaaattgtggcattttgtgaggccaaggctt

SEQ ID NO: 525006 - DNA, 120 bp, Artificial Sequence
  ENSG00000165731_41 (sequence is synthesized)
ggatgcgtgtgtaatagagccttgtggtgtgtgcgcacacacccagagggagagtttgaaaaatgcttattggacacgtaacctggctctaatttgggctgtttttcagatacactgtga

SEQ ID NO: 525007 - DNA, 120 bp, Artificial Sequence
  ENSG00000165731_42 (sequence is synthesized)
taagttcttttacaaatatctatagacatggtaaacttttggttttcagatatgcttaatgatagtcttactaaatgcagaaataagaataaactttctcaaattattaaaaatgcctac

SEQ ID NO: 525008 - DNA, 120 bp, Artificial Sequence
  ENSG00000165731_43 (sequence is synthesized)
acagtaagtgtgaattgctgcaacaggtttgttctcaggagggtaagaactccaggtctaaacagctgacccagtgatggggaatttatccttgaccaatttatccttgaccaataacct

SEQ ID NO: 525009 - DNA, 120 bp, Artificial Sequence
  ENSG00000165731_44 (sequence is synthesized)
aattgtctattcctgagttataaaagtccccatccttattagctctactggaattttcatacacgtaaatgcagaagttactaagtattaagtattactgagtattaagtagtaatctgt

SEQ ID NO: 525010 - DNA, 120 bp, Artificial Sequence
  ENSG00000165731_45 (sequence is synthesized)
cagttattaaaatttgtaaaatctatttatgaaaggtcattaaaccagatcatgttcctttttttgtaatcaaggtgactaagaaaatcagttgtgtaaataaaatcatgtatcataaaa

SEQ ID NO: 525011 - DNA, 120 bp, Artificial Sequence
  ENSG00000165731_46 (sequence is synthesized)
ctctgtgatgctttttaaaaatgtttctggtctgaacaaaaccaaagtctgctctgaacctttttatttgtaaatgtctgactttgcatccagtttacatttaggcattattgcaactat

SEQ ID NO: 525012 - DNA, 120 bp, Artificial Sequence
  ENSG00000165731_47 (sequence is synthesized)
gtttttctaaaaggatgtgaaaataagtgtaattaccacattgcccagcaacttaggatggtagaggaaaaaacagatcagggcggaactctcaggggagaccaagaacaggttgaataa

SEQ ID NO: 525013 - DNA, 120 bp, Artificial Sequence
  ENSG00000165731_48 (sequence is synthesized)
ggcgcttctggggtgggaatcaagtcatagtacttctactttaactaagtggataaatatacaaatctggggaggtattcagttgagaaaggagccaccagcaccactcagcctgcactg

SEQ ID NO: 525014 - DNA, 120 bp, Artificial Sequence
  ENSG00000165731_49 (sequence is synthesized)
ggagcacagccaggttcccccagacccctcctgggcaggcaggtgcctctcagaggccacccggcactggcgagcagccactggccaagcctcagccccagtcccagccacatgtcctcc

SEQ ID NO: 525015 - DNA, 120 bp, Artificial Sequence
  ENSG00000165731_50 (sequence is synthesized)
atcaggggtagcgaggttgcaggagctggctggccctgggaggacgcacccccactgctgttttcacatcctttcccttacccaccttcaggacggttgtcacttatgaagtcagtgcta

SEQ ID NO: 525016 - DNA, 120 bp, Artificial Sequence
  ENSG00000165731_51 (sequence is synthesized)
aagctggagcagttgctttttgaaagaacatggtctgtggtgctgtggtcttacaatggacagtaaatatggttcttgccaaaactccttcttttgtctttgattaaatactagaaattt

SEQ ID NO: 525017 - DNA, 120 bp, Artificial Sequence
  ENSG00000165731_52 (sequence is synthesized)
ttcaccttcatgccatcagttcattcaatattccagaagtacctcttgcatgcctgccaggggccaggtactgttctaggagctaaggatataacaatgaacacaacgggttggaatctt

SEQ ID NO: 525018 - DNA, 120 bp, Artificial Sequence
  ENSG00000165731_53 (sequence is synthesized)
ccgatttgcccagatcgggaaagtctgtgtggaaaactgcctggcagatctcacaggggatgcagtatctggccgagatgaagctcgttcatcgggacttggcagccagaaacatcctgg

SEQ ID NO: 525019 - DNA, 120 bp, Artificial Sequence
  ENSG00000165731_54 (sequence is synthesized)
acagtcatcgctgcaaactgcaaactcgtaagcacagtcatcgctgcaaactgcaaactcgtgctccgagcgctgccctcccctgtggagcggaggaggggaggcctggggccgcggcgg

SEQ ID NO: 525020 - DNA, 120 bp, Artificial Sequence
  ENSG00000165731_55 (sequence is synthesized)
tgtgcgccccgctctgaccgcagagcccccttcccgaggaaagcggctggcccggtcccggctggtgatcacgcggggcccctgtctgcttggtgcgcaggtgagggtctgcccttccgc

SEQ ID NO: 525021 - DNA, 120 bp, Artificial Sequence
  ENSG00000165732_0 (sequence is synthesized)
ctcttcctctccacgcggttgagaagaccggtcggcctgggcaacctgcgctgaagatgccgggaaaactccgtagtgacgctggtttggaatcagacaccgcaatgaaaaaaggggaga

SEQ ID NO: 525022 - DNA, 120 bp, Artificial Sequence
  ENSG00000165732_1 (sequence is synthesized)
cactgcgaaagcaaaccgaggagaaagagaaaaaagagaagccaaaatctgataagactgaagagatagcagaagaggaagaaactgttttccccaaagctaaacaagttaaaaagaaag

SEQ ID NO: 525023 - DNA, 120 bp, Artificial Sequence
  ENSG00000165732_2 (sequence is synthesized)
cagagccttctgaagttgacatgaattctcctaaatccaaaaaggcaaaaaagaaagaggagccatctcaaaatgacatttctcctaaaaccaaaagtttgagaaagaaaaaggagccca

SEQ ID NO: 525024 - DNA, 120 bp, Artificial Sequence
  ENSG00000165732_3 (sequence is synthesized)
ttgaaaagaaagtggtttcttctaaaaccaaaaaagtgacaaaaaatgaggagccttctgaggaagaaatagatgctcctaagcccaagaagatgaagaaagaaaaggaaatgaatggag

SEQ ID NO: 525025 - DNA, 120 bp, Artificial Sequence
  ENSG00000165732_4 (sequence is synthesized)
aaactagagagaaaagccccaaactgaagaatggatttcctcatcctgaaccggactgtaaccccagtgaagctgccagtgaagaaagtaacagtgagatagagcaggaaatacctgtgg

SEQ ID NO: 525026 - DNA, 120 bp, Artificial Sequence
  ENSG00000165732_5 (sequence is synthesized)
aacaaaaagaaggcgctttctctaattttcccatatctgaagaaactattaaacttctcaaaggccgaggagtgaccttcctatttcctatacaagcaaagacattccatcatgtttaca

SEQ ID NO: 525027 - DNA, 120 bp, Artificial Sequence
  ENSG00000165732_6 (sequence is synthesized)
gcgggaaggacttaattgcacaggcacggacaggaactgggaagacattctcctttgccatccctttgattgagaaacttcatggggaactgcaagacaggaagagaggccgtgcccctc

SEQ ID NO: 525028 - DNA, 120 bp, Artificial Sequence
  ENSG00000165732_7 (sequence is synthesized)
aggtactggttcttgcacctacaagagagttggcaaatcaagtaagcaaagacttcagtgacatcacaaaaaagctgtcagtggcttgtttttatggtggaactccctatggaggtcaat

SEQ ID NO: 525029 - DNA, 120 bp, Artificial Sequence
  ENSG00000165732_8 (sequence is synthesized)
ttgaacgcatgaggaatgggattgatatcctggttggaacaccaggtcgtatcaaagaccacatacagaatggcaaactagatctcaccaaacttaagcatgttgtcctggatgaagtgg

SEQ ID NO: 525030 - DNA, 120 bp, Artificial Sequence
  ENSG00000165732_9 (sequence is synthesized)
accagatgttggatatgggatttgctgatcaagtggaagagattttaagtgtggcatacaagaaagattctgaagacaatccccaaacattgcttttttctgcaacttgccctcattggg

SEQ ID NO: 525031 - DNA, 120 bp, Artificial Sequence
  ENSG00000165732_10 (sequence is synthesized)
tatttaatgttgccaagaaatacatgaaatctacatatgaacaggtggacctgattggtaaaaagactcagaaaacggcaataactgtggagcatctggctattaagtgccactggactc

SEQ ID NO: 525032 - DNA, 120 bp, Artificial Sequence
  ENSG00000165732_11 (sequence is synthesized)
agagggcagcagttattggggatgtcatccgagtatatagtggtcatcaaggacgcactatcatcttttgtgaaaccaagaaagaagcccaggagctgtcccagaattcagctataaagc

SEQ ID NO: 525033 - DNA, 120 bp, Artificial Sequence
  ENSG00000165732_12 (sequence is synthesized)
aggatgctcagtccttgcatggagacattccacagaagcaaagggaaatcaccctgaaaggttttagaaatggtagttttggagttttggtggcaaccaatgttgctgcacgtgggttag

SEQ ID NO: 525034 - DNA, 120 bp, Artificial Sequence
  ENSG00000165732_13 (sequence is synthesized)
acatccctgaggttgatttggttatacaaagctctccaccaaaggatgtagagtcctacattcatcgatccgggcggacaggcagagctggaaggacgggggtgtgcatctgcttttatc

SEQ ID NO: 525035 - DNA, 120 bp, Artificial Sequence
  ENSG00000165732_14 (sequence is synthesized)
agcacaaggaagaatatcagttagtacaagtggagcaaaaagcgggaattaagttcaaacgaataggtgttccttctgcaacagaaataataaaagcttccagcaaagatgccatcaggc

SEQ ID NO: 525036 - DNA, 120 bp, Artificial Sequence
  ENSG00000165732_15 (sequence is synthesized)
ttttggattccgtgcctcccactgccattagtcacttcaaacaatcagctgagaagctgatagaggagaagggagctgtggaagctctggcagcagcactggcccatatttcaggtgcca
